United States Patent Application Publication US 2021/0199660 A1 - sequence listing, part 25

SEQ ID NO: 349549 - DNA, 120 bp, Artificial Sequence
  ENSG00000138777_7 (sequence is synthesized)
gaatcggtatcatcttcaccaaataaagaaagtaatgaagaagagcaagtgtggcacttccttggcaagtgattgaaacatctgaaattctgctgtcaagattcccatctctaaggactc

SEQ ID NO: 349550 - DNA, 120 bp, Artificial Sequence
  ENSG00000138777_8 (sequence is synthesized)
caagtgctagagacaagggggtctatgagcatttactgacttcctgttaaaacttcattttttcaaactttttgagctatgcaatatataaataaacagtaagaattttaaattactctc

SEQ ID NO: 349551 - DNA, 72 bp, Artificial Sequence
  ENSG00000138777_9 (sequence is synthesized)
gattttgtttcatttcatagcacaaatttagaggcattgagttgaccatttctagtttctatacctgaagga

SEQ ID NO: 349552 - DNA, 120 bp, Artificial Sequence
  ENSG00000138777_10 (sequence is synthesized)
ggcattgagttgaccatttctagtttctatacctgaaggaacccattgattttaccagtttttatttctgtagattggatgtaaaaatcacagattcaataaattaataaactttgtgta

SEQ ID NO: 349553 - DNA, 120 bp, Artificial Sequence
  ENSG00000138777_11 (sequence is synthesized)
ttttaaagatagcaatgtgaatatacatgatagaaaactaactttgaggccgagtgcagtggctaacacctgtaatcccagcccattgagaaaccaagattgccaccaaggagccaatga

SEQ ID NO: 349554 - DNA, 120 bp, Artificial Sequence
  ENSG00000138777_12 (sequence is synthesized)
ttactttataaaaactgggaaaatatacgtgaaagaggtttggcttttctgatcatttattttatgaaacactttgatgctctattctggggatacaaatgctcaggggagaacgaagtg

SEQ ID NO: 349555 - DNA, 120 bp, Artificial Sequence
  ENSG00000138777_13 (sequence is synthesized)
gactgaacctcattaacaatgtattaatcttagtttatgtacctttttttgcacttgaaacaggaagagatttcttttttgtcattcttgtatataactgagaaagggagaggtctgata

SEQ ID NO: 349556 - DNA, 120 bp, Artificial Sequence
  ENSG00000138777_14 (sequence is synthesized)
actgccagtatcaccattagatgctttttggaagcaccttgaaaggaaaaagtgttgttggaagtcaggaggacaaacaggagttactataacagggtcataagcctcctatatgaatta

SEQ ID NO: 349557 - DNA, 120 bp, Artificial Sequence
  ENSG00000138777_15 (sequence is synthesized)
aataaagatttaagggtagtaatttaggaaattaccaagaggtttatttacaataatcagctaacgtttgtggattattttttatttgctagccactatgtgaacatgatgttatttaat

SEQ ID NO: 349558 - DNA, 120 bp, Artificial Sequence
  ENSG00000138777_16 (sequence is synthesized)
tgttatgagttgctatttttctttccaaggacactgaggctcaaggcatttttatagacttgtctaagatctggtaagtgccagagctagttttggaattagcttctgaccacaaagctt

SEQ ID NO: 349559 - DNA, 120 bp, Artificial Sequence
  ENSG00000138777_17 (sequence is synthesized)
atgctctttaaccactctatgaaacaggtgttagagaaataaagcaggggtaaaaatggtggtgtttgaatagctgttctcttagaactgaaaatcacttgacagttgtcagggtgtgaa

SEQ ID NO: 349560 - DNA, 120 bp, Artificial Sequence
  ENSG00000138777_18 (sequence is synthesized)
gaggagcgcggccagccctgctcgcagaattaccgcctcttctttacggtagccgcgcggtccaggccaccttacttcccgcgggagcgcgcaccgagtcacgagaactgccagcgagga

SEQ ID NO: 349561 - DNA, 120 bp, Artificial Sequence
  ENSG00000138777_19 (sequence is synthesized)
cagagtgcaagcggccaccccgcggcggcctgcagccattagccggcccggccgccgttcccggttcacacaactcagtgaggaagggaaggcagagcccgcccacacgccggccttcct

SEQ ID NO: 349562 - DNA, 120 bp, Artificial Sequence
  ENSG00000138777_20 (sequence is synthesized)
agaggcgtaagaaacctcctactgcgggagctccctgacgtcggagaggcaggcggaactttgcggatgcctaatccagcgcgtcttctttttttggagggactctgatgaaggttcttt

SEQ ID NO: 349563 - DNA, 120 bp, Artificial Sequence
  ENSG00000138777_21 (sequence is synthesized)
agtttcatggtctcagaaatattccagtatatacaataaatcgcatagtcatcctgccttcacttgacaggagccaaacttccagcctgtcctacctgcctgcacatcaggattcctgtg

SEQ ID NO: 349564 - DNA, 120 bp, Artificial Sequence
  ENSG00000138777_22 (sequence is synthesized)
tccttctaccttttcccctcttgtccagttagtgatgtacttctcacttttataatgctttcttttactccctcttctatgacattaccattgcttctgtttatctctgttaaaacctca

SEQ ID NO: 349565 - DNA, 120 bp, Artificial Sequence
  ENSG00000138777_23 (sequence is synthesized)
ttgcattttaattgcagtttatctatttgtctctttccctgagttaaaaactgagtatcttgatgaaaagaactttgttgtatccatccatttattccccatacatagcacattgtctga

SEQ ID NO: 349566 - DNA, 120 bp, Artificial Sequence
  ENSG00000138777_24 (sequence is synthesized)
agatgctttgtaaatgtttgtagagtgcaggaatagtattatacatatgaaaacacaaaagtctgaaggtgatatacatatcaatgatgatgctgctctaggtatcacaatcaattgtgc

SEQ ID NO: 349567 - DNA, 120 bp, Artificial Sequence
  ENSG00000138777_25 (sequence is synthesized)
ttctggttagactgggccccatgtttcctggctccctcagtccaatgctctgccactaaagggaattaattttggttcttaacaaaacatctttttgtttttttctttacagatattgat

SEQ ID NO: 349568 - DNA, 120 bp, Artificial Sequence
  ENSG00000138777_26 (sequence is synthesized)
ctgtgaactactgaatttaaattggttctgaggacatgtcatttggagaggtttgtaaatttggaatttattaacgtggatggagttttagtatatcaataaattttgttttaaaccata

SEQ ID NO: 349569 - DNA, 120 bp, Artificial Sequence
  ENSG00000138777_27 (sequence is synthesized)
tctttttgatgttaatctgtttataaggtatctattttaggtaggttagcctgagggagtacattgaaacacgaatttagtgcccctcctgtcaaaaggtctctgttttttccgaagcag

SEQ ID NO: 349570 - DNA, 120 bp, Artificial Sequence
  ENSG00000138777_28 (sequence is synthesized)
aaccagtttgcttttaatggagaattcaaaaacaagaagatctaagtgaatcaacaaggctgaaaaatatatatttccatctatgtgtctatagctcctacgtcttggaaaatgaaggaa

SEQ ID NO: 349571 - DNA, 120 bp, Artificial Sequence
  ENSG00000138777_29 (sequence is synthesized)
tttcatgatcagactaattttgcaaattgtgtacatagaaaaactttctatttactgttttgtggaggagaaagttactcacccttaatgtaaatccataggggactccctcctaagtgt

SEQ ID NO: 349572 - DNA, 120 bp, Artificial Sequence
  ENSG00000138777_30 (sequence is synthesized)
tcattctaccacgacggaactaagctgcttaacaattgaaaggacacctgaattatcttactgtcataggatttttctattagaataccactgagttaccacaaagtatctctaatatga

SEQ ID NO: 349573 - DNA, 120 bp, Artificial Sequence
  ENSG00000138777_31 (sequence is synthesized)
cacagatggagagaatagaccaaagagttaaagtctaaagcatggaattttttttaaagttattaccactaggtaaattgaatatttgaaaccaacttttaagtggataccagtaagtat

SEQ ID NO: 349574 - DNA, 120 bp, Artificial Sequence
  ENSG00000138777_32 (sequence is synthesized)
gttttataagtgaaataaggcatgttaatgaaaacttaaaatttataatgggtattttgctgtaaaagaattgattgctggactcagtgtttttttgaaagcacattaaaagaatccttc

SEQ ID NO: 349575 - DNA, 120 bp, Artificial Sequence
  ENSG00000138778_0 (sequence is synthesized)
aaatttaaaggcggggcggcctgtgagccctgaagtgccggccgcggagggtcctggccattttcctgggaccagttcagcctgataggatggcggaggaaggagccgtggccgtctgcg

SEQ ID NO: 349576 - DNA, 120 bp, Artificial Sequence
  ENSG00000138778_1 (sequence is synthesized)
tgcgagtgcggccgctgaacagcagagaagaatcacttggagaaactgcccaagtttactggaaaactgacaataatgtcatttatcaagttgatggaagtaaatccttcaattttgatc

SEQ ID NO: 349577 - DNA, 120 bp, Artificial Sequence
  ENSG00000138778_2 (sequence is synthesized)
gtgtctttcatggtaatgaaactaccaaaaatgtgtatgaagaaatagcagcaccaatcatcgattctgccatacaaggctacaatggtactatatttgcctatggacagactgcttcag

SEQ ID NO: 349578 - DNA, 120 bp, Artificial Sequence
  ENSG00000138778_3 (sequence is synthesized)
gaaaaacatataccatgatgggttcagaagatcatttgggagttatacccagggcaattcatgacattttccaaaaaattaagaagtttcctgatagggaatttctcttacgtgtatctt

SEQ ID NO: 349579 - DNA, 120 bp, Artificial Sequence
  ENSG00000138778_4 (sequence is synthesized)
acatggaaatatacaatgaaaccattacagatttactctgtggcactcaaaaaatgaaacctttaattattcgagaagatgtcaataggaatgtgtatgttgctgatctcacagaagaag

SEQ ID NO: 349580 - DNA, 120 bp, Artificial Sequence
  ENSG00000138778_5 (sequence is synthesized)
ttgtatatacatcagaaatggctttgaaatggattacaaagggagaaaagagcaggcattatggagaaacaaaaatgaatcaaagaagcagtcgttctcataccatctttaggatgattt

SEQ ID NO: 349581 - DNA, 120 bp, Artificial Sequence
  ENSG00000138778_6 (sequence is synthesized)
tggaaagcagagagaagggtgaaccttctaattgtgaaggatctgttaaggtatcccatttgaatttggttgatcttgcaggcagtgaaagagctgctcaaacaggcgctgcaggtgtgc

SEQ ID NO: 349582 - DNA, 120 bp, Artificial Sequence
  ENSG00000138778_7 (sequence is synthesized)
ggctcaaggaaggctgtaatataaatcgaagcttatttattttgggacaagtgatcaagaaacttagtgatggacaagttggtggtttcataaattatcgagatagcaagttaacacgaa

SEQ ID NO: 349583 - DNA, 120 bp, Artificial Sequence
  ENSG00000138778_8 (sequence is synthesized)
ttctccagaattccttgggaggaaatgcaaagacacgtattatctgcacaattactccagtatcttttgatgaaacacttactgctctccagtttgccagtactgctaaatatatgaaga

SEQ ID NO: 349584 - DNA, 120 bp, Artificial Sequence
  ENSG00000138778_9 (sequence is synthesized)
atactccttatgttaatgaggtatcaactgatgaagctctcctgaaaaggtatagaaaagaaataatggatcttaaaaaacaattagaggaggtttctttagagacgcgggctcaggcaa

SEQ ID NO: 349585 - DNA, 120 bp, Artificial Sequence
  ENSG00000138778_10 (sequence is synthesized)
tggaaaaagaccaattggcccaacttttggaagaaaaagatttgcttcagaaagtacagaatgagaaaattgaaaacttaacacggatgctggtgacctcttcttccctcacgttgcaac

SEQ ID NO: 349586 - DNA, 120 bp, Artificial Sequence
  ENSG00000138778_11 (sequence is synthesized)
aggaattaaaggctaaaagaaaacgaagagttacttggtgccttggcaaaattaacaaaatgaagaactcaaactatgcagatcaatttaatataccaacaaatataacaacaaaaacac

SEQ ID NO: 349587 - DNA, 120 bp, Artificial Sequence
  ENSG00000138778_12 (sequence is synthesized)
ataagctttctataaatttattacgagaaattgatgaatctgtctgttcagagtctgatgttttcagtaacactcttgatacattaagtgagatagaatggaatccagcaacaaagctac

SEQ ID NO: 349588 - DNA, 120 bp, Artificial Sequence
  ENSG00000138778_13 (sequence is synthesized)
taaatcaggagaatatagaaagtgagttgaactcacttcgtgctgactatgataatctggtattagactatgaacaactacgaacagaaaaagaagaaatggaattgaaattaaaagaaa

SEQ ID NO: 349589 - DNA, 120 bp, Artificial Sequence
  ENSG00000138778_14 (sequence is synthesized)
agaatgatttggatgaatttgaggctctagaaagaaaaactaaaaaagatcaagagatgcaactaattcatgaaatttcgaacttaaagaatttagttaagcatgcagaagtatataatc

SEQ ID NO: 349590 - DNA, 120 bp, Artificial Sequence
  ENSG00000138778_15 (sequence is synthesized)
aagatcttgagaatgaactcagttcaaaagtagagctgcttagagaaaaggaagaccagattaagaagctacaggaatacatagactctcaaaagctagaaaatataaaaatggacttgt

SEQ ID NO: 349591 - DNA, 120 bp, Artificial Sequence
  ENSG00000138778_16 (sequence is synthesized)
catactcattggaaagcattgaagacccaaaacaaatgaagcagactctgtttgatgctgaaactgtagcccttgatgccaagagagaatcagcctttcttagaagtgaaaatctggagc

SEQ ID NO: 349592 - DNA, 120 bp, Artificial Sequence
  ENSG00000138778_17 (sequence is synthesized)
tgaaggagaaaatgaaagaacttgcaactacatacaagcaaatggaaaatgatattcagttatatcaaagccagttggaggcaaaaaagaaaatgcaagttgatctggagaaagaattac

SEQ ID NO: 349593 - DNA, 120 bp, Artificial Sequence
  ENSG00000138778_18 (sequence is synthesized)
aatctgcttttaatgagataacaaaactcacctcccttatagatggcaaagttccaaaagatttgctctgtaatttggaattggaaggaaagattactgatcttcagaaagaactaaata

SEQ ID NO: 349594 - DNA, 120 bp, Artificial Sequence
  ENSG00000138778_19 (sequence is synthesized)
aagaagttgaagaaaatgaagctttgcgggaagaagtcattttgctttcagaattgaaatctttaccttctgaagtagaaaggctgaggaaagagatacaagacaaatctgaagagctcc

SEQ ID NO: 349595 - DNA, 120 bp, Artificial Sequence
  ENSG00000138778_20 (sequence is synthesized)
atataataacatcagaaaaagataaattgttttctgaagtagttcataaggagagtagagttcaaggtttacttgaagaaattgggaaaacaaaagatgacctagcaactacacagtcga

SEQ ID NO: 349596 - DNA, 120 bp, Artificial Sequence
  ENSG00000138778_21 (sequence is synthesized)
attataaaagcactgatcaagaattccaaaatttcaaaacccttcatatggactttgagcaaaagtataagatggtccttgaggagaatgagagaatgaatcaggaaatagttaatctct

SEQ ID NO: 349597 - DNA, 120 bp, Artificial Sequence
  ENSG00000138778_22 (sequence is synthesized)
ctaaagaagcccaaaaatttgattcgagtttgggtgctttgaagaccgagctttcttacaagacccaagaacttcaggagaaaacacgtgaggttcaagaaagactaaatgagatggaac

SEQ ID NO: 349598 - DNA, 120 bp, Artificial Sequence
  ENSG00000138778_23 (sequence is synthesized)
agctgaaggaacaattagaaaatagagattctacgctgcaaactgtagaaagggagaaaacactgattactgagaaactgcagcaaactttagaagaagtaaaaactttaactcaagaaa

SEQ ID NO: 349599 - DNA, 120 bp, Artificial Sequence
  ENSG00000138778_24 (sequence is synthesized)
aagatgatctaaaacaactccaagaaagcttgcaaattgagagggaccaactcaaaagtgatattcacgatactgttaacatgaatatagatactcaagaacaattacgaaatgctcttg

SEQ ID NO: 349600 - DNA, 120 bp, Artificial Sequence
  ENSG00000138778_25 (sequence is synthesized)
agtctctgaaacaacatcaagaaacaattaatacactaaaatcgaaaatttctgaggaagtttccaggaatttgcatatggaggaaaatacaggagaaactaaagatgaatttcagcaaa

SEQ ID NO: 349601 - DNA, 120 bp, Artificial Sequence
  ENSG00000138778_26 (sequence is synthesized)
agatggttggcatagataaaaaacaggatttggaagctaaaaatacccaaacactaactgcagatgttaaggataatgagataattgagcaacaaaggaagatattttctttaatacagg

SEQ ID NO: 349602 - DNA, 120 bp, Artificial Sequence
  ENSG00000138778_27 (sequence is synthesized)
agaaaaatgaactccaacaaatgttagagagtgttatagcagaaaaggaacaattgaagactgacctaaaggaaaatattgaaatgaccattgaaaaccaggaagaattaagacttcttg

SEQ ID NO: 349603 - DNA, 120 bp, Artificial Sequence
  ENSG00000138778_28 (sequence is synthesized)
gggatgaacttaaaaagcaacaagagatagttgcacaagaaaagaaccatgccataaagaaagaaggagagctttctaggacctgtgacagactggcagaagttgaagaaaaactaaagg

SEQ ID NO: 349604 - DNA, 120 bp, Artificial Sequence
  ENSG00000138778_29 (sequence is synthesized)
aaaagagccagcaactccaagaaaaacagcaacaacttcttaatgtacaagaagagatgagtgagatgcagaaaaagattaatgaaatagagaatttaaagaatgaattaaagaacaaag

SEQ ID NO: 349605 - DNA, 120 bp, Artificial Sequence
  ENSG00000138778_30 (sequence is synthesized)
aattgacattggaacatatggaaacagagaggcttgagttggctcagaaacttaatgaaaattatgaggaagtgaaatctataaccaaagaaagaaaagttctaaaggaattacagaagt

SEQ ID NO: 349606 - DNA, 120 bp, Artificial Sequence
  ENSG00000138778_31 (sequence is synthesized)
catttgaaacagagagagaccaccttagaggatatataagagaaattgaagctacaggcctacaaaccaaagaagaactaaaaattgctcatattcacctaaaagaacaccaagaaacta

SEQ ID NO: 349607 - DNA, 120 bp, Artificial Sequence
  ENSG00000138778_32 (sequence is synthesized)
ttgatgaactaagaagaagcgtatctgagaagacagctcaaataataaatactcaggacttagaaaaatcccataccaaattacaagaagagatcccagtgcttcatgaggaacaagagt

SEQ ID NO: 349608 - DNA, 120 bp, Artificial Sequence
  ENSG00000138778_33 (sequence is synthesized)
tactgcctaatgtgaaagaagtcagtgagactcaggaaacaatgaatgaactggagttattaacagaacagtccacaaccaaggactcaacaacactggcaagaatagaaatggaaaggc

SEQ ID NO: 349609 - DNA, 120 bp, Artificial Sequence
  ENSG00000138778_34 (sequence is synthesized)
tcaggttgaatgaaaaatttcaagaaagtcaggaagagataaaatctctaaccaaggaaagagacaaccttaaaacgataaaagaagcccttgaagttaaacatgaccagctgaaagaac

SEQ ID NO: 349610 - DNA, 120 bp, Artificial Sequence
  ENSG00000138778_35 (sequence is synthesized)
atggagcaattcaaacccaaagattcagcactactaaggatagaaatagaaatgctcggattgtccaaaagacttcaagaaagtcatgatgaaatgaaatctgtagctaaggagaaagat

SEQ ID NO: 349611 - DNA, 120 bp, Artificial Sequence
  ENSG00000138778_36 (sequence is synthesized)
gacctacagaggctgcaagaagttcttcaatctgaaagtgaccagctcaaagaaaacataaaagaaattgtagctaaacacctggaaactgaagaggaacttaaagttgctcattgttgc

SEQ ID NO: 349612 - DNA, 120 bp, Artificial Sequence
  ENSG00000138778_37 (sequence is synthesized)
ctgaaagaacaagaggaaactattaatgagttaagagtgaatctttcagagaaggaaactgaaatatcaaccattcaaaagcagttagaagcaatcaatgataaattacagaacaagatc

SEQ ID NO: 349613 - DNA, 120 bp, Artificial Sequence
  ENSG00000138778_38 (sequence is synthesized)
caagagatttatgagaaagaggaacaatttaatataaaacaaattagtgaggttcaggaaaaagtgaatgaactgaaacaattcaaggagcatcgcaaagccaaggattcagcactacaa

SEQ ID NO: 349614 - DNA, 120 bp, Artificial Sequence
  ENSG00000138778_39 (sequence is synthesized)
agtatagaaagtaagatgctcgagttgaccaacagacttcaagaaagtcaagaagaaatacaaattatgattaaggaaaaagaggaaatgaaaagagtacaggaggcccttcagatagag

SEQ ID NO: 349615 - DNA, 120 bp, Artificial Sequence
  ENSG00000138778_40 (sequence is synthesized)
agagaccaactgaaagaaaacactaaagaaattgtagctaaaatgaaagaatctcaagaaaaagaatatcagtttcttaagatgacagctgtcaatgagactcaggagaaaatgtgtgaa

SEQ ID NO: 349616 - DNA, 120 bp, Artificial Sequence
  ENSG00000138778_41 (sequence is synthesized)
atagaacacttgaaggagcaatttgagacccagaagttaaacctggaaaacatagaaacggagaatataaggttgactcagatactacatgaaaaccttgaagaaatgagatctgtaaca

SEQ ID NO: 349617 - DNA, 120 bp, Artificial Sequence
  ENSG00000138778_42 (sequence is synthesized)
aaagaaagagatgaccttaggagtgtggaggagactctcaaagtagagagagaccagctcaaggaaaaccttagagaaactataactagagacctagaaaaacaagaggagctaaaaatt

SEQ ID NO: 349618 - DNA, 120 bp, Artificial Sequence
  ENSG00000138778_43 (sequence is synthesized)
gttcacatgcatctgaaggagcaccaagaaactattgataaactaagagggattgtttcagagaaaacaaatgaaatatcaaatatgcaaaaggacttagaacactcaaatgatgcctta

SEQ ID NO: 349619 - DNA, 120 bp, Artificial Sequence
  ENSG00000138778_44 (sequence is synthesized)
aaagcacaggatctgaaaatacaagaggaactaagaattgctcacatgcatctgaaagagcagcaggaaactattgacaaactcagaggaattgtttctgagaagacagataaactatca

SEQ ID NO: 349620 - DNA, 120 bp, Artificial Sequence
  ENSG00000138778_45 (sequence is synthesized)
aatatgcaaaaagatttagaaaattcaaatgctaaattacaagaaaagattcaagaacttaaggcaaatgaacatcaacttattacgttaaaaaaagatgtcaatgagacacagaaaaaa

SEQ ID NO: 349621 - DNA, 120 bp, Artificial Sequence
  ENSG00000138778_46 (sequence is synthesized)
gtgtctgaaatggagcaactaaagaaacaaataaaagaccaaagcttaactctgagtaaattagaaatagagaatttaaatttggctcagaaacttcatgaaaaccttgaagaaatgaaa

SEQ ID NO: 349622 - DNA, 120 bp, Artificial Sequence
  ENSG00000138778_47 (sequence is synthesized)
tctgtaatgaaagaaagagataatctaagaagagtagaggagacactcaaactggagagagaccaactcaaggaaagcctgcaagaaaccaaagctagagatctggaaatacaacaggaa

SEQ ID NO: 349623 - DNA, 120 bp, Artificial Sequence
  ENSG00000138778_48 (sequence is synthesized)
ctaaaaactgctcgtatgctatcaaaagaacacaaagaaactgttgataaacttagagaaaaaatttcagaaaagacaattcaaatttcagacattcaaaaggatttagataaatcaaaa

SEQ ID NO: 349624 - DNA, 120 bp, Artificial Sequence
  ENSG00000138778_49 (sequence is synthesized)
gatgaattacagaaaaagatccaagaacttcagaaaaaagaacttcaactgcttagagtgaaagaagatgtcaatatgagtcataaaaaaattaatgaaatggaacagttgaagaagcaa

SEQ ID NO: 349625 - DNA, 120 bp, Artificial Sequence
  ENSG00000138778_50 (sequence is synthesized)
tttgaggcccaaaacttatctatgcaaagtgtgagaatggataacttccagttgactaagaaacttcatgaaagccttgaagaaataagaattgtagctaaagaaagagatgagctaagg

SEQ ID NO: 349626 - DNA, 120 bp, Artificial Sequence
  ENSG00000138778_51 (sequence is synthesized)
aggataaaagaatctctcaaaatggaaagggaccaattcatagcaaccttaagggaaatgatagctagagaccgacagaaccaccaagtaaaacctgaaaaaaggttactaagtgatgga

SEQ ID NO: 349627 - DNA, 120 bp, Artificial Sequence
  ENSG00000138778_52 (sequence is synthesized)
caacagcaccttacggaaagcctgagagaaaagtgctctagaataaaagagcttttgaagagatactcagagatggatgatcattatgagtgcttgaatagattgtctcttgacttggag

SEQ ID NO: 349628 - DNA, 120 bp, Artificial Sequence
  ENSG00000138778_53 (sequence is synthesized)
aaggaaattgaattccaaaaagagctttcaatgagagttaaagcaaacctctcacttccctatttacaaaccaaacacattgaaaaactttttactgcaaaccagagatgctccatggaa

SEQ ID NO: 349629 - DNA, 120 bp, Artificial Sequence
  ENSG00000138778_54 (sequence is synthesized)
ttccacagaatcatgaagaaactgaagtatgtgttaagctatgttacaaaaataaaagaagaacaacatgaatccatcaataaatttgaaatggattttattgatgaagtggaaaagcaa

SEQ ID NO: 349630 - DNA, 120 bp, Artificial Sequence
  ENSG00000138778_55 (sequence is synthesized)
aaggaattgctaattaaaatacagcaccttcaacaagattgtgatgtaccatccagagaattaagggatctcaaattgaaccagaatatggatctacatattgaggaaattctcaaagat

SEQ ID NO: 349631 - DNA, 120 bp, Artificial Sequence
  ENSG00000138778_56 (sequence is synthesized)
ttctcagaaagtgagttccctagcataaagactgaatttcaacaagtactaagtaataggaaagaaatgacacagtttttggaagagtggttaaatactcgttttgatatagaaaagctt

SEQ ID NO: 349632 - DNA, 120 bp, Artificial Sequence
  ENSG00000138778_57 (sequence is synthesized)
aaaaatggcatccagaaagaaaatgataggatttgtcaagtgaataacttctttaataacagaataattgccataatgaatgaatcaacagagtttgaggaaagaagtgctaccatatcc

SEQ ID NO: 349633 - DNA, 120 bp, Artificial Sequence
  ENSG00000138778_58 (sequence is synthesized)
aaagagtgggaacaggacctgaaatcactgaaagagaaaaatgaaaaactatttaaaaactaccaaacattgaagacttccttggcatctggtgcccaggttaatcctaccacacaagac

SEQ ID NO: 349634 - DNA, 120 bp, Artificial Sequence
  ENSG00000138778_59 (sequence is synthesized)
aataagaatcctcatgttacatcaagagctacacagttaaccacagagaaaattcgagagctggaaaattcactgcatgaagctaaagaaagtgctatgcataaggaaagcaagattata

SEQ ID NO: 349635 - DNA, 120 bp, Artificial Sequence
  ENSG00000138778_60 (sequence is synthesized)
aagatgcagaaagaacttgaggtgactaatgacataatagcaaaacttcaagccaaagttcatgaatcaaataaatgccttgaaaaaacaaaagagacaattcaagtacttcaggacaaa

SEQ ID NO: 349636 - DNA, 120 bp, Artificial Sequence
  ENSG00000138778_61 (sequence is synthesized)
gttgctttaggagctaagccatataaagaagaaattgaagatctcaaaatgaagcttgtgaaaatagacctagagaaaatgaaaaatgccaaagaatttgaaaaggaaatcagtgctaca

SEQ ID NO: 349637 - DNA, 120 bp, Artificial Sequence
  ENSG00000138778_62 (sequence is synthesized)
aaagccactgtagaatatcaaaaggaagttataaggctattgagagaaaatctcagaagaagtcaacaggcccaagatacctcagtgatatcagaacatactgatcctcagccttcaaat

SEQ ID NO: 349638 - DNA, 120 bp, Artificial Sequence
  ENSG00000138778_63 (sequence is synthesized)
aaacccttaacttgtggaggtggcagcggcattgtacaaaacacaaaagctcttattttgaaaagtgaacatataaggctagaaaaagaaatttctaagttaaagcagcaaaatgaacag

SEQ ID NO: 349639 - DNA, 120 bp, Artificial Sequence
  ENSG00000138778_64 (sequence is synthesized)
ctaataaaacaaaagaatgaattgttaagcaataatcagcatctttccaatgaggtcaaaacttggaaggaaagaacccttaaaagagaggctcacaaacaagtaacttgtgagaattct

SEQ ID NO: 349640 - DNA, 120 bp, Artificial Sequence
  ENSG00000138778_65 (sequence is synthesized)
ccaaagtctcctaaagtgactggaacagcttctaaaaagaaacaaattacaccctctcaatgcaaggaacggaatttacaagatcctgtgccaaaggaatcaccaaaatcttgttttttt

SEQ ID NO: 349641 - DNA, 120 bp, Artificial Sequence
  ENSG00000138778_66 (sequence is synthesized)
gatagccgatcaaagtctttaccatcacctcatccagttcgctattttgataactcaagtttaggcctttgtccagaggtgcaaaatgcaggagcagagagtgtggattctcagccaggt

SEQ ID NO: 349642 - DNA, 120 bp, Artificial Sequence
  ENSG00000138778_67 (sequence is synthesized)
ccttggcacgcctcctcaggcaaggatgtgcctgagtgcaaaactcagtagactcctctttgtcacttctctggagatccagcattccttatttggaaatgactttgtttatgtgtctat

SEQ ID NO: 349643 - DNA, 120 bp, Artificial Sequence
  ENSG00000138778_68 (sequence is synthesized)
ccctggtaatgatgttgtagtgcagcttaatttcaattcagtctttactttgccactagagttgaaagataagggaacaggaaatgaatgcattgtggtaatttagaatggtgatagcaa

SEQ ID NO: 349644 - DNA, 120 bp, Artificial Sequence
  ENSG00000138778_69 (sequence is synthesized)
taccttcttcttgcatatggtaatacttttaaaagttgaattgttttatttatttgtatattttgtaaagaataaagttattgaaagaaatgtaaagttatctacatgacttagcatatt

SEQ ID NO: 349645 - DNA, 120 bp, Artificial Sequence
  ENSG00000138778_70 (sequence is synthesized)
ccaaagcataatacatacattaatataaaacatcattttattaacaaaattgtaaatgtttttaataccttacacattcaataaatgtttagtagttctgaatcaccgctcttctatata

SEQ ID NO: 349646 - DNA, 120 bp, Artificial Sequence
  ENSG00000138778_71 (sequence is synthesized)
atttaaattcttaaaggatagcagaggctatgtcctcttaactttccagttctaatattccttttactgtaataaccacagaagttctttctcacatttctggtaacctacctatcccaa

SEQ ID NO: 349647 - DNA, 120 bp, Artificial Sequence
  ENSG00000138778_72 (sequence is synthesized)
tccctatacaaactctctaaattggttggtttattatagactttgtttttcattgcccctcactcccagcctggaggaacctatagatcatttattctacctcttcattgtagacataag

SEQ ID NO: 349648 - DNA, 120 bp, Artificial Sequence
  ENSG00000138778_73 (sequence is synthesized)
gaaacagtaccagagtttttatcaaagtaaagttttctaaacctggagtccccacagatagataaagcatatatggatggacttcttgtaatctgtaaaatttttgaaattttttatgaa

SEQ ID NO: 349649 - DNA, 120 bp, Artificial Sequence
  ENSG00000138778_74 (sequence is synthesized)
atttatgaaaatattgttacagctctttttttaaaaatgtacacatccatagattttaaatatactggtctcattacatatgcaaagtttttaaaactaaacacaattctgatcaattaa

SEQ ID NO: 349650 - DNA, 120 bp, Artificial Sequence
  ENSG00000138778_75 (sequence is synthesized)
atattattataaaccctaaatatttggaaaggggagttaattacaacaaaatagttataatgtttctataaatttattggaatttcctctaataataaagcacctggaaactgaagagga

SEQ ID NO: 349651 - DNA, 120 bp, Artificial Sequence
  ENSG00000138778_76 (sequence is synthesized)
cattgctttaaatagctgttgagcaccagatcaaggtactgtcagaggtgcaaagagaaactagagtccctggcttaacagaattaatgaattctgtgacaaggcacataacacttgtct

SEQ ID NO: 349652 - DNA, 120 bp, Artificial Sequence
  ENSG00000138778_77 (sequence is synthesized)
tgcaacataattgcctttgattagtagttaagtggttaataactagtatagagtttaaaggaaggagagatatttttggctagaagcaaaacttcagagtagaggaggcgttagcactgg

SEQ ID NO: 349653 - DNA, 120 bp, Artificial Sequence
  ENSG00000138778_78 (sequence is synthesized)
accttgaggggtaaatgagattccaataagctgatgtttttaagttctctcaatatatcttttttattctcccgaagactatcacccaggataagttacagagcattgttataaggacat

SEQ ID NO: 349654 - DNA, 120 bp, Artificial Sequence
  ENSG00000138780_0 (sequence is synthesized)
gttacttccctttttccggtccgccggattatgaatgacggccggcgcgagtattttccacataaggtggctgtcgtttttctcctggcgtctgtggaggcgagtggtctgcgggcagca

SEQ ID NO: 349655 - DNA, 120 bp, Artificial Sequence
  ENSG00000138780_1 (sequence is synthesized)
gctcccagaggcagccttggaattccagctcggactgggcgggaaggcgcaggcggcccaggtcgccgacacgctcacgcaccctccctgcctggccgcgcctctgcgaccaggtgaccc

SEQ ID NO: 349656 - DNA, 120 bp, Artificial Sequence
  ENSG00000138780_2 (sequence is synthesized)
aatgaaagaagaaaatgaaagccataaagaaaagtcttacagaagaagaatacctgtacctggacttttctcaccaaacagaaggatgcatctttcctcttcatacatctgtaactttat

SEQ ID NO: 349657 - DNA, 120 bp, Artificial Sequence
  ENSG00000138780_3 (sequence is synthesized)
ttctgttatcttactgtgactgtaaaatctttaaaatttgcttagttgtcaccaaagaggttagtcagtggaccaggctatgtgaactcaccatccctttggctattgagaattttctca

SEQ ID NO: 349658 - DNA, 120 bp, Artificial Sequence
  ENSG00000138780_4 (sequence is synthesized)
gagaatcttctgaccagcccccaactatacctgtagaaatactacagctagagaaaaagcttagtgagcctgttagagtgcataatgatgataaactccgcaggcagaagctcaagcaac

SEQ ID NO: 349659 - DNA, 120 bp, Artificial Sequence
  ENSG00000138780_5 (sequence is synthesized)
agaaggctgatggagttgggcctccccttactaagggaaaggcaaagagcaaggtccacacacaggaaacatctgaagggttggattcttcatccaagagtctggaactgaaagtggcat

SEQ ID NO: 349660 - DNA, 120 bp, Artificial Sequence
  ENSG00000138780_6 (sequence is synthesized)
tctcaaagctcacagtacaggaagaaccagctactaccaacagagagccttctcacatcagaaaagcaaaagcctccgaccttccacctctggagcatgtgtttgcagaagggctttact

SEQ ID NO: 349661 - DNA, 120 bp, Artificial Sequence
  ENSG00000138780_7 (sequence is synthesized)
tcactctggcagatattgtgctcttgccctgtatccatcatttcttggtaattatcagcaggaaattttctgagaagctggtagaatttccattgctagcctcttggtaccagaggattc

SEQ ID NO: 349662 - DNA, 120 bp, Artificial Sequence
  ENSG00000138780_8 (sequence is synthesized)
aggaagtgccaggagtaaaaacagcagcttctaagtgtgggatccaatttctccatttaccaaagttgttgacaacctcaactgaacagcatccaaacttatgtgaagtcccaggtgtag

SEQ ID NO: 349663 - DNA, 120 bp, Artificial Sequence
  ENSG00000138780_9 (sequence is synthesized)
aagagcaaagcgatcctttatttataggaggaccaagaccaaccatggccaagttaatggaaaagggcattgaagtgatgttttctccccacccttgccctacttggactcttgattgga

SEQ ID NO: 349664 - DNA, 120 bp, Artificial Sequence
  ENSG00000138780_10 (sequence is synthesized)
atgttctccctgcagcagtcagcccaaaggaaggtaaaatgtccagtgatcgagctttgaggaagcagcaacagttgaacaaccttgtctatgtggtaacaaatcaggccaaacctggtg

SEQ ID NO: 349665 - DNA, 120 bp, Artificial Sequence
  ENSG00000138780_11 (sequence is synthesized)
acagaattgtggatttctgcagcggtgggggccatgttggaattgtccttgctcacatgctgccatcatgtcaggttacattaatagaaaacaaggaattatcattaattcgtgctaaga

SEQ ID NO: 349666 - DNA, 120 bp, Artificial Sequence
  ENSG00000138780_12 (sequence is synthesized)
agagaagtgatgaactgggtttaagcaacatttggttcattcaagcaaatatggaatattttactgggatgtttaatattggagtagcattgcatgcttgtggagtggcaacagacatgg

SEQ ID NO: 349667 - DNA, 120 bp, Artificial Sequence
  ENSG00000138780_13 (sequence is synthesized)
tgattgagcactgtatcaaaacacgggcttccttcgtcacatgcccttgctgttatggtttcattcagaacacctcaaagttcaattttccaaaaagtgaacaattcaagaaaactttat

SEQ ID NO: 349668 - DNA, 120 bp, Artificial Sequence
  ENSG00000138780_14 (sequence is synthesized)
catacaaggaacacatgattctgtgcagatttgcagaccagacagctgtccagctcccaccccaacgaaggctcataggaaaacagtgcatgtgcttggtggatctggatcgagcaagag

SEQ ID NO: 349669 - DNA, 120 bp, Artificial Sequence
  ENSG00000138780_15 (sequence is synthesized)
ctgcagaagaatgtggatactccgttcaagtgatatccatggagccagagagctgctctcccaaaaataacatgattgtgggagtccccatttaaaatgagatattcacatttgatattt

SEQ ID NO: 349670 - DNA, 120 bp, Artificial Sequence
  ENSG00000138780_16 (sequence is synthesized)
ctattgtgctcaggaaggaaagcaacagggaaatcttggaagtaaaggctccctgcaaagcatcacaaatgctttacaatgtgtgattaaaggactgctggtttttatagtgagaatccc

SEQ ID NO: 349671 - DNA, 120 bp, Artificial Sequence
  ENSG00000138780_17 (sequence is synthesized)
ctgaagtctcagctgccaaaagaataatactagtggaggttccatcacaggaataacaatttccttctcacttcacaagctcctctgatcttgccaatgtgatgtttaattcaaaacagc

SEQ ID NO: 349672 - DNA, 120 bp, Artificial Sequence
  ENSG00000138780_18 (sequence is synthesized)
gcacttacagcctttattttatacttatttagatattcacatgggaactgaaagtagactcagtggagttttttgttttttatatttttaacaattgtactttttctatcactttaaaaa

SEQ ID NO: 349673 - DNA, 120 bp, Artificial Sequence
  ENSG00000138780_19 (sequence is synthesized)
aatctagtcaggtaattatagtacagttatttttaagctggggttagttgaacttgtatagcatttaatatactccttttaaatatatttctgccaggcatggtggctcatgcctataat

SEQ ID NO: 349674 - DNA, 78 bp, Artificial Sequence
  ENSG00000138780_20 (sequence is synthesized)
tttgagcccaggatatcgagaccagcctgcactacaaaaaaatccaaaaaatgaggtgggaggatcacttgagcccag

SEQ ID NO: 349675 - DNA, 120 bp, Artificial Sequence
  ENSG00000138780_21 (sequence is synthesized)
ggctgcagtgagccttgatagcgccactgcactcctgcctgggaaaatgagacccagactcaaaataaatcaatgaatgaattaataaacaaataaataaataaataaatttcccataaa

SEQ ID NO: 349676 - DNA, 120 bp, Artificial Sequence
  ENSG00000138780_22 (sequence is synthesized)
ttaccaaatgagattgtcactggttcaaattattaaataattgccataaatttcctattacgggaatgtggaatttggacatacattttaacaataagtacattgattaatacatttaag

SEQ ID NO: 349677 - DNA, 120 bp, Artificial Sequence
  ENSG00000138780_23 (sequence is synthesized)
tttataagtaattattgaggatccagtattttcaagaccttggcctagtttcttttcaattcaaagatgagttgcaaaagacataatgttttgcctatggaagtagatcatctagaagaa

SEQ ID NO: 349678 - DNA, 61 bp, Artificial Sequence
  ENSG00000138780_24 (sequence is synthesized)
tcagtggctcgatcttggctcaccacaacctctgcattctcctgcctcagcctcccgagta

SEQ ID NO: 349679 - DNA, 120 bp, Artificial Sequence
  ENSG00000138780_25 (sequence is synthesized)
gtgctgaaattacaggcgtgagccacctcacctggccatgttctttatggaatactacaatgtgttgtcacaggatttgttattcagatgtcaatcatttttatttatatatttctgggt

SEQ ID NO: 349680 - DNA, 120 bp, Artificial Sequence
  ENSG00000138780_26 (sequence is synthesized)
cagatgtcaatcatttttatttatatatttctgggtaaaacttattagtggtgtgaggagtgcagaatatggaagcttacctaaattctttttctgccagccaacattttaaaagacaaa

SEQ ID NO: 349681 - DNA, 120 bp, Artificial Sequence
  ENSG00000138780_27 (sequence is synthesized)
tgatgcatcctttctcaatgctgctaattctttaaattttacatgtcccaatttattccatttgagatttattttaatgttttcaacccctgtgtaacatgtatcatgaggagaaagcac

SEQ ID NO: 349682 - DNA, 120 bp, Artificial Sequence
  ENSG00000138780_28 (sequence is synthesized)
tatcattgatcatcactatggattaaaatataggaatattttacagggcagtatgggtgggggtgggagacatattggaatcgtgttttctgggataaaatttttaaaaagaattaatca

SEQ ID NO: 349683 - DNA, 120 bp, Artificial Sequence
  ENSG00000138780_29 (sequence is synthesized)
ttagccctgagtattttagtcatttgtgcctatagaaaacaacatgctcttttattgtggactttcttcttttaagtgaggtttaatttatatacaatacaataacagatttttaagtat

SEQ ID NO: 349684 - DNA, 120 bp, Artificial Sequence
  ENSG00000138780_30 (sequence is synthesized)
tcatttgagatgttttgacaactgtatatatacatgtaaccatcactggaatcagatatagaatattccccttaaatattgtcaggtaaacacattgagaatattttttccagtctgtgg

SEQ ID NO: 349685 - DNA, 120 bp, Artificial Sequence
  ENSG00000138780_31 (sequence is synthesized)
cttacctacttattttcataatgaatgttttacttgtgatgaagatttaacttacccttttactttaatgattaatattttctgtgttctttctaataaattttacgaactctgaggtta

SEQ ID NO: 349686 - DNA, 120 bp, Artificial Sequence
  ENSG00000138780_32 (sequence is synthesized)
gtgagtagagatagttcactactaagagatgacctgatccaggatgttgaaatacagattatttcaaggcaggagctcccaccaatagtccaaaattgctgtttgcctgcagtagtagaa

SEQ ID NO: 349687 - DNA, 120 bp, Artificial Sequence
  ENSG00000138780_33 (sequence is synthesized)
cgatcagacaatttttgtagagcaggacttgctgttgtattgagacacataatccagaaatcctatgaagcagaccccttaaagaaggaacttttggaacttctgggctttaaaaagact

SEQ ID NO: 349688 - DNA, 120 bp, Artificial Sequence
  ENSG00000138780_34 (sequence is synthesized)
acttcgtttgtggctaaggttactgtaagcttttcacttaaaaacttttcctacttctttaccagataagaaaacagctaattttaatcactggcttttgttctctaggacttaactgca

SEQ ID NO: 349689 - DNA, 120 bp, Artificial Sequence
  ENSG00000138780_35 (sequence is synthesized)
cctttttagtctttctaagattatgagacttttctatattacattcaaggtcatgtttttatttggcaagattgtggtttcagaatgaggaaaagctgtggggaccaaagctaacttgtt

SEQ ID NO: 349690 - DNA, 120 bp, Artificial Sequence
  ENSG00000138780_36 (sequence is synthesized)
tgtcttactgactttttcagggccatgttggaattgtccttgctcacatgctgccatcatgtcaggtaaagccagaataagagataaaaggaaatattttaaaattatacagttcagcta

SEQ ID NO: 349691 - DNA, 120 bp, Artificial Sequence
  ENSG00000138780_37 (sequence is synthesized)
gccaaatttggtttatcccgctcttggagtttctagtcactcacccaagtcaaatatgtggcacaggcattgtcttttctttgaaataaactttcaagactcagaatcttaaggaaaaaa

SEQ ID NO: 349692 - DNA, 120 bp, Artificial Sequence
  ENSG00000138780_38 (sequence is synthesized)
agactcagaatcttaaggaaaaaaaagtaaagtaagatcataaaacatttatcaatttttaaaagaggtttataggtttaagtaatttttcaaagaagtagctattttattgctaaataa

SEQ ID NO: 349693 - DNA, 120 bp, Artificial Sequence
  ENSG00000138780_39 (sequence is synthesized)
attttcaatataattttaaatggaaatattgacctctgaaacttgctgagcatattcttttggtatcttgattttgatccattgcatcaaaattataacaatagcaaaattttttaaagc

SEQ ID NO: 349694 - DNA, 90 bp, Artificial Sequence
  ENSG00000138780_40 (sequence is synthesized)
tggagtcttgctctgtcactcaggctggaatgcagtggtgtagtctcggctcactggaaccccagcctcccgggttcaagtaattctgta

SEQ ID NO: 349695 - DNA, 120 bp, Artificial Sequence
  ENSG00000138780_41 (sequence is synthesized)
cagccaccactcggactcaatatgcttttaaatgtaattttctaaaaacagcttttggagagaacagaggcatcaatactgttacagtctattagttatctggccctatggacattagta

SEQ ID NO: 349696 - DNA, 120 bp, Artificial Sequence
  ENSG00000138780_42 (sequence is synthesized)
agtaacattctagagtatgagtgtcagagaccagtggtttgtctattaaaatagtagaattatcttacttgataattcttgagaaggctgtgactcagtttactaaatttactatattta

SEQ ID NO: 349697 - DNA, 120 bp, Artificial Sequence
  ENSG00000138780_43 (sequence is synthesized)
ttaaatataaagcaatgtttggctccttgattctgcacacctttatttgactctgcctgttttctttcacataaggactacagcattttttactgactcctccttgaccatcattttttt

SEQ ID NO: 349698 - DNA, 120 bp, Artificial Sequence
  ENSG00000138780_44 (sequence is synthesized)
cataatataataaaaacctggcatttccgtgaagttgacttactggcttgtattgctatttacttctgggatgtagtaatatagggatatactatggaaagaaacttaacaaaaaacaga

SEQ ID NO: 349699 - DNA, 120 bp, Artificial Sequence
  ENSG00000138780_45 (sequence is synthesized)
gaaaattatctgtagttgtcaagggctcattaacctttctgtgccttaaatcgaagccacatttttgtgtctgtgtagcttgtcatcctcaataaaatctgcttgaatttgaaaattcta

SEQ ID NO: 349700 - DNA, 120 bp, Artificial Sequence
  ENSG00000138785_0 (sequence is synthesized)
gtttccgaagggaccaccgggaacagacggatcggcagggcggggcggaacggtgaggccatctactgaaacacagaagcaattttaaaagaaaatggaggaagtataactgatctttgc

SEQ ID NO: 349701 - DNA, 120 bp, Artificial Sequence
  ENSG00000138785_1 (sequence is synthesized)
agaaagtggggaagtgagttgaccagagaaggatgagagaattgccaagttgtactgaacgccaagctgagaatggtgattctgaagatagaatgcgtttgcaatggctgctactgtgaa

SEQ ID NO: 349702 - DNA, 120 bp, Artificial Sequence
  ENSG00000138785_2 (sequence is synthesized)
cttggaacttgatcccatttttttgaaagcactaggtttcttgcattcaaagagtaaagattctgctgaaaagctaaaagcactgcttgatgaatctttggctcggggcattgattccag

SEQ ID NO: 349703 - DNA, 120 bp, Artificial Sequence
  ENSG00000138785_3 (sequence is synthesized)
ttaccgtccatctcaaaaggatgtggagccacccaaaatttcaagcacaaaaaacatttccattaagcaagagcccaaaatatcatccagtcttccttctggtaataataatggcaaggt

SEQ ID NO: 349704 - DNA, 120 bp, Artificial Sequence
  ENSG00000138785_4 (sequence is synthesized)
cctcacaactgaaaaggtaaagaaggaagctgaaaagagacctgctgataaaatgaaatcagacatcactgaaggagttgatattccaaagaaacctagattggagaaaccagaaacaca

SEQ ID NO: 349705 - DNA, 120 bp, Artificial Sequence
  ENSG00000138785_5 (sequence is synthesized)
gtcatctcccattactgtccaaagtagcaaggatttacctatggctgacctttccagttttgaggagaccagtgctgatgattttgccatggagatgggattggcctgcgttgtttgtag

SEQ ID NO: 349706 - DNA, 120 bp, Artificial Sequence
  ENSG00000138785_6 (sequence is synthesized)
gcaaatgatggtggcatctggcaatcaattagtagaatgtcaggagtgccataatctctaccaccgagattgtcataaaccccaggtgacagacaaggaagcgaatgaccctcgcctggt

SEQ ID NO: 349707 - DNA, 120 bp, Artificial Sequence
  ENSG00000138785_7 (sequence is synthesized)
tggctcaaaaaactcagaaaccaccgcagaaaccagcccctgcagttgtttctgtaactccagctgtcaaagatccattggttaagaaaccagaaactaaactgaaacaagagacaactt

SEQ ID NO: 349708 - DNA, 120 bp, Artificial Sequence
  ENSG00000138785_8 (sequence is synthesized)
ttctagcgtttaagagaacagaagtcaagacatccacagttatttcaggaaattcttctagtgccagcgtttcctcgtcagtaactagtggcttaactggatgggcagcttttgcagcca

SEQ ID NO: 349709 - DNA, 120 bp, Artificial Sequence
  ENSG00000138785_9 (sequence is synthesized)
aaacttcctctgctggtccttcaacagcaaaattgagttcaacaacacaaaacaatactgggaaacctgctacttcgtcagctaaccagaaacctgtgggtttgactggtctggcaacat

SEQ ID NO: 349710 - DNA, 120 bp, Artificial Sequence
  ENSG00000138785_10 (sequence is synthesized)
catccaaaggtggaataggttccaaaataggttccaataacagcactacgcccactgtacctttaaaaccacctccacctctaaccttgggtaaaactggccttagtcgctcagttagtt

SEQ ID NO: 349711 - DNA, 120 bp, Artificial Sequence
  ENSG00000138785_11 (sequence is synthesized)
gtgacaatgtcagcaaagtaggtcttcctagtccaagtagtttagttccaggaagcagcagccaactaagtgggaatggaaatagtggaacatcaggacctagtggaagtactaccagca

SEQ ID NO: 349712 - DNA, 120 bp, Artificial Sequence
  ENSG00000138785_12 (sequence is synthesized)
aaactacttcagaatccagcagctctccctcagcatcccttaaaggcccaacttcacaagaatcacagctcaatgctatgaagcgattacagatggtcaagaagaaagctgcccaaaaga

SEQ ID NO: 349713 - DNA, 120 bp, Artificial Sequence
  ENSG00000138785_13 (sequence is synthesized)
aactcaagaagtaatgtggccaagtaggtttttgtatcatattagcctaaagatgaaaggcttattattatgatataatctgtaatacactgtaatttaataaaagtcttcataatcaaa

SEQ ID NO: 349714 - DNA, 120 bp, Artificial Sequence
  ENSG00000138785_14 (sequence is synthesized)
attggaaggggttgcaagagcttgcgaagtcatgaagaacaaagttttttagagccattatgaaatggcaacgataatactgcactctatgtgaacagtttctgtttccttcatctgggg

SEQ ID NO: 349715 - DNA, 120 bp, Artificial Sequence
  ENSG00000138785_15 (sequence is synthesized)
cacgtgcatatgatcaactttggacttcttttgagattgccaggaactctgccagacaggggttacaacagtaggcaagaccaatccactgcctgccttcatggaacttacattctaatg

SEQ ID NO: 349716 - DNA, 120 bp, Artificial Sequence
  ENSG00000138785_16 (sequence is synthesized)
agaaagaaagattatttacataattaacagtgtgattaatattacaaataagtacagaatgtttttgggctatgtaacagtgaaacttctagttttgttgagggaatgtgcaggaaaaac

SEQ ID NO: 349717 - DNA, 120 bp, Artificial Sequence
  ENSG00000138785_17 (sequence is synthesized)
cgcatcctcagccctgcagacccccgaagaaaagaccagttcttagggggtcgcggaggctgagaagccggcggcccgagcgccctctttacctggtcgcagaggcgcggccaggcaggg

SEQ ID NO: 349718 - DNA, 120 bp, Artificial Sequence
  ENSG00000138785_18 (sequence is synthesized)
agggtgcgtgagcgtgtcggcgacctgggccgcctgcgccttcccgcccagtccgagctggaattccaaggctgcctctgggagctgctgcccgcagaccactcgcctccacagacgcca

SEQ ID NO: 349719 - DNA, 120 bp, Artificial Sequence
  ENSG00000138785_19 (sequence is synthesized)
ggagaaaaacgacagccaccttatgtggaaaatactcgcgccggccgtcattcataatccggcggaccggaaaaagggaagtaacgtcacttcctactgtcgcactgccaaacgtttccc

SEQ ID NO: 349720 - DNA, 120 bp, Artificial Sequence
  ENSG00000138785_20 (sequence is synthesized)
ccgcccctactgtgggaacctttgttttcctgctttcggagccggccagtgcgggaaccgtttccgaagggaccaccgggaacagacggatcggcagggcggggcggaacggcgtttgca

SEQ ID NO: 349721 - DNA, 120 bp, Artificial Sequence
  ENSG00000138785_21 (sequence is synthesized)
agtcctaattcccgagccggggcgagtcgccctcggggggccgcggatggggtcccagactcgcaagggcgcgccctctccgcctcgggcgggcactcggagccgctggaccgctctcct

SEQ ID NO: 349722 - DNA, 120 bp, Artificial Sequence
  ENSG00000138785_22 (sequence is synthesized)
cgcgccacgctgtgcggtggcccaacttctggatggaggagacgcctctctgaccacgaaaccccgcggggaaaagtgacccaagacagaagaagaccctcaccagatgccagccccttg

SEQ ID NO: 349723 - DNA, 120 bp, Artificial Sequence
  ENSG00000138785_23 (sequence is synthesized)
acatgatttgaagaaacagtgtgcactttgtcctcatggtgtttgtaaattaagattcattttatataatggtaatgtcaaggcaatcgcaatctcaggcgtttgcaatggctgctactg

SEQ ID NO: 349724 - DNA, 120 bp, Artificial Sequence
  ENSG00000138785_24 (sequence is synthesized)
accctcttctgtattatttctaaagcttaatattatctttactgtttagaaactaatacaatctgtaagaccattaatatgataataatttgtcaaagagcatatatattcattatcatc

SEQ ID NO: 349725 - DNA, 120 bp, Artificial Sequence
  ENSG00000138785_25 (sequence is synthesized)
acactattttttaaaatgttcaactgtatttcatttcagtgatgagtcctgtgagggattattatctttctgtatattcagttaagattttgtatctgatttaatccactgatttttgca

SEQ ID NO: 349726 - DNA, 120 bp, Artificial Sequence
  ENSG00000138785_26 (sequence is synthesized)
ggcagggcggggcggaacggtgagttatgctgagcgactctgctcctggcctcctggaggctcgagacccccgcgccaggagcgaggtgggagagtagctacgtggggtattagtttcct

SEQ ID NO: 349727 - DNA, 120 bp, Artificial Sequence
  ENSG00000138785_27 (sequence is synthesized)
cgctcctcaaggggaatcataatttacgggcggttgcgtgccctagactgactgctctcccctttcagtgaggactgtgcttcctccgagggagttgcgggccgggacatgcggaccgag

SEQ ID NO: 349728 - DNA, 120 bp, Artificial Sequence
  ENSG00000138785_28 (sequence is synthesized)
ttgtctctcatcttttggctcccctgtcaaggaccatcccccattctaggacttcgatgtgtgatgctttgatcaaaggattgacattccttttctaagtgtttgctgtcagctttcagc

SEQ ID NO: 349729 - DNA, 120 bp, Artificial Sequence
  ENSG00000138785_29 (sequence is synthesized)
cacttgattggtttggaatcggagccttttctcctgcgattccaggtgtccctaaggcgtttgcaatggctgctactgtgaacttggaacttgatcccatttttttgaaagcactaggtt

SEQ ID NO: 349730 - DNA, 120 bp, Artificial Sequence
  ENSG00000138785_30 (sequence is synthesized)
agacggatcggcagggcggggcggaacgatcaacacagttacaccaagttgctgacctctttatgactgctgtagaaagtaaacttctttcactatatggatatttgccggtaaggaagg

SEQ ID NO: 349731 - DNA, 120 bp, Artificial Sequence
  ENSG00000138785_31 (sequence is synthesized)
gaagggaccaccgggaacagacggatcggcagggcggggcggaacggtgtccctaaggtatcagtgttatccagaaccaagaactcagtggaggaatgaaaaaggcagcatctttaaaat

SEQ ID NO: 349732 - DNA, 120 bp, Artificial Sequence
  ENSG00000138792_0 (sequence is synthesized)
gccagccctcttcctcccactcggctcctcttacggagtcctcattccaccccccttgtttccgcattcatcctgagtggctggtgggaacgtgaaaagggagaggaaaaggcgcaagaa

SEQ ID NO: 349733 - DNA, 120 bp, Artificial Sequence
  ENSG00000138792_1 (sequence is synthesized)
gccagagagaggggtgtgggaaaagcgaaaacaggctgccaaatcaggggattccttccaatttaaaaaggaagtctgctgacgttagttagttaaatttaacatctttttatgtgtaac

SEQ ID NO: 349734 - DNA, 120 bp, Artificial Sequence
  ENSG00000138792_2 (sequence is synthesized)
acttgactttggaagcaaaaatgaactttgcggagagagagggctctaagagatactgcattcaaacgaaacatgtggccattctctgtgcggtggtggtgggtgtaggattaatagtgg

SEQ ID NO: 349735 - DNA, 120 bp, Artificial Sequence
  ENSG00000138792_3 (sequence is synthesized)
gacttgccgtgggcttgaccagatcgtgtgactccagcggggacggcgggccgggcactgcgccagctccttcccacctgccttcttccacggccagcccctcaggtcctcctgcccagg

SEQ ID NO: 349736 - DNA, 120 bp, Artificial Sequence
  ENSG00000138792_4 (sequence is synthesized)
accaggacatctgcccggccagtgaggatgagagcggacagtggaaaaactttcgactgccggacttcgtcaacccagtccactacgacctgcacgtgaagcccctgttggaggaggaca

SEQ ID NO: 349737 - DNA, 120 bp, Artificial Sequence
  ENSG00000138792_5 (sequence is synthesized)
cctacacgggcaccgtgagcatctccatcaacctgagcgctcccacccggtacctgtggctgcacctccgggagaccaggatcacccggctcccggagctgaagaggccctctggggacc

SEQ ID NO: 349738 - DNA, 120 bp, Artificial Sequence
  ENSG00000138792_6 (sequence is synthesized)
aggtgcaagtccggaggtgtttcgagtacaaaaagcaggagtacgtggtggtcgaggcggaggaagagcttacccccagcagtggagatggcctgtatctcctgaccatggagttcgccg

SEQ ID NO: 349739 - DNA, 120 bp, Artificial Sequence
  ENSG00000138792_7 (sequence is synthesized)
gctggctgaacggctccctcgtgggattttatagaaccacctacacggagaacggacaagtcaagagcatagtggccaccgatcatgaaccaacagatgccaggaaatcttttccttgtt

SEQ ID NO: 349740 - DNA, 120 bp, Artificial Sequence
  ENSG00000138792_8 (sequence is synthesized)
ttgatgagcccaacaaaaaggcaacttatacaatatctatcacccatcccaaagaatacggagcactttcaaatatgccagtggcgaaagaagagtcagtggatgataaatggactcgaa

SEQ ID NO: 349741 - DNA, 120 bp, Artificial Sequence
  ENSG00000138792_9 (sequence is synthesized)
caacttttgagaagtctgtccccatgagcacgtacctggtgtgctttgctgtacatcaatttgactctgtaaagagaatatcaaatagtggaaaacctcttacaatttatgtccagccag

SEQ ID NO: 349742 - DNA, 120 bp, Artificial Sequence
  ENSG00000138792_10 (sequence is synthesized)
agcaaaagcacacagccgaatatgctgcaaacataactaaaagtgtgtttgattattttgaagaatactttgctatgaattattctcttcctaaattagataaaatcgctattccagatt

SEQ ID NO: 349743 - DNA, 120 bp, Artificial Sequence
  ENSG00000138792_11 (sequence is synthesized)
ttggcactggtgccatggagaactggggactcatcacgtacagagaaacgaacctgctttatgaccctaaggaatcagcctcatcaaaccaacagagggtggccactgtggttgcccatg

SEQ ID NO: 349744 - DNA, 120 bp, Artificial Sequence
  ENSG00000138792_12 (sequence is synthesized)
aacttgtgcatcagtggtttggaaatattgtgaccatggactggtgggaagacttgtggctaaatgaaggatttgcttctttctttgagtttctgggagtaaaccatgcagaaacagact

SEQ ID NO: 349745 - DNA, 120 bp, Artificial Sequence
  ENSG00000138792_13 (sequence is synthesized)
ggcaaatgcgtgaccaaatgttacttgaagatgtattacctgttcaagaggatgattctttgatgtcttcgcatccaattattgtgactgtgacaacccctgatgaaataacatctgttt

SEQ ID NO: 349746 - DNA, 120 bp, Artificial Sequence
  ENSG00000138792_14 (sequence is synthesized)
ttgatggaatatcctatagcaagggatcttctattttgagaatgcttgaagactggataaaaccagagaattttcaaaaaggatgtcagatgtacttggaaaaataccaattcaagaatg

SEQ ID NO: 349747 - DNA, 120 bp, Artificial Sequence
  ENSG00000138792_15 (sequence is synthesized)
caaaaacttctgatttttgggcagcactggaagaggcaagtaggctaccagtgaaagaagtaatggacacctggaccagacagatgggttatcctgtgcttaacgtgaacggtgtcaaga

SEQ ID NO: 349748 - DNA, 120 bp, Artificial Sequence
  ENSG00000138792_16 (sequence is synthesized)
acatcacacagaaacgctttttgttggacccaagagctaacccttctcagcccccttcagatcttggttatacatggaatatcccagttaaatggactgaagataatataacaagcagtg

SEQ ID NO: 349749 - DNA, 120 bp, Artificial Sequence
  ENSG00000138792_17 (sequence is synthesized)
tgttatttaataggtcagaaaaagaaggaatcactttgaactcctctaatcctagtggaaatgcttttctcaaaataaacccagatcatattgggttttatcgtgtaaattatgaagtag

SEQ ID NO: 349750 - DNA, 120 bp, Artificial Sequence
  ENSG00000138792_18 (sequence is synthesized)
caacttgggactcgatagctacagcgctctccttgaaccacaagacattttcttcagcagatcgtgcaagtcttattgatgatgcttttgccttggcaagagctcaacttctagattata

SEQ ID NO: 349751 - DNA, 120 bp, Artificial Sequence
  ENSG00000138792_19 (sequence is synthesized)
aggtggctttgaacttgaccaagtatctcaaaagggaagagaattttttaccatggcagagagtaatttcagctgtaacctacatcattagcatgtttgaagatgataaagagctatatc

SEQ ID NO: 349752 - DNA, 120 bp, Artificial Sequence
  ENSG00000138792_20 (sequence is synthesized)
ctatgattgaggaatacttccaaggtcaagtgaagcctattgcagattctctgggatggaatgatgctggagaccatgtcacaaagttactccgttcctccgtgttagggtttgcgtgca

SEQ ID NO: 349753 - DNA, 120 bp, Artificial Sequence
  ENSG00000138792_21 (sequence is synthesized)
agatgggagacagagaagccttgaacaatgcttcctcgttatttgagcagtggctaaatgggactgtaagccttcccgtaaatctcaggcttctggtgtatcggtatgggatgcagaact

SEQ ID NO: 349754 - DNA, 120 bp, Artificial Sequence
  ENSG00000138792_22 (sequence is synthesized)
ctggcaatgagatttcatggaactacactcttgagcaataccagaaaacttcattagctcaagaaaaagaaaaactgctgtatggattagcatcagtgaagaacgttactcttttgtcaa

SEQ ID NO: 349755 - DNA, 120 bp, Artificial Sequence
  ENSG00000138792_23 (sequence is synthesized)
ggtatttggatttgctcaaggacacgaaccttattaaaactcaggatgtgtttacagtcattcgatatatctcatataacagctatgggaagaacatggcctggaattggatacaactca

SEQ ID NO: 349756 - DNA, 120 bp, Artificial Sequence
  ENSG00000138792_24 (sequence is synthesized)
actgggactatctagtcaacagatatacactcaataacagaaaccttggccgaattgtcacaatagcagagccattcaacactgaactgcaactgtggcagatggagagcttttttgcaa

SEQ ID NO: 349757 - DNA, 120 bp, Artificial Sequence
  ENSG00000138792_25 (sequence is synthesized)
aatatccacaagctggagcaggagaaaaacctagggaacaagtgctggaaacagtgaaaaacaatatagagtggctaaaacaacatagaaacaccatcagagaatggttttttaatttac

SEQ ID NO: 349758 - DNA, 120 bp, Artificial Sequence
  ENSG00000138792_26 (sequence is synthesized)
ttgagagtggttaatgtattcaaatgttagagtttaattttgtgaatctattgtttctcctctgaagcatttggtggcctaatttacaagcacgatggagagagccttataaacagataa

SEQ ID NO: 349759 - DNA, 120 bp, Artificial Sequence
  ENSG00000138792_27 (sequence is synthesized)
tgcttttactaagcactgtgtttatatgtcttgcaaagcctttaaattgttcctctttgtttatgaagaaagatactaatagagtacttaatatactcagggattccttctaagtgtact

SEQ ID NO: 349760 - DNA, 120 bp, Artificial Sequence
  ENSG00000138792_28 (sequence is synthesized)
ctgaagataatgaaatagttattttaatacctttaaatatcattctttgtatcttaaatctgtgaagtagaacaatttggtcttagctttacattttcagtaccaaagaaacaccactta

SEQ ID NO: 349761 - DNA, 120 bp, Artificial Sequence
  ENSG00000138792_29 (sequence is synthesized)
atcttctctcttgattgatttttaaagtttaaataccagtacttgagggaccaatattaccatcttaatctttattttattattcagaattatacagacctaatatcattttattcacat

SEQ ID NO: 349762 - DNA, 120 bp, Artificial Sequence
  ENSG00000138792_30 (sequence is synthesized)
atgtcttactactttaaatcctaccaaagtaacctgggcttaagttttacttgaggatcatatgaattagccaaaagaatggctgactgttgcctttgctcttataaaatcaataagaga

SEQ ID NO: 349763 - DNA, 120 bp, Artificial Sequence
  ENSG00000138792_31 (sequence is synthesized)
actctcctctttttttaaaaataaatctaaatgattatcttgaaaaagtattgttttccagtgtcacttgactcttgaataaaaataactgcagtgttccccaaataatttaacacattg

SEQ ID NO: 349764 - DNA, 120 bp, Artificial Sequence
  ENSG00000138792_32 (sequence is synthesized)
caaatatgattcaagaatctggcctttttcatgcttggtactctcttctcttgctccattccttacaaagctccttcaaatatgctatgaaattagagggaacatagtgcttaactctgc

SEQ ID NO: 349765 - DNA, 120 bp, Artificial Sequence
  ENSG00000138792_33 (sequence is synthesized)
tccatggattttagaggaaaaaagctaaataattggaaactgttcaggaaagagagaaggcagattatttcttaaaactaaatggaattagaatttagctttgacctcacctagcaatct

SEQ ID NO: 349766 - DNA, 120 bp, Artificial Sequence
  ENSG00000138792_34 (sequence is synthesized)
aagtgtgaaaatggggagacctgtgggcatccccagcatgactctgcatatctgagcatatatctccttatagatcaattttatgtataaacccttagatcctaatccatacagaatagc

SEQ ID NO: 349767 - DNA, 120 bp, Artificial Sequence
  ENSG00000138792_35 (sequence is synthesized)
actgatcaaatttaaatgcatgacttgattaaagacatcaatttcatagaagctggtggcaagaatatgtttaatatggcacttgatacctcctagatccataatgtaagtccaataggc

SEQ ID NO: 349768 - DNA, 120 bp, Artificial Sequence
  ENSG00000138792_36 (sequence is synthesized)
agaaaagatggtaagttactatgtttcaatctgctatatctagaaaatctaaatttatttggaactttcaaaaatgtaaggtaatttagaatcggcttgatgagaattgaagcatatgga

SEQ ID NO: 349769 - DNA, 120 bp, Artificial Sequence
  ENSG00000138792_37 (sequence is synthesized)
aacaaaaccttagctttaactttatttatacaataatgtgccctaatcatgtactctgaaactttataaactttcctgttgctgtttcttaattatcacttctcaatccgtacagccaaa

SEQ ID NO: 349770 - DNA, 120 bp, Artificial Sequence
  ENSG00000138792_38 (sequence is synthesized)
ctagtaaattcaaatgtagactgggttgtgggtggcagatatagaagaagaaatttccagaccaaaaaatattaaatattattttaaattatttcagaagcaaaaacatattaacatcat

SEQ ID NO: 349771 - DNA, 120 bp, Artificial Sequence
  ENSG00000138792_39 (sequence is synthesized)
aacttaccagaaaaaccccactatcctcataagattaacttaaaattctgaccacaatcagaaccagcacttgaagtctatgtattgtttcaagtaggacatattatgaggtgagatggt

SEQ ID NO: 349772 - DNA, 120 bp, Artificial Sequence
  ENSG00000138792_40 (sequence is synthesized)
ttatccttctgttttatgaaattaatacattttaaaagaaaaatgttagtttaagggggtggtaaataaaacagatttcaacttgcctacaagacattctatttcatgccttttcctttt

SEQ ID NO: 349773 - DNA, 120 bp, Artificial Sequence
  ENSG00000138792_41 (sequence is synthesized)
gttgttctatttcattctattttaagcattaaaactgagaacaaattgtttacttcttttcactccacacgcgaaagagttgtatgtactttgtcagaataagtcttctagaccatcagg

SEQ ID NO: 349774 - DNA, 120 bp, Artificial Sequence
  ENSG00000138792_42 (sequence is synthesized)
tccttctcaaacaacacctgttttttaaaaggctgatgcctaatagatagatctatgccaagcacagtttattactttgcttgcttggttttgcacagtattcacaggggacaaaaaatt

SEQ ID NO: 349775 - DNA, 120 bp, Artificial Sequence
  ENSG00000138792_43 (sequence is synthesized)
taatatgatgtttccaaaattaagccacagtaaatttaaataattaattttaattgaaaaaaagtaaccatttaatttcaagaattaactggaaaatatgggaagcaaggtcatgtagca

SEQ ID NO: 349776 - DNA, 120 bp, Artificial Sequence
  ENSG00000138792_44 (sequence is synthesized)
aaaagcaaggccagtattactgcctcccctctaggcagcccactcctgtattccagatcattgctatgtacccacataattataaattaggagtttaaataataaaacatagacgtaaaa

SEQ ID NO: 349777 - DNA, 120 bp, Artificial Sequence
  ENSG00000138792_45 (sequence is synthesized)
ctgacaggcaagggaggtttgggaaacaggggtgagatgtatacctgggttgaaggtaatgatactcctacagcttaccctccaagttggtgaagtgttagtccaaaagtagaaacaaca

SEQ ID NO: 349778 - DNA, 120 bp, Artificial Sequence
  ENSG00000138792_46 (sequence is synthesized)
gagtaggggcaaaaatctagaacaataattctcaaagggaattgggggatgagaaggaagtagaaaagaggggattcaaattaccagtggtgctttctaaaacacggttaggtaatcatc

SEQ ID NO: 349779 - DNA, 120 bp, Artificial Sequence
  ENSG00000138792_47 (sequence is synthesized)
atcatcagactttcctttttttttcaagcatttttataaacactagcactccacataacattaatttttacaaaacccccttaaagtagatactgttattgttcttattttagagtggat

SEQ ID NO: 349780 - DNA, 120 bp, Artificial Sequence
  ENSG00000138792_48 (sequence is synthesized)
aaattgagatggagaagttatagaacttgcacaaggctacaaaagttgtatttggcaccagccagtatttgaacccaggcagtttatcactctaatctacattttaatctgtattagagt

SEQ ID NO: 349781 - DNA, 120 bp, Artificial Sequence
  ENSG00000138792_49 (sequence is synthesized)
aaaaatatgcttttgaaatcagagtgacctgggttggaatatcaactacttggtagttgagtgcttttaacctctccattgttgtttcatctataaagtaaggatcaaaatagtagctac

SEQ ID NO: 349782 - DNA, 120 bp, Artificial Sequence
  ENSG00000138792_50 (sequence is synthesized)
ctcaatggtagttgtgaggattaaatacaaaaatgcatgtaaaggacatacgtataggaaataacaatcactcaataagtgttagctcttattattgttactattatatctccccatccc

SEQ ID NO: 349783 - DNA, 120 bp, Artificial Sequence
  ENSG00000138792_51 (sequence is synthesized)
tacttaagacactagtttgaagaataaaataaactttggttcaggaataaccaaacctaagcaactgaaggcactaagggtaggctatgtgttagcctgtgttattgttcataaatagta

SEQ ID NO: 349784 - DNA, 120 bp, Artificial Sequence
  ENSG00000138792_52 (sequence is synthesized)
attgccctggtctggaagaggattctatatcctaccccattgtagtctagcatggtatgtgacttgctttggccagtgaaacagagtgaaaatgatgtatgtcaattttaggcagaaacg

SEQ ID NO: 349785 - DNA, 120 bp, Artificial Sequence
  ENSG00000138792_53 (sequence is synthesized)
tccagagccagcacttggtttgccatgttctccgtgtttcttctgctcctagatgcagcagtattccagatagaggccgcactatgagcctgaattccaggataaaaacaacatggaata

SEQ ID NO: 349786 - DNA, 120 bp, Artificial Sequence
  ENSG00000138792_54 (sequence is synthesized)
gaacttagccagcacagagtacacatgtgctgtaaatgagaaatacccctttgttattgtaaatcactgagattttgaggttgtctgttactgcagcataatctagcctaatataaacac

SEQ ID NO: 349787 - DNA, 120 bp, Artificial Sequence
  ENSG00000138792_55 (sequence is synthesized)
caaactaatatactcctctaccatagtaatttatttcttgttctttctcctcctccttcctctacttcagggtttagcgaccttttgcctgcctgtttttgtaaggcctgaaagctaaac

SEQ ID NO: 349788 - DNA, 120 bp, Artificial Sequence
  ENSG00000138792_56 (sequence is synthesized)
atagttttacatttttagatggttgaaaaaatcaaaaggagaataatagttcatgatgtaaaaattatataaaatttaaataaatgtcggcatccttaaataaagttttattggaacaca

SEQ ID NO: 349789 - DNA, 120 bp, Artificial Sequence
  ENSG00000138792_57 (sequence is synthesized)
aatctcctcaaaactttgagaatggatcattgttagctcattttacaaacaggaaaatgaaagatttgaaaggagcatagtggccaccgatcatgaaccaacagatgccaggaaatcttt

SEQ ID NO: 349790 - DNA, 120 bp, Artificial Sequence
  ENSG00000138792_58 (sequence is synthesized)
aagtgaagtcaagtgtggcaaagggacacgtaaaggaagtaatggacaaatgacacagagagaaagagacagagacagagaaagagaaagagaaagagcgcgcaagagagaaattgatag

SEQ ID NO: 349791 - DNA, 120 bp, Artificial Sequence
  ENSG00000138792_59 (sequence is synthesized)
ataggtcagaaaaagaagttaattgaggattggaagaatatctcggcagctgtttgatttactgtttacaagtttgaaagcgtgaataattcatctaccctagtacaattcacccagcac

SEQ ID NO: 349792 - DNA, 120 bp, Artificial Sequence
  ENSG00000138792_60 (sequence is synthesized)
tttcatggaatgaagtttccatacaagtgaattttccagataactaaagcttactcaagtgctttgtaaaatgcatttcaagagttcacaatagacattgttctaatatgtgttatgtac

SEQ ID NO: 349793 - DNA, 120 bp, Artificial Sequence
  ENSG00000138792_61 (sequence is synthesized)
tccttagaatatttggaataataaatttaatccttaattactagattaattctttcaagcacgtattgcttatgtgcaaaacacagagataagaatgggggcagtgctggagcaaaaaaa

SEQ ID NO: 349794 - DNA, 120 bp, Artificial Sequence
  ENSG00000138792_62 (sequence is synthesized)
cactttttaacaactaaaattcatttaacatttgttttttgttttaagacttgttgaaaagtgcttaaggccctggatttgtgtttgtttgttttttaaggttactccgttcctccgtgt

SEQ ID NO: 349795 - DNA, 120 bp, Artificial Sequence
  ENSG00000138794_0 (sequence is synthesized)
gtggcttcaggaagaggagggcaaggtgtctggctgcgcgtttggctgcaatgagctcggcctcggggctccgcagggggcacccggcaggtggggaagaaaacatgacagaaacagatg

SEQ ID NO: 349796 - DNA, 120 bp, Artificial Sequence
  ENSG00000138794_1 (sequence is synthesized)
ccttctataaaagagaaatgtttgatccggcagaaaagtacaaaatggaccacaggaggagaggaattgctttaatcttcaatcatgagaggttcttttggcacttaacactgccagaaa

SEQ ID NO: 349797 - DNA, 120 bp, Artificial Sequence
  ENSG00000138794_2 (sequence is synthesized)
ggcggggcacctgcgcagatagagacaatcttacccgcaggttttcagatctaggatttgaagtgaaatgctttaatgatcttaaagcagaagaactactgctcaaaattcatgaggtgt

SEQ ID NO: 349798 - DNA, 120 bp, Artificial Sequence
  ENSG00000138794_3 (sequence is synthesized)
caactgttagccacgcagatgccgattgctttgtgtgtgtcttcctgagccatggcgaaggcaatcacatttatgcatatgatgctaaaatcgaaattcagacattaactggcttgttca

SEQ ID NO: 349799 - DNA, 120 bp, Artificial Sequence
  ENSG00000138794_4 (sequence is synthesized)
aaggagacaagtgtcacagcctggttggaaaacccaagatatttatcattcaggcatgtcggggaaaccagcacgatgtgccagtcattcctttggatgtagtagataatcagacagaga

SEQ ID NO: 349800 - DNA, 120 bp, Artificial Sequence
  ENSG00000138794_5 (sequence is synthesized)
agttggacaccaacataactgaggtggatgcagcctccgtttacacgctgcctgctggagctgacttcctcatgtgttactctgttgcagaaggatattattctcaccgggaaactgtga

SEQ ID NO: 349801 - DNA, 120 bp, Artificial Sequence
  ENSG00000138794_6 (sequence is synthesized)
ctcacactggtgaacaggaaagtttctcagcgccgagtggacttttgcaaagacccaagtgcaattggaaagaagcaggttccctgttttgcctcaatgctaactaaaaagctgcatttc

SEQ ID NO: 349802 - DNA, 120 bp, Artificial Sequence
  ENSG00000138794_7 (sequence is synthesized)
aagctgcatttctttccaaaatctaattaattaatagaggctatctaattttacactctgtattgaaaatggctttctcagccaggcgtggttactcacacctgtaatcccagcactttg

SEQ ID NO: 349803 - DNA, 63 bp, Artificial Sequence
  ENSG00000138794_8 (sequence is synthesized)
gcaaaaaaaaatttagctaggcatggcggcgcatgcctgcaatcccagctacttggaaggctg

SEQ ID NO: 349804 - DNA, 120 bp, Artificial Sequence
  ENSG00000138794_9 (sequence is synthesized)
agaaaatgtctttctcttccttttatataaatatcgttagggtgaagcattatggtctaatgattcaaatgttttaaagtttaatgcctagcagagaactgccttaaaaaaaaaaaaaaa

SEQ ID NO: 349805 - DNA, 120 bp, Artificial Sequence
  ENSG00000138794_10 (sequence is synthesized)
aagttcatgttggccatggtgaaagggtttgatatggagaaacaaaatcctcaggaaattagataaataaaaatttataagcatttgtattattttttaataaactgcagggttacacaa

SEQ ID NO: 349806 - DNA, 120 bp, Artificial Sequence
  ENSG00000138794_11 (sequence is synthesized)
aaatctagctgatttaacttgtattttgtcacttttttataaaagtttattgtttgatgtttttaaaggtttttgaaatccaggaattaaatcatcccttaataaaatattcgaaattca

SEQ ID NO: 349807 - DNA, 120 bp, Artificial Sequence
  ENSG00000138794_12 (sequence is synthesized)
agctttaactctgggaaggaccagcccgatccacgggagcccgggcggcgcgcaatcagaaccaactggccccacgctcgggggcagggggcggggccgccgaggaagggccgagggcgg

SEQ ID NO: 349808 - DNA, 120 bp, Artificial Sequence
  ENSG00000138794_13 (sequence is synthesized)
gggcttcagctggaggcggccagttcctggcggccagcacaccccggtatctctcttcttcatccaggaaacctgctgctgtctgtcggtttgagccaaaaccacaataacttttttctg

SEQ ID NO: 349809 - DNA, 120 bp, Artificial Sequence
  ENSG00000138795_0 (sequence is synthesized)
gagaagcagtggggaggcgcagccgctcacctgcggggcagggcgcggaggagggacccgggctgcgcgctctcgggccgaggaaccaggacgcgcccggagcctcgcacgcggccaagc

SEQ ID NO: 349810 - DNA, 120 bp, Artificial Sequence
  ENSG00000138795_1 (sequence is synthesized)
tcggggcgtcccctcccctcggccgggcgaactcaaggggcgcagctctttgctttgacagagctggccggcggaggcgtgcagagcggcgagccggcgagccaggctgagaaactcgag

SEQ ID NO: 349811 - DNA, 120 bp, Artificial Sequence
  ENSG00000138795_2 (sequence is synthesized)
ccgggaacaaagaggggtcggactgagtgtgtgtgtcggctcgagctccgggcagaggcatttgggcccgaggcccccgctgtgactccccgagactccgcagtgccctccactgcggag

SEQ ID NO: 349812 - DNA, 120 bp, Artificial Sequence
  ENSG00000138795_3 (sequence is synthesized)
tccccgcgcttgccggcaaaaactttattcttggcaaacttctctttctcttcccctcctcctcggcccccatcttctgctcctcctccttctctagcagattaaatgagcctcgagaag

SEQ ID NO: 349813 - DNA, 120 bp, Artificial Sequence
  ENSG00000138795_4 (sequence is synthesized)
aaaaaccgaagcgaaagggaagaaaataagaagatctaaaacggacatctccagcgtgggtggctcctttttctttttctttttttcccacccttcaggaagtggacgtttcgttatctt

SEQ ID NO: 349814 - DNA, 120 bp, Artificial Sequence
  ENSG00000138795_5 (sequence is synthesized)
ctgatccttgcaccttcttttggggcaaacggggcccttctgcccagatcccctctcttttctcggaaaacaaactactaagtcggcatccggggtaactacagtggagagggtttccgc

SEQ ID NO: 349815 - DNA, 120 bp, Artificial Sequence
  ENSG00000138795_6 (sequence is synthesized)
ggagacgcgccgccggaccctcctctgcactttggggaggcgtgctccctccagaaccggcgttctccgcgcgcaaatcccggcgacgcggggtcgcggggtggccgccggggcagcctc

SEQ ID NO: 349816 - DNA, 120 bp, Artificial Sequence
  ENSG00000138795_7 (sequence is synthesized)
gtctagcgcgcgccgcgcagacgcccccggagtcgccagctaccgcagccctcgccgcccagtgcccttcggcctcgggggcgggcgcctgcgtcggtctccgcgaagcgggaaagcgcg

SEQ ID NO: 349817 - DNA, 120 bp, Artificial Sequence
  ENSG00000138795_8 (sequence is synthesized)
ccgccgggattcgggcgccgcggcagctgctccggctgccggccggcggccccgcgctcgcccgccccgcttccgcccgctgtcctgctgcacgaacccttccaactctcctttcctccc

SEQ ID NO: 349818 - DNA, 120 bp, Artificial Sequence
  ENSG00000138795_9 (sequence is synthesized)
tcccccacccttgagttacccctctgtctttcctgctgttgcgcgggtgctcccacagcggagcggagattacagagccgccgggatgccccaactctccggaggaggtggcggcggcgg

SEQ ID NO: 349819 - DNA, 120 bp, Artificial Sequence
  ENSG00000138795_10 (sequence is synthesized)
gggggacccggaactctgcgccacggacgagatgatccccttcaaggacgagggcgatcctcagaaggaaaagatcttcgccgagatcagtcatcccgaagaggaaggcgatttagctga

SEQ ID NO: 349820 - DNA, 120 bp, Artificial Sequence
  ENSG00000138795_11 (sequence is synthesized)
catcaagtcttccttggtgaacgagtctgaaatcatcccggccagcaacggacacgaggtggccagacaagcacaaacctctcaggagccctaccacgacaaggccagagaacaccccga

SEQ ID NO: 349821 - DNA, 120 bp, Artificial Sequence
  ENSG00000138795_12 (sequence is synthesized)
tgacggaaagcatccagatggaggcctctacaacaagggaccctcctactcgagttattccgggtacataatgatgccaaatatgaataacgacccatacatgtcaaatggatctctttc

SEQ ID NO: 349822 - DNA, 120 bp, Artificial Sequence
  ENSG00000138795_13 (sequence is synthesized)
tccacccatcccgagaacatcaaataaagtgcccgtggtgcagccatcccatgcggtccatcctctcacccccctcatcacttacagtgacgagcacttttctccaggatcacacccgtc

SEQ ID NO: 349823 - DNA, 120 bp, Artificial Sequence
  ENSG00000138795_14 (sequence is synthesized)
ttggacagatcaccccacctcttggctggcaaggtcagcctgtatatcccatcacgggtggattcaggcaaccctacccatcctcactgtcagtcgacacttccatgtccaggttttccc

SEQ ID NO: 349824 - DNA, 120 bp, Artificial Sequence
  ENSG00000138795_15 (sequence is synthesized)
atcatatgattcccggtcctcctggtccccacacaactggcatccctcatccagctattgtaacacctcaggtcaaacaggaacatccccacactgacagtgacctaatgcacgtgaagc

SEQ ID NO: 349825 - DNA, 120 bp, Artificial Sequence
  ENSG00000138795_16 (sequence is synthesized)
ctcagcatgaacagagaaaggagcaggagccaaaaagacctcacattaagaagcctctgaatgcttttatgttatacatgaaagaaatgagagcgaatgtcgttgctgagtgtactctaa

SEQ ID NO: 349826 - DNA, 120 bp, Artificial Sequence
  ENSG00000138795_17 (sequence is synthesized)
aagaaagtgcagctatcaaccagattcttggcagaaggtggcatgccctctcccgtgaagagcaggctaaatattatgaattagcacggaaagaaagacagctacatatgcagctttatc

SEQ ID NO: 349827 - DNA, 120 bp, Artificial Sequence
  ENSG00000138795_18 (sequence is synthesized)
caggctggtctgcaagagacaattatggtaagaaaaagaagaggaagagagagaaactacaggaatctgcatcaggtacaggtccaagaatgacagctgcctacatctgaaacatggtgg

SEQ ID NO: 349828 - DNA, 120 bp, Artificial Sequence
  ENSG00000138795_19 (sequence is synthesized)
aaaacgaagctcattcccaacgtgcaaagccaaggcagcgaccccaggacctcttctggagatggaagcttgttgaaaacccagactgtctccacggcctgcccagtcgaccccaaagga

SEQ ID NO: 349829 - DNA, 120 bp, Artificial Sequence
  ENSG00000138795_20 (sequence is synthesized)
acactgacatcaattttaccctgaggtcactgctagagacgctgatccataaagacaatcactgccaacccctctttcgtctactgcaagagccaagttccaaaataaagcataaaaagg

SEQ ID NO: 349830 - DNA, 120 bp, Artificial Sequence
  ENSG00000138795_21 (sequence is synthesized)
ttttttaaaaggaaatgtaaaagcacatgagaatgctagcaggctgtggggcagctgagcagcttttctcccctcatatctgcgtgcacttcccagagcatcttgcatccaaacctgtaa

SEQ ID NO: 349831 - DNA, 120 bp, Artificial Sequence
  ENSG00000138795_22 (sequence is synthesized)
cctttcggcaaggacggtaacttggctgcatttgcctgtcatgcgcaactggagccagcaaccagcacatccatcagcaccccagtggaggagttcatggaagagttccctctttgtttc

SEQ ID NO: 349832 - DNA, 120 bp, Artificial Sequence
  ENSG00000138795_23 (sequence is synthesized)
tgcttcatttttctttcttttcttttctcctaaagcttttatttaacagtgcaaaaggatcgtttttttttgcttttttaaacttgaatttttttaatttacactttttagttttaattt

SEQ ID NO: 349833 - DNA, 120 bp, Artificial Sequence
  ENSG00000138795_24 (sequence is synthesized)
tcttgtatattttgctagctatgagcttttaaataaaattgaaagttctggaaaagtttgaaataatgacataaaaagaagccttctttttctgagacagcttgtctggtaagtggcttc

SEQ ID NO: 349834 - DNA, 120 bp, Artificial Sequence
  ENSG00000138795_25 (sequence is synthesized)
tctgtgaattgcctgtaacacatagtggcttctccgcccttgtaaggtgttcagtagagctaaataaatgtaatagccaaacccactctgttggtagcaattggcagccctatttcagtt

SEQ ID NO: 349835 - DNA, 120 bp, Artificial Sequence
  ENSG00000138795_26 (sequence is synthesized)
tattttttcttctgttttcttcttttctttttttaaacagtaaaccttaacagatgcgttcagcagactggtttgcagtgaattttcatttctttccttatcacccccttgttgtaaaaa

SEQ ID NO: 349836 - DNA, 120 bp, Artificial Sequence
  ENSG00000138795_27 (sequence is synthesized)
gcccagcacttgaattgttattactttaaatgttctgtatttgtatctgtttttattagccaattagtgggattttatgccagttgttaaaatgagcattgatgtacccattttttaaaa

SEQ ID NO: 349837 - DNA, 120 bp, Artificial Sequence
  ENSG00000138795_28 (sequence is synthesized)
aagcaaggcacagcctttgcccaaaactgtcatcctaacgtttgtcattccagtttgagttaatgtgctgagcatttttttaaaagaagctttgtaataaaacatttttaaaaattgtca

SEQ ID NO: 349838 - DNA, 120 bp, Artificial Sequence
  ENSG00000138795_29 (sequence is synthesized)
actagtcctgcagggtggaaggcgctttatcgggtcttctggcccgctgcgggcgatagagctggtaacctgagtagagtaaatagagacacgtgggtgctggctagagaaagcgcggag

SEQ ID NO: 349839 - DNA, 120 bp, Artificial Sequence
  ENSG00000138795_30 (sequence is synthesized)
cagggccgcgctggagggctgtttgaagcctagtccagagctggtctagggggcggatggaccctgatacccgacactccactggtcacccttgttccacaactgggaaaccctctggag

SEQ ID NO: 349840 - DNA, 120 bp, Artificial Sequence
  ENSG00000138795_31 (sequence is synthesized)
gaaatccggtagaaaagtcctgacacccgaatgatttaaccaacgccttttccctccaaagaaacttggaggatatacctttttttccttaaatggcatctttctacccccaaaaagaaa

SEQ ID NO: 349841 - DNA, 120 bp, Artificial Sequence
  ENSG00000138795_32 (sequence is synthesized)
gtgtgtggttttgagggcggggacattttgggttttaaacagcgcgtttaagaacacctcagatctgccttctctatcccaatggcagaggtggccagacaagcacaaacctctcaggag

SEQ ID NO: 349842 - DNA, 120 bp, Artificial Sequence
  ENSG00000138795_33 (sequence is synthesized)
ctttgaattaccagcgcacacacatttgtaccattattgtcacaaactctaaggtgattttctttcttttgggtgtggggattcatgatgttaggtggccagacaagcacaaacctctca

SEQ ID NO: 349843 - DNA, 120 bp, Artificial Sequence
  ENSG00000138795_34 (sequence is synthesized)
gatgatgtttccttttgtatccagtttggtttttctccctgtgaaggtctgtaatactagggcagccatgaatgggaaagaatctcatagcctgcaatgggaaggaagcaaaatgggaag

SEQ ID NO: 349844 - DNA, 120 bp, Artificial Sequence
  ENSG00000138795_35 (sequence is synthesized)
ctccacacctgagagttgggggagagcaggagcagggaggctcccagctgacagattgtgtgtgcacacagatggttctccctggaaagttctgctggcagatcctggcattggggaagt

SEQ ID NO: 349845 - DNA, 120 bp, Artificial Sequence
  ENSG00000138795_36 (sequence is synthesized)
gaagtttttctctctcatcaacctctctcactctatccttcctccaacccacccattcccttcttatttaaaaatcattttaaaaaacatgaacagggagatcaaaattaatatgcaggg

SEQ ID NO: 349846 - DNA, 120 bp, Artificial Sequence
  ENSG00000138795_37 (sequence is synthesized)
ctgcaatttaaaaataaatcaaagtttaaatgcttaatattttcattttttgatttttgaaacataaaatatgctattgctattttgcttacttttgtttttttcttccttcctctctgt

SEQ ID NO: 349847 - DNA, 120 bp, Artificial Sequence
  ENSG00000138795_38 (sequence is synthesized)
agccaggcatttgaacacatgttcctccactttccattcatggaaattagatttatgaatggtaacacttgtggagttgaagaaatttcacatcaacaagcaaggtgctaactttattca

SEQ ID NO: 349848 - DNA, 120 bp, Artificial Sequence
  ENSG00000138795_39 (sequence is synthesized)
caattatgtaagcccctcctccataccagtggctctccactctcactcattcgctcttttgcgttcaagaaggaaatgtgttttaggtgtatataatgctggtactacttattttttgga

SEQ ID NO: 349849 - DNA, 120 bp, Artificial Sequence
  ENSG00000138795_40 (sequence is synthesized)
agttaatgaactttgtaataaggatttcatggatatattgcattatgaaagcttcgagctatctttttttttttgctatgggtgctaatgaatgcttttaaataaaatttttgaaataaa

SEQ ID NO: 349850 - DNA, 120 bp, Artificial Sequence
  ENSG00000138796_0 (sequence is synthesized)
gcgtcacggggacgccgggggcgcgcgggctgcagggccgcgtaggtccccgcccccagagtctggctttccgcggctgcccgcctcgcgcgtcttccctgcccgggtctcctcgctgtc

SEQ ID NO: 349851 - DNA, 120 bp, Artificial Sequence
  ENSG00000138796_1 (sequence is synthesized)
ctcctcgctgtcgccgccgctgccacaccatggccttcgtcaccaggcagttcatgcgttccgtgtcctcctcgtccaccgcctcggcctcggccaagaagataatcgtcaagcacgtga

SEQ ID NO: 349852 - DNA, 120 bp, Artificial Sequence
  ENSG00000138796_2 (sequence is synthesized)
cggtcatcggcggcgggctgatgggcgccggcattgcccaggttgctgcagcaactggtcacacagtagtgttggtagaccagacagaggacatcctggcaaaatccaaaaagggaattg

SEQ ID NO: 349853 - DNA, 120 bp, Artificial Sequence
  ENSG00000138796_3 (sequence is synthesized)
aggaaagccttaggaaagtggcaaagaagaagtttgcagaaaaccttaaggccggcgatgaatttgtggagaagaccctgagcaccatagcgaccagcacggatgcagcctccgttgtcc

SEQ ID NO: 349854 - DNA, 120 bp, Artificial Sequence
  ENSG00000138796_4 (sequence is synthesized)
acagcacagacttggtggtggaagccatcgtggagaatctgaaggtgaaaaacgagctcttcaaaaggctggacaagtttgctgctgaacatacaatctttgccagcaacacttcctcct

SEQ ID NO: 349855 - DNA, 120 bp, Artificial Sequence
  ENSG00000138796_5 (sequence is synthesized)
tgcagattacaagcatagctaatgccaccaccagacaagaccgattcgctggcctccatttcttcaacccagtgcctgtcatgaaacttgtggaggtcattaaaacaccaatgaccagcc

SEQ ID NO: 349856 - DNA, 120 bp, Artificial Sequence
  ENSG00000138796_6 (sequence is synthesized)
agaagacatttgaatctttggtagactttagcaaagccctaggaaagcatcctgtttcttgcaaggacactcctgggtttattgtgaaccgcctcctggttccatacctcatggaagcaa

SEQ ID NO: 349857 - DNA, 120 bp, Artificial Sequence
  ENSG00000138796_7 (sequence is synthesized)
tactacgaagttcatcgtggatgggtggcatgaaatggatgcagagaacccattacatcagcccagcccatccttaaataagctggtagcagagaacaagttcggcaagaagactggaga

SEQ ID NO: 349858 - DNA, 120 bp, Artificial Sequence
  ENSG00000138796_8 (sequence is synthesized)
aggattttacaaatacaagtgatgtgcagcttctccggctctgagaagaacacctgagagcgctttccagccagtgccccgagtgcctgtgggaatgctctttggtcagacattccctca

SEQ ID NO: 349859 - DNA, 120 bp, Artificial Sequence
  ENSG00000138796_9 (sequence is synthesized)
cacagtacagtttaataaatgtgcattttgattgtaatctatcgaagtgattattacaccagttacagcagtaatagattctccattaagaaataattcccttttttagtctgttcattt

SEQ ID NO: 349860 - DNA, 120 bp, Artificial Sequence
  ENSG00000138796_10 (sequence is synthesized)
ctgtgtattttctaaacagctttacacccttggtgccttggagcaaacatgttttttgaaccttgtcatttttgtgaagaattgcctagattccttctctcatcaacgggaaagtacttc

SEQ ID NO: 349861 - DNA, 120 bp, Artificial Sequence
  ENSG00000138796_11 (sequence is synthesized)
ctctgagagtgcgagtgcaccatgctcactgttgctgcgtgggagagtcacaagccactggcaagcaagtggtatagtctgtgaagcactgcagcgagcagcacctggatcttgccttta

SEQ ID NO: 349862 - DNA, 120 bp, Artificial Sequence
  ENSG00000138796_12 (sequence is synthesized)
taagaacattttactacctgcagctttgagtcttgccctacattttgggcatgacataagatgtgtctttattcagctcgtcgtgaagatgctgctgctgaatgggtcagcatatctctg

SEQ ID NO: 349863 - DNA, 120 bp, Artificial Sequence
  ENSG00000138796_13 (sequence is synthesized)
tttgcatggtttgcaggaggtcggttttcatggtcattcagttccacagatctgaatgattactgtctgtctgtgtcttttttccatgagaaatcactgttgcaaattgcctataaattg

SEQ ID NO: 349864 - DNA, 120 bp, Artificial Sequence
  ENSG00000138796_14 (sequence is synthesized)
actctactaaaataacaatgtttcagtctgaaaatttgaattgaaaaaaatgtataatataaaattgtaatacactcaaatgattataaaagtaaaagttggtaatttaggcagaagcta

SEQ ID NO: 349865 - DNA, 120 bp, Artificial Sequence
  ENSG00000138796_15 (sequence is synthesized)
cttacagtactgtactaacccatgaaaaatcatgttgttcatgaatcacctgaagaagccatctgttgaggtggactccagcagccaaagagagcaggcttgtgtgtcctgctcctcccc

SEQ ID NO: 349866 - DNA, 120 bp, Artificial Sequence
  ENSG00000138796_16 (sequence is synthesized)
tcttggaccctgacttgttcctggtagaattcttctcatagaatgatgtgaaagaaggagcattgtatactgcaagcttgtccacatgctgtaaagagcaatccgtgcctcctgttctag

SEQ ID NO: 349867 - DNA, 120 bp, Artificial Sequence
  ENSG00000138796_17 (sequence is synthesized)
tttgtagacagggaaactggactcctaagccatgcctaaggccattatgtggatagtctgagacctgaatggagctcaggacaccagctgagtagaagacacgggactgctctctgtcct

SEQ ID NO: 349868 - DNA, 120 bp, Artificial Sequence
  ENSG00000138796_18 (sequence is synthesized)
ggcttttgtctcctgatgaatggctgcattttcataaatgattttaggtacagcttggtaaacacatacctccctaacagaaaatgagggctttacttttgcaagaaatactacagatgg

SEQ ID NO: 349869 - DNA, 120 bp, Artificial Sequence
  ENSG00000138796_19 (sequence is synthesized)
tgaaataaatgataagacagtgagagagcaacctgccaaaatagcaataaggaacctgtttctcaccgggaagttgcattatgtttttattgtttgttgttttgtttttcaagaagcagc

SEQ ID NO: 349870 - DNA, 120 bp, Artificial Sequence
  ENSG00000138796_20 (sequence is synthesized)
atggtttagtgggaagcctgcttgacctccatcttttttttcccctttcttaagctgcccagttattgtatataaaataatcccagttgctgaaatgataacctacctgaaggtaattat

SEQ ID NO: 349871 - DNA, 120 bp, Artificial Sequence
  ENSG00000138796_21 (sequence is synthesized)
tttgattaccttcagtttctccatttgctttagttcctctttagttcccccaaaactcggggactatacttatgcatgactttgcagtttttcttaaggggtagttgtgtcacaaaatgc

SEQ ID NO: 349872 - DNA, 120 bp, Artificial Sequence
  ENSG00000138796_22 (sequence is synthesized)
gttctgtagttttaagtcatctagatttctaaactcatattaataattggatgttatgattgtactttcttacgcagttatgctttgttagtggaagaaagtagtaatggtattgaaaag

SEQ ID NO: 349873 - DNA, 120 bp, Artificial Sequence
  ENSG00000138796_23 (sequence is synthesized)
aacatctgtgcaagacaaaaagatatggaaacagaagtacagggaaaagctaatgattatcttcagcagcataataattaatctacaaagtaatgattcagtcttccatcagagtggcca

SEQ ID NO: 349874 - DNA, 120 bp, Artificial Sequence
  ENSG00000138796_24 (sequence is synthesized)
cggcagctgcagagatgggaactctttgttctcattaaattatcttgttaggtcattccagaactctctctgtgtggtattctaagggctttcagagggtctttctgggtcagttattga

SEQ ID NO: 349875 - DNA, 120 bp, Artificial Sequence
  ENSG00000138796_25 (sequence is synthesized)
agctctttatgaggcatctggacaatatatggcaactacataggacaagggtcagcaaacttctgtaaaggaccagatagtgaatattttcagccatacagtctctgttgcaagtagtca

SEQ ID NO: 349876 - DNA, 120 bp, Artificial Sequence
  ENSG00000138796_26 (sequence is synthesized)
gttctattgttgtagcatgaaaacagccatagacagtatatgcaatatgagtgtggctgtgctccagtaaaacttgacttacaaaaacaggctgtgggctacagtattgtactttaccaa

SEQ ID NO: 349877 - DNA, 120 bp, Artificial Sequence
  ENSG00000138796_27 (sequence is synthesized)
tacttgacatagaagaggggcattaatgtgcctggaatgtgccttcctagtgagacttcatgaggggattgtggtatataggttaagggtatgaactagcccaactgggtttaaatcctg

SEQ ID NO: 349878 - DNA, 120 bp, Artificial Sequence
  ENSG00000138796_28 (sequence is synthesized)
gtgccggcacttattagctgtgtaaccttaggcaagctacttaacctcgctgtgcctcagtgtcctcatgcttcacataaggataattatagtacctctgtcacagggttattatgagga

SEQ ID NO: 349879 - DNA, 120 bp, Artificial Sequence
  ENSG00000138796_29 (sequence is synthesized)
tatgaggaatgaataaattaatatttttaaagtatttagaacagtacctggcacacagtaagtacagtaaataaaatgtgtttaataaataatctgaaaaatatgaatttgattacataa

SEQ ID NO: 349880 - DNA, 76 bp, Artificial Sequence
  ENSG00000138796_30 (sequence is synthesized)
tctgaaaaatatgaatttgattacataaaataaaattactttatttaaagattgtgtctcctgctaggcatggtgg

SEQ ID NO: 349881 - DNA, 64 bp, Artificial Sequence
  ENSG00000138796_31 (sequence is synthesized)
aagagaaaaaaaagactgtgtcttttcacattccaccaatatactgatagcatctgtctctctg

SEQ ID NO: 349882 - DNA, 120 bp, Artificial Sequence
  ENSG00000138796_32 (sequence is synthesized)
agcaaagccctaggaaagcatcctgtttcttgcaaggtgacgcatccaaagaagacattgacactgctatgaaattaggagccggttaccccatgggcccatttgagcttctagattatg

SEQ ID NO: 349883 - DNA, 120 bp, Artificial Sequence
  ENSG00000138796_33 (sequence is synthesized)
agccttaggagttactacacttcaagacctgggtgtctgctggaggaaggaacatgaccctgcggagatgttaagggttgggagagctgagcttggaggctggaagcccagctgggaggc

SEQ ID NO: 349884 - DNA, 120 bp, Artificial Sequence
  ENSG00000138796_34 (sequence is synthesized)
tattgttaaagagaattaatacaagtgtattctggatgatttgaatgtttcatcactaacgagatctgagatatccatccccttatgtgcatttgtgttcatattattatttgtgccaag

SEQ ID NO: 349885 - DNA, 120 bp, Artificial Sequence
  ENSG00000138796_35 (sequence is synthesized)
ggaattctcagtgtctctaggaggggtcgggccgtgcacaatggaggaagcagtgtctgttttctagctttgtgagctcagctgcaccctgagccctggtacctttttcactgttttccc

SEQ ID NO: 349886 - DNA, 120 bp, Artificial Sequence
  ENSG00000138796_36 (sequence is synthesized)
agggcctcctggcttccctgtgggcctctgagaaaggtttctggaactcccaccacccccactacagtcccagccagagcaattgcatggccggcccagattgatatcctggatctctgc

SEQ ID NO: 349887 - DNA, 120 bp, Artificial Sequence
  ENSG00000138796_37 (sequence is synthesized)
ggtgacttcacaaaagataccatttaatgaaaatttactagttttttgtttttctgtctcccaaaacaggacactcctgggtttattgtgaaccgcctcctggttccatacctcatggaa

SEQ ID NO: 349888 - DNA, 120 bp, Artificial Sequence
  ENSG00000138796_38 (sequence is synthesized)
taaaaatcactaggctaggagatcttgaaagttccttaaggttctaaaacttgtgactgacaggtgattagaaatatgtgacaaggccgatatgtggtaaggacagtttttagtagtctg

SEQ ID NO: 349889 - DNA, 120 bp, Artificial Sequence
  ENSG00000138796_39 (sequence is synthesized)
tccttactgagtgatgtcatgatgtactttttgtaaccttaagaatggtgtaaacagttttcctcagtacttgattgacaaagaatgcttttctctgctgtagaaatatcagatttggga

SEQ ID NO: 349890 - DNA, 120 bp, Artificial Sequence
  ENSG00000138796_40 (sequence is synthesized)
cagggtccaggcctctaaattgatctgcattctcctgcctgctttccctccctggtttctggaaaggtagctctcatgtctgcttcaaaggcaaacaagccttaataggactggataaaa

SEQ ID NO: 349891 - DNA, 120 bp, Artificial Sequence
  ENSG00000138796_41 (sequence is synthesized)
agcaagtgtaattgttttcaattacttcattcataaatgctcactcctgagagtgtcattttttaaacaaaacatttacaccagctcttccagagagatgaaagcacatttgcttcctca

SEQ ID NO: 349892 - DNA, 120 bp, Artificial Sequence
  ENSG00000138796_42 (sequence is synthesized)
aaatctgctttaaatattaaaacttttctctatggtttatggaagcaattgcctcacttttgctccaagatcaaaccaacagttctggtttatctatcaacaaatatgcctaattacacc

SEQ ID NO: 349893 - DNA, 120 bp, Artificial Sequence
  ENSG00000138796_43 (sequence is synthesized)
tcaaagaaagcacagagcattttaccctaccttgaaaggcagttgtatgtcttttttttttttttaacaaaatgtaatgttttagaatgtagcatgtgagagatccaccttttaatggtg

SEQ ID NO: 349894 - DNA, 120 bp, Artificial Sequence
  ENSG00000138796_44 (sequence is synthesized)
ttttcctcactgtccatttgatgcattctccaatgcaccaagtatcagatggtaagttgaaagccctcttcttgtctgtggtccctttctgcataggtgcatgccctttagccctcacca

SEQ ID NO: 349895 - DNA, 120 bp, Artificial Sequence
  ENSG00000138796_45 (sequence is synthesized)
tccctggccgcctgtgggctgaagctggaagagcaggacctggcctcaggacatgctcttagcttgctctgggcatgggcttcaacagcctatcattgctggtccctctgcttctttttc

SEQ ID NO: 349896 - DNA, 120 bp, Artificial Sequence
  ENSG00000138796_46 (sequence is synthesized)
caccaccttctcagaatctgcttctgaagttgctgggtgtcctgcctggggtgggtgctgcttccctactgcacactacagtcacaccctaggcctcttaccatgtccccccgcccacca

SEQ ID NO: 349897 - DNA, 120 bp, Artificial Sequence
  ENSG00000138796_47 (sequence is synthesized)
cctgctccctcctctcagccaacacagaggagtgctcagagcatgcccaccgtgccatctccgttcatacagttccaccttgaagcttcaagcatctggaggctccttctcgtctgccac

SEQ ID NO: 349898 - DNA, 120 bp, Artificial Sequence
  ENSG00000138796_48 (sequence is synthesized)
atctgttcatcacttttgattccttcctgtcatgcctgttccacctcttcatcccaccttttccccatcccagtcaggctgccttcatgaggttccttaggtagcagagtaattcacgct

SEQ ID NO: 349899 - DNA, 120 bp, Artificial Sequence
  ENSG00000138796_49 (sequence is synthesized)
actcatgtcttttcctgactggtccccgctactgcacttactgagaaagtatcatattgtccaggaagttgagacaccgcctactgcatctgcccacacaccccctgcacagcctcggca

SEQ ID NO: 349900 - DNA, 120 bp, Artificial Sequence
  ENSG00000138796_50 (sequence is synthesized)
ggagctctgtgactgtttctgaactcatgcaaggagaaattttctgtaccccactgttgatacacctggggttccaggcacatggtttggccaatgctgccttgagtggtgcaggctctc

SEQ ID NO: 349901 - DNA, 120 bp, Artificial Sequence
  ENSG00000138796_51 (sequence is synthesized)
tggaaggatgtgtgtgctgttgtaggtcaggcctcctggatgaccgggcctctgccactaacacttcttgccagtccccatgggatctcgtggaggctcacgcccttttgctctgctgtt

SEQ ID NO: 349902 - DNA, 120 bp, Artificial Sequence
  ENSG00000138796_52 (sequence is synthesized)
tgtccactcattttggcttccatgttgggccttctttcccagtatcccagctccgtcctcactcttcctattgctcttgttcgttcacactgtgactgaggcctgatgcatgccccagtc

SEQ ID NO: 349903 - DNA, 120 bp, Artificial Sequence
  ENSG00000138796_53 (sequence is synthesized)
actgtcactcctgtgagtcagagggacagaggctggataggctgtgtctgacagtggactgctgcccttgccaggcacccactcctaatggccagtgtgggcaggatggtggggccaaat

SEQ ID NO: 349904 - DNA, 120 bp, Artificial Sequence
  ENSG00000138796_54 (sequence is synthesized)
ggtcagctcttctcaggagggctctgctggcaacaggcctgggagcaccatgagcctgccccccagtcaccatgtgacatcttgctcacattgtcgcccctgctcaagacaggctcagtg

SEQ ID NO: 349905 - DNA, 120 bp, Artificial Sequence
  ENSG00000138796_55 (sequence is synthesized)
gttctctggtttcctgccatctacaagctctgccagagagccttccttctggccaacctctgcccctgctgttatcaccgccaactactcctgccattcccacgttgccccacctgagtg

SEQ ID NO: 349906 - DNA, 120 bp, Artificial Sequence
  ENSG00000138796_56 (sequence is synthesized)
tctgcagagctcccagctggacatcatctctgtcatcacaactcttcttgctttggctctcccttgggtcacttgtcactgtcttccctgtggcatggcaggtgttttctttcccttact

SEQ ID NO: 349907 - DNA, 120 bp, Artificial Sequence
  ENSG00000138796_57 (sequence is synthesized)
atactctcttttctggggcactctggctcctcctcatcttcatatgtcccaaggtgctgtgtagggcgggcacataggcagctgctgatgagtaaaaatgctgtttctgagttgttgcta

SEQ ID NO: 349908 - DNA, 120 bp, Artificial Sequence
  ENSG00000138796_58 (sequence is synthesized)
agtgcctctgttgttcatgctaagaatggttggcaggtggtgctgctgagccagacaaagaagcagatgttgggcaagtcccagcccctcagctgtgctgatctggagttcactgaggaa

SEQ ID NO: 349909 - DNA, 120 bp, Artificial Sequence
  ENSG00000138796_59 (sequence is synthesized)
gctttcctttgctgtcttgtctggagttaggggctcttaactggagggaggtaggagagggtgtccaatgaacctcctaaagttgacgcagaatttgggttatatgtgcattttttatgg

SEQ ID NO: 349910 - DNA, 120 bp, Artificial Sequence
  ENSG00000138796_60 (sequence is synthesized)
aaagggtgtctgattgtcagaagtacttgattctaaagaagtttaagaattattagtttaaaacatgattccacatctaactgtcacttggcacaccaatctctgtattttgtttctctg

SEQ ID NO: 349911 - DNA, 120 bp, Artificial Sequence
  ENSG00000138796_61 (sequence is synthesized)
gactttgtagagttatttagatatttttctatcatgtgctgtatcttcatattatttcttgaaataaaacagtcctcaagtgagtctctgaatatggaattacagcgttgcttctagggt

SEQ ID NO: 349912 - DNA, 120 bp, Artificial Sequence
  ENSG00000138796_62 (sequence is synthesized)
taattgtcctgtccttgaatatagatttcattaaatggctttagctgagttgcaaccattatgctgtcagatttctgtcccagggagactgccagtaacaaatgaaccagtacataagca

SEQ ID NO: 349913 - DNA, 120 bp, Artificial Sequence
  ENSG00000138796_63 (sequence is synthesized)
tgttaggttgtgatgagtaattgtggagaagaagatagtaaggggtggcaagagtcttgtcctagtgtcctggccttttctttagtgcagggagttgctttttttatatatgcagggagg

SEQ ID NO: 349914 - DNA, 120 bp, Artificial Sequence
  ENSG00000138796_64 (sequence is synthesized)
agaagaggctgtcagaagtatgacacctgagcagaggcctggaggaagtgagagactgagctccgaagctgtctgagggcagcacctaggcacagggagcatatcccaagcctgaggagc

SEQ ID NO: 349915 - DNA, 120 bp, Artificial Sequence
  ENSG00000138796_65 (sequence is synthesized)
ctgtgaggccggcacttccagcattccagggctctaccagcacagaagctgcggggcttcctaatgaaatcctctgagtagaacccacttttaagcttcatagccacaccccaaatatgc

SEQ ID NO: 349916 - DNA, 120 bp, Artificial Sequence
  ENSG00000138796_66 (sequence is synthesized)
tgtgttccttcccattcctgcctctgcatgtgctgttctctctacctagaatgcccttcctggtctgctcatctcaggattatcttcaccttccaggacccaggcatgggggtggttttg

SEQ ID NO: 349917 - DNA, 120 bp, Artificial Sequence
  ENSG00000138796_67 (sequence is synthesized)
gtgaagccctggcagtgtgagtaaatctctccatctttactcacacagagctgtgtgagtcatgaatcttcaggtcttattatgttgaagtttttggcttacacatctgagttctcccat

SEQ ID NO: 349918 - DNA, 120 bp, Artificial Sequence
  ENSG00000138796_68 (sequence is synthesized)
tatgtcatgagtaccttgagtgcttgtctggtttatctttgtctcattctacatctctggtgcctgctacataatgaatagaagttgaatgaatgaatgaatgaatgacgctgcctatat

SEQ ID NO: 349919 - DNA, 120 bp, Artificial Sequence
  ENSG00000138796_69 (sequence is synthesized)
gattatttttgtttctttgctttcttatggcctaacactcaaatcatgatttctcaggcgtctctaatcctaattagtgtagttattagtaatgtcaaccataataaataattgtggtgt

SEQ ID NO: 349920 - DNA, 120 bp, Artificial Sequence
  ENSG00000138796_70 (sequence is synthesized)
attttagtcaccttaaaatgccttgaaatcctttggaattactttagtaatttatttgcttttaaaaatatatcttctttatcgatgtttaagtagtttctctctgagtgtcttaacatt

SEQ ID NO: 349921 - DNA, 120 bp, Artificial Sequence
  ENSG00000138796_71 (sequence is synthesized)
tttccctcttttctttagctttgatctgattgacttcttaatgctttggaacaaaattctagatagccacctgttgcagactattctacttttctgatttcaaagaaagggaacagattg

SEQ ID NO: 349922 - DNA, 120 bp, Artificial Sequence
  ENSG00000138796_72 (sequence is synthesized)
ttctccataaaggcctcttggggccaaaggacatagtaaatttccaagggaaaagcacattgatccttgtcgtagtctactcaacagacttccaaacgtgtggtgattctaactcgggtt

SEQ ID NO: 349923 - DNA, 120 bp, Artificial Sequence
  ENSG00000138796_73 (sequence is synthesized)
tgggcttttctttaaaaggtatcttgactaaaaggtttgtgtgaaatgtgatgccaggggaatactccttacttgtaaaacccaaaaaactgggggaaagaatacatacaataactatac

SEQ ID NO: 349924 - DNA, 120 bp, Artificial Sequence
  ENSG00000138796_74 (sequence is synthesized)
atacaaaagcagaaagcttagttttctttttaagaaagtttatttataaatcaaaaatatgctgtagcattaaattatactttaataaatgattccagagttggaaaatcccaatgtatt

SEQ ID NO: 349925 - DNA, 120 bp, Artificial Sequence
  ENSG00000138796_75 (sequence is synthesized)
tgaaagtagctgaagtttcaggcatggagacttctgtctccatgaacagggtatcagtactccaaaattcacctcagtggtgcgtagctttgaaaatcttgggccacacactgtggctta

SEQ ID NO: 349926 - DNA, 120 bp, Artificial Sequence
  ENSG00000138796_76 (sequence is synthesized)
cactgtggcttacacctgtaatcttagcactttgggaagctgagacgggaggatcacttgaggttgggagtttgagcccagactggccaaatggtgaaaccctatctctactaaaaatat

SEQ ID NO: 349927 - DNA, 67 bp, Artificial Sequence
  ENSG00000138796_77 (sequence is synthesized)
aaaccctatctctactaaaaatataaatattagccttgtgtgggggcgcacacctgtagtctcagcc

SEQ ID NO: 349928 - DNA, 120 bp, Artificial Sequence
  ENSG00000138796_78 (sequence is synthesized)
caagactctgtctcaaaaaaaacaaagtcttatgacctctttggcatgtactttagagaggaaatcttacccaagccagaaagtctcagtctaggcattttttttattgtgcaagcatat

SEQ ID NO: 349929 - DNA, 120 bp, Artificial Sequence
  ENSG00000138796_79 (sequence is synthesized)
aagcatataaaattctagtaattctggggctaatcctgtgatagggagaattcaaggaaaggtggtggtgacccagtgctgccgttttctccttaggtgacgcatccaaagaagacattg

SEQ ID NO: 349930 - DNA, 120 bp, Artificial Sequence
  ENSG00000138796_80 (sequence is synthesized)
gttggcaaaaatgcgtatttttttgattactagtgagtttatttatttatttttttatttttcgagatggagtcttgcagtgtctcccaggttggattgcagtggcgcaatctcagctca

SEQ ID NO: 349931 - DNA, 120 bp, Artificial Sequence
  ENSG00000138796_81 (sequence is synthesized)
acaggtgtgagccactgcgactggccagtgagtttaaatatttaatgagtcttggcactttttccttattgagctctatgagctttttctgtagaagatattaactgttggagcttcatg

SEQ ID NO: 349932 - DNA, 120 bp, Artificial Sequence
  ENSG00000138796_82 (sequence is synthesized)
ttttctgtagaagatattaactgttggagcttcatgttctcaggtaccctatcttgagtctatagtgaaccttttgaagttgaaaagagtatttttgcctcaattataaaatctgtattg

SEQ ID NO: 349933 - DNA, 120 bp, Artificial Sequence
  ENSG00000138796_83 (sequence is synthesized)
ttccataatcttaattaagctgataaaacttgtttgtgcatctttgtgctcatgtggcaatagatggggttagggcttggtttcagtttgcctagggttaaaggaggttcacatcctttg

SEQ ID NO: 349934 - DNA, 120 bp, Artificial Sequence
  ENSG00000138796_84 (sequence is synthesized)
tgttactgtccagtttccccgcatgcagtcaggttagctctgtgaggagtgcctggtcatctgtaattcagacattaaggaagtacctggtgtgtgctagaaacagaatgcagagttcag

SEQ ID NO: 349935 - DNA, 120 bp, Artificial Sequence
  ENSG00000138796_85 (sequence is synthesized)
gccagggtgaggatttctgccctcaggaagatcacagccttttgacaaaagaggaggcaccatttgcctagtggaaatcagcttcaacaaaaaaatcacctgcttttctctacaagtccc

SEQ ID NO: 349936 - DNA, 120 bp, Artificial Sequence
  ENSG00000138796_86 (sequence is synthesized)
cggaagagatcagtagataaaatccaaatcccacacctgtcctccagagagatgattattgttagttactgagaagggaaatggatgaaaggcatatgtggcacaggggtcaccgcagga

SEQ ID NO: 349937 - DNA, 120 bp, Artificial Sequence
  ENSG00000138796_87 (sequence is synthesized)
tgcagaggtcttagggggtgtgccgtgaaaggccagctctctgtcagaggctctgctcctttgtcggagcacgtgccctcaagtcagctccactgcagtgtgcgctggaacctgagaagt

SEQ ID NO: 349938 - DNA, 120 bp, Artificial Sequence
  ENSG00000138796_88 (sequence is synthesized)
tgctgagtagccgaggagtggctccaaggagcctggaaagcagtcctcctttgaggaccattcaaggtggagtgtgacgttttgtcgattcttgaaagggaattgggaggaaagaggagg

SEQ ID NO: 349939 - DNA, 120 bp, Artificial Sequence
  ENSG00000138796_89 (sequence is synthesized)
aataaagggatgggtgtagggctgtgtgtacagcattttatgtgttttctgatttatcttcacaactttgagacaaactgtcacccccagttcacagatgatgaaacagattcagagtga

SEQ ID NO: 349940 - DNA, 120 bp, Artificial Sequence
  ENSG00000138796_90 (sequence is synthesized)
cagaaggaccaagagagtattcaagattgaacccaaatctgtctctcccaaagccatgctcttccaggtcacacctgtgccttgatctgtctttatgtcaggatctgtgcagtggggcat

SEQ ID NO: 349941 - DNA, 120 bp, Artificial Sequence
  ENSG00000138796_91 (sequence is synthesized)
ctgggtttgaatgtttttttaagtactatgattgttggataaattgtcatatgagatagaaataaggccatgctgcaaattttgaaaatgtacagcttgataaatgggggcaaacatgat

SEQ ID NO: 349942 - DNA, 120 bp, Artificial Sequence
  ENSG00000138796_92 (sequence is synthesized)
gcacgtgacggtcatcggcggcgggctgatgggcgccggcattgcccagcctcaaatcaacatgtaaccaaaagctgtgaatgaataatccaaacttgaagaaccccagattttattcag

SEQ ID NO: 349943 - DNA, 120 bp, Artificial Sequence
  ENSG00000138796_93 (sequence is synthesized)
gaggagtaactggaagccataaccatgaacttccatatctgtcataggaaagaggttggcctcagcagcaatgagggataattctttcaagaaaggaatgaagagagaagttagatggaa

SEQ ID NO: 349944 - DNA, 120 bp, Artificial Sequence
  ENSG00000138798_0 (sequence is synthesized)
caaaaagagaaactgttgggagaggaatcgtatctccatatttcttctttcagccccaatccaagggttgtagctggaactttccatcagttcttcctttctttttcctctctaagcctt

SEQ ID NO: 349945 - DNA, 120 bp, Artificial Sequence
  ENSG00000138798_1 (sequence is synthesized)
tgccttgctctgtcacagtgaagtcagccagagcagggctgttaaactctgtgaaatttgtcataagggtgtcaggtatttcttactggcttccaaagaaacatagataaagaaatcttt

SEQ ID NO: 349946 - DNA, 120 bp, Artificial Sequence
  ENSG00000138798_2 (sequence is synthesized)
cctgtggcttcccttggcaggctgcattcagaaggtctctcagttgaagaaagagcttggaggacaacagcacaacaggagagtaaaagatgccccagggctgaggcctccgctcaggca

SEQ ID NO: 349947 - DNA, 120 bp, Artificial Sequence
  ENSG00000138798_3 (sequence is synthesized)
gccgcatctggggtcaatcatactcaccttgcccgggccatgctccagcaaaatcaagctgttttcttttgaaagttcaaactcatcaagattatgctgctcactcttatcattctgttg

SEQ ID NO: 349948 - DNA, 120 bp, Artificial Sequence
  ENSG00000138798_4 (sequence is synthesized)
ccagtagtttcaaaatttagttttgttagtctctcagcaccgcagcactggagctgtcctgaaggtactctcgcaggaaatgggaattctacttgtgtgggtcctgcacccttcttaatt

SEQ ID NO: 349949 - DNA, 120 bp, Artificial Sequence
  ENSG00000138798_5 (sequence is synthesized)
ttctcccatggaaatagtatctttaggattgacacagaaggaaccaattatgagcaattggtggtggatgctggtgtctcagtgatcatggattttcattataatgagaaaagaatctat

SEQ ID NO: 349950 - DNA, 120 bp, Artificial Sequence
  ENSG00000138798_6 (sequence is synthesized)
tgggtggatttagaaagacaacttttgcaaagagtttttctgaatgggtcaaggcaagagagagtatgtaatatagagaaaaatgtttctggaatggcaataaattggataaatgaagaa

SEQ ID NO: 349951 - DNA, 120 bp, Artificial Sequence
  ENSG00000138798_7 (sequence is synthesized)
gttatttggtcaaatcaacaggaaggaatcattacagtaacagatatgaaaggaaataattcccacattcttttaagtgctttaaaatatcctgcaaatgtagcagttgatccagtagaa

SEQ ID NO: 349952 - DNA, 120 bp, Artificial Sequence
  ENSG00000138798_8 (sequence is synthesized)
aggtttatattttggtcttcagaggtggctggaagcctttatagagcagatctcgatggtgtgggagtgaaggctctgttggagacatcagagaaaataacagctgtgtcattggatgtg

SEQ ID NO: 349953 - DNA, 120 bp, Artificial Sequence
  ENSG00000138798_9 (sequence is synthesized)
cttgataagcggctgttttggattcagtacaacagagaaggaagcaattctcttatttgctcctgtgattatgatggaggttctgtccacattagtaaacatccaacacagcataatttg

SEQ ID NO: 349954 - DNA, 120 bp, Artificial Sequence
  ENSG00000138798_10 (sequence is synthesized)
tttgcaatgtccctttttggtgaccgtatcttctattcaacatggaaaatgaagacaatttggatagccaacaaacacactggaaaggacatggttagaattaacctccattcatcattt

SEQ ID NO: 349955 - DNA, 120 bp, Artificial Sequence
  ENSG00000138798_11 (sequence is synthesized)
gtaccacttggtgaactgaaagtagtgcatccacttgcacaacccaaggcagaagatgacacttgggagcctgagcagaaactttgcaaattgaggaaaggaaactgcagcagcactgtg

SEQ ID NO: 349956 - DNA, 120 bp, Artificial Sequence
  ENSG00000138798_12 (sequence is synthesized)
tgtgggcaagacctccagtcacacttgtgcatgtgtgcagagggatacgccctaagtcgagaccggaagtactgtgaagatgttaatgaatgtgctttttggaatcatggctgtactctt

SEQ ID NO: 349957 - DNA, 120 bp, Artificial Sequence
  ENSG00000138798_13 (sequence is synthesized)
gggtgtaaaaacacccctggatcctattactgcacgtgccctgtaggatttgttctgcttcctgatgggaaacgatgtcatcaacttgtttcctgtccacgcaatgtgtctgaatgcagc

SEQ ID NO: 349958 - DNA, 120 bp, Artificial Sequence
  ENSG00000138798_14 (sequence is synthesized)
catgactgtgttctgacatcagaaggtcccttatgtttctgtcctgaaggctcagtgcttgagagagatgggaaaacatgtagcggttgttcctcacccgataatggtggatgtagccag

SEQ ID NO: 349959 - DNA, 120 bp, Artificial Sequence
  ENSG00000138798_15 (sequence is synthesized)
ctctgcgttcctcttagcccagtatcctgggaatgtgattgctttcctgggtatgacctacaactggatgaaaaaagctgtgcagcttcaggaccacaaccatttttgctgtttgccaat

SEQ ID NO: 349960 - DNA, 120 bp, Artificial Sequence
  ENSG00000138798_16 (sequence is synthesized)
tctcaagatattcgacacatgcattttgatggaacagactatggaactctgctcagccagcagatgggaatggtttatgccctagatcatgaccctgtggaaaataagatatactttgcc

SEQ ID NO: 349961 - DNA, 120 bp, Artificial Sequence
  ENSG00000138798_17 (sequence is synthesized)
catacagccctgaagtggatagagagagctaatatggatggttcccagcgagaaaggcttattgaggaaggagtagatgtgccagaaggtcttgctgtggactggattggccgtagattc

SEQ ID NO: 349962 - DNA, 120 bp, Artificial Sequence
  ENSG00000138798_18 (sequence is synthesized)
tattggacagacagagggaaatctctgattggaaggagtgatttaaatgggaaacgttccaaaataatcactaaggagaacatctctcaaccacgaggaattgctgttcatccaatggcc

SEQ ID NO: 349963 - DNA, 120 bp, Artificial Sequence
  ENSG00000138798_19 (sequence is synthesized)
aagagattattctggactgatacagggattaatccacgaattgaaagttcttccctccaaggccttggccgtctggttatagccagctctgatctaatctggcccagtggaataacgatt

SEQ ID NO: 349964 - DNA, 120 bp, Artificial Sequence
  ENSG00000138798_20 (sequence is synthesized)
gacttcttaactgacaagttgtactggtgcgatgccaagcagtctgtgattgaaatggccaatctggatggttcaaaacgccgaagacttacccagaatgatgtaggtcacccatttgct

SEQ ID NO: 349965 - DNA, 120 bp, Artificial Sequence
  ENSG00000138798_21 (sequence is synthesized)
gtagcagtgtttgaggattatgtgtggttctcagattgggctatgccatcagtaatgagagtaaacaagaggactggcaaagatagagtacgtctccaaggcagcatgctgaagccctca

SEQ ID NO: 349966 - DNA, 120 bp, Artificial Sequence
  ENSG00000138798_22 (sequence is synthesized)
tcactggttgtggttcatccattggcaaaaccaggagcagatccctgcttatatcaaaacggaggctgtgaacatatttgcaaaaagaggcttggaactgcttggtgttcgtgtcgtgaa

SEQ ID NO: 349967 - DNA, 120 bp, Artificial Sequence
  ENSG00000138798_23 (sequence is synthesized)
ggttttatgaaagcctcagatgggaaaacgtgtctggctctggatggtcatcagctgttggcaggtggtgaagttgatctaaagaaccaagtaacaccattggacatcttgtccaagact

SEQ ID NO: 349968 - DNA, 120 bp, Artificial Sequence
  ENSG00000138798_24 (sequence is synthesized)
agagtgtcagaagataacattacagaatctcaacacatgctagtggctgaaatcatggtgtcagatcaagatgactgtgctcctgtgggatgcagcatgtatgctcggtgtatttcagag

SEQ ID NO: 349969 - DNA, 120 bp, Artificial Sequence
  ENSG00000138798_25 (sequence is synthesized)
ggagaggatgccacatgtcagtgtttgaaaggatttgctggggatggaaaactatgttctgatatagatgaatgtgagatgggtgtcccagtgtgcccccctgcctcctccaagtgcatc

SEQ ID NO: 349970 - DNA, 120 bp, Artificial Sequence
  ENSG00000138798_26 (sequence is synthesized)
gctcagaaggctaccaaggagatgggattcactgtcttgatattgatgagtgccaactgggggagcacagctgtggagagaatgccagctgcacaaatacagagggaggctatacctgca

SEQ ID NO: 349971 - DNA, 120 bp, Artificial Sequence
  ENSG00000138798_27 (sequence is synthesized)
tgtgtgctggacgcctgtctgaaccaggactgatttgccctgactctactccaccccctcacctcagggaagatgaccaccactattccgtaagaaatagtgactctgaatgtcccctgt

SEQ ID NO: 349972 - DNA, 120 bp, Artificial Sequence
  ENSG00000138798_28 (sequence is synthesized)
cccacgatgggtactgcctccatgatggtgtgtgcatgtatattgaagcattggacaagtatgcatgcaactgtgttgttggctacatcggggagcgatgtcagtaccgagacctgaagt

SEQ ID NO: 349973 - DNA, 120 bp, Artificial Sequence
  ENSG00000138798_29 (sequence is synthesized)
ggtgggaactgcgccacgctggccacgggcagcagcagaaggtcatcgtggtggctgtctgcgtggtggtgcttgtcatgctgctcctcctgagcctgtggggggcccactactacagga

SEQ ID NO: 349974 - DNA, 120 bp, Artificial Sequence
  ENSG00000138798_30 (sequence is synthesized)
ctcagaagctgctatcgaaaaacccaaagaatccttatgaggagtcgagcagagatgtgaggagtcgcaggcctgctgacactgaggatgggatgtcctcttgccctcaaccttggtttg

SEQ ID NO: 349975 - DNA, 120 bp, Artificial Sequence
  ENSG00000138798_31 (sequence is synthesized)
tggttataaaagaacaccaagacctcaagaatgggggtcaaccagtggctggtgaggatggccaggcagcagatgggtcaatgcaaccaacttcatggaggcaggagccccagttatgtg

SEQ ID NO: 349976 - DNA, 120 bp, Artificial Sequence
  ENSG00000138798_32 (sequence is synthesized)
gaatgggcacagagcaaggctgctggattccagtatccagtgataagggctcctgtccccaggtaatggagcgaagctttcatatgccctcctatgggacacagacccttgaagggggtg

SEQ ID NO: 349977 - DNA, 120 bp, Artificial Sequence
  ENSG00000138798_33 (sequence is synthesized)
tcgagaagccccattctctcctatcagctaacccattatggcaacaaagggccctggacccaccacaccaaatggagctgactcagtgaaaactggaattaaaaggaaagtcaagaagaa

SEQ ID NO: 349978 - DNA, 120 bp, Artificial Sequence
  ENSG00000138798_34 (sequence is synthesized)
tgaactatgtcgatgcacagtatcttttctttcaaaagtagagcaaaactataggttttggttccacaatctctacgactaatcacctactcaatgcctggagacagatacgtagttgtg

SEQ ID NO: 349979 - DNA, 120 bp, Artificial Sequence
  ENSG00000138798_35 (sequence is synthesized)
cttttgtttgctcttttaagcagtctcactgcagtcttatttccaagtaagagtactgggagaatcactaggtaacttattagaaacccaaattgggacaacagtgctttgtaaattgtg

SEQ ID NO: 349980 - DNA, 120 bp, Artificial Sequence
  ENSG00000138798_36 (sequence is synthesized)
ttgtcttcagcagtcaatacaaatagatttttgtttttgttgttcctgcagccccagaagaaattaggggttaaagcagacagtcacactggtttggtcagttacaaagtaatttctttg

SEQ ID NO: 349981 - DNA, 120 bp, Artificial Sequence
  ENSG00000138798_37 (sequence is synthesized)
atctggacagaacatttatatcagtttcatgaaatgattggaatattacaataccgttaagatacagtgtaggcatttaactcctcattggcgtggtccatgctgatgattttgcaaaat

SEQ ID NO: 349982 - DNA, 120 bp, Artificial Sequence
  ENSG00000138798_38 (sequence is synthesized)
gagttgtgatgaatcaatgaaaaatgtaatttagaaactgatttcttcagaattagatggcttattttttaaaatatttgaatgaaaacattttatttttaaaatattacacaggaggct

SEQ ID NO: 349983 - DNA, 120 bp, Artificial Sequence
  ENSG00000138798_39 (sequence is synthesized)
tcggagtttcttagtcattactgtccttttcccctacagaattttccctcttggtgtgattgcacagaatttgtatgtattttcagttacaagattgtaagtaaattgcctgatttgttt

SEQ ID NO: 349984 - DNA, 120 bp, Artificial Sequence
  ENSG00000138798_40 (sequence is synthesized)
tcattatagacaacgatgaatttcttctaattatttaaataaaatcaccaaaaacataaacattttattgtatgcctgattaagtagttaattatagtctaaggcagtactagagttgaa

SEQ ID NO: 349985 - DNA, 120 bp, Artificial Sequence
  ENSG00000138798_41 (sequence is synthesized)
ccaaaatgatttgtcaagcttgctgatgtttctgtttttcgttttttttttttttccggagagaggataggatctcactctgttatccaggctggagtgtgcaatggcacaatcatagct

SEQ ID NO: 349986 - DNA, 120 bp, Artificial Sequence
  ENSG00000138798_42 (sequence is synthesized)
gcaatcctcctgcctcagcctcccgagtaactaggaccacaggcacaggccaccatgcctggctaaggtttttatttttattttttgtagacatggggatcacacaatgttgcccaggct

SEQ ID NO: 349987 - DNA, 120 bp, Artificial Sequence
  ENSG00000138798_43 (sequence is synthesized)
ggtcttgaactcctggcctcaagcaaggtcgtgctggtaattttgcaaaatgaattgtgattgactttcagcctcccaacgtattagattataggcattagccatggtgcccagccttgt

SEQ ID NO: 349988 - DNA, 120 bp, Artificial Sequence
  ENSG00000138798_44 (sequence is synthesized)
aggcattagccatggtgcccagccttgtaacttttaaaaaaattttttaatctacaactctgtagattaaaatttcacatggtgttctaattaaatatttttcttgcagccaagatattg

SEQ ID NO: 349989 - DNA, 120 bp, Artificial Sequence
  ENSG00000138798_45 (sequence is synthesized)
ttactacagataacacaacctgatatggtaactttaaattttgggggctttgaatcattcagtttatgcattaactagtccctttgtttatctttcatttctcaaccccttgtactttgg

SEQ ID NO: 349990 - DNA, 120 bp, Artificial Sequence
  ENSG00000138798_46 (sequence is synthesized)
tgataccagacatcagaataaaaagaaattgaagtacctgttttcaaatggatactttataggaattttggtaaagatttggtgatgggaggatgacttgaggtttgtggatattagtta

SEQ ID NO: 349991 - DNA, 120 bp, Artificial Sequence
  ENSG00000138798_47 (sequence is synthesized)
attattcagtatgatacctcacccagctaatttagatttttctatattcggttttgctttcattgacaatatcctggaggatcagaagacttgtctatttctgctgagtcactggcctca

SEQ ID NO: 349992 - DNA, 120 bp, Artificial Sequence
  ENSG00000138798_48 (sequence is synthesized)
gaaaaataataaccataatttcccccaaggttttctttacctaagtgtgaatattttttcttcctccaaaagctcacttttgggtttagattaaatttttgtattttagcacctttttct

SEQ ID NO: 349993 - DNA, 120 bp, Artificial Sequence
  ENSG00000138798_49 (sequence is synthesized)
tttaggggttcaatgatgacaaaagaaatgacatgagaacacggctacccataacataccattatctttgtaccagaaaaatccttgtttccttcttaatgactctggtaccttagaaac

SEQ ID NO: 349994 - DNA, 120 bp, Artificial Sequence
  ENSG00000138798_50 (sequence is synthesized)
tgggaccctgctaagtccttgactaggctatctaccagctcctggtcggattaaagaaaaaacacactttgtgttttttaatcaccaaggcaccctgcagagatatcttcttcttgcaac

SEQ ID NO: 349995 - DNA, 120 bp, Artificial Sequence
  ENSG00000138798_51 (sequence is synthesized)
ttcacatctttatcagtaatgtcctctttcctttaaaaattcaagttttaagaacagcattttcatgtaaaaacttgatttgtgttttttccagactgaatacttttcctccctaactct

SEQ ID NO: 349996 - DNA, 120 bp, Artificial Sequence
  ENSG00000138798_52 (sequence is synthesized)
catcgtctcattgcgcgcaacgcctgattgagcttctgtttgactaaatatcacctactatgtaaaaaatgagcatattggcctcttttctagcatctaataaaggcttaatacactgta

SEQ ID NO: 349997 - DNA, 120 bp, Artificial Sequence
  ENSG00000138798_53 (sequence is synthesized)
atcttagaatcagtggctccttgggggaactcttctgaaatagctattgatataccctctatttagatacactgcatttctctccctaaaagctatagctccctaaaagcaagctgtaga

SEQ ID NO: 349998 - DNA, 120 bp, Artificial Sequence
  ENSG00000138798_54 (sequence is synthesized)
cagtgataagggctcctgtccccagaattttccctcttggtgtgattgcacagaatttgtatgtattttcagttacaagattgtaagtaaattgcctgatttgttttcattatagacaac

SEQ ID NO: 349999 - DNA, 120 bp, Artificial Sequence
  ENSG00000138798_55 (sequence is synthesized)
gtgtgaatatctacaggaactctttattgtctataaatagactttattttaaacagaaaaccagtaattaaaaattatttctgcttgtgttggttgtcattgggaagtattttgtttaaa

SEQ ID NO: 350000 - DNA, 120 bp, Artificial Sequence
  ENSG00000138798_56 (sequence is synthesized)
gcccattctctttggcttaagataagtataatttaaaattttatgtatttataagattctctaaaaattaaagatatacttcacaataagtgatatgcttatgcacaaccttagacttta

SEQ ID NO: 350001 - DNA, 120 bp, Artificial Sequence
  ENSG00000138798_57 (sequence is synthesized)
tcatccttttacttcaggggtatttattgacacattacaggaactgaagatacagtggagggtaaaacaaatatgatatctgcaaagccaaggaatctagtgcagaacacatacattact

SEQ ID NO: 350002 - DNA, 120 bp, Artificial Sequence
  ENSG00000138798_58 (sequence is synthesized)
ggttacacgtatctgggaagcagcctagttcgaatttagttgcaggtgtgcctatctccaaagtcaagctcttaacaccctgtacaacctaaagactagtgccatttgtatatattccac

SEQ ID NO: 350003 - DNA, 120 bp, Artificial Sequence
  ENSG00000138798_59 (sequence is synthesized)
cacacaaacacacacacaccctctacctcacagaaccttggaaagagtgaaacactgtctggaaagcattttgagttctgcagaaaagactgccttaaacatctaaagttatgttcctag

SEQ ID NO: 350004 - DNA, 120 bp, Artificial Sequence
  ENSG00000138798_60 (sequence is synthesized)
ttatcttcatatttcttctctcccacacaagtacttaaattttagtagcaaaagcagttagttgtccctgatcatcactgagtgggctgagtattttgttttgttgtgagattgtctcaa

SEQ ID NO: 350005 - DNA, 120 bp, Artificial Sequence
  ENSG00000138798_61 (sequence is synthesized)
gagaaaaaagtgggcttcgggatgctggggaatctgggctctggctaagtttgcctccgtgagagatgcagctgtagacgttgtagggaggtaagacctcttaagaatcaggaaaagatt

SEQ ID NO: 350006 - DNA, 120 bp, Artificial Sequence
  ENSG00000138801_0 (sequence is synthesized)
ctcttgctaccctcccggcgcagagaaccccggctgctcagcgcgctccgcggtcatggagatccccgggagcctgtgcaagaaagtcaaactgagcaataacgcgcagaactggggaat

SEQ ID NO: 350007 - DNA, 120 bp, Artificial Sequence
  ENSG00000138801_1 (sequence is synthesized)
gcagagagcaaccaatgtcacctaccaagcccatcatgtcagcaggaacaagagaggtcaggtggtggggaccagaggtggctttcgtggttgcacagtttggctaacaggcttgtctgg

SEQ ID NO: 350008 - DNA, 120 bp, Artificial Sequence
  ENSG00000138801_2 (sequence is synthesized)
agcgggaaagactactgtgagcatggccttggaggagtacctggtttgtcatggtattccatgctacactctggatggtgacaatattcgtcaaggtctcaataaaaatcttggctttag

SEQ ID NO: 350009 - DNA, 120 bp, Artificial Sequence
  ENSG00000138801_3 (sequence is synthesized)
tcctgaagacagagaagagaatgttcgacgcatcgcagaagttgctaaactgtttgcagatgctggcttagtgtgcatcacaagtttcatatcaccttacactcaggatcgcaacaatgc

SEQ ID NO: 350010 - DNA, 120 bp, Artificial Sequence
  ENSG00000138801_4 (sequence is synthesized)
aaggcaaattcatgaaggtgcaagtttaccgttttttgaagtatttgttgatgctcctctgcatgtttgtgaacagagggatgtcaaaggactctacaaaaaagcccgggcaggagaaat

SEQ ID NO: 350011 - DNA, 120 bp, Artificial Sequence
  ENSG00000138801_5 (sequence is synthesized)
taaaggtttcactgggatcgattctgaatatgaaaagccagaggcccctgagttggtgctgaaaacagactcctgtgatgtaaatgactgtgtccagcaagttgtggaacttctacagga

SEQ ID NO: 350012 - DNA, 120 bp, Artificial Sequence
  ENSG00000138801_6 (sequence is synthesized)
acgggatattgtacctgtggatgcatcttatgaagtaaaagaactatatgtgccagaaaataaacttcatttggcaaaaacagatgcggaaacattaccagcactgaaaattaataaagt

SEQ ID NO: 350013 - DNA, 120 bp, Artificial Sequence
  ENSG00000138801_7 (sequence is synthesized)
ggatatgcagtgggtgcaggttttggcagaaggttgggcaaccccattgaatggctttatgagagagagggagtacttgcagtgccttcattttgattgtcttctggatggaggtgtcat

SEQ ID NO: 350014 - DNA, 120 bp, Artificial Sequence
  ENSG00000138801_8 (sequence is synthesized)
taacttgtcagtacctatagttctgactgcgactcatgaagataaagagaggctggacggctgtacagcatttgctctgatgtatgagggccgccgtgtggccattcttcgcaatccaga

SEQ ID NO: 350015 - DNA, 120 bp, Artificial Sequence
  ENSG00000138801_9 (sequence is synthesized)
gttttttgagcacaggaaagaggagcgctgtgccagacagtggggaacgacatgcaagaaccacccctatattaagatggtgatggaacaaggagattggctgattggaggagatcttca

SEQ ID NO: 350016 - DNA, 120 bp, Artificial Sequence
  ENSG00000138801_10 (sequence is synthesized)
tacgcaacccagtgcacaatggacatgccctgttaatgcaggatacccataagcaacttctagagaggggctaccggcgccctgtcctcctcctccaccctctgggtggctggacaaagg

SEQ ID NO: 350017 - DNA, 120 bp, Artificial Sequence
  ENSG00000138801_11 (sequence is synthesized)
atgacgatgttcctttgatgtggcgtatgaagcagcatgctgcagtgttggaggaaggagttctgaatcctgagacgacagtggtggccatcttcccatctcccatgatgtatgctggac

SEQ ID NO: 350018 - DNA, 120 bp, Artificial Sequence
  ENSG00000138801_12 (sequence is synthesized)
caactgaggtccagtggcattgcagagcacggatggttgcaggagccaacttttacattgttggacgagaccctgctggcatgcctcatccagaaacagggaaggatctttatgagccaa

SEQ ID NO: 350019 - DNA, 120 bp, Artificial Sequence
  ENSG00000138801_13 (sequence is synthesized)
gtcatggtgccaaagtgctgacgatggcccctggtttaatcactttggaaatagttccctttcgagttgcagcttacaacaagaaaaagaagcgtatggactactatgactctgaacacc

SEQ ID NO: 350020 - DNA, 120 bp, Artificial Sequence
  ENSG00000138801_14 (sequence is synthesized)
atgaagactttgaatttatttcaggaacacgaatgcgcaaacttgctcgagaaggccagaaaccacctgaaggtttcatggctcccaaggcttggaccgtgctgacagaatactacaaat

SEQ ID NO: 350021 - DNA, 120 bp, Artificial Sequence
  ENSG00000138801_15 (sequence is synthesized)
ccttggagaaagcttaggctgttaacccagtcactccacctttgacacattactagtaacaagaggggaccacatagtctctgttggcatttctttgtggtgtctgtctggacatgcttc

SEQ ID NO: 350022 - DNA, 120 bp, Artificial Sequence
  ENSG00000138801_16 (sequence is synthesized)
ctaaaaacagaccattttccttaacttgcatcagttttggtctgccttatgagttctgttttgaacaagtgtaacacactgatggttttaatgtatcttttccacttattatagttatat

SEQ ID NO: 350023 - DNA, 120 bp, Artificial Sequence
  ENSG00000138801_17 (sequence is synthesized)
tcctacaatacaattttaaaattgtctttttatattatatttatgcttctgtgtcatgattttttcaagctgttatattagttgtaaccagtagtattcacattaaatcttgcttttttt

SEQ ID NO: 350024 - DNA, 120 bp, Artificial Sequence
  ENSG00000138801_18 (sequence is synthesized)
ccccttaaaaaaagaaaaaaattaccaaacaataaacttggctagaccttgttttgaggattttacaagacctttgtagcgattagattttttttctacattgaaaatagaaactgcttc

SEQ ID NO: 350025 - DNA, 120 bp, Artificial Sequence
  ENSG00000138801_19 (sequence is synthesized)
ctttcttctttccagtcagctattggtctttccagctgttataatctaaagtattcttatgatctgtgtaagctctgaatgaacttctttactcaataaaattaattttttggcttctta

SEQ ID NO: 350026 - DNA, 120 bp, Artificial Sequence
  ENSG00000138801_20 (sequence is synthesized)
atctcttgagccaggagtttgagaccagctggcgcaacatattgagaattctgtctctacaaataataaaataagttggatgtggtggcatgtgcctgttgtcctagctatttggaaggc

SEQ ID NO: 350027 - DNA, 87 bp, Artificial Sequence
  ENSG00000138801_21 (sequence is synthesized)
tgagctatgcagcctttgtttctgggaaaaaaaaagtattactacatagttatccttctaactttacacatggaatctgtttggact

SEQ ID NO: 350028 - DNA, 120 bp, Artificial Sequence
  ENSG00000138801_22 (sequence is synthesized)
atccttccaggagcgcggaggtgggttccggggctgcggcgcctcccggctggggccgtgggtggttgcgaggcagaggggcgcggcgcagggtggggatctcgccctagcttggcgcag

SEQ ID NO: 350029 - DNA, 120 bp, Artificial Sequence
  ENSG00000138801_23 (sequence is synthesized)
gagtaatggcacctatctttccttttacaatactggaggtggtccacacccgtcccagcagccacaggtgggtgcatgcatgggatggttgggtgggacagctccctgttcccccttccc

SEQ ID NO: 350030 - DNA, 120 bp, Artificial Sequence
  ENSG00000138801_24 (sequence is synthesized)
accctcccggcgcagagaaccccggctgctcagcgcgctccgcggtcatggagatccccgggagcctgtgcaagaaagtcaaactgagcaataacgcgcagaactggaaacattgacgaa

SEQ ID NO: 350031 - DNA, 120 bp, Artificial Sequence
  ENSG00000138801_25 (sequence is synthesized)
agagaaccccggctgctcagcgcgctccgcggtcatggagatccccgggagcctgtgcaagaaagtcaaactgagcaataacgcgcagaactgggtaagctggggacgaaggcgagacgg

SEQ ID NO: 350032 - DNA, 120 bp, Artificial Sequence
  ENSG00000138802_0 (sequence is synthesized)
ttcccttccctccgcccacctccctgaagcggagccgccgtcgccaccagcgccgtcatgtcggcccccgccgggtcctctcacccggccgccagcgcccggatcccgcccaagttcggc

SEQ ID NO: 350033 - DNA, 120 bp, Artificial Sequence
  ENSG00000138802_1 (sequence is synthesized)
ggagcggccgtctcaggagccgcagcgcccgcgggcccgggtgcgggcccggcgccgcaccagcagaacggtccagcccagaatcaaatgcaggttccatctggatatggattgcatcat

SEQ ID NO: 350034 - DNA, 120 bp, Artificial Sequence
  ENSG00000138802_2 (sequence is synthesized)
caaaactatattgctccctcaggacattactctcaaggacctgggaaaatgacctcattgccattggatacccagtgtggtgattactactctgctctctatacagtaccaacacaaaat

SEQ ID NO: 350035 - DNA, 120 bp, Artificial Sequence
  ENSG00000138802_3 (sequence is synthesized)
gtgactcctaacacagtgaaccagcaaccaggagcacagcagttgtacagcaggggtcctcctgcccctcatattgtgggatccactctaggatctttccaaggtgctgcatcgtcagca

SEQ ID NO: 350036 - DNA, 120 bp, Artificial Sequence
  ENSG00000138802_4 (sequence is synthesized)
tcccatttgcatacgagtgcctcccaaccatactcctcttttgtgaatcactacaatagtccagccatgtactctgccagctcttctgttgcgtctcagggatttccctctacttgtggt

SEQ ID NO: 350037 - DNA, 120 bp, Artificial Sequence
  ENSG00000138802_5 (sequence is synthesized)
cattatgctatgtcaactgtttctaatgccgcgtatcctagtgtttcatatccctctctgcctgctggtgatacatatgggcaaatgtttacctcacagaatgctccgactgttaggcca

SEQ ID NO: 350038 - DNA, 120 bp, Artificial Sequence
  ENSG00000138802_6 (sequence is synthesized)
gttaaagataattcattctctggtcaaaatacagctatcagccatccatcgccacttccacctctaccatcacaacagcaccaccagcagcaaagtctttcaggatacagtactctaacg

SEQ ID NO: 350039 - DNA, 120 bp, Artificial Sequence
  ENSG00000138802_7 (sequence is synthesized)
tggtcatctccaggccttccatcgactcaagacaatctcatccgaaaccacacaggatccctggctgtagcgaacaacaacccaaccattactgttgcagattctttatcctgtcctgtt

SEQ ID NO: 350040 - DNA, 120 bp, Artificial Sequence
  ENSG00000138802_8 (sequence is synthesized)
atgcaaaatgttcagcctcccaagtccagcccagtggtatccactgttttatcaggatcctcaggatcctcatcaacaagaacacctcccactgcaaatcacccagttgagcctgtgacc

SEQ ID NO: 350041 - DNA, 120 bp, Artificial Sequence
  ENSG00000138802_9 (sequence is synthesized)
tcagttacacagccatcagagctattacaacaaaaaggtgttgacagctcttctaccacaagcagtgcttctccaatgcccaacagttatgatgccctggaaggaggcagttacccagat

SEQ ID NO: 350042 - DNA, 120 bp, Artificial Sequence
  ENSG00000138802_10 (sequence is synthesized)
atgctttcttcatcagcaagcagtcctgctcctgatcccgcccctgaacctgatcctgcttctgctccagctccagcttcagctccagctcctgtcgtccctcagccttcaaaaatggct

SEQ ID NO: 350043 - DNA, 120 bp, Artificial Sequence
  ENSG00000138802_11 (sequence is synthesized)
aagccttttggctatggctatccaacacttcagcctggttatcagaatgctacagcaccacttatttctggagtacagcccagtaacccggtatattctggattccagcagtatcctcaa

SEQ ID NO: 350044 - DNA, 120 bp, Artificial Sequence
  ENSG00000138802_12 (sequence is synthesized)
cagtatcctggtgtgaaccagctatcctccagtataggaggattgagtcttcagagttctccacaaccagaaagcctgagacctgtaaaccttactcaggagaggaatattttacctatg

SEQ ID NO: 350045 - DNA, 120 bp, Artificial Sequence
  ENSG00000138802_13 (sequence is synthesized)
actcctgtttgggctcctgtacctaacttgaatgcagacctcaaaaaattaaactgtagcccagattcatttcggtgtactttgacaaatattccacagacacaggctttactgaataaa

SEQ ID NO: 350046 - DNA, 120 bp, Artificial Sequence
  ENSG00000138802_14 (sequence is synthesized)
gctaagcttcctttaggattgttgttacatcccttcagagacctaacgcaattaccagtgataacatcaaataccattgtgaggtgccgatcctgtcgaacgtatattaacccctttgta

SEQ ID NO: 350047 - DNA, 120 bp, Artificial Sequence
  ENSG00000138802_15 (sequence is synthesized)
gaagaatttatgtataacccccttacccgatcttatggagagcctcataaacgaccagaagttcagaattcaactgtggagttcattgcttcttcagattacatgctgcgtcctcctcaa

SEQ ID NO: 350048 - DNA, 120 bp, Artificial Sequence
  ENSG00000138802_16 (sequence is synthesized)
cctgcagtttacttgtttgttttagatgtgtctcataatgcagtggaagctggatatttgacaattttgtgccagtcactcctagaaaatctagacaagcttcctggagattcacgaaca

SEQ ID NO: 350049 - DNA, 120 bp, Artificial Sequence
  ENSG00000138802_17 (sequence is synthesized)
agaataggattcatgacctttgatagcactattcatttctacaatttacaagaaggattatcacagcctcaaatgttgattgtgtctgatatagatgatgtttttctacctacaccggat

SEQ ID NO: 350050 - DNA, 120 bp, Artificial Sequence
  ENSG00000138802_18 (sequence is synthesized)
agtttacttgtgaatctatatgaaagtaaagagcttataaaagacttactgaatgcattaccaaacatgttcaccaatacaagagaaacacacagtgcccttggtcctgcacttcaggct

SEQ ID NO: 350051 - DNA, 120 bp, Artificial Sequence
  ENSG00000138802_19 (sequence is synthesized)
gcctttaaattaatgtctccaacaggtggccgtgtgtctgtatttcagacacagttaccttccttgggtgcaggacttctgcaatccagagaagatcctaatcagagatcaagtacaaag

SEQ ID NO: 350052 - DNA, 120 bp, Artificial Sequence
  ENSG00000138802_20 (sequence is synthesized)
gtggtacaacatcttggccctgcaactgatttttataagaaacttgcattagattgctcgggacagcaaactgcagtggatttgttccttttaagttcacagtattctgatcttgcttct

SEQ ID NO: 350053 - DNA, 120 bp, Artificial Sequence
  ENSG00000138802_21 (sequence is synthesized)
ctagcttgcatgtccaagtattctgcagggtgcatctattattatccatcattccactatactcacaatccttcacaagcagaaaagttacaaaaagacctaaaacggtatctcacaaga

SEQ ID NO: 350054 - DNA, 120 bp, Artificial Sequence
  ENSG00000138802_22 (sequence is synthesized)
aaaattgggtttgaagctgttatgagaataaggtgtactaaaggtctttcaatgcacacttttcacggtaacttctttgtccgttctactgatttgttatcccttgccaacatcaatcct

SEQ ID NO: 350055 - DNA, 120 bp, Artificial Sequence
  ENSG00000138802_23 (sequence is synthesized)
gatgctggatttgcggtgcagttgtcaattgaagaaagtttaacagatacttccttagtatgttttcaaacagccctattatatacatcaagcaaaggtgagcggagaattagagtacat

SEQ ID NO: 350056 - DNA, 120 bp, Artificial Sequence
  ENSG00000138802_24 (sequence is synthesized)
acactttgtttgccagtggtaagttcactagcagatgtatatgcgggagtggatgtacaagctgccatctgccttctggcaaacatggctgtggatcggtccgtttcatcaagtctgtca

SEQ ID NO: 350057 - DNA, 120 bp, Artificial Sequence
  ENSG00000138802_25 (sequence is synthesized)
gatgcaagagatgccttagtgaatgctgtagtggactcattgtctgcatatggctcaactgtctcaaatttacagcactctgcattgatggcgcccagctccctcaagttgtttcctctc

SEQ ID NO: 350058 - DNA, 120 bp, Artificial Sequence
  ENSG00000138802_26 (sequence is synthesized)
tatgttttggcccttctcaaacagaaagcatttagaacgggtacaagcacacggctggatgatcgtgtatatgccatgtgtcagataaagtctcagccacttgttcatctaatgaaaatg

SEQ ID NO: 350059 - DNA, 120 bp, Artificial Sequence
  ENSG00000138802_27 (sequence is synthesized)
attcatcccaacttatacaggatagacagattgacagatgagggtgcagtacatgttaatgacaggattgtaccacagccacctcttcaaaaattgtctgcagagaagctgacaagagaa

SEQ ID NO: 350060 - DNA, 120 bp, Artificial Sequence
  ENSG00000138802_28 (sequence is synthesized)
ggtgctttccttatggactgtggctctgttttttacatttgggttgggaaaggctgtgacaataacttcatagaggatgtgcttggatatactaattttgcatcaataccacagaaaatg

SEQ ID NO: 350061 - DNA, 120 bp, Artificial Sequence
  ENSG00000138802_29 (sequence is synthesized)
acacatcttccagagctagatacactttcatcagaaagagccagatccttcataacttggcttagagacagcagaccattaagtccaatccttcacatagtaaaagatgagagtcctgcc

SEQ ID NO: 350062 - DNA, 120 bp, Artificial Sequence
  ENSG00000138802_30 (sequence is synthesized)
aaagcagaattttttcagcatttgattgaagaccggacagaggctgcattttcttactatgaatttttgcttcatgttcagcagcagatttgtaagtgaagtagaataaaattgaataag

SEQ ID NO: 350063 - DNA, 120 bp, Artificial Sequence
  ENSG00000138802_31 (sequence is synthesized)
agttacacagccatcagagctattacaacaaaaaggcgtgcagtatggtgaatatgttaataaccaagctagctccgcaccaactcccttgtcatcaacttccgatgatgaggaagagga

SEQ ID NO: 350064 - DNA, 120 bp, Artificial Sequence
  ENSG00000138802_32 (sequence is synthesized)
aaaaagatctataacctaggtaaagcataatctgtcagagaagcgcgtgagaaatttgaaatgaaggcatttgttaatacaagatgcaacgcacagcactctgtctgaggctttggtaaa

SEQ ID NO: 350065 - DNA, 120 bp, Artificial Sequence
  ENSG00000138802_33 (sequence is synthesized)
aagtaaaggggaagaaagaacttgacagatctttttcaactcaaattaatggtaacgatgatgctgtttcaccaagtatattttgaattggtttctacacatttccagtagtatggcagt

SEQ ID NO: 350066 - DNA, 120 bp, Artificial Sequence
  ENSG00000138802_34 (sequence is synthesized)
acagtgctctgttcattgcaagctggcaaatttatgtagctatgtggaatgatatgtcataatgtaaaattagataaattcttttttcttataattaatataacatttctggacttgaac

SEQ ID NO: 350067 - DNA, 120 bp, Artificial Sequence
  ENSG00000138802_35 (sequence is synthesized)
tctggcaagagatgccaaaaggcattggtaccgtgttatttgtttatatgaattactttttaacaaggaatgtttcttattcattaaatgaattcaacattttctctgtaaaaacaatag

SEQ ID NO: 350068 - DNA, 120 bp, Artificial Sequence
  ENSG00000138802_36 (sequence is synthesized)
agtttcagtacatgaactatagaaaaaaatctatatataatgtacataaatgttacatttgtaaagaaaatgtaaaaatgtaactatagcatatgaattgcttaaactgtgctgcattgt

SEQ ID NO: 350069 - DNA, 120 bp, Artificial Sequence
  ENSG00000138802_37 (sequence is synthesized)
tggatgacaactctttttgtcacagttagagaatgaggttgactaatgcatattatgaattgagtccacaaaggaacacaaaactctttgtaattctgttaaatcttttatgtagattta

SEQ ID NO: 350070 - DNA, 120 bp, Artificial Sequence
  ENSG00000138802_38 (sequence is synthesized)
tttatgatcagcctactaattaaaactatttcgcttgacagtatggtttggtgattttttggggtttttgtttgattggttttttgtggggattggtgggtttttttacatacaggatgt

SEQ ID NO: 350071 - DNA, 120 bp, Artificial Sequence
  ENSG00000138802_39 (sequence is synthesized)
gggattggtgggtttttttacatacaggatgtattgaatttactaattggggaagtgcagtgatactgcatttcagttagtaatatatatgaatcaggccaggcgcggtggctcacgcct

SEQ ID NO: 350072 - DNA, 79 bp, Artificial Sequence
  ENSG00000138802_40 (sequence is synthesized)
agcgctttgggaggccaaggtgggcagatgacttgaggtcaggtgttcatgacctcaaaattagccaggggtgctggcg

SEQ ID NO: 350073 - DNA, 87 bp, Artificial Sequence
  ENSG00000138802_41 (sequence is synthesized)
ggtgcgggcccggcgccgcaccagcagaacgagacgggatttcaccatgttgcccaagctagtcttgaactcctggacccaagcagt

SEQ ID NO: 350074 - DNA, 120 bp, Artificial Sequence
  ENSG00000138813_0 (sequence is synthesized)
aacatatcttaacaaccagggagccacacaggctccttggagtaagagtgtgagaaactggatgaagacagctgtattcttttggaagcgttcgagattggtctgtctctaccaactaaa

SEQ ID NO: 350075 - DNA, 120 bp, Artificial Sequence
  ENSG00000138813_1 (sequence is synthesized)
aacttctagcttaagtgcagagatttaaggagatcaacaaaaactcagtctagacatattatgaggctgggagggtatcaacagacttgagttcttgtcagcaagatcacctgcttttaa

SEQ ID NO: 350076 - DNA, 120 bp, Artificial Sequence
  ENSG00000138813_2 (sequence is synthesized)
tattgtcctcagggtctgagcacatctggaagtgaggtcaatcaagttagaccccaaaaacttttgtgacaacagtgaagaggggaaaataaacacaccacaaacatgaacctcaacccc

SEQ ID NO: 350077 - DNA, 120 bp, Artificial Sequence
  ENSG00000138813_3 (sequence is synthesized)
ccgacatctgctcttcagatcgagggcaaaggcagccatattatggctagaaatgtaagctgctttctagtcaggcacacccctcatcccagaagagtctgccacatcaaaggcttgaat

SEQ ID NO: 350078 - DNA, 120 bp, Artificial Sequence
  ENSG00000138813_4 (sequence is synthesized)
aacattccaatctgtactgtgaatgatgatgagaatgcatttggaacattgtggggagttggccagtctaactacttagagaagaacaggataccatttgccaattgcagttacccctcc

SEQ ID NO: 350079 - DNA, 120 bp, Artificial Sequence
  ENSG00000138813_5 (sequence is synthesized)
agcactgcagtccaggagagccctgtaagaggaatgtcgccagccccaaacggtgccaaagtgcctccacggcctcattctgagcccagtagaaaaattaaagagtgcttcaaaacttcc

SEQ ID NO: 350080 - DNA, 120 bp, Artificial Sequence
  ENSG00000138813_6 (sequence is synthesized)
tccaaaggcatgctctactcctggctcctgttcttcagggatgacaagtaccaagaatgatgtgaaagcaaacaccatttgcataccaaactatctggatcaggaaataaaaatcctggc

SEQ ID NO: 350081 - DNA, 120 bp, Artificial Sequence
  ENSG00000138813_7 (sequence is synthesized)
aaagctctgtagcattttgcatactgattctctggcagaagttttacagtggctgcttcatgcaacttcaaaagaaaaagagtgggtctcagctttgattcattctgagcttgccgagat

SEQ ID NO: 350082 - DNA, 120 bp, Artificial Sequence
  ENSG00000138813_8 (sequence is synthesized)
aaacctgttaactcatcacagaagaaacacctcaatggaaccagcagcagagactgggaagccacccacagttaaatcaccacccacagttaaattgcccccaaattttactgcaaaatc

SEQ ID NO: 350083 - DNA, 120 bp, Artificial Sequence
  ENSG00000138813_9 (sequence is synthesized)
aaaagtgctgaccagagatacagaaggggatcaaccaaccagagtgtcaagtcaaggatctgaagaaaacaaggaagtaccaaaagaggctgagcacaagcctccactacttataagaag

SEQ ID NO: 350084 - DNA, 120 bp, Artificial Sequence
  ENSG00000138813_10 (sequence is synthesized)
aaataatatgaaaatacctgttgcagaatatttcagcaaaccaaattctcctcccaggcctaacactcaggagagtggatcagcaaaaccagtgtcagcaaggagtatacaagaatacaa

SEQ ID NO: 350085 - DNA, 120 bp, Artificial Sequence
  ENSG00000138813_11 (sequence is synthesized)
cctctgtccccaaagagcatgttatccttcaacacaccggaggtagaagttctagactgggtgaattctttcatgaatatgagcttcacatttacatcatcaaattatttttcaaatgaa

SEQ ID NO: 350086 - DNA, 120 bp, Artificial Sequence
  ENSG00000138813_12 (sequence is synthesized)
tatttttggtattgaggaatcaagtggtcctctttatggtggcacatgtaaatctaaaaatacctgtatgtaatgctacaaataaatattactggaaatgatatttccatttgtagttaa

SEQ ID NO: 350087 - DNA, 120 bp, Artificial Sequence
  ENSG00000138813_13 (sequence is synthesized)
aagtaccaaaaggttaagtacagtttttggtaactattgagttggtataaagaaaccagtaagtactaatgactcagggaacagattttaaggatcagtgcttttaaaaaaacagaaaaa

SEQ ID NO: 350088 - DNA, 120 bp, Artificial Sequence
  ENSG00000138813_14 (sequence is synthesized)
tacaatagtaatttccagatcaattcttgagagagcatctgcttactttctcataaagataaatttacctttgttttgaaaggcaaagtgcctgatcatggacagacactctttgagaag

SEQ ID NO: 350089 - DNA, 120 bp, Artificial Sequence
  ENSG00000138813_15 (sequence is synthesized)
caagacagcaggacaacaggaactataggtttggttatagcaattcagtgaaaagggaaaccctgcattgacctaacaaaaggacaatgatctcagagttttggttcttcacagcttaat

SEQ ID NO: 350090 - DNA, 120 bp, Artificial Sequence
  ENSG00000138813_16 (sequence is synthesized)
ggagttaaataatttcactggagacaaagtcaaccagagagaagagtaaaatggcaatcagccacaagcaggtgacctacaagacagctgaaatacaattgaaaagagcagttttgtgtt

SEQ ID NO: 350091 - DNA, 120 bp, Artificial Sequence
  ENSG00000138813_17 (sequence is synthesized)
ccaccagaagcccagctccagtctgtaggggaaccagggagaatcaagaattgtggaaagtcctaccttggtccaaaatagcccaaagtatccttataggtttggcagtttctagcttta

SEQ ID NO: 350092 - DNA, 120 bp, Artificial Sequence
  ENSG00000138813_18 (sequence is synthesized)
aaacaaggagagcattcatgactacagagcaacaactatgaagtgtatctacaagctttatacaaaaatgtgtcttgtcatttctacaagttccctttataccaggaatgatatataatc

SEQ ID NO: 350093 - DNA, 120 bp, Artificial Sequence
  ENSG00000138813_19 (sequence is synthesized)
aattagagctcactggggtcaccctagactccagcaagttccactgtgattaaccaaacccaaaaaagacactatctcctaacagccaataataagtatagtttaaaaattacaaagtac

SEQ ID NO: 350094 - DNA, 120 bp, Artificial Sequence
  ENSG00000138813_20 (sequence is synthesized)
tcccttacttagactccaaggacagcctattgtatctggcctctcctaccaaactcctcatcctgggactataacatcatgacagtgatggtttctattattcaactttatgtcttacct

SEQ ID NO: 350095 - DNA, 120 bp, Artificial Sequence
  ENSG00000138813_21 (sequence is synthesized)
gtaaggctcacacatattttatcatttagatatttggaattttttgtataagaattcccaagtcatgcccctttctctccattgtcgatatttagcatctccttacatccctattcctgc

SEQ ID NO: 350096 - DNA, 120 bp, Artificial Sequence
  ENSG00000138813_22 (sequence is synthesized)
ttgggtgcaactatgtaggtcttacgagcacaattaacttgtcttagcctgtttgtctcttctcttgttacatctatcaggaccatagatcttccttctttctctcactgtcactcttac

SEQ ID NO: 350097 - DNA, 120 bp, Artificial Sequence
  ENSG00000138813_23 (sequence is synthesized)
ccataaacaattctatgcaatcaaaatcatgtttacttttgagagtgaaggaacatatcctgcatgttacagaacaaataactcattaaagatgagcatgtggtggaaaaaaaaagaaaa

SEQ ID NO: 350098 - DNA, 120 bp, Artificial Sequence
  ENSG00000138813_24 (sequence is synthesized)
actgtgtacaagagctcccttcagccaagagcaattcctagagagggactcagaatgagccataagtaactgacatatgtggagctggggagctgagagcctaggtgctgaaggcatgat

SEQ ID NO: 350099 - DNA, 120 bp, Artificial Sequence
  ENSG00000138813_25 (sequence is synthesized)
gttttcccatacctagaggtatcatcagtgagagttgcaagacagcaaaggtgtctgcctgctccttcctctgggatctccatcctaggggggtactgagctgttgctggctcgaatgct

SEQ ID NO: 350100 - DNA, 120 bp, Artificial Sequence
  ENSG00000138814_0 (sequence is synthesized)
aggttgtgcccgggactgtgtctgccgagctcggcggctgtgccttggtgagtggaggagcggcgcggggaggcagaggcgagcgcgggcgatcgcggcggcgggacgtctccggcggcc

SEQ ID NO: 350101 - DNA, 120 bp, Artificial Sequence
  ENSG00000138814_1 (sequence is synthesized)
caccagcggcggcgctctgtgtggagaagcaggggcagcggcagcagcaacagcggcagcggcagcagcagcggcagcagcggcggccgcctctccgccgccggggacgccaaggtgcgg

SEQ ID NO: 350102 - DNA, 120 bp, Artificial Sequence
  ENSG00000138814_2 (sequence is synthesized)
gcggctggtggcactgacatcggcggccctgcctctcctccctcgcccccggccttccccatgtgatcggtcttaatcctggccgtgtgtgcgcgcgtggggctccattccgcggtgctg

SEQ ID NO: 350103 - DNA, 120 bp, Artificial Sequence
  ENSG00000138814_3 (sequence is synthesized)
ggtctccgtgccggggtgggtgctcgtgtgtgcgcttctcctccccatcccccttcccccaagaataaaagaagaaccgggaggcgtgctcagaaaataaataaataaccaccacacacg

SEQ ID NO: 350104 - DNA, 120 bp, Artificial Sequence
  ENSG00000138814_4 (sequence is synthesized)
cgcagcccggagcgagtcggcggggctggcggcagcggcggaggaggagtgaaggcggcggcggcggaggagggacgcgcggaaaaggcagcaactttaaagccagctcagagcctagac

SEQ ID NO: 350105 - DNA, 120 bp, Artificial Sequence
  ENSG00000138814_5 (sequence is synthesized)
ctccagccgagcggtttgcagcgcggcggcggcggcggcggcggcggcgttgagtgtctggcccgccggtccggtcggggtgtgcagtcggacggacgagcagcgcgtcgctgtcctccg

SEQ ID NO: 350106 - DNA, 120 bp, Artificial Sequence
  ENSG00000138814_6 (sequence is synthesized)
gcagctggagatgtccgagcccaaggcaattgatcccaagttgtcgacgaccgacagggtggtgaaagctgttccatttcctccaagtcaccggcttacagcaaaagaagtgtttgataa

SEQ ID NO: 350107 - DNA, 120 bp, Artificial Sequence
  ENSG00000138814_7 (sequence is synthesized)
tgatggaaaacctcgtgtggatatcttaaaggcgcatcttatgaaggagggaaggctggaagagagtgttgcattgagaataataacagagggtgcatcaattcttcgacaggaaaaaaa

SEQ ID NO: 350108 - DNA, 120 bp, Artificial Sequence
  ENSG00000138814_8 (sequence is synthesized)
tttgctggatattgatgcgccagtcactgtttgtggggacattcatggacaattctttgatttgatgaagctctttgaagtcgggggatctcctgccaacactcgctacctcttcttagg

SEQ ID NO: 350109 - DNA, 120 bp, Artificial Sequence
  ENSG00000138814_9 (sequence is synthesized)
ggactatgttgacagagggtacttcagtattgaatgtgtgctgtatttgtgggccttgaaaattctctaccccaaaacactgtttttacttcgtggaaatcatgaatgtagacatctaac

SEQ ID NO: 350110 - DNA, 120 bp, Artificial Sequence
  ENSG00000138814_10 (sequence is synthesized)
agagtatttcacatttaaacaagaatgtaaaataaagtattcagaacgcgtatatgatgcctgtatggatgcctttgactgccttcccctggctgccctgatgaaccaacagttcctgtg

SEQ ID NO: 350111 - DNA, 120 bp, Artificial Sequence
  ENSG00000138814_11 (sequence is synthesized)
tgtgcatggtggtttgtctccagagattaacactttagatgatatcagaaaattagaccgattcaaagaaccacctgcatatggacctatgtgtgatatcctgtggtcagaccccctgga

SEQ ID NO: 350112 - DNA, 120 bp, Artificial Sequence
  ENSG00000138814_12 (sequence is synthesized)
agattttggaaatgagaagactcaggaacatttcactcacaacacagtcagggggtgttcatacttctacagttacccggctgtatgtgaattcttacagcacaataacttgttatctat

SEQ ID NO: 350113 - DNA, 120 bp, Artificial Sequence
  ENSG00000138814_13 (sequence is synthesized)
actccgagcccacgaagcccaagatgcagggtaccgcatgtacaggaaaagccaaacaacaggcttcccttctctaattacaattttttcagcaccaaattacttagatgtatacaataa

SEQ ID NO: 350114 - DNA, 120 bp, Artificial Sequence
  ENSG00000138814_14 (sequence is synthesized)
caaagctgcagtattgaagtatgagaacaatgttatgaatatcaggcaattcaactgttctcctcatccatactggcttccaaatttcatggatgtttttacttggtcccttccatttgt

SEQ ID NO: 350115 - DNA, 120 bp, Artificial Sequence
  ENSG00000138814_15 (sequence is synthesized)
tggggaaaaagtgactgagatgctggtaaatgtcctcaacatctgctcagatgatgaactagggtcagaagaagatggatttgatggtgcaacagctgcagcccggaaagaggtgataag

SEQ ID NO: 350116 - DNA, 120 bp, Artificial Sequence
  ENSG00000138814_16 (sequence is synthesized)
gaacaagatccgagcaataggcaaaatggccagagtgttctcagtgctcagagaagagagtgagagtgtgctgacgctgaaaggcttgaccccaactggcatgctccccagcggagtact

SEQ ID NO: 350117 - DNA, 120 bp, Artificial Sequence
  ENSG00000138814_17 (sequence is synthesized)
ttctggagggaagcaaaccctgcaaagcgctactgttgaggctattgaggctgatgaagctatcaaaggattttcaccacaacataagatcactagcttcgaggaagccaagggcttaga

SEQ ID NO: 350118 - DNA, 120 bp, Artificial Sequence
  ENSG00000138814_18 (sequence is synthesized)
ccgaattaatgagaggatgccgcctcgcagagatgccatgccctctgacgccaaccttaactccatcaacaaggctctcacctcagagactaacggcacggacagcaatggcagtaatag

SEQ ID NO: 350119 - DNA, 120 bp, Artificial Sequence
  ENSG00000138814_19 (sequence is synthesized)
ctgcggggcatgatggggattgctgcatatcagcagttggatgttcttgcctctgacagtagcttatttgctctgggggccaggaattggattcagtttacactatcattaaaaaagagg

SEQ ID NO: 350120 - DNA, 120 bp, Artificial Sequence
  ENSG00000138814_20 (sequence is synthesized)
gagagagataataaactatattttggtggggatggtgattaaacacctcttttgggtatgccttttaaaaatgcttatagagaaaaaaaattttaaaaagaaagctaatgctagtatata

SEQ ID NO: 350121 - DNA, 120 bp, Artificial Sequence
  ENSG00000138814_21 (sequence is synthesized)
ctgcaatgttaggggaatgaacatgttttcctactgcattggggacttctagataggttaatgaaaggccttttattctgttactggacatgaaaactttgtctaatttcttactctatt

SEQ ID NO: 350122 - DNA, 120 bp, Artificial Sequence
  ENSG00000138814_22 (sequence is synthesized)
gtacgtttacagtcgcagcactaaaaatggatgacatcaaacatttttaacaaaatgatgtacaaactaaggactatttattgataatgttttgctactcttgtcagacaatggctataa

SEQ ID NO: 350123 - DNA, 120 bp, Artificial Sequence
  ENSG00000138814_23 (sequence is synthesized)
aaaaacagaaaaagaaaaaaaagaacgttgcaaatttgttaaaatgccaaaaaggacagtttaattttgtacagattatgcttacctcaggtttctttagtgtgcttgaatgcccttctt

SEQ ID NO: 350124 - DNA, 120 bp, Artificial Sequence
  ENSG00000138814_24 (sequence is synthesized)
ttctttagtgtgcttgaatgcccttctttccatataacacttatcttcttcttaattcggcaatggaatatcttttaagttttaaaaaaactggaataattatatctatcttttttgccg

SEQ ID NO: 350125 - DNA, 120 bp, Artificial Sequence
  ENSG00000138814_25 (sequence is synthesized)
tttatatttaggggtttttgttgataaaatcaagtcttggttgtggcttgctgaattaaatatttatgagtggtgcatttttaagtatagtgaacaagacaccatattaagtacagtgat

SEQ ID NO: 350126 - DNA, 120 bp, Artificial Sequence
  ENSG00000138814_26 (sequence is synthesized)
aaagcatctatattctgtaaaaaaaaaaaaaatctgcctatgcatgttttttaagaaaaaaaaaatggctgtatcggcctgtatgggactgtaatgcgcttagtggtctgacatatactg

SEQ ID NO: 350127 - DNA, 120 bp, Artificial Sequence
  ENSG00000138814_27 (sequence is synthesized)
gaaatgtatgtatactggcgtactttatattctctaaaatgcttaatgcctttgaaattttgtaatcaaaaaaaagctttgaaaaaatctaaaggggagagtattctttaaagtttttaa

SEQ ID NO: 350128 - DNA, 120 bp, Artificial Sequence
  ENSG00000138814_28 (sequence is synthesized)
cataagcttgtcaatgcacatgtagatggttagcatgtttagcaaaccttgtgaaattataataagtttgtagttacatgtgaaactctaaatgcatggcaactgttaatgtcataacag

SEQ ID NO: 350129 - DNA, 120 bp, Artificial Sequence
  ENSG00000138814_29 (sequence is synthesized)
tttagttattttgttctgttctgtcatgtgccacaaaatatgtacttttttcacttttttccctttgtatatcagttacgggttacaactggttcattctgaaaacaacaacaacaaaag

SEQ ID NO: 350130 - DNA, 120 bp, Artificial Sequence
  ENSG00000138814_30 (sequence is synthesized)
tccattcatattttttaacaattgtataagtgcccaagtaattcactacagcctaaagccttgcctttgtaatttgacttctgacatgttggcaatcaaagcatgcacttgtaacaatga

SEQ ID NO: 350131 - DNA, 120 bp, Artificial Sequence
  ENSG00000138814_31 (sequence is synthesized)
aaaagaaaaagcattttatattactactcaataaaatgtgcatgaacttacagaattctcatccttccactgagtccgctgaagggatttatgtgcacaaccaccatgtgtcttctaggt

SEQ ID NO: 350132 - DNA, 120 bp, Artificial Sequence
  ENSG00000138814_32 (sequence is synthesized)
gctggcccaccaccacacatcacaggctgatttccacaggcttcttcctaggggcctcgtgatctgaggggtggtgcctacttccactgtaagaaagaatcttggtggatttgtgtctca

SEQ ID NO: 350133 - DNA, 120 bp, Artificial Sequence
  ENSG00000138814_33 (sequence is synthesized)
aatcagataagagaagcctgtttaaagagcagatgccatcttctggcttcctcaaggagccagttaaaaaaccagagcattcctttttattgaaaaataaaattaatttgttatcaggtt

SEQ ID NO: 350134 - DNA, 120 bp, Artificial Sequence
  ENSG00000138814_34 (sequence is synthesized)
gtttcagttgtattggatgccctatctatctgctaaagcaaaaagtactaggctactaagtgcattttcatcacagaaaagagttgcatttgtattaacaagaaatttgtatacccacgc

SEQ ID NO: 350135 - DNA, 120 bp, Artificial Sequence
  ENSG00000138814_35 (sequence is synthesized)
ttcagctactatctaatcatcacccgaagatttaagatacaccaaatttcagtttgtttgtaacattgttcatctttagtgcactttgttttatataataaagtatgcctgttatattaa

SEQ ID NO: 350136 - DNA, 120 bp, Artificial Sequence
  ENSG00000138814_36 (sequence is synthesized)
ataataagaatatggcaattagcgatatagcatacccaaacaaagatgttctcgatacagtctggcaaagactatcccaaggttattttaatgaattcagacattttttcctgtggatat

SEQ ID NO: 350137 - DNA, 120 bp, Artificial Sequence
  ENSG00000138814_37 (sequence is synthesized)
ttctccatcctaaaaaaagtggcaaccaaggaaaatatttagatgcaacttactagagtgatgatgtgaaagaaatggtgattctggtatcatggtgtttattttctttcttataactgc

SEQ ID NO: 350138 - DNA, 120 bp, Artificial Sequence
  ENSG00000138814_38 (sequence is synthesized)
agagaaaatatcctgactaaaaaaaattcatttttttggattcctttcttttacaaattgtgctgaggcaactatggcatagaaataaacatttgacattaaaataagcagttgatgtga

SEQ ID NO: 350139 - DNA, 120 bp, Artificial Sequence
  ENSG00000138814_39 (sequence is synthesized)
gcgccagtcactgaagctccacagatgaccccgattcacacaccaaggtaaaaacggatggctttcaaatgacacagaaaggagatttcacacatggcagggaaggaatgtaaactactg

SEQ ID NO: 350140 - DNA, 120 bp, Artificial Sequence
  ENSG00000138814_40 (sequence is synthesized)
cagtcggacggacgagcagcgcgtcgctgtcctccggcagctggagatgtccgagcccaaggcaattgatcccaagttgtcgacgaccgacagggtggtgaaagtttgtggggacattca

SEQ ID NO: 350141 - DNA, 120 bp, Artificial Sequence
  ENSG00000138814_41 (sequence is synthesized)
tttcttcgctgctgatcttccctggagctgctgctgcttcccgtggggaatacagatgaggctggtgatgcaccaggagcaggccaggggactctgagatgatgactctttgtcattgtg

SEQ ID NO: 350142 - DNA, 120 bp, Artificial Sequence
  ENSG00000138814_42 (sequence is synthesized)
ggtgttggcggcggcggcggcggcggaggggggtaggttgtgcccgggactgtgtctgccgagctcggcggctgtgccttgctgttccatttcctccaagtcaccggcttacagcaaaag

SEQ ID NO: 350143 - DNA, 120 bp, Artificial Sequence
  ENSG00000138821_0 (sequence is synthesized)
gagtttcaccgcggacctgtcagagatacagaggttgtgggggcgggagacagaaagagagagagatccagagaccgagtcttacgttgacacgcagagagaaagacgcagagacagaca

SEQ ID NO: 350144 - DNA, 120 bp, Artificial Sequence
  ENSG00000138821_1 (sequence is synthesized)
aacaaacagataggagaggctctccaggaggccggggggcccactccgcctatcgctcccctcggctacgctgccacttcaatgccccgcaggtcgcgagctgctgttctttcgaaggcg

SEQ ID NO: 350145 - DNA, 120 bp, Artificial Sequence
  ENSG00000138821_2 (sequence is synthesized)
tcggagaaccaggggcgtcccgcgccacctctgactcggagcagcgccgagcactgacgctcccgcccttgggcaaggacgccagtgcgcccgcgcgcgtccctctgcgcggcagcccgt

SEQ ID NO: 350146 - DNA, 120 bp, Artificial Sequence
  ENSG00000138821_3 (sequence is synthesized)
ggccctcaaggggaagcccaggccaggatggccccgggtcgcgcggtggccgggctcctgttgctggcggccgccggcctcggaggagtggcggaggggccagggctagccttcagcgag

SEQ ID NO: 350147 - DNA, 120 bp, Artificial Sequence
  ENSG00000138821_4 (sequence is synthesized)
cgaggatgtgctgagcgtgttcggcgcgaatctgagcctgtcggcggcgcagctccagcacttgctggagcagatgggagccgcctcccgcgtgggcgtcccggagcctggccagctgca

SEQ ID NO: 350148 - DNA, 120 bp, Artificial Sequence
  ENSG00000138821_5 (sequence is synthesized)
cttcaaccagtgtttaactgctgaagagatcttttcccttcatggcttttcaaatgctacccaaataaccagctccaaattctctgtcatctgtccagcagtcttacagcaattgaactt

SEQ ID NO: 350149 - DNA, 120 bp, Artificial Sequence
  ENSG00000138821_6 (sequence is synthesized)
tcacccatgtgaggatcggcccaagcacaaaacaagaccaagtcattcagaagtttggggatatggattcctgtcagtgacgattattaatctggcatctctcctcggattgattttgac

SEQ ID NO: 350150 - DNA, 120 bp, Artificial Sequence
  ENSG00000138821_7 (sequence is synthesized)
tccactgataaagaaatcttatttcccaaagattttgaccttttttgtggggctggctattgggactcttttttcaaatgcaattttccaacttattccagaggcatttggatttgatcc

SEQ ID NO: 350151 - DNA, 120 bp, Artificial Sequence
  ENSG00000138821_8 (sequence is synthesized)
caaagtcgacagttatgttgagaaggcagttgctgtgtttggtggattttacctacttttcttttttgaaagaatgctaaagatgttattaaagacatatggtcagaatggtcataccca

SEQ ID NO: 350152 - DNA, 120 bp, Artificial Sequence
  ENSG00000138821_9 (sequence is synthesized)
ctttggaaatgataactttggtcctcaagaaaaaactcatcaacctaaagcattacctgccatcaatggtgtgacatgctatgcaaatcctgctgtcacagaagctaatggacatatcca

SEQ ID NO: 350153 - DNA, 120 bp, Artificial Sequence
  ENSG00000138821_10 (sequence is synthesized)
ttttgataatgtcagtgtggtatctctacaggatggaaaaaaagagccaagttcatgtacctgtttgaaggggcccaaactgtcagaaatagggacgattgcctggatgataacgctctg

SEQ ID NO: 350154 - DNA, 120 bp, Artificial Sequence
  ENSG00000138821_11 (sequence is synthesized)
cgatgccctccacaatttcatcgatggcctggcgattggggcttcctgcaccttgtctctccttcagggactcagtacttccatagcaatcctatgtgaggagtttccccacgagttagg

SEQ ID NO: 350155 - DNA, 120 bp, Artificial Sequence
  ENSG00000138821_12 (sequence is synthesized)
agactttgtgatcctactcaatgcagggatgagcactcgacaagccttgctattcaacttcctttctgcatgttcctgctatgttgggctagcttttggcattttggtgggcaacaattt

SEQ ID NO: 350156 - DNA, 120 bp, Artificial Sequence
  ENSG00000138821_13 (sequence is synthesized)
gcatgttcctctatatttctctggcagatatgtttccagagatgaatgatatgctgagagaaaaggtaactggaagaaaaaccgatttcaccttcttcatgattcagaatgctggaatgt

SEQ ID NO: 350157 - DNA, 120 bp, Artificial Sequence
  ENSG00000138821_14 (sequence is synthesized)
taactggattcacagccattctactcattaccttgtatgcaggagaaatcgaattggagtaatagaaaatggaagatggtgttgttaataaaggcatttaatagataaaaacatctccaa

SEQ ID NO: 350158 - DNA, 120 bp, Artificial Sequence
  ENSG00000138821_15 (sequence is synthesized)
aaaggattttgaagctgatcctatttagttaaaaagataattttgctttcaactgtaggtccagaaaactaattattggcatcagtctgtgaaatagtccattatttgttgttaaaaatg

SEQ ID NO: 350159 - DNA, 120 bp, Artificial Sequence
  ENSG00000138821_16 (sequence is synthesized)
cttcaaaaggttttcagtgtcagtctgagatgcctggtatataggagcctttgggaaatacctatttttcagtattccatgcatattagatatcaccatgaagcaagagacatgcattct

SEQ ID NO: 350160 - DNA, 120 bp, Artificial Sequence
  ENSG00000138821_17 (sequence is synthesized)
ataatcatgtagacactcagactcaggggaaaatacaagttatatcctgaaagcctttaaaactctatggtaggatcaaagattcaaatggtttcagagaggttttatttcaattaattt

SEQ ID NO: 350161 - DNA, 120 bp, Artificial Sequence
  ENSG00000138821_18 (sequence is synthesized)
gttctagtgctttcaagagcaagtacatcaaaatgtagaaggtaaaatgtatgcaacactaatataaattattccaagtctttaaggagccaaagaaaaaaaagatttctcacagctttt

SEQ ID NO: 350162 - DNA, 120 bp, Artificial Sequence
  ENSG00000138821_19 (sequence is synthesized)
tgttctgttttgtatttcaattaggaacttgcagtattattttgaaaaccattctaaaataataggagttaggaaataaataaagttttgctagccctgctaagttcaggcttagaggct

SEQ ID NO: 350163 - DNA, 120 bp, Artificial Sequence
  ENSG00000138821_20 (sequence is synthesized)
tatcgctaagtataaacttcaccagattccacgaaaagctggatagctttttttctgacttatgttgtggttgcacccctcacaaatggcagaacagtatgtaaagctggtaacacctcg

SEQ ID NO: 350164 - DNA, 120 bp, Artificial Sequence
  ENSG00000138821_21 (sequence is synthesized)
gtttcagtgcaccatgtgtttgctttgtgaaggtgaagaatatgttggtttagagaaagaaattggatgtaattttatgcaatttacttttaaagacaaacataactatttagcagagaa

SEQ ID NO: 350165 - DNA, 120 bp, Artificial Sequence
  ENSG00000138821_22 (sequence is synthesized)
tattttaataaatgcaaaacaacagctggactgctgtacatcaaggacagattaactggaaaacatatgttccttatgtgtgatcgagagccattcagaaaagacttcctttgtgttcag

SEQ ID NO: 350166 - DNA, 120 bp, Artificial Sequence
  ENSG00000138821_23 (sequence is synthesized)
cctatacttttccatatggtataccttgaaaaaaattagcacaccatggttatttttctaccttttataaaagacagagcctgtttactcatttagaagatagagaaaattggtctaaaa

SEQ ID NO: 350167 - DNA, 120 bp, Artificial Sequence
  ENSG00000138821_24 (sequence is synthesized)
ttgaacatcctagattcacactcccaagtcacttaaggtgatttgatggtgaggaaaatgattgacaaagcccaacaatgatctcaggaattacattttccaacagaccaaaaaatgttt

SEQ ID NO: 350168 - DNA, 120 bp, Artificial Sequence
  ENSG00000138821_25 (sequence is synthesized)
tcatgtagcagcaatgcagatttggtgaatatttaatatatattttagtatgtatttcactttatgactgacaattaaaaaatattgtttggccaaatagtaaacacccttttgaaacca

SEQ ID NO: 350169 - DNA, 120 bp, Artificial Sequence
  ENSG00000138821_26 (sequence is synthesized)
agtgtggttttagtttttcctaagaagtggcgtggtttggggctttatatccgggaggagcatatgtacgcaaatcctggggcgtttgcaaacccggatccggggcgtctggccccatgc

SEQ ID NO: 350170 - DNA, 120 bp, Artificial Sequence
  ENSG00000138821_27 (sequence is synthesized)
gaatgatatgctgagagaaaagataatcaaatgggctactgatgacatcaaatctcaacttcatttactttggatatatacggcaaggtagtaatttcattatctggagtatttcacctc

SEQ ID NO: 350171 - DNA, 120 bp, Artificial Sequence
  ENSG00000138821_28 (sequence is synthesized)
cacatctctgcaataccagcaccttcaacagtgattggttagaggttggcatatgacatagttatgaccattgagacgtgatgctgtgtgtgctgtgaagtttctcaaaaggagtaagga

SEQ ID NO: 350172 - DNA, 120 bp, Artificial Sequence
  ENSG00000138821_29 (sequence is synthesized)
agatacagcctcttctttctagggactttgtttgtaggtgtgacacctggagcagccattttgctactgttttgtttctaattgtgttccccgccgccctccccgctcgccccgaaaaac

SEQ ID NO: 350173 - DNA, 120 bp, Artificial Sequence
  ENSG00000138821_30 (sequence is synthesized)
atttgttaagatgagctcatactggagtagagtgggttcctgatctagtatgactggtattcttattaaaaagagaaatttgaatactagctacaccatgtaaagatgaaggcagagatc

SEQ ID NO: 350174 - DNA, 120 bp, Artificial Sequence
  ENSG00000138821_31 (sequence is synthesized)
gtggtgatgcatctacaatgtcaacaattgccagcaaatcatcagaatctgggagagaggtatggaatgaattctctctcgcagccctaagaaggaaccaatcctgtgcacacctgaatc

SEQ ID NO: 350175 - DNA, 120 bp, Artificial Sequence
  ENSG00000138821_32 (sequence is synthesized)
ttggacttccagcctccacaactgtgagacaatacatttttgttatttaagctacccagttgtggcactttattactgcagttctagccgactaatacagctaccttgagaggaaatagc

SEQ ID NO: 350176 - DNA, 120 bp, Artificial Sequence
  ENSG00000138821_33 (sequence is synthesized)
atggggatgaaggtgatgtgctgaagaagcacagcagaaagtggaaagatggtccatgaggacatccttagccactgaattgacaagcctcttccctggagtccctcttccttgggattt

SEQ ID NO: 350177 - DNA, 120 bp, Artificial Sequence
  ENSG00000138821_34 (sequence is synthesized)
tttttggtgtgtgtaataatcacttttcctaatggtgcaaaccattgtgagttgctctttgactgctagtaattaaagcaaactaaccaagtcagccctccccagtgttcctttttgcaa

SEQ ID NO: 350178 - DNA, 120 bp, Artificial Sequence
  ENSG00000138821_35 (sequence is synthesized)
tctaaattctgatgtccaactcctccctgggccactccctgtccccagatgtctctttgtatatctaaagaagaaaaagaaggataaatcctttttctcccaagagatctccctgctttt

SEQ ID NO: 350179 - DNA, 120 bp, Artificial Sequence
  ENSG00000138821_36 (sequence is synthesized)
gtgaaaagcacaaagaagggcattatctaacttttctcatcattagaagtcaagcctggccgtgactcccgttatgacattttgatggccacattttatgagaaaagcccaaacagacag

SEQ ID NO: 350180 - DNA, 120 bp, Artificial Sequence
  ENSG00000138821_37 (sequence is synthesized)
acctgtctgtaaattctttcatcctttgcattctttctttgactgtaccttagagagtgtttgattattgcaggggagatggaaaagaagcaggttctggcctatgctctagttcctcac

SEQ ID NO: 350181 - DNA, 120 bp, Artificial Sequence
  ENSG00000138821_38 (sequence is synthesized)
tttctggagttatcttttgggcctggagtctcttggagtgaggaaaggaagccatttttatactttacttatggtagagttaaacttcgtactcttaggaggctacatgcaatctccaag

SEQ ID NO: 350182 - DNA, 120 bp, Artificial Sequence
  ENSG00000138821_39 (sequence is synthesized)
aggaagagagtgaagaggttaagaattatgccatcaaaatgtgctgctctggcatattgactatttgaattacagatattttaaaaacatcagatatgaagaggtcactctgatcttaat

SEQ ID NO: 350183 - DNA, 120 bp, Artificial Sequence
  ENSG00000138821_40 (sequence is synthesized)
tctgtgtcttaacagcaggagatgaaattcccacatgggagatggcctccctgtcacagaaggaataccattctccctatcaatgatgagaaattggaactgagagaattctgtatagac

SEQ ID NO: 350184 - DNA, 120 bp, Artificial Sequence
  ENSG00000138821_41 (sequence is synthesized)
cttgttcaagtaattcttctattttaaacctccccacataatttagctgccttttcaaaactactgtcctttgtgcaaccagtatagaagcgattgactctcactgcatccttgggtctt

SEQ ID NO: 350185 - DNA, 120 bp, Artificial Sequence
  ENSG00000138821_42 (sequence is synthesized)
cttttccctatatgggctcttttcccatatgggctcttatgtcctgtaaaacatgtattaaataaatttgtatgcttttctcccgttaacctgtcttacatcaatttaattcttgggccc

SEQ ID NO: 350186 - DNA, 120 bp, Artificial Sequence
  ENSG00000138821_43 (sequence is synthesized)
aggtaggaccctaagaggacagaggtcgagttttgccacctctgcaagagaaaagagagatgcccagaccaccaggcctgggaaatctttgatttcccaggctttgaagtgggcactgtg

SEQ ID NO: 350187 - DNA, 120 bp, Artificial Sequence
  ENSG00000138821_44 (sequence is synthesized)
tctgaacctggccctctgaaacttcctgttcctggacatcccagctgctaatgtgagttgcccttgcactggctcagggctgggacattaaaggaatttcccttttgttgacataacagt

SEQ ID NO: 350188 - DNA, 120 bp, Artificial Sequence
  ENSG00000138821_45 (sequence is synthesized)
aggatggctatagctaacaataatatattatttagtttcaagtagctagaaggaacatatgaatgttcccaacacaaagaaatgacaactatttgagatgatggatatgctaataacctt

SEQ ID NO: 350189 - DNA, 120 bp, Artificial Sequence
  ENSG00000138821_46 (sequence is synthesized)
aatctgattcctatacattatatgcatcacatatacatacattatatgtataacatcactatgtaccccataaatatgtgcaattattgtcaattaaacaaataaatttaaacaaacatt

SEQ ID NO: 350190 - DNA, 120 bp, Artificial Sequence
  ENSG00000138821_47 (sequence is synthesized)
tccttaagagttgggagagtggacatatgggaagtactctcgtggagaattattcatgcctgctgttcagcttaccccatgctgcatcaaagacttggcgttattgagaattcagagtga

SEQ ID NO: 350191 - DNA, 83 bp, Artificial Sequence
  ENSG00000138821_48 (sequence is synthesized)
ctataaaggtaaatgctatctaagccacagtaaccttgagatactgtgggcctggggcagagaagagcatctgtagaagaggc

SEQ ID NO: 350192 - DNA, 120 bp, Artificial Sequence
  ENSG00000138823_0 (sequence is synthesized)
acctacgtttaatcattaatagtgagcccttcagtgaacttaggtcctgattttggagtttggagtctgacctttccccaaagataaacatgattgttgcaggttctgaagagggtcact

SEQ ID NO: 350193 - DNA, 120 bp, Artificial Sequence
  ENSG00000138823_1 (sequence is synthesized)
ccctcactggctgccattgaaagagtccacttctcagtgactcctagctgggcactggatgcagttgaggattgctggtcaatatgattcttcttgctgtgctttttctctgcttcattt

SEQ ID NO: 350194 - DNA, 120 bp, Artificial Sequence
  ENSG00000138823_2 (sequence is synthesized)
cctcatattcagcttctgttaaaggtcacacaactggtctctcattaaataatgaccggctgtacaagctcacgtactccactgaagttcttcttgatcggggcaaaggaaaactgcaag

SEQ ID NO: 350195 - DNA, 120 bp, Artificial Sequence
  ENSG00000138823_3 (sequence is synthesized)
acagcgtgggctaccgcatttcctccaacgtggatgtggccttactatggaggaatcctgatggtgatgatgaccagttgatccaaataacgatgaaggatgtaaatgttgaaaatgtga

SEQ ID NO: 350196 - DNA, 120 bp, Artificial Sequence
  ENSG00000138823_4 (sequence is synthesized)
atcagcagagaggagagaagagcatcttcaaaggaaaaagcccatctaaaataatgggaaaggaaaacttggaagctctgcaaagacctacgctccttcatctaatccatggaaaggtca

SEQ ID NO: 350197 - DNA, 120 bp, Artificial Sequence
  ENSG00000138823_5 (sequence is synthesized)
aagagttctactcatatcaaaatgaggcagtggccatagaaaatatcaagagaggtctggctagcctatttcagacacagttaagctctggaaccaccaatgaggtagatatctctggaa

SEQ ID NO: 350198 - DNA, 120 bp, Artificial Sequence
  ENSG00000138823_6 (sequence is synthesized)
attgtaaagtgacctaccaggctcatcaagacaaagtgatcaaaattaaggccttggattcatgcaaaatagcgaggtctggatttacgaccccaaatcaggtcttgggtgtcagttcaa

SEQ ID NO: 350199 - DNA, 120 bp, Artificial Sequence
  ENSG00000138823_7 (sequence is synthesized)
aagctacatctgtcaccacctataagatagaagacagctttgttatagctgtgcttgctgaagaaacacacaattttggactgaatttcctacaaaccattaaggggaaaatagtatcga

SEQ ID NO: 350200 - DNA, 120 bp, Artificial Sequence
  ENSG00000138823_8 (sequence is synthesized)
agcagaaattagagctgaagacaaccgaagcaggcccaagattgatgtctggaaagcaggctgcagccataatcaaagcagttgattcaaagtacacggccattcccattgtggggcagg

SEQ ID NO: 350201 - DNA, 120 bp, Artificial Sequence
  ENSG00000138823_9 (sequence is synthesized)
tcttccagagccactgtaaaggatgtccttctctctcggagctctggcggtccaccaggaaatacctgcagcctgacaacctttccaaggctgaggctgtcagaaacttcctggccttca

SEQ ID NO: 350202 - DNA, 120 bp, Artificial Sequence
  ENSG00000138823_10 (sequence is synthesized)
ttcagcacctcaggactgcgaagaaagaagagatccttcaaatactaaagatggaaaataaggaagtattacctcagctggtggatgctgtcacctctgctcagacctcagactcattag

SEQ ID NO: 350203 - DNA, 120 bp, Artificial Sequence
  ENSG00000138823_11 (sequence is synthesized)
aagccattttggactttttggatttcaaaagtgacagcagcattatcctccaggagaggtttctctatgcctgtggatttgcttctcatcccaatgaagaactcctgagagccctcatta

SEQ ID NO: 350204 - DNA, 120 bp, Artificial Sequence
  ENSG00000138823_12 (sequence is synthesized)
gtaagttcaaaggttctattggtagcagtgacatcagagaaactgttatgatcatcactgggacacttgtcagaaagttgtgtcagaatgaaggctgcaaactcaaagcagtagtggaag

SEQ ID NO: 350205 - DNA, 120 bp, Artificial Sequence
  ENSG00000138823_13 (sequence is synthesized)
ctaagaagttaatcctgggaggacttgaaaaagcagagaaaaaagaggacaccaggatgtatctgctggctttgaagaatgccctgcttccagaaggcatcccaagtcttctgaagtatg

SEQ ID NO: 350206 - DNA, 120 bp, Artificial Sequence
  ENSG00000138823_14 (sequence is synthesized)
cagaagcaggagaagggcccatcagccacctggctaccactgctctccagagatatgatctccctttcataactgatgaggtgaagaagaccttaaacagaatataccaccaaaaccgta

SEQ ID NO: 350207 - DNA, 120 bp, Artificial Sequence
  ENSG00000138823_15 (sequence is synthesized)
aagttcatgaaaagactgtgcgcactgctgcagctgctatcattttaaataacaatccatcctacatggacgtcaagaacatcctgctgtctattggggagcttccccaagaaatgaata

SEQ ID NO: 350208 - DNA, 120 bp, Artificial Sequence
  ENSG00000138823_16 (sequence is synthesized)
gaaatggtcgctcacaattatgaccgtttctccaggagtggatcttcttctgcctacactggctacatagaacgtagtccccgttcggcatctacttacagcctagacattctctactcg

SEQ ID NO: 350209 - DNA, 120 bp, Artificial Sequence
  ENSG00000138823_17 (sequence is synthesized)
ggttctggcattctaaggagaagtaacctgaacatctttcagtacattgggaaggctggtcttcacggtagccaggtggttattgaagcccaaggactggaagccttaatcgcagccacc

SEQ ID NO: 350210 - DNA, 120 bp, Artificial Sequence
  ENSG00000138823_18 (sequence is synthesized)
cctgacgagggggaggagaaccttgactcctatgctggtatgtcagccatcctctttgatgttcagctcagacctgtcacctttttcaacggatacagtgatttgatgtccaaaatgctg

SEQ ID NO: 350211 - DNA, 120 bp, Artificial Sequence
  ENSG00000138823_19 (sequence is synthesized)
tcagcatctggcgaccctatcagtgtggtgaaaggacttattctgctaatagatcattctcaggaacttcagttacaatctggactaaaagccaatatagaggtccagggtggtctagct

SEQ ID NO: 350212 - DNA, 120 bp, Artificial Sequence
  ENSG00000138823_20 (sequence is synthesized)
attgatatttcaggtgcaatggagtttagcttgtggtatcgtgagtctaaaacccgagtgaaaaatagggtgactgtggtaataaccactgacatcacagtggactcctcttttgtgaaa

SEQ ID NO: 350213 - DNA, 120 bp, Artificial Sequence
  ENSG00000138823_21 (sequence is synthesized)
gctggcctggaaaccagtacagaaacagaagcaggcttggagtttatctccacagtgcagttttctcagtacccattcttagtttgcatgcagatggacaaggatgaagctccattcagg

SEQ ID NO: 350214 - DNA, 120 bp, Artificial Sequence
  ENSG00000138823_22 (sequence is synthesized)
caatttgagaaaaagtacgaaaggctgtccacaggcagaggttatgtctctcagaaaagaaaagaaagcgtattagcaggatgtgaattcccgctccatcaagagaactcagagatgtgc

SEQ ID NO: 350215 - DNA, 120 bp, Artificial Sequence
  ENSG00000138823_23 (sequence is synthesized)
aaagtggtgtttgcccctcagccggatagtacttccagcggatggttttgaaactgacctgtgatattttacttgaatttgtctccccgaaagggacacaatgtggcatgactaagtact

SEQ ID NO: 350216 - DNA, 120 bp, Artificial Sequence
  ENSG00000138823_24 (sequence is synthesized)
tgctctctgagagcacagcgtttacatatttacctgtatttaagatttttgtaaaaagctacaaaaaactgcagtttgatcaaatttgggtatatgcagtatgctacccacagcgtcatt

SEQ ID NO: 350217 - DNA, 120 bp, Artificial Sequence
  ENSG00000138823_25 (sequence is synthesized)
ttgaatcatcatgtgacgctttcaacaacgttcttagtttacttatacctctctcaaatctcatttggtacagtcagaatagttattctctaagaggaaactagtgtttgttaaaaacaa

SEQ ID NO: 350218 - DNA, 120 bp, Artificial Sequence
  ENSG00000138823_26 (sequence is synthesized)
aaataaaaacaaaaccacacaaggagaacccaattttgtttcaacaatttttgatcaatgtatatgaagctcttgataggacttccttaagcatgacgggaaaaccaaacacgttcccta

SEQ ID NO: 350219 - DNA, 120 bp, Artificial Sequence
  ENSG00000138823_27 (sequence is synthesized)
aaaaaaaaaaaaaaaaagtaagacacaaacaaaccattttttttctctttttttggagttgggggcccagggagaagggacaagacttttaaaagacttgttagccaacttcaagaatta

SEQ ID NO: 350220 - DNA, 120 bp, Artificial Sequence
  ENSG00000138823_28 (sequence is synthesized)
aagaattaatatttatgtctctgttattgttagttttaagccttaaggtagaaggcacatagaaataacatctcatctttctgctgaccattttagtgaggttgttccaaagacattcag

SEQ ID NO: 350221 - DNA, 120 bp, Artificial Sequence
  ENSG00000138823_29 (sequence is synthesized)
gtctctacctccagccctgcaaaaatattggacctagcacagaggaatcaggaaaattaatttcagaaactccatttgatttttcttttgctgtgtctttttgagactgtaatatggtac

SEQ ID NO: 350222 - DNA, 120 bp, Artificial Sequence
  ENSG00000138823_30 (sequence is synthesized)
actgtcctctaagggacatcctcattttatctcacctttttgggggtgagagctctagttcatttaactgtactctgcacaatagctaggatgactaagagaacattgcttcaagaaact

SEQ ID NO: 350223 - DNA, 120 bp, Artificial Sequence
  ENSG00000138823_31 (sequence is synthesized)
ggtggatttggatttccaaaatatgaaataaggaaaaaaatgtttttatttgtatgaattaaaagatccatgttgaacatttgcaaatatttattaataaacagatgtggtgataaaccc

SEQ ID NO: 350224 - DNA, 120 bp, Artificial Sequence
  ENSG00000138823_32 (sequence is synthesized)
aaaacaaatgacaggtccttattttccactaaacacagacacatgaaatgaaagtttagctagcccactatttgttgtaaattgaaaacgaagtgtgataaaataaatatgtagaaatca

SEQ ID NO: 350225 - DNA, 120 bp, Artificial Sequence
  ENSG00000138823_33 (sequence is synthesized)
tttcgaacccgcaatggaagaaaggggaggggtttatgcggggcggggtctggagttagtgttttgggagtgggaggtagttacagtgatgtctgttttttcccgttcaagaattaagtg

SEQ ID NO: 350226 - DNA, 120 bp, Artificial Sequence
  ENSG00000138823_34 (sequence is synthesized)
agtagggggctgcatggcacgcgcccctttgcgtccagagaataccatagtgcgggggagcgccaaccagtgccaggacacttaccgagctgaagagttgacaggtcacacaactggtct

SEQ ID NO: 350227 - DNA, 120 bp, Artificial Sequence
  ENSG00000138823_35 (sequence is synthesized)
gtaatcacattgtaactacttttatggtaaatggaatttcttcaagaactaaagaacagaggttgtaaattaaatgtttccaaactgaatcaatgccctgagttcccttacatttactag

SEQ ID NO: 350228 - DNA, 120 bp, Artificial Sequence
  ENSG00000138823_36 (sequence is synthesized)
ccaatttgtttcctatttttctggaaatctttatagtggaatgaagtatttatttattgatgaaaggcattattaaaaggtaaatttctcatcaaattataagggattacaaacgtaatg

SEQ ID NO: 350229 - DNA, 120 bp, Artificial Sequence
  ENSG00000138823_37 (sequence is synthesized)
taacaaagcaagtcatcaaagcatgattggatgaattcaggaaaggagacaaattatgagactgaaatgatccaactgagattagtaatattgatttgttatgagattatcgatatctgg

SEQ ID NO: 350230 - DNA, 120 bp, Artificial Sequence
  ENSG00000138823_38 (sequence is synthesized)
ctaaagtacaaggttaaagattttaaaagggtatgacaagtctaaagtagagtttttttaaagcctttagaaattattttaaaactatgacatggaaaagccttttatatattaaaataa

SEQ ID NO: 350231 - DNA, 120 bp, Artificial Sequence
  ENSG00000138823_39 (sequence is synthesized)
tgattgaacactttataatatatatttgaaaatctgttttaaaaattctatgtgtgcattacttatggcttgattctagtcaattgaaatggtctaaataaatttggaattgagaaacaa

SEQ ID NO: 350232 - DNA, 120 bp, Artificial Sequence
  ENSG00000138823_40 (sequence is synthesized)
tgtacctgcagacgtgtattcattcatatattcttgcccagtataatcacaaggattcataaaacggaagagggagacagaagagatggtcagagtgatatgaagtaaaaaggattcagc

SEQ ID NO: 350233 - DNA, 120 bp, Artificial Sequence
  ENSG00000138823_41 (sequence is synthesized)
agcaagagcgccgcaggaaaccacttccacaccactgctcccctctcccccggaagcccttgttgctagtagggggctgcatggcacgcgcccctttgcgtccagagaataccatagtgc

SEQ ID NO: 350234 - DNA, 120 bp, Artificial Sequence
  ENSG00000138823_42 (sequence is synthesized)
gctagtagggggctgcatggcacgcgcccctttgcgtccagagaataccatagtgcgggggagcgccaaccagtgccaggacacttaccgagctgaagagttgacaggcaggcccagtat

SEQ ID NO: 350235 - DNA, 120 bp, Artificial Sequence
  ENSG00000138823_43 (sequence is synthesized)
tgtacctgcagacgtgtattcattcatatattcttgtgagtattggatgaaggaattaagatagtcccactgttaaaaatgcaaaacaacgaagaaaggctcctaatttttctgtgttga

SEQ ID NO: 350236 - DNA, 120 bp, Artificial Sequence
  ENSG00000138829_0 (sequence is synthesized)
gccgcatcttctccagcgcccagcctcccgccctctctcttgctggccgcacgccccggccccgcgcacctccgcccggctccgcagccgctacccgcgcttcgttgccctgtgggactc

SEQ ID NO: 350237 - DNA, 120 bp, Artificial Sequence
  ENSG00000138829_1 (sequence is synthesized)
cgagcgagcccggagggaaccctcctcttcttctgggggcgacttttgtttgcttgcctgtttctttctggtgacttttgcagctttccaatatccgtcttcggagcgcacgggaatccg

SEQ ID NO: 350238 - DNA, 120 bp, Artificial Sequence
  ENSG00000138829_2 (sequence is synthesized)
ccgagctctgcgtgcaggcccttttttcttttgaggttcacattttttgaaattttacgccagggcttttgtaatttcctcccccgcccgctgacggtcctggagtcgctcggggcttta

SEQ ID NO: 350239 - DNA, 120 bp, Artificial Sequence
  ENSG00000138829_3 (sequence is synthesized)
ggccggttatgcaacgtgtaccgctcggggctgccggctgcacctccgccgcgcctcgccgctcactgcgctagacccggcgccccgcgtctcgcttcgcgggcagtcagggggccggcg

SEQ ID NO: 350240 - DNA, 120 bp, Artificial Sequence
  ENSG00000138829_4 (sequence is synthesized)
ctctgtcgaggtctccagctagagcagggagcccgagcccgagggagtccccggagccgacgaagggcttattagaccctgactcttttctgaggcgcgcagattttgtctttgatcact

SEQ ID NO: 350241 - DNA, 120 bp, Artificial Sequence
  ENSG00000138829_5 (sequence is synthesized)
ccctctccgcgggtctacggccgcgcgctttcggcgccggcgatggggagaagacggaggctgtgtctccagctctacttcctgtggctgggctgtgtggtgctctgggcgcagggcacg

SEQ ID NO: 350242 - DNA, 120 bp, Artificial Sequence
  ENSG00000138829_6 (sequence is synthesized)
gccggccagcctcagcctcctccgcccaagccgccccggccccagccgccgccgcaacaggttcggtccgctacagcaggctctgaaggcgggtttctagcgcccgagtatcgcgaggag

SEQ ID NO: 350243 - DNA, 120 bp, Artificial Sequence
  ENSG00000138829_7 (sequence is synthesized)
ggtgccgcagtggccagccgcgtccgccggcgaggacagcaggacgtgctccgagggcccaacgtgtgcggctccagattccactcctactgctgccctggatggaagacgctccctgga

SEQ ID NO: 350244 - DNA, 120 bp, Artificial Sequence
  ENSG00000138829_8 (sequence is synthesized)
ggaaaccagtgcattgtcccgatttgtagaaatagttgtggagatggattttgttcccgtcctaacatgtgtacttgttccagtgggcaaatatcatcaacctgtggatcaaaatcaatt

SEQ ID NO: 350245 - DNA, 120 bp, Artificial Sequence
  ENSG00000138829_9 (sequence is synthesized)
cagcagtgcagtgtgagatgcatgaatggtgggacctgtgcagatgaccactgccagtgccagaaaggatatattggaacttattgtggacaacctgtctgtgaaaatggatgtcagaat

SEQ ID NO: 350246 - DNA, 120 bp, Artificial Sequence
  ENSG00000138829_10 (sequence is synthesized)
ggtggacgttgcatcggacccaaccgctgtgcttgtgtttatgggttcactggtccacagtgtgaaagagattacaggacaggcccgtgtttcactcaggtcaacaaccagatgtgccaa

SEQ ID NO: 350247 - DNA, 120 bp, Artificial Sequence
  ENSG00000138829_11 (sequence is synthesized)
gggcagctgacaggcattgtctgcacgaagactctgtgctgtgccaccattggacgggcgtggggccatccctgtgagatgtgtccagcccagcctcagccctgccgacggggtttcatc

SEQ ID NO: 350248 - DNA, 120 bp, Artificial Sequence
  ENSG00000138829_12 (sequence is synthesized)
cccaacatccgcactggagcttgccaagatgttgatgaatgccaggctatcccagggatatgccaaggaggaaactgtatcaatacagtgggctcttttgaatgcagatgccctgctggt

SEQ ID NO: 350249 - DNA, 120 bp, Artificial Sequence
  ENSG00000138829_13 (sequence is synthesized)
cacaaacagagtgaaactactcagaaatgtgaagacattgatgagtgcagcatcattcctgggatatgtgaaactggtgaatgttccaacaccgtgggaagctatttttgtgtttgtcca

SEQ ID NO: 350250 - DNA, 120 bp, Artificial Sequence
  ENSG00000138829_14 (sequence is synthesized)
cgtggatatgtaacctcaacagatggctctcgatgcatcgatcagagaacaggcatgtgtttctcgggcctggtgaatggccgctgtgcacaagagctcccggggagaatgacgaaaatg

SEQ ID NO: 350251 - DNA, 120 bp, Artificial Sequence
  ENSG00000138829_15 (sequence is synthesized)
cagtgctgctgtgagcctggccgctgctggggcatcggaaccattcctgaagcctgtcctgtcagaggttctgaggaatatcgcagactttgcatggatggacttccaatgggaggaatt

SEQ ID NO: 350252 - DNA, 120 bp, Artificial Sequence
  ENSG00000138829_16 (sequence is synthesized)
ccagggagtgctggttccagacctggaggcactgggggaaatggctttgccccaagtggcaatggcaatggctatggcccaggagggacaggcttcatccccatccctggaggcaatggc

SEQ ID NO: 350253 - DNA, 120 bp, Artificial Sequence
  ENSG00000138829_17 (sequence is synthesized)
ttttctcctggcgttgggggagccggtgtgggggccgggggacagggacctatcatcactggactaacaattctgaaccagacaatagatatctgtaagcatcatgctaacctttgttta

SEQ ID NO: 350254 - DNA, 120 bp, Artificial Sequence
  ENSG00000138829_18 (sequence is synthesized)
aatggacgctgtataccaactgtctcaagctaccgatgtgaatgcaacatgggttataagcaggatgcaaatggagattgtatagatgttgatgaatgcacatcaaatccctgcactaat

SEQ ID NO: 350255 - DNA, 120 bp, Artificial Sequence
  ENSG00000138829_19 (sequence is synthesized)
ggagattgtgttaacacacctggttcctattattgtaaatgtcatgctggattccagaggactcctaccaagcaagcatgcattgatattgatgagtgcatccagaatggggttctttgt

SEQ ID NO: 350256 - DNA, 120 bp, Artificial Sequence
  ENSG00000138829_20 (sequence is synthesized)
aaaaacggtcgatgcgtgaacacagatggaagtttccagtgcatttgcaatgccggctttgaattaactacagatggaaaaaactgtgttgatcatgatgaatgtacaactaccaacatg

SEQ ID NO: 350257 - DNA, 120 bp, Artificial Sequence
  ENSG00000138829_21 (sequence is synthesized)
tgtttgaatggaatgtgcatcaatgaagatggcagcttcaagtgcatctgcaaaccaggatttgtcttggctccaaatgggcgttactgtactgatgttgatgaatgccagaccccagga

SEQ ID NO: 350258 - DNA, 120 bp, Artificial Sequence
  ENSG00000138829_22 (sequence is synthesized)
atctgcatgaatgggcactgcatcaacagtgaagggtccttccgctgtgactgtcccccaggcctggctgtgggcatggatggacgtgtgtgtgttgatactcacatgcgcagtacctgc

SEQ ID NO: 350259 - DNA, 120 bp, Artificial Sequence
  ENSG00000138829_23 (sequence is synthesized)
tatggaggaatcaagaaaggagtgtgtgtgcgtcctttccccggtgcagtgaccaagtccgaatgctgctgtgccaatccagactatggttttggagaaccctgccagccatgccctgca

SEQ ID NO: 350260 - DNA, 120 bp, Artificial Sequence
  ENSG00000138829_24 (sequence is synthesized)
aaaaattcagctgaattccacggcctttgtagtagtggagtaggtatcactgtggatggaagagatatcaatgaatgtgctttggatcctgatatatgtgccaatgggatttgtgaaaac

SEQ ID NO: 350261 - DNA, 120 bp, Artificial Sequence
  ENSG00000138829_25 (sequence is synthesized)
ttacgtggtagttaccgttgtaattgcaacagtggctatgaaccagatgcctctggaagaaactgtattgacattgatgaatgtttagtaaacagactgctttgtgataacggattgtgc

SEQ ID NO: 350262 - DNA, 120 bp, Artificial Sequence
  ENSG00000138829_26 (sequence is synthesized)
cgaaacacgccaggaagttacagctgtacgtgcccaccagggtatgtgttcaggactgagacagagacctgtgaagatataaatgaatgtgaaagcaacccatgtgtcaatggggcctgc

SEQ ID NO: 350263 - DNA, 120 bp, Artificial Sequence
  ENSG00000138829_27 (sequence is synthesized)
agaaacaaccttggatctttcaattgtgaatgttcgcccggcagcaaactcagctccacaggattgatctgtattgacagcctgaaggggacctgttggctcaacatccaggacagccgc

SEQ ID NO: 350264 - DNA, 120 bp, Artificial Sequence
  ENSG00000138829_28 (sequence is synthesized)
tgtgaggtgaatattaatggagccactctgaaatctgaatgctgtgccaccctcggagccgcctgggggagcccctgtgagcggtgtgaactagatacagcttgcccaagagggcttgcc

SEQ ID NO: 350265 - DNA, 120 bp, Artificial Sequence
  ENSG00000138829_29 (sequence is synthesized)
aggattaaaggtgttacgtgtgaagatgttaatgagtgtgaggtgttccctggcgtttgtccaaatggacgctgtgtcaacagtaagggatcttttcattgcgagtgccctgaaggcctt

SEQ ID NO: 350266 - DNA, 120 bp, Artificial Sequence
  ENSG00000138829_30 (sequence is synthesized)
acgttggatgggactggccgtgtatgtttggatattcgcatggagcagtgttacttgaagtgggatgaagatgaatgcatccaccccgttcctggaaagttccgcatggatgcctgctgc

SEQ ID NO: 350267 - DNA, 120 bp, Artificial Sequence
  ENSG00000138829_31 (sequence is synthesized)
tgtgctgtcggggcggcttggggcaccgagtgtgaggagtgccccaaacctggcaccaaggaatacgagacgctgtgcccccgcggggctggctttgctaaccgaggggatgttcttact

SEQ ID NO: 350268 - DNA, 120 bp, Artificial Sequence
  ENSG00000138829_32 (sequence is synthesized)
gggcggccattttacaaagacatcaatgaatgcaaagcatttcctgggatgtgcacttatgggaagtgcagaaatacaatcggaagcttcaaatgccgttgcaatagtggctttgctcta

SEQ ID NO: 350269 - DNA, 120 bp, Artificial Sequence
  ENSG00000138829_33 (sequence is synthesized)
gacatggaggaaagaaactgcacggacatcgacgagtgcaggatttctcctgacctctgtggcagtggaatctgcgtcaatacaccgggcagctttgagtgcgagtgcttcgaaggctat

SEQ ID NO: 350270 - DNA, 120 bp, Artificial Sequence
  ENSG00000138829_34 (sequence is synthesized)
gaaagtggcttcatgatgatgaagaactgcatggacattgacgaatgtgaacgtaaccctctcctttgtaggggtggcacctgtgtgaacactgagggcagctttcagtgtgactgccca

SEQ ID NO: 350271 - DNA, 120 bp, Artificial Sequence
  ENSG00000138829_35 (sequence is synthesized)
ctgggacacgagctgtcaccatcccgtgaggactgtgtggatattaatgaatgctccctgagtgacaatctctgcagaaatggaaaatgtgtgaacatgattggaacctatcagtgctct

SEQ ID NO: 350272 - DNA, 120 bp, Artificial Sequence
  ENSG00000138829_36 (sequence is synthesized)
tgcaatcctggatatcaggctacgccagaccgccagggctgtacagatattgatgaatgtatgataatgaacggaggctgtgacacccagtgcacaaattcagagggaagctacgaatgc

SEQ ID NO: 350273 - DNA, 120 bp, Artificial Sequence
  ENSG00000138829_37 (sequence is synthesized)
agctgcagtgagggttatgccctgatgccagatgggagatcgtgtgcagacattgatgaatgtgaaaacaatcctgatatctgtgatggcggccagtgtaccaacattcctggagagtat

SEQ ID NO: 350274 - DNA, 120 bp, Artificial Sequence
  ENSG00000138829_38 (sequence is synthesized)
cgctgcctctgctatgatggcttcatggcttccatggacatgaaaacatgcattgatgtcaatgaatgtgacctaaattcaaatatctgcatgtttggggaatgtgagaacacaaaggga

SEQ ID NO: 350275 - DNA, 120 bp, Artificial Sequence
  ENSG00000138829_39 (sequence is synthesized)
tccttcatttgccactgtcagctgggttactcagtgaagaaggggaccacaggatgtacagatgtggatgagtgtgaaattggtgctcataactgcgacatgcatgcctcatgtctgaat

SEQ ID NO: 350276 - DNA, 120 bp, Artificial Sequence
  ENSG00000138829_40 (sequence is synthesized)
atcccaggaagcttcaagtgtagctgcagagaaggctggattggaaacggcatcaagtgtattgatctggacgaatgttctaatggaacccaccagtgtagcatcaatgctcagtgtgta

SEQ ID NO: 350277 - DNA, 120 bp, Artificial Sequence
  ENSG00000138829_41 (sequence is synthesized)
aataccccgggctcataccgctgtgcctgctccgaaggtttcactggtgatggctttacctgctcagatgttgatgagtgtgcagaaaacataaacctctgtgagaacggacagtgcctt

SEQ ID NO: 350278 - DNA, 120 bp, Artificial Sequence
  ENSG00000138829_42 (sequence is synthesized)
aatgtcccgggtgcatatcgctgcgagtgtgagatgggcttcactccagcctcagacagcagatcctgccaagatattgatgaatgctccttccaaaacatttgtgtctttggaacatgt

SEQ ID NO: 350279 - DNA, 120 bp, Artificial Sequence
  ENSG00000138829_43 (sequence is synthesized)
aataacctgcctggaatgtttcattgcatctgcgatgatggttatgaattggacagaacaggagggaactgtacagatattgatgagtgtgcagatcctataaactgtgtcaatggccta

SEQ ID NO: 350280 - DNA, 120 bp, Artificial Sequence
  ENSG00000138829_44 (sequence is synthesized)
tgtgtcaacacgcctggtcgctatgagtgtaactgcccacccgattttcagttgaacccaactggtgtgggttgtgttgacaaccgtgtgggcaactgctacctgaagtttggacctcga

SEQ ID NO: 350281 - DNA, 120 bp, Artificial Sequence
  ENSG00000138829_45 (sequence is synthesized)
ggagtctgtcttgcaacaccgagatcggggtgggcgtcagtcgctcttcatgctgctgctctctgggaaaggcctggggaaacccctgtgagacatgcccccctgtcaatagcactgaat

SEQ ID NO: 350282 - DNA, 120 bp, Artificial Sequence
  ENSG00000138829_46 (sequence is synthesized)
attacaccctgtgtcccggaggtgaaggcttcagacctaaccccatcacaatcattttagaagacattgacgaatgccaggagttaccaggtctctgccagggtggaaactgcatcaaca

SEQ ID NO: 350283 - DNA, 120 bp, Artificial Sequence
  ENSG00000138829_47 (sequence is synthesized)
cttttgggagcttccagtgtgagtgcccacaaggctactacctcagcgaggatacccgcatctgtgaagatattgatgagtgttttgcacatcctggtgtgtgtgggcctgggacctgct

SEQ ID NO: 350284 - DNA, 120 bp, Artificial Sequence
  ENSG00000138829_48 (sequence is synthesized)
ataacaccctgggaaattacacctgcatttgcccacctgagtacatgcaggtcaatggaggccacaactgcatggacatgagaaaaagcttttgctaccgaagctataatggaaccactt

SEQ ID NO: 350285 - DNA, 120 bp, Artificial Sequence
  ENSG00000138829_49 (sequence is synthesized)
gtgagaatgagttgcctttcaatgtgacaaaaaggatgtgctgctgcacatataatgtgggcaaagcctggaacaaaccttgtgaaccatgcccaactccaggaacagctgactttaaaa

SEQ ID NO: 350286 - DNA, 120 bp, Artificial Sequence
  ENSG00000138829_50 (sequence is synthesized)
ccatatgtggaaatattcctggattcacctttgacattcacacaggaaaagctgttgacattgatgaatgtaaagagattccaggcatttgtgcaaatggtgtgtgcattaaccagattg

SEQ ID NO: 350287 - DNA, 120 bp, Artificial Sequence
  ENSG00000138829_51 (sequence is synthesized)
gcagtttccgctgtgaatgccctacaggattcagttacaatgacctgctgttggtttgtgaagatatagatgagtgcagcaatggtgataatctctgccagcggaatgcagactgcatca

SEQ ID NO: 350288 - DNA, 120 bp, Artificial Sequence
  ENSG00000138829_52 (sequence is synthesized)
atagtcctggtagttaccgctgtgaatgtgccgcgggtttcaaactttcacccaatggggcctgtgtagatcgcaatgaatgtttagaaattcctaacgtttgcagtcatggcttgtgtg

SEQ ID NO: 350289 - DNA, 120 bp, Artificial Sequence
  ENSG00000138829_53 (sequence is synthesized)
ttgatctgcaaggaagttaccagtgcatctgccacaatggctttaaggcttctcaggaccagaccatgtgcatggatgttgatgagtgcgagcggcatccatgtggaaatggaacttgta

SEQ ID NO: 350290 - DNA, 120 bp, Artificial Sequence
  ENSG00000138829_54 (sequence is synthesized)
aaaacaccgttggatcctataactgtctgtgctacccagggtttgaactcactcataataatgattgcctggacatagatgagtgcagttccttttttggtcaggtgtgcagaaatggac

SEQ ID NO: 350291 - DNA, 120 bp, Artificial Sequence
  ENSG00000138829_55 (sequence is synthesized)
gttgttttaatgaaattggttctttcaagtgtctatgtaacgaaggttatgaacttaccccagatggcaaaaactgtatagacactaatgagtgtgtcgcccttcccggctcttgctctc

SEQ ID NO: 350292 - DNA, 120 bp, Artificial Sequence
  ENSG00000138829_56 (sequence is synthesized)
ctggtacctgtcagaatttggagggatccttcagatgcatctgtcccccagggtatgaagtaaaaagcgagaactgcattgatataaatgaatgtgatgaagatcccaacatttgtcttt

SEQ ID NO: 350293 - DNA, 120 bp, Artificial Sequence
  ENSG00000138829_57 (sequence is synthesized)
ttggttcctgtactaatactccagggggcttccagtgcctctgcccccctggctttgtactatctgataatggacggagatgctttgatactcgccagagcttctgcttcacaaattttg

SEQ ID NO: 350294 - DNA, 120 bp, Artificial Sequence
  ENSG00000138829_58 (sequence is synthesized)
aaaatggaaagtgttctgtacccaaagctttcaacaccacaaaagcaaaatgctgctgtagtaagatgccaggagagggctggggggacccctgtgagctgtgccccaaagacgatgaag

SEQ ID NO: 350295 - DNA, 120 bp, Artificial Sequence
  ENSG00000138829_59 (sequence is synthesized)
ttgcatttcaggatttgtgtccatatggccatggaactgtccctagtcttcatgatacacgtgaagatgtcaatgagtgtcttgagagcccaggcatttgttcaaatggtcaatgtatca

SEQ ID NO: 350296 - DNA, 120 bp, Artificial Sequence
  ENSG00000138829_60 (sequence is synthesized)
acaccgacggatcttttcgctgtgaatgtccaatgggctacaaccttgactacactggagtacgctgtgtggatactgatgagtgttcaatcggcaatccgtgtggaaatggtacatgca

SEQ ID NO: 350297 - DNA, 120 bp, Artificial Sequence
  ENSG00000138829_61 (sequence is synthesized)
ccaatgttattgggagttttgaatgcaattgcaatgaaggctttgagccagggcccatgatgaattgtgaagatatcaacgaatgtgcccagaacccactgctgtgtgctttccgctgca

SEQ ID NO: 350298 - DNA, 120 bp, Artificial Sequence
  ENSG00000138829_62 (sequence is synthesized)
tgaacacttttgggtcctatgaatgcacgtgcccgattggctatgccctcagggaagatcaaaagatgtgcaaagatctggatgaatgtgctgaagggttacacgactgtgaatctaggg

SEQ ID NO: 350299 - DNA, 120 bp, Artificial Sequence
  ENSG00000138829_63 (sequence is synthesized)
gcatgatgtgtaagaatctaatcggcaccttcatgtgcatctgccctcctggaatggcccgaaggcccgatggagaaggctgtgtagatgaaaatgaatgcaggaccaagccaggaatct

SEQ ID NO: 350300 - DNA, 120 bp, Artificial Sequence
  ENSG00000138829_64 (sequence is synthesized)
gtgaaaatggacgttgtgttaacattattggaagctatagatgtgagtgtaatgaaggattccagtcaagttcttcaggcactgaatgccttgacaatcgacagggtctctgctttgcag

SEQ ID NO: 350301 - DNA, 120 bp, Artificial Sequence
  ENSG00000138829_65 (sequence is synthesized)
aggtactgcagacaatatgtcaaatggcatccagtagtcgcaatctcgtcactaagtcagaatgctgctgtgatggtgggcgaggctggggccaccagtgcgagctttgcccacttcctg

SEQ ID NO: 350302 - DNA, 120 bp, Artificial Sequence
  ENSG00000138829_66 (sequence is synthesized)
gaactgcccagtacaaaaagatatgtcctcatggcccaggatatacaactgatggaagagatattgatgaatgtaaggtaatgccaaacctctgcaccaatggtcagtgcatcaatacca

SEQ ID NO: 350303 - DNA, 120 bp, Artificial Sequence
  ENSG00000138829_67 (sequence is synthesized)
tgggctcattccgatgcttctgcaaggttggctacaccacagacatcagtggaacctcttgtatagaccttgatgaatgctcccagtccccgaaaccatgcaactacatctgcaagaaca

SEQ ID NO: 350304 - DNA, 120 bp, Artificial Sequence
  ENSG00000138829_68 (sequence is synthesized)
ctgaggggagttatcagtgttcatgtccgagggggtatgtcctgcaagaggatggaaagacatgcaaagaccttgatgaatgtcaaacaaagcagcataactgccagttcctctgtgtca

SEQ ID NO: 350305 - DNA, 120 bp, Artificial Sequence
  ENSG00000138829_69 (sequence is synthesized)
acaccctgggggggtttacctgtaaatgtccacctggtttcacacagcatcacactgcttgtatcgacaacaacgaatgtgggtctcaaccttcgctttgtggagcaaagggaatctgtc

SEQ ID NO: 350306 - DNA, 120 bp, Artificial Sequence
  ENSG00000138829_70 (sequence is synthesized)
aaaacactccaggcagtttcagctgtgaatgccaaagagggttctctcttgatgccaccggactgaactgtgaagatgttgatgaatgtgatgggaaccacaggtgccaacacggctgcc

SEQ ID NO: 350307 - DNA, 120 bp, Artificial Sequence
  ENSG00000138829_71 (sequence is synthesized)
agaacatcctgggtggctacagatgtggctgcccccaaggctacatccagcactaccagtggaatcagtgtgtcgatgagaatgaatgctccaatcccaatgcctgtggctctgcttcct

SEQ ID NO: 350308 - DNA, 120 bp, Artificial Sequence
  ENSG00000138829_72 (sequence is synthesized)
gctacaacaccctggggagttacaagtgcgcctgcccctcggggttctccttcgaccagttctccagtgcctgccacgacgtgaatgagtgctcgtcctccaagaacccctgcaattacg

SEQ ID NO: 350309 - DNA, 120 bp, Artificial Sequence
  ENSG00000138829_73 (sequence is synthesized)
gctgctctaacacggaggggggctacctctgtggctgcccccctgggtattacagagtgggacaaggccactgtgtctcaggaatgggatttaacaaggggcagtacctgtcactggata

SEQ ID NO: 350310 - DNA, 120 bp, Artificial Sequence
  ENSG00000138829_74 (sequence is synthesized)
cagaggtcgatgaggaaaatgctctgtccccagaagcatgctacgagtgcaaaatcaacggctattctaagaaagacagcaggcagaagagaagtattcatgaacctgatcccactgctg

SEQ ID NO: 350311 - DNA, 120 bp, Artificial Sequence
  ENSG00000138829_75 (sequence is synthesized)
ttgaacagatcagcctagagagtgtcgacatggacagccccgtcaacatgaagttcaacctctcccacctcggctctaaggagcacatcctggaactaaggcccgccatccagcccctca

SEQ ID NO: 350312 - DNA, 120 bp, Artificial Sequence
  ENSG00000138829_76 (sequence is synthesized)
acaaccacatccgttatgtcatctctcaagggaacgatgacagcgtcttccgcatccaccaaaggaatgggctcagctacttgcacacggccaagaagaagctcatgcccggcacataca

SEQ ID NO: 350313 - DNA, 120 bp, Artificial Sequence
  ENSG00000138829_77 (sequence is synthesized)
cactggaaatcactagcatccctctctacaagaagaaggagcttaagaaactggaagagagcaatgaggatgactacctcctaggggagcttggggaggctctcagaatgaggctgcaga

SEQ ID NO: 350314 - DNA, 120 bp, Artificial Sequence
  ENSG00000138829_78 (sequence is synthesized)
ttcagctctattaacccttcacagacttgggcccaggctcaaatcctagcacagccagtctgcagaagcatttgaaaagtcaaggactaattttaaagaggaaaaataataataactctt

SEQ ID NO: 350315 - DNA, 120 bp, Artificial Sequence
  ENSG00000138829_79 (sequence is synthesized)
gtttctttcctccctgtcttagactttgaatgttgaccctcacagggagggataatttagactctggtatggccaaagatttgagcacaaaggcaaccgtggttactgtattttttatat

SEQ ID NO: 350316 - DNA, 120 bp, Artificial Sequence
  ENSG00000138829_80 (sequence is synthesized)
aacttcattttaaaatatattaaaagaaacctaaatgttcaagatatcagcatatggcactaaatgcacaaaaataatgtgagctttttttttttttcctgttagcagtctgtaacactt

SEQ ID NO: 350317 - DNA, 120 bp, Artificial Sequence
  ENSG00000138829_81 (sequence is synthesized)
tgggtattttgctatagttgctaattaaaaaaatatagatgtttatttatttttaatgcagtaatatatggagaaatgaacaaactatgtaaacaaaaagggaaactcacttgtttttct

SEQ ID NO: 350318 - DNA, 120 bp, Artificial Sequence
  ENSG00000138829_82 (sequence is synthesized)
ttagatttataaatttgagctattttttttagaggtgctttttaaaaatccaatagatacaagagatgtttcctttggttttctgccagtcatccagctgatacacacctgatgatttta

SEQ ID NO: 350319 - DNA, 120 bp, Artificial Sequence
  ENSG00000138829_83 (sequence is synthesized)
aagaaagccacacagagctgaatgggcagtgtaatcaataatttaaaaaacatgaatgtcattagatcctttataacgtagatcgaagccaaagcagctcatttgtgacaacatttcata

SEQ ID NO: 350320 - DNA, 120 bp, Artificial Sequence
  ENSG00000138829_84 (sequence is synthesized)
tcaccagacacaccaggcaacagaagttgaagcacaaccactgtagcaaaataccttgactgcttgtgagaccattagcattgcaggccaaaccgtactgtatttccttctcataacctc

SEQ ID NO: 350321 - DNA, 120 bp, Artificial Sequence
  ENSG00000138829_85 (sequence is synthesized)
aaggaaccatatgtgctacccacaacacctcattcttacccagggtgcgctgcgtcctcatggtactgtaggcagctgaagaaccgccgttcccttgaaagggaacacctggcattctgt

SEQ ID NO: 350322 - DNA, 120 bp, Artificial Sequence
  ENSG00000138829_86 (sequence is synthesized)
ggtgtttcgtgctgtcttaaataatggtgcatttattatgttcaagttatttcaggattgccatatgtgcaaacaaatcatgcaatgcagccaaggaatatatgttgttgttgttgtttt

SEQ ID NO: 350323 - DNA, 120 bp, Artificial Sequence
  ENSG00000138829_87 (sequence is synthesized)
aaacccattttttttttagaattttcattaatactgtagttatacaccatatgcctcattttatcatagcctattgtgtatgaaagatgtttgtacaatgaattgatgtttagtttgctt

SEQ ID NO: 350324 - DNA, 120 bp, Artificial Sequence
  ENSG00000138829_88 (sequence is synthesized)
tagtcatttaaaaagatattgtaccaggatgtgctattaagagcacgtatccattattcttctcaacccaagaacctgtttcctggaccagtgaccaaacctcatatgtgaaatggccaa

SEQ ID NO: 350325 - DNA, 120 bp, Artificial Sequence
  ENSG00000138829_89 (sequence is synthesized)
agcacatgcaggctcctggttgttcctctcaaacctgtgctgaccaaagattagtaaccagttatacccagtattttgaggttttattgtttttttaataactaaaaagaaaaaaggaac

SEQ ID NO: 350326 - DNA, 120 bp, Artificial Sequence
  ENSG00000138829_90 (sequence is synthesized)
agtgtaaatttgtaatcaagagtttgtgaggaaaaacttatggtttttggttttgtttgtttttgtaggtctgtgtatcaaatatgacacttttcttgcaataaagcttattttggggta

SEQ ID NO: 350327 - DNA, 120 bp, Artificial Sequence
  ENSG00000138829_91 (sequence is synthesized)
ggcagttagggcaactggaaggctgggagctgaaatcacctgaagtctcattcactcacatgtctgatggttgatattgtctatcagattcttttttgtctccttctctgcaagaggctg

SEQ ID NO: 350328 - DNA, 120 bp, Artificial Sequence
  ENSG00000138829_92 (sequence is synthesized)
gcaccagatcacctcctgagtagagcagacattccaaaggatgtcctgccaacaataatggaaagctggatacaactgaatatgtaaaatgatgttaatgaagaattgaagagcactgta

SEQ ID NO: 350329 - DNA, 120 bp, Artificial Sequence
  ENSG00000138829_93 (sequence is synthesized)
tctagttttctgctctccccttattttgaatcaaacccaggcatcctatcatttcatctataaagactttagttcctaaaagtggaattgctggatcaaagggtaaaggcataggcaatt

SEQ ID NO: 350330 - DNA, 120 bp, Artificial Sequence
  ENSG00000138829_94 (sequence is synthesized)
ctagagcatttagatttaatgtgatggacaggaatgaaccatgaagccacgagtgtttgatttttaaattgtgatattccactaaatgagaaatgaccaggacttcacagagatttcatg

SEQ ID NO: 350331 - DNA, 120 bp, Artificial Sequence
  ENSG00000138829_95 (sequence is synthesized)
gtatcactgtggatggaagagtacagcctttccagcagagccagcctctattggaaactacttgatcattcatacaagcacatcagtgcacaagttccactgcccctcggtgatatagta

SEQ ID NO: 350332 - DNA, 120 bp, Artificial Sequence
  ENSG00000138829_96 (sequence is synthesized)
gtagtagtcatgttcacggctcgttataaaacgtcatgttctgaagcatccatgtttaaagtgtcctctccagtaatttcaagtatcagcaatgagaaacacttattaaatattagtaac

SEQ ID NO: 350333 - DNA, 120 bp, Artificial Sequence
  ENSG00000138829_97 (sequence is synthesized)
gcaagaaaaacaggacttcatttgaaattttgaagactactggtcacaattaaaactctttatctactatgaaagcataggtttaagcctagagtagttctgtgtttgtgtattgtagcc

SEQ ID NO: 350334 - DNA, 120 bp, Artificial Sequence
  ENSG00000138829_98 (sequence is synthesized)
ttagtgggtttgatttgaaaagagtcaatgagcatttgcatctagtttgttatctcagttgtgttgcattgagaatgggagtaatccagccatttatgtttcttcttaataaagtaggtt

SEQ ID NO: 350335 - DNA, 120 bp, Artificial Sequence
  ENSG00000138829_99 (sequence is synthesized)
tccatttcacttataaagttatatcaaaaacgaaaattgagatagaaataagaagtccaagtgaaatacagtatcatgtgtaaatgatgtgttagtagttggcaccgtgtcatatattat

SEQ ID NO: 350336 - DNA, 120 bp, Artificial Sequence
  ENSG00000138829_100 (sequence is synthesized)
cacaagcaggagccagatgtccttgcgtgatcctcccttccagactataccttcgttaacattccttgagctagttattctttcctggcttacatgggaggcagaaaaagaacatcattg

SEQ ID NO: 350337 - DNA, 120 bp, Artificial Sequence
  ENSG00000138829_101 (sequence is synthesized)
tattggaaagtttcccttaaatggctctttatgtggcagatagttgtttgcaatttagtttgaagagttttcagctttgttccattaacacagcattttgttgtttgagacttgtgacaa

SEQ ID NO: 350338 - DNA, 120 bp, Artificial Sequence
  ENSG00000138829_102 (sequence is synthesized)
caaatatatttatttaggctcatgaaactcataaaagttgttggcacagtctcctctgctgctgttccaactctgcttagataaaccatggaaaataaactttctgtactaaactgaaaa

SEQ ID NO: 350339 - DNA, 120 bp, Artificial Sequence
  ENSG00000138829_103 (sequence is synthesized)
tcaaccacagtaaatgaaaccacaacaagggctggaacaagctccacctggaagcagaatacatagcacatgctgcactataaaagtcattcgtttaagcgtggattattttgccgaatg

SEQ ID NO: 350340 - DNA, 120 bp, Artificial Sequence
  ENSG00000138829_104 (sequence is synthesized)
aataatgatgatggcggctttcatctcttatgaagttttcctggccaagagccagtagttggaagtttggatcattcttttttcttttttaaccatttcttctcttctttctctttttta

SEQ ID NO: 350341 - DNA, 120 bp, Artificial Sequence
  ENSG00000138829_105 (sequence is synthesized)
tcactaaatgaatgacatgtggagaaactattcagcttttaaagtatgctccattacttgtctcaactaccactatttattgtgtttatcaaaatcataaaaagctcatttttggcattt

SEQ ID NO: 350342 - DNA, 120 bp, Artificial Sequence
  ENSG00000138829_106 (sequence is synthesized)
tctactgaaaacatacccttgtactgttagccagcaatttccccaacttttcaagcatgcagcaccttcgcttggaaggccaagtctatctcattcaatttttaaatttcttttaaaccc

SEQ ID NO: 350343 - DNA, 120 bp, Artificial Sequence
  ENSG00000138829_107 (sequence is synthesized)
atgacatcatccacctttcctagaaatgggtctttgtgcctagtatgatatctttccaagaaaaagaatttggattttctattaaattagaaactcaattcacattatatatagtttgag

SEQ ID NO: 350344 - DNA, 80 bp, Artificial Sequence
  ENSG00000138834_0 (sequence is synthesized)
agtgacgggcgcagcctcggcagcggcggcggcggagccctgaggcgacagcagctgcgggaggcgacgggctgcggcct

SEQ ID NO: 350345 - DNA, 120 bp, Artificial Sequence
  ENSG00000138834_1 (sequence is synthesized)
cggatagcgagccgcgctggcggcggcggtggccgcgatgatggagatccagatggacgagggcggcggcgtggtggtgtaccaggacgactactgctccggctcggtgatgtcggagcg

SEQ ID NO: 350346 - DNA, 120 bp, Artificial Sequence
  ENSG00000138834_2 (sequence is synthesized)
ggtgtcgggcctggcgggctccatctaccgcgagttcgagcgcctcatccactgctacgacgaggaggtggtcaaggagctcatgccgctggtggtgaacgtgctggagaacctagactc

SEQ ID NO: 350347 - DNA, 120 bp, Artificial Sequence
  ENSG00000138834_3 (sequence is synthesized)
ggtgctcagcgagaaccaggagcacgaggtggagctggagctgctgcgcgaggacaacgagcagctgctcacccagtacgagcgtgagaaggcgctgcgcaggcaggcggaggagaaatt

SEQ ID NO: 350348 - DNA, 120 bp, Artificial Sequence
  ENSG00000138834_4 (sequence is synthesized)
cattgagtttgaagatgctctggaacaagagaagaaagagctgcaaatccaggtggagcactacgagttccagacgcgccagctggagctgaaggccaagaactatgccgatcagatttc

SEQ ID NO: 350349 - DNA, 120 bp, Artificial Sequence
  ENSG00000138834_5 (sequence is synthesized)
ccggttggaggagcgggagtcggagatgaagaaggagtacaatgccctgcaccagcggcacacagagatgatacagacctacgtggagcacattgagaggtccaagatgcagcaggtcgg

SEQ ID NO: 350350 - DNA, 120 bp, Artificial Sequence
  ENSG00000138834_6 (sequence is synthesized)
aggaaacagccagaccgagagcagcctgccggggcggaggaaggagcgccccacctccctgaacgtgttccccctggctgacggcacggtacgtgcacagatcgggggcaagctcgtgcc

SEQ ID NO: 350351 - DNA, 120 bp, Artificial Sequence
  ENSG00000138834_7 (sequence is synthesized)
tgcgggggaccactggcacctgagtgacctcggccagctgcagtccagctccagctaccagtgtccacaggatgaaatgtccgagtcaggccagtcctcggcggccgccacacccagcac

SEQ ID NO: 350352 - DNA, 120 bp, Artificial Sequence
  ENSG00000138834_8 (sequence is synthesized)
cacaggcaccaagtccaacacgcccacatcctccgtgccctcggccgccgtcacacccctcaacgagagcctgcagcccctgggggactatggcgtgggctccaagaacagcaagcgtgc

SEQ ID NO: 350353 - DNA, 120 bp, Artificial Sequence
  ENSG00000138834_9 (sequence is synthesized)
ccgggagaagcgcgacagccgcaacatggaagtacaggtcacccaggagatgcgcaacgtcagtataggcatgggcagcagtgacgagtggtctgatgttcaagacattattgactccac

SEQ ID NO: 350354 - DNA, 120 bp, Artificial Sequence
  ENSG00000138834_10 (sequence is synthesized)
gccagagctggacatgtgtccagagacccgcctggaccgcacaggaagcagcccaacccagggcatcgtgaacaaagctttcggcatcaacaccgactccctgtaccatgagctgtcgac

SEQ ID NO: 350355 - DNA, 120 bp, Artificial Sequence
  ENSG00000138834_11 (sequence is synthesized)
ggcagggtctgaggtcatcggggatgtggacgaaggggccgacctcctaggggagttctcagtgcgcgatgatttctttggaatgggcaaagaagtggggaatctgctactggaaaactc

SEQ ID NO: 350356 - DNA, 120 bp, Artificial Sequence
  ENSG00000138834_12 (sequence is synthesized)
acagcttctggaaaccaaaaacgccttgaatgtggtgaagaatgacctgattgccaaggtcgaccagctgtccggggagcaggaggtgctgaggggcgagttggaggctgctaagcaggc

SEQ ID NO: 350357 - DNA, 120 bp, Artificial Sequence
  ENSG00000138834_13 (sequence is synthesized)
caaagtcaagctggaaaaccgtatcaaggagctggaagaggaactgaaaagagtgaagtccgaggccatcatcgcccgccgtgaacccaaagaagaggcggaggatgtaagcagctatct

SEQ ID NO: 350358 - DNA, 120 bp, Artificial Sequence
  ENSG00000138834_14 (sequence is synthesized)
ctgtacagaatcggacaaaatccccatggcccagcgccgccgcttcacgcgggtggagatggcccgtgtgctcatggagcggaaccagtacaaggagcggctgatggagctgcaggaggc

SEQ ID NO: 350359 - DNA, 120 bp, Artificial Sequence
  ENSG00000138834_15 (sequence is synthesized)
tgtgcggtggactgagatgatcagagcgtcccgagagcacccatccgtccaggagaagaagaagtcgaccatctggcagttcttcagccgcctcttcagctcttcctccagcccccctcc

SEQ ID NO: 350360 - DNA, 120 bp, Artificial Sequence
  ENSG00000138834_16 (sequence is synthesized)
ggccaagcgcccctatccctcggtgaacatccactacaagtcacccaccactgccggcttcagccagcgccgcaaccatgccatgtgcccgatctcggcaggcagccggcccctggaatt

SEQ ID NO: 350361 - DNA, 120 bp, Artificial Sequence
  ENSG00000138834_17 (sequence is synthesized)
cttccctgacgacgactgcacgtcctccgcccgtcgagagcagaagcgcgagcagtaccgccaggtgcgtgagcacgtgcgtaacgacgacggccgtctgcaggcctgcggctggagcct

SEQ ID NO: 350362 - DNA, 120 bp, Artificial Sequence
  ENSG00000138834_18 (sequence is synthesized)
gcccgccaagtacaagcagctgagtcccaacgggggccaggaggacacgcggatgaagaacgtgccggtgccggtgtactgccgccctctggtggagaaggaccccaccatgaagctgtg

SEQ ID NO: 350363 - DNA, 120 bp, Artificial Sequence
  ENSG00000138834_19 (sequence is synthesized)
gtgtgccgcgggcgtcaacctgagcgggtggaggcccaatgaggacgacgctgggaatggagtcaagccagcgccaggccgcgatcccctgacctgcgaccgcgaaggagacggcgagcc

SEQ ID NO: 350364 - DNA, 120 bp, Artificial Sequence
  ENSG00000138834_20 (sequence is synthesized)
caagagcgcccacacgtctcccgagaagaagaaggccaaggagctccctgaaatggacgccacctccagccgggtgtggatcctgaccagcaccctgaccaccagcaaggtggtgatcat

SEQ ID NO: 350365 - DNA, 120 bp, Artificial Sequence
  ENSG00000138834_21 (sequence is synthesized)
cgacgccaaccagccgggcacggtggtggaccagttcaccgtctgcaacgcgcacgtgctgtgcatctccagcatccccgcggccagcgacagcgactaccctcccggggagatgttcct

SEQ ID NO: 350366 - DNA, 120 bp, Artificial Sequence
  ENSG00000138834_22 (sequence is synthesized)
ggacagcgacgtgaacccagaggacccgggcgcagatggcgtgctggccggtatcaccctggtgggctgtgccacccgctgcaacgtgccgcggagcaactgctcctcccgaggggacac

SEQ ID NO: 350367 - DNA, 120 bp, Artificial Sequence
  ENSG00000138834_23 (sequence is synthesized)
gggggaggtggccaccatcgccaacgggaaggtcaacccgtcccagtccacagaggaggccacagaggccacggaggtgccagaccctgggcccagcgagccagagacagccacattgcg

SEQ ID NO: 350368 - DNA, 120 bp, Artificial Sequence
  ENSG00000138834_24 (sequence is synthesized)
gcccgggcctctcacagagcacgtcttcactgacccagccccgaccccgtcctctggcccccagcctggcagcgagaacgggccagagcctgacagcagcagcacacggccagagccaga

SEQ ID NO: 350369 - DNA, 120 bp, Artificial Sequence
  ENSG00000138834_25 (sequence is synthesized)
gcccagcggggaccccacgggagcaggcagcagtgctgcacccaccatgtggctgggagcccagaacggctggctctatgtgcactcggctgtggccaactggaagaagtgcctgcactc

SEQ ID NO: 350370 - DNA, 120 bp, Artificial Sequence
  ENSG00000138834_26 (sequence is synthesized)
catcaagctgaaggattctgtgctgagcctggtgcatgtcaaaggccgtgtgctggtggctctggcggacgggaccctggccatcttccaccgtggtgaagatggccagtgggatctgag

SEQ ID NO: 350371 - DNA, 120 bp, Artificial Sequence
  ENSG00000138834_27 (sequence is synthesized)
caactatcacctaatggacctgggccacccgcaccactccatccgctgcatggctgttgtgtacgaccgcgtgtggtgtggctacaagaacaaggtgcacgtcatccagcccaagaccat

SEQ ID NO: 350372 - DNA, 120 bp, Artificial Sequence
  ENSG00000138834_28 (sequence is synthesized)
gcagatagagaagtcatttgacgcccacccgcggcgggagagccaggtgcggcagctggcgtggatcggcgatggcgtatgggtgtccatccgcctggactccaccctgaggctctacca

SEQ ID NO: 350373 - DNA, 120 bp, Artificial Sequence
  ENSG00000138834_29 (sequence is synthesized)
tgcacacacgcaccagcatctacaggacgtggacattgagccctacgtcagcaagatgctaggcactggcaagctgggtttctccttcgtacgcatcacggccctgcttgtcgcgggcag

SEQ ID NO: 350374 - DNA, 120 bp, Artificial Sequence
  ENSG00000138834_30 (sequence is synthesized)
ccggctctgggtgggcaccggcaacggagtggtcatctccatccccctgacagagactgtggtcctgcaccgaggccagctcctggggctccgagccaataagacatcccccacctctgg

SEQ ID NO: 350375 - DNA, 120 bp, Artificial Sequence
  ENSG00000138834_31 (sequence is synthesized)
ggagggcgcccgtcccgggggcatcatccacgtgtatggcgatgacagcagtgacagggcggccagcagcttcatcccctactgctccatggcccaggcccagctatgcttccatgggca

SEQ ID NO: 350376 - DNA, 120 bp, Artificial Sequence
  ENSG00000138834_32 (sequence is synthesized)
ccgcgatgccgtgaagttctttgtctcggtgccagggaacgtgctggccaccctgaatgggagtgtgctggacagcccagccgagggccctgggccagctgcccctgcctcggaggtcga

SEQ ID NO: 350377 - DNA, 120 bp, Artificial Sequence
  ENSG00000138834_33 (sequence is synthesized)
gggccagaagctgcggaacgtgctggtgctgagcggcggggagggctacatcgacttccgcattggagacggagaggacgacgagacggaggagggcgcaggggacatgagccaggtgaa

SEQ ID NO: 350378 - DNA, 120 bp, Artificial Sequence
  ENSG00000138834_34 (sequence is synthesized)
gcccgtgctgtccaaggcagagcgcagtcacatcatcgtgtggcaggtgtcctacacccccgagtgaagctgctgccctgcctggcccgacctgtacataggacccccgaccacctgacc

SEQ ID NO: 350379 - DNA, 120 bp, Artificial Sequence
  ENSG00000138834_35 (sequence is synthesized)
cccgcccggcccgcggggtagccagccaggcgccgccgcccctcttctaacctctcaacctgcagctttcacctgagtctggcccctccagcgggcagggagtgcggggatgcggatcag

SEQ ID NO: 350380 - DNA, 120 bp, Artificial Sequence
  ENSG00000138834_36 (sequence is synthesized)
ctgggaggaggaggggaggggaacttccacccgaggggaagatgctctcgggacagtttcccgggcagctcctggccagcttccagcccagagtcctcaagtccagggcaccttgggccc

SEQ ID NO: 350381 - DNA, 120 bp, Artificial Sequence
  ENSG00000138834_37 (sequence is synthesized)
agcgcaggcagaatccgaggtggtcctggctctaccctgggcctcctactccccagcacccctggaggaggcaggggctccccgccgccgaggctgcctgccctgggcccacctctgcat

SEQ ID NO: 350382 - DNA, 120 bp, Artificial Sequence
  ENSG00000138834_38 (sequence is synthesized)
gctgctcatggggccaccctgcctcctgggccctcactctgcctaggggagctgggccaggcactagcctttgcccagggaggtgggcctcaggctgcccaggtgcctgcaccccagccg

SEQ ID NO: 350383 - DNA, 120 bp, Artificial Sequence
  ENSG00000138834_39 (sequence is synthesized)
gccttctctggggcctccccgtcgtcaagcctctatcctgtctgtccccaccccagctgtcccctgcccagggagctggcataaaagcacgaggcccggctccctggggcagctgcttga

SEQ ID NO: 350384 - DNA, 120 bp, Artificial Sequence
  ENSG00000138834_40 (sequence is synthesized)
gaacagagactgctaccccatcctgcccatgcaggcaggctcttgccagccccgttctgacccgtgtccccccaggctctgcctgggcagaagactcaccttggaggagtgggccctgga

SEQ ID NO: 350385 - DNA, 120 bp, Artificial Sequence
  ENSG00000138834_41 (sequence is synthesized)
gtcctgtccctcccagaagcccccagggtgggatttctcaggctgccagggcaggcccaggcctcaggaagaaggggaggcccctggcctctccgggatcagtcctaggacacaggctca

SEQ ID NO: 350386 - DNA, 120 bp, Artificial Sequence
  ENSG00000138834_42 (sequence is synthesized)
gcctcaggttgatgggggatgatgtgctcccggggcctgcctcctgcacggggctccacggagcccagctcccagacacgctactaagtgcctagggttgcccgctgtggcctgcttcca

SEQ ID NO: 350387 - DNA, 120 bp, Artificial Sequence
  ENSG00000138834_43 (sequence is synthesized)
gggagcaacagagaggccaccaagcagaggcccgtggggctgaggatggagccgcccccagccgactccaagcccgcagagggcagacgccaccctggactgctctccctgcccagctgg

SEQ ID NO: 350388 - DNA, 120 bp, Artificial Sequence
  ENSG00000138834_44 (sequence is synthesized)
gcctctctggcctattcctaccttccaggcccactgcactcctgtctgggaggcccttatgagggcagcccagcccccgcacccacccccaaccagagaagcacagatcttggggagctg

SEQ ID NO: 350389 - DNA, 120 bp, Artificial Sequence
  ENSG00000138834_45 (sequence is synthesized)
ccccacaagccccgctggccaccgagggctgcagccgctgcgctgccggcttctccccaccaccctgccacctccactgtgatgtatgtccgctccctcgtctgttcccccaggatctcg

SEQ ID NO: 350390 - DNA, 120 bp, Artificial Sequence
  ENSG00000138834_46 (sequence is synthesized)
aagtgactccgggctgagcagtggggcggctgggggaggggtgacgattctcctcaggctttggccctgcaagcaaacccacatatctgctctgtatgtaataaatgtcttaacgtcgta

SEQ ID NO: 350391 - DNA, 120 bp, Artificial Sequence
  ENSG00000138834_47 (sequence is synthesized)
gcaacggagtggtcatctccatccccctgacagagagtgagtggcctgcacacctgcaggggcagtggtgctgccagaggtgtacgtgggttcacggggtggctctgcagggccaccttg

SEQ ID NO: 350392 - DNA, 120 bp, Artificial Sequence
  ENSG00000138834_48 (sequence is synthesized)
gagggtgccttgctgcccctacgctgaccgctctcctcttctcccatgctcctcccatgtccccagctgtggtcctgcaccgaggccagctcctggggctccgagccaataagacatccc

SEQ ID NO: 350393 - DNA, 120 bp, Artificial Sequence
  ENSG00000138834_49 (sequence is synthesized)
gaggtcatcggggatgtggacgaaggggccgacctcctaggtaagcgcaagccttcccccgcaccgctgtgcctgcacaatgctggggctttctgctgttggttttgtttgtaatgaaag

SEQ ID NO: 350394 - DNA, 120 bp, Artificial Sequence
  ENSG00000138834_50 (sequence is synthesized)
caggttttgtagccgtgccgtggagtgagaggctcctccctgttgctggtgttccccgttcactggggcgggagcctcgtctgcaggcagcccttcacggctctctgggccactcgccct

SEQ ID NO: 350395 - DNA, 120 bp, Artificial Sequence
  ENSG00000138834_51 (sequence is synthesized)
ctcccttcgtgtgtggcaggatggagaaacccagccagggtgtcaggggctcaggctgcccagcaggccctgtgtggctgtggctgttccacgcggcctcgtgtcggcacctgctagtcc

SEQ ID NO: 350396 - DNA, 120 bp, Artificial Sequence
  ENSG00000138834_52 (sequence is synthesized)
aggctagacctccctgcccttggatagaccgctctgtagccaggggtgtacagtgcctgtcagggttgagcttagtgatcctctctcaaaccacacccccacataaagcctcatgctcac

SEQ ID NO: 350397 - DNA, 120 bp, Artificial Sequence
  ENSG00000138834_53 (sequence is synthesized)
ccgggctccagccagacacatcctgcccctgagagccacgcctctactctcggaggaacgtcagtgtctagagtgtggggtttgccctccgttggcagaaaggtgaggagaaagctcctc

SEQ ID NO: 350398 - DNA, 120 bp, Artificial Sequence
  ENSG00000138834_54 (sequence is synthesized)
ttctctgggcccctccctgcctgtccctggtaacgcctcctgggtcctgagtttgagaaagcagagcctcgccccagcaggtactcacagccagagtgcgggggccccagcaggttctca

SEQ ID NO: 350399 - DNA, 120 bp, Artificial Sequence
  ENSG00000138834_55 (sequence is synthesized)
cagccagccggtgagtgcacctcagagcacaggggcccagagccaggccactccttcagggccccaggtcgcttgctgccagttttggcctgtgagctcactggcctcagtgccaggtaa

SEQ ID NO: 350400 - DNA, 120 bp, Artificial Sequence
  ENSG00000138834_56 (sequence is synthesized)
ggacagccaccttcctgggaagaagaggtgaccccgggtctggtggatttcccacaggggccgtcagaggatgtccacagaggcagagcccttggggcctgtgggctgggttgggctggt

SEQ ID NO: 350401 - DNA, 120 bp, Artificial Sequence
  ENSG00000138834_57 (sequence is synthesized)
ggatgtggggcctgggacttctccagaagcttacttcctgctgcatgctttgccgactgtccttccacctctaagtgtccatcgtgcctgtgggggctgctgcaggctcctgctccgtca

SEQ ID NO: 350402 - DNA, 120 bp, Artificial Sequence
  ENSG00000138834_58 (sequence is synthesized)
gcccacctgctgctgcgctgctctgggagcgagctccctcatggcatctggaacgctctcctgtcctccctgtgctcagggctggagagagggtggcggggctgcgggctccccgggcct

SEQ ID NO: 350403 - DNA, 120 bp, Artificial Sequence
  ENSG00000138834_59 (sequence is synthesized)
tctgggcccagccctgccacctgggcccacctcctctcactgtctctggctcacgcttcccgggcctggagctgggacctgcccataggcatctgaagacacgtcagcctcagccggggg

SEQ ID NO: 350404 - DNA, 120 bp, Artificial Sequence
  ENSG00000138834_60 (sequence is synthesized)
gagcccttgcttgacgctctctggcctccgggctgcctctcgcgcccgctctgggcccgctcttcttctcatgatgtctttcctttcacctcctgcgttgtctgacatcgtcgctctctt

SEQ ID NO: 350405 - DNA, 120 bp, Artificial Sequence
  ENSG00000138834_61 (sequence is synthesized)
tttttgttttgttttgtttttgtttttatgtactgtattttcagtgttttaaccaaacagttgtggctactcatggtgaggaatgaccgctaagagtttgggttctttcagtgcatttgg

SEQ ID NO: 350406 - DNA, 120 bp, Artificial Sequence
  ENSG00000138834_62 (sequence is synthesized)
tttgggttctttcagtgcatttggaggtcactgctacacgttgatgtttaggaggttgagaggtttgcctttaggtaagttgtggccagggggagtgtcccatgggtaagtggtggccct

SEQ ID NO: 350407 - DNA, 120 bp, Artificial Sequence
  ENSG00000138834_63 (sequence is synthesized)
gtagggtgacggagagctaggggaggcgcaatcagactgcagaattccccgcagccaccatgagggtcaggagcaggccggggacccagcgtggaggaaggtggcccagaagcgtttgtc

SEQ ID NO: 350408 - DNA, 120 bp, Artificial Sequence
  ENSG00000138834_64 (sequence is synthesized)
tgatgtgcacagctacaccctgcctggccacatggggttccctgttttctctctgccgggtggtggcagagtcggtgagacaccaggtgcctgtgacacattgggtagacaggttctttg

SEQ ID NO: 350409 - DNA, 120 bp, Artificial Sequence
  ENSG00000138834_65 (sequence is synthesized)
agaacgtcagcacagacttcttgcatgagcggtactcgcttcctccagcgtggggagtgacatgaagagcaagggttttcctttcaaactgggcatagctgcagagccacaggccgtctc

SEQ ID NO: 350410 - DNA, 120 bp, Artificial Sequence
  ENSG00000138834_66 (sequence is synthesized)
agacatttctacaaagccactccgggaggcgggctgcgcccgtgtgagggctctccctcggcactgctcatcttttggggctggacatgcatggcctgggccgctgggacgcggtgggtg

SEQ ID NO: 350411 - DNA, 120 bp, Artificial Sequence
  ENSG00000138834_67 (sequence is synthesized)
tggagcagcatccctggcttccacccacgaaagccaggagcacccccttcatttgtgaccacaaaaatgtctctggactttgcaagcatcccctcggggcagtcagcccaactgagaata

SEQ ID NO: 350412 - DNA, 120 bp, Artificial Sequence
  ENSG00000138834_68 (sequence is synthesized)
gctactatagaggaaggtgtgtcattttgagattccttctagagaaacttaggagcctggtagatgaagcagaaatgtgtcctctgagtgagtggccgtgtccggtactgagaggccccg

SEQ ID NO: 350413 - DNA, 120 bp, Artificial Sequence
  ENSG00000138834_69 (sequence is synthesized)
tgccctgagtctggcggtgaccagagaggctgggcagaggcagaggtcagcactggccatgacttctggaagtcccgtctgccctggtcacttaaaggccagtataagtcagctgtggag

SEQ ID NO: 350414 - DNA, 120 bp, Artificial Sequence
  ENSG00000138834_70 (sequence is synthesized)
agggctggataccccctcgacagctcctccctgggtgagatccttagcattagagtcccccacggtgcgccctctgagagaccacgggaacccacccagcggctgcctgggacaggcaca

SEQ ID NO: 350415 - DNA, 120 bp, Artificial Sequence
  ENSG00000138834_71 (sequence is synthesized)
ggagccacctgggtgcctctgaggccttgcactttcccacacctcaaggagggccgggggccacgggcaagctctgccatagcgggtgatcaggtcagctaagacgagaacgtttggggc

SEQ ID NO: 350416 - DNA, 120 bp, Artificial Sequence
  ENSG00000138834_72 (sequence is synthesized)
tctttttctccagctggttcagtatctttgttaggaaagaccattggaaagaatgtttgtttcgcattccgcattagtcacatagaatgcgctcctccctagcgagcttcctgaggtaga

SEQ ID NO: 350417 - DNA, 120 bp, Artificial Sequence
  ENSG00000138834_73 (sequence is synthesized)
cggctggttgcggtttctcgtaatccgggctgcccccaccctccagaatgtcttggtggcgtccctttctgtgagcagggattgtggtttctttgcgcttgctcatgttcaggggtgagc

SEQ ID NO: 350418 - DNA, 120 bp, Artificial Sequence
  ENSG00000138834_74 (sequence is synthesized)
tctggtccagtcaagccacagggtcagcaccttctggtcactccctggccctgacctgagcccggggaggaacgtggggcaggcgcgggtgggcccagcctcgagctcttcagcacagtg

SEQ ID NO: 350419 - DNA, 120 bp, Artificial Sequence
  ENSG00000138834_75 (sequence is synthesized)
atggtgacggggcagcggtggcggcacagccagcccttcttgggtccccagtcagagccctctgccctacctgggctggacttgtttctgaacagccacaagctacagggggctgccgct

SEQ ID NO: 350420 - DNA, 120 bp, Artificial Sequence
  ENSG00000138834_76 (sequence is synthesized)
gtgtccctggcgaggcactggcccattacaagcaatcgtctggggagggcaccagtggaaagccccgttccaagccatttcaggagggtggccctgcttccgaggagccggagtcagtgg

SEQ ID NO: 350421 - DNA, 120 bp, Artificial Sequence
  ENSG00000138834_77 (sequence is synthesized)
ccggataagcagagccactcgggagtggtgaggcccggaagggttagcccggtgggcggcagaggagctctggcccgcagggtgtcgggcgaggcaaagtgcaaagcattggtgcgcggg

SEQ ID NO: 350422 - DNA, 120 bp, Artificial Sequence
  ENSG00000138834_78 (sequence is synthesized)
gcctcaggcagccacggcggagccgcaggccagggacctgcagtgactcgctctccctcctccctgtgtttggccttagtgtccacaggatgaaatgtccgagtcaggccagtcctcggc

SEQ ID NO: 350423 - DNA, 120 bp, Artificial Sequence
  ENSG00000138834_79 (sequence is synthesized)
ggagttctcaggaatgggcaaagaagtggggaatctgctactggaaaactcacagcttctggaaaccaaggcggaagtgcaggcgcccctggcaaggccccttcacgtacctgtatgccg

SEQ ID NO: 350424 - DNA, 120 bp, Artificial Sequence
  ENSG00000138834_80 (sequence is synthesized)
aggttcctagtgagcctcctgggcaggggtctggagggtcggagaaggagccccgcggctcccacgcccccacctgcctccagtcttgaagtggctgtgccgccagaagctggcagccct

SEQ ID NO: 350425 - DNA, 80 bp, Artificial Sequence
  ENSG00000138834_81 (sequence is synthesized)
cccgcagaggcggggcgggggtaaggggcggggcgctgtggggcggggagagggcggggcagtgctagggggtgggagag

SEQ ID NO: 350426 - DNA, 120 bp, Artificial Sequence
  ENSG00000138834_82 (sequence is synthesized)
cgtcatccagcccaagaccatgcagatagaggcgagtgccggccagggccccggggaggggaagaggctcctgctggccagcagctctcccgcatcttccatacggaagtccacgaggcc

SEQ ID NO: 350427 - DNA, 120 bp, Artificial Sequence
  ENSG00000138834_83 (sequence is synthesized)
ctacgtgggtcccatctcccctgtaccacctatgactcaggctcgaacaggcgcaaagcaggcgctggctgggaggtctgaggggactgcaggtggccctggagctgtggcaggtttggg

SEQ ID NO: 350428 - DNA, 79 bp, Artificial Sequence
  ENSG00000138835_0 (sequence is synthesized)
tcacattcagacagcacacctttgcccaattttctttctggatctcaccgtcctgagtgttgtacctgcaggttgctca

SEQ ID NO: 350429 - DNA, 120 bp, Artificial Sequence
  ENSG00000138835_1 (sequence is synthesized)
ggatctcaccgtcctgagtgttgtacctgcaggttgctcacagcctctggagcccaagatagtctcccctttgggaggaggctctacagtggtccctggcgaagttgtgaagaggtctgc

SEQ ID NO: 350430 - DNA, 120 bp, Artificial Sequence
  ENSG00000138835_2 (sequence is synthesized)
cacgtctctgtgctcagtgtcctctctacatcctgtggcttgagcctgagcttgcccatattccctggctggatggagtggctaagccctgatatcgctctgcccagaagagatgagtgg

SEQ ID NO: 350431 - DNA, 120 bp, Artificial Sequence
  ENSG00000138835_3 (sequence is synthesized)
actcaaacttctccagccaggaagaggatcacgcatgccaaagtccagggtgcaggtcagctgaggctgtccattgatgcccaggaccgggttctgctgcttcacattatagaaggtaaa

SEQ ID NO: 350432 - DNA, 120 bp, Artificial Sequence
  ENSG00000138835_4 (sequence is synthesized)
ggcctgatcagcaaacagcctggcacctgtgatccgtatgtgaagatttctttgatccctgaagatagtagactacgccaccagaagacgcagaccgttccagactgcagagacccggct

SEQ ID NO: 350433 - DNA, 120 bp, Artificial Sequence
  ENSG00000138835_5 (sequence is synthesized)
ttccacgagcacttcttctttcctgtccaagaggaggatgatcagaagcgtctcttggttactgtgtggaacagggccagccagtccagacagagtggactcattggctgcatgagcttt

SEQ ID NO: 350434 - DNA, 120 bp, Artificial Sequence
  ENSG00000138835_6 (sequence is synthesized)
ggggtgaagtctctcctgactccagacaaggagatcagtggttggtactacctcctaggggagcacctgggccggaccaagcacttgaaggtggccaggcggcgactgcggccgctgaga

SEQ ID NO: 350435 - DNA, 120 bp, Artificial Sequence
  ENSG00000138835_7 (sequence is synthesized)
gacccgctgctgagaatgccaggaggtggggacactgagaatgggaagaaactaaagatcaccatcccgaggggaaaggacggctttggcttcaccatctgctgcgactctccagttcga

SEQ ID NO: 350436 - DNA, 120 bp, Artificial Sequence
  ENSG00000138835_8 (sequence is synthesized)
gtccaggccgtggattccgggggtccggcggaacgggcagggctgcagcagctggacacggtgctgcagctgaatgagaggcctgtggagcactggaaatgtgtggagctggcccacgag

SEQ ID NO: 350437 - DNA, 120 bp, Artificial Sequence
  ENSG00000138835_9 (sequence is synthesized)
atccggagctgccccagtgagatcatcctactcgtgtggcgcatggtcccccaggtcaagccaggaccagatggcggggtcctgcggcgggcctcctgcaagtcgacacatgacctccag

SEQ ID NO: 350438 - DNA, 120 bp, Artificial Sequence
  ENSG00000138835_10 (sequence is synthesized)
tcaccccccaacaaacgggagaagaactgcacccatggggtccaggcacggcctgagcagcgccacagctgccacctggtatgtgacagctctgatgggctgctgctcggcggctgggag

SEQ ID NO: 350439 - DNA, 120 bp, Artificial Sequence
  ENSG00000138835_11 (sequence is synthesized)
cgctacaccgaggtggccaagcgcgggggccagcacaccctgcctgcactgtcccgtgccactgcccccaccgaccccaactacatcatcctggccccgctgaatcctgggagccagctg

SEQ ID NO: 350440 - DNA, 120 bp, Artificial Sequence
  ENSG00000138835_12 (sequence is synthesized)
ctccggcctgtgtaccaggaggataccatccccgaagaatcagggagtcccagtaaagggaagtcctacacaggcctggggaagaagtcccggctgatgaagacagtgcagaccatgaag

SEQ ID NO: 350441 - DNA, 120 bp, Artificial Sequence
  ENSG00000138835_13 (sequence is synthesized)
ggccacgggaactaccaaaactgcccggttgtgaggccgcatgccacgcactcaagctatggcacctacgtcaccctggcccccaaagtcctggtgttccctgtctttgttcagcctcta

SEQ ID NO: 350442 - DNA, 120 bp, Artificial Sequence
  ENSG00000138835_14 (sequence is synthesized)
gatctctgtaatcctgcccggaccctcctgctgtcagaggagctgctgctgtatgaagggaggaacaaggctgccgaggtgacactgtttgcctattcggacctgctgctcttcaccaag

SEQ ID NO: 350443 - DNA, 120 bp, Artificial Sequence
  ENSG00000138835_15 (sequence is synthesized)
gaggacgagcctggccgctgcgacgtcctgaggaaccccctctacctccagagtgtgaagctgcaggaaggttcttcagaagacctgaaattctgcgtgctctatctagcagagaaggca

SEQ ID NO: 350444 - DNA, 120 bp, Artificial Sequence
  ENSG00000138835_16 (sequence is synthesized)
gagtgcttattcactttggaagcgcactcgcaggagcagaagaagagagtgtgctggtgcctgtcggagaacatcgccaagcagcaacagctggcagcatcacccccggacagcaagatg

SEQ ID NO: 350445 - DNA, 120 bp, Artificial Sequence
  ENSG00000138835_17 (sequence is synthesized)
tttgagacggaggcagatgagaagagggagatggccttggaggaagggaaggggcctggtgccgaggattccccacccagcaaggagccctctcctggccaggagcttcctccaggacaa

SEQ ID NO: 350446 - DNA, 120 bp, Artificial Sequence
  ENSG00000138835_18 (sequence is synthesized)
gcaaagactcagctacctctgaaggatcccctccaggcccagatgctccgcccagcaaggatgtgccaccatgccaggaaccccctccagcccaagacctctcaccctgccaggacctac

SEQ ID NO: 350447 - DNA, 120 bp, Artificial Sequence
  ENSG00000138835_19 (sequence is synthesized)
ctgctggtcaagaacccctgcctcaccaggaccctctactcaccaaagacctccctgccatccaggaatcccccacccgggaccttccaccctgtcaagatctgcctcctagccaggtct

SEQ ID NO: 350448 - DNA, 120 bp, Artificial Sequence
  ENSG00000138835_20 (sequence is synthesized)
ccctgccagccaaggcccttactgaggacaccatgagctccggggacctactagcagctactggggacccacctgcggcccccaggccagccttcgtgatccctgaggtccggctggata

SEQ ID NO: 350449 - DNA, 120 bp, Artificial Sequence
  ENSG00000138835_21 (sequence is synthesized)
gcacctacagccagaaggcaggggcagagcagggctgctcgggagatgaggaggatgcagaagaggccgaggaggtggaggagggggaggaaggggaggaggacgaggatgaggacacca

SEQ ID NO: 350450 - DNA, 120 bp, Artificial Sequence
  ENSG00000138835_22 (sequence is synthesized)
gcgatgacaactacggagagcgcagtgaggccaagcgcagcagcatgatcgagacgggccagggggctgagggtggcctctcactgcgtgtgcagaactcgctgcggcgccggacgcaca

SEQ ID NO: 350451 - DNA, 120 bp, Artificial Sequence
  ENSG00000138835_23 (sequence is synthesized)
gcgagggcagcctgctgcaggagccccgagggccctgctttgcctccgacaccaccttgcactgctcagacggtgagggcgccgcctccacctggggcatgccttcgcccagcaccctca

SEQ ID NO: 350452 - DNA, 120 bp, Artificial Sequence
  ENSG00000138835_24 (sequence is synthesized)
agaaagagctgggccgcaatggtggctccatgcaccacctttccctcttcttcacaggacacaggaagatgagcggggctgacaccgttggggatgatgacgaagcctcccggaagagaa

SEQ ID NO: 350453 - DNA, 120 bp, Artificial Sequence
  ENSG00000138835_25 (sequence is synthesized)
agagcaaaaacctagccaaggacatgaagaacaagctggggatcttcagacggcggaatgagtcccctggagcccctcccgcgggcaaggcagacaaaatgatgaagtcattcaagccca

SEQ ID NO: 350454 - DNA, 120 bp, Artificial Sequence
  ENSG00000138835_26 (sequence is synthesized)
cctcagaggaagccctcaagtggggcgagtccttggagaagctgctggttcacaaatacgggttagcagtgttccaagccttccttcgcactgagttcagtgaggagaatctggagttct

SEQ ID NO: 350455 - DNA, 120 bp, Artificial Sequence
  ENSG00000138835_27 (sequence is synthesized)
ggttggcttgtgaggacttcaagaaggtcaagtcacagtccaagatggcatccaaggccaagaagatctttgctgaatacatcgcgatccaggcatgcaaggaggtcaacctggactcct

SEQ ID NO: 350456 - DNA, 120 bp, Artificial Sequence
  ENSG00000138835_28 (sequence is synthesized)
acacgcgggagcacaccaaggacaacctgcagagcgtcacgcggggctgcttcgacctggcacagaagcgcatcttcgggctcatggaaaaggactcgtaccctcgctttctccgttctg

SEQ ID NO: 350457 - DNA, 120 bp, Artificial Sequence
  ENSG00000138835_29 (sequence is synthesized)
acctctacctggaccttattaaccagaagaagatgagtcccccgctttaggggccactggagtcgagctcagcgttcacaccaggcgggctgggtcccctgcccacctgcctccctgccc

SEQ ID NO: 350458 - DNA, 120 bp, Artificial Sequence
  ENSG00000138835_30 (sequence is synthesized)
cctgtgacggagggggcaagcaagcccccagaggctgtgtctctggacagacggatagacatacggaagcgaggcctggaccaagagaggcccaggctactggaggagtagaaggatggg

SEQ ID NO: 350459 - DNA, 120 bp, Artificial Sequence
  ENSG00000138835_31 (sequence is synthesized)
ccccgtggggtccccactgccccggtacgagggggcccaagaccctggcaggtcaggggccctggccaagccagatctggagctgctgctccctgctgcggagaccgcggaggcttcgcg

SEQ ID NO: 350460 - DNA, 120 bp, Artificial Sequence
  ENSG00000138835_32 (sequence is synthesized)
ttgaccaagttccttaaagaactggctgatggggcaggaggtccaggcctgggctctcgggccctcctagagggccattggagcttgcagctcagacccccactttgagttttatttatt

SEQ ID NO: 350461 - DNA, 120 bp, Artificial Sequence
  ENSG00000138835_33 (sequence is synthesized)
taaatagtagttggatgcttggcacgtcgtcctgtaataggaaacccttgcctcatcagttttcctgatttacaagtgcaatattttagccaatgccttgggagaagctgccatgcaaag

SEQ ID NO: 350462 - DNA, 120 bp, Artificial Sequence
  ENSG00000138835_34 (sequence is synthesized)
gtggacaccattctccagcttcaggggatatgctcgtcccgggcaccggtggcaggcagctggccttctggactaaggcagcctggggggacactgcagtctggctacacacagagatct

SEQ ID NO: 350463 - DNA, 120 bp, Artificial Sequence
  ENSG00000138835_35 (sequence is synthesized)
ggcaccccctgggtggagtgtccctcgggggctttgggaaagcatggcaccctcagaccacacagtagccaagttctggagcaaataaaaggcctgtgttatttcttgttcttgaccctt

SEQ ID NO: 350464 - DNA, 120 bp, Artificial Sequence
  ENSG00000138835_36 (sequence is synthesized)
aactttggctcagcctgtcttcatccactgtatcctgacacctctcctactccttctctttaatgtacagctgagactgggatacccttagactgaaaggaaggacacggctatgtagaa

SEQ ID NO: 350465 - DNA, 120 bp, Artificial Sequence
  ENSG00000138835_37 (sequence is synthesized)
cggggacgggcattgtactcagctcccagcacgcccatctttaaagtcctgtaggggtaagctgaggcatcttaagggcaggagaggctgagtttgcctcttaccccaggatccgttctc

SEQ ID NO: 350466 - DNA, 120 bp, Artificial Sequence
  ENSG00000138835_38 (sequence is synthesized)
agtgccagggggtgccgttgtgagggatggacgcctctcccccggagcagcactttggggccagcttgggccctggggatgagccacaggggacccacagcctatgcgtgtgagcatgta

SEQ ID NO: 350467 - DNA, 120 bp, Artificial Sequence
  ENSG00000138835_39 (sequence is synthesized)
acccgggagccagctgggcccctcgcggggtgggcagaaggacgggctggcccaggaccctcttctttgagacatcccggactccatctcggatgaaagtgctttgagaaaccacagagt

SEQ ID NO: 350468 - DNA, 120 bp, Artificial Sequence
  ENSG00000138835_40 (sequence is synthesized)
gccggctagacagggctgtggctcttacccgtgccgagctttcacatccgctcacatctgtgctcccagatgccagcgtgacccctgacacgtgtgtgcagcagcctgcagctgccccaa

SEQ ID NO: 350469 - DNA, 120 bp, Artificial Sequence
  ENSG00000138835_41 (sequence is synthesized)
gccatggctgaacactgactcccagctgtggggcttcaccattacagactccccagggcttcaaagacttctcagcttcgagcatggcttttggctgtcagggcagctgtacaatagtgg

SEQ ID NO: 350470 - DNA, 120 bp, Artificial Sequence
  ENSG00000138835_42 (sequence is synthesized)
gactcccgatgtggtgggcggggctgaaccctgtggcttctgaggtccctgccagccagagacttgtgtcagctgaggctgtccattgatgcccaggaccgggttctgctgcttcacatt

SEQ ID NO: 350471 - DNA, 120 bp, Artificial Sequence
  ENSG00000138835_43 (sequence is synthesized)
agtgctctttcagccagacacttagagcagaataaaagcaaatatggaaaatcttacagcttaaggattgctccaagccccaggtgctgggctggaggctccaggagcatttggtcagag

SEQ ID NO: 350472 - DNA, 120 bp, Artificial Sequence
  ENSG00000138835_44 (sequence is synthesized)
aaacttatccacaaggaatttgataatattagctcacattgtgtggcgctttactaggtctgcaaaaagctcttggaaggatcctgtgacactgtttgcctattcggacctgctgctctt

SEQ ID NO: 350473 - DNA, 120 bp, Artificial Sequence
  ENSG00000138835_45 (sequence is synthesized)
aaaggggaaatgcggcccgctccccactcagtgccactctgtgccactccgtgccaggccctgagggcacccggttgctgcttccttccgtctttccccaaggactatcagaggcaggtg

SEQ ID NO: 350474 - DNA, 120 bp, Artificial Sequence
  ENSG00000138835_46 (sequence is synthesized)
gctgggccagggggtgggtcggggggaggtctggccatgtggtagggtgataggactgaggggccccagggagctggctgcagggcagtttgtttctcctgatggagaatgctccctggt

SEQ ID NO: 350475 - DNA, 120 bp, Artificial Sequence
  ENSG00000138835_47 (sequence is synthesized)
gggtggggcgatgggctggggactggtttgttcatggggacagagatcagaagtgggcttgagaagaacagggccagaaggcctggactctggccccagcctagcccctaatttgtgcag

SEQ ID NO: 350476 - DNA, 120 bp, Artificial Sequence
  ENSG00000138835_48 (sequence is synthesized)
ggtggctttgggcaagtcactaagtcactgtctagactgggccctcagccttcctgtctacccaatggagggtctttctgtccacctgggaacagcctgataggactgaagcacagccct

SEQ ID NO: 350477 - DNA, 120 bp, Artificial Sequence
  ENSG00000138835_49 (sequence is synthesized)
tagtttccagatgagaattctggactggaggccctgacattacaattgccaacactgactctggtgtttggcaaaatttggtgtatgtgggaaacacgtgcctctggttgaggtccttaa

SEQ ID NO: 350478 - DNA, 120 bp, Artificial Sequence
  ENSG00000138835_50 (sequence is synthesized)
cttcagaatttccctctagatcaatgctttttaaagcactaactccaacaccaccatcttctgtaggagctttcgagctttccagcttttccagcatacgctcctgatctgttactcagg

SEQ ID NO: 350479 - DNA, 120 bp, Artificial Sequence
  ENSG00000138835_51 (sequence is synthesized)
catgctggttatcccatttcatacgtggacaccttgaggcctaaaggttggtgactggctctacctgacacctctgtgtgattctaggttgccccttgctcctctctgggcctcagcctt

SEQ ID NO: 350480 - DNA, 120 bp, Artificial Sequence
  ENSG00000138835_52 (sequence is synthesized)
tctgtctatgcagtggggatttcggatcgctgttgtttcagagtctgaggctatgaggtctgagagggcccttgtgtggagtcacctctgagctgcaggcaggatttccagggcaagaag

SEQ ID NO: 350481 - DNA, 120 bp, Artificial Sequence
  ENSG00000138835_53 (sequence is synthesized)
gccacagcatcagcaggcacctgtctttggcctgtgagccatagcctaaggcgtgcccttcccgaccttggccagatcacgctagagtcctccaaggcctcccctcccttgcccagccac

SEQ ID NO: 350482 - DNA, 120 bp, Artificial Sequence
  ENSG00000138835_54 (sequence is synthesized)
ccccagggcttgtctctcctctaggggtccaggtggggagaagaggttgtgcctggtcccgcccacaaccccagacagacaccaaggaaaaactggatcttggaactttgcagtgacccc

SEQ ID NO: 350483 - DNA, 120 bp, Artificial Sequence
  ENSG00000138835_55 (sequence is synthesized)
aaagtggggtcacctgggtcctgagcattctctccaagtgaggcaaagtgctgattcagtacccggaagccacagtgaaccagaagcaaccagcccgtttgccctggctttagcccagct

SEQ ID NO: 350484 - DNA, 120 bp, Artificial Sequence
  ENSG00000138835_56 (sequence is synthesized)
tctgagccaagcagggaccaagtgacttcaacaactcctttgctccctctgggcccaagagtgacctgagaaggggtggaactgacagtcattggctcctctttctcttcctgagctcct

SEQ ID NO: 350485 - DNA, 120 bp, Artificial Sequence
  ENSG00000138835_57 (sequence is synthesized)
gaatgctaatagtctcaggcattgccaggagggggcgctgctggcccagctgccgaatcccgcactcgccaagcctttctggccacactcaggccttcttatactatagggtgtttgtta

SEQ ID NO: 350486 - DNA, 120 bp, Artificial Sequence
  ENSG00000138835_58 (sequence is synthesized)
gaggtgtcaatgaaaaagatgtgtgtgtgggttctcaggtcttcttctacccccaggcctaagaccctggagactcgggggaggtatagggaggaggcagtggggtgcatgcacagtgac

SEQ ID NO: 350487 - DNA, 120 bp, Artificial Sequence
  ENSG00000138835_59 (sequence is synthesized)
acctccagaggaagcccctccccaccaggtcctgtagcacccaccactaggcaggaattgggctatagggaggagcctcctgcaaccctcttctctggccttgaccgtgggtggggtcca

SEQ ID NO: 350488 - DNA, 120 bp, Artificial Sequence
  ENSG00000138835_60 (sequence is synthesized)
ctaccctagaaagccttcctcaccccagctgccttgacctctccagctttctgcagcaactgttggcttctcttactccacagccaattgcattttcttagcaaggtgaaatgcataaac

SEQ ID NO: 350489 - DNA, 120 bp, Artificial Sequence
  ENSG00000138835_61 (sequence is synthesized)
caaaacagtcccttgcaccaaccatcttcacttaaccttttgtaggatgagagaggatccagggggtgccaggactgttgaatgtggtgctggaagtgggaggtgtagggaagcagtgtg

SEQ ID NO: 350490 - DNA, 120 bp, Artificial Sequence
  ENSG00000138835_62 (sequence is synthesized)
tggcgcagagggcaggcatcccgggtgctggagcagccctgtctagcctcctttcaatgtaggtgctgccttttgaattgcctgaagcccacactttttttttttggagacagagtctcc

SEQ ID NO: 350491 - DNA, 89 bp, Artificial Sequence
  ENSG00000138835_63 (sequence is synthesized)
ctccttctgtcacccaggctggagtgcgatcttggcttgctgcaacctccgcctcccaagttcaagcagttcttgtctgtgtgccatca

SEQ ID NO: 350492 - DNA, 120 bp, Artificial Sequence
  ENSG00000138835_64 (sequence is synthesized)
agacatgagccaccatgcctggcctctgaaggtcatactcttaaaagcttagacgaagagtcttagaacatctacggtaataataagaataaccattaatgtttattatgccccgcactg

SEQ ID NO: 350493 - DNA, 120 bp, Artificial Sequence
  ENSG00000138835_65 (sequence is synthesized)
ttctgtgtgtatttcatatgtaatctaatttaatctttaccactacttttattttccgttctgttctttcttattgaccttacccttattttacacgtgaataaactactgtgcaaagag

SEQ ID NO: 350494 - DNA, 120 bp, Artificial Sequence
  ENSG00000138835_66 (sequence is synthesized)
gccagtgtgcgcgtgtgcccgcaggtgcacacattcccaagcatctgttcagttcccgagtatgggtgaggtctttccctttcattagttctcagcagctatggcttcttgaagacagaa

SEQ ID NO: 350495 - DNA, 120 bp, Artificial Sequence
  ENSG00000138835_67 (sequence is synthesized)
cctgggctctaaataaatagttccagctccggcattcctggtccttgactgggaggggcccaccccagacttgagaactgcctccctgtgtggttgtggcaccatggacactcctgactt

SEQ ID NO: 350496 - DNA, 120 bp, Artificial Sequence
  ENSG00000138835_68 (sequence is synthesized)
tctcggggccccaatcttctggtgacatagctgctattcagactttcattaagagaaatgtttttctctttgcacatgaaatctactgtcgaaactcagcaaaaccccctaggatcccga

SEQ ID NO: 350497 - DNA, 120 bp, Artificial Sequence
  ENSG00000138835_69 (sequence is synthesized)
gggttgtgtgtgaggcaggagatgctgtgttttttgaggaatccctgagcttcctccaagcagtttaaaaatccctgggtgggtgattcttcagggaggttccgtgtgtctgcgacatct

SEQ ID NO: 350498 - DNA, 120 bp, Artificial Sequence
  ENSG00000138835_70 (sequence is synthesized)
ggtgagtccaggtgtggacaatattttaaagttccggtttcattccagtttaatagtttcaaaaagatacttaagcgttcagagcacattcttgtttgaatgactcattaggatttttta

SEQ ID NO: 350499 - DNA, 120 bp, Artificial Sequence
  ENSG00000138835_71 (sequence is synthesized)
aacttgagttcaggtagaagacaccctgggctgggttcagtgactgccctggcttggttctggtccataagcagagactgcctggttctcctttatccccagaggcaactttgaccctgt

SEQ ID NO: 350500 - DNA, 120 bp, Artificial Sequence
  ENSG00000138835_72 (sequence is synthesized)
ttccttttctgtaaaatggggacagtgatgcttcttttatagggttgtcgggaaggccacataagagagtggggtcaagctggcctggcacctgccaaagcaggagctagatagatagtg

SEQ ID NO: 350501 - DNA, 120 bp, Artificial Sequence
  ENSG00000138835_73 (sequence is synthesized)
gttatctctccctcttctcctataaatgaccagctgtgtttttgatggagcagaaagttcaagcaagaagacagggtgagaattgttacccagctaagtcaaaggggctttgggggttcc

SEQ ID NO: 350502 - DNA, 120 bp, Artificial Sequence
  ENSG00000138835_74 (sequence is synthesized)
atctggcacctcagctttcagactgggggcccggggttcaggccactgcctgatttcatgtcagctcatgcatggtgtctggcatcttggagcctcctcttctgaactgttcttgttttc

SEQ ID NO: 350503 - DNA, 120 bp, Artificial Sequence
  ENSG00000138835_75 (sequence is synthesized)
attccagagagcgtgtgtggctgcagcctgcaccgttgctgcccgctgcccaggacgcggggtgggggacaggagccagagtggtgcctcctacagaccaatctgcggccccaaggtggg

SEQ ID NO: 350504 - DNA, 120 bp, Artificial Sequence
  ENSG00000138835_76 (sequence is synthesized)
gggccctacagagatgctccgaggcatgtacctcactcgcaacgggaacctgcagaggcgacacacgatgaaggagtaggtgccctcgacccagctctcccgactctggatttgcagggg

SEQ ID NO: 350505 - DNA, 120 bp, Artificial Sequence
  ENSG00000138835_77 (sequence is synthesized)
acaaatgtaagttgggcctgcctgcccactccctgtgccctctctccctctccccttcgcccccatccagaccctgtgtagctggtgctagagaggccgccttccctctcctcggccgtc

SEQ ID NO: 350506 - DNA, 120 bp, Artificial Sequence
  ENSG00000138835_78 (sequence is synthesized)
attaaataattaaactttaaaatggtgtttttgtaagtttataggacttgtacttctgaagttattcaggcttaaaactactaagatgttggggtcctgctgtatattcatgactggatg

SEQ ID NO: 350507 - DNA, 120 bp, Artificial Sequence
  ENSG00000138835_79 (sequence is synthesized)
tcgccaatgcaggtgactgaggctgagaggccggctggcaggagccattctctgggaggtgccctgtacagggggtctagggaaaagaggggcgaacatgagcaagaggcatttaactcc

SEQ ID NO: 350508 - DNA, 120 bp, Artificial Sequence
  ENSG00000138835_80 (sequence is synthesized)
tttcttgccagcagtttcacccagtgctgaattctgctgcctccttggggaccggcaaggctaaaaatggttcttggctaaaaatagccagtcctgccaccccggtggtgggcagtgcct

SEQ ID NO: 350509 - DNA, 120 bp, Artificial Sequence
  ENSG00000138835_81 (sequence is synthesized)
cccctggctccctccttccctttcagcaatttgctgacttgtcccccaccccccaccactgtctccctgctgccatggtaacgaggaggccagtcacaaatagctgggactggcttcctg

SEQ ID NO: 350510 - DNA, 120 bp, Artificial Sequence
  ENSG00000138835_82 (sequence is synthesized)
ccggggcggccccagaggctgtcccttgcagacacatgcccctttcacggctccctctcagggttggccagaaggaatttttttttccgctccccctcctggtccctcccatttcctggc

SEQ ID NO: 350511 - DNA, 120 bp, Artificial Sequence
  ENSG00000138835_83 (sequence is synthesized)
ttctcggctgatctctctgggtaggtgccctctgggggcagtacccctgcctgagtggcacttcccctcctggctttgtttggtttggcctcgatttagaacagggttggcagaggcagg

SEQ ID NO: 350512 - DNA, 120 bp, Artificial Sequence
  ENSG00000138835_84 (sequence is synthesized)
ctgacttgcatttctggttttgggtttgttgctgcactttccccaaggggtgggcgggctctgactgacagtcaccactgggacaggcctgggccccaccctcaccacccaggaaagggg

SEQ ID NO: 350513 - DNA, 120 bp, Artificial Sequence
  ENSG00000138835_85 (sequence is synthesized)
aaatgcggcccgctccccactcagtgccactctgtgccactccgtgccaggccctgagggcacccggttgctgcttccttccgtctttccccaaggactatcagagatgccagcgtgacc

SEQ ID NO: 350514 - DNA, 120 bp, Artificial Sequence
  ENSG00000138835_86 (sequence is synthesized)
agtgctcaagttgtctgggctgagatagggacactgaggggctggctagctcctttgtgcctccagttcccttggagaggagggtggctcttggcaggggtgggctgtgggcttcctgac

SEQ ID NO: 350515 - DNA, 120 bp, Artificial Sequence
  ENSG00000138835_87 (sequence is synthesized)
ccaatgccacccaggatagaagctttacctcaccaggacagactctgattggctgagcaaacccaagggcgggactctgcttctggcaacttaaccctttcttgggcatcccctaccaca

SEQ ID NO: 350516 - DNA, 120 bp, Artificial Sequence
  ENSG00000138835_88 (sequence is synthesized)
cagtaacctcacctcaactggacctgaaacagaggaccaagatggtgggtctagggtcatctgaagggagtggtcccaagggtgcatgtggatgtcaacagaaggaccacaatggtgtga

SEQ ID NO: 350517 - DNA, 120 bp, Artificial Sequence
  ENSG00000138835_89 (sequence is synthesized)
gaggccttgtgggcatgcagagactggcagcagaaagtcccaagaggagaggactcagaggcttcttccttccaaggaggaggaggaggaggacattccacatctgggcttccagtggtg

SEQ ID NO: 350518 - DNA, 120 bp, Artificial Sequence
  ENSG00000138835_90 (sequence is synthesized)
gctcccggacctgccttgggggcagcaggagaggttgggagaggtcaccctgatgaagaacaatgccatgatctgctgctgccagaggacatctccgcccatccactcattttccacctg

SEQ ID NO: 350519 - DNA, 120 bp, Artificial Sequence
  ENSG00000138835_91 (sequence is synthesized)
tacacattggctcattcattcgatggatatttcgggtgcatctactttatgccaggctctatgctaggagctggggatactgtggagaaaaagtcggatatggtctcgctctcatcaaga

SEQ ID NO: 350520 - DNA, 120 bp, Artificial Sequence
  ENSG00000138835_92 (sequence is synthesized)
tttcagtctagctgggagtgagcgttaaataagtcaataccaacacacacacgtgcacacacgtgatggcaagctgtgatcatctatgaaagaaaaaacacagatttctttaagagggaa

SEQ ID NO: 350521 - DNA, 120 bp, Artificial Sequence
  ENSG00000138835_93 (sequence is synthesized)
aatgtggtcagtgatcatggtggacagagtgtaattctgcttcctccgagctaggagcacagggcccgccccaggctaacgctctgtgaacctctgtgagaaaggaagaagggagccagg

SEQ ID NO: 350522 - DNA, 120 bp, Artificial Sequence
  ENSG00000138835_94 (sequence is synthesized)
atcggctctgtcctgctctccacaggcctctgctgtgttgggagccactgccttcctcccctcccccaacctgtgggcccacagctcgccagctggcccttgaacccacttccctgcgcc

SEQ ID NO: 350523 - DNA, 120 bp, Artificial Sequence
  ENSG00000138835_95 (sequence is synthesized)
tctggctgcctcaatgtcactggggattagtgtgcatttgcggcttttggcggacactcccctcctggctgcagcctcaccctctggagcccagggatgggcttgggcctgggagccccc

SEQ ID NO: 350524 - DNA, 120 bp, Artificial Sequence
  ENSG00000138835_96 (sequence is synthesized)
agactccggttactggggagcaacacagccgcctcgggttgcagacgctcctgtccgggtcgcagtgggacgccatggagcgctccctgcaccgcgtctccctcgggagccggcgtgccc

SEQ ID NO: 350525 - DNA, 120 bp, Artificial Sequence
  ENSG00000138835_97 (sequence is synthesized)
acccggacttgtccttctacctcaccacctttggtcagctgaggctgtccattgatgcccaggaccgggttctgctgcttcacagtctctttattcgtgtggatggatatgtctatgtgt

SEQ ID NO: 350526 - DNA, 120 bp, Artificial Sequence
  ENSG00000138835_98 (sequence is synthesized)
actctgtgccactccgtgccaggccctgagggcacccggttgctgcttccttccgtctttccccaaggactatcagaggagctttcgagctttccagcttttccagcatacgctcctgat

SEQ ID NO: 350527 - DNA, 120 bp, Artificial Sequence
  ENSG00000138835_99 (sequence is synthesized)
ttggggaggtgagaggtgatttcctgccattcttctgtggggcgggcttcccagggtgctcatgccaggctgacgggtccagtgcgggctcccgctgctgggggagagctgggttttcat

SEQ ID NO: 350528 - DNA, 120 bp, Artificial Sequence
  ENSG00000138835_100 (sequence is synthesized)
ggggcggcagccgaggcaggacccgcagccatgaaccgcttcaatgggctctgcaaggtgtgctcggagcgccgctaccgccagatcaccatcccgaggggaaaggacggctttggcttc

SEQ ID NO: 350529 - DNA, 120 bp, Artificial Sequence
  ENSG00000138835_101 (sequence is synthesized)
gaggtttcaggaagccttcgggcttatcgtgcagaggcacacagcacagacagggcttggggagggcccgccccaggctaacgctctgtgaacctctgtgagaaaggaagaagggagcca

SEQ ID NO: 350530 - DNA, 120 bp, Artificial Sequence
  ENSG00000138835_102 (sequence is synthesized)
cgctcccctggggaacttgggtaagtccataaatagctctgctgacacaaaggagctctgtctggggaaggcagccgcttgacacggccgccaggagctgccacagccacggccgcccgc

SEQ ID NO: 350531 - DNA, 120 bp, Artificial Sequence
  ENSG00000138835_103 (sequence is synthesized)
ctgcgggaggagccgggtggaaacctgggcgggcgagctggcaggagcggcagccaggagtcgcctgggtccctgctggagtatgctggatgccagcgtgacccctgacacgtgtgtgca

SEQ ID NO: 350532 - DNA, 120 bp, Artificial Sequence
  ENSG00000138835_104 (sequence is synthesized)
ggttgtatggtgctcctccattctttataacagctcatactattccatatacagctatagatggtttacttcactatttctatattgatgaacatttcaggtgtttccagtttttcctta

SEQ ID NO: 350533 - DNA, 120 bp, Artificial Sequence
  ENSG00000138835_105 (sequence is synthesized)
aacaatgctgtagtgccagcctttgtgtgcacgtgcttgtgtttgtctacgacagtgacctggaatgaagacttttaggtggaagaatatgcacatttaaatttcagtagatcttggcag

SEQ ID NO: 350534 - DNA, 120 bp, Artificial Sequence
  ENSG00000138835_106 (sequence is synthesized)
aaattaccctccattttcactccttccaacagagaatgacagtacttgttctcctacacctttaccaacatttgacaacgacccagcagtgagatttcccagcatccacctggctgcctg

SEQ ID NO: 350535 - DNA, 120 bp, Artificial Sequence
  ENSG00000138835_107 (sequence is synthesized)
actgctggaggcattcgaaagggactcccgatgtggtgggcggggctgaaccctgtggcttctgaggtccctgccagccagagacttgtgtgagtctttgaatggcttcacatgaacaaa

SEQ ID NO: 350536 - DNA, 120 bp, Artificial Sequence
  ENSG00000138835_108 (sequence is synthesized)
agagcatttctgtcacctttcctctagttttttccaccacacccaccagggagctgaggcaaggttgtttctgttgctgtttccttaggtcagctgaggctgtccattgatgcccaggac

SEQ ID NO: 350537 - DNA, 120 bp, Artificial Sequence
  ENSG00000138835_109 (sequence is synthesized)
gtttccatcttatgtatgagggggtgtgtgggttctcgggtcggtggcgggctgacagtcttctctgggtcagagggttctctgtggctggctttgacaagctgctgcttcctccccccg

SEQ ID NO: 350538 - DNA, 120 bp, Artificial Sequence
  ENSG00000138867_0 (sequence is synthesized)
agattcgagacctggaagggctggggcggcgcttggggcggcccagccgccgcctcccgttctctcctccgcagcggcggcggtggcggagaaggaactcgacacgcaccgaccgccctc

SEQ ID NO: 350539 - DNA, 120 bp, Artificial Sequence
  ENSG00000138867_1 (sequence is synthesized)
gccgaagcggaagctgtagcccgctctgggccggggccatgggcgccccgcgccgcccgggtcatgaggacggaggcggaggcagcggggccgccgctcgagcccggggactttgtgcaa

SEQ ID NO: 350540 - DNA, 120 bp, Artificial Sequence
  ENSG00000138867_2 (sequence is synthesized)
ttgtgcaactgcctgtgcccgtcatccagcagctctaccactgggactgtggcctggcctgctccaggatggtgctgcggtacctgggccagctggacgacagtgagtttgagagagccc

SEQ ID NO: 350541 - DNA, 120 bp, Artificial Sequence
  ENSG00000138867_3 (sequence is synthesized)
tgcagaagctgcagctgaccaggagcatctggaccatcgacctggcctacctgatgcaccactttggcgtgaggcaccgcttctgtacccagaccctgggtgtcgacaagggctacaaga

SEQ ID NO: 350542 - DNA, 120 bp, Artificial Sequence
  ENSG00000138867_4 (sequence is synthesized)
accagtccttctacaggaagcactttgacacagaagagacccgggtgaatcagctgtttgcacaagcaaaggcctgcaaggtgctggtggagaaatgcacagtgagtgtgaaggacatcc

SEQ ID NO: 350543 - DNA, 120 bp, Artificial Sequence
  ENSG00000138867_5 (sequence is synthesized)
aggcgcacctggctcagggccatgtggccatcgtgctggtgaactcgggggtgctgcactgtgacctgtgctccagccctgtcaagtactgctgcttcacccccagtggccaccactgct

SEQ ID NO: 350544 - DNA, 120 bp, Artificial Sequence
  ENSG00000138867_6 (sequence is synthesized)
tctgccgcactcctgactaccagggccacttcatcgtgctgcgtggctacaaccgggccactggctgcatcttctacaacaacccagcctatgccgacccaggaatgtgcagcaccagca

SEQ ID NO: 350545 - DNA, 120 bp, Artificial Sequence
  ENSG00000138867_7 (sequence is synthesized)
tcagtaactttgaggaggccagaaccagctatggcacagatgaggacatcctctttgtctacttggacagctgacagcaggagcctggtgcgcctaggccctcggaccccatccccaccc

SEQ ID NO: 350546 - DNA, 120 bp, Artificial Sequence
  ENSG00000138867_8 (sequence is synthesized)
cagccgggcccgctcaggatgccctggcccaggcttggggctgctggggttggaatgtggaactgcagcctcagcccatctggcagagtcccaggaactcggagactggcacagctgctt

SEQ ID NO: 350547 - DNA, 120 bp, Artificial Sequence
  ENSG00000138867_9 (sequence is synthesized)
tgtctgccagtgccgtgtgttgtcatgtcactcaccccaagcacctgctggctgctggaagcataccccaagaccccaagccttgactccagctgcgcccacaggaagtccagtcccgac

SEQ ID NO: 350548 - DNA, 120 bp, Artificial Sequence
  ENSG00000138867_10 (sequence is synthesized)
agtgcccttgttgcctttgagccagatccatggcaatggtctccccacagaccgcaggactgagcctggagagagaagttgcttgacggatgccacttgtcaggacagtatgtgagtgtc

SEQ ID NO: 350549 - DNA, 120 bp, Artificial Sequence
  ENSG00000138867_11 (sequence is synthesized)
tggagacagcatagctgaccccaatcccccagggctgaggacccctccaggcccctctctcctggaagtgctgcatatgcccctgtgcccagtggttgatgataccaccaccacctgcct

SEQ ID NO: 350550 - DNA, 120 bp, Artificial Sequence
  ENSG00000138867_12 (sequence is synthesized)
acccatgggcccaagtttctgtggctcattacagggcatctgacccctgccacccagcatagacacacctcacagctgccctgccatgcagagccctggccgctggagactcttaaagcc

SEQ ID NO: 350551 - DNA, 120 bp, Artificial Sequence
  ENSG00000138867_13 (sequence is synthesized)
cccacagccctccaggtcctccagctctgtcagatggagggctctcgggcctagatcccactggtaggcctcgtggctggcagcagtgctctgggaataaacagctgccctagccccaga

SEQ ID NO: 350552 - DNA, 120 bp, Artificial Sequence
  ENSG00000138867_14 (sequence is synthesized)
gatccctgcacccaggaggcctcctgacaccagccaaaatcctgacagcagggtctgccctcttgagtgtggggagcccctagtcctttaaggttggctgctaaggcctgtgctccaaag

SEQ ID NO: 350553 - DNA, 120 bp, Artificial Sequence
  ENSG00000138867_15 (sequence is synthesized)
caacgggctggggcagcctgcagctgcccacccaacctggtcttcacaccagattgcacaggatactgggtcttgtctatcttgatggagaagaggggttcctgcccaggatcttacaac

SEQ ID NO: 350554 - DNA, 120 bp, Artificial Sequence
  ENSG00000138867_16 (sequence is synthesized)
acagcaagtagcatagagctctttccttcctcttttttggggaggttggggtcaggggttgtttctttgagatttaagttttcatttttgaggggtaatcaccttcaagtaaaacagtaa

SEQ ID NO: 350555 - DNA, 120 bp, Artificial Sequence
  ENSG00000138867_17 (sequence is synthesized)
tagcaagagtgaaggtactttggaaccactaacacctctgcacagggcagttagccagctcaagttctttttcagagaaagggacttggccagtggtttaagtacctgccccttcacctc

SEQ ID NO: 350556 - DNA, 120 bp, Artificial Sequence
  ENSG00000138867_18 (sequence is synthesized)
tcagacgaggcagctgacgaggcagctggcccagtcttgggagtctgctcaggacagtggtggagctgggtcttgaaccccagtctgcacctaaaaaactaaaggaaatggatttttttt

SEQ ID NO: 350557 - DNA, 120 bp, Artificial Sequence
  ENSG00000138867_19 (sequence is synthesized)
cctcggcctcccaaagtgggaaatgggtcattttcaaaggggcaacagtgataccatccctgcactcctgggtcctgctcttccaatgcccaaggcatggcatggtggcagctgtgcccc

SEQ ID NO: 350558 - DNA, 120 bp, Artificial Sequence
  ENSG00000138867_20 (sequence is synthesized)
cgcccattgctttggagcacagatgactctgggggcagaggtgggctctgtttaggagggcagtgagaccacccagccaaattgcttctcaaccctagacaaagcctttggccaagaggg

SEQ ID NO: 350559 - DNA, 120 bp, Artificial Sequence
  ENSG00000138867_21 (sequence is synthesized)
aggtgctgttagttgggcagcccttctgggtttcagagaccggtgttggctctagactggtctcatctccattgccttaatgccaggtggcccaggagtacccatgcacagcagctgtgg

SEQ ID NO: 350560 - DNA, 120 bp, Artificial Sequence
  ENSG00000138867_22 (sequence is synthesized)
ggtgtgggcatcttcaggtggtgttctggtaaaattgttagaatagctgtatgaaggaaaccagtgggaggaaatgaagttttcaggatggtgggatgtgatttagacagtgcacatgct

SEQ ID NO: 350561 - DNA, 120 bp, Artificial Sequence
  ENSG00000138867_23 (sequence is synthesized)
gttagggctgtcactagggagtggccttcatggagggtggtaacagcacctcagtccagccaaaatgtttagaaacactcagtctctggtcccagaggatggcttctcagggcatgccac

SEQ ID NO: 350562 - DNA, 120 bp, Artificial Sequence
  ENSG00000138867_24 (sequence is synthesized)
aagttaaaggtcaccttcctgaaagatgaatgagaaagctgcccattctcaagactcatctgcctagggagggtcacagaggcaggatgtaagacacactgtgttgcattcttgcacaag

SEQ ID NO: 350563 - DNA, 120 bp, Artificial Sequence
  ENSG00000138867_25 (sequence is synthesized)
tcatgaaaatggagccagagagcctggacatcagggacttttgcccacagcacatgacaccgacagctgcccagcctgttcacatgctggggaccagcacagcacctgaagccatgtggg

SEQ ID NO: 350564 - DNA, 120 bp, Artificial Sequence
  ENSG00000138867_26 (sequence is synthesized)
acagttgggctttgttcattctagccacggggatgaaagggatcttttgcattgcagagattttatatatattttgtttgtaatgagccattctcaataaacattattctcactgcaaaa

SEQ ID NO: 350565 - DNA, 120 bp, Artificial Sequence
  ENSG00000138867_27 (sequence is synthesized)
gcgcgaggattgggcgagagggtggggccactcaacgctgaggcggcgaatggccggagcagacttaaatcaagaggctggggacctctaagatcaaagtttggggcggggcctaaggag

SEQ ID NO: 350566 - DNA, 120 bp, Artificial Sequence
  ENSG00000138867_28 (sequence is synthesized)
ccaggccttcccatgtggggccacacagaggtataaggccacctggttccagtagttggaagagggaacagtcaagggctagacacccaggtagatacccaggtgtgcagagaccaggga

SEQ ID NO: 350567 - DNA, 120 bp, Artificial Sequence
  ENSG00000138867_29 (sequence is synthesized)
cctttccccagtgttgagcgcggtctcgcctccgcttcctcctcactccgcctgccggctgggaaactagggcaccagtacgatagttccggcaccggaaaagagggctgatgactgggc

SEQ ID NO: 350568 - DNA, 120 bp, Artificial Sequence
  ENSG00000138867_30 (sequence is synthesized)
ccgggggccgccgcaacgacccttggggccggcaaagagccagagagggtgctcacacttccaagcaccccacaccaaggacaggctggacggcaaggcggagacgcggggcttgggccc

SEQ ID NO: 350569 - DNA, 120 bp, Artificial Sequence
  ENSG00000138867_31 (sequence is synthesized)
ctagctaagccaagctgtagctgagctgtcccaggtggttcagcctcatcccccttgcttattcgctacgggctcctgctcatgcctgccagagtgtacaagcccaagggtgatcgatcc

SEQ ID NO: 350570 - DNA, 120 bp, Artificial Sequence
  ENSG00000138867_32 (sequence is synthesized)
tccccagagagctgacctgagcccagctgcccacccctctctcaagcatcatcctcatgcctctgtgtggtcctgcttccctgctcctgcttaggacagacagctttctgatctggcttg

SEQ ID NO: 350571 - DNA, 120 bp, Artificial Sequence
  ENSG00000138892_0 (sequence is synthesized)
atgaggctcctggatgggaaacagacttccaggtactcagagaatgcctgcgagaagaagattttctctatctacggacactacccggtggtccgggccgctctgcgaaggaagggctgg

SEQ ID NO: 350572 - DNA, 120 bp, Artificial Sequence
  ENSG00000138892_1 (sequence is synthesized)
gtagagaagaagttccactttttgcccaaggtcattccggatgtcgaggatgaaggcgcccgggtcaatgatgatacatgtgccaaagtcaaagaaaatcaagaaatggctttggagaaa

SEQ ID NO: 350573 - DNA, 120 bp, Artificial Sequence
  ENSG00000138892_2 (sequence is synthesized)
acagacaacatccacgacgtgatgtctaggttggtaaaaaatgagatgccgtacctcctctggaccatcaagagggacatcattgactatcacagcctgacctacgaccagatgctgaac

SEQ ID NO: 350574 - DNA, 120 bp, Artificial Sequence
  ENSG00000138892_3 (sequence is synthesized)
cactacgcaaagacagcctccttcaccaccaagatcgggctgtgcgtgaacatgcggagcctgccctggtacgtcccggccaaccccgactccttcttcccacgctgctacagcctctgc

SEQ ID NO: 350575 - DNA, 120 bp, Artificial Sequence
  ENSG00000138892_4 (sequence is synthesized)
accgagagtgagcagcaggagttcctggaagacttccggcgcaccatggcatccagcatcctcaagtgggtggtcagccaccagagctgcagcaggagcagcagaagcaagcccagggac

SEQ ID NO: 350576 - DNA, 120 bp, Artificial Sequence
  ENSG00000138892_5 (sequence is synthesized)
cagagggaggaggccgggagcagcgacctgagcagcaggcaagatgctgaaaatgctgaggcaaagctcaggggcctcccggggcagcttgtggacatcgcgtgcaaggtgtgccaggcc

SEQ ID NO: 350577 - DNA, 120 bp, Artificial Sequence
  ENSG00000138892_6 (sequence is synthesized)
tacctggggcagctggagcatgaggacatcgacacgtcagcagatgccgtggaggacctcactgaggccgagtgggaggacctgacccagcagtactactccctcgttcaggtgcctttg

SEQ ID NO: 350578 - DNA, 120 bp, Artificial Sequence
  ENSG00000138892_7 (sequence is synthesized)
gggagtagcattgtcttgtgcatcttcaaaatccagaaggttatgatgtcatttgagccccccacagcccgagacaggcagtgccaggctctgctgaatagaatcacgtctgtgaaccct

SEQ ID NO: 350579 - DNA, 120 bp, Artificial Sequence
  ENSG00000138892_8 (sequence is synthesized)
cagacggacattgacgggctccggaacatctggattataaagcccgcggccaagtcccggggccgaggtgagtcccctgacatagtgtgcatggaccgtgtggaggagatcctggagctg

SEQ ID NO: 350580 - DNA, 120 bp, Artificial Sequence
  ENSG00000138892_9 (sequence is synthesized)
gcagctgcagaccaccctctttccagggacaacaagtgggtggtccagaagtacatcgagacgccgctgctcatctgtgacaccaagttcgacatcagacagtggttcctcgtcacggac

SEQ ID NO: 350581 - DNA, 120 bp, Artificial Sequence
  ENSG00000138892_10 (sequence is synthesized)
gccgtccagaagtacctgaagaatgatgtgggccgcagccccctgctgcccgcacacaacatgtggaccagcaccaggttccaggagtacctgcagcgccagggccgtggcgccgtgtgg

SEQ ID NO: 350582 - DNA, 120 bp, Artificial Sequence
  ENSG00000138892_11 (sequence is synthesized)
ggcagcgtcatctacccgtccatgaagaaggccatcgcccacgccatgaaggtggcccaggaccacgtggagcctcgcaagaacagctttgagctctacggggctgacttcgtccttggg

SEQ ID NO: 350583 - DNA, 120 bp, Artificial Sequence
  ENSG00000138892_12 (sequence is synthesized)
agggacttcaggccctggctgatcgagatcaattccagccccaccatgcacccgtccacgccggtcacggcccagctgtgtgcacaggtgcaggaggacaccatcaaggtggccgtggac

SEQ ID NO: 350584 - DNA, 120 bp, Artificial Sequence
  ENSG00000138892_13 (sequence is synthesized)
cgcagctgtgacatcggcaacttcgagctcctgtggaggcagccggtggttgagccgcccccattcagcgggtccgacctctgcgtggcgggcgtcagtgtgaggagagccaggaggcag

SEQ ID NO: 350585 - DNA, 120 bp, Artificial Sequence
  ENSG00000138892_14 (sequence is synthesized)
gtgctgcccgtctgcaacctcaaggcctcggcctcgctgttggacgcgcagccgctgaaggcacggggcccctcggccatgccagaccctgcccagggacccccatcaccagctctccag

SEQ ID NO: 350586 - DNA, 120 bp, Artificial Sequence
  ENSG00000138892_15 (sequence is synthesized)
cgggacttgggactgaaggaagagaaggggctccccctggccttgctggcacccttaaggggggcagccgagagcggtggagccgcacagcccacccgcaccaaagctgctgggaaggtg

SEQ ID NO: 350587 - DNA, 120 bp, Artificial Sequence
  ENSG00000138892_16 (sequence is synthesized)
gagctcccggcctgcccctgtcgccacgtggacagtcaggccccaaacaccggtgtccccgtagcccagcccgccaaaagctgggatccaaaccagctaaatgcgcacccgctggagcct

SEQ ID NO: 350588 - DNA, 120 bp, Artificial Sequence
  ENSG00000138892_17 (sequence is synthesized)
gtgctgcggggcctgaagacagcagagggcgcgctgcgtccgccgcccggaggaaaaggagagggcacggtctgcagccgcctgccacaccacgggcaccacgtggccgcctgccagacc

SEQ ID NO: 350589 - DNA, 120 bp, Artificial Sequence
  ENSG00000138892_18 (sequence is synthesized)
acgggcaccacgtgggatggtgggcctggggtgtgcttcctccggcagctcctggcatcagaactgcccatgggccctgggctgccgagggacccccgagcgccgccctgcctcgtgtgc

SEQ ID NO: 350590 - DNA, 80 bp, Artificial Sequence
  ENSG00000138892_19 (sequence is synthesized)
cgcgggctgctgccacccgccgggccctgcaagcgctgccgctcgttctgcgccgcggtcctgcagggcgcgtccttcgt

SEQ ID NO: 350591 - DNA, 120 bp, Artificial Sequence
  ENSG00000138892_20 (sequence is synthesized)
atggaaccagagaggaaggggctatcgttggcttcttcttcagatggagacgggagagaagaaaataaattaaaacaaggaatttcccaagacttggcttcttcctccagattagacaga

SEQ ID NO: 350592 - DNA, 120 bp, Artificial Sequence
  ENSG00000138892_21 (sequence is synthesized)
tcaagaaattacttttcgcagtgccaggctctgctgaatagaatcacgtctgtgaaccctcagacggacattgacgggctccggaacatctggattataaagcccgcggccaagtcccgg

SEQ ID NO: 350593 - DNA, 120 bp, Artificial Sequence
  ENSG00000138942_0 (sequence is synthesized)
atgtgactggagtccgcgtaggaggggtcggaggtcttacccaacagattgacgcggcgttagtattggccgtgtacccgaaaaactgattgactgggctggcgttaactgtgcggaggc

SEQ ID NO: 350594 - DNA, 120 bp, Artificial Sequence
  ENSG00000138942_1 (sequence is synthesized)
aggatttccctggggaaagtcttcactcagagcttcgctgacagccaaggatggcaagcaaggggccctcggcctctgcatctcctgagaactccagtgcaggggggcccagtgggagca

SEQ ID NO: 350595 - DNA, 120 bp, Artificial Sequence
  ENSG00000138942_2 (sequence is synthesized)
gcaatggcgctggcgagagcggagggcaggacagcactttcgagtgcaacatctgcttggacacagccaaggatgccgtcatcagcctgtgtggccacctcttctgttggccgtgtttac

SEQ ID NO: 350596 - DNA, 120 bp, Artificial Sequence
  ENSG00000138942_3 (sequence is synthesized)
atcagtggttggagaccagacctaacagacaggtgtgtcctgtttgcaaagctggcatcagccgagacaaggtcatccccctctatggaaggggcagcactgggcaacaggaccccagag

SEQ ID NO: 350597 - DNA, 120 bp, Artificial Sequence
  ENSG00000138942_4 (sequence is synthesized)
agaagacccctcctcgtcctcaaggacagaggccagagccggagaatagagggggatttcaaggatttggatttggagatggtggcttccagatgtcttttggaattggggcatttccct

SEQ ID NO: 350598 - DNA, 120 bp, Artificial Sequence
  ENSG00000138942_5 (sequence is synthesized)
ttgggatatttgccacagcatttaatataaatgatgggcggcctcctccagctgtccctgggacaccccagtatgtggacgagcagttcctgtcacgcctcttcctatttgtggccctgg

SEQ ID NO: 350599 - DNA, 120 bp, Artificial Sequence
  ENSG00000138942_6 (sequence is synthesized)
tgatcatgttctggctcctgattgcctaatgctgggctcctgcctacatccgtggcagggctctggactggtgacgtgccaccccaactcctggtgtttggcttcctggctaatcttgac

SEQ ID NO: 350600 - DNA, 120 bp, Artificial Sequence
  ENSG00000138942_7 (sequence is synthesized)
tcctggaatcagtgggatcagtaacacatcaaggagtcttgtttcttcatcagagctttggaactcgagaccagttggcgatgacccctgaatatcgccaccgctgtaaacactctataa

SEQ ID NO: 350601 - DNA, 120 bp, Artificial Sequence
  ENSG00000138942_8 (sequence is synthesized)
cttcaggccttggcattgagtcatctctcatgggtgacaccatgaaatcttgtttcagccagttctgcaggtcctgactctgcagagggaagaggcagaaagagagaaactgtcagagta

SEQ ID NO: 350602 - DNA, 120 bp, Artificial Sequence
  ENSG00000138942_9 (sequence is synthesized)
taatttcacctgagtttaatattacagaaacaaagggatgcaccaaatggtatttctggaaattttcatgtctttaaataccccttggtaagttgcttctgaagccagtgggggctcctc

SEQ ID NO: 350603 - DNA, 120 bp, Artificial Sequence
  ENSG00000138942_10 (sequence is synthesized)
agatagagaggttcccctttcaaatcccagtgccgctctgttctctttccttcccctcccactccccctcttcttcctctgtagagatgcaagaaattgctgtcccataaaaatcataat

SEQ ID NO: 350604 - DNA, 120 bp, Artificial Sequence
  ENSG00000138942_11 (sequence is synthesized)
tgcagtagctaaagctggggtcacttcgtgaattcaccagagactcaaagatcttttattggctctgggctgtgctcagtgtctttggcctcagagaacaacttgaatgacttcctggtt

SEQ ID NO: 350605 - DNA, 120 bp, Artificial Sequence
  ENSG00000138942_12 (sequence is synthesized)
tcctggcataaattattcctggtgagacatgtggcttaactcacaggtttcccatcagctttctccctaaaactatgttcatctgcctctctctgccagagaacatacagccgagaatac

SEQ ID NO: 350606 - DNA, 120 bp, Artificial Sequence
  ENSG00000138942_13 (sequence is synthesized)
tttggagctccgaggcagtaataactgaacaagcagccctgtcccctaggctgcagaagcttgaatgcatcctctcccagaacctgccacaggaaactgggggctttgtcaggtcagccc

SEQ ID NO: 350607 - DNA, 120 bp, Artificial Sequence
  ENSG00000138942_14 (sequence is synthesized)
aactgcatgcaaaagaccaccatcctcagaagccaagttgtcttttatgaagaggcaaggaaaggggaaacccacatgtgaccctgattttggtatggcttgatagagttccctgaaaac

SEQ ID NO: 350608 - DNA, 120 bp, Artificial Sequence
  ENSG00000138942_15 (sequence is synthesized)
tccttgtatgtgtgctaaaaccagggaagcatgtgactgccaagcaggcaacccctgatgatttgtaaagccaggtggcagggccttggggagccccagcacaatgatattgtgtggtct

SEQ ID NO: 350609 - DNA, 120 bp, Artificial Sequence
  ENSG00000138942_16 (sequence is synthesized)
tccctcctgtggaatcgaggggaaattattcttcccaataccttgatttgattttcagtttcataagcttcttcctctgaatcttattgagggactatggtaccaagcaggtaggactgt

SEQ ID NO: 350610 - DNA, 120 bp, Artificial Sequence
  ENSG00000138942_17 (sequence is synthesized)
tcacctggtggaacagttcttgctctgccttctaggcttcatcccagaaatccagcctctttctggagaccccaaagctggagggagatgggctttcctctgggcctctctcctactttg

SEQ ID NO: 350611 - DNA, 120 bp, Artificial Sequence
  ENSG00000138942_18 (sequence is synthesized)
ccatccacactgctcctggctaaccccagcaataaccaacaaatggtaggaagccccatctattgctttttctcaattatgactgcatagtttatggaaacaaagatcttgaggaagatg

SEQ ID NO: 350612 - DNA, 120 bp, Artificial Sequence
  ENSG00000138942_19 (sequence is synthesized)
agggaagccctcccctcttcacagtccccatctcttctcctttgtacctgtcaacaccagagttcagtgtttaaacagacaaaatataaagtattgagtaggtggttcatatgccgaatc

SEQ ID NO: 350613 - DNA, 120 bp, Artificial Sequence
  ENSG00000138942_20 (sequence is synthesized)
cacttggtaggaagaaaccaccagctttatagtgtgcctgatagattttaaacattcctgggcacccactcaagagtgctctttttatcaccttctggaaatccgcaaagttgcaggggc

SEQ ID NO: 350614 - DNA, 120 bp, Artificial Sequence
  ENSG00000138942_21 (sequence is synthesized)
ctctggagtgtctcttctctagagagaattggtgggacccccctcagtgcagtggccccaactagtggagggagagaggacttaagtcagatggactcaacagaaatgggtttccagaag

SEQ ID NO: 350615 - DNA, 120 bp, Artificial Sequence
  ENSG00000138942_22 (sequence is synthesized)
aataatgaaaagttgtgggtaggaaaatgaatcatttggactcttcaatgaaatggagtgagcccaggagagctcagccaacagaggcactctgggaacctgttagtaaagccaggctgg

SEQ ID NO: 350616 - DNA, 120 bp, Artificial Sequence
  ENSG00000138942_23 (sequence is synthesized)
ccaaatgccatttgattttgaacctcgtaggtccccactcaccctctgccaggagctaagtaaggcaggagagctgacttgggactcctggctcggccccaacagggagcccccttccca

SEQ ID NO: 350617 - DNA, 120 bp, Artificial Sequence
  ENSG00000138942_24 (sequence is synthesized)
ccatccctcggcaagctcaccacctcatccttctgccaaggcagctttcctttcttttgtgtgttttctgtgttcttagcctccaccctcctcctgccacccttgtggactaggaccagg

SEQ ID NO: 350618 - DNA, 120 bp, Artificial Sequence
  ENSG00000138942_25 (sequence is synthesized)
tcctgaccccagtcagaaaatgatgatatgtacagtggcacaccttaaccagtcactaattttcactgttgtgaaagtgatttgatttagaattaaacaaatggttttacattactatga

SEQ ID NO: 350619 - DNA, 120 bp, Artificial Sequence
  ENSG00000138942_26 (sequence is synthesized)
tcctcgtcctcaaggacagaggccagagccggagaatagaggggtgaggaacattctaggagaagcttctacaaatgagctgatggctttagaagtttccttcttagccttacaattttt

SEQ ID NO: 350620 - DNA, 120 bp, Artificial Sequence
  ENSG00000138942_27 (sequence is synthesized)
ctccttgattataaaagtaaaggaaaacttgtaaaatacagaaaggaaaagagggggaaaaaaatcacttataaccacaccaatccagagggatttcaaggatttggatttggagatggt

SEQ ID NO: 350621 - DNA, 76 bp, Artificial Sequence
  ENSG00000138942_28 (sequence is synthesized)
agtattggccgtgtacccgaaaaactgattgactgggctggcgttaactgtgcggaggcaggttggagtgcgatga

SEQ ID NO: 350622 - DNA, 120 bp, Artificial Sequence
  ENSG00000138944_0 (sequence is synthesized)
acactgaattcttgtcagcacacagaggccagcctgcgctggaaaacactcttttgcctatacaaggctcgaccaagttgctctccttttattggggtttaaggttggtggcaaccagga

SEQ ID NO: 350623 - DNA, 120 bp, Artificial Sequence
  ENSG00000138944_1 (sequence is synthesized)
gccggggaagaggccagcagctgcagggagaccgcagccagcggagggggcttctgatccctcagtcacagggctcggcaggcagctctggacggatcaatgcaagccagacgatgacca

SEQ ID NO: 350624 - DNA, 120 bp, Artificial Sequence
  ENSG00000138944_2 (sequence is synthesized)
gttgtggccagcagtccttgaacgtgctcgccgtcctcttctcattgctgttttctgcagtcttgtctgcacatttccgggtctgtgaaccatacacagaccacaaaggccgctaccact

SEQ ID NO: 350625 - DNA, 120 bp, Artificial Sequence
  ENSG00000138944_3 (sequence is synthesized)
ttggcttccactgcccccggctctcggacaacaagaccttcatcctctgttgtcaccataacaacacggtcttcaaatactgctgcaacgagacggagttccaggcggtgatgcaggcga

SEQ ID NO: 350626 - DNA, 120 bp, Artificial Sequence
  ENSG00000138944_4 (sequence is synthesized)
acctcacggccagctccgagggttacatgcacaacaattacaccgccttgttgggagtgtggatctatggatttttcgtgttgatgctgctggttctggaccttttgtattactcggcaa

SEQ ID NO: 350627 - DNA, 120 bp, Artificial Sequence
  ENSG00000138944_5 (sequence is synthesized)
tgaactacgacatctgcaaggtctacctggcacggtggggcatccaaggacgatggatgaaacaggacccccggcggtgggggaaccccgctcgggcccctcggccgggtcagcgggccc

SEQ ID NO: 350628 - DNA, 120 bp, Artificial Sequence
  ENSG00000138944_6 (sequence is synthesized)
cacagccgcagcctcccccaggcccgctgccacaagccccacaggccgtgcacacattgcggggagatgctcacagcccaccgctgatgaccttccagagttcgtctgcctgaaaacgct

SEQ ID NO: 350629 - DNA, 120 bp, Artificial Sequence
  ENSG00000138944_7 (sequence is synthesized)
tttgctgtgcctcaggatgggggagatgagatctgaagcacccggtgcagcctccgagaagaacaacttctacagagatgccagggacagccgaggtagcggcggtggcacaggaggaaa

SEQ ID NO: 350630 - DNA, 120 bp, Artificial Sequence
  ENSG00000138944_8 (sequence is synthesized)
tgctgcctgtgcccaaagcccccttccgcggacttctaagattaggagcaaactcaggggtaggggctgggggtgcaggggaggggattctgagccacctgtccgcaagcaatagtccta

SEQ ID NO: 350631 - DNA, 120 bp, Artificial Sequence
  ENSG00000138944_9 (sequence is synthesized)
ttttgggctggtggcttctgagaggtgactcattgtggactcaggatgaccaagacaaagcaactctggctgattccagccaggaggattgaggcctgtgagttatacctgtggttgaaa

SEQ ID NO: 350632 - DNA, 120 bp, Artificial Sequence
  ENSG00000138944_10 (sequence is synthesized)
accgaagcttcccttgcccctgctccctccagtagtggccccttggggctatttgtgtcagaatattgaatgtgcgtgtgtgtgtgcgtgtgtgtgatttggggtgttctttttgtttgc

SEQ ID NO: 350633 - DNA, 120 bp, Artificial Sequence
  ENSG00000138944_11 (sequence is synthesized)
ttggttggttggtttttattggggcttcccccctcaagttctctgatgggcatgagtcaccctccggctgggggttctcatccgtgtcaatgtccgagccgcaagcttattgctaagcac

SEQ ID NO: 350634 - DNA, 120 bp, Artificial Sequence
  ENSG00000138944_12 (sequence is synthesized)
agggtacggcccctctgtgtctcggggagcactggggatttgaaaatgccagtcagggttgtttcttacagaattcgttcctgtaacaatagtaatactaagggctgcatctcaggctga

SEQ ID NO: 350635 - DNA, 120 bp, Artificial Sequence
  ENSG00000138944_13 (sequence is synthesized)
ccacagggcaggtgccaagttaagtgttttcatgcactccctctctcaccacctgggaggcaggtatgattaaccccctgcagaaaaactcacagtggggaagcggtgccggaacccaaa

SEQ ID NO: 350636 - DNA, 120 bp, Artificial Sequence
  ENSG00000138944_14 (sequence is synthesized)
gtccaggctccaactccctggacgtgacatgctcgccagccggggtacaccctgcacaatgctgggagcatctccttgatgcctccaccatcaccgcctggagcgctgatccactcagca

SEQ ID NO: 350637 - DNA, 120 bp, Artificial Sequence
  ENSG00000138944_15 (sequence is synthesized)
cattctggctaagcatctgctgtgtgccaggccccgtgctgggcagtgatgggaatgaaagatgagttagatctcatctctgcccccggggagcctcccatctggtgggagacacagaca

SEQ ID NO: 350638 - DNA, 120 bp, Artificial Sequence
  ENSG00000138944_16 (sequence is synthesized)
cgtggatctttgctggaaagggtaacaaggccatggaaacccaggcaggagcgttctagaaatccatccactttcaagtaggacttccatgcccgtaacatccacccaccgagctaatca

SEQ ID NO: 350639 - DNA, 120 bp, Artificial Sequence
  ENSG00000138944_17 (sequence is synthesized)
cccccactcctgccccgctgccctgggacacctatgagatggcatcacctaaatcatcacaaacatctccaaaggccatgctgccagtgtagacacactcattccatgggtgttagtgat

SEQ ID NO: 350640 - DNA, 120 bp, Artificial Sequence
  ENSG00000138944_18 (sequence is synthesized)
accaaatctcccccagctcttagctcgggaggccctgcttgatcaatgtgtgtgtcctctgacgcagtttcctcatttcatcagacctagtgttctcacactgaccacccatccattcac

SEQ ID NO: 350641 - DNA, 120 bp, Artificial Sequence
  ENSG00000138944_19 (sequence is synthesized)
cagacacgacagtgagcaaggcaggtccctgctcactgtgctagctttctagctggggcaggaagacagtgaagaaggaaggtggcgaaggcagtgagtgctctgccgggaactcagtgc

SEQ ID NO: 350642 - DNA, 120 bp, Artificial Sequence
  ENSG00000138944_20 (sequence is synthesized)
caggaactcagttcgagggacacgtgagtgagacccttgtggacctggggtggtctgggaaggccgccttgagcagatgattgaagcccagatttgaatgacacacaggagccagtaatg

SEQ ID NO: 350643 - DNA, 120 bp, Artificial Sequence
  ENSG00000138944_21 (sequence is synthesized)
ggcgttaaagataggaaaagagcattccaggcagaaggaacggctagtgcaaagatcctgcggcagccacaggcttggtggtttcaaggaagcacaagaaagccaggtggcacaagaaag

SEQ ID NO: 350644 - DNA, 120 bp, Artificial Sequence
  ENSG00000138944_22 (sequence is synthesized)
ccaggtggctggggacccagagggaaggcagaaggagatgagggtgatagtgcccagctctgggctctgctgtgagtcaagctgtgcaaacacaatgtcctgcctttggaaaagcagaac

SEQ ID NO: 350645 - DNA, 120 bp, Artificial Sequence
  ENSG00000138944_23 (sequence is synthesized)
aaacttgctagggtataaagcatcctccattctgcctggctgtccatcctctcaacagccccatgaagaaggggctctccccattttatggacaagaagacagactcagctgggtcaagt

SEQ ID NO: 350646 - DNA, 120 bp, Artificial Sequence
  ENSG00000138944_24 (sequence is synthesized)
ggcttgcccaggatcacacaggtcagctgtggaagacccaggcccctggcttcagtctttgggtccagctgtctcctccaggcagtgctgccagtgtccaggcatatggcttggcaaagt

SEQ ID NO: 350647 - DNA, 120 bp, Artificial Sequence
  ENSG00000138944_25 (sequence is synthesized)
gggagaacctctgcttggggtctcgattggagaaaggaatggcttcctctcccctgatgtgagccgtcccagggccatgttgccgtaagggggtgcacagcctgtccactagcccagctg

SEQ ID NO: 350648 - DNA, 120 bp, Artificial Sequence
  ENSG00000138944_26 (sequence is synthesized)
cggaagccacagctgtgtcccacgtgcagtgcctcagaaggcagaggaagccttgaggtgggggcccaagacccagattctgacatcagctctgccactgagaacagcgtgacctcaggc

SEQ ID NO: 350649 - DNA, 120 bp, Artificial Sequence
  ENSG00000138944_27 (sequence is synthesized)
aaggtctgttacctcagtttccccatcggtaagaggaaggagtcagatgggtatttaaggagtttgcaaccctcgtgtcctgctgtcctggacaatgctctgtaggtgcttcctctgcca

SEQ ID NO: 350650 - DNA, 120 bp, Artificial Sequence
  ENSG00000138944_28 (sequence is synthesized)
ggccttgcctccctctcctggacacctggggtcaaaggtcactgccaaatagacagctagaactggggttcacctaagcatcccttgagatgtacaaccttctaggaggacattcctcct

SEQ ID NO: 350651 - DNA, 120 bp, Artificial Sequence
  ENSG00000138944_29 (sequence is synthesized)
gcctgcccccctccccgcaagaggtcttttcaggaataactgaaaaacccatggggtttgtggtcctgctgctctgccaagtccctcttgggcagctgggctgaggactggaacattctg

SEQ ID NO: 350652 - DNA, 120 bp, Artificial Sequence
  ENSG00000138944_30 (sequence is synthesized)
tggcaagcaggaggcctcagcagagatcaccaagacccagcacacctggtgcagacagccacggcatcctccttcctgcaggtcacccccacgagccacttaacctctcagagcctctgc

SEQ ID NO: 350653 - DNA, 120 bp, Artificial Sequence
  ENSG00000138944_31 (sequence is synthesized)
ttctcacctgtcaagtgtgtgaggtagggtaccagttagtcacggtacttgctgtctcacagaggagccgacaggtgagaacagtgtgcatgtgggtgtgaacactcagtgtggaaagca

SEQ ID NO: 350654 - DNA, 120 bp, Artificial Sequence
  ENSG00000138944_32 (sequence is synthesized)
ggtgtgtgtgtattcaatcccccaatggtgtcaagggctcctcaaaatgccatgggtccccaggtcattgtgataaacactgtccccatcctgctgtggttgtggctggaaggtccctca

SEQ ID NO: 350655 - DNA, 120 bp, Artificial Sequence
  ENSG00000138944_33 (sequence is synthesized)
aggagtagactgtccctgagaacaagatggatgcagggtagtgacgagttcaagcatagctagagttactgttttttagcaactcaacctgattttttaagctgcctacttttacttttt

SEQ ID NO: 350656 - DNA, 120 bp, Artificial Sequence
  ENSG00000138944_34 (sequence is synthesized)
actgtgagcttctgtccatcaccatgtaatttgtaataataataatacaaaaagaaaaacgagagagagaagaggacaagatgtccacagaggaatctgcattcgaggctgtttgcagaa

SEQ ID NO: 350657 - DNA, 120 bp, Artificial Sequence
  ENSG00000138944_35 (sequence is synthesized)
ctaccgcgtttgtaaggactgtttcccactgggaactgtgtgtaattaatgagcagttttatgctttccctctcgtctgtgtacggtgtgattgttgtgtgtttcagaatctctattcag

SEQ ID NO: 350658 - DNA, 120 bp, Artificial Sequence
  ENSG00000138944_36 (sequence is synthesized)
aaccaatagctggtaatgcctgctggctcgctgccctcaagttagcctctgaacgtgccctgcacctagagaagcagccttctcacccgcctcacctggctgctccagcggccaggccag

SEQ ID NO: 350659 - DNA, 120 bp, Artificial Sequence
  ENSG00000138944_37 (sequence is synthesized)
ccacctgaccatgaccattgctgatgtgcaacaggccttaattgaaaaaacacacaagtacatacatgcacatgcgcgcacacacacaggtgatttcacaggtagatctggtccctcttg

SEQ ID NO: 350660 - DNA, 120 bp, Artificial Sequence
  ENSG00000138944_38 (sequence is synthesized)
ctgtctccaatgctctagaaagcagcaagtaggcagctgacagtgttcccagggtgagtggcatctcccctcatcatcagaaagattcagtcaaattttggcccagagctgaagaggagg

SEQ ID NO: 350661 - DNA, 120 bp, Artificial Sequence
  ENSG00000138944_39 (sequence is synthesized)
acttgggaatgtcagggaaaacatgacagggctaggggttaacaggcttctttggccaggagatggtttccagttcaccgtcaacccaaaagctctcttcaggtcatggcaaacagacca

SEQ ID NO: 350662 - DNA, 120 bp, Artificial Sequence
  ENSG00000138944_40 (sequence is synthesized)
gggctgtgggtgtggctgtgcttggcactgactcccccacaggccgctgtccaggttggctcaggattccagctgccatccccaggcaggcccctccgctggctcggctgctttcacaat

SEQ ID NO: 350663 - DNA, 120 bp, Artificial Sequence
  ENSG00000138944_41 (sequence is synthesized)
caccatgtctgtctattagagactgtgccattcaaggagacggggtccccgggggtgcagacttgtaaaattttttaatttttcaacttggctgaactggtccccatcaacaggaaaagc

SEQ ID NO: 350664 - DNA, 90 bp, Artificial Sequence
  ENSG00000138944_42 (sequence is synthesized)
tttcaacttggctgaactggtccccatcaacaggaaaagccttcggaagtgaatttacagatttctcccatgtttgaaattaacataaca

SEQ ID NO: 350665 - DNA, 120 bp, Artificial Sequence
  ENSG00000138944_43 (sequence is synthesized)
agactctgtctaggtaggtaggtaagaaggaaggaaggaagaacagacctggatggagttattgggaacatgtcttatcaatgttgaagggccccctatcactgtagggagacatccacg

SEQ ID NO: 350666 - DNA, 120 bp, Artificial Sequence
  ENSG00000138944_44 (sequence is synthesized)
tgggttgttttcgtctgctgtgaaaatctagggttggaatcatggaagcaaactgcaggaattcttaatcatcctgctcacgtggtgggcatcagagggtgtctgcttggcccccacagc

SEQ ID NO: 350667 - DNA, 120 bp, Artificial Sequence
  ENSG00000138944_45 (sequence is synthesized)
actgggacagtcagagaggccatgagtggatgacgccctgatcactgccctttgcagtccaggaatacctcactgggctggggccataccctgtgccctctggaagacaagcctgcgcac

SEQ ID NO: 350668 - DNA, 120 bp, Artificial Sequence
  ENSG00000138944_46 (sequence is synthesized)
ttactatgtgccagatgccatgcacagtgccctagttccttgctgtagcaccaacacgtcccacgctggtgcttaaatgcacgcaaacaactttggtggttgtggcccgaaaagctcaaa

SEQ ID NO: 350669 - DNA, 120 bp, Artificial Sequence
  ENSG00000138944_47 (sequence is synthesized)
tgttaaagttaagcagtcaggcaagctagaagaggtgaggagcctcctagaaaactcattcgatgacacgcgcttccctcacctattcagatacttgccgagtgcctgccacttgcctgg

SEQ ID NO: 350670 - DNA, 120 bp, Artificial Sequence
  ENSG00000138944_48 (sequence is synthesized)
ccctgtacccagggcccatctgggagccattcctgctatagctgggaccacttgtgaaacggctagttgtgcctaacagacatgctcagattcacaaaatgaattcagaacacttacctg

SEQ ID NO: 350671 - DNA, 120 bp, Artificial Sequence
  ENSG00000138944_49 (sequence is synthesized)
tcccacccgtgaaagtgaccttggaggtgtcattgccccccaccaccccagtttctagtccaagccaacagctggtgctagatagatgcttgatgaatgagcagatttgactgttagtta

SEQ ID NO: 350672 - DNA, 120 bp, Artificial Sequence
  ENSG00000138944_50 (sequence is synthesized)
ctctgtacctaaaactcctatctttacatcaaagccctgacagatttgcccttgacagactgaaatccggggctgctgcagggttcacctccaggaggcaccattcacgacactgtccca

SEQ ID NO: 350673 - DNA, 120 bp, Artificial Sequence
  ENSG00000138944_51 (sequence is synthesized)
taaatggtaatgggctcccagggatactgtttacatagactgcactgagaacggtgacccttaggtttgtacaatgaggtaccctgttgaatgaccctaaaccagcctccaaaatgtgca

SEQ ID NO: 350674 - DNA, 120 bp, Artificial Sequence
  ENSG00000138944_52 (sequence is synthesized)
ggatcccacattggtcagcgccaaccctgagcacaggatctaaaactatagatgatatggccaccctggccacagctggaaccaagctggtggcccaagagagagcctcttcttggaatt

SEQ ID NO: 350675 - DNA, 120 bp, Artificial Sequence
  ENSG00000138944_53 (sequence is synthesized)
gcatgtcagtttctcatacgcagtttcttcctatttttcccatttcccgttttaaagctagtggcatacctcacagtcaaataaccaagtggtcagtgtctcgacaatgtgcagtaacga

SEQ ID NO: 350676 - DNA, 120 bp, Artificial Sequence
  ENSG00000138944_54 (sequence is synthesized)
ggtgggggctgcaagggtgaggggctcagtcaccttaacaaggcaggagacctcccacaaaaggctgatgtgtcgtccccagggccagctggacaagggcatgcagcgcaggggtagggg

SEQ ID NO: 350677 - DNA, 120 bp, Artificial Sequence
  ENSG00000138944_55 (sequence is synthesized)
gatggaaatattttctctcccgtaaactctgacttcatgtgagcaggcatggggtctccctgagagctgataaccgggaaaaccaaaaccaataatattcctaataataatactagaatg

SEQ ID NO: 350678 - DNA, 120 bp, Artificial Sequence
  ENSG00000138944_56 (sequence is synthesized)
taagaataatcatgtgtttttcactgaccgctgttgctctgcttttgtctttatatacagtagtttttataacaatgtccctaggttttaataaaggagtgtcatgtcaactgttcccta

SEQ ID NO: 350679 - DNA, 120 bp, Artificial Sequence
  ENSG00000138964_0 (sequence is synthesized)
ctttgtttggctgctgttttaatctttcatgcatttagcagtcatggatggtgccagcgaaggaacaggtgccagggcgttgtgactccacccagcgctgcttcccgggaccttccaatt

SEQ ID NO: 350680 - DNA, 120 bp, Artificial Sequence
  ENSG00000138964_1 (sequence is synthesized)
ggacaggagctgggggaagagctggttcacagccctttgtgggggatgggactttgggaaccccaaacttctgctgggaccacaaggagaagagggcagcagagtcacagctgcagagag

SEQ ID NO: 350681 - DNA, 120 bp, Artificial Sequence
  ENSG00000138964_2 (sequence is synthesized)
gaggaagctcctgccggctgagcgggcctggaggaagtgagcagcggggctcctgcctcccggcctggtccccgaagaccccagaagaacccggaacttgcttccattcggaatccaggg

SEQ ID NO: 350682 - DNA, 120 bp, Artificial Sequence
  ENSG00000138964_3 (sequence is synthesized)
accaccctttgcactcagtaggcctttgttttcctgcgtggaaagcggttgggcttgggaggcgatggagccggagttcttgtacgacctgctgcagctccccaagggggtggagccccc

SEQ ID NO: 350683 - DNA, 120 bp, Artificial Sequence
  ENSG00000138964_4 (sequence is synthesized)
agcggaggaggagctctcaaaaggaggaaagaagaaatacctgccacccacttcccggaaggaccccaaatttgaagaactgcagaaggtgttgatggagtggatcaatgccactcttct

SEQ ID NO: 350684 - DNA, 120 bp, Artificial Sequence
  ENSG00000138964_5 (sequence is synthesized)
ccccgagcacattgtggtccgcagcctggaggaggacatgttcgacgggctcatcctacaccacctattccagaggctggcggcgctcaagctggaagcagaggacatcgccctgacagc

SEQ ID NO: 350685 - DNA, 120 bp, Artificial Sequence
  ENSG00000138964_6 (sequence is synthesized)
cacaagccagaagcacaagctcacagtggtgctggaggccgtgaaccggagtctgcagctggaggagtggcaggccaagtggagcgtggagagcatcttcaacaaggacctgttgtctac

SEQ ID NO: 350686 - DNA, 120 bp, Artificial Sequence
  ENSG00000138964_7 (sequence is synthesized)
cctgcacctccttgtggccctggccaagcgcttccagcccgacctctccctcccaaccaacgtccaggtggaggtcatcactatcgagagcaccaaaagtggtctgaagtcagagaagtt

SEQ ID NO: 350687 - DNA, 120 bp, Artificial Sequence
  ENSG00000138964_8 (sequence is synthesized)
ggtggaacagctcactgaatacagcacagacaaggacgagcctccaaaggacgtctttgatgaattatttaagctggctccggagaaagtgaacgcagtgaaagaggccatcgtgaactt

SEQ ID NO: 350688 - DNA, 120 bp, Artificial Sequence
  ENSG00000138964_9 (sequence is synthesized)
tgtcaaccagaagctggaccgcctgggcctgtctgtgcagaatctggacacccagtttgcagatggggtcatcttactcttgctgattggacaacttgaaggcttcttcctgcacttaaa

SEQ ID NO: 350689 - DNA, 120 bp, Artificial Sequence
  ENSG00000138964_10 (sequence is synthesized)
ggaattctacctcactcccaactctcctgcagaaatgctgcacaacgtcaccctggcgctggagctgctgaaggacgagggcctgctcagctgccctgtcagccctgaagatatcgtgaa

SEQ ID NO: 350690 - DNA, 120 bp, Artificial Sequence
  ENSG00000138964_11 (sequence is synthesized)
caaggatgccaagagcacactgagggtgctctatggtctgttctgcaagcacacgcagaaggcacacagggacaggacgccccatggagccccgaattgaccctcactgcctccaaagcc

SEQ ID NO: 350691 - DNA, 120 bp, Artificial Sequence
  ENSG00000138964_12 (sequence is synthesized)
cagagcctgcctgtcagcccagctggagggcccgaggctgcagggtgtcctcccacagtcccgctgtttcctgtgcattcgtgacccgcttccctcccaccctgtctcctgtctccatcg

SEQ ID NO: 350692 - DNA, 120 bp, Artificial Sequence
  ENSG00000138964_13 (sequence is synthesized)
ttggattatctttgaacccccttgtgtggatcattttgagccgcctggccttgctcagtttattttaataaaagtatttctgggagggattctgggaacttgacagggtcctgaggaggg

SEQ ID NO: 350693 - DNA, 120 bp, Artificial Sequence
  ENSG00000138964_14 (sequence is synthesized)
agggctggggactctcagggacagggcccacagccccagaccccaccttttccagcccagctccccacacccacctgcttctcactcgggaggatgggccccagagtcaccctccagggc

SEQ ID NO: 350694 - DNA, 120 bp, Artificial Sequence
  ENSG00000138964_15 (sequence is synthesized)
aggagcccgaatggctccatagccatgcccccacccaccgggagaagtggattcagtgactgtcaaagcaacccgggctgtgtcctgcagctgccctcgtgagttttgcccaaaagtcac

SEQ ID NO: 350695 - DNA, 120 bp, Artificial Sequence
  ENSG00000138964_16 (sequence is synthesized)
aaagaagcaatcttcgtggttgattagtgggttcaggtcatctccagtctgtcctcgggagctgtgggttcccactcgctccagtgagacttggcattttctgcacataaagaagagtcg

SEQ ID NO: 350696 - DNA, 120 bp, Artificial Sequence
  ENSG00000138964_17 (sequence is synthesized)
tgtgggagaattgcacatagtcagtccagggcatccagagtggggcagagctgatggctgatgggaaccggggaggaggctggcggggaggggtgagattggtggggagggctggggctg

SEQ ID NO: 350697 - DNA, 120 bp, Artificial Sequence
  ENSG00000138964_18 (sequence is synthesized)
gccgggaggggtgggactgatggggaggggtgaggctggcggggaggggtgaggctggcggggaggggtgggactggtggggaggagtgaggctagtgggcgggtgaggctggcggggag

SEQ ID NO: 350698 - DNA, 120 bp, Artificial Sequence
  ENSG00000138964_19 (sequence is synthesized)
gggagggtttgtggggacgggtgaggctggcggggaggggtgaggctggtggggagggctggggcctggtggggaggagtgggacttgtggggaggagtgggacttgtggggaggggtga

SEQ ID NO: 350699 - DNA, 120 bp, Artificial Sequence
  ENSG00000138964_20 (sequence is synthesized)
ggctggggagaagggcaaccacagccccaggctgctgctcctccctggaccctgaagaggcctctgggtctggggttttcacagtttgacagctgaggccttggggaggggctttagatg

SEQ ID NO: 350700 - DNA, 120 bp, Artificial Sequence
  ENSG00000138964_21 (sequence is synthesized)
ggggttaggggctaggtcatcattgacacccactgggggcgcctaggcagatgtccttcgggggagcaagatgggagccagggacgcagtgccaggtcagccctgggagctggtgtctgg

SEQ ID NO: 350701 - DNA, 120 bp, Artificial Sequence
  ENSG00000138964_22 (sequence is synthesized)
gtgtgagaaggccttgaggggtcttcccttcacctagcctcccatctgcctgcccttctcagctcccaattcacagggcaaacccaagcccataagcgtgttccacgtgagcactcagat

SEQ ID NO: 350702 - DNA, 120 bp, Artificial Sequence
  ENSG00000138964_23 (sequence is synthesized)
gcacccctcttcatggatacccaccctacttcccggctgcctctgggaaacgtgcatcctcccacaccaggtacctggagcccagctccttccacctgctcaggtgccccctccattgcg

SEQ ID NO: 350703 - DNA, 120 bp, Artificial Sequence
  ENSG00000138964_24 (sequence is synthesized)
atgccccctccagcacctcaaatcctctcctggagcttctggggacacaggctcagcctctctcagctggcttcatcccaaaagcctgaaatccagccccacttcctggggcctttgagt

SEQ ID NO: 350704 - DNA, 120 bp, Artificial Sequence
  ENSG00000138964_25 (sequence is synthesized)
cctcacttgcttgggccccatccgctgcaggctggctctgcctggctgttccacgtcctcactcttgttctatttgacagcaattaaaaaaaaagtgacttatttaattactgtagcttt

SEQ ID NO: 350705 - DNA, 120 bp, Artificial Sequence
  ENSG00000138964_26 (sequence is synthesized)
attgaaaaataacttcccagtttgaagtgtacaatttgatgagttttgacaaatgcatgcagtcatataaccaccaccatcgttatccagacatgggacattcccatcaccatgcaagtt

SEQ ID NO: 350706 - DNA, 120 bp, Artificial Sequence
  ENSG00000138964_27 (sequence is synthesized)
tctgcatctgtctgcagccagttcccttctcccagcccctggccctggggaccactgatctgttttctgtcaccatcatttagacttgtctagaatttcttataaactgtatcctatggt

SEQ ID NO: 350707 - DNA, 120 bp, Artificial Sequence
  ENSG00000138964_28 (sequence is synthesized)
agcttgagagaccagctcgggtctgaagtgtttctctatctactgtgctgagatctctccttctcgaaccctgctatgcctttgcatacgctgttttctccacctgccacgttctcaccc

SEQ ID NO: 350708 - DNA, 120 bp, Artificial Sequence
  ENSG00000138964_29 (sequence is synthesized)
cttcttcttccactgcaaactcctatgcagccgtcaaggccccattctcctctggaaagccttcccgatccccttggcaacaaccaccaccaatatttattcactgagcccactttgtgc

SEQ ID NO: 350709 - DNA, 120 bp, Artificial Sequence
  ENSG00000138964_30 (sequence is synthesized)
acagcagcctccacagccctgacttccctgggtgcctcttggcagaccaggcagcggcctccacggggcggggacagcaggctgtccccactccttggcctcaggctggggggtggcgac

SEQ ID NO: 350710 - DNA, 120 bp, Artificial Sequence
  ENSG00000138964_31 (sequence is synthesized)
ccccgaagacccctggaaggcctgttgaatggagcaagtcacccacagagcctgcatgaacaaacatctattgagcaccaactgtgtgccttcacatacaccatcccagcaaccccatgg

SEQ ID NO: 350711 - DNA, 120 bp, Artificial Sequence
  ENSG00000138964_32 (sequence is synthesized)
gcagaagcacacctggcccagccctgtgactggcactggggacaccatctgtggtcttgcccggaagacctggtgaggtgctgacatgtcgtctcagctcggtctcctccacaggctgat

SEQ ID NO: 350712 - DNA, 120 bp, Artificial Sequence
  ENSG00000138964_33 (sequence is synthesized)
ccagagacaaggatttggatgccagtagttgagttgggaggttatcccaggggtcatgggagggaaggggccaacacatggttagtgatggagctggtcatggttctgggggctcaagcc

SEQ ID NO: 350713 - DNA, 120 bp, Artificial Sequence
  ENSG00000138964_34 (sequence is synthesized)
tgctgggtaccctggagccagcatagagcaagttcagtgcattcctgcccaaggggcgatggagctggggtatttatacaccaccacccctgccccgacaacctcctgacaacctttagt

SEQ ID NO: 350714 - DNA, 120 bp, Artificial Sequence
  ENSG00000138964_35 (sequence is synthesized)
gaacagctgctccctgagaaagggctgggccttgattccctggcactctgaccttttgagcacagcagagtggggacagtttcgagcagagctgcaggtgggagctgggccagtaggcaa

SEQ ID NO: 350715 - DNA, 120 bp, Artificial Sequence
  ENSG00000138964_36 (sequence is synthesized)
cagtcaaggagtgggcagggtaccagcagcccccgcattagcttcctagggctactgtaacatgtgaccacagactgaatggcttaaaccacagaaacctactgtcttacagtgctgcag

SEQ ID NO: 350716 - DNA, 120 bp, Artificial Sequence
  ENSG00000138964_37 (sequence is synthesized)
gccagaggccctcaaccaaggggtcggcaggcttggctccttctggaggctctcaggggacccctgtcttctccctttcccccagctgtgatggctgcagcatcctggtctcccagatct

SEQ ID NO: 350717 - DNA, 120 bp, Artificial Sequence
  ENSG00000138964_38 (sequence is synthesized)
gtggatgcatcactgcagtccccacctccatcttcacgtccaatgtcatgtccctcatttcctcctaggacctcagaaggggcacctttaacatccatatttctactgaccacctcttca

SEQ ID NO: 350718 - DNA, 120 bp, Artificial Sequence
  ENSG00000138964_39 (sequence is synthesized)
ccccacttcctggtactaaaacctcacacatgataatgacagccccacactgctcaggtttgtgatggagagaagcagggagtctgcaggaacctggggcaggcccctaacagcctggga

SEQ ID NO: 350719 - DNA, 120 bp, Artificial Sequence
  ENSG00000138964_40 (sequence is synthesized)
gatcaaggagggcttcccagtggaggtgacatttgaccaggccttgaaagatgggtaggagttggcaggcgagaggcaggcattctgagccaggtggagggccaggtgagaagtctccat

SEQ ID NO: 350720 - DNA, 120 bp, Artificial Sequence
  ENSG00000138964_41 (sequence is synthesized)
gaggaaggggcctggcccggggcggggtgtggaggtgggaggacggcggtgcgggatggagggtggaggccaggctgacagggtgctggtggtgggttgcgggggtcgaccccaggctct

SEQ ID NO: 350721 - DNA, 120 bp, Artificial Sequence
  ENSG00000138964_42 (sequence is synthesized)
ggcctatgtagctgccattttggaggtgaacagcctgcggggaaactggcatggtttggggaaggcggggagagggggagaaatgaaagcattgagtttaagtggcctgcagaaccccgg

SEQ ID NO: 350722 - DNA, 120 bp, Artificial Sequence
  ENSG00000138964_43 (sequence is synthesized)
aggtagggttgccagatatatcaaacataggatacccagttaactttgaatgtcaagtaatcaagaaataacttccgagtttatgtctcaaagtataaatgctgcagtgtctgaggatga

SEQ ID NO: 350723 - DNA, 120 bp, Artificial Sequence
  ENSG00000138964_44 (sequence is synthesized)
gctggtgttcgtgagggaaatgagggaaagcacgctggggcggaagtggcaggaccggtgcccctgggtctgcggtgctgaaatctgtgggtgacctgcagggagtgtggccaagcgccc

SEQ ID NO: 350724 - DNA, 120 bp, Artificial Sequence
  ENSG00000138964_45 (sequence is synthesized)
aatctattatcccttacatcccggggacaggacagacagcaaggcttagacaggtgacctcatctgtcaggggcacgcagctgcccgtaacggagctgtggtttgacacgagctgccagc

SEQ ID NO: 350725 - DNA, 120 bp, Artificial Sequence
  ENSG00000138964_46 (sequence is synthesized)
ccctaagcccgtgctcctccccagcttgtctgcccaaggtgtaggagaactggtgaggtggtggtggtgggcctgggtcacccattcttagttctctccttggtcatgggtctgctgcta

SEQ ID NO: 350726 - DNA, 120 bp, Artificial Sequence
  ENSG00000138964_47 (sequence is synthesized)
tggccactggaccagctcggcacaggtgggctccaggcctctgtttccctcagcgtctgtgtctccagtctccacatggcctctctgttgcctcctccagggaggcctcctggcctacac

SEQ ID NO: 350727 - DNA, 120 bp, Artificial Sequence
  ENSG00000138964_48 (sequence is synthesized)
gacctggcccctccagggcccacaggtaggctctctccttcagtccccacaatggtcccgggtttagggacacctgtctcactttctagatgggcctgggctggggagatggaggcgctg

SEQ ID NO: 350728 - DNA, 120 bp, Artificial Sequence
  ENSG00000138964_49 (sequence is synthesized)
agctggggctcagggtggggctctgacgccagggttggtgctctttctaccacaccacactgcctctctaacacttattgagtgcctgctgttttgaggtgctgggaggtaacaaaagaa

SEQ ID NO: 350729 - DNA, 120 bp, Artificial Sequence
  ENSG00000138964_50 (sequence is synthesized)
cccatgatccctgccctcgggctgccctaggctgctagagagaaaacgggcagtcctgggtggctgggggcagggctgggctcctgtctccgtgttcctcctcagtctggaaagctccaa

SEQ ID NO: 350730 - DNA, 120 bp, Artificial Sequence
  ENSG00000138964_51 (sequence is synthesized)
ggggctttgcaggggatgtgcattctcagggcctcctcctggtcccgggcaagtgttccccacaagccccagagtcaccctctcctttgtccttgtatggtcatgtctggtctacgcatc

SEQ ID NO: 350731 - DNA, 120 bp, Artificial Sequence
  ENSG00000138964_52 (sequence is synthesized)
tcttctgcacacaactgtggtctcggaggccacagataggcccaattccatgtcctcagcacttcgcctgaggccagcctctgcagtgttcgccgagctctttggagatgggctgcacaa

SEQ ID NO: 350732 - DNA, 120 bp, Artificial Sequence
  ENSG00000138964_53 (sequence is synthesized)
tcccactcatgcggctagcacttccgggcatgtcccatgtagcaggtgcagttcatcctcagaatagccctgtgctgttactgtccccatttcacagatgaggaaagggagcctctgaga

SEQ ID NO: 350733 - DNA, 120 bp, Artificial Sequence
  ENSG00000138964_54 (sequence is synthesized)
ggcctcataatttctccaaggtcttatggttagggaagcaggggggtcaggatagaagcctaggagtgtaggctttaaccactaggccacactgccctgcagagatgaagtggacacagc

SEQ ID NO: 350734 - DNA, 120 bp, Artificial Sequence
  ENSG00000138964_55 (sequence is synthesized)
tgtgcagaagggcaggggctgcaggcacaggctgatcaaggtgaggtgggctctctcaaccagctcagggggctgaggcttgctcacatcatgtggcctgcatggcccaccaatcctgtt

SEQ ID NO: 350735 - DNA, 120 bp, Artificial Sequence
  ENSG00000138964_56 (sequence is synthesized)
ctgtgtagatgagggtctcctggaagctggagggcatacccgattgaggctgtgagtgtggcccacggtccaacaccaagaatgggctctccagacccatgttccctgaagcaccaggca

SEQ ID NO: 350736 - DNA, 120 bp, Artificial Sequence
  ENSG00000138964_57 (sequence is synthesized)
ggctcagcctcctggagggtccctgaggtgctctctggtctgtccccggccaggggtcctcaccaccctctcctgcctccagagaggctggcggcgctcaagctggaagcagaggacatc

SEQ ID NO: 350737 - DNA, 120 bp, Artificial Sequence
  ENSG00000138964_58 (sequence is synthesized)
gtttggcacaaagataatagcatcgtaatgaggtgtttattggatctgtgtctgcagaggacgtctttgatgaattatttaagctggctccggagaaagtgaacgcagtgaaagagtttg

SEQ ID NO: 350738 - DNA, 120 bp, Artificial Sequence
  ENSG00000138964_59 (sequence is synthesized)
cagatggggtcatcttactcttgctgattggacaacttgaaggcttcttcctgcacttaaaggaattctacctcactcccaactctcctgcagaaatgggcaggaggctccaaccttgag

SEQ ID NO: 350739 - DNA, 120 bp, Artificial Sequence
  ENSG00000138964_60 (sequence is synthesized)
cacacatctctggctgaatctccctgggagcagcagatgacagcagggcttgtggtgctgcaacagtggcctggtgtgacgtggtgatggtttccggagcaaggggcaggatctctgaag

SEQ ID NO: 350740 - DNA, 120 bp, Artificial Sequence
  ENSG00000138964_61 (sequence is synthesized)
agcagagtggacttcctaggagctggggaaacctcacagctcctccctccctcacacggcagcttccaagttccctccagctgccggataaacctcccaaacacaactgtgtgagagaac

SEQ ID NO: 350741 - DNA, 120 bp, Artificial Sequence
  ENSG00000138964_62 (sequence is synthesized)
actgcaccagcacctcttaccaatagcaactcatttattctcaagggcgggcatcagtgcctgctttatacagatgaggaaactgaggcacaaggggtgacgtgccacagtaacaggaaa

SEQ ID NO: 350742 - DNA, 120 bp, Artificial Sequence
  ENSG00000138964_63 (sequence is synthesized)
ctttgcagggtgtggggctcctgacgtgctcccctcacacgtgtgggtccctttcaaaagtggggtgagcataggatggagcaattcaacgactataggtcgccctttcagtaaagctct

SEQ ID NO: 350743 - DNA, 120 bp, Artificial Sequence
  ENSG00000138964_64 (sequence is synthesized)
gtgtcatgagccctttggggggttggcggccacagttcctgcaacctcccttctaggagatggctcaaaagaaggacatgggcaggtacccagagctgtcaccctctctgtgttctctga

SEQ ID NO: 350744 - DNA, 120 bp, Artificial Sequence
  ENSG00000138964_65 (sequence is synthesized)
aagaaacaaatgaacaacagcttgcaaggaagcagcgagatgtcccagtggggaagggctttaggtgaactcattggaatttatgtaaccacaaaaacataaatgtgctgacaaagaaaa

SEQ ID NO: 350745 - DNA, 80 bp, Artificial Sequence
  ENSG00000139044_0 (sequence is synthesized)
cgcgggcggaggcaggcgggcgggcgccggggaagcctccttctgggcagcgagtgagggcgggcgcgcagggagggagg

SEQ ID NO: 350746 - DNA, 120 bp, Artificial Sequence
  ENSG00000139044_1 (sequence is synthesized)
cgcgcagggagggagggcggcagcgagcctgcgacgggagaggcgtggggaggagagcccggcgcggaacacacgcgcggaggaggagccgggctcggctcccggagagacctgctgggc

SEQ ID NO: 350747 - DNA, 120 bp, Artificial Sequence
  ENSG00000139044_2 (sequence is synthesized)
ggctcccggagagacctgctgggcgcccgcgcagcccggagacccctcgcgcccggagcatgagcccgagccccgccggagagcggccgggagagacggcctcggcgcagccctgagacg

SEQ ID NO: 350748 - DNA, 80 bp, Artificial Sequence
  ENSG00000139044_3 (sequence is synthesized)
ccatggggagcccccgggccgcgcggcccccgctgctcctgcgcccggtgaagctgctgcggaggcgcttccggctgctg

SEQ ID NO: 350749 - DNA, 120 bp, Artificial Sequence
  ENSG00000139044_4 (sequence is synthesized)
ccggtgaagctgctgcggaggcgcttccggctgctgctggcgctcgccgtggtgtctgtggggctctggactctgtatctggaactggtggcgtcggcccaggtcggcgggaaccccctg

SEQ ID NO: 350750 - DNA, 120 bp, Artificial Sequence
  ENSG00000139044_5 (sequence is synthesized)
aaccggaggtacggcagctggagagaactggccaaggctctggccagcaggaacattccagctgtggatccacacctccagttctaccatccccagaggctgagcctcgaggaccacgac

SEQ ID NO: 350751 - DNA, 120 bp, Artificial Sequence
  ENSG00000139044_6 (sequence is synthesized)
attgaccaaggggtgagcagtaacagcagctacttgaagtggaacaagcctgtcccctggctctcagagttccggggccgtgccaacctgcatgtgtttgaagactggtgtggcagctct

SEQ ID NO: 350752 - DNA, 120 bp, Artificial Sequence
  ENSG00000139044_7 (sequence is synthesized)
atccagcagctcaggaggaacctgcatttcccactgtacccccatattcgcacaaccctgaggaagcttgctgtgtcccccaaatggaccaactatggcctccgcatctttggctacctg

SEQ ID NO: 350753 - DNA, 120 bp, Artificial Sequence
  ENSG00000139044_8 (sequence is synthesized)
cacccctttactgatgggaaaatccagtttgccattgctgcagatgacaacgcggagttctggctgagcctcgatgaccaggtctcaggcctccagctgctggccagtgtgggcaagact

SEQ ID NO: 350754 - DNA, 120 bp, Artificial Sequence
  ENSG00000139044_9 (sequence is synthesized)
ggaaaggagtggaccgccccgggagagtttgggaaatttcggagccaaatttccaagccggtgagcctgtcagcctcccacaggtactacttcgaggtgctgcacaagcagaatgaggag

SEQ ID NO: 350755 - DNA, 120 bp, Artificial Sequence
  ENSG00000139044_10 (sequence is synthesized)
ggcaccgaccacgtggaagttgcatggcgacggaacgaccctggagccaagttcaccatcattgactccctctccctgtccctcttcacaaatgagacgttcctacagatggatgaggtg

SEQ ID NO: 350756 - DNA, 120 bp, Artificial Sequence
  ENSG00000139044_11 (sequence is synthesized)
ggccacatcccacagacagcagccagccacgtggactcctccaacgctcttcccagggatgagcagccgcccgctgacatgcttcggcctgacccccgggacaccctctatcgagtgcct

SEQ ID NO: 350757 - DNA, 120 bp, Artificial Sequence
  ENSG00000139044_12 (sequence is synthesized)
ctgatccccaagtcgcatctccgccacgtcctgcctgactgtccctacaaacccagctatctggtggatgggcttcctctgcagcgctaccagggactccggtttgttcatctgtctttt

SEQ ID NO: 350758 - DNA, 120 bp, Artificial Sequence
  ENSG00000139044_13 (sequence is synthesized)
gtttaccccaatgactatacccgcctgagccacatggagacccacaataaatgtttctaccaggaaaacgcctactaccaagaccggttcagctttcaggagtacatcaagattgaccag

SEQ ID NO: 350759 - DNA, 120 bp, Artificial Sequence
  ENSG00000139044_14 (sequence is synthesized)
cctgagaagcaggggctggagcagccaggttttgaggaaaaccttctagaagagtcccagtatggggaagtggcagaggagacccctgcctccaacaaccagaatgccaggatgcttgag

SEQ ID NO: 350760 - DNA, 120 bp, Artificial Sequence
  ENSG00000139044_15 (sequence is synthesized)
ggaagacagacacctgcctccaccctggagcaagatgccactgactaccgcctccgaagcctgcggaaactcctggctcagccccgggagggcctgctggcccccttctccaagcggaac

SEQ ID NO: 350761 - DNA, 120 bp, Artificial Sequence
  ENSG00000139044_16 (sequence is synthesized)
tccacagcgtccttcccagggaggaccagccacattccagtgcagcagccagagaagaggaagcaaaaacccagccctgagcccagccaagattcacctcattccgacaagtggcctcct

SEQ ID NO: 350762 - DNA, 120 bp, Artificial Sequence
  ENSG00000139044_17 (sequence is synthesized)
gggcaccctgtgaagaacctgcctcagatgagggggcccaggcccaggcccgctggtgacagccccaggaagactcagtggctgaaccaggtggagtcgtacatcgcagagcagagacgg

SEQ ID NO: 350763 - DNA, 120 bp, Artificial Sequence
  ENSG00000139044_18 (sequence is synthesized)
ggtgacaggatgcggcctcaggcccctggaaggggctggcatggggaggaggaagtggtggcggccgcaggccaggaaggacaagtggagggagaggaagagggggaagaagaggaggag

SEQ ID NO: 350764 - DNA, 120 bp, Artificial Sequence
  ENSG00000139044_19 (sequence is synthesized)
gaagaggatatgagtgaggtgttcgagtacgtacctgtgtttgacccggtagtaaactgggaccagaccttcagtgcccggaatctcgacttccaagccctgaggactgactggatcgat

SEQ ID NO: 350765 - DNA, 120 bp, Artificial Sequence
  ENSG00000139044_20 (sequence is synthesized)
ctgagctgtaacacatctggcaacctgctgcttccagagcaggaagctctggaggtcacgcgagtcttcttgaagaagctcaaccagaggagccgggggaggtaccagctacagcgcatt

SEQ ID NO: 350766 - DNA, 120 bp, Artificial Sequence
  ENSG00000139044_21 (sequence is synthesized)
gtgaacgtggaaaagcgtcaggaccagctacgtgggggtcgctacctcctggagcttgaactgttggaacaaggccagcgcgtggtgcggctctcggagtatgtgtctgcacgaggctgg

SEQ ID NO: 350767 - DNA, 120 bp, Artificial Sequence
  ENSG00000139044_22 (sequence is synthesized)
aatacccgggcccaagagcccaagctgtgctggcctcagggtttctcctggagtcaccgagccgtggtccacttcgtcgtgcctgtgaagaaccaggcacgctgggtacagcaattcatc

SEQ ID NO: 350768 - DNA, 120 bp, Artificial Sequence
  ENSG00000139044_23 (sequence is synthesized)
aaagacatggaaaacctgttccaggtcaccggtgacccacacttcaacatcgtcatcactgactatagcagtgaggacatggatgttgagatggcactgaagaggtccaagctgcggagc

SEQ ID NO: 350769 - DNA, 120 bp, Artificial Sequence
  ENSG00000139044_24 (sequence is synthesized)
taccagtacgtgaagctaagtggaaactttgaacgctcagctggacttcaggctggcatagacctcgtgaaggacccgcacagcatcatcttcctctgtgacctccacatccacttccca

SEQ ID NO: 350770 - DNA, 120 bp, Artificial Sequence
  ENSG00000139044_25 (sequence is synthesized)
gctggagtcatcgatgccattcggaagcactgtgtggagggaaagatggcctttgcccccatggtgatgaggctgcattgtggggccaccccccagtggcctgagggctactgggaggtg

SEQ ID NO: 350771 - DNA, 120 bp, Artificial Sequence
  ENSG00000139044_26 (sequence is synthesized)
aatgggttcgggctgcttggcatctacaagtctgacctggacaggattgggggcatgaacaccaaggagttccgagaccgctggggcggggaagactgggagctgctggacaggatactc

SEQ ID NO: 350772 - DNA, 120 bp, Artificial Sequence
  ENSG00000139044_27 (sequence is synthesized)
caagcgggcctggacgtggagcgtctctccctcaggaatttcttccatcatttccattccaagcgaggcatgtggagccgtcgccagatgaagacgctgtagccggagggtgtccgcggg

SEQ ID NO: 350773 - DNA, 120 bp, Artificial Sequence
  ENSG00000139044_28 (sequence is synthesized)
gcccagcactccccgctctggactagcagtggctccccagggccctgctactgttcagggatggggagtggggtgacggctggaccccaagaggcctcgaagctgacggcccactccacc

SEQ ID NO: 350774 - DNA, 120 bp, Artificial Sequence
  ENSG00000139044_29 (sequence is synthesized)
tggagctgtcccctcacagaggcaggttccggggctcctgtctctgcctcctgggccttcagaagggaggactttgagagagaggccaggagggaccacttgctcagtcgagaacgggaa

SEQ ID NO: 350775 - DNA, 120 bp, Artificial Sequence
  ENSG00000139044_30 (sequence is synthesized)
gagctcctgagaaggacgggtcaggaaggagagatctgactgagcgacaccatcctcatccatgaaggtgcacgcccacatcccccaagcgctcctcacgccaagcgctgaccaccagac

SEQ ID NO: 350776 - DNA, 120 bp, Artificial Sequence
  ENSG00000139044_31 (sequence is synthesized)
cctcttctagtggacatattttattggggggcggggattttaaaaacagaaaaccgaaactgctgtccagagcgggggtgaggttgtgcactgagggactgtccccacgtgcaggcctcc

SEQ ID NO: 350777 - DNA, 120 bp, Artificial Sequence
  ENSG00000139044_32 (sequence is synthesized)
cgcccactcctatgtcccttgggcgttgtccctggccgcgggactggtcccacgtggggcaggtctctgctccaccccaggctcgtgccttccagagacacacatctcccagtagccacc

SEQ ID NO: 350778 - DNA, 120 bp, Artificial Sequence
  ENSG00000139044_33 (sequence is synthesized)
aaacagctggccactgattagggcattaacttcctccggatggctcacgtcagaccagaagcacagaacgggctgtttctggtgcttgggcattgggaggtggggagctggcgggcaggg

SEQ ID NO: 350779 - DNA, 120 bp, Artificial Sequence
  ENSG00000139044_34 (sequence is synthesized)
ggcttgccactccctggcactggacattgaggcctgcagaacaggcagggtgatgaaggcaggggagagaagccctttcccttaccggcgtgcctgtgggtaaggcctcccgagaggaca

SEQ ID NO: 350780 - DNA, 120 bp, Artificial Sequence
  ENSG00000139044_35 (sequence is synthesized)
tggagaagaggtaaagaggatgtggacatatctgtcaatttccttaggcaagaagcgggtgggggctggacagaaagggacgaaaagggaagtggaagctgtgagcctcacagtccagct

SEQ ID NO: 350781 - DNA, 120 bp, Artificial Sequence
  ENSG00000139044_36 (sequence is synthesized)
ccactgcagacctgcccttctgcagggagagccctggccacccggccttgagtggaagaagaggaaagggtgtacgggggcaaaaccctggacagggagcaggataagaagggggcggga

SEQ ID NO: 350782 - DNA, 120 bp, Artificial Sequence
  ENSG00000139044_37 (sequence is synthesized)
tgagaggtttggggaggtgaggacattgccctgagatatcccctggaggcagggagaggagtgggggcaggaggaactgaagaggggggcagtttcagggaaaatagcccttagcctttt

SEQ ID NO: 350783 - DNA, 120 bp, Artificial Sequence
  ENSG00000139044_38 (sequence is synthesized)
tagtcgatgccaccctttctgtcacctggagaccttgtacttctcttgcactaataaccccggtgcttttgtggctgggggtttttctgttgctgctgctgcctccaccactgctgtgaa

SEQ ID NO: 350784 - DNA, 120 bp, Artificial Sequence
  ENSG00000139044_39 (sequence is synthesized)
ttcacccatggtgcattggacactggatcttgaactccagagtctgtttagggaggtgagcacagggctgggggaggtgcggcggggcccagaagaccaggccactgagcccgcgctcca

SEQ ID NO: 350785 - DNA, 120 bp, Artificial Sequence
  ENSG00000139044_40 (sequence is synthesized)
ggctgtgacggtccaaaccacggcactggagctgcagggtctgcctagtgggctctgcattccccgagagcacgagtttggcacatgggagaatggagcccgtggagaaccttctggggg

SEQ ID NO: 350786 - DNA, 120 bp, Artificial Sequence
  ENSG00000139044_41 (sequence is synthesized)
gtcggggagaatccctgcctccctttaaggaatcatgaaggacagagacttttgagattgtggcttaggaaggccatacctgctccctgggctgtggctttttctggtccctgctgaggc

SEQ ID NO: 350787 - DNA, 120 bp, Artificial Sequence
  ENSG00000139044_42 (sequence is synthesized)
cgactggcccctggagaaggatggtggggcataggctagggctgcagttggccagtggggctgccagtttctttctgggaccactctcgtcctcgggcattgcactggaaggctggaacc

SEQ ID NO: 350788 - DNA, 120 bp, Artificial Sequence
  ENSG00000139044_43 (sequence is synthesized)
agcccaaactgcccacctgcttcacttccaatgactaggagccagcccagcctcctgccctgcccacacccctgcgccctgggccagtgccttgcgtttgatgttacctccacaccatct

SEQ ID NO: 350789 - DNA, 120 bp, Artificial Sequence
  ENSG00000139044_44 (sequence is synthesized)
gccttaagaggaagggccgggcaaggcccctactccctagagaaatgtcttgggtaggagagggtgtgggatggtgggaggggaagcattaaatacagcaacttcttagaaaaaaaaaaa

SEQ ID NO: 350790 - DNA, 120 bp, Artificial Sequence
  ENSG00000139044_45 (sequence is synthesized)
atgtgtgtgtgtgtgcatggccagagcagaccttgtccccaaggccaggccatggggtgaacatcagcaccagttccggggccgtgccaacctgcatgtgtttgaagactggtgtggcag

SEQ ID NO: 350791 - DNA, 120 bp, Artificial Sequence
  ENSG00000139044_46 (sequence is synthesized)
ggacatcttatgcaaatggaaccatgtaatgtgtggcctttatatcgggctttttgcagaatattcacttagcacaagtttcattcgtgttgtagaatctattaaacacttcattcctcg

SEQ ID NO: 350792 - DNA, 120 bp, Artificial Sequence
  ENSG00000139044_47 (sequence is synthesized)
gtgaggtgagtgagggtcaggacaggcgctgtgggcgcctcggtgcctcggtggagcccggctgcgcccctgtccgccagcccagctgccgactccagagcttccgtgtgtccggcaccc

SEQ ID NO: 350793 - DNA, 120 bp, Artificial Sequence
  ENSG00000139044_48 (sequence is synthesized)
agcctggaaccagctcatctctccatataagtcttctccatcttcacactgtctcccaggatgtagaaacccccactttacagagagggaagccacagcatcaagcactgaagggaattt

SEQ ID NO: 350794 - DNA, 120 bp, Artificial Sequence
  ENSG00000139044_49 (sequence is synthesized)
aatcgctaagacactcacaaaagcctccagcttttatgctgatgccctccttgccctcatctggaaactctccccgctgcccagggaaaatccagtttgccattgctgcagatgacaacg

SEQ ID NO: 350795 - DNA, 120 bp, Artificial Sequence
  ENSG00000139044_50 (sequence is synthesized)
atcactctggcagactacccaagccttctgtgcctctgtgttctcctctacgaacaaggattacatgaggtcacatattgaaagcatttagaacagtgtctgccacagtctctgagctct

SEQ ID NO: 350796 - DNA, 120 bp, Artificial Sequence
  ENSG00000139044_51 (sequence is synthesized)
aacggcttctgttactgttctttgggttcttccgatcatcctgtggaggaggtactctgattatgcccatctcaccaagagaaaacagctcacactgttagcaagtgatagagtgggggc

SEQ ID NO: 350797 - DNA, 120 bp, Artificial Sequence
  ENSG00000139044_52 (sequence is synthesized)
tcgaacctaggcagttaactcctggcattctaagagcaaggagaagggatgagggagtgtaaggtgctggaagggggtgggacagagccgcgaccccagggcccatggagatggcgctct

SEQ ID NO: 350798 - DNA, 120 bp, Artificial Sequence
  ENSG00000139044_53 (sequence is synthesized)
agctgaggcttccaggtcaggctgagaggggcgaccatggtctgtttccaggggatgttcagaccgtgccagccccgcccctgaggagctcaagatccaaatcacgtgacctctcccttc

SEQ ID NO: 350799 - DNA, 120 bp, Artificial Sequence
  ENSG00000139044_54 (sequence is synthesized)
acacccaagggagtggagagcatgactcctgccttttccatatccaggcacatgtggaaaatgacactatttttagcagcatgctggggtcagctggaggagagtgagagcccgggggag

SEQ ID NO: 350800 - DNA, 120 bp, Artificial Sequence
  ENSG00000139044_55 (sequence is synthesized)
gttacttggactgctggaggggcttgctgtccctggcgcaccatttgggaggttctggtttagagaagcactgtcttctggggcctttcttgggggattagggcgtggctgggaccatct

SEQ ID NO: 350801 - DNA, 120 bp, Artificial Sequence
  ENSG00000139044_56 (sequence is synthesized)
gctgggtccctcaggtgctatgcacctgccgggcatgtgatgccgtttatctcactcagtcttcacaaacccatgagagatgcagtattattccctttatgcagatgaagaaactggggt

SEQ ID NO: 350802 - DNA, 120 bp, Artificial Sequence
  ENSG00000139044_57 (sequence is synthesized)
taattgaggttgagtaccttgcccagggtcacacagtaagcgatagaacctggattcaaccccagtctggagccccatggtgcgtcacacgtatgatcatcctctgtcttgtatgtcttg

SEQ ID NO: 350803 - DNA, 120 bp, Artificial Sequence
  ENSG00000139053_0 (sequence is synthesized)
gcaaagaaggcagctgggcagctgataggaacaacattcagctccgaggctgaaagggaaacatcagccgcccggggggagttaaaatgagtgacaacactactctgcctgctccagctt

SEQ ID NO: 350804 - DNA, 120 bp, Artificial Sequence
  ENSG00000139053_1 (sequence is synthesized)
caaaccagggtcctaccaccccacgcaaaggccctcccaagttcaagcagaggcagactcgccaattcaagagtaaacctccaaagaaaggtgtgaaaggatttggagatgacattccag

SEQ ID NO: 350805 - DNA, 120 bp, Artificial Sequence
  ENSG00000139053_2 (sequence is synthesized)
gaatggaggggctaggaacagatatcacagtgatttgtccatgggaggcattcagccacctggaattgcatgagctcgctcagtttgggattatctgaagtgccagaggttctgccactc

SEQ ID NO: 350806 - DNA, 120 bp, Artificial Sequence
  ENSG00000139053_3 (sequence is synthesized)
catctgctgtaattttggttgcttttgccctgttgatctgccggagtcttgaaattcagctgattggaagtggtttctttgactttcaaggtcattccctatcagttactactaagagtt

SEQ ID NO: 350807 - DNA, 120 bp, Artificial Sequence
  ENSG00000139053_4 (sequence is synthesized)
ctcttactgtcagaatctctcttgcagtacagctcaaaatagtggatgcatttcaaacttgaccaccttttcctaccagctagttagaagtcatcaatatttctctacattttgtttatc

SEQ ID NO: 350808 - DNA, 120 bp, Artificial Sequence
  ENSG00000139053_5 (sequence is synthesized)
tgtaagtcctttaaatctatttttgctaggcattcattatgattaatagtagacttttaagacaacatttatgtcactccccacctcctcatatttaataaaggagatatttaccttgaa

SEQ ID NO: 350809 - DNA, 120 bp, Artificial Sequence
  ENSG00000139055_0 (sequence is synthesized)
agggttggagcaggagcaggagagggacaatggaagctgccccgtccaggttcatgttcctcttatttctcctcacgtgtgagctggctgcagaagttgctgcagaagttgagaaatcct

SEQ ID NO: 350810 - DNA, 120 bp, Artificial Sequence
  ENSG00000139055_1 (sequence is synthesized)
cagatggtcctggtgctgcccaggaacccacgtggctcacagatgtcccagctgccatggaattcattgctgccactgaggtggctgtcataggcttcttccaggatttagaaataccag

SEQ ID NO: 350811 - DNA, 120 bp, Artificial Sequence
  ENSG00000139055_2 (sequence is synthesized)
cagtgcccatactccatagcatggtgcaaaaattcccaggcgtgtcatttgggatcagcactgattctgaggttctgacacactacaacatcactgggaacaccatctgcctctttcgcc

SEQ ID NO: 350812 - DNA, 120 bp, Artificial Sequence
  ENSG00000139055_3 (sequence is synthesized)
tggtagacaatgaacaactgaatttagaggacgaagacattgaaagcattgatgccaccaaattgagccgtttcattgagatcaacagcctccacatggtgacagagtacaaccctgtga

SEQ ID NO: 350813 - DNA, 120 bp, Artificial Sequence
  ENSG00000139055_4 (sequence is synthesized)
ctgtgattgggttattcaacagcgtaattcagattcatctcctcctgataatgaacaaggcctccccagagtatgaagagaacatgcacagataccagaaggcagccaagctcttccagg

SEQ ID NO: 350814 - DNA, 120 bp, Artificial Sequence
  ENSG00000139055_5 (sequence is synthesized)
ggaagattctctttattctggtggacagtggtatgaaagaaaatgggaaggtgatatcatttttcaaactaaaggagtctcaactgccagctttggcaatttaccagactctagatgacg

SEQ ID NO: 350815 - DNA, 120 bp, Artificial Sequence
  ENSG00000139055_6 (sequence is synthesized)
aagactccaaaggtggaactctgacttctccttggaactacatatggccaagtatctactttatgcaaagtaaaaaggcacaactcaaatctcagagacactaaacaacaggatcactag

SEQ ID NO: 350816 - DNA, 88 bp, Artificial Sequence
  ENSG00000139055_7 (sequence is synthesized)
caactcaaatctcagagacactaaacaacaggatcactaggcctgccaaccacacacacacgcacgtgcacacacgcacgcacgcgtg

SEQ ID NO: 350817 - DNA, 120 bp, Artificial Sequence
  ENSG00000139055_8 (sequence is synthesized)
ccttcttttaaatttcatatcctcactccctatccaatttccttcttatcgtgcattcatactctgtaagcccatctgtaacacacctagatcaaggctttaagagactcactgtgatgc

SEQ ID NO: 350818 - DNA, 120 bp, Artificial Sequence
  ENSG00000139055_9 (sequence is synthesized)
ctctatgaaagagaggcattcctagagaaagattgttccaatttgtcatttaatatcaagtttgtatactgcacatgacttacacacaacatagttcctgctcttttaaggttacctaag

SEQ ID NO: 350819 - DNA, 120 bp, Artificial Sequence
  ENSG00000139055_10 (sequence is synthesized)
ggttgaaactctaccttctttcataagcacatgtccgtctctgactcaggatcaaaaaccaaaggatggttttaaacacctttgtgaaattgtctttttgccagaagttaaaggctgtct

SEQ ID NO: 350820 - DNA, 120 bp, Artificial Sequence
  ENSG00000139055_11 (sequence is synthesized)
ccaagtccctgaactcagcagaaatagaccatgtgaaaactccatgcttggttagcatctccaactccctatgtaaatcaacaacctgcataataaataaaaggcaatcatgttatagga

SEQ ID NO: 350821 - DNA, 120 bp, Artificial Sequence
  ENSG00000139055_12 (sequence is synthesized)
gcacagcgatgtgagctgaggtgcaggcaccagacctaggaattcctagaaaaatagtcaggaagcatttagacacatcaaatgttaaacgagtcctgattatgatgataatgatgatga

SEQ ID NO: 350822 - DNA, 120 bp, Artificial Sequence
  ENSG00000139055_13 (sequence is synthesized)
gtaattcagattcatctcctcctgataatgaacaaggcctccccagagtatgaagagaacatgcacagataccagaaggcagccaagctcttccaggggaagctgcaataatttatttta

SEQ ID NO: 350823 - DNA, 120 bp, Artificial Sequence
  ENSG00000139055_14 (sequence is synthesized)
gcaacaattacaaggtatctctttatccctggacgtcacctcagatagaactttttctttcaaacttccccaactgcagattctctttattctggtggacagtggtatgaaagaaaatgg

SEQ ID NO: 350824 - DNA, 120 bp, Artificial Sequence
  ENSG00000139083_0 (sequence is synthesized)
gcgctccagacccccggggcggctgccgggagagatgctggaagaaacttcttaaatgaccgcgtctggctggccgtggagcctttctgggttggggagaggaaaggaaagtggaaaaaa

SEQ ID NO: 350825 - DNA, 120 bp, Artificial Sequence
  ENSG00000139083_1 (sequence is synthesized)
cctgagaacttcctgatctctctcgctgtgagacatgtctgagactcctgctcagtgtagcattaagcaggaacgaatttcatatacacctccagagagcccagtgccgagttacgcttc

SEQ ID NO: 350826 - DNA, 120 bp, Artificial Sequence
  ENSG00000139083_2 (sequence is synthesized)
ctcgacgccacttcatgttccagtgcctcgagcgctcaggatggaggaagactcgatccgcctgcctgcgcacctgcgcttgcagccaatttactggagcagggatgacgtagcccagtg

SEQ ID NO: 350827 - DNA, 120 bp, Artificial Sequence
  ENSG00000139083_3 (sequence is synthesized)
gctcaagtgggctgaaaatgagttttctttaaggccaattgacagcaacacgtttgaaatgaatggcaaagctctcctgctgctgaccaaagaggactttcgctatcgatctcctcattc

SEQ ID NO: 350828 - DNA, 120 bp, Artificial Sequence
  ENSG00000139083_4 (sequence is synthesized)
aggtgatgtgctctatgaactccttcagcatattctgaagcagaggaaacctcggattcttttttcaccattcttccaccctggaaactctatacacacacagccggaggtcatactgca

SEQ ID NO: 350829 - DNA, 120 bp, Artificial Sequence
  ENSG00000139083_5 (sequence is synthesized)
tcagaaccatgaagaagataactgtgtccagaggacccccaggccatccgtggataatgtgcaccataaccctcccaccattgaactgttgcaccgctccaggtcacctatcacgacaaa

SEQ ID NO: 350830 - DNA, 120 bp, Artificial Sequence
  ENSG00000139083_6 (sequence is synthesized)
tcaccggccttctcctgaccccgagcagcggcccctccggtcccccctggacaacatgatccgccgcctctccccggctgagagagctcagggacccaggccgcaccaggagaacaacca

SEQ ID NO: 350831 - DNA, 120 bp, Artificial Sequence
  ENSG00000139083_7 (sequence is synthesized)
ccaggagtcctaccctctgtcagtgtctcccatggagaataatcactgcccagcgtcctccgagtcccacccgaagccatccagcccccggcaggagagcacacgcgtgatccagctgat

SEQ ID NO: 350832 - DNA, 120 bp, Artificial Sequence
  ENSG00000139083_8 (sequence is synthesized)
gcccagccccatcatgcaccctctgatcctgaacccccggcactccgtggatttcaaacagtccaggctctccgaggacgggctgcatagggaagggaagcccatcaacctctctcatcg

SEQ ID NO: 350833 - DNA, 120 bp, Artificial Sequence
  ENSG00000139083_9 (sequence is synthesized)
ggaagacctggcttacatgaaccacatcatggtctctgtctccccgcctgaagagcacgccatgcccattgggagaatagcagactgtagactgctttgggattacgtctatcagttgct

SEQ ID NO: 350834 - DNA, 120 bp, Artificial Sequence
  ENSG00000139083_10 (sequence is synthesized)
ttctgacagccggtacgaaaacttcatccgatgggaggacaaagaatccaaaatattccggatagtggatcccaacggactggctcgactgtggggaaaccataagaacagaacaaacat

SEQ ID NO: 350835 - DNA, 120 bp, Artificial Sequence
  ENSG00000139083_11 (sequence is synthesized)
gacctatgagaaaatgtccagagccctgcgccactactacaaactaaacattatcaggaaggagccaggacaaaggcttttgttcaggtttatgaaaaccccagatgaaatcatgagtgg

SEQ ID NO: 350836 - DNA, 120 bp, Artificial Sequence
  ENSG00000139083_12 (sequence is synthesized)
ccgaacagaccgtctggagcacctagagtcccaggagctggatgaacaaatataccaagaagatgaatgctgaaggaaccaacagtccacctcagcgggccagcagcccagggaacccct

SEQ ID NO: 350837 - DNA, 120 bp, Artificial Sequence
  ENSG00000139083_13 (sequence is synthesized)
gcccaccaggattgctggaagtgtgacggagcaggcgggctgaggagagtggaaaaggaagcgacccagaaatggcagggacacttctcttgcagaccaagagggaccctggagcacctt

SEQ ID NO: 350838 - DNA, 120 bp, Artificial Sequence
  ENSG00000139083_14 (sequence is synthesized)
agacaaactacccagcacaggcggggctggaattctggcggagggcatgagcctgggactccatgtcacgtttccttctgatttggaatctctccatctgtaattcctcaccctcaccct

SEQ ID NO: 350839 - DNA, 120 bp, Artificial Sequence
  ENSG00000139083_15 (sequence is synthesized)
tccaccgttgttagtatcatggtgtttttgtttttgtttttgttttaagaacctgcagtttgactcttcatcgttcatctaggggaagacatctgatgttgttttcctatggaaatatat

SEQ ID NO: 350840 - DNA, 120 bp, Artificial Sequence
  ENSG00000139083_16 (sequence is synthesized)
atctattatatatatattttttgcaaatctcacaaagtgcggcaagcccagctggtcaggaaagagaatacttgcagaggggttcaggttcctctttttcctgccacgtggatcaggtct

SEQ ID NO: 350841 - DNA, 120 bp, Artificial Sequence
  ENSG00000139083_17 (sequence is synthesized)
gttcctgttactgttgggtcttggctgaaaaaaaaaaatgcttttaaaaaagataaaatgaaaaggagagctctctttttctctctcttgctctgttcttcccttggtcccctctgtcct

SEQ ID NO: 350842 - DNA, 120 bp, Artificial Sequence
  ENSG00000139083_18 (sequence is synthesized)
cccgccctgcctgcagttgagattcagatgccttctgacagagttcagcctcttggagagtcttggggattgttggcacctaaacagaatcagtgacccgggtgctttgtggccagcagc

SEQ ID NO: 350843 - DNA, 120 bp, Artificial Sequence
  ENSG00000139083_19 (sequence is synthesized)
acagaatcaaacccgcatcccagcattgggccacccatctgagggaggccaaaatcatcacagatgctgctgtgctgcagacagatacatgctagtccagagagccgcccctgagatggc

SEQ ID NO: 350844 - DNA, 120 bp, Artificial Sequence
  ENSG00000139083_20 (sequence is synthesized)
tgtgagaaccatgtgtctaaggcgtaagataaggatggaaggctgtccaagttatttggaaggcctcggcagcttgggattagcttgggagcgcagcgctgcaaagtggaaaatatgaaa

SEQ ID NO: 350845 - DNA, 120 bp, Artificial Sequence
  ENSG00000139083_21 (sequence is synthesized)
agaccacacaggcccagcagtccagaaactgggcaaaaatattctgcagtggggatttatttttccaaagcaggtaacagaggctagtgagaaagaaaagctcctctctgctccattcca

SEQ ID NO: 350846 - DNA, 120 bp, Artificial Sequence
  ENSG00000139083_22 (sequence is synthesized)
ttttttttttttttttttttcaattcctaaccttttttaaagtttcctggtctccactggacacagagctttggagacggaggatcccagagggcagtctcagttgcaatcagtgtgtgc

SEQ ID NO: 350847 - DNA, 120 bp, Artificial Sequence
  ENSG00000139083_23 (sequence is synthesized)
aggacccatttgtggctctttttcacctcaaaataagatcgatggtatcttgtaaaatgagggtagtgccacttcttagtatttttgaaagctgttttagattttttttttttttccttt

SEQ ID NO: 350848 - DNA, 120 bp, Artificial Sequence
  ENSG00000139083_24 (sequence is synthesized)
tctagccatctaaattgactcttccaatataggtctcagaaatccaatatttggagtacaatttcttttaatccagattacacctgccttacaaagcaccccctccttgttcccctctgt

SEQ ID NO: 350849 - DNA, 120 bp, Artificial Sequence
  ENSG00000139083_25 (sequence is synthesized)
ttcctctactcagttgggggagaaactcacagctcctccgggatacatatgtgccctcagcagcagctcccaggtgaagttaccagacccctgggcttctccccagctttttctgagttg

SEQ ID NO: 350850 - DNA, 120 bp, Artificial Sequence
  ENSG00000139083_26 (sequence is synthesized)
agtcagacatgtagagtttgggtcacacaggcaagaggaattttccctcggccttactgacaaggacaccaacctagggtgcaaacagatggactatggttcaaggacactggaattgag

SEQ ID NO: 350851 - DNA, 120 bp, Artificial Sequence
  ENSG00000139083_27 (sequence is synthesized)
gagctgatcaaggctctcttcagccttgctctgtccctgcctcttatcagagcacaggtagacacacgggcatagccagcccactcctactgtcacaggcgccccaccattcaaccttcc

SEQ ID NO: 350852 - DNA, 120 bp, Artificial Sequence
  ENSG00000139083_28 (sequence is synthesized)
gggaggtcagggaccttctatatgaggcgagtgggtctcagtctgcttgaatggtgatgagattctgctggatctcagcacgctgcaggtgtcttttgagagcattcagtaggacatggt

SEQ ID NO: 350853 - DNA, 120 bp, Artificial Sequence
  ENSG00000139083_29 (sequence is synthesized)
gatccctatttcagcctctaagatgactggtattctatctgaaatgcagagattaagccaaatacctgatgtattgtgaaagccactgattttaagaatggagagaaagggattttttac

SEQ ID NO: 350854 - DNA, 120 bp, Artificial Sequence
  ENSG00000139083_30 (sequence is synthesized)
tgcatccctctgtatgaatatgaaatcagagaccagggcatgatgttgctaggattagagcctctcagtctggcctcttcacccaagtgcaagaactcagtctcttactgttcaaagaat

SEQ ID NO: 350855 - DNA, 120 bp, Artificial Sequence
  ENSG00000139083_31 (sequence is synthesized)
cttaacagttgaattatggagggaaattcccttttgccccaagcatttctatatttaaagcaatatcccaggagaatatgttagacttaggatgataccttcagccacttgaagaagaaa

SEQ ID NO: 350856 - DNA, 120 bp, Artificial Sequence
  ENSG00000139083_32 (sequence is synthesized)
tagaaggcgctcattccaatatagtctttatttcccattcagatacaggttgagcatccctaatctgaacagttaaaacccccaaatgccccaaaatccaaaccttcctgaacgctatga

SEQ ID NO: 350857 - DNA, 120 bp, Artificial Sequence
  ENSG00000139083_33 (sequence is synthesized)
caccatgagtggaaaattccacacctaacaaacacatttgctttcttatggttcaatgtacacaaactgttttatatagaaaatgatttcaaatatcataaaattaccttcaggctatgt

SEQ ID NO: 350858 - DNA, 120 bp, Artificial Sequence
  ENSG00000139083_34 (sequence is synthesized)
atatcataaaattaccttcaggctatgtgtataaagtatatatgagccataaatgaattttgtgtttagactttgtgtccatccccaagatctctcattttatatatatatatatatata

SEQ ID NO: 350859 - DNA, 89 bp, Artificial Sequence
  ENSG00000139083_35 (sequence is synthesized)
tatatatacacacacacacacatacacaaatattccaggatacaaaaaaaaacatttaaaaatccgagacccagggatatcaatctgta

SEQ ID NO: 350860 - DNA, 120 bp, Artificial Sequence
  ENSG00000139083_36 (sequence is synthesized)
aaggatttcgtaattcccctaactgcaaatgtcctcttcatttgttctttatgagaaaacccgggtagtgccagcacctggatacagtatttacaccctgcagaccctaaagatttcaga

SEQ ID NO: 350861 - DNA, 120 bp, Artificial Sequence
  ENSG00000139083_37 (sequence is synthesized)
ttcagttagcaaaccttgatgaagcacctgctggacactgagggacccaaagctcaatcagccataatccctgctttcagagtttatattgtacctgcctaatccacccggcgtgactca

SEQ ID NO: 350862 - DNA, 120 bp, Artificial Sequence
  ENSG00000139083_38 (sequence is synthesized)
tttcaacactaagtactaggggtgttgtcaggagacaaatctgaagtcaggagaggaaaatgcaaaggagccctgccgtgtgatggatgtgcattctcacttgggtcttgaagttctcat

SEQ ID NO: 350863 - DNA, 120 bp, Artificial Sequence
  ENSG00000139083_39 (sequence is synthesized)
tcctacatctcaagctagccaggcagtctcctctctatcagaagaaagcactggtaattggctagactggctatgttgaaggtaacatgaactctaagatcttgacccagggcgacttgg

SEQ ID NO: 350864 - DNA, 120 bp, Artificial Sequence
  ENSG00000139083_40 (sequence is synthesized)
ttttgcttaaggtggcatcaccaatgttccaaatcctttagggagatgagggtatccccacagaaaaagaggaataatagaccaatggattttctcctttcaccagtatgtttggaaccc

SEQ ID NO: 350865 - DNA, 120 bp, Artificial Sequence
  ENSG00000139083_41 (sequence is synthesized)
tctgatccaatgtcttttgatactgatctcttgtccaaatgagaatgtcgctttagctgaaattcaaatggctgtgacaatttaccgaaatgatgaagtaaccaccattcccacctttca

SEQ ID NO: 350866 - DNA, 120 bp, Artificial Sequence
  ENSG00000139083_42 (sequence is synthesized)
ctgcctaggctccaagtctgaatacatttttgaaataggaactcccttttgcaaaaaagaaacctgggtgtcagggaggtgaagtgacttgccctaggagcagacagcatgccaagaatg

SEQ ID NO: 350867 - DNA, 120 bp, Artificial Sequence
  ENSG00000139083_43 (sequence is synthesized)
gaattaggctcaggatccagcctgggctcaccctgtgtggctcattcccacccaggaaactgaagataaaagatttgggaaaacacaccaagaaaaaggggcagttttctttgcccaagc

SEQ ID NO: 350868 - DNA, 120 bp, Artificial Sequence
  ENSG00000139083_44 (sequence is synthesized)
atttggtgctagttagaggctgttcactctctcctgctcctcttcggagtagaaataaaggctgtgacacaaggaagccagtggggtgggagggaggcaccataatccctccctaaaacc

SEQ ID NO: 350869 - DNA, 120 bp, Artificial Sequence
  ENSG00000139083_45 (sequence is synthesized)
cacagaagactaacctgatactcttttgacccaactgcatcaacactaaacagctgcagaccccctgaatctttcacacatgccaagtgaacattcttgatgatttctctttgtgaccgc

SEQ ID NO: 350870 - DNA, 120 bp, Artificial Sequence
  ENSG00000139083_46 (sequence is synthesized)
aaccacctgcaaaccagaacgactctagaatttccttccccgcccccctttttgtttagtttctaatctcttgtttatgaggtgtggggtttataagggactgaatcaaatgaatgtaac

SEQ ID NO: 350871 - DNA, 90 bp, Artificial Sequence
  ENSG00000139083_47 (sequence is synthesized)
cttttctcagggccagtgagttgcaaataatttttaaagaaaagcctataattacatcatctcaataaattttttataaaaaaaaaaaaa

SEQ ID NO: 350872 - DNA, 120 bp, Artificial Sequence
  ENSG00000139083_48 (sequence is synthesized)
tacaaactaaacattatcaggaaggagccaggacaaaggcttttgttcaggttcctctttttcctgccacgtggatcaggtctgttcctgttactgttgggtcttggctgaaaaaaaaaa

SEQ ID NO: 350873 - DNA, 120 bp, Artificial Sequence
  ENSG00000139083_49 (sequence is synthesized)
tctgagactcctgctcagtgtagcattaagcaatgctccaaggatgctttggaagactcattattcagagctgcagctggactgccttagacatctgcatttctctatctctgaaataag

SEQ ID NO: 350874 - DNA, 120 bp, Artificial Sequence
  ENSG00000139083_50 (sequence is synthesized)
ggactcaaacaagagcatcactcttttcctttccagctctaaaattatgtgatttttctttcacatgcaggaacgaatttcatatacacctccagagagcccagtgccgagttacgcttc

SEQ ID NO: 350875 - DNA, 120 bp, Artificial Sequence
  ENSG00000139083_51 (sequence is synthesized)
aggcagtgggctccaggccagagaggggcaagctctgaggtggttttcacaggacttcgccacgctgctttggaatctttcacacccccctacccccagatacctttgaaaaatttgagg

SEQ ID NO: 350876 - DNA, 120 bp, Artificial Sequence
  ENSG00000139083_52 (sequence is synthesized)
ttcctgttccttgtttctcagtgtattcatttcttccctgactatgacatgttaaaaaaaaaagaaacctggaaacatgcagtatatggcagagccaactaaatctcctagtagacaaga

SEQ ID NO: 350877 - DNA, 120 bp, Artificial Sequence
  ENSG00000139083_53 (sequence is synthesized)
tcttggcatagtccctaactacgttcaacctttatttactcctggagacctgccagaagttaataaactaaccgtcatgaggaaacgtccctcattacaggagatgagataaagccccag

SEQ ID NO: 350878 - DNA, 120 bp, Artificial Sequence
  ENSG00000139083_54 (sequence is synthesized)
cacccgtatctccactgttcttcccagttgccacagaccgtttatatgaagaaatgctaaagaagttccccagaagtagagatgttattgaaacttgaaagtttatatcttcaaaattga

SEQ ID NO: 350879 - DNA, 120 bp, Artificial Sequence
  ENSG00000139083_55 (sequence is synthesized)
gtaatttggaagggacacaaacatacctgaaacattttgtctcatatcatcaattctgtatgtaatctcacaataagaaaactataaaacaaccatgtaaataaatcagactatcctaaa

SEQ ID NO: 350880 - DNA, 120 bp, Artificial Sequence
  ENSG00000139083_56 (sequence is synthesized)
tgcctgcgcacctgcgttctggggattaggacacggacatttctatttggcagccaacattcagccatctccagtcactgagctacacagaatgaaaagcacctttgaagaatcgtaagc

SEQ ID NO: 350881 - DNA, 120 bp, Artificial Sequence
  ENSG00000139083_57 (sequence is synthesized)
catgaatgatgacgggccgaagggagtgagggctcctacctcttgtcactcctaccatcctgcctccaggacccctgccacctacttgggagtctgcccttaaaactcaagggtcacctg

SEQ ID NO: 350882 - DNA, 120 bp, Artificial Sequence
  ENSG00000139112_0 (sequence is synthesized)
gtttttgtgctcccagctctagcgaaaagccgccggtatttctccatctggctctcctctacctccaggcaggctcacccgagatccccgccccgaaccccccctgcacactcggcccag

SEQ ID NO: 350883 - DNA, 120 bp, Artificial Sequence
  ENSG00000139112_1 (sequence is synthesized)
cgctgttgcccccggagcggacgtttctgcagctattctgagcacaccttgacgtcggctgagggagcgggacagggtcagcggcgaaggaggcaggccccgcgcggggatctcggaagc

SEQ ID NO: 350884 - DNA, 120 bp, Artificial Sequence
  ENSG00000139112_2 (sequence is synthesized)
cctgcggtgcatcatgaagttccagtacaaggaggaccatccctttgagtatcggaaaaaggaaggagaaaagatccggaagaaatatccggacagggtccccgtgattgtagagaaggc

SEQ ID NO: 350885 - DNA, 120 bp, Artificial Sequence
  ENSG00000139112_3 (sequence is synthesized)
tccaaaagccagggtgcctgatctggacaagaggaagtacctagtgccctctgaccttactgttggccagttctacttcttaatccggaagagaatccacctgagacctgaggacgcctt

SEQ ID NO: 350886 - DNA, 120 bp, Artificial Sequence
  ENSG00000139112_4 (sequence is synthesized)
attcttctttgtcaacaacaccatccctcccaccagtgctaccatgggccaactgtatgaggacaatcatgaggaagactattttctgtatgtggcctacagtgatgagagtgtctatgg

SEQ ID NO: 350887 - DNA, 120 bp, Artificial Sequence
  ENSG00000139112_5 (sequence is synthesized)
gaaatgagtggttggaagcccagcagatgggagcacctggacttgggggtaggggaggggtgtgtgtgcgcgacatggggaaagagggtggctcccaccgcaaggagacagaaggtgaag

SEQ ID NO: 350888 - DNA, 120 bp, Artificial Sequence
  ENSG00000139112_6 (sequence is synthesized)
acatctagaaacattacaccacacacaccgtcatcacattttcacatgctcaattgatattttttgctgcttcctcggcccagggagaaagcatgtcaggacagagctgttggattggct

SEQ ID NO: 350889 - DNA, 120 bp, Artificial Sequence
  ENSG00000139112_7 (sequence is synthesized)
ggacaagttggggccagagatgatggcagtccagcagcaactccctgtgctcccttctctttgggcagagattctatttttgacatttgcacaagacaggtagggaaaggggacttgtgg

SEQ ID NO: 350890 - DNA, 120 bp, Artificial Sequence
  ENSG00000139112_8 (sequence is synthesized)
tagtggaccatacctggggaccaaaagagacccactgtaattgatgcattgtggcccctgatcttccctgtctcacacttcttttctcccatcccggttgcaatctcactcagacatcac

SEQ ID NO: 350891 - DNA, 120 bp, Artificial Sequence
  ENSG00000139112_9 (sequence is synthesized)
agtaccaccccaggggtggcagtagacaacaacccagaaatttagacagggatctcttacctttggaaaataggggttaggcatgaaggtggttgtgattaagaagatggttttgttatt

SEQ ID NO: 350892 - DNA, 120 bp, Artificial Sequence
  ENSG00000139112_10 (sequence is synthesized)
aaatagcattaaactggaattgacaagagtgttgagcatccctgtctaacctgctctttctctttggtgccccttatctcaccccttccttggaatttaataagtctcaggcatttccaa

SEQ ID NO: 350893 - DNA, 120 bp, Artificial Sequence
  ENSG00000139112_11 (sequence is synthesized)
ttgtagactaaaaccactcttagcatctcctctagtattttccatgtatcaggacagaggtgtcttatgtagggagggggcaagtatgaagtaaggtaattatatactactctcattcag

SEQ ID NO: 350894 - DNA, 120 bp, Artificial Sequence
  ENSG00000139112_12 (sequence is synthesized)
gattcttgctcccatgctgctgtcccttcaggctcacatgcacaggaatgctacatgatggccagctgcttccctccttggttatcatccactgcagctgctagttagaaaggtttggag

SEQ ID NO: 350895 - DNA, 120 bp, Artificial Sequence
  ENSG00000139112_13 (sequence is synthesized)
ggatgacttttagtaaatcatggggattttattgatttattttcacttttgggattttgtggggtgggagtggggagcaggaattgcactcagacatgacatttcaattcatctctgcta

SEQ ID NO: 350896 - DNA, 120 bp, Artificial Sequence
  ENSG00000139112_14 (sequence is synthesized)
atgaaaagggttctttctcttgggggaaatgtgtgtgtcagttctgtcagctgcaagttcttgtataatgaagtcaatgccatcaggccaaggaaataaaataattgcttaccttaaaaa

SEQ ID NO: 350897 - DNA, 120 bp, Artificial Sequence
  ENSG00000139112_15 (sequence is synthesized)
ggggcagcggaacgcgcagagggcacggtgcaagcacgggacagctctgcattggccaaagggatcccaggaggcctggccctcttttctcctgaggctggatcccaaccagcaggaaaa

SEQ ID NO: 350898 - DNA, 120 bp, Artificial Sequence
  ENSG00000139112_16 (sequence is synthesized)
ggctggattttcgccttttgtatttgttttggggcccaaccaagaaaaacagtggagggggaataaaacatgtttaaatcttttttttgtcttaaaaccatctttaatttcacagtcaca

SEQ ID NO: 350899 - DNA, 120 bp, Artificial Sequence
  ENSG00000139112_17 (sequence is synthesized)
ataaggcaggactgagacgttttttctccgttttggacaccggcttaagtagttaaaactaccgcaggcagctgcgcagccgaattggagggcagaatatggcttaagtggtagggggac

SEQ ID NO: 350900 - DNA, 120 bp, Artificial Sequence
  ENSG00000139112_18 (sequence is synthesized)
gcaaacccagtcgatttctgccttggctggttctcctttaatgaagttgactttggctctcatatcattggtcttgggacgaaaaggttcagaagctattcagtaattttcttgcattac

SEQ ID NO: 350901 - DNA, 120 bp, Artificial Sequence
  ENSG00000139112_19 (sequence is synthesized)
agggggttaggggagcacaagacagtcctggcctggaaaacaaggtcacgttctctgcccaacagccctcttgcctcatcgttctaggctccggggcttgtgtggggacagccagcctcc

SEQ ID NO: 350902 - DNA, 120 bp, Artificial Sequence
  ENSG00000139112_20 (sequence is synthesized)
gacggcgttttgggggccgagccgccgtcttcagtgactcagcaacccacacacggtctcagcagctgagaccgtgtgtgggttgcggtgcacaaaatagggcccctgtgggcgagactg

SEQ ID NO: 350903 - DNA, 120 bp, Artificial Sequence
  ENSG00000139112_21 (sequence is synthesized)
gtattaggtatctttcagcatccgggcgttttccccattaccccctcccccgcccacttgcctggtgtttctctaatgcaggctgcgcagccgaattggagggcagaatatggcttaagt

SEQ ID NO: 350904 - DNA, 120 bp, Artificial Sequence
  ENSG00000139112_22 (sequence is synthesized)
atctcggaagccctgcggtgcatcatgaagttccagtacaaggaggaccatccctttgagtatcggaaaaaggaaggagaaaagatccggaagaaatatccggacagggtccccgtgagt

SEQ ID NO: 350905 - DNA, 120 bp, Artificial Sequence
  ENSG00000139112_23 (sequence is synthesized)
gtagaggagcggaggggatgggaggggaagggcccgcgggggcgggggcgggtagtcgagatggcttccctggggcgcccaggcggctctggagaagggaggttccgagaattacttaat

SEQ ID NO: 350906 - DNA, 120 bp, Artificial Sequence
  ENSG00000139112_24 (sequence is synthesized)
aggtaggaacattagtattacgtgtcacataatggtaaaataattgctgttatctgatgtcttttcttgactcacagccactctgggtttcttctctaatccttacctaacgttcgtggt

SEQ ID NO: 350907 - DNA, 120 bp, Artificial Sequence
  ENSG00000139112_25 (sequence is synthesized)
tttatagctaccagaagccaccagggccttagcccagcagtagaaacctcttgtaacccttttcctttaaaaagaaaaaaaagtcattagggctcttcattccccaggaattacaaaaag

SEQ ID NO: 350908 - DNA, 120 bp, Artificial Sequence
  ENSG00000139112_26 (sequence is synthesized)
gttttcagcttatagaggggtgagctaatcccttactcgggaaaggatcctttacaaattactttcctggtttctggaccttggatacctgaaaattttgcccagttctggtgataccaa

SEQ ID NO: 350909 - DNA, 120 bp, Artificial Sequence
  ENSG00000139112_27 (sequence is synthesized)
tcttttgagcaatgatatttaaaaaatacaatcaagttttattgatagtttaccctagcggtattataagtactcagtctgtaatcattgacttacttccttacacgattacccgttcta

SEQ ID NO: 350910 - DNA, 120 bp, Artificial Sequence
  ENSG00000139112_28 (sequence is synthesized)
gtgctcccagctctagcgaaaagccgccggtatttctccatctggctctcctctacctccaggcaggctcacccgagatccccgccccgaaccccccctgcacactcggccccgcgcggg

SEQ ID NO: 350911 - DNA, 120 bp, Artificial Sequence
  ENSG00000139112_29 (sequence is synthesized)
ccatgggccaactgtatgaggtaatggttctggttgcacaatactggatgccgtccagtgcagtctggcatcctctagcccttgttctagatgcgttgataacacatctgagaagtgggg

SEQ ID NO: 350912 - DNA, 120 bp, Artificial Sequence
  ENSG00000139112_30 (sequence is synthesized)
cagaaggtgttatttatccggatcctcttacatatggcagtgtaaggctctgagagattagatacctcttgttttttagggattagccactctactagatttaatccttctgaaatcttg

SEQ ID NO: 350913 - DNA, 120 bp, Artificial Sequence
  ENSG00000139116_0 (sequence is synthesized)
tccccagcctggccgctgggaggccgcgtccccaccggagggggcagggcgcactcacccggccgccctgaggccgctggcggcctgttggcttctccacaggcgcgctcgccgttcaag

SEQ ID NO: 350914 - DNA, 120 bp, Artificial Sequence
  ENSG00000139116_1 (sequence is synthesized)
tggcttctccacaggcgcgctcgccgttcaagcgcgctttgtccccgccccagatcctggggggtgagcggtggagaaggggcgggcgcccgcgagccgtgaatcacctcctcctcttgc

SEQ ID NO: 350915 - DNA, 120 bp, Artificial Sequence
  ENSG00000139116_2 (sequence is synthesized)
tgcctcagcgccgccgccacctttccattcagtcgcccaacatggctggagcgcggcggaggtgagccggccgcccgcccgcagacgccccagcctactgcgcccgagtcccgcggcccc

SEQ ID NO: 350916 - DNA, 120 bp, Artificial Sequence
  ENSG00000139116_3 (sequence is synthesized)
agtggcgcctcagctctgcggtgccgaggcccaacggctcgatcgctgcccgccgccagcatgttgggcgccccggacgagagctccgtgcgggtggctgtcagaataagaccacagctt

SEQ ID NO: 350917 - DNA, 120 bp, Artificial Sequence
  ENSG00000139116_4 (sequence is synthesized)
gccaaagagaagattgaaggatgccatatttgtacatctgtcacaccaggagagcctcaggtcttcctagggaaagataaggcttttacttttgactatgtatttgacattgactcccag

SEQ ID NO: 350918 - DNA, 120 bp, Artificial Sequence
  ENSG00000139116_5 (sequence is synthesized)
caagagcagatctacattcaatgtatagaaaaactaattgaaggttgctttgaaggatacaatgctacagtttttgcttatggacaaactggagctggtaaaacatacacaatgggaaca

SEQ ID NO: 350919 - DNA, 120 bp, Artificial Sequence
  ENSG00000139116_6 (sequence is synthesized)
ggatttgatgttaacattgttgaggaagaactgggtattatttctcgagctgttaaacacctttttaagagtattgaagaaaaaaaacacatagcaattaaaaatgggcttcctgctcca

SEQ ID NO: 350920 - DNA, 120 bp, Artificial Sequence
  ENSG00000139116_7 (sequence is synthesized)
gattttaaagtgaatgcccaattcttagagctctataatgaagaggtccttgacttatttgataccactcgtgatattgatgcaaaaagtaaaaaatcaaatataagaattcatgaagat

SEQ ID NO: 350921 - DNA, 120 bp, Artificial Sequence
  ENSG00000139116_8 (sequence is synthesized)
tcaactggaggaatttatactgtgggcgttacaacacgtactgtgaatacagaatcagagatgatgcagtgtttgaagttgggtgctttatcccggacaactgccagtacccagatgaat

SEQ ID NO: 350922 - DNA, 120 bp, Artificial Sequence
  ENSG00000139116_9 (sequence is synthesized)
gttcagagctctcgttcacatgccatttttaccattcatgtgtgtcaaaccagagtgtgtccccaaatagatgctgacaatgcaactgataataaaattatttctgaatcagcacagatg

SEQ ID NO: 350923 - DNA, 120 bp, Artificial Sequence
  ENSG00000139116_10 (sequence is synthesized)
aatgaatttgaaaccctgactgcaaagttccattttgttgatctcgcaggatctgaaagactgaagcgtactggagctacaggcgagagggcaaaagaaggcatttctatcaactgtgga

SEQ ID NO: 350924 - DNA, 120 bp, Artificial Sequence
  ENSG00000139116_11 (sequence is synthesized)
cttttggcacttggcaatgtaataagtgccttgggagacaagagcaagagggccacacatgtcccctatagagattccaagctaacaagactactacaggattccctcgggggtaatagc

SEQ ID NO: 350925 - DNA, 120 bp, Artificial Sequence
  ENSG00000139116_12 (sequence is synthesized)
caaacaatcatgatagcatgtgtcagcccttcagacagagactttatggaaacgttaaacaccctgaaatacgccaatcgagctagaaatatcaagaataaggtgatggtcaatcaggac

SEQ ID NO: 350926 - DNA, 120 bp, Artificial Sequence
  ENSG00000139116_13 (sequence is synthesized)
agagctagtcagcaaatcaatgcacttcgtagtgaaatcacacgacttcagatggagctcatggagtacaaaacaggtaaaagaataattgacgaagagggtgtggaaagcatcaatgac

SEQ ID NO: 350927 - DNA, 120 bp, Artificial Sequence
  ENSG00000139116_14 (sequence is synthesized)
atgtttcatgagaatgctatgctacagactgaaaataataacctgcgtgtaagaattaaagccatgcaagagacggttgatgcattgaggtccagaattacacagcttgttagtgatcag

SEQ ID NO: 350928 - DNA, 120 bp, Artificial Sequence
  ENSG00000139116_15 (sequence is synthesized)
gccaaccatgttcttgccagagcaggtgaaggaaatgaggagattagtaatatgattcatagttatataaaagaaatcgaagatctcagggcaaaattattagaaagtgaagcagtgaat

SEQ ID NO: 350929 - DNA, 120 bp, Artificial Sequence
  ENSG00000139116_16 (sequence is synthesized)
gagaaccttcgaaaaaacttgacaagagccacagcaagagcgccatatttcagcggatcatcaactttttctcctaccatactatcctcagacaaagaaaccattgaaattatagaccta

SEQ ID NO: 350930 - DNA, 120 bp, Artificial Sequence
  ENSG00000139116_17 (sequence is synthesized)
gcaaaaaaagatttagagaagttgaaaagaaaagaaaagaggaagaaaaaaagtgtggctggtaaagaggataatacagacactgaccaagagaagaaagaagaaaagggtgtttcggaa

SEQ ID NO: 350931 - DNA, 120 bp, Artificial Sequence
  ENSG00000139116_18 (sequence is synthesized)
agagaaaacaatgaattagaagtggaagaaagtcaagaagtgagtgatcatgaggatgaagaagaggaggaggaggaggaggaagatgacattgatgggggtgaaagttctgatgaatca

SEQ ID NO: 350932 - DNA, 120 bp, Artificial Sequence
  ENSG00000139116_19 (sequence is synthesized)
gattctgaatcagatgaaaaagccaattatcaagcagacttggcaaacattacttgtgaaattgcaattaagcaaaagctgattgatgaactagaaaacagccagaaaagactgcagact

SEQ ID NO: 350933 - DNA, 120 bp, Artificial Sequence
  ENSG00000139116_20 (sequence is synthesized)
ctgaaaaagcagtatgaagagaagctaatgatgctgcaacataaaattcgggatactcagcttgaaagagaccaggtgcttcaaaacttaggctcggtagaatcttactcagaagaaaaa

SEQ ID NO: 350934 - DNA, 120 bp, Artificial Sequence
  ENSG00000139116_21 (sequence is synthesized)
gcaaaaaaagttaggtctgaatatgaaaagaaactccaagccatgaacaaagaactgcagagacttcaagcagctcaaaaagaacatgcaaggttgcttaaaaatcagtctcagtatgaa

SEQ ID NO: 350935 - DNA, 120 bp, Artificial Sequence
  ENSG00000139116_22 (sequence is synthesized)
aagcaattgaagaaattgcagcaggatgtgatggaaatgaaaaaaacaaaggttcgcctaatgaaacaaatgaaagaagaacaagagaaagccagactgactgagtctagaagaaacaga

SEQ ID NO: 350936 - DNA, 120 bp, Artificial Sequence
  ENSG00000139116_23 (sequence is synthesized)
gagattgctcagttgaaaaaggatcaacgtaaaagagatcatcaacttagacttctggaagcccaaaaaagaaaccaagaagtggttctacgtcgcaaaactgaagaggttacggctctt

SEQ ID NO: 350937 - DNA, 120 bp, Artificial Sequence
  ENSG00000139116_24 (sequence is synthesized)
cgtcggcaagtaagacccatgtcagataaagtggctgggaaagttactcggaagctgagttcatctgatgcacctgctcaggacacaggttccagtgcagctgctgtcgaaacagatgca

SEQ ID NO: 350938 - DNA, 120 bp, Artificial Sequence
  ENSG00000139116_25 (sequence is synthesized)
tcaaggacaggagcccagcagaaaatgagaattcctgtggcgagagtccaggccttaccaacgccggcaacaaatggaaacaggaaaaaatatcagaggaaaggattgactggccgagtg

SEQ ID NO: 350939 - DNA, 120 bp, Artificial Sequence
  ENSG00000139116_26 (sequence is synthesized)
tttatttccaagacagctcgcatgaagtggcagctccttgagcgcagggtcacagacatcatcatgcagaagatgaccatttccaacatggaggcagatatgaatagactcctcaagcaa

SEQ ID NO: 350940 - DNA, 120 bp, Artificial Sequence
  ENSG00000139116_27 (sequence is synthesized)
gggaggaactcacaaaaagacgagagaaactttcaaaaagaagggagaagatagtcaaggagaatggagagggagataaaaatgtggctaatatcaatgaagagatggagtcactgactg

SEQ ID NO: 350941 - DNA, 120 bp, Artificial Sequence
  ENSG00000139116_28 (sequence is synthesized)
ctaatatcgattacatcaatgacagtatttctgattgtcaggccaacataatgcagatggaagaagcaaaggaagaaggtgagacattggatgttactgcagtcattaatgcctgcaccc

SEQ ID NO: 350942 - DNA, 120 bp, Artificial Sequence
  ENSG00000139116_29 (sequence is synthesized)
ttacagaagcccgatacctgctagatcacttcctgtcaatgggcatcaataagggtcttcaggctgcccagaaagaggctcaaattaaagtactggaaggtcgactcaaacaaacagaaa

SEQ ID NO: 350943 - DNA, 120 bp, Artificial Sequence
  ENSG00000139116_30 (sequence is synthesized)
taaccagtgctacccaaaaccagctcttattccatatgttgaaagagaaggcagaattaaatcctgagctagatgctttactaggccatgctttacaagatctagatagcgtaccattag

SEQ ID NO: 350944 - DNA, 120 bp, Artificial Sequence
  ENSG00000139116_31 (sequence is synthesized)
aaaatgtagaggatagtactgatgaggatgctcctttaaacagcccaggatcagaaggaagcacgctgtcttcagatctcatgaagctttgtggtgaagtgaaacctaagaacaaggccc

SEQ ID NO: 350945 - DNA, 120 bp, Artificial Sequence
  ENSG00000139116_32 (sequence is synthesized)
gaaggagaaccaccactcagatggaattgctgtatgcagatagcagtgaactagcttcagacactagtacaggagatgcctccttgcctggccctctcacacctgttgcagaagggcaag

SEQ ID NO: 350946 - DNA, 120 bp, Artificial Sequence
  ENSG00000139116_33 (sequence is synthesized)
agattggaatgaatacagagacaagtggtacttctgctagggaaaaagagctctctcccccacctggcttaccttctaagataggcagcatttccaggcagtcatctctatcagaaaaaa

SEQ ID NO: 350947 - DNA, 120 bp, Artificial Sequence
  ENSG00000139116_34 (sequence is synthesized)
aaattccagagccttctcctgtaacaaggagaaaggcatatgagaaagcagaaaaatcaaaggccaaggaacaaaagcactcagattctggaacttcagaggctagtctttcacctcctt

SEQ ID NO: 350948 - DNA, 120 bp, Artificial Sequence
  ENSG00000139116_35 (sequence is synthesized)
cttccccaccaagccggccccgtaatgaactgaatgtttttaatcgtcttactgtttctcagggaaacacatcagttcagcaggataagtctgatgaaagtgactcctctctctcggagg

SEQ ID NO: 350949 - DNA, 120 bp, Artificial Sequence
  ENSG00000139116_36 (sequence is synthesized)
tacacagatcctccagaaggggcataatcaacccatttcctgcttcaaaaggaatcagagcttttccacttcagtgtattcacatagctgaagggcatacaaaagctgtgctctgtgtgg

SEQ ID NO: 350950 - DNA, 120 bp, Artificial Sequence
  ENSG00000139116_37 (sequence is synthesized)
attctactgatgatctcctcttcactggatcaaaagatcgtacttgtaaagtatggaatctggtgactgggcaggaaataatgtcactggggggtcatcccaacaatgtcgtgtctgtaa

SEQ ID NO: 350951 - DNA, 120 bp, Artificial Sequence
  ENSG00000139116_38 (sequence is synthesized)
aatactgtaattataccagtttggtcttcactgtatcaacatcttatattaaggtgtgggatatcagagattcagcaaagtgcattcgaacactaacgtcttcaggtcaagttactcttg

SEQ ID NO: 350952 - DNA, 120 bp, Artificial Sequence
  ENSG00000139116_39 (sequence is synthesized)
gagatgcttgttctgcaagtaccagtcgaacagtagctattccttctggagagaaccagatcaatcaaattgccctaaacccaactggcaccttcctctatgctgcttctggaaatgctg

SEQ ID NO: 350953 - DNA, 120 bp, Artificial Sequence
  ENSG00000139116_40 (sequence is synthesized)
tcaggatgtgggatcttaaaaggtttcagtctacaggaaagttaacaggacacctaggccctgttatgtgccttactgtggatcagatttccagtggacaagatctaatcatcactggct

SEQ ID NO: 350954 - DNA, 120 bp, Artificial Sequence
  ENSG00000139116_41 (sequence is synthesized)
ccaaggatcattacatcaaaatgtttgatgttacagaaggagctcttgggactgtgagtcccacccacaattttgaaccccctcattatgatggcatagaagcactaaccattcaagggg

SEQ ID NO: 350955 - DNA, 120 bp, Artificial Sequence
  ENSG00000139116_42 (sequence is synthesized)
ataacctatttagtgggtctagagataatggaatcaagaaatgggacttaactcaaaaagaccttcttcagcaagttccaaatgcacataaggattgggtctgtgccctgggagtggtgc

SEQ ID NO: 350956 - DNA, 120 bp, Artificial Sequence
  ENSG00000139116_43 (sequence is synthesized)
cagaccacccagttttgctcagtggctgcagagggggcattttgaaagtctggaacatggatacttttatgccagtgggagagatgaagggtcatgatagtcctatcaatgccatatgtg

SEQ ID NO: 350957 - DNA, 120 bp, Artificial Sequence
  ENSG00000139116_44 (sequence is synthesized)
ttaattccacccacatttttactgcagctgatgatcgaactgtgagaatttggaaggctcgcaatttgcaagatggtcagatctctgacacaggagatctgggggaagatattgccagta

SEQ ID NO: 350958 - DNA, 120 bp, Artificial Sequence
  ENSG00000139116_45 (sequence is synthesized)
attaaacatgaatgaagataggttgtaaactgaatgctgtgataatactctgtattctttatggaaaatgttgtcctgtacttactaggcaaaacgtatgaatcggattaactggaaaat

SEQ ID NO: 350959 - DNA, 120 bp, Artificial Sequence
  ENSG00000139116_46 (sequence is synthesized)
atatctgaattcaactgctgactataaatggtattctaataaaattgtgtactatcctgtgtgcttagttttaagatcaaccaatagatatatatcctacaattgatatattgctttatt

SEQ ID NO: 350960 - DNA, 120 bp, Artificial Sequence
  ENSG00000139116_47 (sequence is synthesized)
cacacttttattgtggctgaatttttgtgcctatctataaaacacactttcaaattatttgaattaccaagacgtctgcttttgtgacagtcagaaaacacacctggaatacgatgcagc

SEQ ID NO: 350961 - DNA, 120 bp, Artificial Sequence
  ENSG00000139116_48 (sequence is synthesized)
ccaccattaactcattcatgtagtttattcaagtgatttatgtatttaaactaaatattgaaaatgttagtcaaattgtggtttgcttgtcaggtatttatatcagtctgtagtggattc

SEQ ID NO: 350962 - DNA, 120 bp, Artificial Sequence
  ENSG00000139116_49 (sequence is synthesized)
ccaaatttcaaagctcttttaatgtaatggacaaaaataagatatgagaatattattgatgaattttcataaggtggaattgatcttaatctactaacagagaagggtagacagtttgtg

SEQ ID NO: 350963 - DNA, 120 bp, Artificial Sequence
  ENSG00000139116_50 (sequence is synthesized)
ttaaatgttggcatttacttgtattgaccaaagttttgcagctctactatattctgtgctcaggactaaaatgctgttaatttttttttttttttccagtgctgtgcatatattctgtga

SEQ ID NO: 350964 - DNA, 120 bp, Artificial Sequence
  ENSG00000139116_51 (sequence is synthesized)
tgggaaacattgttgatgtcctaacagaaatatattttgatctattttcctatggagttgtttctattatgaccatttaattttgtttttatttaatagtagtatttccttcccttttat

SEQ ID NO: 350965 - DNA, 120 bp, Artificial Sequence
  ENSG00000139116_52 (sequence is synthesized)
ctaattttttatatgctgctaaatatattttaaatatactatgtttgcgaaccttggtagctatgatgagagctattatcatctgtggtgggaaaagctatgtaaataggtagattgtat

SEQ ID NO: 350966 - DNA, 120 bp, Artificial Sequence
  ENSG00000139116_53 (sequence is synthesized)
agagagactatcttgtgttgtgcctgtatgaatttttaaaagttgttgactggattttgcaaaaggatgtataatatttctgtctgctcagaatattaatttgtaaattctgcaagttta

SEQ ID NO: 350967 - DNA, 120 bp, Artificial Sequence
  ENSG00000139116_54 (sequence is synthesized)
atttttatgtagatggtataacatttgaaaatattgtcttatgtgattttttcccctgaaaatatttgcttgtaaatgaaaacttagctagggcttaaataaacatgttgctatgaaatt

SEQ ID NO: 350968 - DNA, 120 bp, Artificial Sequence
  ENSG00000139116_55 (sequence is synthesized)
cttgttagtgatcaggccaaccatgttcttgccagagcaggtgaaggaaatgaggagattagtaatatgattcatagttatataaaagaaatcgaagatctcaggtatagttcatgttct

SEQ ID NO: 350969 - DNA, 120 bp, Artificial Sequence
  ENSG00000139116_56 (sequence is synthesized)
cagccctttggttaggttaactttaggagattctttacttacctttcccttgatgtcatattccaagctgttttcctcctttctcttcccatattattctcctactcttactgctatgtc

SEQ ID NO: 350970 - DNA, 120 bp, Artificial Sequence
  ENSG00000139116_57 (sequence is synthesized)
gttgtttatataacacatgggtcatctttacatcccaccttgaattcttaactgcttaaatgtgtcttttcaactaaaccctatgtttcttggggaagaaggtgagacattggatgttac

SEQ ID NO: 350971 - DNA, 120 bp, Artificial Sequence
  ENSG00000139116_58 (sequence is synthesized)
tcagaccctatcttaaattcctttgggagagggacaatgttttgataatctttatatttccatagtacatagcccagtgccataaagcagaaactacaaaaatatcaaatttatgagaaa

SEQ ID NO: 350972 - DNA, 120 bp, Artificial Sequence
  ENSG00000139116_59 (sequence is synthesized)
gctccctaaagagcttcattgtttttaatttttttattttaaatttttgcaggtacatagtagatatatatttatggagtacatgagatgtttggatacaggcatgcaatgcacaataat

SEQ ID NO: 350973 - DNA, 120 bp, Artificial Sequence
  ENSG00000139116_60 (sequence is synthesized)
catatcatggagaatggggtagccatcccctcaagcaattatcctttgtgttgcaaacaatccaattatactcttttagtagttttaaaatgtacaattattatcaactatagtcaccct

SEQ ID NO: 350974 - DNA, 120 bp, Artificial Sequence
  ENSG00000139116_61 (sequence is synthesized)
gttgggctatcaaatagtaggtcttactttattctttctattatttttgtacccattaaacatccccacctctcccaacccccactgccctacctagcctctggtaaccgtccttctact

SEQ ID NO: 350975 - DNA, 120 bp, Artificial Sequence
  ENSG00000139116_62 (sequence is synthesized)
gcctctggtaaccgtccttctactctctatgtccatgagttcagttgtttgatttttagatcccataaataagtgagaatatccaatgtttctctttctgtgcctggcttattttactta

SEQ ID NO: 350976 - DNA, 120 bp, Artificial Sequence
  ENSG00000139116_63 (sequence is synthesized)
atgttgttgcaaatgatatgatctctttctttttttatggctaaatagtactccattgtgtgtatgtacattttctttatccattcactgttattttaaattctcattcttttaaaattt

SEQ ID NO: 350977 - DNA, 120 bp, Artificial Sequence
  ENSG00000139116_64 (sequence is synthesized)
tctttgagattgtcagttctttaagtttttgatctttttaacccattgtccctttagaatttcttttcattcaattattcctatcttcaatttttgtttgaaatctgctttcttagtatt

SEQ ID NO: 350978 - DNA, 120 bp, Artificial Sequence
  ENSG00000139116_65 (sequence is synthesized)
ttaggtggcatatatattacactttctccagcatgttcctttacacaccagtttgacatagaattatgttttcctgttatttgtcatttctgctccttccttatttgtcagaattcagta

SEQ ID NO: 350979 - DNA, 120 bp, Artificial Sequence
  ENSG00000139116_66 (sequence is synthesized)
cactcaaataattcccattgtggcttcgttaaaccttggagagatgaaattattaataagaaaatctagatgtattatagtctttgctctttgcagaatgcagctgttagcagatgcctg

SEQ ID NO: 350980 - DNA, 120 bp, Artificial Sequence
  ENSG00000139116_67 (sequence is synthesized)
attagttgatatactccatcactattattatttcacactttgtccttttgcttaaaagagagcagtctggattttattactaattacttataaagacttcttaaagttaggggaaaaaaa

SEQ ID NO: 350981 - DNA, 120 bp, Artificial Sequence
  ENSG00000139116_68 (sequence is synthesized)
tttatagatgagcaaaccaaagcctagagaggtaaagtaattcgatcaaggtcacacagctactgatagtaagctaagtatcaagatttcaagttgcagaacaactgaatattgaataca

SEQ ID NO: 350982 - DNA, 120 bp, Artificial Sequence
  ENSG00000139116_69 (sequence is synthesized)
aaaagcatagaatactaagcaatttaataaaaatgtattagaaatagaaatatatgaatcccacagaaataagaattgcccactttaaacgtgcagcaaaactgcatgtttccatgttaa

SEQ ID NO: 350983 - DNA, 120 bp, Artificial Sequence
  ENSG00000139116_70 (sequence is synthesized)
ggtacatcttattttaaagatttttattggcggtcaagtggtttttgcatgatcttttttgaaatgtatccatgcccacaaacacactaagtcttttattaaacattcctgattttaaaa

SEQ ID NO: 350984 - DNA, 120 bp, Artificial Sequence
  ENSG00000139116_71 (sequence is synthesized)
tatactgtgggcgttacaacacgtactgtgaatacagaatcagagtccttgtttcttcccctttttcagatgatgcagtgtttgaagttgggtgctttatcccggacaactgccagtacc

SEQ ID NO: 350985 - DNA, 120 bp, Artificial Sequence
  ENSG00000139116_72 (sequence is synthesized)
aacttcttttcttttggctttaaaaaaaaaagtatgcatgttgctaatttcttatttctattatttaaaatttatataaatttgatctctggttttcgaaataatttgctaggtgttgtc

SEQ ID NO: 350986 - DNA, 120 bp, Artificial Sequence
  ENSG00000139116_73 (sequence is synthesized)
tcccctaaggtattggagagttgaaataatttaagatgagatgtcctttgttgaattgctttgtcttgtctccaagttttaggatcattcttaagggttataatttttataaaggctgac

SEQ ID NO: 350987 - DNA, 120 bp, Artificial Sequence
  ENSG00000139116_74 (sequence is synthesized)
aaatacctaaattaaagttatacctataaaaccattatataactattatgtataaacagaaagtttagactcttaaatttgctctaaattacctatatcctagttttaagagtcctgtca

SEQ ID NO: 350988 - DNA, 120 bp, Artificial Sequence
  ENSG00000139116_75 (sequence is synthesized)
ctatatcctagttttaagagtcctgtcaggatagtaaatgtttgctgacttttaaagaaaaaagaaaataccaattacaagtttaatacattttgagctttcctaattttttaccttgaa

SEQ ID NO: 350989 - DNA, 120 bp, Artificial Sequence
  ENSG00000139116_76 (sequence is synthesized)
gcatattgcatattctgggatgagtgtatgccccaaaaatatttttattggtattattaaagatttgaaggaggaaatattctctttcctatgataatctgaacaaaaaaccttctattc

SEQ ID NO: 350990 - DNA, 120 bp, Artificial Sequence
  ENSG00000139116_77 (sequence is synthesized)
aaaataaatcttgcatagactatttttaattattatcttgaggacaaagaaagattttcccacatagtcctgtgtgtgtatgcgtatgtgtatgtgtgtgtgtacatatgtgtaccatgt

SEQ ID NO: 350991 - DNA, 120 bp, Artificial Sequence
  ENSG00000139116_78 (sequence is synthesized)
gtgcatgtgtgtgttttgatagttatattaatattagattagtcattcactggtaaagatttttaacgttatttttcaaactaatcctcacatgtgatctagcagataatttatggaatg

SEQ ID NO: 350992 - DNA, 120 bp, Artificial Sequence
  ENSG00000139116_79 (sequence is synthesized)
aatacatctctgcactgaggaatattgcccccccaaaagtggcacacactatatgatctgtaaataatacaaaataacaaactttccaaacttgaatagccatttttcataatattcttc

SEQ ID NO: 350993 - DNA, 120 bp, Artificial Sequence
  ENSG00000139116_80 (sequence is synthesized)
attttatgaggacatttccattgttttccattcagtatcccatctgctaccttttgttccagaattaattttaatgatggcagaactttcttgcatgtgcttgaggtggcctatgtaatt

SEQ ID NO: 350994 - DNA, 120 bp, Artificial Sequence
  ENSG00000139116_81 (sequence is synthesized)
aactgttggatctgctgttagagattgctaaccagaatagtttatggcttcattgcttttgtgataagatgagaatagaagaaatgcttttggtgaaggtagtgatgtagaactgaggtc

SEQ ID NO: 350995 - DNA, 120 bp, Artificial Sequence
  ENSG00000139116_82 (sequence is synthesized)
agattttaggaactaaatgtgttaggtatttagtctgtcagatgagtgagacttttggaacttcaagactaaatctgtggcctggaatccagattcagttccaggcagtcatctctatca

SEQ ID NO: 350996 - DNA, 120 bp, Artificial Sequence
  ENSG00000139117_0 (sequence is synthesized)
agtccgcccgagctgtggttgtgggcgccggacaagtccaaggcgcctcctcccaatatggacagccgctacaacagcactgcgggcatcggggacttgaaccagctgagcgctgccatc

SEQ ID NO: 350997 - DNA, 120 bp, Artificial Sequence
  ENSG00000139117_1 (sequence is synthesized)
ccggccacgcgggtggaggtgtccgtgtcctgcagaaatcttcttgacagagacacattttctaaatctgatccaatttgtgtcttatatgtacaaggagttggaaataaagaatggaga

SEQ ID NO: 350998 - DNA, 120 bp, Artificial Sequence
  ENSG00000139117_2 (sequence is synthesized)
gagtttggaagaactgaagtaattgataatactttaaatcctgattttgtaagaaagtttattctggactacttttttgaagaaagagagaatcttcgttttgacttgtatgatgttgat

SEQ ID NO: 350999 - DNA, 120 bp, Artificial Sequence
  ENSG00000139117_3 (sequence is synthesized)
tcaaagagccccaacttatccaaacatgactttctgggacaagtgttttgtacattgggagagatcgttggttcacagggaagtcgcctggaaaaaccaatagtaggaattccagggaag

SEQ ID NO: 351000 - DNA, 120 bp, Artificial Sequence
  ENSG00000139117_4 (sequence is synthesized)
aaatgtggtacaatcatacttacagcagaggaattaaactgttgcagggatgccgttttgatgcaattttgtgcgaacaaattggacaagaaggacttctttggaaaatcagatcctttc

SEQ ID NO: 351001 - DNA, 120 bp, Artificial Sequence
  ENSG00000139117_5 (sequence is synthesized)
cttgtattttatcgaagtaatgaagatggcagttttacaatttgtcacaagacagaagttgtcaaaaacactctaaatccagtatggcaagcattcaagatctcagtcagagcattatgt

SEQ ID NO: 351002 - DNA, 120 bp, Artificial Sequence
  ENSG00000139117_6 (sequence is synthesized)
aatggagactatgacagaacaatcaaagtagaggtgtatgactgggaccgagatggaagtcatgatttcattggagaatttacaacaagctatagggaactttctagagggcagtcacaa

SEQ ID NO: 351003 - DNA, 120 bp, Artificial Sequence
  ENSG00000139117_7 (sequence is synthesized)
ttcaacgtatatgaggtggtgaatcccaaaaagaaaggaaaaaagaaaaaatatactaattctggaacagtaactttactctctttcttggtagaaacagaagtttcattccttgactac

SEQ ID NO: 351004 - DNA, 120 bp, Artificial Sequence
  ENSG00000139117_8 (sequence is synthesized)
attaagggagggacgcaaatcaatttcacagtggctattgattttacagcatcaaacggcaaccctgctcagcccacttccctccactacatgaatccttaccaactgaatgcctatggt

SEQ ID NO: 351005 - DNA, 120 bp, Artificial Sequence
  ENSG00000139117_9 (sequence is synthesized)
atggcactaaaagcagtgggagaaattgttcaagattatgacagtgataaaatgtttccagctctaggatttggtgcaaaactgcctccagatggaaggatatctcacgaatttgctttg

SEQ ID NO: 351006 - DNA, 120 bp, Artificial Sequence
  ENSG00000139117_10 (sequence is synthesized)
aatgggaatcctcaaaacccctactgtgatggcattgagggggtcatggaggcttattacaggagtctgaaatctgtacaactatatgggcccaccaactttgctcctgtaattaatcat

SEQ ID NO: 351007 - DNA, 120 bp, Artificial Sequence
  ENSG00000139117_11 (sequence is synthesized)
gtagcaagatatgcttcttctgtaaaggatggctcccagtattttgtgcttctgattgttacagatggtgttatctcagatatggcccagactaaggagtccatagttaatgcctcaaaa

SEQ ID NO: 351008 - DNA, 120 bp, Artificial Sequence
  ENSG00000139117_12 (sequence is synthesized)
cttccaatgtcaataattatagtaggtgttggaccagcagaatttgatgcaatggtcgaattggatggagatgatgtaagagtctcctctagaggaaaatatgctgaaagagacattgtg

SEQ ID NO: 351009 - DNA, 120 bp, Artificial Sequence
  ENSG00000139117_13 (sequence is synthesized)
cagtttgtgccattcagggattatattgacagaagtggaaaccacatactgagcatggctagattggctaaagatgtcctagctgagatccctgagcagtttctctcctatatgagagcc

SEQ ID NO: 351010 - DNA, 120 bp, Artificial Sequence
  ENSG00000139117_14 (sequence is synthesized)
actgtgctctgaaatgctaatgtcaactacaaatcaaaagtgctgagttaatgctttgtgcctggtgctctgtaatgaaccaggcaatgagatagttttctcagtttggtttcagcagtt

SEQ ID NO: 351011 - DNA, 120 bp, Artificial Sequence
  ENSG00000139117_15 (sequence is synthesized)
aatgtgctttcttggatccaaatttaaatatcttcctaaaccaaaactgtaaatatggttgttgcatgagcaacagaaaaaattgtttaaatgcttgaagcaaagtatggatgtcttctc

SEQ ID NO: 351012 - DNA, 120 bp, Artificial Sequence
  ENSG00000139117_16 (sequence is synthesized)
taaatctttctttctttttttttttaacagaaacagctaatttccaatgtattgttgggaaaaagcacaaactgtgtttttaactcaaatattgtcttcgactgctatgtgtataggaaa

SEQ ID NO: 351013 - DNA, 120 bp, Artificial Sequence
  ENSG00000139117_17 (sequence is synthesized)
gcagtctctgtatcaatgtttacatgttactactttttaaatttcaatacttttataactgttcttaaaaataagagttttaaatactgaatcctttgtcttctaaattgcaatagctat

SEQ ID NO: 351014 - DNA, 120 bp, Artificial Sequence
  ENSG00000139117_18 (sequence is synthesized)
aatcacaagagcaatatctctttgaatgactgtctggacaaacacaattgcaaataagggaagggaaaaatgcttttctatttttcagtaactggattgtcttaagaaactacatctgct

SEQ ID NO: 351015 - DNA, 120 bp, Artificial Sequence
  ENSG00000139117_19 (sequence is synthesized)
taataaacaatttctcagcaatgtttgctgggtatgggagtttaagcccggcagatgtgtctcctggttgaacatgcatttttcatggagtttgggttctaaatttagactgcagttggt

SEQ ID NO: 351016 - DNA, 120 bp, Artificial Sequence
  ENSG00000139117_20 (sequence is synthesized)
ttgtattttgtaacactaagtagaaattataaaaagtcaaacattgtgatctataaatgcacagaaaatactttgtaaaaagtagcatccttatataataatgctatttagaaagactga

SEQ ID NO: 351017 - DNA, 120 bp, Artificial Sequence
  ENSG00000139117_21 (sequence is synthesized)
aaccaagactatttaactgtgaactatgtagcagatgttttaaactttttattccattatatcttgtctagatattttaattcaaagggatactggctctcttgatcggaatttcttgtt

SEQ ID NO: 351018 - DNA, 120 bp, Artificial Sequence
  ENSG00000139117_22 (sequence is synthesized)
atcaccattccacgttgccacacaaggtgcacaggctggaagtcttttgtgaaattcccagttaaatatatacaactatgtgacttagtgcacaacacatttgtgaaataacctactcct

SEQ ID NO: 351019 - DNA, 120 bp, Artificial Sequence
  ENSG00000139117_23 (sequence is synthesized)
atatactgacctgcctgtccacgaataattgtaaagggtttttgcatgtacagtttttacaagaattacagttttgtgaagttgtgtctaaattaaagcatttctttagaacaaatggcc

SEQ ID NO: 351020 - DNA, 120 bp, Artificial Sequence
  ENSG00000139117_24 (sequence is synthesized)
ttaaattctcacggaattcctggaaatgattgtgaattgccttcaaataatagaaaagtgtatttatttgtgtgtgtgtgtgtgtcaaaaatgtaactgctttataatattttttcctta

SEQ ID NO: 351021 - DNA, 120 bp, Artificial Sequence
  ENSG00000139117_25 (sequence is synthesized)
cctatatattctatttaatacttggtttatttctactgtacattgttttctttgtcccaagttgacctagggtgacttttataagcatgaaactattttactggaaagaaaaatatatac

SEQ ID NO: 351022 - DNA, 120 bp, Artificial Sequence
  ENSG00000139117_26 (sequence is synthesized)
tataactatgtaataattgttgatttttaattatgtattaaaatctttaaatcataactatttgctttgtacgtttcatgtatgaatgacaatagtttgatgatttcctttactgatctt

SEQ ID NO: 351023 - DNA, 120 bp, Artificial Sequence
  ENSG00000139117_27 (sequence is synthesized)
tagtttgatgatttcctttactgatcttaaatatttatgccactacagtgtattacctacagatttttaaatttagctttatttatcaacccaaaaaacaaataaataagatcaatattc

SEQ ID NO: 351024 - DNA, 120 bp, Artificial Sequence
  ENSG00000139117_28 (sequence is synthesized)
ggtgatggcttcacagggagatacatgagtcaacatttatcgaatgatggatgcactttaagtgcagttcattatatatgttatacctcactgaagtggaaacaaattggataaatcttc

SEQ ID NO: 351025 - DNA, 120 bp, Artificial Sequence
  ENSG00000139117_29 (sequence is synthesized)
aaagtgctcagcagaaaggaggccctagagtgggtagctcctttctgctgctggtcaaccccatccttaccaggcatccatcccatcggcccaggaatctgtctgcctcctgctgctctt

SEQ ID NO: 351026 - DNA, 120 bp, Artificial Sequence
  ENSG00000139117_30 (sequence is synthesized)
cttggcacctgggctcagcactgactttgctccaagattagagcggaagccaacagcagggagaagccaggcagtgggagtaggcacttctgagcctgtgagggcaggagctcttcctgg

SEQ ID NO: 351027 - DNA, 120 bp, Artificial Sequence
  ENSG00000139117_31 (sequence is synthesized)
gcccccaagggtacagggatgcctgagcttgcagctgtggtttgggcaactgcagctgtgtggggaaatgcgagggggcagctcctgcctgctccatggagcaggagtggcctgggaggt

SEQ ID NO: 351028 - DNA, 120 bp, Artificial Sequence
  ENSG00000139117_32 (sequence is synthesized)
ctgagtctgtagccgtggcttggatgactgcagtgcacctggggagctcctaccccaactcggaaaaggcagagctcccacttgtccctggctcccacacgctccccggagcatgcagcc

SEQ ID NO: 351029 - DNA, 120 bp, Artificial Sequence
  ENSG00000139117_33 (sequence is synthesized)
cacaatgccccaccgtccccaactctcaagtggccgacagtgggcagtccagaagctgggaccagactcatctgcccgagggcacagtaggagggacggagggatctcccaagagctccg

SEQ ID NO: 351030 - DNA, 120 bp, Artificial Sequence
  ENSG00000139117_34 (sequence is synthesized)
tgagagtgcttgttcctcaaattatctggaagaattgcggaattcttcaaatctcaagatcaaacattacctttctcctccaaacaacctgctccatatttaatagaataaccattgaac

SEQ ID NO: 351031 - DNA, 120 bp, Artificial Sequence
  ENSG00000139117_35 (sequence is synthesized)
catctgaaaaatttgtgatcttgccagtgacgcccaacatccttactggtgcatgttttcctgtagaatttgttcaattagggctttctgaaatacacaataaataatacgtggaatgaa

SEQ ID NO: 351032 - DNA, 120 bp, Artificial Sequence
  ENSG00000139117_36 (sequence is synthesized)
cttctctctacctgctctcagggataattaccagaaaaatggtcaaaaggctgacagcagcaggggagaagagattcataaaccttcaatacaatctgatagcctgttggtcttgactca

SEQ ID NO: 351033 - DNA, 120 bp, Artificial Sequence
  ENSG00000139117_37 (sequence is synthesized)
ggacagactgaggagaaagtgttcacaagatgccaggatcttatgtcagctctgaaatttcctttgactaaacatgctaaacaaaacaatacaaaacaaaacaataaaaaagattatttt

SEQ ID NO: 351034 - DNA, 120 bp, Artificial Sequence
  ENSG00000139117_38 (sequence is synthesized)
tttctttgtctgtaaaatgcacacttaatcaagttttgtatgagaaatgaatgaagacatgaagggatcaacatgctttctgtcttttcatagcacattttgctacttcatacatcttga

SEQ ID NO: 351035 - DNA, 120 bp, Artificial Sequence
  ENSG00000139131_0 (sequence is synthesized)
attcccttcgtgccgctaccaagatggcggcgcccatcttgcggtccttttcctggggccggtggtctggtaccctaaatctctcagtattgttgcccttggggctgcgtaaggcccact

SEQ ID NO: 351036 - DNA, 120 bp, Artificial Sequence
  ENSG00000139131_1 (sequence is synthesized)
cgggcgctcaggggttactggcagcgcagaaggctcgaggtctgttcaaggacttcttcccggagacggggacgaaaatagagctcccagagctcttcgaccgtggcacggcgagttttc

SEQ ID NO: 351037 - DNA, 120 bp, Artificial Sequence
  ENSG00000139131_2 (sequence is synthesized)
cccaaaccatttactgtggcttcgaccccacggcagactcgcttcatgtgggtcatctacttgcgctgctgggcctgtttcatttgcagcgagcgggccacaacgtgatcgcgctggtgg

SEQ ID NO: 351038 - DNA, 120 bp, Artificial Sequence
  ENSG00000139131_3 (sequence is synthesized)
gaggcgccacggcgcgcctgggagacccgagcggccgtaccaaggaacgcgaggcgctggagacagagcgcgtgcgagccaacgcgcgagctctgcgcctagggcttgaggccctggcgg

SEQ ID NO: 351039 - DNA, 120 bp, Artificial Sequence
  ENSG00000139131_4 (sequence is synthesized)
ctaatcaccagcagcttttcactgatgggcgctcctggggcagcttcactgtgctggacaactcggcctggtaccagaagcagcacctggtggacttcctggcggcagtggggggtcact

SEQ ID NO: 351040 - DNA, 120 bp, Artificial Sequence
  ENSG00000139131_5 (sequence is synthesized)
tccgcatggggacgctgctgagccggcagagcgtgcagctgcggctcaagagccccgagggcatgagcttggccgagttcttttaccaggtgctccaggcctatgacttctattacctct

SEQ ID NO: 351041 - DNA, 120 bp, Artificial Sequence
  ENSG00000139131_6 (sequence is synthesized)
tccagcgttatggatgcagggtccagctgggcggatctgatcaactaggcaacatcatgtccggatatgagttcatcaacaagttgactggagaagatgtatttggaatcaccgttcctc

SEQ ID NO: 351042 - DNA, 120 bp, Artificial Sequence
  ENSG00000139131_7 (sequence is synthesized)
taattacaagtacaactggagcaaagctgggaaagtctgctggcaacgctgtttggctaaacagagataagacatctccatttgaattgtatcaattctttgtcaggcaaccggacgatt

SEQ ID NO: 351043 - DNA, 120 bp, Artificial Sequence
  ENSG00000139131_8 (sequence is synthesized)
gagccagaaaggcggggtcctcagaaacgactggcagcagaagtaacaaagcttgttcatggacgagaaggattggattctgctaaaaggtgtacacaagccctttatcacagtagcata

SEQ ID NO: 351044 - DNA, 120 bp, Artificial Sequence
  ENSG00000139131_9 (sequence is synthesized)
gatgcactggaggtcatgtctgatcaggagttaaaagagttgtttaaagaagctccattttctgaattttttctcgatcctggaacaagtgtcctagatacttgccgcaaagcaaatgcc

SEQ ID NO: 351045 - DNA, 120 bp, Artificial Sequence
  ENSG00000139131_10 (sequence is synthesized)
attccagatggtccccgagggtatcgaatgataacagaaggcggagtcagcataaatcaccaacaagtaacaaatcctgagagtgttttaattgttggacaacatattctcaagaatgga

SEQ ID NO: 351046 - DNA, 120 bp, Artificial Sequence
  ENSG00000139131_11 (sequence is synthesized)
ctttccttacttaaaataggaaaaagaaatttctacattataaaatggcttcagttgtgatgaaaagtccttctggttgtccaaataaacttacccatcattcattctcaagacctctga

SEQ ID NO: 351047 - DNA, 120 bp, Artificial Sequence
  ENSG00000139131_12 (sequence is synthesized)
agggttggctccagaacttagacctttgcttatgcaaatcagaaaaacagaatggactaggactcagtgtgagtaacttcattatttttatgggccggttaataaatatttgtttaataa

SEQ ID NO: 351048 - DNA, 120 bp, Artificial Sequence
  ENSG00000139131_13 (sequence is synthesized)
tgggatgttttattttctgatgtacaaagcttgattaccatagaaaaccatgattttcagggttaatctctttttaaaattatacttcagaagagaaagaaatgctgctttcctatctta

SEQ ID NO: 351049 - DNA, 120 bp, Artificial Sequence
  ENSG00000139131_14 (sequence is synthesized)
agaagagaaagaaatgctgctttcctatcttacccttcctgctctcctttttgtagtgatgaggaacaatgaaaaagaggtagtgtaaggaattgtgaggctgggcatggtggctcacac

SEQ ID NO: 351050 - DNA, 82 bp, Artificial Sequence
  ENSG00000139131_15 (sequence is synthesized)
caacagggcatgtggttgcaggcacctgtaaccccagctactcaagaggctgagctgcgagaatcacttgaacccaggagat

SEQ ID NO: 351051 - DNA, 120 bp, Artificial Sequence
  ENSG00000139132_0 (sequence is synthesized)
attatccttgctgggctgggaagtggggaaagcaggggagcctgtgctgggtgagattatctgcaatggaccgggttaatgggaggcttgctttggctcgctggaagaacaaatgaaggg

SEQ ID NO: 351052 - DNA, 120 bp, Artificial Sequence
  ENSG00000139132_1 (sequence is synthesized)
agttttacttcaaccatttgtgacttctggccaagaggaataaattcagcttttataaggcagcagtacctgtccaaagatcgctttagttccaccttgctccacaagcagcacaaccac

SEQ ID NO: 351053 - DNA, 120 bp, Artificial Sequence
  ENSG00000139132_2 (sequence is synthesized)
actggttggtgagaatgtatctgaagaagaggctcagggaataaatgggaacaggccagcaaaacactcagctgcaagtccaaagccacaagtgcctccaaagccattacacctgcagaa

SEQ ID NO: 351054 - DNA, 120 bp, Artificial Sequence
  ENSG00000139132_3 (sequence is synthesized)
ttcaccttcgtccaatatacaccaaacccccaggcataaagctttacctagtgcaaaaccaaggatggaggaaattaaacctgcctctgcttcttgtgtctcaaaagaaaaacccagtaa

SEQ ID NO: 351055 - DNA, 120 bp, Artificial Sequence
  ENSG00000139132_4 (sequence is synthesized)
ggtatcagatctcatcagtcgctttgaaggaggcagctcattatcaaattatagtgatttgaagaaagagtctgctgtgaacctaaatgctcctagaaccccaggaaggcatggattgac

SEQ ID NO: 351056 - DNA, 120 bp, Artificial Sequence
  ENSG00000139132_5 (sequence is synthesized)
aaccacacctcaacaaaaactcctctcccagcacttgccacagaggcagggaaatgatacagataagactcagggtgcacagacttgtgtggccaacggtgtaatggcagcacaaaacca

SEQ ID NO: 351057 - DNA, 120 bp, Artificial Sequence
  ENSG00000139132_6 (sequence is synthesized)
gatggaatgtgaggaggagaaagctgccactcttagctcagatacttctattcaagcttctgaacccttgcttgatacgcacatagtgaatggagaaagagatgaaactgccacagctcc

SEQ ID NO: 351058 - DNA, 120 bp, Artificial Sequence
  ENSG00000139132_7 (sequence is synthesized)
tgcatcacccacaacagacagctgtgatggaaatgcttctgacagtagctacaggactccaggcataggcccagtgctccccctagaagaaagaggggcagaaacagaaaccaaggtaca

SEQ ID NO: 351059 - DNA, 120 bp, Artificial Sequence
  ENSG00000139132_8 (sequence is synthesized)
agagagggaaaatggggaaagccctctggaactggagcagctggaccagcaccatgagatgaaggagactaatgagcaaaaacttcacaaaatagccaatgaacttttgcttactgaaag

SEQ ID NO: 351060 - DNA, 120 bp, Artificial Sequence
  ENSG00000139132_9 (sequence is synthesized)
agcttatgtcaaccgacttgacctcttagatcaggtattttattgcaaactgttggaagaagcaaaccgaggctcgtttccagcagagatggtgaataaaatcttttctaatatttcatc

SEQ ID NO: 351061 - DNA, 120 bp, Artificial Sequence
  ENSG00000139132_10 (sequence is synthesized)
aataaatgccttccatagtaaattcctcttgccagagctggagaaacgaatgcaagaatgggaaactactcctagaattggagacatccttcagaaattggcaccattccttaagatgta

SEQ ID NO: 351062 - DNA, 120 bp, Artificial Sequence
  ENSG00000139132_11 (sequence is synthesized)
tggagaatatgtgaaaggatttgataatgcaatggaattggttaaaaacatgacagaacgtattccccagttcaaatcagtggttgaagaaattcagaaacagaaaatctgtgggagctt

SEQ ID NO: 351063 - DNA, 120 bp, Artificial Sequence
  ENSG00000139132_12 (sequence is synthesized)
aactttgcagcatcacatgctagaacctgttcagcggattccccggtatgagatgctccttaaggactatctaaggaaattgcctcctgattccctggactggaatgatgctaaaaaatc

SEQ ID NO: 351064 - DNA, 120 bp, Artificial Sequence
  ENSG00000139132_13 (sequence is synthesized)
acttgaaattatatctacagcagcaagccattctaatagtgcaataaggaaaatggagaacctaaagaaactcttagagatttatgaaatgttgggagaagaagaagacattgtaaaccc

SEQ ID NO: 351065 - DNA, 120 bp, Artificial Sequence
  ENSG00000139132_14 (sequence is synthesized)
ttcaaatgaactaataaaagaaggacagatcctcaaactagctgctcggaacacttcagcacaagaacgctaccttttcttattcaacaacatgttgctgtactgtgtgcccaaattcag

SEQ ID NO: 351066 - DNA, 120 bp, Artificial Sequence
  ENSG00000139132_15 (sequence is synthesized)
cttggtaggctctaaattcacagttcgaaccagggttggcattgatggaatgaaaattgtagagactcaaaatgaagaatatccacatactttccaggtgtctgggaaagagagaacact

SEQ ID NO: 351067 - DNA, 120 bp, Artificial Sequence
  ENSG00000139132_16 (sequence is synthesized)
ggaactgcaggccagttctgcgcaagacaaagaagaatggatcaaggcccttcaagaaaccatcgatgcttttcatcaaaggcatgaaaccttcagaaatgcaattgcaaaggataatga

SEQ ID NO: 351068 - DNA, 120 bp, Artificial Sequence
  ENSG00000139132_17 (sequence is synthesized)
cattcactcagaggtttctactgctgagctagggaaaagagccccaagatggatccgagataatgaagtgacaatgtgtatgaaatgtaaagaacctttcaatgcactgacacgaaggag

SEQ ID NO: 351069 - DNA, 120 bp, Artificial Sequence
  ENSG00000139132_18 (sequence is synthesized)
gcatcattgtcgagcatgtggatatgtggtttgttggaaatgctccgactacaaagctcaacttgaatatgatggtggtaaattgagcaaagtttgtaaagactgttatcaaatcataag

SEQ ID NO: 351070 - DNA, 120 bp, Artificial Sequence
  ENSG00000139132_19 (sequence is synthesized)
tggattcacagacagtgaagaaaagaaaagaaaaggaattttagagattgaatcagcagaagtatctggaaacagtgtggtgtgcagctttcttcagtatatggagaagtcaaaaccttg

SEQ ID NO: 351071 - DNA, 120 bp, Artificial Sequence
  ENSG00000139132_20 (sequence is synthesized)
gcagaaagcttggtgtgtgatccccaagcaagaccctcttgtgctgtacatgtatggtgccccccaggacgtcagagcccaggccaccattccacttctgggctatgtggtggatgaaat

SEQ ID NO: 351072 - DNA, 120 bp, Artificial Sequence
  ENSG00000139132_21 (sequence is synthesized)
gccaaggagcgcagacctgccacacagtttcaaactgacccagtctaagtccgtgcacagctttgctgcagacagtgaggaactgaagcagaagtggctgaaagtcatccttttagctgt

SEQ ID NO: 351073 - DNA, 120 bp, Artificial Sequence
  ENSG00000139132_22 (sequence is synthesized)
cacaggtgagacaccaggtggtccaaatgagcatccagccaccttggatgatcatcctgaacctaagaaaaaatcagaatgctgaactcctccaggaccagccatggtgtggaggtctca

SEQ ID NO: 351074 - DNA, 120 bp, Artificial Sequence
  ENSG00000139132_23 (sequence is synthesized)
ggacttacagctcaagacattcccagctcttcttacacatctgctagcactttatgttgaaaaatataggcccataaatgcatcttttgaggactattttcctatgtttatgtactctta

SEQ ID NO: 351075 - DNA, 120 bp, Artificial Sequence
  ENSG00000139132_24 (sequence is synthesized)
gtgaaattagtgtgcagagtcattctaccgataaagttttgaaataatgtgaaaactggagcattttttgagctattccttgaatatgtgcttttttgtcttgaagaaatggtgtatcaa

SEQ ID NO: 351076 - DNA, 120 bp, Artificial Sequence
  ENSG00000139132_25 (sequence is synthesized)
ttgattctgtcaccgtcaggttagaatgagcacttccatttaagaaatcctttcatgtcttcttctctttcacatgtaggacctggaacagtttgaaagatatacctccatgttgccaaa

SEQ ID NO: 351077 - DNA, 120 bp, Artificial Sequence
  ENSG00000139132_26 (sequence is synthesized)
atagatccatggtgaaaaatacagggacagttgaggctattgtattaacttatttaatttagtttataaatctctagctgcataaatgatgtctgttcttttaaaacaaaagaaaaagga

SEQ ID NO: 351078 - DNA, 120 bp, Artificial Sequence
  ENSG00000139132_27 (sequence is synthesized)
aggacaaattgttggtgttcagatttccgatttataaagaaaagataacttgtttttgtagaaatactcctaagaatgtcttaagtatatagcaattatgtatatatagtattaaatata

SEQ ID NO: 351079 - DNA, 120 bp, Artificial Sequence
  ENSG00000139132_28 (sequence is synthesized)
ttatacatgcttttaggttcacattcatctctaatttattttttaaatataaagcatggtttatcgtggaattgagcaatgttctaaactgaagaaatgttttggtgatttatgttttgc

SEQ ID NO: 351080 - DNA, 120 bp, Artificial Sequence
  ENSG00000139132_29 (sequence is synthesized)
tgattggcatttgagggtattgatatttttataataagcggtaatttatgtggcatgggatatatttgtgaattccaacagtacttttaaagtaccattttttgtttctgtgcctattta

SEQ ID NO: 351081 - DNA, 120 bp, Artificial Sequence
  ENSG00000139132_30 (sequence is synthesized)
aaacagtgcctctcttagaaggtgctattaatataagatgagggttcagttaatgcttcagtcttgattattctaagattaaagtgcattttggtcactgggacagtcaaagtcatacag

SEQ ID NO: 351082 - DNA, 120 bp, Artificial Sequence
  ENSG00000139132_31 (sequence is synthesized)
gttattttaccgtttacaatcctataattattgcagtagttaacatcagcatgtacaaacattttcaccaaaacccaaactttatgagacacctgaccttttacagaactaggatatgtg

SEQ ID NO: 351083 - DNA, 120 bp, Artificial Sequence
  ENSG00000139132_32 (sequence is synthesized)
gaaaccacatttatcgtaatgtttttcttttccgtaagataatcgagcatggttaaataaggtctctatataatgaacacttaagataactgtatgggccttttcctttgtcggaatgaa

SEQ ID NO: 351084 - DNA, 120 bp, Artificial Sequence
  ENSG00000139132_33 (sequence is synthesized)
acaaaatccacatgtgataacctatgtttggggtgggggctggtcacatgattccttgtcatgaaggctgctcttcactcttttgtacttgtgattaaaatctcacactaagtttactat

SEQ ID NO: 351085 - DNA, 120 bp, Artificial Sequence
  ENSG00000139132_34 (sequence is synthesized)
gctagaaatctacaagaatgatcccactatctttagtatgtaaggattacaccttagatatagaatagaatttgagactgccacacatttattcaggccttgttactttaagaaatatct

SEQ ID NO: 351086 - DNA, 120 bp, Artificial Sequence
  ENSG00000139132_35 (sequence is synthesized)
tattttttccaccccaaaggagcaagtgaaccaattattgctgacataataggttcccttcctccataaaaggattatcagccatgatcattaacattaaaccaaatagatggagccaaa

SEQ ID NO: 351087 - DNA, 120 bp, Artificial Sequence
  ENSG00000139132_36 (sequence is synthesized)
aagagataaaagtagcttcttaggccctattaaatcagggaaagactagaagaaaatttacattgcttctcttttttaatggccagcggggtatgtgtgtgatgtatactcagagtggtt

SEQ ID NO: 351088 - DNA, 120 bp, Artificial Sequence
  ENSG00000139132_37 (sequence is synthesized)
ttttggaaaattaaactgtagctatagatgatgctttggttttcttaatctcaagaaaagagaagcaatggaaatacagaatgattaactggggaagaggacttttgtaagtgtgactag

SEQ ID NO: 351089 - DNA, 120 bp, Artificial Sequence
  ENSG00000139132_38 (sequence is synthesized)
aacaatggtaatgtatgggccaatgggaagatttataagtcagattatttttgaaaactatttttaaaagcaagaagactacactttccctaccaaaacagaagtaacatggacacactt

SEQ ID NO: 351090 - DNA, 120 bp, Artificial Sequence
  ENSG00000139132_39 (sequence is synthesized)
aagttttggctcaataaatatcaatgttatttaacttagatcattgaaagaatactcatgtaaagataatgtttattatcatgctcttaacagtcattatctttaattttttaaatgaga

SEQ ID NO: 351091 - DNA, 120 bp, Artificial Sequence
  ENSG00000139132_40 (sequence is synthesized)
agcattaatactagaagagaatttctggttatccggtcaccatattcactttccaccccacattcttcagctaaacgcaaagagaagcagtgaaacagccttacccgcttctctcttatt

SEQ ID NO: 351092 - DNA, 120 bp, Artificial Sequence
  ENSG00000139132_41 (sequence is synthesized)
aaagaatcactgatgtttttactcaatgaaaggtaaagtaatacccttagccatttattaaacaattcaaccaagagacctcaaagtgtgattgatgataagaataatcaatgccttttc

SEQ ID NO: 351093 - DNA, 120 bp, Artificial Sequence
  ENSG00000139132_42 (sequence is synthesized)
ccttccaacatacttgagcagtcatgacaacctaaaaatatcattggttgctttcccattaaaaccaacgttccctgtgggtcttaattctttattttcactcatttggtgctttccaag

SEQ ID NO: 351094 - DNA, 120 bp, Artificial Sequence
  ENSG00000139132_43 (sequence is synthesized)
tcatcttttctttaaagtgcccttcctccaaactttaaaaagtacttccttgacaaaatttctattcattataaaacatttcaatattttaagcttaaattttgcttttgctgaaagcct

SEQ ID NO: 351095 - DNA, 120 bp, Artificial Sequence
  ENSG00000139132_44 (sequence is synthesized)
accatttggcgtgttaagtatgaaatatagtgcagacttttatcttggttttaagtggggctcaataaaaaacaccagccacttttgtaataatggcatcacagtgtcatcatgtatgca

SEQ ID NO: 351096 - DNA, 120 bp, Artificial Sequence
  ENSG00000139132_45 (sequence is synthesized)
agcaataaaactctttagggtatggttttatactgaaaatttaatatgaaggccccttcccacaagaatatagataattattaactttctagatgtgatacggtaattcgaattgcagag

SEQ ID NO: 351097 - DNA, 120 bp, Artificial Sequence
  ENSG00000139132_46 (sequence is synthesized)
tataaggaagggaaatgggaaggggcatcattccttggattttaaataactatcaagaacatttttactttaacaaagaaaatggatagaaaaagcacattttgttttccctgaagttta

SEQ ID NO: 351098 - DNA, 120 bp, Artificial Sequence
  ENSG00000139132_47 (sequence is synthesized)
atttgacatcaggtttgtgtacttatcttcactaggtgacttaacttaccccaatttttttaaaaattattaaactttttacagaaactaaccttttaaatgtaccctttccccatatat

SEQ ID NO: 351099 - DNA, 120 bp, Artificial Sequence
  ENSG00000139132_48 (sequence is synthesized)
atatacgcacacgtttggattttttttttttaagaacacttgttctagttataaatatataaagaaaacgataaagtttgtggtactgcagggttgttaaagattctttgatgccttcta

SEQ ID NO: 351100 - DNA, 120 bp, Artificial Sequence
  ENSG00000139132_49 (sequence is synthesized)
aaaacttttgtcaaaaatacttttgagttcacaattctgttttacttttccttgtccttactttttggaaacagggtggttgcttttatttgttttctggttatattcaaagccttaagt

SEQ ID NO: 351101 - DNA, 120 bp, Artificial Sequence
  ENSG00000139132_50 (sequence is synthesized)
tcttaatctgagcatattgtctgtgataaatttctgatgatctttctggactagatacaacctgagtagcaagcaccaaccggagcaagtaaacttctagggaacaagcgtcttgggttt

SEQ ID NO: 351102 - DNA, 120 bp, Artificial Sequence
  ENSG00000139132_51 (sequence is synthesized)
tataggtatctttgctataatgcagaatagattaatgaagatttcctatatcatatgatatttgtgttagtgggtctaagattaagcacatgatatttataagctaaaattaactcaaaa

SEQ ID NO: 351103 - DNA, 120 bp, Artificial Sequence
  ENSG00000139132_52 (sequence is synthesized)
gtcaagaatgtcttaatgttttcattcttaaattttgtattctccaagaatgtattagtatatgaactgtggccaaccagttcctattcttcagactgtattgacatctgtagtggatca

SEQ ID NO: 351104 - DNA, 120 bp, Artificial Sequence
  ENSG00000139132_53 (sequence is synthesized)
tgttgcttcttcattcttaccaattttattagaatcaaacttcttgttatttgcatactattatctactatagattctcagctttagaaaatgactatgatacataaagaccactaggtc

SEQ ID NO: 351105 - DNA, 120 bp, Artificial Sequence
  ENSG00000139132_54 (sequence is synthesized)
aacttaaaaaaccctttctgtgaatttatacatgtatgtatatatgtaaaaacactgttgatttgcaattctgtctttccatagaaatgaactttttctatcgaaattgtttaacttaaa

SEQ ID NO: 351106 - DNA, 120 bp, Artificial Sequence
  ENSG00000139132_55 (sequence is synthesized)
tattttaacataaattatttacatggatctttatgtataattcatccttatatataccccttaatcacgtagtcatgagaagataactttgctttctttacagaaagggcagagaggaat

SEQ ID NO: 351107 - DNA, 120 bp, Artificial Sequence
  ENSG00000139132_56 (sequence is synthesized)
aagataagaaactgaaacaagcaagaatgaagagagatgtgggggagagactgctggtctccagaccacagcaatgtgttttaagataagatgaaatattttaactgcagaagggatata

SEQ ID NO: 351108 - DNA, 120 bp, Artificial Sequence
  ENSG00000139132_57 (sequence is synthesized)
aaatctatgtaattacatgctgatgggatccattgcacccaggtttttgaccttggcctgtaaatgctagactatgatatcttgttattctttttctcctttgggcttttaaaaaataat

SEQ ID NO: 351109 - DNA, 120 bp, Artificial Sequence
  ENSG00000139132_58 (sequence is synthesized)
ttcattctcagatcattttctgtactgtttactgaggcaaaaaaaaaaaaaatctgaagtcaatcatggtcttctactttctggactgagcatttggcagaatgcagtatcttttcctgt

SEQ ID NO: 351110 - DNA, 120 bp, Artificial Sequence
  ENSG00000139132_59 (sequence is synthesized)
attttgacatgaaatagcacatggcttctacaagatagttttaacttgttggggtcaccgggagttatatgatggtcaaccccttttcccaaaattcattgtggtagttttagtggaaaa

SEQ ID NO: 351111 - DNA, 120 bp, Artificial Sequence
  ENSG00000139132_60 (sequence is synthesized)
cgtaaatcaagaaatctcatatcatactttaataaataaataccaaatacatagtgacatataggtttgggaagaaactagtctgtggggaccattataagagaatcacattatatatta

SEQ ID NO: 351112 - DNA, 120 bp, Artificial Sequence
  ENSG00000139132_61 (sequence is synthesized)
cacagtatatggatattggaatgtatcacttgtggggggttctcttcattagcaaaacagtcatgtctgtctgtatataagacttttttttttttaaccaaactagcatttcattttgtg

SEQ ID NO: 351113 - DNA, 85 bp, Artificial Sequence
  ENSG00000139132_62 (sequence is synthesized)
gacttttttttttttaaccaaactagcatttcattttgtgagtgacaattgacattttaaaataagcataccttgggaggccgag

SEQ ID NO: 351114 - DNA, 77 bp, Artificial Sequence
  ENSG00000139132_63 (sequence is synthesized)
tggtgaaaccctgtctctactaaataaaaataaaacaaaataagtgtatctgggccaggcacgttcgagaccagcct

SEQ ID NO: 351115 - DNA, 120 bp, Artificial Sequence
  ENSG00000139132_64 (sequence is synthesized)
ctccggcctgggtgacagagcaagacttcgactcaaaaaataaaataagcgtatctggatttttcttttgaattcttgactgataagtttgagaatgtatgtttttggaattttacagtt

SEQ ID NO: 351116 - DNA, 120 bp, Artificial Sequence
  ENSG00000139132_65 (sequence is synthesized)
aagtttgagaatgtatgtttttggaattttacagttgactcaagtgtgaaagtatacacaagtaatttttcttttctagctatgtgaatgtaaaatacttgcagataatgtatatattgt

SEQ ID NO: 351117 - DNA, 120 bp, Artificial Sequence
  ENSG00000139132_66 (sequence is synthesized)
ttgtgtaatatatgtatatttggtcataaaagcagataattggaaacattgtaaaattaagcactttaattcctattaaatattaaacatttgtatcttgtaaataaacacatccttaaa

SEQ ID NO: 351118 - DNA, 120 bp, Artificial Sequence
  ENSG00000139132_67 (sequence is synthesized)
agtgcattggtctgagctcctggcagatcctgtgtaatcttcagcctccctgaagctttacagccaggagtgagattttatcacatgaactttaaaagagtaaagccaaatatcttttta

SEQ ID NO: 351119 - DNA, 120 bp, Artificial Sequence
  ENSG00000139132_68 (sequence is synthesized)
agttagttctttatcatgttgaacactagatgtgtatgtgtctagtgtctaaatacagaatgcctatagtttctaccaacaaattatggatccaaatccttgctccagaagcaggaaata

SEQ ID NO: 351120 - DNA, 120 bp, Artificial Sequence
  ENSG00000139132_69 (sequence is synthesized)
gtgacttctggccaagaggaataaattcagcttttataagtgagatgagcatgaagcggtgcaaaacttagattgaacaagagagcaaagggaagcaaccatgaaaaagacagtctacag

SEQ ID NO: 351121 - DNA, 120 bp, Artificial Sequence
  ENSG00000139132_70 (sequence is synthesized)
tgagactagctcatgagcagggaaaaccctgcctattcgattgttgtcttaaaactctttatttattgcacccctgaaatgtatgaatcagatcacccacactggcagttaaacgatttt

SEQ ID NO: 351122 - DNA, 120 bp, Artificial Sequence
  ENSG00000139132_71 (sequence is synthesized)
caagctctggctgctgattagcatttcccctatgctctaagcagatatttcactttttcttttcatgtagtttctgttaatatctctgttgtaatttcaggagtcagaacagtgtggaaa

SEQ ID NO: 351123 - DNA, 120 bp, Artificial Sequence
  ENSG00000139132_72 (sequence is synthesized)
ctttaatataggaaatccacaaatgtattgtttttacatagaaagaaaatgttccttgttgctctagatgttggtgctgtatccctaatacttacgggccaagcaagaagaaattgtata

SEQ ID NO: 351124 - DNA, 120 bp, Artificial Sequence
  ENSG00000139132_73 (sequence is synthesized)
atctttgttgttcagaagtttctaatagaataaataggcctgtaagatgaacttgccactagtaaatgttacttttaaggacatgaatatggaagtattaaattattcaacagattataa

SEQ ID NO: 351125 - DNA, 120 bp, Artificial Sequence
  ENSG00000139132_74 (sequence is synthesized)
aaaacgtacaatcatggcagaaggggaagaggcacatcttacatggtggcaagcgagagtgagcaagtgtatgaaggaagaactgtcagacacttacaaaaccatcagatctcatgagaa

SEQ ID NO: 351126 - DNA, 120 bp, Artificial Sequence
  ENSG00000139132_75 (sequence is synthesized)
ggtagcggctttgagtgagtgcgggagctgcagataccgagacgctgcgactgccgcaggagtcgccgcagccaaactcgccgcgacgccgggagggagcgtaccgggaaggagagggag

SEQ ID NO: 351127 - DNA, 120 bp, Artificial Sequence
  ENSG00000139132_76 (sequence is synthesized)
aggaggcactcgctgaggagacgccgcagtagagggcgcccccggagtcgcgccgaacctgggcatgcaggcgacgccccccaggggccgctcgcggctggacgggagcgggaggagtcg

SEQ ID NO: 351128 - DNA, 120 bp, Artificial Sequence
  ENSG00000139132_77 (sequence is synthesized)
gggagcggcggtcgagcccggcaggatgagcgacgagggcggctccaacttcaggcgggtggcgatccggcggaagtccaacccctcctacctgccgcccggggtgccccggccctggag

SEQ ID NO: 351129 - DNA, 120 bp, Artificial Sequence
  ENSG00000139132_78 (sequence is synthesized)
caggcccgcgtcgcacctgggacgtgtagggaccgctgccttcaagggccaggtgccctcaggagccacaggcagcagtacctgtccaaagatcgctttagttccaccttgctccacaag

SEQ ID NO: 351130 - DNA, 120 bp, Artificial Sequence
  ENSG00000139132_79 (sequence is synthesized)
agatcactaaaaaccaggggaaccagctgggggaaaatgaggcatgtaattaggaggcgacatgactcctcacccttcttccagaagtgcctccaaagccattacacctgcagaattcac

SEQ ID NO: 351131 - DNA, 120 bp, Artificial Sequence
  ENSG00000139132_80 (sequence is synthesized)
aaccgacttgacctcttagatcagaaaatagagtggaggtgaatttagaaaattaacaaccatctggacattatgaaggaatagacctccttctgcctacatgtaacagaatggcaatta

SEQ ID NO: 351132 - DNA, 120 bp, Artificial Sequence
  ENSG00000139132_81 (sequence is synthesized)
tctgtctgaagggacagatgcccttgggggcaaggggaagcgagtggacagcggactcaaaatctgtagaacaagagttcaggcagtttcactgtttcattaaaattgaaaaataatgag

SEQ ID NO: 351133 - DNA, 120 bp, Artificial Sequence
  ENSG00000139133_0 (sequence is synthesized)
agtcccgcctagcgcgcccatttcgagcccaagtttccagctcgggtttccaggctcagaattttccaggagtaggttcttgggcagtggctgtgggagctggaatggcgcagctggaag

SEQ ID NO: 351134 - DNA, 120 bp, Artificial Sequence
  ENSG00000139133_1 (sequence is synthesized)
gttactatttctcggccgccttgagctgtacctttttagtatcctgcctcctcttctccgccttcagccgggcgttgcgagagccctacatggacgagatcttccacctgcctcaggcgc

SEQ ID NO: 351135 - DNA, 120 bp, Artificial Sequence
  ENSG00000139133_2 (sequence is synthesized)
agcgctactgtgagggccatttctccctttcccagtgggatcccatgattactacattacctggcttgtacctggtgtcaattggagtgatcaaacctgccatttggatctttggatggt

SEQ ID NO: 351136 - DNA, 120 bp, Artificial Sequence
  ENSG00000139133_3 (sequence is synthesized)
ctgaacatgttgtctgctccattgggatgctcagatttgttaatcttctcttcagtgttggcaacttctatttactatatttgcttttctgcaaggtacaacccagaaacaaggctgcct

SEQ ID NO: 351137 - DNA, 120 bp, Artificial Sequence
  ENSG00000139133_4 (sequence is synthesized)
caagtatccagagagtcttgtcaacattaacactagcagtatttccaacactttatttttttaacttcctttattatacagaagcaggatctatgttttttactctttttgcgtatttga

SEQ ID NO: 351138 - DNA, 120 bp, Artificial Sequence
  ENSG00000139133_5 (sequence is synthesized)
tgtgtctttatggaaatcataaaacttcagccttccttggattttgtggcttcatgtttcggcaaacaaatatcatctgggctgtcttctgtgcaggaaatgtcattgcacaaaagttaa

SEQ ID NO: 351139 - DNA, 120 bp, Artificial Sequence
  ENSG00000139133_6 (sequence is synthesized)
cggaggcttggaaaactgagctacaaaagaaggaagacagacttccacctattaaaggaccatttgcagaattcagaaaaattcttcagtttcttttggcttattccatgtcctttaaaa

SEQ ID NO: 351140 - DNA, 120 bp, Artificial Sequence
  ENSG00000139133_7 (sequence is synthesized)
acttgagtatgcttttgcttctgacttggccctacatccttctgggatttctgttttgtgcttttgtagtagttaatggtggaattgttattggcgatcggagtagtcatgaagcctgtc

SEQ ID NO: 351141 - DNA, 120 bp, Artificial Sequence
  ENSG00000139133_8 (sequence is synthesized)
ttcattttcctcaactattctactttttttcatttactctctttttttcctttcctcatctcctgtctcctagcaaaattaagacttttctttccttagtttggaaacgtagaattctgt

SEQ ID NO: 351142 - DNA, 120 bp, Artificial Sequence
  ENSG00000139133_9 (sequence is synthesized)
tttttgtggttaccttagtctctgtgtttttagtttggaaattcacttatgctcataaatacttgctagcagacaatagacattatactttctatgtgtggaaaagagtttttcaaagat

SEQ ID NO: 351143 - DNA, 120 bp, Artificial Sequence
  ENSG00000139133_10 (sequence is synthesized)
atgaaactgtaaaatatttgttagttccagcctatatatttgctggttggagtatagctgactcattgaaatcaaagtcaattttttggaatttaatgtttttcatatgcttgttcactg

SEQ ID NO: 351144 - DNA, 120 bp, Artificial Sequence
  ENSG00000139133_11 (sequence is synthesized)
ttatagttcctcagaaactgctggaatttcgttacttcattttaccttatgtcatttataggcttaacatacctctgcctcccacatccagactcatttgtgaactgagctgctatgcag

SEQ ID NO: 351145 - DNA, 120 bp, Artificial Sequence
  ENSG00000139133_12 (sequence is synthesized)
acaagacttttcagtggccaaatagtcaggacattcaaaggtttatgtggtaatatcagtgatatttcgaactgtgaaaatggacttaataattagaccatttctacaaagaacaactga

SEQ ID NO: 351146 - DNA, 120 bp, Artificial Sequence
  ENSG00000139133_13 (sequence is synthesized)
ataggtggaaaacatggaatttcttttaggtgcagtggtggtcttcaaattacattagttttttttatatatattttaaacatatgtaagaaattaagtggcaaagaactgagaaagctt

SEQ ID NO: 351147 - DNA, 120 bp, Artificial Sequence
  ENSG00000139133_14 (sequence is synthesized)
aagacctgcttcaaaagcctgaaaaatggaaaaataaaattgttttcagatatctcatatcactctcataatgttggccccttaaaaagcttgggaatgttttgtatgtacaagtttatt

SEQ ID NO: 351148 - DNA, 120 bp, Artificial Sequence
  ENSG00000139133_15 (sequence is synthesized)
gggaatgttttgtatgtacaagtttattaaaactgggtatgcttcatattactggaatgaatttattctcttcagagagaaatattaggttagtgcaaaagtaattgtggtttttgccat

SEQ ID NO: 351149 - DNA, 120 bp, Artificial Sequence
  ENSG00000139133_16 (sequence is synthesized)
tttttaccaacctaataacaatgtattagcaaatatttacaaatggtcaggtgatattcttgattgaaaagttgcttaacatttcagtaatataattttaattctaagtcaaaatacaaa

SEQ ID NO: 351150 - DNA, 120 bp, Artificial Sequence
  ENSG00000139133_17 (sequence is synthesized)
tgcatagatagtaaatgataaagtagagactcatatatgcctgtctagacatcaaattgttggttattgtttacaatctagaaatgatgaagctctttcactaattcctaatatgaaatg

SEQ ID NO: 351151 - DNA, 120 bp, Artificial Sequence
  ENSG00000139133_18 (sequence is synthesized)
tatgatggccaaagacaaattgtattgattataatcctttaaaagggggatttcctttctgaaatacatattgtattagcttcccagggcttccataacaaatgacgacaaacttgggtg

SEQ ID NO: 351152 - DNA, 120 bp, Artificial Sequence
  ENSG00000139133_19 (sequence is synthesized)
cttacaacaattttcctcacagtctggaggccagaagtctaaaatcaaagtgtcagcagagttggttccttctggaggctctaaggaagaatccataaacagacattctatgtctgtttc

SEQ ID NO: 351153 - DNA, 120 bp, Artificial Sequence
  ENSG00000139133_20 (sequence is synthesized)
ctaatatcttgtggctgtgtgcaattcttggagttctttggcttctggacaaatcttgtccaagtattgcagacagcaatcttcactccagtctctgcctctgtgttcacacggcctttc

SEQ ID NO: 351154 - DNA, 120 bp, Artificial Sequence
  ENSG00000139133_21 (sequence is synthesized)
cctctgtcttctcttcattaccttttaaggacagtgtctttgaatgtagggcccaccctgatctagggtgattgtgtctggagacccttaattatgtttacaaagacccatgttccaagt

SEQ ID NO: 351155 - DNA, 120 bp, Artificial Sequence
  ENSG00000139133_22 (sequence is synthesized)
aagtttgtattcacatgatctgagtagacattgtctcttcgtgggatacttttcagtccatgacagttactaaaggacattttaggatagtcttcatatgattgttaggagactaccttt

SEQ ID NO: 351156 - DNA, 120 bp, Artificial Sequence
  ENSG00000139133_23 (sequence is synthesized)
ttagattttttttattatatatcaaattatagttgtatatacttatgagaaacaaagtggcattatgatttttgaatataatgtgggattaaataaagctaatctatccatcacctcaaa

SEQ ID NO: 351157 - DNA, 120 bp, Artificial Sequence
  ENSG00000139133_24 (sequence is synthesized)
ctcccatccttagacttcactcgtcctgttccaccccctcaagcctcagaacatgaaagaaactgggtatagtcttttgttcctgtctctgagatctgtgaaatatttattaaatgaatg

SEQ ID NO: 351158 - DNA, 120 bp, Artificial Sequence
  ENSG00000139133_25 (sequence is synthesized)
aataaacagcagatctgtcctccaggaaggagtgatctgggagaatactcaacggggaactgagccctcctcttggcagctgacgatatcgatcccactttgtctttccttgttttagga

SEQ ID NO: 351159 - DNA, 120 bp, Artificial Sequence
  ENSG00000139133_26 (sequence is synthesized)
ttaaaggcattcgggtgctccttggaaataccagaaaactttcctttagctcacctgtcaagcacctcactgtgcattttaggggtgggatagggtggactggagggatcttcagctacc

SEQ ID NO: 351160 - DNA, 120 bp, Artificial Sequence
  ENSG00000139133_27 (sequence is synthesized)
aaaaagtgacaatttataatcacaaattccttccctgggtatttttagtgaactgttaactggataaactggcaaccagtcaagtcacatcatttttgagtatatatttgactgtgcaag

SEQ ID NO: 351161 - DNA, 120 bp, Artificial Sequence
  ENSG00000139133_28 (sequence is synthesized)
tatgtacatataaatatcaaaataagcatcccctgcttctctggtgacacaatatagggtactggctagaaatataaagtctgttttagagaaagatctgatcttaaatcttggtgctgt

SEQ ID NO: 351162 - DNA, 120 bp, Artificial Sequence
  ENSG00000139133_29 (sequence is synthesized)
atctgcaaaatgacaataatctttactatagggcatattgtaacgttaatacagagggtttggcaacaatttctgtctcagtttatgttagctgtcatcatggagcctgtggtccaaatg

SEQ ID NO: 351163 - DNA, 120 bp, Artificial Sequence
  ENSG00000139133_30 (sequence is synthesized)
ttttcctaaacttaagagtcccaaacaatgtttccatgcttttaaaaactggaacatttgcagtttatttatcaaaataaaggcttttaaagaacatttcttggaaaatagaaatagatt

SEQ ID NO: 351164 - DNA, 120 bp, Artificial Sequence
  ENSG00000139133_31 (sequence is synthesized)
ttaagttgttgttgtttattggttgctgctacctgaaccatcactaagctggtccgggggcaaaaaataagaaaaacgaatcctgttctgccaaggacttacttaatcttgtcatagaat

SEQ ID NO: 351165 - DNA, 120 bp, Artificial Sequence
  ENSG00000139133_32 (sequence is synthesized)
aacttctcaaaatttctgattgttgctggagatgagacttgggcttgacatatttgtgcctgtcttgttcctattacctcttgcttttacttcattttctttcattttaaagtgggatcc

SEQ ID NO: 351166 - DNA, 120 bp, Artificial Sequence
  ENSG00000139144_0 (sequence is synthesized)
ggagcagagtcaaccctctcagttacataaaataaaaaatggcatattcttggcaaacggatccaaatcctaatgaatcacacgaaaagcagtatgaacaccaagaatttctctttgtaa

SEQ ID NO: 351167 - DNA, 120 bp, Artificial Sequence
  ENSG00000139144_1 (sequence is synthesized)
atcaaccccattcttctagccaagtcagtctgggttttgatcagatagtagatgagatcagtggcaaaattccacactacgagagtgaaattgatgaaaacaccttttttgtgcccactg

SEQ ID NO: 351168 - DNA, 120 bp, Artificial Sequence
  ENSG00000139144_2 (sequence is synthesized)
caccaaaatgggactcaacagggcattcattaaatgaagcacaccaaatatccttgaatgaattcacttctaaaagccgtgaactctcctggcatcaagttagcaaagcaccagcaattg

SEQ ID NO: 351169 - DNA, 120 bp, Artificial Sequence
  ENSG00000139144_3 (sequence is synthesized)
gttttagtccttctgtgttaccaaaacctcaaaatacgaataaagaatgctcctggggaagccccataggaaaacatcatggtgctgatgattccagattcagtattttagctccatcat

SEQ ID NO: 351170 - DNA, 120 bp, Artificial Sequence
  ENSG00000139144_4 (sequence is synthesized)
tcacaagtttggataaaattaatctagagaaagaattagaaaatgaaaatcataactaccatataggatttgaaagtagcattcctccaacaaattcatccttctcaagtgacttcatgc

SEQ ID NO: 351171 - DNA, 120 bp, Artificial Sequence
  ENSG00000139144_5 (sequence is synthesized)
cgaaagaagagaataaaaggagtggacatgtgaacattgtggaaccatctttgatgcttttgaaaggctctcttcaacccggaatgtgggaaagtacatggcagaagaatatagagtcaa

SEQ ID NO: 351172 - DNA, 120 bp, Artificial Sequence
  ENSG00000139144_6 (sequence is synthesized)
taggttgttccattcagctagtggaagtacctcaaagcagcaatacgagtctggcctctttttgcaacaaagtaaaaaaaatcagagaaagatatcatgcagctgatgttaatttcaatt

SEQ ID NO: 351173 - DNA, 120 bp, Artificial Sequence
  ENSG00000139144_7 (sequence is synthesized)
ctgggaagatctggagcactactacagcatttccgtatcagctcttttctaagaccaagtttaatatacatatttttattgataactcaacacaacctcttcattttatgccatgtgcta

SEQ ID NO: 351174 - DNA, 120 bp, Artificial Sequence
  ENSG00000139144_8 (sequence is synthesized)
attatcttgtcaaagatctaattgcagaaattctgcatttttgcacaaatgaccagctactccccaaagatcatattctaagtgtatgtggctctgaagaatttttacaaaacgaccact

SEQ ID NO: 351175 - DNA, 120 bp, Artificial Sequence
  ENSG00000139144_9 (sequence is synthesized)
gtttggggagccacaaaatgtttcaaaaagataaatctgttattcagctccacctgcagaaaagtagggaagctccaggaaagctatctcgaaagcatgaagaggaccacagtcagtttt

SEQ ID NO: 351176 - DNA, 120 bp, Artificial Sequence
  ENSG00000139144_10 (sequence is synthesized)
atctgaatcaacttctagaatttatgcatatttggaaagtatccagacaatgtctcttaacactcatcagaaaatatgacttccacctgaaatacctattgaaaacccaggaaaacgtgt

SEQ ID NO: 351177 - DNA, 120 bp, Artificial Sequence
  ENSG00000139144_11 (sequence is synthesized)
ataatattattgaagaagttaaaaaaatatgcagtgttctagggtgtgtggaaaccaaacaaattacagatgcagtaaatgaactaagtctaattcttcagagaaaaggagagaattttt

SEQ ID NO: 351178 - DNA, 120 bp, Artificial Sequence
  ENSG00000139144_12 (sequence is synthesized)
atcaaagttcagagacttcagcaaaaggcttgatagagaaggtaacaactgaactatccacatccatctaccagctaatcaatgtctactgtaacagcttttatgcagattttcagcctg

SEQ ID NO: 351179 - DNA, 120 bp, Artificial Sequence
  ENSG00000139144_13 (sequence is synthesized)
taaatgtacctagatgcacttcctatctaaatcccgggcttccttcccacctcagcttcacagtgtatgcagcacacaacattccagaaacctgggtgcacaggatcaattttccccttg

SEQ ID NO: 351180 - DNA, 120 bp, Artificial Sequence
  ENSG00000139144_14 (sequence is synthesized)
aaataaagtcacttccaagggaatccatgctcactgtaaaactgtttgggattgcctgtgcaaccaacaatgcaaatttactggcgtggacttgtcttccactgtttccaaaagaaaaat

SEQ ID NO: 351181 - DNA, 120 bp, Artificial Sequence
  ENSG00000139144_15 (sequence is synthesized)
ccattctcgggtctatgctgttcagcatgacattacagagtgagcctcccgtagaaatgataactccaggagtgtgggatgtaagtcagccatccccggtgaccctgcagattgattttc

SEQ ID NO: 351182 - DNA, 120 bp, Artificial Sequence
  ENSG00000139144_16 (sequence is synthesized)
cagctactgggtgggagtatatgaaacctgattctgaagagaatagaagtaatcttgaagagccactaaaggagtgtataaaacatattgccagactttcacagaaacagactcccctac

SEQ ID NO: 351183 - DNA, 120 bp, Artificial Sequence
  ENSG00000139144_17 (sequence is synthesized)
tactctctgaagaaaagaaaagatatttatggttttatcgcttctactgcaataatgaaaactgctcccttcctttagtcctgggtagtgcccctggatgggatgaaaggactgtttcag

SEQ ID NO: 351184 - DNA, 120 bp, Artificial Sequence
  ENSG00000139144_18 (sequence is synthesized)
aaatgcataccattttgagaagatggacattttctcaacctttagaggctcttgggcttttgacttccagttttccagatcaagaaattcgtaaagtggcagttcaacaattagacaacc

SEQ ID NO: 351185 - DNA, 120 bp, Artificial Sequence
  ENSG00000139144_19 (sequence is synthesized)
aacttctactccaccgctccttgcagagcatccaggttgcccatcgtctttactggctgctaaaaaatgcagaaaatgaagcttattttaaaagctggtatcagaagctactagctgctc

SEQ ID NO: 351186 - DNA, 120 bp, Artificial Sequence
  ENSG00000139144_20 (sequence is synthesized)
tccaattctgtgcaggtaaagccttgaatgatgagttttccaaggagcagaaacttatcaaaattctgggagatattggggaaagagtcaagtctgccagtgaccatcaaagacaggagg

SEQ ID NO: 351187 - DNA, 120 bp, Artificial Sequence
  ENSG00000139144_21 (sequence is synthesized)
tactgaagaaagaaattggcagactagaagagttctttcaagatgtaaatacttgtcatcttcctctgaaccctgccctatgtataaaagggattgatcacgatgcatgttcatatttta

SEQ ID NO: 351188 - DNA, 120 bp, Artificial Sequence
  ENSG00000139144_22 (sequence is synthesized)
catctaatgctttgccattgaagattactttcatcaatgctaatccgatgggcaaaaacatcagcattatttttaaggctggagatgatcttcgtcaggatatgcttgttctgcagctta

SEQ ID NO: 351189 - DNA, 120 bp, Artificial Sequence
  ENSG00000139144_23 (sequence is synthesized)
ttcaagtgatggacaatatttggctgcaggaaggcttggatatgcaaatgatcatttatagatgtctatccacaggaaaagaccaaggattggtgcagatggtacctgatgctgtgaccc

SEQ ID NO: 351190 - DNA, 120 bp, Artificial Sequence
  ENSG00000139144_24 (sequence is synthesized)
tagcaaagattcatcgccattctggactgataggaccattgaaagaaaatacaattaaaaagtggttcagtcagcacaaccacttaaaggcagattatgaaaaggccttgaggaactttt

SEQ ID NO: 351191 - DNA, 120 bp, Artificial Sequence
  ENSG00000139144_25 (sequence is synthesized)
tctactcctgtgctggctggtgtgtggtaacattcatcctgggagtatgtgaccgtcacaatgataatatcatgctgacaaagtcgggccacatgtttcatattgactttggaaaattct

SEQ ID NO: 351192 - DNA, 120 bp, Artificial Sequence
  ENSG00000139144_26 (sequence is synthesized)
taggtcatgcacaaacatttggagggataaaaagggaccgagctcctttcatttttacttcagagatggaatactttattacagagggtgggaaaaacccacagcattttcaagattttg

SEQ ID NO: 351193 - DNA, 120 bp, Artificial Sequence
  ENSG00000139144_27 (sequence is synthesized)
tggaactttgctgtcgtgcttataatattatcagaaagcacagccaactgctcttgaacctgctggaaatgatgctgtatgcaggactgcctgagctaagtggaattcaagacctgaaat

SEQ ID NO: 351194 - DNA, 120 bp, Artificial Sequence
  ENSG00000139144_28 (sequence is synthesized)
atgtgtataataatcttcgtccacaagacacagacctggaagcaacaagtcattttaccaagaaaataaaggaaagtctggagtgtttccctgttaaattgaataacttgatccacacac

SEQ ID NO: 351195 - DNA, 120 bp, Artificial Sequence
  ENSG00000139144_29 (sequence is synthesized)
ttgcacaaatgtcagccataagccctgccaaatctacttcacagacttttcctcaggaatcctgtttgctgagtacaactaggtcgattgaaagagcaacaattttagggttcagcaaga

SEQ ID NO: 351196 - DNA, 120 bp, Artificial Sequence
  ENSG00000139144_30 (sequence is synthesized)
aatccagtaatctgtatctgatccaggtgacacacagcaacaacgaaacaagcctgacagaaaaatcatttgagcagttttcaaaacttcacagccaacttcagaagcagtttgcatcac

SEQ ID NO: 351197 - DNA, 120 bp, Artificial Sequence
  ENSG00000139144_31 (sequence is synthesized)
tgactctcccagagtttcctcattggtggcacctaccttttacaaattcagatcacagaagattcagagatctaaatcattacatggaacagatattaaatgtatcacatgaagttacaa

SEQ ID NO: 351198 - DNA, 120 bp, Artificial Sequence
  ENSG00000139144_32 (sequence is synthesized)
acagtgattgtgtacttagctttttcctctctgaggctgtgcaacaaacagttgaagaatcatcacctgtgtacctaggtgagaagtttccagacaagaagcctaaggtgcagttagtca

SEQ ID NO: 351199 - DNA, 120 bp, Artificial Sequence
  ENSG00000139144_33 (sequence is synthesized)
tatcctacgaggatgtgaagctgaccatactagtgaaacacatgaaaaacattcatctcccagatggctctgcgcccagtgcacatgttgaattttatcttttaccatatcccagtgaag

SEQ ID NO: 351200 - DNA, 120 bp, Artificial Sequence
  ENSG00000139144_34 (sequence is synthesized)
ttcgtaggaggaaaacaaaatctgttccaaaatgtacggaccccacttacaatgaaattgtagtatatgatgaagtcacagagctccaaggacatgtcttaatgcttattgtgaagagta

SEQ ID NO: 351201 - DNA, 120 bp, Artificial Sequence
  ENSG00000139144_35 (sequence is synthesized)
aaactgtatttgtgggagcaattaacatccgactctgtagtgtcccactcgataaagaaaaatggtatccattaggaaacagtataatttgaccattgctatgaacatatgcattattca

SEQ ID NO: 351202 - DNA, 120 bp, Artificial Sequence
  ENSG00000139144_36 (sequence is synthesized)
ttaactacttgtatttttttcacttctgggcctctgaatcacataagtaaggcatctttgttgtcaaagacagcacagggtattaaggacacagaaaaaaaatcagaattagtcttttgt

SEQ ID NO: 351203 - DNA, 120 bp, Artificial Sequence
  ENSG00000139144_37 (sequence is synthesized)
gttgtttattttctacctgtgctttcattgttttttcataatcttttctccttcagtggagtactgattgcatgaaatttgatgtgtaaaataataaaagacctttattaaatcatttta

SEQ ID NO: 351204 - DNA, 120 bp, Artificial Sequence
  ENSG00000139144_38 (sequence is synthesized)
atatattttaaattaaacataggtttacatttgttttaattgtgtgcctacagttaaaagcagtatttttaatgtattttataagaaagacaatcaaataaacctcatcaattaattcaa

SEQ ID NO: 351205 - DNA, 120 bp, Artificial Sequence
  ENSG00000139144_39 (sequence is synthesized)
tgcagtatttgtaagatctaccattttttgtagaatatttctagctagtcactgaaaataaaaaaaggttaagtccattttactctcccatcatgtaacacactacttgcacatatcaat

SEQ ID NO: 351206 - DNA, 120 bp, Artificial Sequence
  ENSG00000139144_40 (sequence is synthesized)
atagggcaggcaaggggaaggctggtcactccaccctaatcttacaatgcaaatggactttccagttgatcagcaccatcttgtctgcttcttattgtacatatgcctgacaaaaggaag

SEQ ID NO: 351207 - DNA, 120 bp, Artificial Sequence
  ENSG00000139144_41 (sequence is synthesized)
ggaagatggagccgccatcttgaacatgtctagtccttagttcctgccacattcacacgtgcaagctcccagcttgcttctctgtgtctgcccctcaactttacaggctgctctttgtta

SEQ ID NO: 351208 - DNA, 120 bp, Artificial Sequence
  ENSG00000139144_42 (sequence is synthesized)
gaaaatgatttgggactgcttttcattaaaaaggaaagccttaccgaggactcccatacccttactatctgcctaagtaatttattcttaactcctgtaccagtgagaatcaaattattg

SEQ ID NO: 351209 - DNA, 120 bp, Artificial Sequence
  ENSG00000139144_43 (sequence is synthesized)
agaattgttgagaagcagaaactaactacctggattgtaaaccaaggaaatggtacctgaaaactgccaacggtacctgagaatggagctgacacagagaaaagcacaggaaaatttcta

SEQ ID NO: 351210 - DNA, 120 bp, Artificial Sequence
  ENSG00000139144_44 (sequence is synthesized)
aagaaattattttttttcttggtcaactggaatgaaacgtaagtttaatctttactgtatctggatcatttatgtaataaatgtcagctttttccccctttttttaaaagcaagggatgt

SEQ ID NO: 351211 - DNA, 120 bp, Artificial Sequence
  ENSG00000139144_45 (sequence is synthesized)
aatttaaaaaaaatatgctgccagttgatttgattcagtggtatgataagtacactagggctaatagataactgattgttcaattcaacagattaaaagtccatttagaaacctagacaa

SEQ ID NO: 351212 - DNA, 120 bp, Artificial Sequence
  ENSG00000139144_46 (sequence is synthesized)
tcgaaaggttaggacacagcaagaaggaagctgtctgcacacaggaaaagggctctgaccctgattataaactttgcagcctatagaacgaagagaaataaatgtatgttgtttaagcca

SEQ ID NO: 351213 - DNA, 120 bp, Artificial Sequence
  ENSG00000139146_0 (sequence is synthesized)
agaactgcaggagactatctttctagacaaggcagttgaggaggagggagcgcttgagggggactggcctggcgtgcactccgcacctcggggacattattgcgcgtggaacggctgctt

SEQ ID NO: 351214 - DNA, 120 bp, Artificial Sequence
  ENSG00000139146_1 (sequence is synthesized)
ttggaagactattgcccagaagaaaagatgtttggttttcacaagccaaagatgtaccgaagtatagagggctgctgtatttgcagagctaagtcctccagttctcgattcactgacagt

SEQ ID NO: 351215 - DNA, 120 bp, Artificial Sequence
  ENSG00000139146_2 (sequence is synthesized)
aaacgctatgaaaaggacttccagagctgttttggattgcatgagactcgttcaggagacatctgcaatgcctgtgtcctgcttgtgaaaagatggaagaagttgccagcaggatcaaaa

SEQ ID NO: 351216 - DNA, 120 bp, Artificial Sequence
  ENSG00000139146_3 (sequence is synthesized)
aaaaactggaatcatgtggtagatgcaagggctggacccagtctaaagactacattgaaaccaaagaaagtgaaaactctatctgggaacaggataaaaagcaaccagatcagtaaactg

SEQ ID NO: 351217 - DNA, 120 bp, Artificial Sequence
  ENSG00000139146_4 (sequence is synthesized)
cagaaggaatttaaacgtcataattctgatgctcacagtaccacctcaagtgcctccccagctcaatctccttgttacagtaaccagtcagatgacggctcagatacagagatggcttct

SEQ ID NO: 351218 - DNA, 120 bp, Artificial Sequence
  ENSG00000139146_5 (sequence is synthesized)
ggttctaacagaacaccagttttttcctttttagatctcacttactggaaaagacagaagatatgttgtgggatcatctataaaggccgttttggggaagtcctcattgacacacatctc

SEQ ID NO: 351219 - DNA, 120 bp, Artificial Sequence
  ENSG00000139146_6 (sequence is synthesized)
ttcaagccttgctgcagcaataagaaagcagctgctgagaagccagaggagcaggggccagagcctctgcccatctccactcaggagtggtgactgaggtttttatgtagaaggggaaca

SEQ ID NO: 351220 - DNA, 90 bp, Artificial Sequence
  ENSG00000139146_7 (sequence is synthesized)
tcaggagtggtgactgaggtttttatgtagaaggggaacaaaaaaaaaaatatctgaattttgaaaaaccacaaagctacaaactgaccc

SEQ ID NO: 351221 - DNA, 72 bp, Artificial Sequence
  ENSG00000139146_8 (sequence is synthesized)
tgcctcagcctcccaagtagctgggtttataggtgcccgccaccagacccggctaatttttaatgaccctct

SEQ ID NO: 351222 - DNA, 120 bp, Artificial Sequence
  ENSG00000139146_9 (sequence is synthesized)
caccacgttggccaggctggtcttaaatgaccctcttatttttaacttggatacctgctattctgccaaaagacaatttctagagtagttttgaatgggttgatttcccccactcccaca

SEQ ID NO: 351223 - DNA, 120 bp, Artificial Sequence
  ENSG00000139146_10 (sequence is synthesized)
aactctgaagccagtgtctagcttactaaaaaaagagttgtatataatatttaagatgctgagtatttcataggaaagctgaatgctgctgtaaagtgctctttaagtcttttttttttt

SEQ ID NO: 351224 - DNA, 120 bp, Artificial Sequence
  ENSG00000139146_11 (sequence is synthesized)
taatccccttctaatgaatgaaactaggggaatttcaggggacagagatgggatttgttgtatgataaactgtatgtagtttttagtctttctgttttgagaagcagtggttggggcatt

SEQ ID NO: 351225 - DNA, 120 bp, Artificial Sequence
  ENSG00000139146_12 (sequence is synthesized)
catgaacttgcccctagaggtagttgttaataattttgaaatattaaggtcttgccaagcttctgatgattcacacctgtactactgattattaagcaggacagactgagctttctgttg

SEQ ID NO: 351226 - DNA, 120 bp, Artificial Sequence
  ENSG00000139146_13 (sequence is synthesized)
caaataccttggaggagaaagtaatttctaaatatacagagaggtaacttgactatatatgttgcatcctgtgcctcccttcatattaatatttgataaagattttaatttatgtaaaac

SEQ ID NO: 351227 - DNA, 120 bp, Artificial Sequence
  ENSG00000139146_14 (sequence is synthesized)
ttctaaagcagaatcaaagctcctcttggggaaatggcaagtctttaggataggcaagaccctgtatgaatagtaccaaagcattaccgcatggtagagaacacactcgattaaaaatgt

SEQ ID NO: 351228 - DNA, 120 bp, Artificial Sequence
  ENSG00000139146_15 (sequence is synthesized)
taagctatctgaaaaataaaatgtgcaagtcttcaggatggcacaaaacaaaggttaatgcttcttggggcacatttcttagagggcttgctgagtgtgtaaatataatcgacttttgtt

SEQ ID NO: 351229 - DNA, 120 bp, Artificial Sequence
  ENSG00000139146_16 (sequence is synthesized)
tgtgttacatgacttctgtgacttcattgaaaatctgcacaattcagtttcagctctggattacttcagttgacctttgtgaaggtttttatctgtgtagaatgggtgtttgacttgttt

SEQ ID NO: 351230 - DNA, 120 bp, Artificial Sequence
  ENSG00000139146_17 (sequence is synthesized)
tagcctattaaatttttattttctttcactctgtattaaaagtaaaacttactaaaagaaaagaggtttgtgttcacattaaatggttttggtttggcttcttttagtcaggctttctga

SEQ ID NO: 351231 - DNA, 120 bp, Artificial Sequence
  ENSG00000139146_18 (sequence is synthesized)
acattgagatatcctgaacttagagctcttcaatcctaagattttcatgaaaagcctctcacttgaacccaaaccagagtactcttactgcctcttttctaaatgttcaggaaaagcatt

SEQ ID NO: 351232 - DNA, 120 bp, Artificial Sequence
  ENSG00000139146_19 (sequence is synthesized)
gccagttcagtcttttcaaaatgagggagaaacatttgcctgccttgtaataacaagactcagtgcttattttttaaactgcattttaaaaattggatagtataataacaataaggagta

SEQ ID NO: 351233 - DNA, 120 bp, Artificial Sequence
  ENSG00000139146_20 (sequence is synthesized)
agccaccttttataggcaccctgtagttttatagttcttaatctaaacattttatatttccttcttttggaaaaaacctacatgctacaagccaccatatgcacagactatacagtgagt

SEQ ID NO: 351234 - DNA, 120 bp, Artificial Sequence
  ENSG00000139146_21 (sequence is synthesized)
tgagttggctctcccacagtctttgaggtgaattacaaaagtccagccattatcatcctcctgagttatttgaaatgattttttttgtacattttggctgcagtattggtggtagaatat

SEQ ID NO: 351235 - DNA, 120 bp, Artificial Sequence
  ENSG00000139146_22 (sequence is synthesized)
actataatatggatcatctctacttctgtatttatttatttattactagacctcaaccacagtcttctttttccccttccacctctctttgcctgtaggatgtactgtatgtagtcatgc

SEQ ID NO: 351236 - DNA, 120 bp, Artificial Sequence
  ENSG00000139146_23 (sequence is synthesized)
atgcactttgtattaatatattagaaatctacagatctgttttgtactttttatactgttggatacttataatcaaaacttttactagggtattgaataaatctagtcttactagaaaat

SEQ ID NO: 351237 - DNA, 120 bp, Artificial Sequence
  ENSG00000139146_24 (sequence is synthesized)
gttgttccggcgcaggtgagggaggtggcggcgagcgacgcggttcacctcccgctgccctcgccctcgccccggcgagcggcccccgcaggaactttcctcccgacgcgagatgtctta

SEQ ID NO: 351238 - DNA, 120 bp, Artificial Sequence
  ENSG00000139146_25 (sequence is synthesized)
tcaaaacctgattttaaaaaatgcttctcttccccatttttagattgcatgtttgttaggcgagttaggaggtagtagagtcctccttaaataactaggcttttctttgtgttttatacg

SEQ ID NO: 351239 - DNA, 120 bp, Artificial Sequence
  ENSG00000139146_26 (sequence is synthesized)
cttgccttgatagtgccaagaatggaggtcgatccaggaggtcttcccttgagctgcctgcctgtcttggtcatataacaccaagttgcttgggggtggggtggagcagagagaactctt

SEQ ID NO: 351240 - DNA, 120 bp, Artificial Sequence
  ENSG00000139146_27 (sequence is synthesized)
ccgaagtatagagggctgctgtatttgcagagctaagtcctccagttctcgattcactgacagtaaacgctatgaaaaggacttccagagctgttttggagacaatgtcttcctatgttg

SEQ ID NO: 351241 - DNA, 120 bp, Artificial Sequence
  ENSG00000139146_28 (sequence is synthesized)
cctaggctggagtgcagtagctattcacaggtgtgatcattgtgcaccacagccttgaacttttgggctcaagtgatcctcccgtctgagcctctcgagtagctgggactacagattgca

SEQ ID NO: 351242 - DNA, 120 bp, Artificial Sequence
  ENSG00000139146_29 (sequence is synthesized)
cgccattcgctcggaaactaagttgccatccgcttccgagctggcggccgagggtctttaaatcggcctttgggggtcagtgctgggctctgccggagcgcacgcggcgtggcgttgttt

SEQ ID NO: 351243 - DNA, 120 bp, Artificial Sequence
  ENSG00000139146_30 (sequence is synthesized)
gctcaactccggagggatgcggatgcgacaatgagagcaacacgcggtcgcttaaaaacagcccgtcttccactcgcctgccctcttcggaccgcgcccaagagcctctggtgtccgggg

SEQ ID NO: 351244 - DNA, 120 bp, Artificial Sequence
  ENSG00000139146_31 (sequence is synthesized)
ctagacaaggcagttgaggaggagggagcgcttgagggggactggcctggcgtgcactccgcacctcggggacattattgcgcgtggaacggctgcttttggaaggcacaacttcctgaa

SEQ ID NO: 351245 - DNA, 120 bp, Artificial Sequence
  ENSG00000139146_32 (sequence is synthesized)
tggaccatgactcccaccaaagatccctgtctctgattcaccaaacagcttcaaccctgaaaccaggacgagaagttgacaacatctgagtggacagctaattgacctaagacttcagac

SEQ ID NO: 351246 - DNA, 120 bp, Artificial Sequence
  ENSG00000139146_33 (sequence is synthesized)
caggcctgtatgatctcctgtctaaacattcttagagtattatatttactttggggactattggccttgtctgctttgactcagattataggatatataacctggttaatgtttctgtac

SEQ ID NO: 351247 - DNA, 120 bp, Artificial Sequence
  ENSG00000139146_34 (sequence is synthesized)
acatgatggccacctatgtatatacacttgacttttcagggtctctgctggggatggaaaaatagttcattagccaaactctcctaaagtgtggcagatggaggcagtctctcagattgc

SEQ ID NO: 351248 - DNA, 120 bp, Artificial Sequence
  ENSG00000139146_35 (sequence is synthesized)
tggatttgtcaccagcttccaagggccattcaagatcattacatgctacttgttgcaccagagattgatttttctgacactccaaatgttaccatatacttacatcagttccctccaaat

SEQ ID NO: 351249 - DNA, 120 bp, Artificial Sequence
  ENSG00000139146_36 (sequence is synthesized)
gtcactttccaaattcaaattcagcttctaaagccaggccatattttcattctgtgcttagtaataagccctaagtctcacccttccccaccgcccccaggtctatctatcagtaagcca

SEQ ID NO: 351250 - DNA, 120 bp, Artificial Sequence
  ENSG00000139146_37 (sequence is synthesized)
attagggacaaattctctaacttatctagaacacaaacttaattcctcatcttttccaggtccctgcacattcctggcctcccaccgttactgtcataactggcaactgaatgtccaaag

SEQ ID NO: 351251 - DNA, 120 bp, Artificial Sequence
  ENSG00000139146_38 (sequence is synthesized)
tatgcaggcctttgtaaggcctgcagtaaaaccaatccatggctcactcatgttttaaacaacttacctattcaaactattatgaatgaatagttaagagatacattttggtatgtggca

SEQ ID NO: 351252 - DNA, 120 bp, Artificial Sequence
  ENSG00000139146_39 (sequence is synthesized)
ttgggccacacccaccaactcaaggatgggcacatagtgtaaatagctggcaaaatagctggcaaattgaagggcgcttttttttttttttttttgagggagagtcttgctctttcgcct

SEQ ID NO: 351253 - DNA, 76 bp, Artificial Sequence
  ENSG00000139146_40 (sequence is synthesized)
tttttttttttttttgagggagagtcttgctctttcgcctaggttgtagtgtggtggtgtgatcatggctcactac

SEQ ID NO: 351254 - DNA, 120 bp, Artificial Sequence
  ENSG00000139146_41 (sequence is synthesized)
gtgcctgttgcacttacatcgacacctcgggtgaagtagagacttgcacagaaagaatttccaagcaagctaaatggttacaagaggcacaaactactgatcttctcaatgatctattta

SEQ ID NO: 351255 - DNA, 120 bp, Artificial Sequence
  ENSG00000139146_42 (sequence is synthesized)
attggcttcctatttcttccagtctgcagttcaacccctttttcatgggtaaagtgccgacgtcataacaaggtttgagggaggcacatctcacacgtgtgaatgcccagtcatcacact

SEQ ID NO: 351256 - DNA, 120 bp, Artificial Sequence
  ENSG00000139146_43 (sequence is synthesized)
tacaaatgacaaaaggatctcaaaccttgatatagtctctatcctacttctcttactatcacttaaattactcatggtatttataaccaacttacgtaagtctattgctaaaaccagaat

SEQ ID NO: 351257 - DNA, 120 bp, Artificial Sequence
  ENSG00000139146_44 (sequence is synthesized)
tataggtcaggtgcagtggctcacactcaatcctagcacttgggaggccaaggtgggaagactgcttgaggctaggagtttgagaccagtgtgggcaatgcagtgaaaccctatcttgat

SEQ ID NO: 351258 - DNA, 120 bp, Artificial Sequence
  ENSG00000139151_0 (sequence is synthesized)
agtgtggtgcccagccaaccagctatacctcttttgaagattttaagaacttagcctcctgaacagtcttcttcgaaagtgaaaagtggtaacagctgatgagtatcaagaaattatttt

SEQ ID NO: 351259 - DNA, 120 bp, Artificial Sequence
  ENSG00000139151_1 (sequence is synthesized)
ctgcaaaggggcagagttaattgtatttggaacccatgacagcacctactggggaaagacttctaagtgaggagaaacggctctacaggtcatgaaactatggaaatgagatggtttttg

SEQ ID NO: 351260 - DNA, 120 bp, Artificial Sequence
  ENSG00000139151_2 (sequence is synthesized)
tcaaagattcaggatgacttcagaggtggaaaaattaacctagaaaaaactcagaggttacttgaaaaattagatattcggtgcagttatattcatgtgaaacagatttttaaggacaat

SEQ ID NO: 351261 - DNA, 120 bp, Artificial Sequence
  ENSG00000139151_3 (sequence is synthesized)
gacaggctgaaacaaggaagaatcaccatagaagaatttagagcaatttatcgaattatcacgcacagagaagaaattattgagattttcaacacatattctgaaaaccggaaaattctt

SEQ ID NO: 351262 - DNA, 120 bp, Artificial Sequence
  ENSG00000139151_4 (sequence is synthesized)
ttagcaagtaatctggctcaatttctgacacaagaacaatatgcagctgagatgagtaaagctattgcttttgagatcattcagaaatacgagcctatcgaagaagttaggaaagcacac

SEQ ID NO: 351263 - DNA, 120 bp, Artificial Sequence
  ENSG00000139151_5 (sequence is synthesized)
caaatgtcattagaaggttttacaagatacatggattcacgtgaatgtctactgtttaaaaatgaatgtagaaaagtttatcaagatatgactcatccattaaatgattattttatttca

SEQ ID NO: 351264 - DNA, 120 bp, Artificial Sequence
  ENSG00000139151_6 (sequence is synthesized)
tcttcacataacacatatttggtatctgatcaattattgggaccaagtgacctttggggatatgtaagtgcccttgtgaaaggatgccgttgtttggagattgactgctgggatggagca

SEQ ID NO: 351265 - DNA, 120 bp, Artificial Sequence
  ENSG00000139151_7 (sequence is synthesized)
caaaatgaacctgttgtatatcatggctacacactcacaagcaaacttctgtttaaaactgttatccaagctatacacaagtatgcattcatgacatctgactacccagtggtgctctct

SEQ ID NO: 351266 - DNA, 120 bp, Artificial Sequence
  ENSG00000139151_8 (sequence is synthesized)
agagtccttgctttctgatatgcttgatgattttcctgatactctaccatcaccagaggcactaaaattcaaaatattagttaaaaataagaaaataggaaccttaaaggaaacccatga

SEQ ID NO: 351267 - DNA, 120 bp, Artificial Sequence
  ENSG00000139151_9 (sequence is synthesized)
aagaaaaggttctgataagcgtggagacaatcaagacaaggaaacaggggtaaaaaagttacctggagtaatgcttttcaagaaaaagaagaccaggaagctaaaaattgctctggcctt

SEQ ID NO: 351268 - DNA, 120 bp, Artificial Sequence
  ENSG00000139151_10 (sequence is synthesized)
atctgatcttgtcatttatacgaaagctgagaaattcaaaagctttcaacattcaagattatatcagcaatttaatgaaaataattctattggggagacacaagcccgaaaactttcaaa

SEQ ID NO: 351269 - DNA, 120 bp, Artificial Sequence
  ENSG00000139151_11 (sequence is synthesized)
attgcgagtccatgagtttatttttcacaccaggaagttcattaccagaatatatcccaaagcaacaagagcagactcttctaattttaatccccaagaattttggaatataggttgtca

SEQ ID NO: 351270 - DNA, 120 bp, Artificial Sequence
  ENSG00000139151_12 (sequence is synthesized)
aatggtggctttaaatttccagacccctggtctgcccatggatctgcaaaatgggaaatttttggataatggtggttctggatatattttgaaaccacatttcttaagagagagtaaatc

SEQ ID NO: 351271 - DNA, 120 bp, Artificial Sequence
  ENSG00000139151_13 (sequence is synthesized)
atactttaacccaagtaacataaaagagggtatgccaattacacttacaataaggctcatcagtggtatccagttgcctcttactcattcatcatctaacaaaggtgattcattagtaat

SEQ ID NO: 351272 - DNA, 120 bp, Artificial Sequence
  ENSG00000139151_14 (sequence is synthesized)
tatagaagtttttggtgttccaaatgatcaaatgaagcagcagactcgtgtaattaaaaaaaatgcttttagtccaagatggaatgaaacattcacatttattattcatgtcccagaatt

SEQ ID NO: 351273 - DNA, 120 bp, Artificial Sequence
  ENSG00000139151_15 (sequence is synthesized)
ggcattgatacgttttgttgttgaaggtcaaggtttaatagcaggaaatgaatttcttgggcaatatactttgccacttctatgcatgaacaaaggttatcgtcgtattcctctgttttc

SEQ ID NO: 351274 - DNA, 120 bp, Artificial Sequence
  ENSG00000139151_16 (sequence is synthesized)
cagaatgggtgagagccttgagcctgcttcactgtttgtttatgtttggtacgtcagataacagctaatgataaatgacatatcattagctatgcatcgcaataaaacagccaaaatgaa

SEQ ID NO: 351275 - DNA, 120 bp, Artificial Sequence
  ENSG00000139151_17 (sequence is synthesized)
taagaaaataggaaccttaaaggaaacccatgaaagaaaaggttctgataagcgtggtaaggtggaggaatgggaagaagaagtggcagatggagaggaggaggaggaggaggaggagga

SEQ ID NO: 351276 - DNA, 120 bp, Artificial Sequence
  ENSG00000139151_18 (sequence is synthesized)
ggtatctgatcaattattgggaccaagtgacctttggggatatgtaaggtagaaaaatcaggcccagttttagatatcagcagaagcagaaatatagtttcctcagttttgataaagctg

SEQ ID NO: 351277 - DNA, 120 bp, Artificial Sequence
  ENSG00000139151_19 (sequence is synthesized)
ggctacacactcacaagcaaacttctgtttaaaactgttatccaagctatacacaagtatgcattcatggcactaaaattcaaaatattagttaaaaataagaaaataggaaccttaaag

SEQ ID NO: 351278 - DNA, 120 bp, Artificial Sequence
  ENSG00000139151_20 (sequence is synthesized)
ttacaaacctctccctatctccagttgtggcagccgaaaatgtctccagacattgccaaatccctcctgtgaggcaaagtcgtcccagtggaaaaccagtagcctgtagacatggggtag

SEQ ID NO: 351279 - DNA, 120 bp, Artificial Sequence
  ENSG00000139151_21 (sequence is synthesized)
gtgtaattaaaaaaaatggtcaaggtaatatggtcattattccagcatgagccaattagtttactatttctgtgggcatagactgcaccctagattgctatgtggtaaatgtgctcttgt

SEQ ID NO: 351280 - DNA, 120 bp, Artificial Sequence
  ENSG00000139151_22 (sequence is synthesized)
gaccacaggtgaaccatagaaaacatagatatagtataattagaaattcatcagtgcttctggaaatcttttagtccaagatggaatgaaacattcacatttattattcatgtcccagaa

SEQ ID NO: 351281 - DNA, 120 bp, Artificial Sequence
  ENSG00000139151_23 (sequence is synthesized)
ctctgaatccaagcagtgcatgtggccataagtaggacaatgacaggctgaaacaaggaagaatcaccatagaagaatttagagcaatttatcgaattatcacgcacagagaagaaatta

SEQ ID NO: 351282 - DNA, 120 bp, Artificial Sequence
  ENSG00000139151_24 (sequence is synthesized)
tgaacaaagcatctgagatgtgcctaggaaacaggtcttcctgaagcagaagggtggtggctaattttggatcatgcagcgctttgcggaaggagaagttatcgtcgtattcctctgttt

SEQ ID NO: 351283 - DNA, 120 bp, Artificial Sequence
  ENSG00000139151_25 (sequence is synthesized)
aaaatgggaaatttttggataatggtggttctggatatattttgaaaccacatttcttaagagagagtaaatcatactttaacccaagtaacataaaagaggctcatcagtggtatccag

SEQ ID NO: 351284 - DNA, 120 bp, Artificial Sequence
  ENSG00000139151_26 (sequence is synthesized)
caattaattatactaactatatttacaatcaagatggagagcatttcagtagaaggtaaaattagttgttgagaaaatctgaaataataccaggatatcagtttagaataatttcctgag

SEQ ID NO: 351285 - DNA, 120 bp, Artificial Sequence
  ENSG00000139151_27 (sequence is synthesized)
catacagaaatgctaacattaaacctaggattggatgtctaattatatcagactgataatggtaactgtattagatgttagtgatttataaaaagagtggagaataagcccaaagttagc

SEQ ID NO: 351286 - DNA, 120 bp, Artificial Sequence
  ENSG00000139151_28 (sequence is synthesized)
agaagggaggaaataatacagattagcacagaaataactaaaatagaaaagaaaaaaattagaagaaattgaggaaactaagacttgtttttttgaaaagttaaataaaattgacaaata

SEQ ID NO: 351287 - DNA, 120 bp, Artificial Sequence
  ENSG00000139151_29 (sequence is synthesized)
ttgtggcagccgaaaatgtctccagacattgccaaatccctcctgtgaggcaaagtcgtcccagtggaaaaccagtagcctgtagacatgggtgcccttgtgaaaggatgccgttgtttg

SEQ ID NO: 351288 - DNA, 120 bp, Artificial Sequence
  ENSG00000139154_0 (sequence is synthesized)
gaggaggaggaggagcaggcgccgccatggccgccgctatcaccgacatggccgacctggaggagctctcccgcctgagccctctgccccccggcagcccgggttcggcggcgcggggcc

SEQ ID NO: 351289 - DNA, 120 bp, Artificial Sequence
  ENSG00000139154_1 (sequence is synthesized)
aggaagaggaggaggaggaagaggaggcggaggccgaggcggtggcggcgctgctgctgaacggcggcagcggtgggggcggcggaggcggcggcggaggagtggggggcggcgaggcag

SEQ ID NO: 351290 - DNA, 120 bp, Artificial Sequence
  ENSG00000139154_2 (sequence is synthesized)
gaggagtggggggcggcgaggcagagacgatgtcggagccgagccccgagagcgccagccaggccggggaggacgaagacgaggaggaggacgacgaggaggaggaagatgagagcagca

SEQ ID NO: 351291 - DNA, 120 bp, Artificial Sequence
  ENSG00000139154_3 (sequence is synthesized)
gcagcggcgggggtgaggaggagagtagcgccgagagcctggtgggcagcagcggcgggagcagcagcgacgagacccgctcgttgagccccggcgccgccagcagcagcagcggggatg

SEQ ID NO: 351292 - DNA, 120 bp, Artificial Sequence
  ENSG00000139154_4 (sequence is synthesized)
gggacggcaaggagggcctggaggagcccaagggaccgcggggcagccagggcggcggcgggggcggcagcagtagcagcagcgtagtctccagcggcggcgacgagggctacgggactg

SEQ ID NO: 351293 - DNA, 120 bp, Artificial Sequence
  ENSG00000139154_5 (sequence is synthesized)
ggggaggcggaagcagcgcgacctccgggggccggcggggcagcttggagatgtcgtcggatggggaacccctgagccgcatggactcggaggacagcataagcagtactataatggatg

SEQ ID NO: 351294 - DNA, 120 bp, Artificial Sequence
  ENSG00000139154_6 (sequence is synthesized)
tagacagcacaatttccagtgggcgttcaactccagcaatgatgaatggacaaggaagcactacttcttcaagcaaaaatattgcctataattgttgttgggaccagtgccaggcttgct

SEQ ID NO: 351295 - DNA, 120 bp, Artificial Sequence
  ENSG00000139154_7 (sequence is synthesized)
tcaactctagcccagatctggcagatcacatccgttccatacatgtagatggtcagcgaggaggggtatttgtttgcttatggaaaggttgtaaagtatataacactccatctaccagtc

SEQ ID NO: 351296 - DNA, 120 bp, Artificial Sequence
  ENSG00000139154_8 (sequence is synthesized)
aaagttggttacaaaggcatatgctgacacacagtggagacaaacctttcaagtgtgttgttggtggctgcaatgccagctttgcttctcagggagggctagctcgtcatgtacccacac

SEQ ID NO: 351297 - DNA, 120 bp, Artificial Sequence
  ENSG00000139154_9 (sequence is synthesized)
acttcagtcagcagaactcctcaaaagtttctagccagccaaaggccaaagaagaatctccttctaaagctggaatgaacaaaaggaggaaattaaagaacaaaagacgacgctcattac

SEQ ID NO: 351298 - DNA, 120 bp, Artificial Sequence
  ENSG00000139154_10 (sequence is synthesized)
cacggccacatgatttcttcgatgcacaaacactggatgcgataagacatcgagccatatgctttaacctctcagctcatatagaaagtttagggaagggacacagtgttgtttttcata

SEQ ID NO: 351299 - DNA, 120 bp, Artificial Sequence
  ENSG00000139154_11 (sequence is synthesized)
gtactgtaatagctaagagaaaagaagattctgggaagatcaaacttttgcttcattggatgcctgaagacattctgcctgatgtgtgggtgaatgaaagtgaacgacatcagttaaaaa

SEQ ID NO: 351300 - DNA, 120 bp, Artificial Sequence
  ENSG00000139154_12 (sequence is synthesized)
ctaaagtagttcatttatcaaagctacccaaagatactgccttgcttttggacccaaacatatacagaacaatgccgcagaagaggttgaagagaactctgataagaaaagtgttcaatt

SEQ ID NO: 351301 - DNA, 120 bp, Artificial Sequence
  ENSG00000139154_13 (sequence is synthesized)
tgtatttaagcaaacagtgaacgacgtttgcaatcaactaaaaattcgtctatcgaattagggctgaaaattactgttaaagagtgttgcagtatgtctggtggctcccttttcaggact

SEQ ID NO: 351302 - DNA, 120 bp, Artificial Sequence
  ENSG00000139154_14 (sequence is synthesized)
agggctttctcatggagtacagtatgttaatatttacctatataactaatctgttaacggtttttgaaaaacctttcaaattatttgaataatcttcatattttcatttaacctatatga

SEQ ID NO: 351303 - DNA, 120 bp, Artificial Sequence
  ENSG00000139154_15 (sequence is synthesized)
ctctaattttttttctgaggaaatcatttggtttttgagttgttttttcttaatgtaagaaaaattgtattttttttacaagtatcttcaaactgaatcttttatgcaccaaagttggtc

SEQ ID NO: 351304 - DNA, 120 bp, Artificial Sequence
  ENSG00000139154_16 (sequence is synthesized)
ttgaaaaggaaaataaaatcactttcttgcttggtaagcaagaagccatatcgattttttttaacttacagaaatggaaatatgtgtaacttgttagtattgtattaaacaaatgttgca

SEQ ID NO: 351305 - DNA, 120 bp, Artificial Sequence
  ENSG00000139154_17 (sequence is synthesized)
tagagataatagaacattgcttgtaaataattcagcagatttgtaatatatttttatattttgaaatgtactgtagatgttttctagaggcatgaaagttaaatgtatatattatggtag

SEQ ID NO: 351306 - DNA, 120 bp, Artificial Sequence
  ENSG00000139154_18 (sequence is synthesized)
aaataatattgaaggatattgtacttcactagtgctgccagaggaattgttaataaaagcaccttctttaacaataaatgtctttcacagacttaagggactatgtactactgttaatat

SEQ ID NO: 351307 - DNA, 120 bp, Artificial Sequence
  ENSG00000139154_19 (sequence is synthesized)
ctctaagaacaaaacacattgaacatccttccagaaagtctttgagggaggacctatacccataatagaattatggcactcatttctgacagtgatcaagaaatcagttatttccttact

SEQ ID NO: 351308 - DNA, 120 bp, Artificial Sequence
  ENSG00000139154_20 (sequence is synthesized)
gttggaaggacattgtaaagtatgtggttatatgcagtgaaactgcagaaaatactcctggttgaggagttttcactttactacagtgatataaaaaccagcagtttttacactaaattt

SEQ ID NO: 351309 - DNA, 120 bp, Artificial Sequence
  ENSG00000139154_21 (sequence is synthesized)
gttccacgatacataaatcatttctcatttgctttaaaaaatttaaaagtgtaaaaattatgagagactttattcgttaacaatgggggtaaagagctatatacatgaaaatgagtctta

SEQ ID NO: 351310 - DNA, 120 bp, Artificial Sequence
  ENSG00000139154_22 (sequence is synthesized)
taaaattaagtgaagtgcaaataaaagcactgctactataagacattctggaatggttgtttaataagggtattatccatttgatctatagcaatgtgattttatttttaaaaagaaaag

SEQ ID NO: 351311 - DNA, 120 bp, Artificial Sequence
  ENSG00000139154_23 (sequence is synthesized)
cagtgtgttttctttttttgttgttttcttttgcttaagcacttcatcaattgctttattctgtatctgcgaagtaatctgcaatctcttttgttctttttaaaatttgatttgttataa

SEQ ID NO: 351312 - DNA, 120 bp, Artificial Sequence
  ENSG00000139154_24 (sequence is synthesized)
aattgccaaatagaagtgtttcagatacatagtttgtacctgtatttttattttattgcctcatgttcttgtaagtcattcttaattgaccaatgattgtagaccttgcttgagtatttt

SEQ ID NO: 351313 - DNA, 120 bp, Artificial Sequence
  ENSG00000139154_25 (sequence is synthesized)
ttctaataaaacaaagcaaatcacatttagcttcaaattgtaacaattcaattgaattttaaaatgacacctgaaaagatacatctgatattttctatatagagcacagtaaataagttt

SEQ ID NO: 351314 - DNA, 120 bp, Artificial Sequence
  ENSG00000139154_26 (sequence is synthesized)
tttcattgtgtagaaatacttagatgtcaaaaccagatttcgtgatccttgattaacttctgagtactcaatcaatcataatccttttgctgcttatctgatgttggtttgatactgtta

SEQ ID NO: 351315 - DNA, 120 bp, Artificial Sequence
  ENSG00000139154_27 (sequence is synthesized)
acacaccaaaaagaatatggaattgaaatgagctagctttataacttgtatgtatacatatatacacataacatccaattatgactgggtaataagtgtgaaaattttaatttgtggttt

SEQ ID NO: 351316 - DNA, 120 bp, Artificial Sequence
  ENSG00000139154_28 (sequence is synthesized)
tcatttattaatgtctgcccatctgtattgttgctcctaccttcaaatatgacacctgaaataataagtctgttgtccagaatttatgtattgttcagcatcaagcaaactacagctcac

SEQ ID NO: 351317 - DNA, 120 bp, Artificial Sequence
  ENSG00000139154_29 (sequence is synthesized)
aagcatacccatttatatgttgtctatgcctgctttctcctgcagtggcagaattgagtggtgagaccttaggtcctgcaagcccccaatttttactacaggttggcaatccctaatcca

SEQ ID NO: 351318 - DNA, 120 bp, Artificial Sequence
  ENSG00000139154_30 (sequence is synthesized)
aaaatctgacataaaaaatgctccaaagttcaaaactttctgagtgctgacatcatgctgcaagtggaaaattccacgcctgacctcatgtgactggtcatagtcaaaacaattaagact

SEQ ID NO: 351319 - DNA, 120 bp, Artificial Sequence
  ENSG00000139154_31 (sequence is synthesized)
ttgtttcatgcacaaaattattaaaactgttgtataaaattaccttcagtctatgtgtataaggtgtttgtgagatataaatgaactttatgtttagtcttggatcgcatttctgagtct

SEQ ID NO: 351320 - DNA, 120 bp, Artificial Sequence
  ENSG00000139154_32 (sequence is synthesized)
cattatgtatatgcagatactcaaaaatctgaaaaaaatcaaaaatctgaaatacttctggtcccaagcatttcggataagggatactcagcctgtctctggtcctttaagaaaaagttt

SEQ ID NO: 351321 - DNA, 120 bp, Artificial Sequence
  ENSG00000139154_33 (sequence is synthesized)
tcgattcctttgtctagttgacaaaaagtttggaaacataaacttagaccacacaacttgcattttaatatgacaatgttgatcttggtaataagccagtacattaaattttagtgaaag

SEQ ID NO: 351322 - DNA, 120 bp, Artificial Sequence
  ENSG00000139154_34 (sequence is synthesized)
ctgtttcatgtattttacagtaaatactgccatattaggtacctacaacaaatggtggtttttggaaacttttacggtgggtttttaaagttattaatagtccatcatttcatcatttgt

SEQ ID NO: 351323 - DNA, 120 bp, Artificial Sequence
  ENSG00000139154_35 (sequence is synthesized)
gtttctgtatttattttgctaagaactaaataagattttgtacatcagattgtgtttgaaccgtaaggcacatctgctttatctaaaagaatcttaaggtggaaatagtgtaaaatttaa

SEQ ID NO: 351324 - DNA, 120 bp, Artificial Sequence
  ENSG00000139154_36 (sequence is synthesized)
aattttttatatttctaataaactttttatatataaatgttacctaaagtggacacatgttacttctgaatttcacatgaaaggaaattaaagatggacaataattatctctcaatattt

SEQ ID NO: 351325 - DNA, 120 bp, Artificial Sequence
  ENSG00000139154_37 (sequence is synthesized)
taagatttgttttactaattgaaaacagtatgtcagtaaatctttggccttagtgcttttttcccccttttacacattaataaaatgttttaaatatggtaatactcttaaaacggtaga

SEQ ID NO: 351326 - DNA, 120 bp, Artificial Sequence
  ENSG00000139154_38 (sequence is synthesized)
atttgccacagttgtttaaagcatttttattttttctttgaattcttaattcatggtgaacagatgttgggttcttaaaatataaaaatgagaaaatatgtattaaaaatacttgataga

SEQ ID NO: 351327 - DNA, 120 bp, Artificial Sequence
  ENSG00000139154_39 (sequence is synthesized)
gggttttctctttaatcacaacttaaaaaaagaaacctttaatacctctgcataagttctctgaaagaacttaaattcttagtttatatgaaaactgatatgtatgtctgtgtaacaaag

SEQ ID NO: 351328 - DNA, 120 bp, Artificial Sequence
  ENSG00000139154_40 (sequence is synthesized)
cctgttgggtacaggtctacaaggagatactttgtttctaaaaaaggagttaaatcgtgtcacctgaattttttttttttgagataagtggacattttggggattttggttaaaacatat

SEQ ID NO: 351329 - DNA, 120 bp, Artificial Sequence
  ENSG00000139154_41 (sequence is synthesized)
ttctctattctaaaaattacagaatatgtattcataaaagggaagaaattgttagaaaatttcctgtgtacgtagtttgtttttaaattaaagaatcttgtgacctggtgtaggacattt

SEQ ID NO: 351330 - DNA, 120 bp, Artificial Sequence
  ENSG00000139154_42 (sequence is synthesized)
aactctcctttccccgccctctttcccctcggcgcttcgctcctcacggacctcaggacggctctaactcggaaacagtccccaaacgggcccagatcctctggcggagcagaagagggc

SEQ ID NO: 351331 - DNA, 71 bp, Artificial Sequence
  ENSG00000139154_43 (sequence is synthesized)
atgtgaaactgatttttatcagcaatgtgagaagggactaattctggtatgattaaaatattttgtgcttt

SEQ ID NO: 351332 - DNA, 120 bp, Artificial Sequence
  ENSG00000139154_44 (sequence is synthesized)
gattcatttctgcttttacaggtgattactttatctcactagaaaaaaaaaatgtaaaaatctaaacaaaaagtgtccaaaacttacaataagccttaatctcgaataattaccatgaca

SEQ ID NO: 351333 - DNA, 120 bp, Artificial Sequence
  ENSG00000139154_45 (sequence is synthesized)
agtctccgtgtgagtgcgcgtagtcgcgcgcctgtccccgcgcgggctccgtagcgcgtgtgcaggctgacgcagctcgcgggccctcctcctgctctgcagcggcgtcggcggagtttt

SEQ ID NO: 351334 - DNA, 120 bp, Artificial Sequence
  ENSG00000139154_46 (sequence is synthesized)
cacattagagtcaaccccttcttttttttttttttttttttaaatccagtatttaggataatatttatgcttagtgtaaacattctgtgaatgaagtagactcttcggtggaatatatta

SEQ ID NO: 351335 - DNA, 120 bp, Artificial Sequence
  ENSG00000139154_47 (sequence is synthesized)
atatattactgtatatccacattttcatggaatggtactgtgggagactgagcaaacactcttttggcaacttagtagaacagcttcttaaaggctttgcatgcttgctgctttaagctg

SEQ ID NO: 351336 - DNA, 120 bp, Artificial Sequence
  ENSG00000139154_48 (sequence is synthesized)
cttttttttttcttttcttccctttagtgatttcagtagtttatattggaaagaaaaacaattacaacatgtgcccttacaaataccaaaagcactgtaaggatatttgtcttgacagtg

SEQ ID NO: 351337 - DNA, 120 bp, Artificial Sequence
  ENSG00000139154_49 (sequence is synthesized)
tttattgatttgaagtcatattaggaaatatttagacaatgaaaattatcaagagataatttacctttcaattatgataaatagatgtgattggttgccatttgtgttcttttgcagaac

SEQ ID NO: 351338 - DNA, 120 bp, Artificial Sequence
  ENSG00000139154_50 (sequence is synthesized)
aaagcaagggcaaccagctccttcgccgcacttcccgctcgaccctcggttctggacaacggagatcgtccccagtcaaggtgattatatcgcagatctcacttgggagcttctcttaac

SEQ ID NO: 351339 - DNA, 120 bp, Artificial Sequence
  ENSG00000139155_0 (sequence is synthesized)
gcaaagaaatggctcaaaagcttcagctctttctgtgccctgggagctgagatgcacgtcagtggccttgccagcgtggccaattctctgctgactgccagaaaaaagaggccaggaaga

SEQ ID NO: 351340 - DNA, 120 bp, Artificial Sequence
  ENSG00000139155_1 (sequence is synthesized)
aagaggaaagagaagagatcgctcaggggtgagaccatgcccttcatcttttcttttccctaatctcctctgcttgtgtccacccacactctccccacctggcaaaattgttcaaaattg

SEQ ID NO: 351341 - DNA, 120 bp, Artificial Sequence
  ENSG00000139155_2 (sequence is synthesized)
ctgtggagtttacctcagtttcctctttcagtctgtggtgtgtggtccatcctcttgctgagcacattgaaaggaactggctatctttgatctcttcctccagatcagagtcaaggaatg

SEQ ID NO: 351342 - DNA, 120 bp, Artificial Sequence
  ENSG00000139155_3 (sequence is synthesized)
tgtttataatggacacttcatccaaagaaaatatccagttgttctgcaaaacttcagtgcaacctgttggaaggccttcttttaaaacagaatatccctcctcagaagaaaagcaaccat

SEQ ID NO: 351343 - DNA, 120 bp, Artificial Sequence
  ENSG00000139155_4 (sequence is synthesized)
gctgtggtgaactaaaggtgttcttgtgtgccttgtcttttgtttactttgccaaagcattggcagaaggctatctgaagagcaccatcactcagatagagagaaggtttgatatccctt

SEQ ID NO: 351344 - DNA, 120 bp, Artificial Sequence
  ENSG00000139155_5 (sequence is synthesized)
cttcactggtgggagttattgatggtagttttgaaattgggaatctcttagttataacatttgttagctactttggagccaaacttcacaggccaaaaataattggagcagggtgtgtaa

SEQ ID NO: 351345 - DNA, 120 bp, Artificial Sequence
  ENSG00000139155_6 (sequence is synthesized)
tcatgggagttggaacactgctcattgcaatgcctcagttcttcatggagcagtacaaatatgagagatattctccttcctccaattccactctcagcatctctccgtgtctcctagagt

SEQ ID NO: 351346 - DNA, 120 bp, Artificial Sequence
  ENSG00000139155_7 (sequence is synthesized)
caagcagtcaattaccagtttcagttatggaaaaatcaaaatccaaaataagtaacgaatgtgaagtggacactagctcttccatgtggatttatgttttcctgggcaatcttcttcgtg

SEQ ID NO: 351347 - DNA, 120 bp, Artificial Sequence
  ENSG00000139155_8 (sequence is synthesized)
gaataggagaaactcccattcagcctttgggcattgcctacctggatgattttgccagtgaagacaatgcagctttctatattgggtgtgtgcagacggttgcaattataggaccaatct

SEQ ID NO: 351348 - DNA, 120 bp, Artificial Sequence
  ENSG00000139155_9 (sequence is synthesized)
ttggtttcctgttaggctcattatgtgccaaactatatgttgacattggctttgtaaacctagatcacataaccattaccccaaaagatccccagtgggtaggagcctggtggcttggct

SEQ ID NO: 351349 - DNA, 120 bp, Artificial Sequence
  ENSG00000139155_10 (sequence is synthesized)
atctaatagcaggaatcataagtcttcttgcagctgtgcctttctggtatttaccaaagagtttaccaagatcccaaagtagagaggattctaattcttcctctgagaaatccaagttta

SEQ ID NO: 351350 - DNA, 120 bp, Artificial Sequence
  ENSG00000139155_11 (sequence is synthesized)
ttatagatgatcacacagactaccaaacaccccagggagaaaatgcaaaaataatggaaatggcaagagattttcttccatcactgaagaatctttttggaaacccagtatacttcctat

SEQ ID NO: 351351 - DNA, 120 bp, Artificial Sequence
  ENSG00000139155_12 (sequence is synthesized)
atttatgtacaagcactgttcagttcaattctctgttcggcatggtgacgtacaaaccaaagtacattgagcagcagtatggacagtcatcctccagggccaactttgtgatcgggctca

SEQ ID NO: 351352 - DNA, 120 bp, Artificial Sequence
  ENSG00000139155_13 (sequence is synthesized)
tcaacattccagcagtggcccttggaatattctctggggggatagttatgaaaaaattcagaatcagtgtgtgtggagctgcaaaactctacttgggatcatctgtctttggttacctcc

SEQ ID NO: 351353 - DNA, 120 bp, Artificial Sequence
  ENSG00000139155_14 (sequence is synthesized)
ctttccctgtttgcactgggctgtgaaaattctgatgtggcaggactaactgtctcctaccaaggaaccaaacctgtctcttatcatgaacgagctctcttttcagattgcaactcaaga

SEQ ID NO: 351354 - DNA, 120 bp, Artificial Sequence
  ENSG00000139155_15 (sequence is synthesized)
tgcaaatgttcagagacaaaatgggaacccatgtgcggtgaaaatggaatcacatatgtatcagcttgtcttgctggttgtcaaacctccaacaggagtggaaaaaatattatattttac

SEQ ID NO: 351355 - DNA, 120 bp, Artificial Sequence
  ENSG00000139155_16 (sequence is synthesized)
aactgcacttgtgtgggaattgcagcttctaaatccggaaattcctcaggcatagtgggaagatgtcagaaagacaatggatgtccccaaatgtttctgtatttccttgtaatttcagtc

SEQ ID NO: 351356 - DNA, 120 bp, Artificial Sequence
  ENSG00000139155_17 (sequence is synthesized)
atcacatcctatactttatccctaggtggcatacctggatacatattacttctgaggtgcattaagccacagcttaagtcttttgccttgggtatctacacattagcaataagagttctt

SEQ ID NO: 351357 - DNA, 120 bp, Artificial Sequence
  ENSG00000139155_18 (sequence is synthesized)
gcaggaatcccagctccagtgtattttggagttttgattgatacttcatgcctcaaatggggatttaaaagatgtggaagtagaggatcatgcagattatatgattcaaatgtcttcaga

SEQ ID NO: 351358 - DNA, 120 bp, Artificial Sequence
  ENSG00000139155_19 (sequence is synthesized)
catatatatctgggactaactgtgatactgggcacagtgtcaattctcctaagcattgcagtacttttcattttaaagaaaaattatgtttcaaaacacagaagttttataaccaagaga

SEQ ID NO: 351359 - DNA, 120 bp, Artificial Sequence
  ENSG00000139155_20 (sequence is synthesized)
gaaagaacaatggtgtctacaagattccaaaaggaaaattacactacaagtgatcatctgctacaacccaactactggccaggcaaggaaactcaactttagaaacatgatgactggaag

SEQ ID NO: 351360 - DNA, 120 bp, Artificial Sequence
  ENSG00000139155_21 (sequence is synthesized)
tcatgtcttctaattggttgacattttgcaaacaaataaattgtaatcaaaagagctctaaatttgtaatttctttctcctttcaaaaaatgtctactttgttttggtcctaggcattag

SEQ ID NO: 351361 - DNA, 120 bp, Artificial Sequence
  ENSG00000139155_22 (sequence is synthesized)
tctactttgttttggtcctaggcattaggtaatataactgataatatactgaaacatataatggaagatgcagatgataaaactaattttgaactttttaatttatataaattattttat

SEQ ID NO: 351362 - DNA, 120 bp, Artificial Sequence
  ENSG00000139155_23 (sequence is synthesized)
tttgtgctcattgatatatattagctgtactcctagaagaacaattgtctctattgtcacacatggttatatttaaagtaatttctgaactgtgtaatgtgtctagagtaagcaaatact

SEQ ID NO: 351363 - DNA, 120 bp, Artificial Sequence
  ENSG00000139155_24 (sequence is synthesized)
gctaacaattaactcataccttgggttccttcaagtattactcctatagtattttctcccatagctgtcttcatctgtgtattttaataatgatcttaggatggagcagaacatggagag

SEQ ID NO: 351364 - DNA, 120 bp, Artificial Sequence
  ENSG00000139155_25 (sequence is synthesized)
gaagatttcattttaagctcctccttttctttgaaatacaataatttatatagaaatgtgtagcagcaaattatattggggattagaattttgaattaatagctctcctactattaattt

SEQ ID NO: 351365 - DNA, 120 bp, Artificial Sequence
  ENSG00000139155_26 (sequence is synthesized)
acatgtgctttttgtgtggcgctataagtgactatggttgtaaagtaataaaattgatgttaacatgcccaattattgttcttttatgaatccaatgaatttaaaactattgttaaatat

SEQ ID NO: 351366 - DNA, 120 bp, Artificial Sequence
  ENSG00000139155_27 (sequence is synthesized)
aatactgccccactttaatatatgtaagcaacttcctacttatacacgacgtgttcctaaaacatgtttgaaaggtgaatttctgaaagtctacaataaatgtaggtgttacaacaggaa

SEQ ID NO: 351367 - DNA, 120 bp, Artificial Sequence
  ENSG00000139155_28 (sequence is synthesized)
agaggccaggaagaaagaggaaagagaagagatcgctcagggtctgtggtgtgtggtccatcctcttgctgagcacattgaaaggaactggctatctttgatctcttcctccaggggatg

SEQ ID NO: 351368 - DNA, 120 bp, Artificial Sequence
  ENSG00000139155_29 (sequence is synthesized)
aactgtagcctccttggaacatactacacttgcaataatttgcgcattaaccatcaagacacttcagtaaagctatgcagtgccaatagtttaagctggatcctattttgccctaacaca

SEQ ID NO: 351369 - DNA, 120 bp, Artificial Sequence
  ENSG00000139155_30 (sequence is synthesized)
aagtgaactgagatgactatatttatatttcattatacttttgaattttagttacagtgatttttgtgtcaacacctccatatattagataacttaaaatgtgctatagtatctcaagtt

SEQ ID NO: 351370 - DNA, 120 bp, Artificial Sequence
  ENSG00000139155_31 (sequence is synthesized)
cactttggatcttttaaagataaatttaggataaatgatagcagattttattattaaacaatttatttgtattttctggtcactgactttaatattatgactgatgagaaataatatgat

SEQ ID NO: 351371 - DNA, 120 bp, Artificial Sequence
  ENSG00000139155_32 (sequence is synthesized)
atctgaatccccaaaaacagaaggccaatttgaattatataatttaatcctttgaagaatattgcaatttaagccagaaatttaataattatccgtttcttattttaaaacctttctggt

SEQ ID NO: 351372 - DNA, 120 bp, Artificial Sequence
  ENSG00000139155_33 (sequence is synthesized)
ttgtatatctcttgcttggcaatatttttactcatagttttgtagtaaagatacctatttaacattgtataactctgcatttcccaaaccctgttttccttgtcctggcaaaatactgtt

SEQ ID NO: 351373 - DNA, 120 bp, Artificial Sequence
  ENSG00000139155_34 (sequence is synthesized)
atgtgggttaaattactttcctgggctcatttaaatgcccccccaaacagaaaagagagaaatagtagaaactagtatttattgaacttctgccatgtgccagatattaagccaagcaca

SEQ ID NO: 351374 - DNA, 120 bp, Artificial Sequence
  ENSG00000139155_35 (sequence is synthesized)
gatataacatttaatttgtgaaacatcacattactcccattttgcaaataaaaatgggaataatgttacagagtagggagaagagttgcttttttttttttttaggattgttgtatcaaa

SEQ ID NO: 351375 - DNA, 120 bp, Artificial Sequence
  ENSG00000139155_36 (sequence is synthesized)
caatagtttttagttttttgaggaacctccatactattatattttccaaagagactacatcaacttatgtaaccactaaccatgtacaaagattcccttttctttacattctaaccagtt

SEQ ID NO: 351376 - DNA, 120 bp, Artificial Sequence
  ENSG00000139160_0 (sequence is synthesized)
agtctagtgggataccaggccctgagagacccctacgatcccaggacactgatgtggggtaactaacacccactggaagtctacgctgagttcacaggctatagtcagaggttccggttg

SEQ ID NO: 351377 - DNA, 120 bp, Artificial Sequence
  ENSG00000139160_1 (sequence is synthesized)
agatcaagttgggagacacacccttgttcattctccttgagaagcagctattatcaacagaacattgacagaacctgtgtttggggaaaggactgatggctttgagtctaggttggaaag

SEQ ID NO: 351378 - DNA, 120 bp, Artificial Sequence
  ENSG00000139160_2 (sequence is synthesized)
cacacaggaaccactgtggtctcctcttgcaggctctgcgaagcagtggtcttctcttgtttccctgtggccagtgtccctggagaggagctggaagctttttggaccctgagataaagg

SEQ ID NO: 351379 - DNA, 120 bp, Artificial Sequence
  ENSG00000139160_3 (sequence is synthesized)
ctttcctggaggagaacactgaagtcaccagcagtggtagcctcacccctgaaatccagttgcggcttttgacccccagatgcaaattctggtgggagagagctgacctgtggccccaca

SEQ ID NO: 351380 - DNA, 120 bp, Artificial Sequence
  ENSG00000139160_4 (sequence is synthesized)
gtgatccttactgggcaatctactggccaggaggccaagccctgtctaggtatcttttggataatcctgatgttgtcagaggaaaatctgtattagatcttgggagtggatgtggagcta

SEQ ID NO: 351381 - DNA, 120 bp, Artificial Sequence
  ENSG00000139160_5 (sequence is synthesized)
cagctattgctgctaagatgagtggggcatcaaggatcttggccaatgacatagaccctattgcaggaatggctattacactaaattgtgaattgaacagactgaatccttttcctattt

SEQ ID NO: 351382 - DNA, 120 bp, Artificial Sequence
  ENSG00000139160_6 (sequence is synthesized)
taatccaaaacattttgaatttggaacaagataagtgggaccttgttgttcttggcgatatgttttatgatgaagaccttgcagatagtcttcatcagtggctgaagaagtgcttctgga

SEQ ID NO: 351383 - DNA, 120 bp, Artificial Sequence
  ENSG00000139160_7 (sequence is synthesized)
cctatagaactcgagtactgattggtgaccctgggcggccccagttcagtggacacagcattcagcatcacctgcacaaagtggtagaatattcacttttggagtctactaggcaggaaa

SEQ ID NO: 351384 - DNA, 120 bp, Artificial Sequence
  ENSG00000139160_8 (sequence is synthesized)
acagtggactgacaacaagcacagtgtggggttttcagccttgagttgtcaaagtgcttccaagtatgaatatagtaatgtttggatctgactctaaaagttttctctataggagatact

SEQ ID NO: 351385 - DNA, 120 bp, Artificial Sequence
  ENSG00000139160_9 (sequence is synthesized)
ctccagtttaatgaatgtaattcttgttaaatggaaaatcttgtttttaaaatatgaaggtttagagttttgtttacttttgtcatgtaactggttctgtatttctatgcatgccaatta

SEQ ID NO: 351386 - DNA, 120 bp, Artificial Sequence
  ENSG00000139160_10 (sequence is synthesized)
tacacatctctatctgcatttttttttctattttaaccgctgaaggaatatgattatacaatgccatactcaatggtggcagcatttaatttaagtaatggagaagaattaaacattgta

SEQ ID NO: 351387 - DNA, 120 bp, Artificial Sequence
  ENSG00000139160_11 (sequence is synthesized)
gctggatctgtttctgtagtcgaggacaactgtgatgtaactttgaattaaacaaacaaaacaaaacagaagaagactatatatatattttttctttttttagagacagtctcactttgc

SEQ ID NO: 351388 - DNA, 120 bp, Artificial Sequence
  ENSG00000139160_12 (sequence is synthesized)
tctttttttagagacagtctcactttgctcccaggctggaatgcagtggctattcagaggcttaatcattgggcactgcagccttgaactctgggcttttttttttttttgagatggagt

SEQ ID NO: 351389 - DNA, 120 bp, Artificial Sequence
  ENSG00000139160_13 (sequence is synthesized)
ttgagatggagtctcagctctgtcgtccaggctggagtgcagtgactcatgtctcggctcactgtagcctccacctcccccaatcaagcgattgtcctgtctcagcctccagagtagctg

SEQ ID NO: 351390 - DNA, 120 bp, Artificial Sequence
  ENSG00000139160_14 (sequence is synthesized)
cagcctgacgatgttttttacttctatcacttccttttgattttttcttatagcttctatctctgcttacgtcacccatcattcttgcgtgttgtatgcttttcgcattagagccctttg

SEQ ID NO: 351391 - DNA, 120 bp, Artificial Sequence
  ENSG00000139160_15 (sequence is synthesized)
catgttaatcagttattttaaatttatgatctggtaattctaaaatgtctgccataactgagtctggttctgatgcttgttttcttttcagactgtttttttgtcttttagcatgccttg

SEQ ID NO: 351392 - DNA, 120 bp, Artificial Sequence
  ENSG00000139160_16 (sequence is synthesized)
taattttttgttgatagctagacatgatgtattgcataaataaacaagtaaactaaggtagcatgaggttttaaaatctgggtagggctactgtttgctgtagagtagatattacaggct

SEQ ID NO: 351393 - DNA, 120 bp, Artificial Sequence
  ENSG00000139160_17 (sequence is synthesized)
aaattttcctctagtgtcctggctattgtctcctctgttatctttgagtttccctagagattccttcttatatagagtctgaagcttgcagtttttttcacctgtaattccctgttatta

SEQ ID NO: 351394 - DNA, 120 bp, Artificial Sequence
  ENSG00000139160_18 (sequence is synthesized)
tacagtagcctaactgatgtgataaggtatgggagaaggtatgttctatagtcctgtgattaagtctcagtcagttaagtcagcctgtgcccctgctgtgaccttcacaagtgctttcag

SEQ ID NO: 351395 - DNA, 120 bp, Artificial Sequence
  ENSG00000139160_19 (sequence is synthesized)
cttttcttttgtcactttggtgagacaggaaggctagaggcagctggagttgggtgcttcctttcccccaggtcaacgaggctctggtaaaatagtttcccttgagaactggcttttgtt

SEQ ID NO: 351396 - DNA, 120 bp, Artificial Sequence
  ENSG00000139160_20 (sequence is synthesized)
aaggagaactgaacacttgggcatatttcaaaatggttactttccctatcctcataccagaagaggggatttttctctgatcctcaccctgagaacctggtaggtatcctggaggtaaaa

SEQ ID NO: 351397 - DNA, 120 bp, Artificial Sequence
  ENSG00000139160_21 (sequence is synthesized)
ctatgaaagtgtggtgtctcccctaggagtgggccccctggagtttgtttgttttaatttaacaaagtttaattgagcaaagaacaatctgtgaattgggcagctcccaaaagcagaata

SEQ ID NO: 351398 - DNA, 120 bp, Artificial Sequence
  ENSG00000139160_22 (sequence is synthesized)
cagctcccaaaagcagaataggttcagagtgactgcagggttgccacacctggttagataacgtttatggacagattcctagagcttttgattcttttttttttttttttgaggcagagt

SEQ ID NO: 351399 - DNA, 120 bp, Artificial Sequence
  ENSG00000139160_23 (sequence is synthesized)
gtgctgggattacacgtgtgagccactgtgccaggctggagcttttgattcttaagtccatccacatggagcctccagcaactcaggaattacagcataaatgttcctattggtactggc

SEQ ID NO: 351400 - DNA, 120 bp, Artificial Sequence
  ENSG00000139160_24 (sequence is synthesized)
tccagcaacaggcttctgctccctgtaagctatggttctttgtatttgcgtttctaatttgtgaggcattctctctttaaccttaattctctaatggatctaagtgttgttgacttttca

SEQ ID NO: 351401 - DNA, 120 bp, Artificial Sequence
  ENSG00000139160_25 (sequence is synthesized)
gtttattgagcttttttcttattgtgaggatgggaatgatgacttccaatctctttatattagaaaatataaatcagactagagactggaaatttttgttgttgttgttgggtgttttgt

SEQ ID NO: 351402 - DNA, 120 bp, Artificial Sequence
  ENSG00000139160_26 (sequence is synthesized)
tttgtttgtttttagacaggtcttgctctctcatccaggctggagttcagcaatgcgaccgtgctcactgcagcctcgactttctaggctcaggtaatcctcccacttcagcctccttag

SEQ ID NO: 351403 - DNA, 120 bp, Artificial Sequence
  ENSG00000139160_27 (sequence is synthesized)
tagctaggactgtaggcatgcaccaccatgatgcctggctagtttttttattttgtattttttgtagacatggagtcttgctacattggccaggctgggtattactgggtatttctttct

SEQ ID NO: 351404 - DNA, 120 bp, Artificial Sequence
  ENSG00000139160_28 (sequence is synthesized)
ttcctcctttatttctttccatatttacttattcaatgaatatttgagtgcttattatataccaggcactgttctaggcactggggatatggggatacagcaatgaaaaaaaaagataaa

SEQ ID NO: 351405 - DNA, 120 bp, Artificial Sequence
  ENSG00000139160_29 (sequence is synthesized)
tactttgtccttatgaaatttgtattctagagtagggagacataatgaacaaatgaaaacaggcatcagatggtgataggtagtaaggagaaaaagaagtaagggtaatagggaatactg

SEQ ID NO: 351406 - DNA, 120 bp, Artificial Sequence
  ENSG00000139160_30 (sequence is synthesized)
ggtactggatggggtacagatattttaaacagagtggtgagaaatagttaatacagctagcaacataaaaaaggagaaatatcaaactgcaaactgttttaggaagataaatccttcata

SEQ ID NO: 351407 - DNA, 120 bp, Artificial Sequence
  ENSG00000139160_31 (sequence is synthesized)
gacccaaagaagctcacaatttagatgtcgaaactagtttctgcaaaaaggggaaaatgtgattgacttggttaaatattcagtattaaattttattgaatttgtctttagaaaaatttc

SEQ ID NO: 351408 - DNA, 120 bp, Artificial Sequence
  ENSG00000139160_32 (sequence is synthesized)
atagttagaacaggccttacccattttgcacatatatacatatgcaccacctttgcagtggcaacatatatatccacactataaacataccacatttataaatcttgtaaggacaagaaa

SEQ ID NO: 351409 - DNA, 120 bp, Artificial Sequence
  ENSG00000139160_33 (sequence is synthesized)
tggagttgaataagtaccccccaacatatacaagaaagttagcatacttaccccgtttttcactacatcagaggcaaaataagaaatcttttaagaaaatctcaagactggctcatggca

SEQ ID NO: 351410 - DNA, 120 bp, Artificial Sequence
  ENSG00000139160_34 (sequence is synthesized)
aaatgaatatgctaaatttgggggttggtttaagcgtggtatgtgtcaggtaattttgtgattaccaaaaagttttcacttgaaaactaagacctttgctgtttatttcacaatgtgaaa

SEQ ID NO: 351411 - DNA, 120 bp, Artificial Sequence
  ENSG00000139160_35 (sequence is synthesized)
tcaataaacctgaggatacaagtctctgtagtgatattctgtatttactcatttttacacatttttgaatgcaattttgctaaggaaggaaagcttacagatgcataaaatgtaactggg

SEQ ID NO: 351412 - DNA, 120 bp, Artificial Sequence
  ENSG00000139160_36 (sequence is synthesized)
aagagtagccataaaaatcaatgaatggatgtggctgggcaagagcctctgtaatactaatacgctgaatggctaataagtcacttcatttcggtgaaacaaatacctaaattctttgaa

SEQ ID NO: 351413 - DNA, 120 bp, Artificial Sequence
  ENSG00000139160_37 (sequence is synthesized)
gaattaacaggcttgatgttcaggtctgcttttggcaaatgggcatttaaatactccaagaaggtaagagccagaaaataggaaggtaactatgcttttagaaatatgtttacttagatt

SEQ ID NO: 351414 - DNA, 120 bp, Artificial Sequence
  ENSG00000139160_38 (sequence is synthesized)
ctcccaaggtttatacttacaggtaaacttagaacaatagctcaaatacctacataggagaaggaaatctcaagggaaaacagttaattttaaagttatttaagaaacagaatccaacac

SEQ ID NO: 351415 - DNA, 120 bp, Artificial Sequence
  ENSG00000139160_39 (sequence is synthesized)
catagatcagagttcatgctaggattatcatttcaaaaataatgactcatccaacagatatagaataatagcactttaaagatgtttaagagtaaagcacaaaccatgtatataccaaga

SEQ ID NO: 351416 - DNA, 120 bp, Artificial Sequence
  ENSG00000139160_40 (sequence is synthesized)
cttagctaattctctgagagttataacttaagacaataaaataattaaaaatagtgttaacattaagtagaatgcaaatctctatagatggtttcctgggaaagtagttttgataagctt

SEQ ID NO: 351417 - DNA, 120 bp, Artificial Sequence
  ENSG00000139160_41 (sequence is synthesized)
tcctagcattgatcatcttcaaaaaagcatcaataaacagtccatgtcacttgctttagtttgtttgggcctactaattgctccaacacttctcgggaatgatctataaaagaaaacaat

SEQ ID NO: 351418 - DNA, 120 bp, Artificial Sequence
  ENSG00000139160_42 (sequence is synthesized)
gacaatatattaattgacaataaaaaatgtttaatgtttcctcatgtctaactggaggtgatgttaattattatacagttatttaaaggattaaaggaggtgatctataaagcacaatat

SEQ ID NO: 351419 - DNA, 120 bp, Artificial Sequence
  ENSG00000139160_43 (sequence is synthesized)
acaactaactcactaataattaattaatggtagccctcactattattaggtgtagtgcacctatcatggtattacttgtttaaaaaaaaaaaacaggcatttgttgttttctctgtaatt

SEQ ID NO: 351420 - DNA, 120 bp, Artificial Sequence
  ENSG00000139160_44 (sequence is synthesized)
tcatcataattccaccaaccagagtaatggtctaatttcaccattaacctgtgttaatggttaataacttttttcaggatcttagccggaaatagatgattcactaaagtggggtgactg

SEQ ID NO: 351421 - DNA, 120 bp, Artificial Sequence
  ENSG00000139160_45 (sequence is synthesized)
aacagcatttaatgaagggaatatttaccaaaaaagtaggattaaagaaagccaataggtacggtaaaccaccttgggaagctgcaacacacccaaagggttaaaggaggtagtagtcac

SEQ ID NO: 351422 - DNA, 120 bp, Artificial Sequence
  ENSG00000139160_46 (sequence is synthesized)
cgaacgtgacaagttgacctgtagctgaacatttttccatgtctgtataatactactataaagcatgattttaaatagataaccattatataaatacactgtaatttaaccaatctatat

SEQ ID NO: 351423 - DNA, 120 bp, Artificial Sequence
  ENSG00000139160_47 (sequence is synthesized)
tattggacatttagatgttttcagtttttcacaatgtacagtcgtgattttgatatggtttccatcctagttttaggatgtcttttaaaaatctgaattaaagcaaaaatactgataaaa

SEQ ID NO: 351424 - DNA, 120 bp, Artificial Sequence
  ENSG00000139160_48 (sequence is synthesized)
gccgcgaggggccgccgtccgtcccgccccctgccgggccgcggcgctctgctagagcgtggctcagttttggtagcgggaccccggaaatgtaaagcatgagcgggaacagtcgccagg

SEQ ID NO: 351425 - DNA, 120 bp, Artificial Sequence
  ENSG00000139160_49 (sequence is synthesized)
agtctagtgggataccaggccctgagagacccctacgatcccaggacactgatgtggggtaactaacacccactggaagtctacgctgagttcacaggctatgtatgacctgacatgcat

SEQ ID NO: 351426 - DNA, 120 bp, Artificial Sequence
  ENSG00000139160_50 (sequence is synthesized)
gctgagttcacaggctatgtatgacctgacatgcattttgacctgccctgtgttttgatatttgaatgagttgctgatgtttacaagccgaagctggccgggcgtggtggctcgcgcctg

SEQ ID NO: 351427 - DNA, 120 bp, Artificial Sequence
  ENSG00000139160_51 (sequence is synthesized)
tcccaggactcgggaggctgagacaattataaattcattaacccccagaactcttggctagacttcataaaggcaaaaactgtgtttgccctgttaactgctttatcccaccactagaat

SEQ ID NO: 351428 - DNA, 120 bp, Artificial Sequence
  ENSG00000139163_0 (sequence is synthesized)
gcggccgcccgcggtccagctccgacaacaggaattttctccgagagcgggccgggctcagttcagctgctgtccagacccggatcggcaacagtgccgcctccagacgttctcctgccg

SEQ ID NO: 351429 - DNA, 120 bp, Artificial Sequence
  ENSG00000139163_1 (sequence is synthesized)
ctcgcccgcccgtcccagcgcccccagccctcccgcgagggcgccccgggacggaaggatccaccagtctgtcggcgcccgccgttctcgtggtcgccgtcgccgtcgtcgtggtggtag

SEQ ID NO: 351430 - DNA, 120 bp, Artificial Sequence
  ENSG00000139163_2 (sequence is synthesized)
tctccgccgtcgcctgggccatggccaattacatccacgtccctcccggctccccggaggtgcccaagctgaacgtcaccgttcaggatcaggaggagcatcgctgccgggagggggccc

SEQ ID NO: 351431 - DNA, 120 bp, Artificial Sequence
  ENSG00000139163_3 (sequence is synthesized)
tgagcctcctgcaacacctgcggcctcactgggacccccaggaggtgaccctgcagctcttcacagatggaatcacaaataaacttattggctgttacgtgggaaacaccatggaggatg

SEQ ID NO: 351432 - DNA, 120 bp, Artificial Sequence
  ENSG00000139163_4 (sequence is synthesized)
tagtcctggtgagaatttatggcaataagactgagttattagtcgatcgagatgaggaagtaaagagttttcgagtgttgcaggctcatgggtgtgcaccacaactctactgtaccttca

SEQ ID NO: 351433 - DNA, 120 bp, Artificial Sequence
  ENSG00000139163_5 (sequence is synthesized)
ataatggactatgctatgaatttatacaaggagaagcactggatccaaagcatgtctgcaacccagccattttcaggctaatagctcgtcagcttgctaaaatccatgctattcatgcac

SEQ ID NO: 351434 - DNA, 120 bp, Artificial Sequence
  ENSG00000139163_6 (sequence is synthesized)
acaatggctggatccccaaatctaatctttggctaaagatgggaaagtatttctctctcattcccacaggatttgcagatgaagacattaataaaaggttcctaagtgatatcccaagct

SEQ ID NO: 351435 - DNA, 120 bp, Artificial Sequence
  ENSG00000139163_7 (sequence is synthesized)
ctcagattctccaggaagagatgacttggatgaaggagattctttccaacctgggctcacctgttgtgctttgccataatgacctattgtgtaagaatataatctacaatgagaaacaag

SEQ ID NO: 351436 - DNA, 120 bp, Artificial Sequence
  ENSG00000139163_8 (sequence is synthesized)
gtgatgtacagttcattgattatgaatattctggatacaactacctggcatatgatattggaaatcatttcaatgaatttgcaggtgtgagtgatgtagactatagtctgtatccagata

SEQ ID NO: 351437 - DNA, 120 bp, Artificial Sequence
  ENSG00000139163_9 (sequence is synthesized)
gagaactacagagtcagtggctgcgtgcttaccttgaagcctacaaagaatttaagggctttgggactgaagttactgaaaaggaggtagaaatactcttcattcaagtcaatcagtttg

SEQ ID NO: 351438 - DNA, 120 bp, Artificial Sequence
  ENSG00000139163_10 (sequence is synthesized)
cattggcttctcatttcttttggggattgtgggctttgattcaagccaaatactccactattgagtttgatttccttgggtatgcaattgttcgttttaaccagtactttaaaatgaagc

SEQ ID NO: 351439 - DNA, 120 bp, Artificial Sequence
  ENSG00000139163_11 (sequence is synthesized)
ctgaggttactgcattaaaagtgcctgagtaaagaagagatttaattattctccagtagctgagcaatgcttgtgaatcttttcttaagaaatcccaaaaagccaatattagttaaaatt

SEQ ID NO: 351440 - DNA, 120 bp, Artificial Sequence
  ENSG00000139163_12 (sequence is synthesized)
ctgttgtttaatttggttatcttgctttataaattatgcctctaaacaatcaaatctatttttgaaatagactgaatgatgtcaagaaatatacctactgctatccgtatgtggtggatt

SEQ ID NO: 351441 - DNA, 120 bp, Artificial Sequence
  ENSG00000139163_13 (sequence is synthesized)
agaaatgtgttaaatctgcaaaaggtataaagatgtcagtttaatttctttgataatttaacctatgttgtatgtgaattatttattataaacttagcacgattctgtgactgtttttct

SEQ ID NO: 351442 - DNA, 120 bp, Artificial Sequence
  ENSG00000139163_14 (sequence is synthesized)
ctgtttcacgttcgttgagtgtaagcaatgaaaatgtcccaaataagttttttaagttttactttaataagattaatttcagtaaacattctagttgttcagtgtaacctttttatcttg

SEQ ID NO: 351443 - DNA, 120 bp, Artificial Sequence
  ENSG00000139163_15 (sequence is synthesized)
atgcattgtaagtaaaatgaatcatttactcttgaaatgccagtcattgactgatgtagataatttaggattttcatataaaaatagctgtttaggaaggtgaaatacattcactgtctc

SEQ ID NO: 351444 - DNA, 120 bp, Artificial Sequence
  ENSG00000139163_16 (sequence is synthesized)
tgttggtggtacatcttgttgaattcaatattagaaagtatttctttttggggtaatataacttagaattaaatccctgtttctctatgtagtctggcagtataaatataaatatttacc

SEQ ID NO: 351445 - DNA, 120 bp, Artificial Sequence
  ENSG00000139163_17 (sequence is synthesized)
ttggaataagtattagttaatgttaccaaaatctgtattaaataatgttttcaaatgctaaatatggtcgttactattttcagttttaaaaattttatagtatcaaattgtttctaacca

SEQ ID NO: 351446 - DNA, 120 bp, Artificial Sequence
  ENSG00000139163_18 (sequence is synthesized)
tctaaccaaaaatttccttttacttctagagatgctttatgtttttgattattaaatagtcactagtattgctaatttttgaaacaaatacacaaaatttatcatatgtagaaataagaa

SEQ ID NO: 351447 - DNA, 120 bp, Artificial Sequence
  ENSG00000139163_19 (sequence is synthesized)
aatattgtttaggttaattattttttacctatccagagtcattccttacatttcagtttcatgtttcattcctcacattttagtttcatgttttagtttgattctatgtttttagactga

SEQ ID NO: 351448 - DNA, 120 bp, Artificial Sequence
  ENSG00000139163_20 (sequence is synthesized)
tagcaaatgattacttgatacatgtaagttcagcgttatatgttgaggcagttatataattaaataaggaacacttagggcattgatcttgtacacttaaaatctgacaaatgacaaaat

SEQ ID NO: 351449 - DNA, 120 bp, Artificial Sequence
  ENSG00000139163_21 (sequence is synthesized)
gtgaattaagcataaatagtcatggcaggagggcttttgtttatttctcttgtttttgtttaactgtatttttaattttgtctggtggtaagagggaggtaattattgtatggaaagaag

SEQ ID NO: 351450 - DNA, 120 bp, Artificial Sequence
  ENSG00000139163_22 (sequence is synthesized)
ttagatctttcagatagataaataggcttcaggttttgaagtctgctctgtgtagttgagcagtcatggttaactttacttagaaaattagtctgacaagctttgcacttcggtcacata

SEQ ID NO: 351451 - DNA, 120 bp, Artificial Sequence
  ENSG00000139163_23 (sequence is synthesized)
agtgcccatgtacaaagttggcttactggatctgcatattcaaaatatgcaactacaaatttatcctctgagaaatcttctgaggagtctaatgtattccaaatgacttaatattctcag

SEQ ID NO: 351452 - DNA, 120 bp, Artificial Sequence
  ENSG00000139163_24 (sequence is synthesized)
acaaatgctttaaaatacttggattatctcaagatttttgaagctaataaagtaaatagaaacacaggccattttaaatggtaaattctagttacataaatataatcttaaagtatgttt

SEQ ID NO: 351453 - DNA, 120 bp, Artificial Sequence
  ENSG00000139163_25 (sequence is synthesized)
gtatctgtaacagtgttagaccagatttggtttctacctccccaatgttataaatgttcacttttgtttttataaaccatattactgtaagatcaatagaactttgcctagttaagtgaa

SEQ ID NO: 351454 - DNA, 120 bp, Artificial Sequence
  ENSG00000139163_26 (sequence is synthesized)
tggaaccaattaaacaactagtagctttttataatgttagtgtgaacttgaaaaattgtttttggtggaatttttgtctgtggttagaacattttcataaaacagataaagaatgtgtaa

SEQ ID NO: 351455 - DNA, 120 bp, Artificial Sequence
  ENSG00000139163_27 (sequence is synthesized)
tttttttttttttttttgctttctgccttctaaagtgcaacagtatatatcttgtagaactgtgggaggagagaagataatttttctaccttactccatattcttacttcaaactatttt

SEQ ID NO: 351456 - DNA, 120 bp, Artificial Sequence
  ENSG00000139163_28 (sequence is synthesized)
ttcttacttcaaactattttgaatagaggttcactgagccattgctgatagactgtgcatagctactagctgtcacactattgtaggttttttggagagattcatagggaagtgaatgta

SEQ ID NO: 351457 - DNA, 120 bp, Artificial Sequence
  ENSG00000139163_29 (sequence is synthesized)
tgttgtgatgctcctacttcctgtataggtttttgggatcatggtgcaggctagtaataggattcagaattgcttcccttttatatcgaccatgtaagggattctaaaggagggtaaatc

SEQ ID NO: 351458 - DNA, 120 bp, Artificial Sequence
  ENSG00000139163_30 (sequence is synthesized)
tcaaagtgctctgaaatcatccctctaaaatctgtcctgtggtgtgctaagatgtctgttgcctttttatgttaagctaaggaacttgaatgccttacctaataactcaactagtagtaa

SEQ ID NO: 351459 - DNA, 120 bp, Artificial Sequence
  ENSG00000139163_31 (sequence is synthesized)
gctcattttgtaaatatgaaaatggctgtaagaagtggcattcatgtatattcaatgttagtcaatagaccatagtggcctggatgctttaacaagccaaattccgcaattttttttcct

SEQ ID NO: 351460 - DNA, 120 bp, Artificial Sequence
  ENSG00000139163_32 (sequence is synthesized)
tttttccccttcatacttgtatgatctcacctgaccagtgatttcttttcctcctaaccccatgctaccaccattttctggaaatcaaagagatgtggtagtaaatcatacagtacacac

SEQ ID NO: 351461 - DNA, 120 bp, Artificial Sequence
  ENSG00000139163_33 (sequence is synthesized)
gatcatctgagatcaatatgagcacaaaactcatcaagtaggtctgcctggaatgtatataaaaaatgtaaataaaaatttgtaaattagtgtgaactgtatcttgcatatgagactgtg

SEQ ID NO: 351462 - DNA, 120 bp, Artificial Sequence
  ENSG00000139163_34 (sequence is synthesized)
tattgttttgcattctcttcccttttgtagaaatttttctgtaaggaaatgattcagcttgttggttttagagtaaaaatagccaacagttgtggctacacagtgagatcacaggaactg

SEQ ID NO: 351463 - DNA, 120 bp, Artificial Sequence
  ENSG00000139163_35 (sequence is synthesized)
gaaatagggtttgtcggctttggttaatgtcagtactcatttatttagcctctcagtgcttaataagacttttctttattttttagttagccgttaggttttgtgaggttagattcctgg

SEQ ID NO: 351464 - DNA, 120 bp, Artificial Sequence
  ENSG00000139163_36 (sequence is synthesized)
aagcagtgaatttatacactgttatattaatagagctccgttctttgagtcatgattccaagctaaaggaaattaaaaatgtaatttaataatttcctatttttagggttgttaattttt

SEQ ID NO: 351465 - DNA, 120 bp, Artificial Sequence
  ENSG00000139163_37 (sequence is synthesized)
ttctacaaaaaaaccttgaaattttagatatcccaatgtgaatctaatttccatatatacagaaattagacaaataataagtctttagttcaacttaagcatatctcaaatgacttctct

SEQ ID NO: 351466 - DNA, 120 bp, Artificial Sequence
  ENSG00000139163_38 (sequence is synthesized)
aaatttaaagttgatcatgataggatcataaaagacagaaaagacttaagtaatcttgtaatgacaattatttccatttttgctgaactaaaaatatttaacttcataaatatgttacta

SEQ ID NO: 351467 - DNA, 120 bp, Artificial Sequence
  ENSG00000139163_39 (sequence is synthesized)
cagcttccagatttaaagaaaaaaagtttcccccactctcaattaaaagttagaaccctccacttttaaaattatacaaatatttcttttttacattacacagaagccttctgtaccatt

SEQ ID NO: 351468 - DNA, 120 bp, Artificial Sequence
  ENSG00000139163_40 (sequence is synthesized)
ttacgaatttctgtcttcataatataagtgaaaatactgtcatttcaattttctgctttaaattgtttttaataagcattccaaagtgatacagacttaagcttttaatcaatcagtcat

SEQ ID NO: 351469 - DNA, 120 bp, Artificial Sequence
  ENSG00000139163_41 (sequence is synthesized)
tcagttgatagacaaagttagcgatgctttatgctaggaaacttgttgacagtaacctgtgcgactttatgcagaagacaaatgctagtaattattatgcacagaggaaaaatcatttta

SEQ ID NO: 351470 - DNA, 120 bp, Artificial Sequence
  ENSG00000139163_42 (sequence is synthesized)
agtatgtggtaaagcagcttcatctttcaaaattgatttgctctggtttttctttagtccattagattccagaatgtccttttactgggaatttagttatgtattaagataacctgtttt

SEQ ID NO: 351471 - DNA, 120 bp, Artificial Sequence
  ENSG00000139163_43 (sequence is synthesized)
cagttctttttgaaaagaagacattatttatattgaaccaccttattttaaaatttttaacttttatataccacttgtgtgattccagtgtcatgtcttgggtttgatgtcgttggacag

SEQ ID NO: 351472 - DNA, 120 bp, Artificial Sequence
  ENSG00000139163_44 (sequence is synthesized)
aaaagtgtatcaattattttaaatgaatttttccccatgtttgaggcttagtctgtaaatgtgttgctgtaacagaaaatacttgggtatgcattacttgaatacttgaaaactgaaatt

SEQ ID NO: 351473 - DNA, 120 bp, Artificial Sequence
  ENSG00000139163_45 (sequence is synthesized)
aataagatgtattacataatgaattagatttctctgaacagtttttacactgaaaatcttcatttctggattgcagtttgaaatggaatgaagacctgaattatttgggtagaaaaaatt

SEQ ID NO: 351474 - DNA, 120 bp, Artificial Sequence
  ENSG00000139163_46 (sequence is synthesized)
atgatagtgcttataagaactgtaaactgttttaaactattttgtgtttgacgcatcaaacttcaagttttttgtaagtttctctcctgaaattttctttctcttctatactttatgcac

SEQ ID NO: 351475 - DNA, 120 bp, Artificial Sequence
  ENSG00000139163_47 (sequence is synthesized)
ttactatactactgatgtaataaaagagcagggttaaaaatattgtatctgtattcattgtgaatcctgtagcttttctagttaacaaaaaatcgctttctaaaatactcttaatcccat

SEQ ID NO: 351476 - DNA, 120 bp, Artificial Sequence
  ENSG00000139163_48 (sequence is synthesized)
tgttttggttaacatcttacccatttgttgtatttcaaatgccattaatcattttagtacaacacctatgtttataaaaatttgaaaacattacatattgtatttaaaactaattagtga

SEQ ID NO: 351477 - DNA, 120 bp, Artificial Sequence
  ENSG00000139163_49 (sequence is synthesized)
agagtaagaaaaaaactagccaacagaattgtaggtgatgcattagttaaatttcaaaactcataataaaggaactttcagagattggttgaaacccagtggtatccctgtaaattagct

SEQ ID NO: 351478 - DNA, 120 bp, Artificial Sequence
  ENSG00000139163_50 (sequence is synthesized)
cctgtgactggaaaagaccccaaaaaggcagtagaggagattagtgtttacttgctgtggttgtggtgtgctgctacttaattataggtagtgacacactgaaattcttatttgtccaat

SEQ ID NO: 351479 - DNA, 120 bp, Artificial Sequence
  ENSG00000139163_51 (sequence is synthesized)
aatctgaagtagtttcctatatttatctgtactaaattgactataaattgagtctgcaaagaggaaactttttgactgtactgtatttaggagcctttgtacagcttggtcaaatttcca

SEQ ID NO: 351480 - DNA, 120 bp, Artificial Sequence
  ENSG00000139163_52 (sequence is synthesized)
tgatatgaagtatttgagttttaaaatatactgttattaaaaggaaaaagacatggccattattccatgtgcttaaatgataatttccttattcagtttcagaagaaaaagaatgaaatt

SEQ ID NO: 351481 - DNA, 120 bp, Artificial Sequence
  ENSG00000139163_53 (sequence is synthesized)
gggtaactgtcattgcgttagctttatgttgaattgggaaattgtggcataaagcttaaattcgtgtttatcaaatgtgaaccatagtagtataatgctgctttgtatataatgtaagtg

SEQ ID NO: 351482 - DNA, 120 bp, Artificial Sequence
  ENSG00000139163_54 (sequence is synthesized)
ctacaaatagtctcagcactgaaaatgtattgatacctcttaaatgaatgcaacttttgatgtaggtgttttgctatgcctcagaaaatatctgtctgagaatttgttaatctgtttgat

SEQ ID NO: 351483 - DNA, 120 bp, Artificial Sequence
  ENSG00000139163_55 (sequence is synthesized)
aatgaagatacttcctgttttcttgtttcatattttcatgttcaaaatttaagttttacatttttactactgttaatttaaataaaatttgttctgtggataaaatgaggttggcagtga

SEQ ID NO: 351484 - DNA, 120 bp, Artificial Sequence
  ENSG00000139163_56 (sequence is synthesized)
agaaaattaaaaacagcctcattcatgtaactggttaagtaaaaatacattttcactatgtgttcataaacttttaatgaagctgtttgtctttcagttcaaatataagtgatgtttagg

SEQ ID NO: 351485 - DNA, 120 bp, Artificial Sequence
  ENSG00000139163_57 (sequence is synthesized)
ctttatttctgttaataaggctttttaccattgattaaatgaaggaatgtatctttttgaagagatttatattctgtaaataaaaattcgttgtaacaataaagttgagttctaactaca

SEQ ID NO: 351486 - DNA, 120 bp, Artificial Sequence
  ENSG00000139163_58 (sequence is synthesized)
tttgaattttgtaaagctcattgccataaaattcacagccccttaccctgtattgtctcacaagtgcatgtaatcaagcacgtacaatgagacaaaatattggaagctatttaattacaa

SEQ ID NO: 351487 - DNA, 120 bp, Artificial Sequence
  ENSG00000139163_59 (sequence is synthesized)
acggcttagttctaaagagactgtttggaaaacatttccaaataactgcagcacttggatgactacttccctgagttttgcttattcactgaaagcagaactactgtgccgagccctcca

SEQ ID NO: 351488 - DNA, 120 bp, Artificial Sequence
  ENSG00000139163_60 (sequence is synthesized)
tgcctctcttcacacctgttctgaatccagcatggagcagacgagaagtcatggagttctgacagttccagcacgtgtgtcccctttgcaaaggggaaaattacgttttgtaagagaccc

SEQ ID NO: 351489 - DNA, 120 bp, Artificial Sequence
  ENSG00000139163_61 (sequence is synthesized)
caaatcagggtctcttataaaccctggggtaaaactattagaaatgatattatttttcatttatttaaaaaaaccacagcaaataaaatctgttagagttaaatatctgtgacgccctcc

SEQ ID NO: 351490 - DNA, 120 bp, Artificial Sequence
  ENSG00000139163_62 (sequence is synthesized)
taaatcatctgtttcatttcagtaaatatttctaagatataatattctgttgacatagattgccccttgtgtttcatgtaacacagattgtatctttcttcaagctttttgtttcctcct

SEQ ID NO: 351491 - DNA, 120 bp, Artificial Sequence
  ENSG00000139163_63 (sequence is synthesized)
cttctctgaagttttaaaaccagttttaactggcttacagtgtgtgtgtgtctgtgtgtgcatgcgtgtacatgcatgcatttgcactttcctttgttttgattttatcaccacctggcc

SEQ ID NO: 351492 - DNA, 120 bp, Artificial Sequence
  ENSG00000139163_64 (sequence is synthesized)
tttccatcaagttgcctggtgcttaagtaccacagttcatttgggcttagctttctgcctatatatgagactaacataaaaatagatttgttttctgtattcttgtggacatgagtgtat

SEQ ID NO: 351493 - DNA, 120 bp, Artificial Sequence
  ENSG00000139163_65 (sequence is synthesized)
gatccaaagcatgtctgcaacccagccattttcagtttatcatcgttgactctttgcaaaggaaaaactacaagatgttttggattaaccggctgcagagggtcaaggcttctgcttagt

SEQ ID NO: 351494 - DNA, 120 bp, Artificial Sequence
  ENSG00000139163_66 (sequence is synthesized)
tttttctagttagtgtttgagttgaagtgttatacatttcttactgccgattgcttattacttaattgttcatgttttcagagttcttgcctattaaaattttattaatttggttaacaa

SEQ ID NO: 351495 - DNA, 120 bp, Artificial Sequence
  ENSG00000139163_67 (sequence is synthesized)
ccacggggggagattcctgctgatagttgcccctcctcccactccccagtccacggtcactgcaaaatgaacctttccactccccttgcacggggtcctcgtctacctcctcccctccca

SEQ ID NO: 351496 - DNA, 120 bp, Artificial Sequence
  ENSG00000139163_68 (sequence is synthesized)
ccagtaatgcagtcattaatcctctctgatctttccttcctctcccctccccctgcgatgtgctttcattgatgcctcacactgcgttttgtcttcccaaaccctagcgtactcaattcc

SEQ ID NO: 351497 - DNA, 120 bp, Artificial Sequence
  ENSG00000139163_69 (sequence is synthesized)
caaagtaatgaccacgaccatgcatcgctaggtcggttcttaggcagcaccacacacattgttttgtttgagtcgatatttctgaattattaaagtcgtcttactgaaattaatacctga

SEQ ID NO: 351498 - DNA, 80 bp, Artificial Sequence
  ENSG00000139163_70 (sequence is synthesized)
tgcccagaaatgatatttaacatttagctatttggatttaagctacttttagagacatattgaaattgttgtttttaaat

SEQ ID NO: 351499 - DNA, 120 bp, Artificial Sequence
  ENSG00000139163_71 (sequence is synthesized)
aatttcatcattactttgctgttttttattgaaatttaaatgtatcattggctacatttacgagcttacggtgtgccaagcactgttctaagtacttttatgtgtatcaacttactaatc

SEQ ID NO: 351500 - DNA, 120 bp, Artificial Sequence
  ENSG00000139163_72 (sequence is synthesized)
ttcagaacaatgcaagaagtaggttctaatgtactgattttatatatgagatagagagacacagagggttggtgacttgcctaaggttactcggtttgtatgtagcagagctgggattca

SEQ ID NO: 351501 - DNA, 120 bp, Artificial Sequence
  ENSG00000139163_73 (sequence is synthesized)
aactcaaactctggctctgtagctcatcctgtcagctactactatctgaaatacttgacaaatagtgcaggataaaccccattaaaaggagctcactaagatttatattttgtctcaact

SEQ ID NO: 351502 - DNA, 120 bp, Artificial Sequence
  ENSG00000139163_74 (sequence is synthesized)
ctactgaggtggaattttatatttctagtatatatttaatatagtatatatagctagagtgtgtatagtgtattttaatagtatattttagatgattcagcacattgagttacttgtggt

SEQ ID NO: 351503 - DNA, 120 bp, Artificial Sequence
  ENSG00000139163_75 (sequence is synthesized)
ttatgtatgaggtgggaacaatgcaaaggtaagaagtattacctgtacatctttaaactgaagtcattgttctccagccagagaccagtagaaactcacctgtagctgaagaagttgggt

SEQ ID NO: 351504 - DNA, 120 bp, Artificial Sequence
  ENSG00000139163_76 (sequence is synthesized)
ttattactcactgcagtaagggagaactacattgagaatggtggggatttgtctggtgatttgggggagggttcgaggtaacggtattctctggattggatggtgtcaggaaggaggtgg

SEQ ID NO: 351505 - DNA, 120 bp, Artificial Sequence
  ENSG00000139163_77 (sequence is synthesized)
gacaaatctatgacttatgggcatcttaatcgtacctagaacgctgaagaaatgaagcaggcccaaagtttgactggaaaagagcagcagtcactcatattagccaggataaggaggtat

SEQ ID NO: 351506 - DNA, 120 bp, Artificial Sequence
  ENSG00000139163_78 (sequence is synthesized)
ttggtaatttttgtcatttggacaaagttcctatttttttctaccttcagacatgattacagagtggttttgttgttttcttgacccattatgatcacagagtaaccctatctaatgttg

SEQ ID NO: 351507 - DNA, 120 bp, Artificial Sequence
  ENSG00000139163_79 (sequence is synthesized)
aatgttgatgttctgtaaaacagtttatgttcagcatgacttcaaggcctagtgagtgccaggccgttgttttgctactaatttttccactagtaaaccaggttcattgctgtaaaacta

SEQ ID NO: 351508 - DNA, 120 bp, Artificial Sequence
  ENSG00000139163_80 (sequence is synthesized)
caagttagtaaacatacctaagtcaaaagaaaaaaggttaaattacttatggagaaacaagaaaataaagaaacaagatttaaactacctagtatctttgtagacaaataaatatttata

SEQ ID NO: 351509 - DNA, 120 bp, Artificial Sequence
  ENSG00000139163_81 (sequence is synthesized)
cataaaatattttgataaatgcgagattatattattcacatatctttttattctagcggtttctttccagttatgtagctgttgtgcaatacagaaagttagggctagtgtcattggagt

SEQ ID NO: 351510 - DNA, 120 bp, Artificial Sequence
  ENSG00000139163_82 (sequence is synthesized)
tgtgacactgtgtcttcttcataaatgtttaattagtgttcagtaatttgtattgagtaatcatatctgtctctagcccttaaatgcacacatctttttatgtttgtacaaataaatgta

SEQ ID NO: 351511 - DNA, 120 bp, Artificial Sequence
  ENSG00000139163_83 (sequence is synthesized)
taatatagcatggtcaatttagggataataagagaatgcaatttttataagctagatgaagacattaatgttggtagctatacgagttctagtgtttaagtattaagtacctactgtttg

SEQ ID NO: 351512 - DNA, 120 bp, Artificial Sequence
  ENSG00000139163_84 (sequence is synthesized)
ctgtgaagattcagaaaatggagatgatgatttctggagtttgaggagcctagagtttctttcattataagcatttcagaatgttaaaaggtttctcaatctttattaccgtatttgaaa

SEQ ID NO: 351513 - DNA, 120 bp, Artificial Sequence
  ENSG00000139163_85 (sequence is synthesized)
tattttatctatgacatatgaagaagttacagaacagcatgtgtgaattgatagtggcattgtgataagaaataacatgtttttcaatgcagattttaataaaattatgattatgataaa

SEQ ID NO: 351514 - DNA, 120 bp, Artificial Sequence
  ENSG00000139163_86 (sequence is synthesized)
aaatagtcattttaagtatatattcttcctgacagtgtctttcatacagtctttttgaaatctaggtggaaggcaacactagtatgcacatttttaaaaaatggggatattcaaaataag

SEQ ID NO: 351515 - DNA, 120 bp, Artificial Sequence
  ENSG00000139163_87 (sequence is synthesized)
tccctttatactagttcatgaagttttactgcattatgtgaataaaggtaacagctaagccctatatataataaaaaccattatataaacactggttagttgtatattattaatagtttt

SEQ ID NO: 351516 - DNA, 120 bp, Artificial Sequence
  ENSG00000139163_88 (sequence is synthesized)
ctttcacatcttttttcatatgtcatttaatatcatatcaatctaattgagatagaaatatttaccctctttcttaagcattagttaaatgtatatacatacttttaaaacttctgttct

SEQ ID NO: 351517 - DNA, 120 bp, Artificial Sequence
  ENSG00000139163_89 (sequence is synthesized)
ttctgaattcttgctttcgcttttctcttttcttcctttgttccacttgggagccttcaaaagttctgaattataatagaagtgaagtgttagttctagtgtcagattaatacagaggaa

SEQ ID NO: 351518 - DNA, 120 bp, Artificial Sequence
  ENSG00000139163_90 (sequence is synthesized)
aatgaaaattacaatttttaatagacttttataactagtattgctaattacctgtttccttttgaaatacaccgtctgtgctcaaatctaaaaaaggatttgaagtacttgacttaaagg

SEQ ID NO: 351519 - DNA, 120 bp, Artificial Sequence
  ENSG00000139163_91 (sequence is synthesized)
tcttgacaagccccaaaagtcttatttaaaaaataccatagaaatctctacttacctcttttttcttcctgtaaggttgcgtttttgtttgtagccatagtggttaaattataatagtca

SEQ ID NO: 351520 - DNA, 120 bp, Artificial Sequence
  ENSG00000139163_92 (sequence is synthesized)
aaactgttatactctgagtgtataacacaatgtttaatgcatgttttgttagataatctttaaaattaatatataaaattgagtttttagtaagttggagatttgccataatgtaaatta

SEQ ID NO: 351521 - DNA, 120 bp, Artificial Sequence
  ENSG00000139163_93 (sequence is synthesized)
tggtagattatatttgtatatttattaacaaatctatgaatgttgttaaggacttctataagtaatgaaccatactaggaatagggcagtgttcccattctcagagactttccaatctgt

SEQ ID NO: 351522 - DNA, 120 bp, Artificial Sequence
  ENSG00000139163_94 (sequence is synthesized)
tggacataggagagattccctgtatgtgtacattccctgtatgtgtacacacacacatacacacaaatgtgcaaagattgtgatacaaggcagactgtgagaaatggcaggtatcaagaa

SEQ ID NO: 351523 - DNA, 120 bp, Artificial Sequence
  ENSG00000139163_95 (sequence is synthesized)
agttatatagaaatattgaagacagaatgtataattaacactttggatcaaggaaggcatgttatatgaattaagggcaacatgttaacattagtggttctctttgtttaaatatagaat

SEQ ID NO: 351524 - DNA, 120 bp, Artificial Sequence
  ENSG00000139163_96 (sequence is synthesized)
taaaattatagatgttagataaaattgtattcaaagatggttcttttatgtgaagaagttggtgttttctttaattagtatttaactcatgattttcaatttatctcctgttctctaaag

SEQ ID NO: 351525 - DNA, 120 bp, Artificial Sequence
  ENSG00000139163_97 (sequence is synthesized)
acattgctttgctctatgatagggtttcaaaggtaattgtaaagtttcattgtataaaatctggttttctttctttgcattgaagtaaagtaagcattgattctttggctgtcagatagc

SEQ ID NO: 351526 - DNA, 120 bp, Artificial Sequence
  ENSG00000139163_98 (sequence is synthesized)
actacagaaataactgcctctccatccccctcagtgtcccctcccaaaaaatatgccctacaacagcaaggggcagaggtggaagtaggggaacaccacttaaaaataaagagttaggtg

SEQ ID NO: 351527 - DNA, 120 bp, Artificial Sequence
  ENSG00000139163_99 (sequence is synthesized)
gtaatggtgaagcaagatttttcttgactttttaagatactgcagggttgagaggcaagtctagtattatatagaataagagcacaagagcctggagccaaactgagattaaatcttagt

SEQ ID NO: 351528 - DNA, 120 bp, Artificial Sequence
  ENSG00000139163_100 (sequence is synthesized)
cctgctagttaacatttctgttgtgtaactcattcaactagggaacttaacctaactgtttccttatctataaaatggaaattacagtagtagtatattaaccatatagagtttttgtga

SEQ ID NO: 351529 - DNA, 120 bp, Artificial Sequence
  ENSG00000139163_101 (sequence is synthesized)
ggattgagatagtatatgtaaagttctttaaaacagtgcctggtcatcacttaagtgttgaggtagctgctgttttaaaaattactattgttattcaaagaaggttatttgagttatatt

SEQ ID NO: 351530 - DNA, 120 bp, Artificial Sequence
  ENSG00000139163_102 (sequence is synthesized)
ttttccctaggctctccaaggtatactttaaatccttgaggttaatgattctttggaaaagctggaggtgtgctgtggtaaataataggaagaaaacccttgccccaatagaaaataata

SEQ ID NO: 351531 - DNA, 120 bp, Artificial Sequence
  ENSG00000139163_103 (sequence is synthesized)
caactagaacataaaacacaattaaaatattaaatacattttgtatttcttttattccattttgtttgttcatgatttaagttttataatccttcgaatcccacaattttcattcgacac

SEQ ID NO: 351532 - DNA, 120 bp, Artificial Sequence
  ENSG00000139163_104 (sequence is synthesized)
taaagaataatgtcatatatgcttgatcatttttccaaaattgccagctttaaaaattctctttctgctcttgaaaactctagaaaatggtctggatttgaaaacagcattcataggtta

SEQ ID NO: 351533 - DNA, 120 bp, Artificial Sequence
  ENSG00000139168_0 (sequence is synthesized)
aaacagtcgggaagaagcaccgtggctgctattatctgctctccgcgcctgacccctcccaggactcgtgatgccaaggccgctgcgagcggctacgaagagtcggggttgagccccagc

SEQ ID NO: 351534 - DNA, 120 bp, Artificial Sequence
  ENSG00000139168_1 (sequence is synthesized)
tgagccgagggctcgcactcttctggtctcccaggcccaacccacctgaagaaatgagtggtggattggctccaagtaagagcacagtgtatgtatccaacttgcctttttccctgacaa

SEQ ID NO: 351535 - DNA, 120 bp, Artificial Sequence
  ENSG00000139168_2 (sequence is synthesized)
acaatgacttgtaccggatattttccaagtatggcaaagttgtaaaggttaccatcatgaaagataaagataccaggaagagtaaaggggttgcatttattttatttttggataaagact

SEQ ID NO: 351536 - DNA, 120 bp, Artificial Sequence
  ENSG00000139168_3 (sequence is synthesized)
ctgcacaaaactgtaccagggcaataaacaacaaacagttatttggtagagtgataaaagcaagcattgctattgacaatggaagagcagctgagttcatccgaaggcgaaactactttg

SEQ ID NO: 351537 - DNA, 120 bp, Artificial Sequence
  ENSG00000139168_4 (sequence is synthesized)
ctactttgataaatctaagtgttatgaatgtggggaaagtggacacttaagttatgcctgtccgaaaaatatgctcggagaacgtgagcctccaaagaagaaagaaaaaaagaaaaaaaa

SEQ ID NO: 351538 - DNA, 120 bp, Artificial Sequence
  ENSG00000139168_5 (sequence is synthesized)
ctgaaccagaagaagaaattgaggaagtagaagaaagtgaagatgaaggggaggatcctgctcttgacagcctcagtcaggccatagcattccagcaagccaaaattgaagaagaacaaa

SEQ ID NO: 351539 - DNA, 120 bp, Artificial Sequence
  ENSG00000139168_6 (sequence is synthesized)
aaaaatggaaacccagttcaggagtcccctcaacatcagatgattcaagacgcccaaggataaagaaaagcacatatttcagtgatgaggaagaacttagtgattaaaatcttgccccag

SEQ ID NO: 351540 - DNA, 120 bp, Artificial Sequence
  ENSG00000139168_7 (sequence is synthesized)
ccagcacagtaataaaaatcaagatttgttagtaacaatcttgaagagctaattttaataaaaataagaaaaattaatactatcatgttaatactattattgtcatcccaagaaaaaaga

SEQ ID NO: 351541 - DNA, 120 bp, Artificial Sequence
  ENSG00000139168_8 (sequence is synthesized)
ttatttgaaaagttcattataagggctttattcatgcctgatttgtttacatgaggacttctgaaattaatccttaaaacaaacttcctgaagaccgaaaagttgaatgatttattgtta

SEQ ID NO: 351542 - DNA, 120 bp, Artificial Sequence
  ENSG00000139168_9 (sequence is synthesized)
cttatattaataaacttttcaagagaattttgtctttaaatatgggtgttttgtcatcatatttcttgtagctttatcccaatctggataaattgtaaatacctataaaataaattataa

SEQ ID NO: 351543 - DNA, 120 bp, Artificial Sequence
  ENSG00000139168_10 (sequence is synthesized)
atacctataaaatataaagtaacatagctctaaaaggcttaaaatcaaacacaggtgttatttgtctgccctacccatagcaccaaattccattccctagaagaaactacttacatgtgc

SEQ ID NO: 351544 - DNA, 120 bp, Artificial Sequence
  ENSG00000139168_11 (sequence is synthesized)
acacatgtagctaaataaagtacatatatttcagtcacttaataaaagaataaaggagaattattcaatctcttatacttctcctaccttcctcaatattcccaatgtggctgtattaaa

SEQ ID NO: 351545 - DNA, 120 bp, Artificial Sequence
  ENSG00000139168_12 (sequence is synthesized)
aatttgggggaatccatatatatcttttttaataaccaagtaaatacttttcatttctgagccaaggaatatgctatgattacgttttttcctagagttaataattgtctattttttttc

SEQ ID NO: 351546 - DNA, 120 bp, Artificial Sequence
  ENSG00000139168_13 (sequence is synthesized)
catgtattgtctttgtatttatgactaaatcttcccattctgtctgcaggtgggtatatggtaatgggattagagagcctttaattttctgctttgtatatttctatattgtttaacttt

SEQ ID NO: 351547 - DNA, 120 bp, Artificial Sequence
  ENSG00000139168_14 (sequence is synthesized)
ctgctttgtatatttctatattgtttaactttgtaagaatgcccattacttttttaactagtaaaagcaatagaaataagttaatactatcatagtaatattattattgtcatcccaaga

SEQ ID NO: 351548 - DNA, 120 bp, Artificial Sequence
  ENSG00000139168_15 (sequence is synthesized)
acaaacaatgacttgtaccgggtaagtaaatcttatcgagtgactgctatttgagatacagataaccttaagcaaatagttctccctggcaaattcttttttcctttttttttttttctt

SEQ ID NO: 351549 - DNA, 120 bp, Artificial Sequence
  ENSG00000139168_16 (sequence is synthesized)
aagagtcggggttgagccccagctgagccgagggctcgcactcttctggtctcccaggcccaacccacctgaaggaccttaacctctgcctgccttcgcggctctcagcagaacgtgtaa

SEQ ID NO: 351550 - DNA, 120 bp, Artificial Sequence
  ENSG00000139168_17 (sequence is synthesized)
cgcatagtttcaaatgagaaacttaaaaagcgacgtatctatgttgagttcctgaagttttctaaataattcccccataacaccaaacatgaggcagttttctcattccttcacgaattg

SEQ ID NO: 351551 - DNA, 120 bp, Artificial Sequence
  ENSG00000139168_18 (sequence is synthesized)
accgcacgctctttttaaatcagaaatttgaatttggttgagcctgatattttcacggtaatttgctgactttgtaagataagatgtgaaaattactgattacatttgtaaactttatat

SEQ ID NO: 351552 - DNA, 120 bp, Artificial Sequence
  ENSG00000139168_19 (sequence is synthesized)
acatatacacacatacctacaggtctgtctcttcgaggcaccaagcctatttatataatgtatcatttcataatttggcaataagcaaaattagcgtttcgaaagaagtttatattgtcg

SEQ ID NO: 351553 - DNA, 120 bp, Artificial Sequence
  ENSG00000139173_0 (sequence is synthesized)
acgccgccggcccgtctcgccgcgcttcccagcgaggccgccggcgcgccgagggctgtgctcgaccgcgaatcccgtgtgcagtcgccccgcgccccgcgcgacccttcgggtaaacta

SEQ ID NO: 351554 - DNA, 120 bp, Artificial Sequence
  ENSG00000139173_1 (sequence is synthesized)
actacgaactgggagttctgaagaatgggtaaagactttcgttactatttccagcatccctggtctcgcatgattgtggcttacttggtgatcttctttaacttcttaatatttgcggag

SEQ ID NO: 351555 - DNA, 120 bp, Artificial Sequence
  ENSG00000139173_2 (sequence is synthesized)
gacccagtttctcatagccaaacagaagccaatgttattgttgttggaaactgtttttcatttgttacaaataaataccctagaggagttggctggaggattttgaaggtgcttctatgg

SEQ ID NO: 351556 - DNA, 120 bp, Artificial Sequence
  ENSG00000139173_3 (sequence is synthesized)
ctacttgccattctcacaggactaatagctggcaaatttctgttccatcagcgtttgtttggtcagttgctccgattaaaaatgtttcgagaagatcatgggtcgtggatgacaatgttc

SEQ ID NO: 351557 - DNA, 120 bp, Artificial Sequence
  ENSG00000139173_4 (sequence is synthesized)
ttcagcacaattctctttctcttcatattttctcacatatacaacacgattcttctaatggatgggaacatgggagcatatatcattacagactatatgggcatccgaaatgaaagtttc

SEQ ID NO: 351558 - DNA, 120 bp, Artificial Sequence
  ENSG00000139173_5 (sequence is synthesized)
atgaaattagctgcagtagggacctggatgggggactttgtcacagcttggatggtcactgatatgatgcttcaggacaaaccctatcctgactggggaaaatcagcaagagctttctgg

SEQ ID NO: 351559 - DNA, 120 bp, Artificial Sequence
  ENSG00000139173_6 (sequence is synthesized)
aagaaaggaaatgttaggatcactttattctggacagttctttttactctgacgtctgtggttgtacttgtgattacaacggactggatcagctgggacaagctgaatcggggatttttg

SEQ ID NO: 351560 - DNA, 120 bp, Artificial Sequence
  ENSG00000139173_7 (sequence is synthesized)
cccagtgatgaagtttccagagcattccttgcttcttttatcttggtctttgaccttcttattgtgatgcaggactgggaattcccacatttcatgggagatgttgatgtaaatctccct

SEQ ID NO: 351561 - DNA, 120 bp, Artificial Sequence
  ENSG00000139173_8 (sequence is synthesized)
ggtttgcacacccctcacatgcagttcaagattcctttcttccagaaaatcttcaaggaggaatatcgtattcacataacaggcaaatggtttaactatggaattatcttcctcgtcttg

SEQ ID NO: 351562 - DNA, 120 bp, Artificial Sequence
  ENSG00000139173_9 (sequence is synthesized)
attttggatcttaatatgtggaagaaccaaatattttataaacctcatgaatatgggcaatatatcggcccggggcagaagatatatacagtgaaagactcagaaagtttaaaagatttg

SEQ ID NO: 351563 - DNA, 120 bp, Artificial Sequence
  ENSG00000139173_10 (sequence is synthesized)
aacagaaccaagctatcctgggaatggaggtccaatcacactaaccctcggactaataaaacatatgttgagggagacatgttcttacacagcaggttcataggagccagtcttgatgtc

SEQ ID NO: 351564 - DNA, 120 bp, Artificial Sequence
  ENSG00000139173_11 (sequence is synthesized)
gttccaagcctgatagcctttgtgtggtttggattctttatttggttctttggacgatttttgaaaaatgagccacgcatggagaatcaagacaaaacttacactcgcatgaaaagaaaa

SEQ ID NO: 351565 - DNA, 120 bp, Artificial Sequence
  ENSG00000139173_12 (sequence is synthesized)
tctccatcagaacatagcaaagacatgggaatcactcgagaaaacacccaggcttcagtagaagaccccttgaatgacccttctttggtttgcatcaggtctgacttcaatgagatcgtc

SEQ ID NO: 351566 - DNA, 120 bp, Artificial Sequence
  ENSG00000139173_13 (sequence is synthesized)
tacaagtcttcccacctaacctcggaaaacttgagctcacagttgaacgaatctactagtgcaacagaagctgatcaagacccaacgacttctaaaagtacacctacgaactagactcgg

SEQ ID NO: 351567 - DNA, 120 bp, Artificial Sequence
  ENSG00000139173_14 (sequence is synthesized)
agatagacttggagataacacaaaaagcaaccttgagtgtaactttaaaaatttagtctttccttttgtatatgtaaggtttacgtagtgttaggtaaaaatatgaacaatgccacaacg

SEQ ID NO: 351568 - DNA, 120 bp, Artificial Sequence
  ENSG00000139173_15 (sequence is synthesized)
gtgctcaacatgctttttctaggattcattgttttctatttgtattataatacacgtgcctactgtatactcaacagtcctctagagattgcttttcacaattgcacaagctattactga

SEQ ID NO: 351569 - DNA, 120 bp, Artificial Sequence
  ENSG00000139173_16 (sequence is synthesized)
ctttacagcatagtggaagattagctgatgacccatgtatctgatgttcaaccatagtggtgccttgagacattaaactgtttttaactgtaccagaaatgaagtgtggaacagttacct

SEQ ID NO: 351570 - DNA, 120 bp, Artificial Sequence
  ENSG00000139173_17 (sequence is synthesized)
aacctatttcacatgggcgttttgtatacaactattttgatctacacttgatgtctgagcagaaaacagaaatagctaaatgtgactcaggaagtatctcttggtttcttattcagcagc

SEQ ID NO: 351571 - DNA, 120 bp, Artificial Sequence
  ENSG00000139173_18 (sequence is synthesized)
agagttggtgactttgacaactggactgcagagaaacatggtgatcaccttttaatttttattggctgtctgccaaatataaatacagatgcaaaattcagtaataggagatccataacc

SEQ ID NO: 351572 - DNA, 120 bp, Artificial Sequence
  ENSG00000139173_19 (sequence is synthesized)
caacatgggtcactactcgtgaaatgtgactttctcccaccagtaattgaaatgaggtgatgatacctaattatgttttcctaattaaagataaattgctacttgattaaaaatcctgcc

SEQ ID NO: 351573 - DNA, 120 bp, Artificial Sequence
  ENSG00000139173_20 (sequence is synthesized)
cttcacctttgggaacaaaggttaagagacacagttgggcgaactctcaaatttattggcatttacacaaagtcccagacaaccaaggaactgaagttttcatcatatgagagcagcaca

SEQ ID NO: 351574 - DNA, 120 bp, Artificial Sequence
  ENSG00000139173_21 (sequence is synthesized)
tcccaccatttacaatattcgtatatctttctgcaaatatggctctggatagtgaaaattgaaaaacatatgccaaccctgagcaagggaactcctcaaaaaatcatgcagcggaacctt

SEQ ID NO: 351575 - DNA, 120 bp, Artificial Sequence
  ENSG00000139173_22 (sequence is synthesized)
gtcaggtagagaagccgtgcatgaaagaatttgtttaatgtcttgttttgcgtatgtgttttttgtttttgttttttaagaactaaatattgcacattaataaataagaattatacagca

SEQ ID NO: 351576 - DNA, 120 bp, Artificial Sequence
  ENSG00000139173_23 (sequence is synthesized)
tgaaggtgcttctatggctacttgccattctcacaggactaatagctggcaaatttctgttccatcagcgtttgtttgagcatatatcattacagactatatgggcatccgaaatgaaag

SEQ ID NO: 351577 - DNA, 120 bp, Artificial Sequence
  ENSG00000139173_24 (sequence is synthesized)
gaggaagtactgttggaggttggagcaaggagagtagttgttggaaggaacttcttagaagagccagtctcgaagatatggtgtagacaaagcctgaagctgcactcttactacatttgc

SEQ ID NO: 351578 - DNA, 120 bp, Artificial Sequence
  ENSG00000139173_25 (sequence is synthesized)
aagttgatgtccagtgttcggtattctatttgtggctacacaaattgagaaatgtgaaaaatatacgagttttcgccatgttactcaggttgctcttgaactcctgggctcaagcgattc

SEQ ID NO: 351579 - DNA, 120 bp, Artificial Sequence
  ENSG00000139173_26 (sequence is synthesized)
gctctgattgtctggagatctgcctgcatgcgtggaacagaagaggccctgctacactctaatctatgtacgttaaggactgggaattcccacatttcatgggagatgttgatgtaaatc

SEQ ID NO: 351580 - DNA, 120 bp, Artificial Sequence
  ENSG00000139173_27 (sequence is synthesized)
ggttttccaactgctctcaaggagactttagtacagctgggaacacagatatgtccttatttaaaagtgtattgaaagtcaacgtggcaagtttcagatcagtcgaagctggagactgga

SEQ ID NO: 351581 - DNA, 120 bp, Artificial Sequence
  ENSG00000139174_0 (sequence is synthesized)
cagcccagctgccagcgccgtctcccgcggccgccgccgcccgacagcgcgcccggaacatgccagcctcgcgcagcctgcgctgacttccccgagacgcgccgcggtcggcacggagac

SEQ ID NO: 351582 - DNA, 120 bp, Artificial Sequence
  ENSG00000139174_1 (sequence is synthesized)
cggcacggagactttctgggctctggatggttcgtgcgctgctcaccctcgcccacccctgacgccgcggaccgcagctcctcagccccgcagccccgcagcccagcagccccgcagcgg

SEQ ID NO: 351583 - DNA, 120 bp, Artificial Sequence
  ENSG00000139174_2 (sequence is synthesized)
cgccgaggacagtgcagccgagttgcgtctccctcgcgcgagcagccattgtttgatgtcctgtgactgagaaaccaggctttaaactttatgcctttggagatggagcccaagatgagc

SEQ ID NO: 351584 - DNA, 120 bp, Artificial Sequence
  ENSG00000139174_3 (sequence is synthesized)
aaactggcctttggctgtcagagaagttccacatcagatgatgactctggctgtgcattggaggagtacgcctgggtccccccgggcctgagaccagagcagatccagctctattttgct

SEQ ID NO: 351585 - DNA, 120 bp, Artificial Sequence
  ENSG00000139174_4 (sequence is synthesized)
tgcttaccagaggaaaaagttccttacgttaacagccccggagagaagcatcggattaaacagcttttgtaccagttaccaccacatgataatgaggtacggtattgccagtctttgagt

SEQ ID NO: 351586 - DNA, 120 bp, Artificial Sequence
  ENSG00000139174_5 (sequence is synthesized)
gaagaggagaaaaaagagttgcaggtgttcagtgctcagcggaagaaagaagcactgggaagaggaacaattaagcttctgtccagagcagtcatgcatgctgtgtgtgagcagtgtggt

SEQ ID NO: 351587 - DNA, 120 bp, Artificial Sequence
  ENSG00000139174_6 (sequence is synthesized)
ttgaagataaatggaggtgaagttgcagtgttcgcctcccgtgcgggccctggtgtgtgctggcacccatcctgttttgtctgtttcacgtgtaatgagctgctggtcgacctcatctat

SEQ ID NO: 351588 - DNA, 120 bp, Artificial Sequence
  ENSG00000139174_7 (sequence is synthesized)
ttttatcaggatggaaaaattcactgtggcaggcaccatgcagaactgctcaaaccacggtgctcagcatgtgacgagataatttttgctgatgagtgcacagaagctgagggtcgccat

SEQ ID NO: 351589 - DNA, 120 bp, Artificial Sequence
  ENSG00000139174_8 (sequence is synthesized)
tggcacatgaaacacttctgctgccttgagtgtgaaacggtcctgggaggacagaggtatatcatgaaggacggccgccccttctgctgtggctgttttgagtctctctatgcggagtac

SEQ ID NO: 351590 - DNA, 120 bp, Artificial Sequence
  ENSG00000139174_9 (sequence is synthesized)
tgtgaaacctgtggggaacatattggtgtggaccatgcacagatgacctatgacgggcagcactggcacgccacggaagcctgcttttcttgtgcccagtgtaaagcctctttgttggga

SEQ ID NO: 351591 - DNA, 120 bp, Artificial Sequence
  ENSG00000139174_10 (sequence is synthesized)
tgtcccttccttcccaaacagggtcagatttactgctcaaaaacgtgcagtcttggtgaagacgtccatgcctctgattcttccgactctgcatttcagtcagctcgatcaagagactcc

SEQ ID NO: 351592 - DNA, 120 bp, Artificial Sequence
  ENSG00000139174_11 (sequence is synthesized)
cgaagaagtgtccgaatgggcaagagcagccggtcagcagatcagtgtagacagtctctcctcttatcgcctgctctgaactacaagtttcctggcctctcaggcaatgctgatgacacc

SEQ ID NO: 351593 - DNA, 120 bp, Artificial Sequence
  ENSG00000139174_12 (sequence is synthesized)
ctttctcgaaaattggatgatctgagtctctccagacaaggaacaagttttgccagtgaagaattttggaaaggcagagtagagcaggaaactccagaagaccctgaagaatgggctgat

SEQ ID NO: 351594 - DNA, 120 bp, Artificial Sequence
  ENSG00000139174_13 (sequence is synthesized)
catgaagattatatgacgcagctcctcctcaagtttggtgataaaagcctctttcagccacagcccaatgagatggatattcgagccagtgagcactggatatctgataacatggttaaa

SEQ ID NO: 351595 - DNA, 120 bp, Artificial Sequence
  ENSG00000139174_14 (sequence is synthesized)
agtaagaccgagttaaagcaaaataaccagagccttgcaagtaaaaaataccagtctgatatgtactgggcacagtcacaagatggactgggcgattctgcttatggcagccacccaggc

SEQ ID NO: 351596 - DNA, 120 bp, Artificial Sequence
  ENSG00000139174_15 (sequence is synthesized)
cctgcaagcagtagaaggcttcaggaattggaactggaccatggggcttcagggtataatcatgatgaaacacagtggtatgaagattccctggagtgtctgtcagacctgaaaccagag

SEQ ID NO: 351597 - DNA, 120 bp, Artificial Sequence
  ENSG00000139174_16 (sequence is synthesized)
caaagtgttcgggattcgatggattctttggcattgtccaatatcacaggggcttcggtggatggagaaaacaagccaaggccatcattgtattctctgcaaaattttgaggagatggaa

SEQ ID NO: 351598 - DNA, 120 bp, Artificial Sequence
  ENSG00000139174_17 (sequence is synthesized)
acagaagattgtgagaagatgagcaatatgggaactttgaactcttccatgctgcacaggagtgcagagtccttaaagagtctaagttcagagttgtgtccagagaaaatcctgcctgaa

SEQ ID NO: 351599 - DNA, 120 bp, Artificial Sequence
  ENSG00000139174_18 (sequence is synthesized)
gagaagccagtacatctgccagtgctcagaaggtccaagtctcaatccagaccccagcaggtcaagttttctgatgatgtcattgacaatgggaactatgacattgaaatccggcagcct

SEQ ID NO: 351600 - DNA, 120 bp, Artificial Sequence
  ENSG00000139174_19 (sequence is synthesized)
ccgatgagtgaaaggactcggagacgcgtctacaattttgaagagaggggatccaggtctcatcaccaccgccgccggagaagtagaaagtcccgctccgacaatgccctgaatcttgtt

SEQ ID NO: 351601 - DNA, 120 bp, Artificial Sequence
  ENSG00000139174_20 (sequence is synthesized)
acagaaagaaaatactctcccaaggacagactgcggctgtacacccccgataactatgagaaatttatacagaataaaagtgcccgggagatccaagcatacatccagaatgctgatctc

SEQ ID NO: 351602 - DNA, 120 bp, Artificial Sequence
  ENSG00000139174_21 (sequence is synthesized)
tacggacagtacgcccatgccacttccgattatggcctgcagaacccaggaatgaatcggtttctgggactctacggcgaggatgatgattcctggtgttcttcctcctcctcctcttcc

SEQ ID NO: 351603 - DNA, 120 bp, Artificial Sequence
  ENSG00000139174_22 (sequence is synthesized)
gactcggaagaagaaggatattttcttggacaaccaatccctcaaccccggccacagagatttgcctactatacagatgacctttctagtccaccatctgcacttcccacccctcagttt

SEQ ID NO: 351604 - DNA, 120 bp, Artificial Sequence
  ENSG00000139174_23 (sequence is synthesized)
ggtcagaggacaacaaaatccaagaagaaaaagggacacaagggcaaaaattgtattatttcttaaccaagtagtgatgcagagcatttgtttaaaacttagccattaaccgtctgaatc

SEQ ID NO: 351605 - DNA, 120 bp, Artificial Sequence
  ENSG00000139174_24 (sequence is synthesized)
ctccaatttaccctctttggatggtgccaggtggacgtgacatctcgtgcctgtccggtgcgggtgcgttacagatggacgtagctgctttggttttccagtcctcaagggaatactgaa

SEQ ID NO: 351606 - DNA, 120 bp, Artificial Sequence
  ENSG00000139174_25 (sequence is synthesized)
gatgctgactgaaggggattggatgttgattttagaagatggagaactccagccacctttgtaaagcactagtgtttgtcatttatgtaagtcaggtcggctcaggtcttgatagtccgt

SEQ ID NO: 351607 - DNA, 120 bp, Artificial Sequence
  ENSG00000139174_26 (sequence is synthesized)
cttggtgtgaggcatgcctgtcacgatgacctagctaacactgtgcatcttattgtgaggccagcttgtcccctcgaaccctctttggccaggtaaacattgtattgtatcagcgccagc

SEQ ID NO: 351608 - DNA, 120 bp, Artificial Sequence
  ENSG00000139174_27 (sequence is synthesized)
tacagattgaaaaaaaaaaacaaaaaacattgctatttataacttagtatttcatagacttaagtgtattcctaatttaacggtgcaaatattaatgtatatactgtacagttcagattt

SEQ ID NO: 351609 - DNA, 120 bp, Artificial Sequence
  ENSG00000139174_28 (sequence is synthesized)
taaagctgatatttttatatccctgaattgtaagccgtttgttacgctgcagtgctagatttgccagggaaccagaatttatggatgaactgattgcttatattttagtcagggtttata

SEQ ID NO: 351610 - DNA, 120 bp, Artificial Sequence
  ENSG00000139174_29 (sequence is synthesized)
aatgtagatggtcaaatttacattgcctagtgatggaaaattcaactttttttgatttttttttccaatattaaaaaaggctctgtatgcatggtggggctatgtaagtactctttaaaa

SEQ ID NO: 351611 - DNA, 120 bp, Artificial Sequence
  ENSG00000139174_30 (sequence is synthesized)
ctatggccctattaatcttacaagtgttacttatgggtcaagcaatgtaaactgtataaatgtaaaaacaacccctccacacacataacccctggaatatatggtaaaaacaagtagaag

SEQ ID NO: 351612 - DNA, 120 bp, Artificial Sequence
  ENSG00000139174_31 (sequence is synthesized)
ctgtttcagcgagtgggttttttccccctgcctgcggggggtgcctttctcattttcagcaaggtgatgattatctcatgggaaatgacaaagatctgcttttgtggcagaggactttgt

SEQ ID NO: 351613 - DNA, 120 bp, Artificial Sequence
  ENSG00000139174_32 (sequence is synthesized)
agatttgttattttaagagaggttattcctttttattccttccctcccactaatttgttggcctttaacagcaattttgaaaactgggtcttctggttatgtttttgttttaaaatcttt

SEQ ID NO: 351614 - DNA, 120 bp, Artificial Sequence
  ENSG00000139174_33 (sequence is synthesized)
aaattagaggatgctgtgccattgagtactgtaagttaatatgaggttctggttcaaggaaaacttacgttggatctgaaccaatgagcagatattttgatatgtgccactcttgcatat

SEQ ID NO: 351615 - DNA, 120 bp, Artificial Sequence
  ENSG00000139174_34 (sequence is synthesized)
acatctcagtcctaactaaaggttctagtggcatccaggacctttagggaggcatttaataaacacttaataaataacaaaactacctttctgaatataaatctttgcaaatgtatccag

SEQ ID NO: 351616 - DNA, 120 bp, Artificial Sequence
  ENSG00000139174_35 (sequence is synthesized)
ataacttccattttgtgcctgtgttcaggcatgatttattttgcagttgccctaccattaacagacctccatttgtctcgtgtgtccacacgccccacttgtaggccagaaatagggctt

SEQ ID NO: 351617 - DNA, 120 bp, Artificial Sequence
  ENSG00000139174_36 (sequence is synthesized)
cagacacagaggcttattttttccatatagactggagtggggaaaatttggccttagggaggacagacacaagtccaatgggtaaaccagcgagtagtaggtggacagccgtcccacaca

SEQ ID NO: 351618 - DNA, 120 bp, Artificial Sequence
  ENSG00000139174_37 (sequence is synthesized)
agggtttgtatctgggctacacagattcccttcagaaaagcaccaatggtgagagagttcttcactcagtaacttacattccctggtctggtgcctttaaaaaaccatcagcaatgaaaa

SEQ ID NO: 351619 - DNA, 120 bp, Artificial Sequence
  ENSG00000139174_38 (sequence is synthesized)
ggaagtgcatacacatgacaaaaaaattcaaatagggcaaaagtcagagacagcatctcctttccattcttcatcccagtcccccaggtcctctccccagaagtaaccactcttacccag

SEQ ID NO: 351620 - DNA, 120 bp, Artificial Sequence
  ENSG00000139174_39 (sequence is synthesized)
ttttagtgtctccttcagacattcaaagcacattcgtataaatgtgtcttttaaaagtggtagtgacctatatgtgctgtgacatgcttttttccctttgtatgtggacatttcacgtta

SEQ ID NO: 351621 - DNA, 120 bp, Artificial Sequence
  ENSG00000139174_40 (sequence is synthesized)
gtgcatataggtctacccattctttcagtgactgcttaatagcctactcctaatgatggagttgactttcctcatacattatgctacactggcacatgtgcacataaatcgggagcagcg

SEQ ID NO: 351622 - DNA, 120 bp, Artificial Sequence
  ENSG00000139174_41 (sequence is synthesized)
tagttactgggacaaaggttacgtatttaagactgatggatattgccaattttcctccaaaagaaattctcctgatttacattaatgtaatgtaaatgagagtgtttgttccatcacaac

SEQ ID NO: 351623 - DNA, 120 bp, Artificial Sequence
  ENSG00000139174_42 (sequence is synthesized)
ctctcaatgtattagcagatttcttgattttgaagaaattttcagaacctgtgctgccacaagtgggcatccttttagaaaagactgttgcaatatgttgcttataaaggatggataata

SEQ ID NO: 351624 - DNA, 120 bp, Artificial Sequence
  ENSG00000139174_43 (sequence is synthesized)
aatagtaaacaggtgatacttagcctgaagaaatgcaggtataaggtgaaggtactgccctcacttttcaagtacattctcaaaagataggggtaacatagcctgccaaaggcttaagga

SEQ ID NO: 351625 - DNA, 78 bp, Artificial Sequence
  ENSG00000139174_44 (sequence is synthesized)
caaaagataggggtaacatagcctgccaaaggcttaaggaaatgcagatatttattcacaataataatgtgactttct

SEQ ID NO: 351626 - DNA, 120 bp, Artificial Sequence
  ENSG00000139174_45 (sequence is synthesized)
agcttaaaaattaatcccagtttgtagcaataacagaagactatctacaacggaagaaagaagcaactgccttacagttctgtaaagaattggcaagaaaataaagcctatagttgccga

SEQ ID NO: 351627 - DNA, 120 bp, Artificial Sequence
  ENSG00000139174_46 (sequence is synthesized)
agaccagcctgtgggattacacgagacaggatcgagtccaaacgggtccccagctcggcaaggcgcgccggaaggaatctaacagccattgtttgatgtcctgtgactgagaaaccaggc

SEQ ID NO: 351628 - DNA, 120 bp, Artificial Sequence
  ENSG00000139174_47 (sequence is synthesized)
gtcctagggtatttgcatcttagcggcttcactcactgggctcgggagaatggagcgggcgggcggcgatcgccggccccaggcgggctcccggcgctgagcggagacgagtttttctcc

SEQ ID NO: 351629 - DNA, 120 bp, Artificial Sequence
  ENSG00000139174_48 (sequence is synthesized)
ccgcagaggaggatcctggaaggacgcggagctggggcttgggggatgcagtggcctggacgaggtgactccaacccgggggagcagagtccgtcacgccggcagggaccgagggtctct

SEQ ID NO: 351630 - DNA, 120 bp, Artificial Sequence
  ENSG00000139174_49 (sequence is synthesized)
ctgggctcgggagaatggagcgggcgggcggcggtaggtgctcgagccgctaggctggccaagggggtgggtaacttttcgaggaattgtgcgcgcgggacctcgtggagatcggccagg

SEQ ID NO: 351631 - DNA, 120 bp, Artificial Sequence
  ENSG00000139174_50 (sequence is synthesized)
ggcacggtcagcagtgacagttcctggaaagcgggcggcggcgggagcaggctgggcaggcgccgcccgcgggcgggagcggggagctgggtccggctgggatcgaagggcgggatcggc

SEQ ID NO: 351632 - DNA, 120 bp, Artificial Sequence
  ENSG00000139174_51 (sequence is synthesized)
atgggcagagtggagatgatttctttaagaggtggcctttcatattctcccagcgtttcgtggcccgcgcgtgcacctgcgggagggggaagtttacataagcgtcctagggtatttgca

SEQ ID NO: 351633 - DNA, 120 bp, Artificial Sequence
  ENSG00000139174_52 (sequence is synthesized)
cctcgcccgccaggcggggccagcaccgggacgcgacccgggggcgcggtccgctgcaatgtagtggggacccggtgcttgctgccccaccctgctggggtctcctccggaaatgagtgg

SEQ ID NO: 351634 - DNA, 120 bp, Artificial Sequence
  ENSG00000139174_53 (sequence is synthesized)
gtgcgggtgactcgtagggcacccagccctctgttccttcgggagtcctccgctcccgctccgggccgccagcctccttcagacgcagagcgggcgggcggctagtgcgcgccgagggct

SEQ ID NO: 351635 - DNA, 120 bp, Artificial Sequence
  ENSG00000139174_54 (sequence is synthesized)
cgggattcgatggattctttggcattgtccaatatcacaggtggagtttcgcccttgtcgcccaggatggagtgcaatggcgcagtctcacctcactgcaacctccatctcccgggttca

SEQ ID NO: 351636 - DNA, 120 bp, Artificial Sequence
  ENSG00000139174_55 (sequence is synthesized)
cgcgcgaggatagccattttctttgagcaagcacaacaaactttttaataaaggaattttaaagaaacatttatagcagtttggattaccccaaagaagtaaaggggaaaaggttatctt

SEQ ID NO: 351637 - DNA, 120 bp, Artificial Sequence
  ENSG00000139174_56 (sequence is synthesized)
aatgctttatggtcattcaggcctgcagttgagttgagtgcatgtagaatggagagtaaaagtggcaattaacaagtttaaaccttttgtggaaaggttaatgtcctatatatatttttt

SEQ ID NO: 351638 - DNA, 120 bp, Artificial Sequence
  ENSG00000139174_57 (sequence is synthesized)
gtagacagggaaagcagatattggctgcagcatcgccagggctccgcagaggctctccgcatggctcctgtttgctgcatcacaaccaactcttcccttggttttctccggcgtggaaac

SEQ ID NO: 351639 - DNA, 120 bp, Artificial Sequence
  ENSG00000139174_58 (sequence is synthesized)
ggggcttcgcgtcggcgccgaggaggggttcgctcgctgcctctgcgtcctgagctcggcctctggctcctggggccggggacgcagagaggggctggagccggtcgacccacggcccag

SEQ ID NO: 351640 - DNA, 120 bp, Artificial Sequence
  ENSG00000139174_59 (sequence is synthesized)
ctcgcggcctaagcagcggccgccgcctggagcgcagagtttgcggggcccagggggcgccgacgcccgctctgaggcgtctctgctgctgcggcggcggggatggggacgacccagggg

SEQ ID NO: 351641 - DNA, 120 bp, Artificial Sequence
  ENSG00000139174_60 (sequence is synthesized)
cattagcatacaaaaaagactatcatgttggaatcatgtgaaatcacgttggacattccaaggattttaggagttgtgtgccaggaaacctggacaaagaccaactatacatttcacgat

SEQ ID NO: 351642 - DNA, 120 bp, Artificial Sequence
  ENSG00000139174_61 (sequence is synthesized)
gtcagaacgagtaagtggcaaagctggcaccaaggctggatgactccagaattcgtgtccttaaccactatgcctcactatcttccaaaaaaacaaatattctaaagacaatcataactg

SEQ ID NO: 351643 - DNA, 120 bp, Artificial Sequence
  ENSG00000139178_0 (sequence is synthesized)
agttctctcgcaggtcccagatgtccagttccagatgcctggacccagagtgtgggggaaatatctctggagaagccctcactccaaaggctgtccaggcgcaatgtggtggctgcttct

SEQ ID NO: 351644 - DNA, 120 bp, Artificial Sequence
  ENSG00000139178_1 (sequence is synthesized)
ctggggagtcctccaggcttgcccaacccggggctccgtcctcttggcccaagagctaccccagcagctgacatcccccgggtacccagagccgtatggcaaaggccaagagagcagcac

SEQ ID NO: 351645 - DNA, 120 bp, Artificial Sequence
  ENSG00000139178_2 (sequence is synthesized)
ggacatcaaggctccagagggctttgctgtgaggctcgtcttccaggacttcgacctggagccgtcccaggactgtgcaggggactctgtcacaatctcattcgtcggttcggatccaag

SEQ ID NO: 351646 - DNA, 120 bp, Artificial Sequence
  ENSG00000139178_3 (sequence is synthesized)
ccagttctgtggtcagcaaggctcccctctgggcaggccccctggtcagagggagtttgtatcctcagggaggagtttgcggctgaccttccgcacacagccttcctcggagaacaagac

SEQ ID NO: 351647 - DNA, 120 bp, Artificial Sequence
  ENSG00000139178_4 (sequence is synthesized)
tgcccacctccacaagggcttcctggccctctaccaaaccgtggctgtgaactatagtcagcccatcagcgaggccagcaggggctctgaggccatcaacgcacctggagacaaccctgc

SEQ ID NO: 351648 - DNA, 120 bp, Artificial Sequence
  ENSG00000139178_5 (sequence is synthesized)
caaggtccagaaccactgccaggagccctattatcaggccgcggcagcaggggcactcacctgtgcaaccccagggacctggaaagacagacaggatggggaggaggttcttcagtgtat

SEQ ID NO: 351649 - DNA, 120 bp, Artificial Sequence
  ENSG00000139178_6 (sequence is synthesized)
gcctgtctgcggacggccagtcacccccattgcccagaatcagacgaccctcggttcttccagagccaagctgggcaacttcccctggcaagccttcaccagtatccacggccgtggggg

SEQ ID NO: 351650 - DNA, 120 bp, Artificial Sequence
  ENSG00000139178_7 (sequence is synthesized)
cggggccctgctgggggacagatggatcctcactgctgcccacaccatctaccccaaggacagtgtttctctcaggaagaaccagagtgtgaatgtgttcttgggccacacagccataga

SEQ ID NO: 351651 - DNA, 120 bp, Artificial Sequence
  ENSG00000139178_8 (sequence is synthesized)
tgagatgctgaaactggggaaccaccctgtccaccgtgtcgttgtgcaccccgactaccgtcagaatgagtcccataactttagcggggacatcgccctcctggagctgcagcacagcat

SEQ ID NO: 351652 - DNA, 120 bp, Artificial Sequence
  ENSG00000139178_9 (sequence is synthesized)
ccccctgggccccaacgtcctcccggtctgtctgcccgataatgagaccctctaccgcagcggcttgttgggctacgtcagtgggtttggcatggagatgggctggctaactactgagct

SEQ ID NO: 351653 - DNA, 120 bp, Artificial Sequence
  ENSG00000139178_10 (sequence is synthesized)
gaagtactcgaggctgcctgtagctcccagggaggcctgcaacgcctggctccaaaagagacagagacccgaggtgttttctgacaatatgttctgtgttggggatgagacgcaaaggca

SEQ ID NO: 351654 - DNA, 120 bp, Artificial Sequence
  ENSG00000139178_11 (sequence is synthesized)
cagtgtctgccagggggacagtggcagcgtctatgtggtatgggacaatcatgcccatcactgggtggccacgggcattgtgtcctggggcatagggtgtggcgaagggtatgacttcta

SEQ ID NO: 351655 - DNA, 120 bp, Artificial Sequence
  ENSG00000139178_12 (sequence is synthesized)
caccaaggtgctcagctatgtggactggatcaagggagtgatgaatggcaagaattgaccctgggggcttgaacagggactgaccagcacagtggaggccccaggcaacagagggcctgg

SEQ ID NO: 351656 - DNA, 120 bp, Artificial Sequence
  ENSG00000139178_13 (sequence is synthesized)
gagaaacccccacccggcaagcccgccccatcccagacaggaagcagagtcccacagaccgctcctcctcaccctctacctccctgtgctcatgcactaggccccgggaagcctgtacat

SEQ ID NO: 351657 - DNA, 120 bp, Artificial Sequence
  ENSG00000139178_14 (sequence is synthesized)
ctcaacaactttcgccttgaatgtccttagaaccgccttcccctacttcatctgttgacacagcttttatactcacctgtggaagagtcagctactcacccgctattagagtatggagga

SEQ ID NO: 351658 - DNA, 120 bp, Artificial Sequence
  ENSG00000139178_15 (sequence is synthesized)
aggggttttcattgcattgcatttctgaaacattcctaagaccctttagttgaccttcaaatattcaagctattctgcagctccaagatgcaattatagaaacagctccttttttatttt

SEQ ID NO: 351659 - DNA, 120 bp, Artificial Sequence
  ENSG00000139178_16 (sequence is synthesized)
atgtcctctatatgccaggtgcttcacctgttatttcacttaatcctcataccatatttgcaaaggatgtgttattatctatgtgtgacaaatgaggaaactgaggctcaggggataaag

SEQ ID NO: 351660 - DNA, 120 bp, Artificial Sequence
  ENSG00000139178_17 (sequence is synthesized)
ggacttgcccaagtcccacagctggtgtgtgactgcagagactgtgctcttcccagtgtgctgcaatacttctcaaccctcctctaacctgctgtgtcacccgctttccctcccagcccc

SEQ ID NO: 351661 - DNA, 120 bp, Artificial Sequence
  ENSG00000139178_18 (sequence is synthesized)
cacatccttaccattttccctccctgggaattcctgcttctgcgaaaatggtatcctctagctcacactttcctaatggccccatctcctgcagaagccaggtgagcccagcactggact

SEQ ID NO: 351662 - DNA, 120 bp, Artificial Sequence
  ENSG00000139178_19 (sequence is synthesized)
gaagttcttgcagacaccccacctgtgcccctatcatcaggggaactgctccacctgagaggaccaactctttaatttttagtaaaacctggaggtgatgggccgggcgcagtggctcac

SEQ ID NO: 351663 - DNA, 120 bp, Artificial Sequence
  ENSG00000139178_20 (sequence is synthesized)
cagaccaagacttcatcccccccaaaaaaaaaagattggaggtgatttacagtgaaagacacaaataaaatacaactgttcaatggaaatagaaaataaacaccataaaagagagaagag

SEQ ID NO: 351664 - DNA, 120 bp, Artificial Sequence
  ENSG00000139178_21 (sequence is synthesized)
aggtaatttgttagcatcaagagtcaagttgctatatggtcaaaggttaaatttatctctaaaaaatggcaggattcaaagttgtacatacatgtgattacttctgttttttacacccac

SEQ ID NO: 351665 - DNA, 120 bp, Artificial Sequence
  ENSG00000139178_22 (sequence is synthesized)
atacagtacaaaagattattaaaaatattcccaaaaggcaggtgcaatgatgcacacttatacccccagccactcaggaggctgatgcaagaggatcgcttgagcccaggagttgaagtc

SEQ ID NO: 351666 - DNA, 120 bp, Artificial Sequence
  ENSG00000139178_23 (sequence is synthesized)
cagcctaagcaacatagtgaaaccccatcgccaaaaatataataataattctctcaaaatactaaacagaggtggttttattgataagattttggctgtttggttttccactattctcta

SEQ ID NO: 351667 - DNA, 120 bp, Artificial Sequence
  ENSG00000139178_24 (sequence is synthesized)
ttggctaaaatttgtttaatgagcatgaaatgtttttattttattttgcttatttttatgattgcaaaaaatgatatgagtttctccctgccaaggcaaaaaaatatatatatacctata

SEQ ID NO: 351668 - DNA, 120 bp, Artificial Sequence
  ENSG00000139178_25 (sequence is synthesized)
ctggaaccaccaaactgtcttcaacagcagcagcaccaagttacatctcaccggcaatacatgagggttcaagcccaccatttttgagatccacgcttttgaatgaaagcattgccttct

SEQ ID NO: 351669 - DNA, 120 bp, Artificial Sequence
  ENSG00000139178_26 (sequence is synthesized)
gggactctgtcacagtgagctggggatggggggggtcccgccaggactgtggccagggagattcccggggttgtgggaagtggcggtgccctgaatcccccatctggaggagggatgaat

SEQ ID NO: 351670 - DNA, 120 bp, Artificial Sequence
  ENSG00000139178_27 (sequence is synthesized)
cagatgtccagttccagatgcctggacccagagtgtgggggaaatatctctggagaagccctcactccaaaggctgtccaggcgcaatatctcattcgtcggttcggatccaagccagtt

SEQ ID NO: 351671 - DNA, 120 bp, Artificial Sequence
  ENSG00000139178_28 (sequence is synthesized)
atcaacgcacctggagacaaccctgccaaggtccagaaccactgccaggagccctattatcaggccgcggcagcaggctgtggatcatatgctgatcccatcacagaccagccctccgtt

SEQ ID NO: 351672 - DNA, 120 bp, Artificial Sequence
  ENSG00000139178_29 (sequence is synthesized)
aggttcagtcctcagctctgacacacaggcctgctggagaaaccctccaagcgttggtggatcttgcaccttctgtgtgcctgctgtctaactactgatgatgtggtcactgcctgatgg

SEQ ID NO: 351673 - DNA, 120 bp, Artificial Sequence
  ENSG00000139178_30 (sequence is synthesized)
acagcttctagccctgcctcgcgaggcctctgagtcctagcgcggctcccccgctcctcccacacccacaggcttccggccatagctgcgcggccccaccttgccctccccccaactcac

SEQ ID NO: 351674 - DNA, 120 bp, Artificial Sequence
  ENSG00000139178_31 (sequence is synthesized)
cctggtatcttcaagccttaagtggaagcttgagtgacagctgaggctggggactcagggacacctgggctggatcccagccctgcccctgctggcaagcaaccctattaagagacagcc

SEQ ID NO: 351675 - DNA, 120 bp, Artificial Sequence
  ENSG00000139178_32 (sequence is synthesized)
gtagctgagcccccagcggttgtttccatgcagatttacaggcccagtgtttgcagatcatctcatttttaaagagatgccaaaaatccagatttttaagtaaaattataaattttcaaa

SEQ ID NO: 351676 - DNA, 120 bp, Artificial Sequence
  ENSG00000139178_33 (sequence is synthesized)
aaacagaaaaccctcccctccctgctgtgcatgacgcgggctccctctgcacacagtgcacgaagacgctgtcgggagagcccaggattcaacacgggccttgagaaatgtggctcttgt

SEQ ID NO: 351677 - DNA, 120 bp, Artificial Sequence
  ENSG00000139178_34 (sequence is synthesized)
cccctctgttccccaagccttaccccaacaactttgaaacaaccactgtgatcacagtccccacgggatacagggtgaagctcgtcttccagcagtttgacctggagccttctgaaggct

SEQ ID NO: 351678 - DNA, 120 bp, Artificial Sequence
  ENSG00000139178_35 (sequence is synthesized)
gcttctatgattatgtcaagatctctgctgataagaaaagcctggggaggttctgtgggcaactgggttctccactgggcaaccccccgggaaagaaggaatttatgtcccaagggaaca

SEQ ID NO: 351679 - DNA, 120 bp, Artificial Sequence
  ENSG00000139178_36 (sequence is synthesized)
agatgctgctgaccttccacacagacttctccaacgaggagaatgggaccatcatgttctacaagggcttcctggcctactaccaagctgtggaccttgatgaatgtgcttcccggagca

SEQ ID NO: 351680 - DNA, 120 bp, Artificial Sequence
  ENSG00000139178_37 (sequence is synthesized)
aatcaggggaggaggatccccagccccagtgccagcacctgtgtcacaactacgttggaggctacttctgttcctgccgtccaggctatgagcttcaggaagacaggcattcctgccagg

SEQ ID NO: 351681 - DNA, 120 bp, Artificial Sequence
  ENSG00000139178_38 (sequence is synthesized)
ccacaagggcttcctggccctctaccaaaccgtgggggcactcacctgtgcaaccccagggacctggaaagacagacaggatggggaggaggttcttcagtgtatgcctgtctgcggacg

SEQ ID NO: 351682 - DNA, 120 bp, Artificial Sequence
  ENSG00000139180_0 (sequence is synthesized)
attgtgggaaaagatggcggctgccgcacaatcccgggttgtccgggtcctgtcaatgtcacgttctgccattactgcaatagccacatctgtgtgtcacggcccaccctgtcgccagct

SEQ ID NO: 351683 - DNA, 120 bp, Artificial Sequence
  ENSG00000139180_1 (sequence is synthesized)
tcatcatgccctcatgcctcatgggaaaggtggacgttcctcagtcagtgggattgtggccactgtgtttggagcaacaggattcctggggcgatatgttgtcaaccaccttggacgcat

SEQ ID NO: 351684 - DNA, 120 bp, Artificial Sequence
  ENSG00000139180_2 (sequence is synthesized)
ggggtcacaggtaatcataccctatcggtgtgataaatatgacatcatgcaccttcgtcccatgggtgacctgggccagcttctgtttctggaatgggacgcgagagataaagattctat

SEQ ID NO: 351685 - DNA, 120 bp, Artificial Sequence
  ENSG00000139180_3 (sequence is synthesized)
ccgacgagtagtacaacacagcaatgtggtcatcaatcttattggacgagactgggaaaccaaaaactttgattttgaggatgtttttgtgaagattccccaagcaattgctcaactgtc

SEQ ID NO: 351686 - DNA, 120 bp, Artificial Sequence
  ENSG00000139180_4 (sequence is synthesized)
caaggaagctggagttgaaaaattcattcatgtttcacatctgaatgcgaatattaaaagctcttctagatatttgagaaataaggctgttggagagaaagtagtgagagatgcatttcc

SEQ ID NO: 351687 - DNA, 120 bp, Artificial Sequence
  ENSG00000139180_5 (sequence is synthesized)
ggaagccattatcgtaaagccgtcggacatctttggaagagaggatagattccttaattcttttgcaagtatgcatcggtttggtcctataccccttggttccttgggctggaagacagt

SEQ ID NO: 351688 - DNA, 120 bp, Artificial Sequence
  ENSG00000139180_6 (sequence is synthesized)
taaacaaccagtatatgtcgtagatgtatccaaaggaattgttaatgcagttaaggatcctgatgccaatgggaaatcctttgctttcgttggtcccagtcggtacctccttttccacct

SEQ ID NO: 351689 - DNA, 120 bp, Artificial Sequence
  ENSG00000139180_7 (sequence is synthesized)
ggtgaagtacatctttgctgtggctcacagattgttcctcccattccccttgccgctttttgcctatcgatgggtagcaagagtctttgaaataagcccatttgagccctggataacaag

SEQ ID NO: 351690 - DNA, 120 bp, Artificial Sequence
  ENSG00000139180_8 (sequence is synthesized)
ggataaagtggagcggatgcacatcacagacatgaaattgcctcacctgcctggcttagaagaccttggtattcaggcaacaccactggaactcaaggccattgaggtgctgcggcgtca

SEQ ID NO: 351691 - DNA, 120 bp, Artificial Sequence
  ENSG00000139180_9 (sequence is synthesized)
tcgcacttaccgctggctgtctgctgaaattgaggatgtgaagccggccaagaccgtcaacatttagtgcctcctgagcagctcttggttttggcgtcttttgggtcggcccatgtggtt

SEQ ID NO: 351692 - DNA, 120 bp, Artificial Sequence
  ENSG00000139180_10 (sequence is synthesized)
tgagcacccagccaggcggtctctttagaggatcctgtacacagttccactattaaaacatttcaggttgaattctgcagtattttcttccttgatttacaaaatgagaaatgtagtcac

SEQ ID NO: 351693 - DNA, 120 bp, Artificial Sequence
  ENSG00000139180_11 (sequence is synthesized)
ttagaacttgagcatgatttttgttaaacatatttaataatgatatatatactatttattctctgaaatgccagagagtttgaattttcctatgacaaaccacttctagcatacgttcta

SEQ ID NO: 351694 - DNA, 120 bp, Artificial Sequence
  ENSG00000139180_12 (sequence is synthesized)
gaagacaaggaccctttttaatgtcaaagtattgtaaagaccccaagtgatatgtgattgttttttaatttccattaaatgagagagcatacagtatcccctaacctgaatgtgtttaca

SEQ ID NO: 351695 - DNA, 120 bp, Artificial Sequence
  ENSG00000139180_13 (sequence is synthesized)
ctgaaggtgtttttaaaatttattttaataatgtccatatgccttttaaaaatagtagtacatatatagaaaaacattgtccatagattctcaaaccccttgcagtaattccacagtctt

SEQ ID NO: 351696 - DNA, 120 bp, Artificial Sequence
  ENSG00000139180_14 (sequence is synthesized)
cttggatctgagctatctgaggccagcccgatgcccttagtaccacatctggattatttcagacacataggtggagatagattctcttcacatgcaaaggagatgcttcagcttctatgc

SEQ ID NO: 351697 - DNA, 120 bp, Artificial Sequence
  ENSG00000139180_15 (sequence is synthesized)
cagcagtgccagcacttaggaattatgaccttctaatgaagttcttaaaattgcagccaagacccagatgaacatttggtttagtgttggcaaatcccaccagtacagtgtgatttaaaa

SEQ ID NO: 351698 - DNA, 120 bp, Artificial Sequence
  ENSG00000139180_16 (sequence is synthesized)
ctcccacaatttgtggtgaagccaacataccaccatcctaggtgacccagggttggtcattgtgtttcactggacttcagcctcctgatctatatttgggacagggatgtcagtaaaaac

SEQ ID NO: 351699 - DNA, 120 bp, Artificial Sequence
  ENSG00000139180_17 (sequence is synthesized)
gctgtttgatgagggaatgcccgtctccttacagagagaaaggtatatcagtgttgaaggtaagttctccacctgccctttctgcctgcatcagaatctttttatcccaaaacggtcaac

SEQ ID NO: 351700 - DNA, 120 bp, Artificial Sequence
  ENSG00000139180_18 (sequence is synthesized)
tcccaaaacggtcaacagtgagctactccaagtgtggtccatagatcaccagcattgggatcatcttggggcttgttagaaatgcagaacccgggctgggcacagtggctcacacctgta

SEQ ID NO: 351701 - DNA, 120 bp, Artificial Sequence
  ENSG00000139180_19 (sequence is synthesized)
ccaggagtttgagaccagcctaggcaatatggcaagaccttgtctctacagaaaaatttcaaaaagttagtagggcatggtggcacgcacctgtagtctcagttattcgggaggctaagg

SEQ ID NO: 351702 - DNA, 120 bp, Artificial Sequence
  ENSG00000139180_20 (sequence is synthesized)
gtagtctcagttattcgggaggctaaggtatgatgattgcttgagcctgggagttcaaggttacagtgagctatgatagtgccactgcacttcagcttggactgaagatcctgtctcaga

SEQ ID NO: 351703 - DNA, 120 bp, Artificial Sequence
  ENSG00000139180_21 (sequence is synthesized)
aaaaaaaaaaaaaaaaggcagaatcctaggttttgtcctgtcccaggcgtgttgaatcagaatctgcattttagcaaggtctccaggagatttgtatgcacattacagtatgagaagcac

SEQ ID NO: 351704 - DNA, 120 bp, Artificial Sequence
  ENSG00000139180_22 (sequence is synthesized)
tgccatacagaagagctgtatcagagttcagtgtgatccctgttattaatccaggttgctgaccccaccccagacctactgaatcagagtctcaggaaggagggcccaggaattttagtt

SEQ ID NO: 351705 - DNA, 120 bp, Artificial Sequence
  ENSG00000139180_23 (sequence is synthesized)
ttattaaacattctagtttattctcctgtacactagtatgtcagaatcagcgtactagggaaaggaacacaaacccaacttcacgttttttcttcagatgctgtctgttattttggatga

SEQ ID NO: 351706 - DNA, 120 bp, Artificial Sequence
  ENSG00000139180_24 (sequence is synthesized)
cacccctcctggccataagccagccattaggcacagagatgggtggatttaatttgaaaaggaactataattctataatgcacagtgtcctctcttagaatatctacactttctttcctt

SEQ ID NO: 351707 - DNA, 120 bp, Artificial Sequence
  ENSG00000139180_25 (sequence is synthesized)
tttttgattcttaaaaaaaaacttattgatacataatagatgtaaatattgtcagggtatatgtggtaatttgatatattcatataatcaatcagtgtaattgggatatccatcacctta

SEQ ID NO: 351708 - DNA, 120 bp, Artificial Sequence
  ENSG00000139180_26 (sequence is synthesized)
aacatttacctttatgctagtaacattcaaattactctcttctagctattttgaaatgtacagtagattagtattaactctagttaccctactgatctattgaacaccaggtcttacttc

SEQ ID NO: 351709 - DNA, 120 bp, Artificial Sequence
  ENSG00000139180_27 (sequence is synthesized)
aggtcttacttcttctgtcttaactgtaattatcttcattttctagcaatgctatttctcatctctaacttgtatcatctcaggatgctgtatatttcttttattttttattttttattt

SEQ ID NO: 351710 - DNA, 70 bp, Artificial Sequence
  ENSG00000139180_28 (sequence is synthesized)
ccacctcccggactggtcggctggctgggcggaggcgccccccacacaaacactgaagccgtagcattga

SEQ ID NO: 351711 - DNA, 120 bp, Artificial Sequence
  ENSG00000139180_29 (sequence is synthesized)
ggaggcgccccccacacaaacactgaagccgtagcattgactaaggaaacaattttaccatcctaagctagtggatgtcaccctctcagtgtatggaggttgcatatgacaagtaactgg

SEQ ID NO: 351712 - DNA, 120 bp, Artificial Sequence
  ENSG00000139180_30 (sequence is synthesized)
tataggggctgtccccatagagacttcaagccacacctttctagggattcaggttgcacattacctgattctcacagttgatttgagcctgcaagactgtaaacccatcccattatcatg

SEQ ID NO: 351713 - DNA, 120 bp, Artificial Sequence
  ENSG00000139180_31 (sequence is synthesized)
ttttcttcctcatttacctacatttatcattaaacctttgtgattcagcaaatctgtttaccttctgattctactttaaattccgttcatgttcttccttggccctcctgtgtatttccc

SEQ ID NO: 351714 - DNA, 120 bp, Artificial Sequence
  ENSG00000139180_32 (sequence is synthesized)
ccttggccctcctgtgtatttcccacagctttgctaggccttaagatcatctcacattcttcatcctaatgacaaaaataagttctatgggctgggcgcggtggctcttgcctgtaatcc

SEQ ID NO: 351715 - DNA, 76 bp, Artificial Sequence
  ENSG00000139180_33 (sequence is synthesized)
aggcatggtggggcccacctgtatatagtcccagcccaggagggagactgaggcaggagaatcactgaaacctggg

SEQ ID NO: 351716 - DNA, 71 bp, Artificial Sequence
  ENSG00000139180_34 (sequence is synthesized)
agccaggcatggtggggcccacctgtatatagtcccagcccaggagggagactgaggcaggagaatcactg

SEQ ID NO: 351717 - DNA, 120 bp, Artificial Sequence
  ENSG00000139180_35 (sequence is synthesized)
aataataataataataataaaggtacatgatggaagcatatatgggaatatatgcaaagatctctgagaagataaagaaaggtctctggaaggattagcaaaaactccatagaaaacgga

SEQ ID NO: 351718 - DNA, 120 bp, Artificial Sequence
  ENSG00000139180_36 (sequence is synthesized)
tttttaaagctgcatcttgatgttaacctgctgaaatgtgtgtgttggaccggggtgaggaggaagcagtcattcatgctgtggaagagaacagcatgagcaattgcagtggggcatgaa

SEQ ID NO: 351719 - DNA, 120 bp, Artificial Sequence
  ENSG00000139180_37 (sequence is synthesized)
tgagtgggtggttatgagtgggaggcagagtccgtgagttgggaggggcacaagcgagtttaacctttaccttggaggtgatgcagagcagttgagttccatacagatttggcttcgaat

SEQ ID NO: 351720 - DNA, 120 bp, Artificial Sequence
  ENSG00000139180_38 (sequence is synthesized)
atgagttccactacttcttagttgtgagattggacaagtcacttgacctctctttgtcagcctcagttttcttgtttataaaatgggggtgatagtaataactacatgatgggatagtga

SEQ ID NO: 351721 - DNA, 120 bp, Artificial Sequence
  ENSG00000139180_39 (sequence is synthesized)
tgaggaattaaatgagatcatgcatgtaaaatgctgagccctgcacataataagaactaagtaaatgtgagccattatcatttaagtagggaatatcatgcccatctgagtccatacatt

SEQ ID NO: 351722 - DNA, 120 bp, Artificial Sequence
  ENSG00000139180_40 (sequence is synthesized)
tgtttcctgacttaataaaatagctgccgttcctgagaaggagggattcctatttcccaaatgctggaaacagggacttatagaaggtaaattgccccattagtaagtagctgaattggt

SEQ ID NO: 351723 - DNA, 120 bp, Artificial Sequence
  ENSG00000139180_41 (sequence is synthesized)
tttccaacctggatctttctggctacaaaactgatgccttgttccagaaaggatttaaggatgctcaggaggaagacattcccagagttacactctagaaggtcttggagtgaatgggag

SEQ ID NO: 351724 - DNA, 120 bp, Artificial Sequence
  ENSG00000139180_42 (sequence is synthesized)
gtatagtggaatggagggcgtatttgaagaaacccttcctgtgaaggaaaatccaagagaatgaagtaaggagagacttaaacttgaaaagattcttgtgagagaaggaaaggggctatt

SEQ ID NO: 351725 - DNA, 120 bp, Artificial Sequence
  ENSG00000139180_43 (sequence is synthesized)
tacaatagagaagagactagaagaaagtctgaactcacctccctggaagcagagggtggtggggtttttgagggctgtgtgagagtgtagaagtactgagaacaagaagccatgtggatc

SEQ ID NO: 351726 - DNA, 120 bp, Artificial Sequence
  ENSG00000139180_44 (sequence is synthesized)
ctgtgagggccaggatgggggggggggtcatgggtcatctgtgtttgctgattggctttatccaaaggaagagtaaacatctcatccttatgacaggaagtagtcctgcagcttggagca

SEQ ID NO: 351727 - DNA, 120 bp, Artificial Sequence
  ENSG00000139180_45 (sequence is synthesized)
aggtgcccaccaaagttaggcacatcccacagcaagtgggagaaaggagtgctatctccttttgaggttacatttcagagaatggttcccctgggtccttgagaaagacagtcctgggtt

SEQ ID NO: 351728 - DNA, 120 bp, Artificial Sequence
  ENSG00000139180_46 (sequence is synthesized)
gtaaaactggcaagaggctgagggaagatgtatgtctcaaaggggaactcaaataatttataattttaagttttctgatgctctaagggaagtcaggtgcctaatattggtgatgtggtt

SEQ ID NO: 351729 - DNA, 120 bp, Artificial Sequence
  ENSG00000139180_47 (sequence is synthesized)
tggatgtccccacccaaatctcatgttgcaatgtaatctccagtgttggagttggggcctagtgggaggcgattagatcatggagtagatttatcatgaatgatttagtaccattctctt

SEQ ID NO: 351730 - DNA, 120 bp, Artificial Sequence
  ENSG00000139180_48 (sequence is synthesized)
ggtacaatcctcaagatagtgagttcttacaagatctggtcatttaaaagtgtgaggcaactctcctcaccccttgttcctactcctaccatgtgaggtgcttgctcccttttcacctac

SEQ ID NO: 351731 - DNA, 120 bp, Artificial Sequence
  ENSG00000139180_49 (sequence is synthesized)
tactcctaccatgtgaggtgcttgctcccttttcacctactgccatgactggaagcttcctgaagcctccccagaagcagatgcctatgtgacgcttcctgtacagcctgcagaaccatg

SEQ ID NO: 351732 - DNA, 120 bp, Artificial Sequence
  ENSG00000139180_50 (sequence is synthesized)
agatatttctttatagcaatacaagaatggcctaatcgtgttaggaagaagcctgtctgaagtgcagtcaggctgaggggagcatgaaggccatcttgatgggggaaatcttttagtacc

SEQ ID NO: 351733 - DNA, 120 bp, Artificial Sequence
  ENSG00000139180_51 (sequence is synthesized)
ctaatgcgagcagatgatgatgttgttggcagagagggagggtataacttgtggtgcctagccctagagggaatggaagggccagaatccagagcataggtgggattgtgtgggctgaca

SEQ ID NO: 351734 - DNA, 120 bp, Artificial Sequence
  ENSG00000139180_52 (sequence is synthesized)
agtaatagtatatgatagcatagtatatgatagcagtagtatacgatagcatgtgtgtgagtccattttgtattgccataaaggagtacctgaagctgggtaattaataaagaaaagggg

SEQ ID NO: 351735 - DNA, 120 bp, Artificial Sequence
  ENSG00000139180_53 (sequence is synthesized)
tttatttggctcactgttctgtaggctgtacaagcatggcactaacatctgcttggcatgagccaccacacccggccagaattttatttttagtgactaggctttcctttaaaacctctg

SEQ ID NO: 351736 - DNA, 120 bp, Artificial Sequence
  ENSG00000139180_54 (sequence is synthesized)
ctttaaaaaaataaagcacttgaagcagaactttttatctgtcataatcactgctatgtccacagcacctaaaacagtcccagacatctgttgaataaatgaatgaatgaggtgggaagt

SEQ ID NO: 351737 - DNA, 120 bp, Artificial Sequence
  ENSG00000139180_55 (sequence is synthesized)
ctttctttacacttagatgaaaactccatcggaccccaaattgttctggtcttgttcaggtaataattttaattctataataaaatctcaagttataataggctcaatttgataattagg

SEQ ID NO: 351738 - DNA, 120 bp, Artificial Sequence
  ENSG00000139180_56 (sequence is synthesized)
atgcccagtgttgtgtaataattaaagcgttaaatttcctctctgccccacagctgggatccaagaagaccctgtggctggctactcttctgtattttcatttatctccacccccagttt

SEQ ID NO: 351739 - DNA, 120 bp, Artificial Sequence
  ENSG00000139180_57 (sequence is synthesized)
accagcagtggttatcctctctccaagactgggccaggggtgagaagggcagtcttaccaggcaagggtctttgctgacagatgtctgggccttcttgacagcaggtgtttaaagctgaa

SEQ ID NO: 351740 - DNA, 120 bp, Artificial Sequence
  ENSG00000139180_58 (sequence is synthesized)
tctggttctactttcaggagagtgatggtttgagatggtaactgaagttgtagaagtagatgttgaggatgaagtatcatattaataaaacattgcccattaacaccttagcacaaatta

SEQ ID NO: 351741 - DNA, 120 bp, Artificial Sequence
  ENSG00000139180_59 (sequence is synthesized)
aaactagctatacctcactgataaggacctgaatggctaaataatgatgaatgatttatggatgtagcggggaactgggtggaagcagtagtaagaaatttgaattaaggaatcgtaagg

SEQ ID NO: 351742 - DNA, 120 bp, Artificial Sequence
  ENSG00000139180_60 (sequence is synthesized)
gaatcgagattatctagtttcccctcgacattttataactgaataaacaataaaaaacaagagaagtgacagctttatagcatctgattggggaaaaacacatcttttctggggctagac

SEQ ID NO: 351743 - DNA, 120 bp, Artificial Sequence
  ENSG00000139180_61 (sequence is synthesized)
agtccataaataggacttggaaatggaagtgtagggggagatcccattgtacttcagtggaaaactatgcattgtctggaatctagactctggacaaagacccttccttcctggctgttt

SEQ ID NO: 351744 - DNA, 120 bp, Artificial Sequence
  ENSG00000139180_62 (sequence is synthesized)
gattttgattctatgggagctatcttgcaactctgtaagctgtaggtaactgatagcagagcaaaataattcttgtctatagacgtgtacattgtgtcttagcgtagattcacccgacct

SEQ ID NO: 351745 - DNA, 120 bp, Artificial Sequence
  ENSG00000139180_63 (sequence is synthesized)
ccttccccagttttgcttctattagcacatttatttcagtaattttgatctttggattctccttggacattcctcactgaaaaatgaaataaaatttttggcatgtgctcttcttttgca

SEQ ID NO: 351746 - DNA, 120 bp, Artificial Sequence
  ENSG00000139180_64 (sequence is synthesized)
ggtcctataccccttggttccttgggctggaagacagttaaacaaccagtatatgtaagtacttggatgaagggggtcagaaagggatttttgatgaattcagatttgagtgatcaagtt

SEQ ID NO: 351747 - DNA, 120 bp, Artificial Sequence
  ENSG00000139180_65 (sequence is synthesized)
tctggttttgtcctaatttagtaactctgtcattttctttgtcaacttgtgtcagctagctgcctcttagtttacttaagaggtacatgccttctctgtgtcttcacttgttcatttaag

SEQ ID NO: 351748 - DNA, 120 bp, Artificial Sequence
  ENSG00000139180_66 (sequence is synthesized)
gcattggtacatgaactttgagggttcattctagtaccaagaacctcagtcaatgaaaaagaaatggtggaatgtttgacaagtctcttgctgttaaactttctaaaagtcagaatatct

SEQ ID NO: 351749 - DNA, 120 bp, Artificial Sequence
  ENSG00000139180_67 (sequence is synthesized)
cctgggccagcttctgtttctggttctttagggcagtagttgccaatgcggtgaggcaggggaaagagggtagaggagggccattaagggagtgattaatggaactctttgattgtcaca

SEQ ID NO: 351750 - DNA, 120 bp, Artificial Sequence
  ENSG00000139180_68 (sequence is synthesized)
gtgattggggagctgtcctggttattaggtacaggcacagggatgctaaatatcctacggagcacaggacagtctctttccacaaagagttgtgctgccccaaatgcctgcagccaagct

SEQ ID NO: 351751 - DNA, 120 bp, Artificial Sequence
  ENSG00000139180_69 (sequence is synthesized)
tgatccttgcttctttgtctgtatttcaggattggagacttggtttcctgggtttcttttcaaacttagtaaggagtagttgggtggacaaaaactaatatgctccattaaaaatcaata

SEQ ID NO: 351752 - DNA, 120 bp, Artificial Sequence
  ENSG00000139180_70 (sequence is synthesized)
gcctcctttttagctctgtcatttgattacctgagtaaagtgtactgttacctgtttgtctcggaaagagtgagggaatcagcagggagtctgagatgtcatttctgttgtaataaatgg

SEQ ID NO: 351753 - DNA, 120 bp, Artificial Sequence
  ENSG00000139180_71 (sequence is synthesized)
agcttggatgaaatggcactatattatgactacagcagatggcccattttgaaacttgcattgaggaggctgcagaagtgttgagtgctgaggtatacccctatgttttcatccgattgc

SEQ ID NO: 351754 - DNA, 120 bp, Artificial Sequence
  ENSG00000139180_72 (sequence is synthesized)
tgtttgttggttttatttcattttaagtttaagatctgttgtttctttggaggagaacaaagtgtaccagcagttacagcagccgactgggttggcttgagaggagatggaccaaaaagc

SEQ ID NO: 351755 - DNA, 120 bp, Artificial Sequence
  ENSG00000139180_73 (sequence is synthesized)
agaggtagcctcacaggtcgaggtggttattttcttaaaaaaaaaaaatcagttcagactgctctacagcggtctgtcttcctgcagttctcataggctagcttacatcttgggcagaga

SEQ ID NO: 351756 - DNA, 120 bp, Artificial Sequence
  ENSG00000139180_74 (sequence is synthesized)
aggtagttctctttgactcttgtttttatgttgttaatggagaaattactagatctggggttataaaagaggaaagaattaaaaagaaataagaaaatagtcatgaatggccccaactaa

SEQ ID NO: 351757 - DNA, 120 bp, Artificial Sequence
  ENSG00000139180_75 (sequence is synthesized)
cagaatggaccaaaggcatcctctgttcccaggtcattctttcagctaggttccggcatctcctttgtcatgcaagctctagattggcagttggcaaactttttctttgaagggacagag

SEQ ID NO: 351758 - DNA, 120 bp, Artificial Sequence
  ENSG00000139180_76 (sequence is synthesized)
agtaaatacttctggctttgcaggtcgtagagtctttgtcataattactcagctctgcccttgtaactggaagtagccatagacaatatgtacacaaatgggcatggctgcatttcagta

SEQ ID NO: 351759 - DNA, 120 bp, Artificial Sequence
  ENSG00000139180_77 (sequence is synthesized)
aaattttatttacaaaatgaggctgcaggctgaatttggcctatggactatagtttatcaatccctgctctagacctgtgctgtccagtgtggtagccactggccacatgtggctactga

SEQ ID NO: 351760 - DNA, 120 bp, Artificial Sequence
  ENSG00000139182_0 (sequence is synthesized)
atcctgcagtagcggggttggggtgggagtgagagagtgaggacgctgggctgggggaaacgggaagccgctgcaagtccaccgcctcagctacccagattgggatctgcccaggcccgc

SEQ ID NO: 351761 - DNA, 120 bp, Artificial Sequence
  ENSG00000139182_1 (sequence is synthesized)
tttatggactagtgtgggcggcaggctcctttccgtccctgccctgctgtaccccgctccttggagaccccctgtatccctcccgcaaggtggaatccgcaggctggaggctcccagggg

SEQ ID NO: 351762 - DNA, 120 bp, Artificial Sequence
  ENSG00000139182_2 (sequence is synthesized)
aggcaaacgcctggccctgccctgccccacgccgcaccatgaccctcctgctgctgccccttctgctggcctctctgctcgcgtcctgctcctgtaacaaagccaacaagcacaagccat

SEQ ID NO: 351763 - DNA, 120 bp, Artificial Sequence
  ENSG00000139182_3 (sequence is synthesized)
ggattgaggcagagtaccagggcatcgtcatggagaatgacaacacggtcctactgaatccaccactctttgccttggacaaggatgccccgctgcgctatgcaggtgagatctgcggct

SEQ ID NO: 351764 - DNA, 120 bp, Artificial Sequence
  ENSG00000139182_4 (sequence is synthesized)
tccggctccatgggtctggggtgccctttgaggctgtgatccttgacaaggcgacaggagaggggctgatccgggccaaggagcctgtggactgcgaggcccagaaggaacacaccttca

SEQ ID NO: 351765 - DNA, 120 bp, Artificial Sequence
  ENSG00000139182_5 (sequence is synthesized)
ccatccaggcctatgactgtggcgagggccccgacggggccaacaccaagaagtcccacaaggccactgtgcatgtgcgggtcaacgatgtgaacgagtttgccccagtgtttgtggaac

SEQ ID NO: 351766 - DNA, 120 bp, Artificial Sequence
  ENSG00000139182_6 (sequence is synthesized)
ggctgtatcgtgcggctgtgacagaggggaagctgtacgatcgcatcctgcgggtggaagccattgacggtgactgctccccccagtacagccagatctgctactatgagattctcacac

SEQ ID NO: 351767 - DNA, 120 bp, Artificial Sequence
  ENSG00000139182_7 (sequence is synthesized)
ccaacacccctttcctcattgacaatgacgggaacattgagaacacagagaagctgcagtacagtggtgagaggctctataagtttacagtgacagcttatgactgtgggaagaagcggg

SEQ ID NO: 351768 - DNA, 120 bp, Artificial Sequence
  ENSG00000139182_8 (sequence is synthesized)
cagcagatgatgctgaggtggagattcaggtgaagcccacctgtaaacccagctggcaaggctggaacaaaaggatcgaatatgcaccaggtgctgggagcttggctttgttccctggta

SEQ ID NO: 351769 - DNA, 120 bp, Artificial Sequence
  ENSG00000139182_9 (sequence is synthesized)
tccgcctggagacctgtgatgaaccactctggaacattcaggccaccatagagctgcagaccagccatgtggccaagggctgtgaccgtgacaactactcagagcgggcgctgcggaaac

SEQ ID NO: 351770 - DNA, 120 bp, Artificial Sequence
  ENSG00000139182_10 (sequence is synthesized)
tctgtggtgctgccactggggaggtggatctgttgcccatgcctggccccaatgccaactggacagcaggactctcggtgcactacagccaggacagcagcctgatctactggttcaatg

SEQ ID NO: 351771 - DNA, 120 bp, Artificial Sequence
  ENSG00000139182_11 (sequence is synthesized)
gcacccaggctgtgcaggtgcccctgggtggccccagtgggctgggctctgggccccaggacagcctcagtgaccacttcaccctgtccttctggatgaagcatggcgtaactcccaaca

SEQ ID NO: 351772 - DNA, 120 bp, Artificial Sequence
  ENSG00000139182_12 (sequence is synthesized)
agggcaagaaggaagaggaaaccatcgtatgtaacactgtccagaatgaggacggcttctctcactactcgctgactgtccacggctgtaggattgccttcctctactggcccctgcttg

SEQ ID NO: 351773 - DNA, 120 bp, Artificial Sequence
  ENSG00000139182_13 (sequence is synthesized)
agagtgcccgcccagtcaagttcctctggaagctggagcaggtctgtgatgatgagtggcaccactacgctctgaacctcgagttccccacagtcacactctataccgacggcatctcct

SEQ ID NO: 351774 - DNA, 120 bp, Artificial Sequence
  ENSG00000139182_14 (sequence is synthesized)
tcgaccctgccctcatccatgacaatggcctcatccacccaccccgaagggagcctgctctcatgattggggcctgctggactgaggagaagaacaaagagaaggaaaagggagacaaca

SEQ ID NO: 351775 - DNA, 120 bp, Artificial Sequence
  ENSG00000139182_15 (sequence is synthesized)
gtacagacaccacccaaggagaccctttgtcgatccaccactacttccatggctacctggctggtttcagcgtgcgctcaggtcgcctggagagccgcgaggtcatcgagtgcctctatg

SEQ ID NO: 351776 - DNA, 120 bp, Artificial Sequence
  ENSG00000139182_16 (sequence is synthesized)
aaggtccacgtgaacccctcacagtccctgctcaccctggagggggatgatgtggagaccttcaaccatgccctgcagcatgtggcttacatgaacactctgcgctttgccacgcccggc

SEQ ID NO: 351777 - DNA, 120 bp, Artificial Sequence
  ENSG00000139182_17 (sequence is synthesized)
gtcaggcccctgcgcctcaccactgctgtcaagtgcttcagcgaagagtcctgcgtctccatccctgaagtggagggctacgtggtcgtccttcagcctgacgccccccagatcctgctg

SEQ ID NO: 351778 - DNA, 120 bp, Artificial Sequence
  ENSG00000139182_18 (sequence is synthesized)
agtggcactgctcattttgcccgcccagctgtggactttgagggaaccaacggcgtccctttgttccctgatcttcaaatcacctgctccatttctcaccaggtggaggccaaaaaggat

SEQ ID NO: 351779 - DNA, 120 bp, Artificial Sequence
  ENSG00000139182_19 (sequence is synthesized)
gagagttggcagggcacagtgacagacacacgcatgtcggatgagattgtgcacaacctggatggctgtgaaatttctctggtgggggatgacctggatcccgagcgggaaagcctgctc

SEQ ID NO: 351780 - DNA, 120 bp, Artificial Sequence
  ENSG00000139182_20 (sequence is synthesized)
ctggacacaacctctctgcagcagcgggggctggagctcaccaacacatctgcctacctcactattgctggggtggagagcatcactgtgtatgaagagatcctgaggcaggctcgttat

SEQ ID NO: 351781 - DNA, 120 bp, Artificial Sequence
  ENSG00000139182_21 (sequence is synthesized)
cggctgcgacacggagctgccctctacaccaggaagttccggctttcctgctcggaaatgaatggccgttactccagcaatgaattcatcgtggaggtcaatgtcctgcacagcatgaac

SEQ ID NO: 351782 - DNA, 120 bp, Artificial Sequence
  ENSG00000139182_22 (sequence is synthesized)
cgggttgcccaccccagccacgtgctcagctcccagcagttcctgcaccgtggtcaccagcccccgcctgagatggctggacacagcctagccagctcccacagaaactccatgataccc

SEQ ID NO: 351783 - DNA, 120 bp, Artificial Sequence
  ENSG00000139182_23 (sequence is synthesized)
agcgccgcaaccctcatcattgtggtgtgcgtgggcttcctggtgctcatggtcgtcctgggcctggtgcgcatccattcccttcaccgccgcgtctcaggggccggcgggcctccaggg

SEQ ID NO: 351784 - DNA, 120 bp, Artificial Sequence
  ENSG00000139182_24 (sequence is synthesized)
gcctccagtgaccccaaggacccagacctcttctgggatgactcagctctcaccatcattgtgaaccccatggagtcctaccagaatcggcagtcctgtgtgacgggggctgttgggggc

SEQ ID NO: 351785 - DNA, 120 bp, Artificial Sequence
  ENSG00000139182_25 (sequence is synthesized)
cagcaggaggatgaggacagcagtgactcggaggtggccgattcccccagcagcgacgagagacgcatcatcgagacccccccacaccgctactaaggcctacacctctccccacgcaga

SEQ ID NO: 351786 - DNA, 120 bp, Artificial Sequence
  ENSG00000139182_26 (sequence is synthesized)
gggggaattctgccctggtgaaacagacactccagacatgggagaaggactttctgggaacacagagaccaagagggagagaggcttcagaaccagtcctcctttcatttcaaaacccca

SEQ ID NO: 351787 - DNA, 120 bp, Artificial Sequence
  ENSG00000139182_27 (sequence is synthesized)
gcgggccctctggagtccgccctgcccctcccccggccccccatccctcacttctgggctgtcatgctcctggtgtgccccttgcactggggctggctgggttggaaagtgggctggact

SEQ ID NO: 351788 - DNA, 120 bp, Artificial Sequence
  ENSG00000139182_28 (sequence is synthesized)
tcagctgcctttctacccccaatggcagctgcccccttagcactcactgtgttggggagagggtgacgattgcaatggctggggctggggctgggggtgggattgaaggaaaccctctcc

SEQ ID NO: 351789 - DNA, 120 bp, Artificial Sequence
  ENSG00000139182_29 (sequence is synthesized)
tctccccttcccttctctctcctgtccatgggaagcttttccccctctgcagggctccctcagctggaccatcgtccctgcttctcttatgatcgccccacctcatttccatttcagtct

SEQ ID NO: 351790 - DNA, 120 bp, Artificial Sequence
  ENSG00000139182_30 (sequence is synthesized)
ggggaccccatttctccctcctttccaacttccttcctttcttgtcctgtttcccttcctgcccttgcagtcctgaggtcctgcagccccggcccctcctccgtgacctggtgtggccag

SEQ ID NO: 351791 - DNA, 120 bp, Artificial Sequence
  ENSG00000139182_31 (sequence is synthesized)
gctgcggggacgggaggggacgtgggggccccgggtgtacatatataatgtatattttttcaatgttgtcgtgagtgcagcccatgttcctgcgtgcagctcacggccttgtgtgtatgt

SEQ ID NO: 351792 - DNA, 120 bp, Artificial Sequence
  ENSG00000139182_32 (sequence is synthesized)
gtgtgtgtgtgtgtgtgtgaggcatcgtcatgtcctggggcaggggcggggggttgggtgtggtgagggaggggacatatcctagggttttcaaataaaacaatcagaaaaaaaaaaaaa

SEQ ID NO: 351793 - DNA, 120 bp, Artificial Sequence
  ENSG00000139182_33 (sequence is synthesized)
gagtgcccgcccagtcaagttcctctggaagctggagcaggctgaccacaaggaccagtgaggactaatttgagttttcacctccttctgtttctcttgcaagtcctggtggagtggctg

SEQ ID NO: 351794 - DNA, 120 bp, Artificial Sequence
  ENSG00000139182_34 (sequence is synthesized)
agctgagtgtgctggctgctggggagaggggcgctgcagcagggtgtgggtgtgagtgtgaggagctcctgggccatgcgcttccctacgctctgctctgtctgttgacacatgagtctc

SEQ ID NO: 351795 - DNA, 120 bp, Artificial Sequence
  ENSG00000139182_35 (sequence is synthesized)
aggctgtaggtaatttgcggacggggctggaatgcgatgtgtgtatttttctaggggcttgcttgtgtgactgctggtctctgtgtgtgtttggggcacacatacatggaatagtccctc

SEQ ID NO: 351796 - DNA, 120 bp, Artificial Sequence
  ENSG00000139182_36 (sequence is synthesized)
agcaacgggaccgcccagggaggagctgctgtgtatgcatggtgggcaggggtgtgcacccatgtggggagtagtgacccagctgcccgtaagggccctgggcctggaggtgcgtgtgtg

SEQ ID NO: 351797 - DNA, 120 bp, Artificial Sequence
  ENSG00000139182_37 (sequence is synthesized)
gggtctctgcctccacctgctgtccctggggctgcgggctttcctgcttttcttccttgtgcttcttcgagagctgtgtgtgtgtgtgcaggaggcaggcagggctgtgctcatggcggc

SEQ ID NO: 351798 - DNA, 120 bp, Artificial Sequence
  ENSG00000139182_38 (sequence is synthesized)
tcgctctgtggccctcacggcccacgtctgtagtgtctatgtcttccttcagggggttgcctggtctgcccagctggtggggagctgggtgatgctgcacatatggctctaccgtgcctt

SEQ ID NO: 351799 - DNA, 120 bp, Artificial Sequence
  ENSG00000139182_39 (sequence is synthesized)
gctggagacccccagacgcgttcctttactcccgcagtgtgagcaggcggccaggtggctggtgtgggccagcatgcaggctggcaaaggcctggctcgggtgtggggcgtggcaacctt

SEQ ID NO: 351800 - DNA, 120 bp, Artificial Sequence
  ENSG00000139182_40 (sequence is synthesized)
tgtgcagctgtgtgcccacacggtcttcctgagcatgtacctgtgcatgcacatctgctttgccgccatcagctctaaggtccgtgtgagagtgaacgcaccgttctgtgtctcagtgcc

SEQ ID NO: 351801 - DNA, 120 bp, Artificial Sequence
  ENSG00000139182_41 (sequence is synthesized)
cttgaaggtccatgcccctctgagcctgggcatcaaagtggggctgcagggccagaagcatgggagagccacgggggaggcaggtatgcctcagggggagatgttggggaagcaggaacc

SEQ ID NO: 351802 - DNA, 120 bp, Artificial Sequence
  ENSG00000139182_42 (sequence is synthesized)
tcattgtgaaccccatggaggtgagaggcctggggaagcggggttctgtagggtcaagactgtggagcacacacgtcctaccagaatcggcagtcctgtgtgacgggggctgttgggggc

SEQ ID NO: 351803 - DNA, 120 bp, Artificial Sequence
  ENSG00000139182_43 (sequence is synthesized)
ttaaaatcctctcttgagccaacagttgcagcctcttcattatttattctccaggctgaccacaaggaccagtgaggactaatttgagttttcacctccttctgtttctcttgcaagtcc

SEQ ID NO: 351804 - DNA, 120 bp, Artificial Sequence
  ENSG00000139182_44 (sequence is synthesized)
atagggggtggaaaaggtgatggtgctggggtgtgagttgtctgggtcaacaagggttgttgtgggagtagaggccctgctcacaggtgcttcctctcctctccctggggtggggccagc

SEQ ID NO: 351805 - DNA, 120 bp, Artificial Sequence
  ENSG00000139182_45 (sequence is synthesized)
catgtgttgcagggtcctcctccctgctcccaagcccaccatcctctgtccgtgcggtcatcgaatatccacccccacccgctgctgttcctaggacttagggagccccatcccctgctg

SEQ ID NO: 351806 - DNA, 120 bp, Artificial Sequence
  ENSG00000139182_46 (sequence is synthesized)
gcattgattcctctgctccattcctgcccctctctgccccctccctctgtcctatatatcttcacttctctcctttctccccatcctgtgttctgggagagtggcctcaagttggggctt

SEQ ID NO: 351807 - DNA, 120 bp, Artificial Sequence
  ENSG00000139182_47 (sequence is synthesized)
ggctgggagaagtgcagagtgaagggatcaggactgaaatgagttgggaggaggataagcaatcaggatctcaggaaacttctagatctttttctagtttcaattctgcccttaatctat

SEQ ID NO: 351808 - DNA, 120 bp, Artificial Sequence
  ENSG00000139182_48 (sequence is synthesized)
cccttccctttcccagggccttctcacagcccaccactgctccctgaagttccctgtctccattctctagcacgtgaaatcgctaaagaacattctccacttcctgaccatggttcccat

SEQ ID NO: 351809 - DNA, 120 bp, Artificial Sequence
  ENSG00000139182_49 (sequence is synthesized)
ggagatagtgatcccctcctcttcacccccagggcaggttgtttccatgggaactgtctaccctgctataggagaaggctatgacctcccgcagaccctctgactcctttagtagctgat

SEQ ID NO: 351810 - DNA, 120 bp, Artificial Sequence
  ENSG00000139182_50 (sequence is synthesized)
aattctctctcgaacctgccatcgtcccgggcttcagaatccactgggcttggttcatcatggtttaaggtgaaattcggggcgaaggaggcaggacaggtggaatccgcaggctggagg

SEQ ID NO: 351811 - DNA, 120 bp, Artificial Sequence
  ENSG00000139182_51 (sequence is synthesized)
agaggaaaccatcgtatgtaacactgtccagaatggtgagcctcccctccaggcactagccagagggggaaactggcttcttgtcccgcctctgtcactgcccagtgtgtgactgtgaac

SEQ ID NO: 351812 - DNA, 120 bp, Artificial Sequence
  ENSG00000139182_52 (sequence is synthesized)
aggtcacttcccctctcttcatttgtgaggtgcaagtgccaggtgtgatatgccttgattctgtgctttatccccaacatgacatgttggatcgtactgctgtcagagtgcaatgggatt

SEQ ID NO: 351813 - DNA, 120 bp, Artificial Sequence
  ENSG00000139187_0 (sequence is synthesized)
agagattgggctgtttcctcactgatacatatcccttcacacttctataatttaactctctcaactgcatgtgaaagatcttagctgaagatgactgacagtgttatttattccatgtta

SEQ ID NO: 351814 - DNA, 120 bp, Artificial Sequence
  ENSG00000139187_1 (sequence is synthesized)
gagttgcctacggcaacccaagcccagaatgactatggaccacagcaaaaatcttcctcttccaggccttcttgttcttgccttgtggcaatagctttggggcttctgactgcagttctt

SEQ ID NO: 351815 - DNA, 120 bp, Artificial Sequence
  ENSG00000139187_2 (sequence is synthesized)
ctgagtgtgctgctataccagtggatcctgtgccagggctccaactactccacttgtgccagctgtcctagctgcccagaccgctggatgaaatatggtaaccattgttattatttctca

SEQ ID NO: 351816 - DNA, 120 bp, Artificial Sequence
  ENSG00000139187_3 (sequence is synthesized)
gtggaggaaaaggactggaattctagtctggaattctgcctagccagagactcacacctccttgtgataacggacaatcaggaaatgagcctgctccaagttttcctcagtgaggccttt

SEQ ID NO: 351817 - DNA, 120 bp, Artificial Sequence
  ENSG00000139187_4 (sequence is synthesized)
tgctggattggtctgaggaacaattctggctggaggtgggaagatggatcacctctaaacttctcaaggatttcttctaatagctttgtgcagacatgcggtgccatcaacaaaaatggt

SEQ ID NO: 351818 - DNA, 120 bp, Artificial Sequence
  ENSG00000139187_5 (sequence is synthesized)
cttcaagcctcaagctgtgaagttcctttacactgggtgtgtaagaaggtcagactttgatagatgaccactctgtcctgaccctcagatctgtcatgtatccctaaaaggagggagctg

SEQ ID NO: 351819 - DNA, 120 bp, Artificial Sequence
  ENSG00000139187_6 (sequence is synthesized)
gccactggctgttgggaaagccatgagtatatagttagcaaatactgaactttctcagatatggcattagatgcaagacaacctcctagggattgatgcctaactgatggattctctttg

SEQ ID NO: 351820 - DNA, 120 bp, Artificial Sequence
  ENSG00000139187_7 (sequence is synthesized)
tatttctcagtatggaaactaatgctgccactctcatccccgtcccaaccatctctgtcaaaaatatacctttttcatatgatattctgagctaatctgataaaatctatgccaatatat

SEQ ID NO: 351821 - DNA, 120 bp, Artificial Sequence
  ENSG00000139187_8 (sequence is synthesized)
actattgcttgtgtactagagaagtacattattgctgtactcctctgtacattactgatccctgatggtatatttctatcctaacagtgtccctttgcagatcaagctttattctgaaga

SEQ ID NO: 351822 - DNA, 120 bp, Artificial Sequence
  ENSG00000139187_9 (sequence is synthesized)
ctttgcagatcaagctttattctgaagaataaacctagctggcatgctggtgtgtacctgtagtcctagctatttgggaagctgaggtgggagggtcgcttgagcccaggagtttgaggc

SEQ ID NO: 351823 - DNA, 120 bp, Artificial Sequence
  ENSG00000139187_10 (sequence is synthesized)
ctccagcctgggagatagagcaagactccatctctaaaaaaaaaaaaaaatgctaatgtgagaatataaattgtgggaaatgagtgagggcaaggtggtacttcctccttctgagctctt

SEQ ID NO: 351824 - DNA, 120 bp, Artificial Sequence
  ENSG00000139187_11 (sequence is synthesized)
cacacgtaatgcaaaaacccggtcttaactgattttgttttttttctgagtatgcatatatgtggttgaatgaaccaatgtgtgattgtatcttttccattatgtgactgtttgacctgc

SEQ ID NO: 351825 - DNA, 120 bp, Artificial Sequence
  ENSG00000139187_12 (sequence is synthesized)
atattaatttcaagatagcagtcaattcgataaggcattttcatagaggaaagtttacagaaacagtttatgtggttggatcaccaaattatcttaggtactaaggcctcaaaaataaga

SEQ ID NO: 351826 - DNA, 120 bp, Artificial Sequence
  ENSG00000139187_13 (sequence is synthesized)
aaaactttattatttctcctcagtagagtttggacatacataaggagagaaggtacagtgatgaaggagaccataattctgtagtgttgatgatcctggattataatctttttctcttta

SEQ ID NO: 351827 - DNA, 120 bp, Artificial Sequence
  ENSG00000139187_14 (sequence is synthesized)
tctttcatagtttttttaaaaacatggactgtatcttatctaccactatatcccaaatacctaagatagtgcttacgttcagtgactattaaataaataaatggatgaattaaaaagtaa

SEQ ID NO: 351828 - DNA, 120 bp, Artificial Sequence
  ENSG00000139187_15 (sequence is synthesized)
ttcgagtctcgactccactgttgacccctagacgagagtagtgcagcgacggggccgtgatgtgcgtcctggctttcttaacgacacctctcctctgtatttcctttttccaagcctgct

SEQ ID NO: 351829 - DNA, 120 bp, Artificial Sequence
  ENSG00000139187_16 (sequence is synthesized)
gttccgccgcgtggaagcttcgagtctcgactccactgttgacccctagacgagagtagtgcagcgacggggccgtgatgtgcgtcctggctttcttaacgacacctctcctctgtattt

SEQ ID NO: 351830 - DNA, 120 bp, Artificial Sequence
  ENSG00000139187_17 (sequence is synthesized)
aaacagatagcctgtatattcccctatccactgaaaaaattgaatttatggttaaagttttcccacaatgaaagctttgggcccagatggcttcactggtttggtatcagagtcataatg

SEQ ID NO: 351831 - DNA, 120 bp, Artificial Sequence
  ENSG00000139187_18 (sequence is synthesized)
cacgaagttttctttgtggtgttgcactagaatggtgacagggaagaaaaagtatcaagaaactacagataatagtctctgtgactgaggatttgaaggcaaaagagccatttttacata

SEQ ID NO: 351832 - DNA, 120 bp, Artificial Sequence
  ENSG00000139187_19 (sequence is synthesized)
gagccctgagagaatattatctgagacagacagcttcctcttccaggccttcttgttcttgccttgtggcaatagctttggggcttctgactgcagttcttctgagtgtgctgctatacc

SEQ ID NO: 351833 - DNA, 120 bp, Artificial Sequence
  ENSG00000139187_20 (sequence is synthesized)
aaaaggaatctttatggcctggatctcagttcccactaggccaaattgctttaagatgcgatatccttccctgactttctcttttctttcaacctgtcatctgactcaggattgtgcttt

SEQ ID NO: 351834 - DNA, 120 bp, Artificial Sequence
  ENSG00000139190_0 (sequence is synthesized)
agtaagttccagcgcagctagaccgcggggtagtcggcgcgaggcggagcttggcagttccgtccacttcagccgcagcgtccctcaccgggtgtctcgccgcagcctccggagaggaac

SEQ ID NO: 351835 - DNA, 120 bp, Artificial Sequence
  ENSG00000139190_1 (sequence is synthesized)
agaccctcactctctctgtcagaaaaatgtctgctccagctcagccacctgctgaagggacagaagggactgccccaggtgggggtccccctggccctcctcctaacatgaccagtaaca

SEQ ID NO: 351836 - DNA, 120 bp, Artificial Sequence
  ENSG00000139190_2 (sequence is synthesized)
gacgactacagcaaacccaggcacaagtggaggaggtggtggacatcatacgtgtgaacgtggacaaggtcctggagagggaccagaagctgtcagagctggatgaccgagctgatgcct

SEQ ID NO: 351837 - DNA, 120 bp, Artificial Sequence
  ENSG00000139190_3 (sequence is synthesized)
tgcaggcaggagcatcacaatttgagagcagtgctgccaagctaaagaggaagtattggtggaaaaactgcaagatgatgatcatgctgggagccatctgtgccatcatcgtggtagtta

SEQ ID NO: 351838 - DNA, 120 bp, Artificial Sequence
  ENSG00000139190_4 (sequence is synthesized)
ccccttccctgttgtccattgccatccacattcatgtcctctgccctctgtttgctctctcaacacacttccccacccaccgtcctccattccagcccaggcttctccatcacccattcc

SEQ ID NO: 351839 - DNA, 120 bp, Artificial Sequence
  ENSG00000139190_5 (sequence is synthesized)
tcctttttcgttgcgttcatttgcactctgtccctcaacactagaaatgctgctcgtggcacaatctaagtcattacccgaagagcaacagctggcgcctcctccctgcctgctttttct

SEQ ID NO: 351840 - DNA, 120 bp, Artificial Sequence
  ENSG00000139190_6 (sequence is synthesized)
gtactctcaagttcccccaaagccccaaagagttggaggccaagggaaggggcagggaggggagtggctgaggcgaagtacccatgaagctgcccagacttgggaggagaagagtatcgg

SEQ ID NO: 351841 - DNA, 120 bp, Artificial Sequence
  ENSG00000139190_7 (sequence is synthesized)
tgcccatggtgacttctagaaaacctggccactggtaggagctagggaggggctgggaagatggcagctcactcagtactgcctggtcatgtggagctttccttcctggaccaggcctga

SEQ ID NO: 351842 - DNA, 120 bp, Artificial Sequence
  ENSG00000139190_8 (sequence is synthesized)
agagggtcctgggggtggaccaaagtccaacttggtttcagtgcagtacccttttcgaaagtaaaaacttgttttttgtagttatttctaatctgttcgtccaggattttccgtgtcttt

SEQ ID NO: 351843 - DNA, 120 bp, Artificial Sequence
  ENSG00000139190_9 (sequence is synthesized)
ctgcctgcctggggagtggggctgctctgactgaggtatggagaccgctgctatgggatcgtcacctggttcgggacgggggaagggcagagacaagggatttctttgatggacaagcct

SEQ ID NO: 351844 - DNA, 120 bp, Artificial Sequence
  ENSG00000139190_10 (sequence is synthesized)
tccccctgcaacgcattgcagggagatggcgcctcctgttctgaggaagtggggctatgctgtgtgtcactggcttgggttggagggagaccatggggatggggcacttaacaatggaga

SEQ ID NO: 351845 - DNA, 120 bp, Artificial Sequence
  ENSG00000139190_11 (sequence is synthesized)
tgaaatatatatttttaaataactgcaacttttgagaatgagctgaacacttcacagtgaaaattgaactaattggttaaatatccagagtctgtatctctattggaatgccttctaaag

SEQ ID NO: 351846 - DNA, 120 bp, Artificial Sequence
  ENSG00000139190_12 (sequence is synthesized)
caccgctggagaagaaccaccactgtcctcgatgtgtcccaagcctggagcgaatccgtcctcttggctctcccagccctatcacaggaatcattcctgggtttctgtccctctgaggct

SEQ ID NO: 351847 - DNA, 120 bp, Artificial Sequence
  ENSG00000139190_13 (sequence is synthesized)
caccaggtgtagttggccttgttctttgggggtattagcccttctactttctttctcacccaccctgtaccctcttctgtgtgtctctgctatccccctttcctcccaccacccatgtgc

SEQ ID NO: 351848 - DNA, 120 bp, Artificial Sequence
  ENSG00000139190_14 (sequence is synthesized)
atgagcaaatgtgcaacaaaaccctgggactttgcagtcaaatgaagctgagcttcccacatcccgttcttcggtttgccatgagacgatgtggggtttccactgtgtgtctgtcatcac

SEQ ID NO: 351849 - DNA, 120 bp, Artificial Sequence
  ENSG00000139190_15 (sequence is synthesized)
ctgatctcatacttgtatagagtaataacaacagttgtacttccaccaaaggcatgtggcatatttaccaatgtcatgtattctgaacaaaggcaaaaaatacaaattcctaccattaaa

SEQ ID NO: 351850 - DNA, 120 bp, Artificial Sequence
  ENSG00000139190_16 (sequence is synthesized)
agcatttcattgctcaaaaccatccttcctttcctttcgcccttgtttcccacattcccttcgtcctgcccaagggcgggactgaagagctggaagaaagcagtcagtaccctcccaacg

SEQ ID NO: 351851 - DNA, 120 bp, Artificial Sequence
  ENSG00000139190_17 (sequence is synthesized)
accacaaatgcctaacaaactgctgaagcgccctccgaagggacagacctcatctccaccccgccccgtccctccgccagactggagcgcaaactatggtcgcattgatcactgaaggat

SEQ ID NO: 351852 - DNA, 120 bp, Artificial Sequence
  ENSG00000139190_18 (sequence is synthesized)
cctcacagcaaccgctcctttccggagtcggatgagaggagagttgtgactggcaattggcaggggcggggcgggctaggcctgtagcgctgggcgaccgtcctgggcatggattgggcc

SEQ ID NO: 351853 - DNA, 120 bp, Artificial Sequence
  ENSG00000139190_19 (sequence is synthesized)
agcaggacttgtttccatcctagaagcagtcccatgtgcttctagctggaaggagctttctcttctttacattttctacagcattctgtatgagggcaccaaataaatccatctagctgg

SEQ ID NO: 351854 - DNA, 120 bp, Artificial Sequence
  ENSG00000139190_20 (sequence is synthesized)
tagttttatctagccaaataatttaacctagctcccagttaattgttggcataaagagagagattgcctgttagttatagagaaacagtgagtcaagtgcttaatttgaaagtaacaagc

SEQ ID NO: 351855 - DNA, 120 bp, Artificial Sequence
  ENSG00000139190_21 (sequence is synthesized)
tcagaggaagccactccttgccctcgttaaagagggtcctgttcctctcttcctgttgatgaaggagcgtgagggtgttagcagtgtgagatctttggacacccatggaatcctttcctc

SEQ ID NO: 351856 - DNA, 120 bp, Artificial Sequence
  ENSG00000139190_22 (sequence is synthesized)
cacaccacccgtgcacttgccaaagacagggatgaggcaagtggttcttcctggggcccggccgatcctcaggatgcagagaagtcatgtagacccaccagccccaccttggggggaggc

SEQ ID NO: 351857 - DNA, 120 bp, Artificial Sequence
  ENSG00000139190_23 (sequence is synthesized)
gtgccagcctgtgtcaggtgtgcttgtgtattgctgtgctgtcatggggccctctccttgagagccgcctctctgttcttcctgtagtatattcccctttgaaccaccctttcctgtctg

SEQ ID NO: 351858 - DNA, 120 bp, Artificial Sequence
  ENSG00000139190_24 (sequence is synthesized)
aattctactttgcctcctttctcttcctcctctttgcatggtttgtgtgtatagacagtggaacctgaggatgggatctgctcagcctatcttcggggcaattgctgagcttcaggatgg

SEQ ID NO: 351859 - DNA, 120 bp, Artificial Sequence
  ENSG00000139190_25 (sequence is synthesized)
gctattaatgtgggataagcccaggtgcaaggggaggagggcaggctgggaacagagcggagaatgcccatggccctttattccttcttccctcggtccacgaacaggaagaggctgagg

SEQ ID NO: 351860 - DNA, 120 bp, Artificial Sequence
  ENSG00000139192_0 (sequence is synthesized)
agacggcttcacacagggacgcgggctgccatcttgctctaagtgaaagtgaaagaaaagtcggcagcagagggaacagggaagaaacctaaaggctgcaggctgccaggtgtgcttgga

SEQ ID NO: 351861 - DNA, 120 bp, Artificial Sequence
  ENSG00000139192_1 (sequence is synthesized)
gagcccccttcttccgccgggcctcgcaagcagcgtaggactgtggagaagggcggtgggcaaggagggaactcgagagcagcctccatgggcacacaggagggctggtgcctgctgctc

SEQ ID NO: 351862 - DNA, 120 bp, Artificial Sequence
  ENSG00000139192_2 (sequence is synthesized)
tgcctggctctatctggagcagcagaaaccaagccccacccagcagaggggcagtggcgggcagtggacgtggtcctagactgcttcctggcgaaggacggtgcgcaccgtggagctctc

SEQ ID NO: 351863 - DNA, 120 bp, Artificial Sequence
  ENSG00000139192_3 (sequence is synthesized)
gccagcagtgaggacagggcaagggcctcccttgtgctgaagcaggtgccagtgctggacgatggctccctggaggacttcaccgatttccaagggggcacactggcccaagatgaccca

SEQ ID NO: 351864 - DNA, 120 bp, Artificial Sequence
  ENSG00000139192_4 (sequence is synthesized)
cctattatctttgaggcctcagtggacctggtccagattccccaggccgaggccttgctccatgctgactgcagtgggaaggaggtgacctgtgagatctcccgctactttctccagatg

SEQ ID NO: 351865 - DNA, 120 bp, Artificial Sequence
  ENSG00000139192_5 (sequence is synthesized)
acagagaccactgttaagacagcagcttggttcatggccaacatgcaggtctctggagggggacctagcatctccttggtgatgaagactcccagggtcaccaagaatgaggcgctctgg

SEQ ID NO: 351866 - DNA, 120 bp, Artificial Sequence
  ENSG00000139192_6 (sequence is synthesized)
cacccgacgctgaacttgccactgagcccccaggggactgtgcgaactgcagtggagttccaggtgatgacacagacccaatccctgagcttcctgctggggtcctcagcctccttggac

SEQ ID NO: 351867 - DNA, 120 bp, Artificial Sequence
  ENSG00000139192_7 (sequence is synthesized)
ggggcaggctgtgcggaagggcgctaccctggagcctgcacaactgggcatggccagggatgcctccctcaccctgcccggcctcactatacaggacgaggggacctacatttgccagat

SEQ ID NO: 351868 - DNA, 120 bp, Artificial Sequence
  ENSG00000139192_8 (sequence is synthesized)
caccacctctctgtaccgagctcagcagatcatccagctcaacatccaagcttcccctaaagtacgactgagcttggcaaacgaagctctgctgcccaccctcatctgcgacattgctgg

SEQ ID NO: 351869 - DNA, 120 bp, Artificial Sequence
  ENSG00000139192_9 (sequence is synthesized)
ctattaccctctggatgtggtggtgacgtggacccgagaggagctgggtggatccccagcccaagtctctggtgcctccttctccagcctcaggcaaagcgtggcaggcacctacagcat

SEQ ID NO: 351870 - DNA, 120 bp, Artificial Sequence
  ENSG00000139192_10 (sequence is synthesized)
ctcctcctctctcaccgcagaacctggctctgcaggtgccacttacacctgccaggtcacacacatctctctggaggagccccttggggccagcacccaggttgtcccaccagagcggag

SEQ ID NO: 351871 - DNA, 120 bp, Artificial Sequence
  ENSG00000139192_11 (sequence is synthesized)
aacagccttgggagtcatctttgccagcagtctcttccttcttgcactgatgttcctggggcttcagagacggcaagcacctacaggacttgggctgcttcaggctgaacgctgggagac

SEQ ID NO: 351872 - DNA, 120 bp, Artificial Sequence
  ENSG00000139192_12 (sequence is synthesized)
cacttcctgtgctgacacacagagctcccatctccatgaagaccgcacagcgcgtgtaagccagcccagctgacctaaagcgacatgagactactagaaagaaacgacacccttccccaa

SEQ ID NO: 351873 - DNA, 120 bp, Artificial Sequence
  ENSG00000139192_13 (sequence is synthesized)
gcccccacagctactccaacccaaacaacaaccaagccagtttaatggtaggaatttgtattttttgcctttgttcagaatacatgacattggtaaatatgccacatgcctttggtggaa

SEQ ID NO: 351874 - DNA, 120 bp, Artificial Sequence
  ENSG00000139192_14 (sequence is synthesized)
agacggcttcacacagggacgcgggctgccatcttgctctaagtgaaagtgaaagaaaagtcggcagcagagggaacagggaagaaacctaaaggctgcaggctgccagagccccaccca

SEQ ID NO: 351875 - DNA, 120 bp, Artificial Sequence
  ENSG00000139192_15 (sequence is synthesized)
ggagggagggtggggactccacagggaaaatgctaaagaggggctgcctctgtggctgtggtcaggagccactgtcctacagagagggcactggcctgggagctgacacttcagaagagg

SEQ ID NO: 351876 - DNA, 120 bp, Artificial Sequence
  ENSG00000139192_16 (sequence is synthesized)
gctccagccacccacccatcacagcctcctgcttttgagtttgccctaaatgaaaatgaaaccagtcgtgttccctcgttttctcctagctacctcactaaagtctgtcactctcctgcc

SEQ ID NO: 351877 - DNA, 120 bp, Artificial Sequence
  ENSG00000139192_17 (sequence is synthesized)
tcagagtagaaagaaagagtagtcacgtgctcccagaaggactctaagtcaagtcacagagctaaaaatacatgaaggtggcaccagctcatggggcactgggcctggctctgcagaggc

SEQ ID NO: 351878 - DNA, 120 bp, Artificial Sequence
  ENSG00000139192_18 (sequence is synthesized)
accctgggctcatgcaccaaggcagagaacaggaagaagtgaggggacaagaagaaggcagaatgtccagatggaggataagaccaaagagccagcacctacaggacttgggctgcttca

SEQ ID NO: 351879 - DNA, 120 bp, Artificial Sequence
  ENSG00000139192_19 (sequence is synthesized)
aactcgagagcagcctccatgggcacacaggagggctggtgcctgctgctctgcctggctctatctggagcagcagaaaccagtgagtctgggagtcggggagagctggctgggagaaga

SEQ ID NO: 351880 - DNA, 120 bp, Artificial Sequence
  ENSG00000139192_20 (sequence is synthesized)
gctactgaagccccagggtgccaccctccccgagattccagaagagcaaaggggccggggatgaccccatcgccttctaagcccaacaggggaaaggctcagcggctggcaaaggaagga

SEQ ID NO: 351881 - DNA, 120 bp, Artificial Sequence
  ENSG00000139192_21 (sequence is synthesized)
gcatcagctcggtcatccagctctgacagcttctggtccctctccaggaccttgtccacgttcacacgtatgatgtccaccacctgaggagggcacagaaacaaagcagctaagcttcct

SEQ ID NO: 351882 - DNA, 120 bp, Artificial Sequence
  ENSG00000139192_22 (sequence is synthesized)
gccagagacagaggaaaggacaacaaccagagaatcacaagtctggccctgtgcaactctaaagggtgctttgcctctcagggcctttgactattctcctacgaaaaaaggagaaaagat

SEQ ID NO: 351883 - DNA, 120 bp, Artificial Sequence
  ENSG00000139192_23 (sequence is synthesized)
aagaagttcccttttgtttccaaactcctagatttggaaactttcagagaaacagctatctacctacctcctccacttgtgcctgggtttgctgtagtcgtctgttactggtcatgttag

SEQ ID NO: 351884 - DNA, 120 bp, Artificial Sequence
  ENSG00000139192_24 (sequence is synthesized)
gaggagggccagggggacccccacctggggcagtcccttctgtcccttcagcaggtggctgagctggagcagacctgtggaaagacatgtgcagagtacacaaagtgaccaagacaagaa

SEQ ID NO: 351885 - DNA, 78 bp, Artificial Sequence
  ENSG00000139192_25 (sequence is synthesized)
aaagacatgtgcagagtacacaaagtgaccaagacaagaaaggagctgggcagtgggaggagcgcttgagcccaggag

SEQ ID NO: 351886 - DNA, 120 bp, Artificial Sequence
  ENSG00000139192_26 (sequence is synthesized)
aaaataaagtgacagatgaccaccctgcagctctccagcttcctctctgaaatcccagtcccaaaatccagtttcctggccgcctcctggctcagagccccacccagcagaggggcagtg

SEQ ID NO: 351887 - DNA, 120 bp, Artificial Sequence
  ENSG00000139193_0 (sequence is synthesized)
aatactctccccagcacacggaaggggaagggggtggaggttgctgctatgagagagaaaaaaaaaacagccacaatagagattctgccttcaaaggttggcttgccacctgaagcagcc

SEQ ID NO: 351888 - DNA, 120 bp, Artificial Sequence
  ENSG00000139193_1 (sequence is synthesized)
actgcccagggggtgcaaagaagagacagcagcgcccagcttggaggtgctaactccagaggccagcatcagcaactgggcacagaaaggagccgcctgggcagggaccatggcacggcc

SEQ ID NO: 351889 - DNA, 120 bp, Artificial Sequence
  ENSG00000139193_2 (sequence is synthesized)
acatccctggtggctgtgcgttctggggaccctggtggggctctcagctactccagcccccaagagctgcccagagaggcactactgggctcagggaaagctgtgctgccagatgtgtga

SEQ ID NO: 351890 - DNA, 120 bp, Artificial Sequence
  ENSG00000139193_3 (sequence is synthesized)
gccaggaacattcctcgtgaaggactgtgaccagcatagaaaggctgctcagtgtgatccttgcataccgggggtctccttctctcctgaccaccacacccggccccactgtgagagctg

SEQ ID NO: 351891 - DNA, 120 bp, Artificial Sequence
  ENSG00000139193_4 (sequence is synthesized)
tcggcactgtaactctggtcttctcgttcgcaactgcaccatcactgccaatgctgagtgtgcctgtcgcaatggctggcagtgcagggacaaggagtgcaccgagtgtgatcctcttcc

SEQ ID NO: 351892 - DNA, 120 bp, Artificial Sequence
  ENSG00000139193_5 (sequence is synthesized)
tcggtcgtctcaggccctgagcccacaccctcagcccacccacttaccttatgtcagtgagatgctggaggccaggacagctgggcacatgcagactctggctgacttcaggcagctgcc

SEQ ID NO: 351893 - DNA, 120 bp, Artificial Sequence
  ENSG00000139193_6 (sequence is synthesized)
tgcccggactctctctacccactggccaccccaaagatccctgtgcagctccgattttattcgcatccttgtgatcttctctggaatgttccttgttttcaccctggccggggccctgtt

SEQ ID NO: 351894 - DNA, 120 bp, Artificial Sequence
  ENSG00000139193_7 (sequence is synthesized)
cctccatcaacgaaggaaatatagatcaaacaaaggagaaagtcctgtggagcctgcagagccttgtcattacagctgccccagggaggaggagggcagcaccatccccatccaggagga

SEQ ID NO: 351895 - DNA, 120 bp, Artificial Sequence
  ENSG00000139193_8 (sequence is synthesized)
ttaccgaaaaccggagcctgcctgctccccctgagccagcacctgcgggagctgcactacagccctggcctccacccccaccccgccgaccatccaagggagagtgagacctggcagcca

SEQ ID NO: 351896 - DNA, 120 bp, Artificial Sequence
  ENSG00000139193_9 (sequence is synthesized)
caactgcagtcccatcctcttgtcagggccctttcctgtgtacacgtgacagagtgccttttcgagactggcagggacgaggacaaatatggatgaggtggagagtgggaagcaggagcc

SEQ ID NO: 351897 - DNA, 120 bp, Artificial Sequence
  ENSG00000139193_10 (sequence is synthesized)
cagccagctgcgcctgcgctgcaggagggcgggggctctggttgtaaaacacacttcctgctgcgaaagacccacatgctacaagacgggcaaaataaagtgacagatgaccaccctgca

SEQ ID NO: 351898 - DNA, 120 bp, Artificial Sequence
  ENSG00000139194_0 (sequence is synthesized)
acatcctgtctctgtgtgtggagctggctggaatctctcagcctcacctgccagacaacaccccctccttcctcaccctgtctcctgcattctcctgaaaccttcatccacacaatgcct

SEQ ID NO: 351899 - DNA, 120 bp, Artificial Sequence
  ENSG00000139194_1 (sequence is synthesized)
cccaacctcactggctactaccgctttgtctcgcagaagaacatggaggactacctgcaagccctaaacatcagcttggctgtgcggaagatcgcgctgctgctgaagccggacaaggag

SEQ ID NO: 351900 - DNA, 120 bp, Artificial Sequence
  ENSG00000139194_2 (sequence is synthesized)
atcgaacaccagggcaaccacatgacggtgaggacgctcagcaccttccgaaactacactgtgcagtttgatgtgggagtggagtttgaggaggacctcaggagcgtggacggacgaaaa

SEQ ID NO: 351901 - DNA, 120 bp, Artificial Sequence
  ENSG00000139194_3 (sequence is synthesized)
gcaagggatgcagtgtgcgagcaggtcttcaggaaggtcagatagccggagaggagccaagatccctccagacagcaccagctcacagacgctcttgttgtgcccccttcaagcccagat

SEQ ID NO: 351902 - DNA, 120 bp, Artificial Sequence
  ENSG00000139194_4 (sequence is synthesized)
tgtgccaggtcagctgtcccttcctctggccacctttcctccctctgggtccctcctcacccctccccgtgttaatctgtaacttgcagcccccaggccaaagtcctttctcacactcca

SEQ ID NO: 351903 - DNA, 120 bp, Artificial Sequence
  ENSG00000139194_5 (sequence is synthesized)
ctgcccaatagtgacctcacttccaggtcaaggtctggcgtcccaaatgaaagaagcaggcaaagggaaggagcccctgagaacaaccaatctccgctctctcctgtccatttgacctct

SEQ ID NO: 351904 - DNA, 120 bp, Artificial Sequence
  ENSG00000139194_6 (sequence is synthesized)
tcttttccttctaagaaagaactaagctttgggcatttggcgattagtgaaaattctatcctgatggacttctggaaaactgtgactggggttcaagagtttaaacaggggctactggca

SEQ ID NO: 351905 - DNA, 120 bp, Artificial Sequence
  ENSG00000139194_7 (sequence is synthesized)
tcatgggttctgcatccacagcttcagcaaactgcaaatggaaaaatatttgggaaaaataaaaataaaaaataacaatacaaaatgatacaaataaaaaacaatacagtatagcaacta

SEQ ID NO: 351906 - DNA, 120 bp, Artificial Sequence
  ENSG00000139194_8 (sequence is synthesized)
atttctaaccaggcattggtaggagggggtgaatccacagtcccagacccaaagaagggaaactcacagccctgaggggctgctgcaggcagaggagctcctggctggctagcagcaccc

SEQ ID NO: 351907 - DNA, 120 bp, Artificial Sequence
  ENSG00000139194_9 (sequence is synthesized)
actgtcacctctgccttgttctttccaccttgggtcactctggggaaagccagctgctatgccgcgaggacactcaagcgtcctatgaggagggccatgtggcagggaactgaggccgcc

SEQ ID NO: 351908 - DNA, 120 bp, Artificial Sequence
  ENSG00000139194_10 (sequence is synthesized)
tgcccacatccatgtgagtgaccgtctggaagcagacctccagccccagtcccgcctctggaggactgcagcctgcacctggaccaaagccttgtgagagaccctgatcctaaactaccc

SEQ ID NO: 351909 - DNA, 120 bp, Artificial Sequence
  ENSG00000139194_11 (sequence is synthesized)
ttttaaacaaaatgtgggggtgactttttacaagcagacagataactgcaacatagtctcaaccttgaatttcattgcaaatgaccccatcctgaccataacctcaatattcgctaagtg

SEQ ID NO: 351910 - DNA, 120 bp, Artificial Sequence
  ENSG00000139194_12 (sequence is synthesized)
ggcagaagaatggggttggggggtgggggcagtagatgacttcgggcagtaaaaatgtgtccagtcacaaaaaggcatgactccatcctcagtgctcacagccctcccatcctagctcta

SEQ ID NO: 351911 - DNA, 120 bp, Artificial Sequence
  ENSG00000139194_13 (sequence is synthesized)
agctagacccttccacgagtctagagagtgaagttcagaggcaggcagctgccccctttcccttcctctttgaggcccacccacctgagtcctgtctgaggactgcctctcccctaggta

SEQ ID NO: 351912 - DNA, 120 bp, Artificial Sequence
  ENSG00000139194_14 (sequence is synthesized)
attgttaaaaggaatgtccagcatcttcagatggtaccctgctcgtttcaaagttgtgtgaccttactctgtggcttcaaaaggacaaagacatcagaatacaactcaatgcacctcacg

SEQ ID NO: 351913 - DNA, 120 bp, Artificial Sequence
  ENSG00000139194_15 (sequence is synthesized)
ccattagacagcatgagtgacaagccgcagggaggatatatcagacagcaccagatcttagctggtaggaagctgattgacaagttctgtggaggacagagcagcagagccctgaagtcc

SEQ ID NO: 351914 - DNA, 120 bp, Artificial Sequence
  ENSG00000139194_16 (sequence is synthesized)
acagcaataaggggaagatggtgttctagacacaccagcagggaagagccaaacctggatggtcagtttgacctcccagggtaaggagcctctgggtcttctctacctctcccaggacca

SEQ ID NO: 351915 - DNA, 120 bp, Artificial Sequence
  ENSG00000139194_17 (sequence is synthesized)
ccacagtgaaactagagccagagggttctttgctgaaaagagggtgagtgaggtggagagatgcagatgagaggaggctttatgcagaagccatcaggttgtgccatatctaaagcctgg

SEQ ID NO: 351916 - DNA, 120 bp, Artificial Sequence
  ENSG00000139194_18 (sequence is synthesized)
aaaaaggaggataccagctgataggatttggctctatgtccccaaccaaatctcatgtggaattgtaatccccacgtgttggaggaggggcctggtgagaggtgattggatcatgggggc

SEQ ID NO: 351917 - DNA, 89 bp, Artificial Sequence
  ENSG00000139194_19 (sequence is synthesized)
ggaggaggggcctggtgagaggtgattggatcatgggggcagtttctaatggtttagtgccatccccctagtgctgtctcccgatggaa

SEQ ID NO: 351918 - DNA, 80 bp, Artificial Sequence
  ENSG00000139197_0 (sequence is synthesized)
ccctgggccctccccacccttgcggtggcctcgcgggtcccaggggcggggctggagcggcagcagggccggggagatgg

SEQ ID NO: 351919 - DNA, 120 bp, Artificial Sequence
  ENSG00000139197_1 (sequence is synthesized)
gggctggagcggcagcagggccggggagatgggcggtggggagcgcgggagggaccgggccgagccgggggaagggctccggtgacttaaggggagggaatgctcctctgccgtgctcac

SEQ ID NO: 351920 - DNA, 120 bp, Artificial Sequence
  ENSG00000139197_2 (sequence is synthesized)
cgcgtgctggggctgcgcggggctaggtatggtcgggctgttttcccactgtcccttcttcgggcagtgtcgccgtccagcctggttgttgaagcgtccccgtggtcccccggggtccag

SEQ ID NO: 351921 - DNA, 120 bp, Artificial Sequence
  ENSG00000139197_3 (sequence is synthesized)
gcccctttgtggaggcagctgctggcccccagcccatgggaccgtagtcgcggaggcctctgcagaggcgcaggctggaagcggtggcctttgaggggggcggcaggagagagtaccgac

SEQ ID NO: 351922 - DNA, 120 bp, Artificial Sequence
  ENSG00000139197_4 (sequence is synthesized)
ctccctcgaactcctggcagagagagctggcggtcaccatggcaatgcgggagctggtggaggccgaatgcgggggtgccaacccgctcatgaagctcgccgggcacttcacccaggaca

SEQ ID NO: 351923 - DNA, 120 bp, Artificial Sequence
  ENSG00000139197_5 (sequence is synthesized)
aggcccttcggcaggagggattgaggcctggcccctggccccccggagccccggcctctgaggcagcctccaagcctttgggagtagcttctgaagatgagttggtggctgaattcctgc

SEQ ID NO: 351924 - DNA, 120 bp, Artificial Sequence
  ENSG00000139197_6 (sequence is synthesized)
aggaccagaatgcaccccttgtgtcccgtgcccctcagaccttcaagatggatgacctcctggctgagatgcagcagattgagcagtcaaacttccgccaggctccccagagagcccctg

SEQ ID NO: 351925 - DNA, 120 bp, Artificial Sequence
  ENSG00000139197_7 (sequence is synthesized)
gtgtggcagacttggccttgtctgagaactgggcccaggagtttcttgcagctggagatgctgtggatgtaactcaggattataatgagactgactggtcccaagaattcatctctgaag

SEQ ID NO: 351926 - DNA, 120 bp, Artificial Sequence
  ENSG00000139197_8 (sequence is synthesized)
ttacagaccccttgtctgtgtcccctgcccgctgggctgaggaatatttggagcaatcagaggagaagctgtggctgggagaacctgagggaacagccaccgatcgctggtatgatgaat

SEQ ID NO: 351927 - DNA, 120 bp, Artificial Sequence
  ENSG00000139197_9 (sequence is synthesized)
atcatcctgaggaggatctgcagcacacggccagtgactttgtggccaaagtggatgaccccaaattggctaattctgagttcctgaaattcgtgcggcagattggcgaagggcaggtgt

SEQ ID NO: 351928 - DNA, 120 bp, Artificial Sequence
  ENSG00000139197_10 (sequence is synthesized)
tcagatgcctgggttgaccagttcacaagaccagtaaacacatctgcccttgatatggagtttgaacgagccaagtcagctatagagtctgatgtcgatttctgggacaagttgcaggca

SEQ ID NO: 351929 - DNA, 120 bp, Artificial Sequence
  ENSG00000139197_11 (sequence is synthesized)
gagttggaggagatggcaaaacgggatgctgaggcccacccctggctttctgactatgatgaccttacgtcagctacctatgataaggggtaccagtttgaggaggagaaccccttgcgt

SEQ ID NO: 351930 - DNA, 120 bp, Artificial Sequence
  ENSG00000139197_12 (sequence is synthesized)
gatcaccctcagccttttgaagaagggctgcggcgccttcaggagggggacctgccaaatgctgtgctgctttttgaggcagctgtgcagcaggatcctaagcacatggaagcttggcag

SEQ ID NO: 351931 - DNA, 120 bp, Artificial Sequence
  ENSG00000139197_13 (sequence is synthesized)
tatctgggtaccacccaggcagagaatgaacaagaactattagccatcagtgcattgcggaggtgtctggagctaaagccagataaccagacagcactgatggcgctggctgtgagcttc

SEQ ID NO: 351932 - DNA, 120 bp, Artificial Sequence
  ENSG00000139197_14 (sequence is synthesized)
accaacgagtccctgcagcgacaggcctgtgaaaccctacgagactggctgcggtacacaccagcctatgcccatctggtgacacctgctgaagaaggggctggtggggcaggactgggc

SEQ ID NO: 351933 - DNA, 120 bp, Artificial Sequence
  ENSG00000139197_15 (sequence is synthesized)
cccagcaagcgtatcctgggatctctcttgtctgactccctgtttcttgaagtgaaagagctcttcctggcagctgtgcggctggaccctacctccattgaccctgatgtgcagtgtggc

SEQ ID NO: 351934 - DNA, 120 bp, Artificial Sequence
  ENSG00000139197_16 (sequence is synthesized)
ttgggagtccttttcaacctgagtggggagtatgacaaggccgtggactgcttcacagctgccctcagcgttcgtcccaatgactatttgctgtggaataagctaggcgccaccctggcc

SEQ ID NO: 351935 - DNA, 120 bp, Artificial Sequence
  ENSG00000139197_17 (sequence is synthesized)
aatggaaaccagagtgaagaagcagtagctgcgtaccgccgggccctcgagctccagcctggctatatccggtcccgctataacctgggcatcagctgcatcaacctcggggctcaccgg

SEQ ID NO: 351936 - DNA, 120 bp, Artificial Sequence
  ENSG00000139197_18 (sequence is synthesized)
gaggctgtggagcactttctggaggccctgaacatgcagaggaaaagccggggcccccggggtgaaggaggtgccatgtcggagaacatctggagcaccctgcgtttggcattgtctatg

SEQ ID NO: 351937 - DNA, 120 bp, Artificial Sequence
  ENSG00000139197_19 (sequence is synthesized)
ttaggccagagcgatgcctatggggcagccgacgcgcgggatctgtccaccctcctaactatgtttggcctgccccagtgacagtgggacgggctgccctgtgagtgtccacctggaggg

SEQ ID NO: 351938 - DNA, 120 bp, Artificial Sequence
  ENSG00000139197_20 (sequence is synthesized)
gacgctaccccgctaggggttatttggaagcggggcaggcctaggaggctgaagaaggcttcggactggactccccagcccctggtgttagggcttttctctttcttgggcttgggaaca

SEQ ID NO: 351939 - DNA, 120 bp, Artificial Sequence
  ENSG00000139197_21 (sequence is synthesized)
ttagccagccccattttagaggggaaaactgaggctcagaaagggcactgaatccccttaggtcacaatgcgcccaagggaagaggcaggatcgactgagcctaggatctcgcgtcttcg

SEQ ID NO: 351940 - DNA, 120 bp, Artificial Sequence
  ENSG00000139197_22 (sequence is synthesized)
gctttcccccagagcctgggaagcccttcttagctccactcttctttgagctttccgtcaaacaaatcctagggcccgtggccttttcgagcgctcctaaaggcgactctccaagacccg

SEQ ID NO: 351941 - DNA, 120 bp, Artificial Sequence
  ENSG00000139197_23 (sequence is synthesized)
ccttgggatcctgaactcatattggattctctacctaccatcttggacaattcatgtaggaaaacaaatcctcatttgttcaaacaatagatgaaaattattaaagttttgacacatatt

SEQ ID NO: 351942 - DNA, 120 bp, Artificial Sequence
  ENSG00000139197_24 (sequence is synthesized)
cttaaggccccgccttttcagacagcttccgctgggcctgggccgctgcggggcggtcacggcccctttaagcctgagccccgccccctggctccccgccccctcttctcccctccccca

SEQ ID NO: 351943 - DNA, 120 bp, Artificial Sequence
  ENSG00000139197_25 (sequence is synthesized)
ccctctccccaaatgggcctaccaagggggcgggctgatgaccataagcggtacggcctttcaggagctgcctcaacgtaggggtgggtagtctgtgttctagttcctacataattgtag

SEQ ID NO: 351944 - DNA, 120 bp, Artificial Sequence
  ENSG00000139197_26 (sequence is synthesized)
gaaaatgagctgtgtcatctctgagtcccttggtaattcaagggctgtacatccagctacagatctctctgctcatcatgccctttcttggtgctgctttttgggtaggaccccacgatt

SEQ ID NO: 351945 - DNA, 120 bp, Artificial Sequence
  ENSG00000139197_27 (sequence is synthesized)
tagggtaactgttatcatcagctgccatttctgatagggtctaccacatctgtaatgtctgtcctttcccccacttttactgggaattgatagtccagcttccttgggcagtgtaagtag

SEQ ID NO: 351946 - DNA, 120 bp, Artificial Sequence
  ENSG00000139197_28 (sequence is synthesized)
gaggttcatctgctgtgcgcctctaatgtctgtctggatgggatgtgttaggagttggcctgttgggttgaattgttgatttggctgagcagagctgagttttggtaggagtgctcatgg

SEQ ID NO: 351947 - DNA, 120 bp, Artificial Sequence
  ENSG00000139197_29 (sequence is synthesized)
ttctgtcattcttggacctctcctggctgagctctgattccctgtgagcacgatgctgatgcaatagtcctgtgtcatcactgcagcggtcctcaggagctgccagggccaattgctaca

SEQ ID NO: 351948 - DNA, 120 bp, Artificial Sequence
  ENSG00000139197_30 (sequence is synthesized)
gagtgtctgggtgtgtggcataggaggaaggtttgcttgtgaaatgaggctgggtgggagcggggagggactagatcagaagagatcaagggctctattcaggaacgttggtgggaggac

SEQ ID NO: 351949 - DNA, 120 bp, Artificial Sequence
  ENSG00000139197_31 (sequence is synthesized)
agagcaagtgggaagggggtatggtgagtgcggcaatccctcatcctcttagaagcacctgtgaatgggaattgagccaactgttatagaaaattggttcagaaagtgcaatcttgccag

SEQ ID NO: 351950 - DNA, 120 bp, Artificial Sequence
  ENSG00000139197_32 (sequence is synthesized)
atttctagcaaataggttcagtgttaccataagcctttgctgtacttcttgaaatgtttctaggggagagcattggaaaatccccttcccccatctagatcgaaggaagatgagggagca

SEQ ID NO: 351951 - DNA, 120 bp, Artificial Sequence
  ENSG00000139197_33 (sequence is synthesized)
gcttggattcttctcagttgtcccctgcatggggagatacactaacccccagaaatgactgctaagcctcttgccttgtctttagtagctaatgatcagagagattttttttttaaacta

SEQ ID NO: 351952 - DNA, 120 bp, Artificial Sequence
  ENSG00000139197_34 (sequence is synthesized)
ccatggtcccaggattccatcctgaaatttatttttctttgtatgaatatgtgtaaatgatttaaaaataaaactgtaaaatatttgtacgaagaataaatggaactgatgtgggtatga

SEQ ID NO: 351953 - DNA, 120 bp, Artificial Sequence
  ENSG00000139197_35 (sequence is synthesized)
aagcggtggcctttgaggggggcggcaggagagagtaccgacctccctcgaactcctggcagaggtgggggtcgcagcaaaagcactggggtggagggcggccagtgtggggcagacgcc

SEQ ID NO: 351954 - DNA, 120 bp, Artificial Sequence
  ENSG00000139197_36 (sequence is synthesized)
ctcttctcccctcccccaagccagcacctggtgccccggcgggtcgtgcggcgcggcgctccgcggcctccaagcctttgggagtagcttctgaagatgagttggtggctgaattcctgc

SEQ ID NO: 351955 - DNA, 120 bp, Artificial Sequence
  ENSG00000139197_37 (sequence is synthesized)
tgcagcctctgaggcagtgagtgttcttgaggtggaaagcccaggtgcagcctctgaggcagtgagtgttcttgaggtggaaagcccaggtggtggtggtctgaggtggaggggctgttt

SEQ ID NO: 351956 - DNA, 120 bp, Artificial Sequence
  ENSG00000139197_38 (sequence is synthesized)
gcacatcttggtataactgctttctctattgtgttgcaaatcatagtagttaccacttactgagcgtttataaacactagaaaaccctgtgcacctttaaataaatgcaaccattttata

SEQ ID NO: 351957 - DNA, 120 bp, Artificial Sequence
  ENSG00000139197_39 (sequence is synthesized)
atgcaccctgggctgggatggtacttctgttcgtctggcattattgcccttggtcatttaccggcagccctgggcccctccttgctcttctccatgacactaggactcccttggtcttga

SEQ ID NO: 351958 - DNA, 120 bp, Artificial Sequence
  ENSG00000139197_40 (sequence is synthesized)
gcccagcagagctggttttggaaggcaagaatcttgcttttcttaccccagtttagtttaaagagaaggagaagagatcttaggtctcttcgttcctgtctatagaacagagacttaaga

SEQ ID NO: 351959 - DNA, 120 bp, Artificial Sequence
  ENSG00000139197_41 (sequence is synthesized)
tcctgcctcttccttctagtgttcattccctcatctccttgcctactaactcttttttctgatgcctttgcaagtctttagagccagaaatccctttctttttgctctctacctctttta

SEQ ID NO: 351960 - DNA, 120 bp, Artificial Sequence
  ENSG00000139197_42 (sequence is synthesized)
gggtctttagcatatcttgtctgcagctagagatggtcaggggaggggtgagtacagggtcctcttgggcatggttgagagtgcacacctggaagtcctttcccaagtggcctgtgtgtg

SEQ ID NO: 351961 - DNA, 120 bp, Artificial Sequence
  ENSG00000139197_43 (sequence is synthesized)
ggcattgtctatgttaggccagagcgatgcctatggggcagccgacgcgcgggatctgtccaccctcctaactatgtttggcctgccccagtgacagtgggacgggctgccctaggagaa

SEQ ID NO: 351962 - DNA, 120 bp, Artificial Sequence
  ENSG00000139197_44 (sequence is synthesized)
cagatgcctatgggcttcatcaacccctgattttagaggaactgcgtcattgtacatctctgtctttctctcttaggcctccaagcctttgggagtagcttctgaagatgagttggtggc

SEQ ID NO: 351963 - DNA, 80 bp, Artificial Sequence
  ENSG00000139200_0 (sequence is synthesized)
cacccgctccagcgccctgccgcgggccaaacctccccaccatgccccgcaccccgcccgctcctgcgaccccccagccc

SEQ ID NO: 351964 - DNA, 120 bp, Artificial Sequence
  ENSG00000139200_1 (sequence is synthesized)
tgcgaccccccagccccgctcagtcccgagcgcccgcagtcgtcgcgccgccgcgccaagcatgcagtaaaggctgaaaatctgggtcacagctgaggaagacctcagacatggagtcca

SEQ ID NO: 351965 - DNA, 120 bp, Artificial Sequence
  ENSG00000139200_2 (sequence is synthesized)
ggatgtggcctgcgctgctgctgtcccacctcctccctctctggccactgctgttgctgcccctcccaccgcctgctcagggctcttcatcctcccctcgaaccccaccagccccagccc

SEQ ID NO: 351966 - DNA, 120 bp, Artificial Sequence
  ENSG00000139200_3 (sequence is synthesized)
gccccccgtgtgccaggggaggcccctcggccccacgtcatgtgtgcgtgtgggagcgagcacctccaccaagccgatctcctcgggtcccaagatcacgtcggcaagtcctgcctggca

SEQ ID NO: 351967 - DNA, 120 bp, Artificial Sequence
  ENSG00000139200_4 (sequence is synthesized)
ctgcacccccagccaccccatcaggctttgaggaggggccgccctcatcccaatacccctgggctatcgtgtggggtcccaccgtgtctcgagaggatggaggggaccccaactctgcca

SEQ ID NO: 351968 - DNA, 120 bp, Artificial Sequence
  ENSG00000139200_5 (sequence is synthesized)
atcccggatttctggactatggttttgcagcccctcatgggctcgcaaccccacaccccaactcagactccatgcgaggtgatggagatgggcttatccttggagaggcacctgccaccc

SEQ ID NO: 351969 - DNA, 120 bp, Artificial Sequence
  ENSG00000139200_6 (sequence is synthesized)
tgcggccattcctgttcgggggccgtggggaaggtgtggacccccagctctatgtcacaattaccatctccatcatcattgttctcgtggccactggcatcatcttcaagttctgctggg

SEQ ID NO: 351970 - DNA, 120 bp, Artificial Sequence
  ENSG00000139200_7 (sequence is synthesized)
accgcagccagaagcgacgcagaccctcagggcagcaaggtgccctgaggcaggaggagagccagcagccactgacagacctgtccccggctggagtcactgtgctgggggccttcgggg

SEQ ID NO: 351971 - DNA, 120 bp, Artificial Sequence
  ENSG00000139200_8 (sequence is synthesized)
actcacctacccccacccctgaccatgaggagccccgagggggaccccggcctgggatgccccaccccaagggggctccagccttccagttgaaccggattcccctggtgaatctgtgat

SEQ ID NO: 351972 - DNA, 120 bp, Artificial Sequence
  ENSG00000139200_9 (sequence is synthesized)
ggcacagcccccatcccactgagggtggggcagctgtggggagctggggccacaggggctcctggctcctgccccttgcacaccacccggaacactccccagccccacgggcaatcctat

SEQ ID NO: 351973 - DNA, 120 bp, Artificial Sequence
  ENSG00000139200_10 (sequence is synthesized)
ctgctcgccctcctgcaggtgggggcctcacatatctgtgacttcgggtccctgtccccacccttgtgcactcacatgaaagccttgcacactcacctccaccttcacaggccatttgca

SEQ ID NO: 351974 - DNA, 120 bp, Artificial Sequence
  ENSG00000139200_11 (sequence is synthesized)
cacgctcctgcaccctctccccgtccataccgctccgctcagctgactctcatgttctctcgtctcacatttgcactctctccttcccacattctgtgctcagctcactcagtggtcagc

SEQ ID NO: 351975 - DNA, 120 bp, Artificial Sequence
  ENSG00000139200_12 (sequence is synthesized)
gtttcctgcacactttacctctcatgtgcgtttcccggcctgatgttgtggtggtgtgcggcgtgctcactctctccctcatgaacacccacccacctcgtttccgcagcccctgcgtgc

SEQ ID NO: 351976 - DNA, 120 bp, Artificial Sequence
  ENSG00000139200_13 (sequence is synthesized)
tgctccagaggtgggtgggaggtgagctgggggctccttgggccctcatcggtcatggtctcgtcccattccacaccatttgtttctctgtctccccatcctactccaaggatgccggca

SEQ ID NO: 351977 - DNA, 120 bp, Artificial Sequence
  ENSG00000139200_14 (sequence is synthesized)
tcaccctgagggctcccccttgggaatggggtagtgaggccccagacttcacccccagcccactgctaaaatctgttttctgacagatgggttttggggagtcgcctgctgcactacatg

SEQ ID NO: 351978 - DNA, 120 bp, Artificial Sequence
  ENSG00000139200_15 (sequence is synthesized)
agaaagggactcccatttgcccttccctttctcctacagtcccttttgtcttgtctgtcctggctgtctgtgtgtgtgccattctctggacttcagagccccctgagccagtcctccctt

SEQ ID NO: 351979 - DNA, 120 bp, Artificial Sequence
  ENSG00000139200_16 (sequence is synthesized)
cccagcctccctttgggcctccctaactccacctaggctgccagggaccggagtcagctggttcaaggccatcgggagctctgcctccaagtctacccttcccttcccggactccctcct

SEQ ID NO: 351980 - DNA, 120 bp, Artificial Sequence
  ENSG00000139200_17 (sequence is synthesized)
gtcccctcctttcctccctccttccttccactctccttccttttgcttccctgccctttccccctcctcaggttcttccctccttctcactggtttttccaccttcctccttcccttctt

SEQ ID NO: 351981 - DNA, 120 bp, Artificial Sequence
  ENSG00000139200_18 (sequence is synthesized)
ccctggctcctaggctgtgatatatatttttgtattatctctttcttcttcttgtggtgatcatcttgaattactgtgggatgtaagtttcaaaattttcaaataaagcctttgcaagat

SEQ ID NO: 351982 - DNA, 120 bp, Artificial Sequence
  ENSG00000139200_19 (sequence is synthesized)
ctccctggcgcagccgtccccgtccccgcggctgcctccatcccgcctcggctcggcgggcggctccgcgcagtctcctgcttcgggtccccagtccgctctcggcactccctgcctcgg

SEQ ID NO: 351983 - DNA, 120 bp, Artificial Sequence
  ENSG00000139200_20 (sequence is synthesized)
ggtcccttcgccgacctccttttcctcgtctccccccactctcgccgctctccagccctgtgcggggagtgcgggcctgcgggatgggtgggatgggggccacgctggggctggggcccg

SEQ ID NO: 351984 - DNA, 120 bp, Artificial Sequence
  ENSG00000139200_21 (sequence is synthesized)
ggagggcaaagagggaaggcaacttaggtcttcagagctggggtgggggtgccctctggatgggtagtgaggaggcaggcgtggcctcccacagcccctggccctcccaagggggctgga

SEQ ID NO: 351985 - DNA, 120 bp, Artificial Sequence
  ENSG00000139200_22 (sequence is synthesized)
ccagctcctctctgggaggcacccttccttctcccagtctctcaggatctgtgtcctattctctgctgcccataactccaactctgccctctttggttttttctcatgccaccttgtcta

SEQ ID NO: 351986 - DNA, 120 bp, Artificial Sequence
  ENSG00000139200_23 (sequence is synthesized)
ctattctggcctaccccttggttcctgactgtgccctttccctcttcctctcaggattcccctggtgaatctgtgatgcccccaatgttggggtgcagccaagcaggaggccaaggggcc

SEQ ID NO: 351987 - DNA, 120 bp, Artificial Sequence
  ENSG00000139200_24 (sequence is synthesized)
agatggggctggagtctggtcaggcaaccacgctggagtttttcccccaaaaggatgctaacaaccagtgaatcctgggtgcagccgcatagctggcagctgggtggcctgggagggcag

SEQ ID NO: 351988 - DNA, 120 bp, Artificial Sequence
  ENSG00000139200_25 (sequence is synthesized)
atgcgggtagaattggtggatgaattagctggggaagtacacagggcagggctggggtgtgacggccccctttttctcccagtaaaggctgaaaatctgggtcacagctgaggaagacct

SEQ ID NO: 351989 - DNA, 120 bp, Artificial Sequence
  ENSG00000139209_0 (sequence is synthesized)
actggggtgtgcgcagcgcctggagcatgagccgggtggtggcgtgcacggaggatcgcgggaggctgccgcctcgggacaccccactcacacagagctgacgcaagttggacagaagga

SEQ ID NO: 351990 - DNA, 120 bp, Artificial Sequence
  ENSG00000139209_1 (sequence is synthesized)
ggtgttggggtgaggtggtggtgttgattggcttgtctcgttcactcccactggtctttaaatcaatgtctagatctctaaagtttcatataaatcaaagctgttacacgggtctgccat

SEQ ID NO: 351991 - DNA, 120 bp, Artificial Sequence
  ENSG00000139209_2 (sequence is synthesized)
tccaaacaagtcaggaaagcctgcacaggactggataaataattaagaacagagtgttctgaacatcaacacaaagtggaagaaccttaagctgaaggtacagtatattatttacactga

SEQ ID NO: 351992 - DNA, 120 bp, Artificial Sequence
  ENSG00000139209_3 (sequence is synthesized)
aggggcttgtgtgtggacaagaaagcgctgacagctcaaatggatcccatggaactgagaaatgtcaacatcgaaccagatgatgagagcagcagtggagaaagtgctccagatagctac

SEQ ID NO: 351993 - DNA, 120 bp, Artificial Sequence
  ENSG00000139209_4 (sequence is synthesized)
atcgggataggaaattcagaaaaggcagcaatgagcagtcaatttgctaatgaagacactgaaagtcagaaattcctgacaaatggatttttggggaaaaagaagctggcagattatgct

SEQ ID NO: 351994 - DNA, 120 bp, Artificial Sequence
  ENSG00000139209_5 (sequence is synthesized)
gatgaacaccatcccggaaccacttcctttggaatgtcttcatttaacctgagtaatgccatcatgggcagtgggatcctgggcttgtcctatgccatggccaacacagggatcatactt

SEQ ID NO: 351995 - DNA, 120 bp, Artificial Sequence
  ENSG00000139209_6 (sequence is synthesized)
tttataatcatgctgcttgctgtggcaatattatcactgtattcagttcaccttttattaaaaacagccaaggaaggagggtctttgatttatgaaaaattaggagaaaaggcatttgga

SEQ ID NO: 351996 - DNA, 120 bp, Artificial Sequence
  ENSG00000139209_7 (sequence is synthesized)
tggccgggaaaaattggagcttttgtttccattacaatgcagaacattggagcaatgtcaagctacctctttatcattaaatatgaactacctgaagtaatcagagcattcatgggactt

SEQ ID NO: 351997 - DNA, 120 bp, Artificial Sequence
  ENSG00000139209_8 (sequence is synthesized)
gaagaaaatactggagaatggtacctcaatggcaactacctcatcatatttgtgtctgttggaattattcttccactttcgctccttaaaaatttaggttatcttggctataccagtgga

SEQ ID NO: 351998 - DNA, 120 bp, Artificial Sequence
  ENSG00000139209_9 (sequence is synthesized)
ttttctcttacctgcatggtgttttttgttagtgtggtgatttacaagaaattccaaataccctgccctctacctgttttggatcacagtgttggaaatctgtcattcaacaacacgctt

SEQ ID NO: 351999 - DNA, 120 bp, Artificial Sequence
  ENSG00000139209_10 (sequence is synthesized)
ccaatgcatgtggtaatgttacccaacaactctgagagttctgatgtgaacttcatgatggattacacccaccgcaatcctgcagggctggatgagaaccaggccaagggctctcttcat

SEQ ID NO: 352000 - DNA, 120 bp, Artificial Sequence
  ENSG00000139209_11 (sequence is synthesized)
gacagtggagtagaatatgaagctcatagtgatgacaagtgtgaacccaaatactttgtattcaactcccggacggcctatgcaattcctatcctagtatttgcttttgtatgccaccct

SEQ ID NO: 352001 - DNA, 120 bp, Artificial Sequence
  ENSG00000139209_12 (sequence is synthesized)
gaggtccttcccatctacagtgaacttaaagatcggtcccggagaaaaatgcaaacggtgtcaaatatttccatcacggggatgcttgtcatgtacctgcttgccgccctctttggttac

SEQ ID NO: 352002 - DNA, 120 bp, Artificial Sequence
  ENSG00000139209_13 (sequence is synthesized)
ctaaccttctatggagaagttgaagatgaattacttcatgcctacagcaaagtgtatacattagacatccctcttctcatggttcgcctggcagtccttgtggcagtaacactaactgtg

SEQ ID NO: 352003 - DNA, 120 bp, Artificial Sequence
  ENSG00000139209_14 (sequence is synthesized)
cccattgtcctcttcccaattcgtacatcagtgatcacactgttatttcccaaacgacccttcagctggatacgacatttcctgattgcagctgtgcttattgcacttaataatgttctg

SEQ ID NO: 352004 - DNA, 120 bp, Artificial Sequence
  ENSG00000139209_15 (sequence is synthesized)
gtcatccttgtgccaactataaaatacatcttcggattcataggggcttcttctgccactatgctgatttttattcttccagcagttttttatcttaaacttgtcaagaaagaaactttt

SEQ ID NO: 352005 - DNA, 120 bp, Artificial Sequence
  ENSG00000139209_16 (sequence is synthesized)
tttaattttccttgtggttggaatattcttcatgattggaagcatggcactcattataattgactggatttatgatcctccaaattccaagcatcactaacacaaggaaaaatactttct

SEQ ID NO: 352006 - DNA, 120 bp, Artificial Sequence
  ENSG00000139209_17 (sequence is synthesized)
ttttctattggaaatggttacaagttatactccaaaagatatttgaattatcttgattggaatgttattcataggaaataacaggaagattccaaagacgtttaccagtaatatcaccag

SEQ ID NO: 352007 - DNA, 120 bp, Artificial Sequence
  ENSG00000139209_18 (sequence is synthesized)
gcacctgcagaagaggaaaatcactgtttttgtcaaggatggttgtgtatgtgtttaaaataaaacctgtggtgcacatttctacccaggttttgctagagcagtgtgagatgatgaagg

SEQ ID NO: 352008 - DNA, 120 bp, Artificial Sequence
  ENSG00000139209_19 (sequence is synthesized)
tgtatttttgctgctttacgagcagaataagggtaactgcatgtaacaatcatcagatagtactctttcccctgccgtctcctcatcctgcaccccctaaaaaagtaccaaacatttgca

SEQ ID NO: 352009 - DNA, 120 bp, Artificial Sequence
  ENSG00000139209_20 (sequence is synthesized)
ttctcagaacatcaaacaaaaatgccctggtggcaaagctatcaccatttaatgtcttctctcagtcttgcaccaaagtctctggtctgtttactaacagaggcaaaaggcatgtcttag

SEQ ID NO: 352010 - DNA, 120 bp, Artificial Sequence
  ENSG00000139209_21 (sequence is synthesized)
gaactgtttctgtttctgtaaggtacatgaatggtcaaacaccagtctagagcatcttattgtcaacagcaaaataatattttgcccaccctgtttgtgacattgagttgtgacttctat

SEQ ID NO: 352011 - DNA, 120 bp, Artificial Sequence
  ENSG00000139209_22 (sequence is synthesized)
attcaatagatttttgtaaatgttaaaacatctatatttaaatgttaaaacactaaatatagagaggggctttatttcaatcatagagcaacaacaaaaataatgcttatagctaaactg

SEQ ID NO: 352012 - DNA, 120 bp, Artificial Sequence
  ENSG00000139209_23 (sequence is synthesized)
cctgttctagaaagcatctgctttttcatgttattcctaaatcctcttgtcatacttttgtcattgaacaatgctctccctctcgtcttccatcctcattcagaatttttagaagaccac

SEQ ID NO: 352013 - DNA, 120 bp, Artificial Sequence
  ENSG00000139209_24 (sequence is synthesized)
aatcgtggagatacactacccagtattgtttgatacatttttatttgataaacattcagtgcaggaaactgtgatttgctatatgtttatgtatataatcttattctgtagtcatcagaa

SEQ ID NO: 352014 - DNA, 120 bp, Artificial Sequence
  ENSG00000139209_25 (sequence is synthesized)
tgttaatgtaaggtacatttgatttttattttttacatgtgtagttttctttcttcacagtcaaagcatttatattattgggggtgggggcagggaattaagttggtgggctcgaaaatc

SEQ ID NO: 352015 - DNA, 120 bp, Artificial Sequence
  ENSG00000139209_26 (sequence is synthesized)
cattcatatgtatctgtctacaaatgtctggggataatttaaatttgaaacctaagttatatatagtttggcaatgctcttcttcaatatttacaataataggatgatctacaagaaaat

SEQ ID NO: 352016 - DNA, 120 bp, Artificial Sequence
  ENSG00000139209_27 (sequence is synthesized)
aagtttctttttgcaaatttttatcatactaaagttgttcttttaatttagcatatctaaaataggatttagttcagtttagctcacacaggtgtttgctgacattcattggccatttaa

SEQ ID NO: 352017 - DNA, 120 bp, Artificial Sequence
  ENSG00000139209_28 (sequence is synthesized)
tacagtgttgagtggttctctgtaaaagtataagtgctaacactacgaagaaatgcacacgatcattcttgctcacttctataacaaacttacataaaatggatttaaaaattcctactc

SEQ ID NO: 352018 - DNA, 120 bp, Artificial Sequence
  ENSG00000139209_29 (sequence is synthesized)
acagcctaaaacttctggagttcactacctttttttcaaatcatagtaagatcacttgtgtattttatattttagtaaagccaattatgaagtacaagtatcatacacgtacttttgagc

SEQ ID NO: 352019 - DNA, 120 bp, Artificial Sequence
  ENSG00000139209_30 (sequence is synthesized)
tactattatttgaaaaaaatctgccaaatagcatctttaggatatatttacattttcactcatctaaaaagtatacaaaaataaaaagtggaaaaaggtatcttctgaatgttcaagagc

SEQ ID NO: 352020 - DNA, 120 bp, Artificial Sequence
  ENSG00000139209_31 (sequence is synthesized)
atcctatagtgccaaataataaagcaccatttttttcttcataaccaggattaaaattcatatatactgcagggcagacatacatatgatagcttgtgctgattaatttaaccccatttg

SEQ ID NO: 352021 - DNA, 120 bp, Artificial Sequence
  ENSG00000139209_32 (sequence is synthesized)
taaacagatgaaaattttattttcttatttcatttataagatggctcaatgtattgggaggcttcttttttattacagaaagtgtatattggtatataataaatgaacttttcaaatgac

SEQ ID NO: 352022 - DNA, 120 bp, Artificial Sequence
  ENSG00000139209_33 (sequence is synthesized)
actggggtgtgcgcagcgcctggagcatgagccgggtggtggcgtgcacggaggatcgcgggaggctgccgcctcgggacaccccactcacacagaacagagtgttctgaacatcaacac

SEQ ID NO: 352023 - DNA, 120 bp, Artificial Sequence
  ENSG00000139209_34 (sequence is synthesized)
aaaagaaagaagggtctctccatccatccctttctgatactttccctgaatcccagtctggaaagggtagtaaaagaggcggagtgttctgaacatcaacacaaagtggaagaaccttaa

SEQ ID NO: 352024 - DNA, 120 bp, Artificial Sequence
  ENSG00000139209_35 (sequence is synthesized)
gcagcgcctggagcatgagccgggtggtggcgtgcacggaggatcgcgggaggctgccgcctcgggacaccccactcacacagggcaaaaggatgtatacactccatcttcatttaaaac

SEQ ID NO: 352025 - DNA, 80 bp, Artificial Sequence
  ENSG00000139211_0 (sequence is synthesized)
cccggctctgggagcggggcgccccgcgcgcgggcacacggcggccagagcgccgaggcggtaccttcagcctgcaatga

SEQ ID NO: 352026 - DNA, 120 bp, Artificial Sequence
  ENSG00000139211_1 (sequence is synthesized)
ccagagcgccgaggcggtaccttcagcctgcaatgagaggaacccgggagagcccccgggagccagcgaagagcttggctgctgcgtccagggctgctgctgccgccgcggctgcttgaa

SEQ ID NO: 352027 - DNA, 120 bp, Artificial Sequence
  ENSG00000139211_2 (sequence is synthesized)
actcctcaaagttgagagccggctagagggtgccgcccgccgggagccggagggaaaggaagtcggaaggtgcaagagtgacagacacggacagacggacgcgcagaccttcggaaggca

SEQ ID NO: 352028 - DNA, 120 bp, Artificial Sequence
  ENSG00000139211_3 (sequence is synthesized)
ctgcgtaggcagcctccccggagcccacgaggctccccagcaccgttcactggtgggaggctgagccggtggaaaagacaccgggaagagactcagaggcgaccataatgtcgttacgtg

SEQ ID NO: 352029 - DNA, 120 bp, Artificial Sequence
  ENSG00000139211_4 (sequence is synthesized)
tacacactctgcccaccctgcttggagccgtcgtcagaccgggctgcagggagctgctgtgtttgctgatgatcacagtgactgtgggccctggtgcctctggggtgtgccccaccgctt

SEQ ID NO: 352030 - DNA, 120 bp, Artificial Sequence
  ENSG00000139211_5 (sequence is synthesized)
gcatctgtgccactgacatcgtcagctgcaccaacaaaaacctgtccaaggtgcctgggaaccttttcagactgattaagagactggacctgagttataacagaattgggcttctggatt

SEQ ID NO: 352031 - DNA, 120 bp, Artificial Sequence
  ENSG00000139211_6 (sequence is synthesized)
ctgagtggattccagtatcgtttgcaaagctgaacaccctaattcttcgtcataacaacatcaccagcatttccacgggcagtttttccacaactccaaatttgaagtgtcttgacttat

SEQ ID NO: 352032 - DNA, 120 bp, Artificial Sequence
  ENSG00000139211_7 (sequence is synthesized)
cgtccaataagctgaagacggtgaaaaatgctgtattccaagagttgaaggttctggaagtgcttctgctttacaacaatcacatatcctatctcgatccttcagcgtttggagggctct

SEQ ID NO: 352033 - DNA, 120 bp, Artificial Sequence
  ENSG00000139211_8 (sequence is synthesized)
cccagttgcagaaactctacttaagtggaaattttctcacacagtttccgatggatttgtatgttggaaggttcaagctggcagaactgatgtttttagatgtttcttataaccgaattc

SEQ ID NO: 352034 - DNA, 120 bp, Artificial Sequence
  ENSG00000139211_9 (sequence is synthesized)
cttccatgccaatgcaccacataaatttagtgccaggaaaacagctgagaggcatctaccttcatggaaacccatttgtctgtgactgttccctgtactccttgctggtcttttggtatc

SEQ ID NO: 352035 - DNA, 120 bp, Artificial Sequence
  ENSG00000139211_10 (sequence is synthesized)
gtaggcactttagctcagtgatggattttaagaacgattacacctgtcgcctgtggtctgactccaggcactcgcgtcaggtacttctgctccaggatagctttatgaattgctctgaca

SEQ ID NO: 352036 - DNA, 120 bp, Artificial Sequence
  ENSG00000139211_11 (sequence is synthesized)
gcatcatcaatggttcctttcgtgcgcttggctttattcatgaggctcaggtcggggaaagactgatggtccactgtgacagcaagacaggtaatgcaaatacggatttcatctgggtgg

SEQ ID NO: 352037 - DNA, 120 bp, Artificial Sequence
  ENSG00000139211_12 (sequence is synthesized)
gtccagataacagactgctagagccggataaagagatggaaaacttttacgtgtttcacaatggaagtctggttatagaaagccctcgttttgaggatgctggagtgtattcttgtatcg

SEQ ID NO: 352038 - DNA, 120 bp, Artificial Sequence
  ENSG00000139211_13 (sequence is synthesized)
caatgaataagcaacgcctgttaaatgaaactgtggacgtcacaataaatgtgagcaatttcactgtaagcagatcccatgctcatgaggcatttaacacagcttttaccactcttgctg

SEQ ID NO: 352039 - DNA, 120 bp, Artificial Sequence
  ENSG00000139211_14 (sequence is synthesized)
cttgcgtggccagtatcgttttggtacttttgtacctctatctgactccatgcccctgcaagtgtaaaaccaagagacagaaaaatatgctacaccaaagcaatgcccattcatcgattc

SEQ ID NO: 352040 - DNA, 120 bp, Artificial Sequence
  ENSG00000139211_15 (sequence is synthesized)
ggcaggtgcaggtaaaagagtggtgtttttggaacccctgaaggatactgcagcagggcagaacgggaaagtcaggctctttcccagcgaggcagtgatagctgagggcatcctaaagtc

SEQ ID NO: 352041 - DNA, 120 bp, Artificial Sequence
  ENSG00000139211_16 (sequence is synthesized)
cacgagggggaaatctgactcagattcagtcaattcagtgttttctgacacaccttttgtggcgtccacttaatttgtgcctatatttgtatgatgtcataatttaatctgttcatattt

SEQ ID NO: 352042 - DNA, 120 bp, Artificial Sequence
  ENSG00000139211_17 (sequence is synthesized)
aactttgtgtgtggtctgcaaaataaacagcaggacagaaattgtgttgttttgttctttgaaatacaaccaaattctcttaaaatgattggtaggaaatgaggtaaagtacttcagttc

SEQ ID NO: 352043 - DNA, 120 bp, Artificial Sequence
  ENSG00000139211_18 (sequence is synthesized)
ctcaatgtgccatagaaagatggggttgttttccaaagtttaagttctagatcacaatatcttagcttttagcactattggtaatttcagagtaggcccaaaggtgatatgactcccatt

SEQ ID NO: 352044 - DNA, 120 bp, Artificial Sequence
  ENSG00000139211_19 (sequence is synthesized)
gtccctttatttaggatattgaaagaaaaaataaactttatgtattagtgtcctttaaaaatagactttgctaacttactagtaccagagttattttaaagaaaaacactagtgtccaat

SEQ ID NO: 352045 - DNA, 120 bp, Artificial Sequence
  ENSG00000139211_20 (sequence is synthesized)
ttcatttttaaaagatgtagaaagaagaatcaagcatcaattaattataaagcctaaagcaaagttagatttgggggttattcagccaaaattaccgttttagaccagaatgaatagact

SEQ ID NO: 352046 - DNA, 120 bp, Artificial Sequence
  ENSG00000139211_21 (sequence is synthesized)
acactgataaaatgtactggataatgccacatcctatatggtgttatagaaatagtgcaaggaaagtacatttgtttgcctgtcttttcattttgtacattcttcccattctgtattctt

SEQ ID NO: 352047 - DNA, 120 bp, Artificial Sequence
  ENSG00000139211_22 (sequence is synthesized)
gtacaaaagatctcattgaaaatttaaagtcatcataatttgttgccataaatatgtaagtgtcaataccaaaatgtctgagtaacttcttaaatccctgttctagcaaactaatattgg

SEQ ID NO: 352048 - DNA, 120 bp, Artificial Sequence
  ENSG00000139211_23 (sequence is synthesized)
ttcatgtgcttgtgtatatgtaaatcttaaattatgtgaactattaaatagaccctactgtactgtgctttggacatttgaattaatgtaaatatatgtaatctgtgacttgatattttg

SEQ ID NO: 352049 - DNA, 120 bp, Artificial Sequence
  ENSG00000139211_24 (sequence is synthesized)
ttttatttggctatttaaaaacataaatctaaaatgtcttatgttatcagattatgctattttgtataaagcaccactgatagcaaatctctctccaaaattcttaaagttgattttttt

SEQ ID NO: 352050 - DNA, 120 bp, Artificial Sequence
  ENSG00000139211_25 (sequence is synthesized)
aaagggggaggggaaggctttaatgtgttctagatcaatttataccttccgtatgacgttttactctgatatcattgtgcactttagccagatccagaaaacactcaaatttattttgca

SEQ ID NO: 352051 - DNA, 120 bp, Artificial Sequence
  ENSG00000139211_26 (sequence is synthesized)
acaagtgagagcccaggagacctccttattatcctgtctctgctttgaggcaatcaagtaccctctctgaacctaggttccctcatctgtaaaacaaaggtttcagaccagatggtgttt

SEQ ID NO: 352052 - DNA, 120 bp, Artificial Sequence
  ENSG00000139211_27 (sequence is synthesized)
aaggtttctccccatactggaatgaatgatttcttggtggtattagcatcatcacagacctatacttgctttctgaaactctaccacatactgaaggaatacaggaatgggattaagatg

SEQ ID NO: 352053 - DNA, 120 bp, Artificial Sequence
  ENSG00000139211_28 (sequence is synthesized)
actagcatagcagtgtacagcttgaagagatgttccacatcatcactccagctccttctcttttctcagggacaaatgaggcccagagagaatacgacctgtgtaaggtcaaacagtggc

SEQ ID NO: 352054 - DNA, 120 bp, Artificial Sequence
  ENSG00000139211_29 (sequence is synthesized)
agggaaagaaggagagctggggtttagcattctccctggtgaagattggaggtccaaagaaatgactcctttttaagggatgggcataaaaaagtgatcaaaacattgcaaaggagaatc

SEQ ID NO: 352055 - DNA, 120 bp, Artificial Sequence
  ENSG00000139211_30 (sequence is synthesized)
aaagattgattgtcctggggctaagaaagaagataatttttaaagaatgggagtgggcaacagtgaaaaatattgcagataagtagataaggatagaagatcaaccactgactggtagta

SEQ ID NO: 352056 - DNA, 120 bp, Artificial Sequence
  ENSG00000139211_31 (sequence is synthesized)
ccccagcaccgactaacccaggaaagaggaaaaaatacatttaacagtgaagaggcaacacagagctccctattgtgaaataaaacccatttcaaaagttattggaaagaaagttcactg

SEQ ID NO: 352057 - DNA, 120 bp, Artificial Sequence
  ENSG00000139218_0 (sequence is synthesized)
gagtagcggtggcttaagccgcgcggagcagcgcaacctgggtcgctccctgcttcgccgccgcctccggaccgagccagcggagtcagtgtcctagagaccctgtaacaccacaaagcg

SEQ ID NO: 352058 - DNA, 120 bp, Artificial Sequence
  ENSG00000139218_1 (sequence is synthesized)
gacgaaggagtccatgttggggaacttggcagcggagtgactgggacctgggaacctactgtggggccgcggccggaccgagcgcctcgacctcggtctgaggaaacccttttccaaaga

SEQ ID NO: 352059 - DNA, 120 bp, Artificial Sequence
  ENSG00000139218_2 (sequence is synthesized)
gaaatgaagaagaaaactgtatgtaccctaaatatgggagataagaagtatgaagacatggaaggtgaagaaaacggagataatactatttccactggtctgttgtacagtgaggctgac

SEQ ID NO: 352060 - DNA, 120 bp, Artificial Sequence
  ENSG00000139218_3 (sequence is synthesized)
agatgcccaatatgtcttaattgtctattagaaaaggaagttggttttccagaaagctgtaatcatgtcttctgtatgacttgtattcttaaatgggcagagacactggcttcatgtcct

SEQ ID NO: 352061 - DNA, 120 bp, Artificial Sequence
  ENSG00000139218_4 (sequence is synthesized)
attgaccgtaaaccttttcaggcagtgtttaaattcagtgcattggaaggttatgttaaggttcaagtaaaaaaacagctgagagaaacaaaagacaagaaaaatgaaaactcatttgag

SEQ ID NO: 352062 - DNA, 120 bp, Artificial Sequence
  ENSG00000139218_5 (sequence is synthesized)
aaacaggtctcctgtcatgaaaattctaaaagctgtataagaagaaaagccatcgtaagagaagatctattaagtgcaaaagtttgtgacttgaagtggatacatagaaactctttatac

SEQ ID NO: 352063 - DNA, 120 bp, Artificial Sequence
  ENSG00000139218_6 (sequence is synthesized)
agtgaaacaggaggaaagaaaaatgcagcaataaagataaataagcctcagagatcaaattggagtacaaatcagtgcttcagaaattttttctccaatatgttttcttctgttagccac

SEQ ID NO: 352064 - DNA, 120 bp, Artificial Sequence
  ENSG00000139218_7 (sequence is synthesized)
tctggagaatcttcctttacctatagagcttattgtacagaatttatagaagccagtgaaatcagtgcattgattaggcagaagagacatgaactggaattgtcatggtttcctgataca

SEQ ID NO: 352065 - DNA, 120 bp, Artificial Sequence
  ENSG00000139218_8 (sequence is synthesized)
ttacctggaattggaagaattggttttataccctggaatgttgaaacagaagtccttcctctcatttcttctgtgttgccaagaactatttttccaacaagtaccatatctttcgaacat

SEQ ID NO: 352066 - DNA, 120 bp, Artificial Sequence
  ENSG00000139218_9 (sequence is synthesized)
tttggtacttcttgcaagggatatgcattagcacatactcaagaaggggaagaaaagaagcaaacttctggtacatcaaataccagaggatcaagacgaaaacctgcaatgacaactcct

SEQ ID NO: 352067 - DNA, 120 bp, Artificial Sequence
  ENSG00000139218_10 (sequence is synthesized)
acaaggaggtctacacgtaacacaagagctgaaacagccagtcagtctcagagatccccaatatcagacaattctgggtgtgatgccccaggtaacagtaatccatctttaagtgttccc

SEQ ID NO: 352068 - DNA, 120 bp, Artificial Sequence
  ENSG00000139218_11 (sequence is synthesized)
tcttcagctgagtcagaaaagcaaacaagacaggctccaaaacggaagtctgtaagaagaggaagaaaaccacctttactgaaaaagaaacttcggagctctgtagctgcccctgaaaaa

SEQ ID NO: 352069 - DNA, 120 bp, Artificial Sequence
  ENSG00000139218_12 (sequence is synthesized)
tcatcttccaatgattcagtagatgaagaaacagcagaatctgacacatcacctgtgttagaaaaagagcaccaaccagatgtagacagtagtaacatttgtactgtgcagactcatgta

SEQ ID NO: 352070 - DNA, 120 bp, Artificial Sequence
  ENSG00000139218_13 (sequence is synthesized)
gaaaaccagtctgctaattgcttgaaaagttgcaatgagcaaatagaagaaagtgagaagcatactgcaaattatgatacagaggaaagagtaggatcttcatcttctgagtcttgtgct

SEQ ID NO: 352071 - DNA, 120 bp, Artificial Sequence
  ENSG00000139218_14 (sequence is synthesized)
caagatcttcctgtgctagttggtgaggaaggggaagttaaaaaactcgagaatacaggtatagaggctaatgttttgtgtttggaaagtgagatttctgaaaatattcttgaaaaagga

SEQ ID NO: 352072 - DNA, 120 bp, Artificial Sequence
  ENSG00000139218_15 (sequence is synthesized)
ggtgatccattggaaaagcaagaccagatatctggactttcacaatcagaggtaaagacagatgtatgtacagttcatcttccaaatgattttcctacatgtttaacatctgaaagcaaa

SEQ ID NO: 352073 - DNA, 120 bp, Artificial Sequence
  ENSG00000139218_16 (sequence is synthesized)
gtgtaccaacctgtatcttgtcccctaagtgacttatctgagaatgtagagtcagtggttaatgaagaaaaaataacagagagttccctagtagaaattactgaacataaagattttaca

SEQ ID NO: 352074 - DNA, 120 bp, Artificial Sequence
  ENSG00000139218_17 (sequence is synthesized)
ctaaaaacagaggagcttatagagagccccaagttagaatcttctgagggtgaaattatacagacagtggacagacaatctgttaagagcccagaggttcaattgcttgggcatgttgaa

SEQ ID NO: 352075 - DNA, 120 bp, Artificial Sequence
  ENSG00000139218_18 (sequence is synthesized)
actgaagatgtagaaataattgcaacatgtgatacttttgggaatgaagatttcaataatattcaagactctgaaaataacttactaaaaaataatcttctgaacaccaaattggaaaaa

SEQ ID NO: 352076 - DNA, 120 bp, Artificial Sequence
  ENSG00000139218_19 (sequence is synthesized)
tctttagaagaaaagaatgaatcgctgaccgaacatcctagatctacagagttgcctaaaacacacattgaacagattcagaagcattttagtgaggacaacaatgaaatgatacctatg

SEQ ID NO: 352077 - DNA, 120 bp, Artificial Sequence
  ENSG00000139218_20 (sequence is synthesized)
gagtgtgattcattttgcagtgaccaaaatgaatctgaagttgaaccatctgtaaatgctgatcttaaacaaatgaatgaaaattctgtgacacactgttctgaaaataatatgccgtct

SEQ ID NO: 352078 - DNA, 120 bp, Artificial Sequence
  ENSG00000139218_21 (sequence is synthesized)
tctgatcttgcggatgaaaaggttgaaactgtttctcaaccatctgaaagcccaaaagataccatagataaaaccaaaaagcctcgtactcgaagatctagatttcattctccatctaca

SEQ ID NO: 352079 - DNA, 120 bp, Artificial Sequence
  ENSG00000139218_22 (sequence is synthesized)
acttggtcacccaacaaagacactccacaagaaaagaagcggccccagtctccatctcccagaagagaaactgggaaagaaagcaggaagtctcaatcaccatctcctaagaatgagtca

SEQ ID NO: 352080 - DNA, 120 bp, Artificial Sequence
  ENSG00000139218_23 (sequence is synthesized)
gccagaggccggaaaaaatcccgttctcagtccccaaaaaaggatattgcaagagaaaggaggcaatctcagtctcggtctccaaaaagggatactactagggaaagcagaagatctgaa

SEQ ID NO: 352081 - DNA, 120 bp, Artificial Sequence
  ENSG00000139218_24 (sequence is synthesized)
tcactgtccccaagaagagaaacttctagagagaacaaaagatctcagccaagagtgaaagattcttccccaggagaaaaatccaggtcccagagcagagaacgagaaagtgatagagat

SEQ ID NO: 352082 - DNA, 120 bp, Artificial Sequence
  ENSG00000139218_25 (sequence is synthesized)
gggcagaggagagagagagaaaggagaaccagaaagtggtctaggtccagatctcattctaggtccccctcaagatgtagaacaaaaagtaagagttcatcatttggtagaattgacaga

SEQ ID NO: 352083 - DNA, 120 bp, Artificial Sequence
  ENSG00000139218_26 (sequence is synthesized)
gatagttactctccccggtggaagggaagatgggcaaatgatggttggagatgtccacgaggaaatgatcggtacagaaagaatgacccagagaaacagaatgaaaatacaagaaaagaa

SEQ ID NO: 352084 - DNA, 120 bp, Artificial Sequence
  ENSG00000139218_27 (sequence is synthesized)
aaaaatgacatccatctagatgctgatgatccaaattctgctgacaaacatagaaatgactgtcccaattggataacagaaaaaataaactctgggcctgatccaagaaccagaaatcca

SEQ ID NO: 352085 - DNA, 120 bp, Artificial Sequence
  ENSG00000139218_28 (sequence is synthesized)
gaaaagttgaaagagtctcattgggaagaaaatagaaatgaaaattcaggaaattcttggaataaaaactttggttctggttgggtatctaaccgtggtagaggcagaggcaaccgtggc

SEQ ID NO: 352086 - DNA, 120 bp, Artificial Sequence
  ENSG00000139218_29 (sequence is synthesized)
agaggcacttacagaagtagttttgcctataaagatcagaatgaaaatcggtggcaaaatcgaaaacccctctcagggaattcaaacagttcagggagtgaatctttcaagtttgtggaa

SEQ ID NO: 352087 - DNA, 120 bp, Artificial Sequence
  ENSG00000139218_30 (sequence is synthesized)
cagcaatcctataagcgaaaaagtgaacaggagttctcatttgatacaccagcagatagatctggatggacatctgcatccagctgggccgtgagaaagactttgccagcagatgtacaa

SEQ ID NO: 352088 - DNA, 120 bp, Artificial Sequence
  ENSG00000139218_31 (sequence is synthesized)
aagttgatggttctcagctacctataaatatgatgcaaccgcaaatgaatgtaatgcagcaacaaatgaatgcacaacaccagcctatgaatatcttcccatatccagtgggtgttcatg

SEQ ID NO: 352089 - DNA, 120 bp, Artificial Sequence
  ENSG00000139218_32 (sequence is synthesized)
ctcctttgatgaacatccaacgcaatccatttaacattcatcctcagctacccttgcatctccacacaggagtgcccctcatgcaggtagccactcctaccagtgtatctcagggactac

SEQ ID NO: 352090 - DNA, 120 bp, Artificial Sequence
  ENSG00000139218_33 (sequence is synthesized)
caccaccaccaccccctcccccaccatcccaacaagtcaactacattgcttcacaaccagatggaaagcaattgcagggtattcctagttcttctcatgtaagtaataacatgagtacac

SEQ ID NO: 352091 - DNA, 120 bp, Artificial Sequence
  ENSG00000139218_34 (sequence is synthesized)
cagttttgcctgctccgacagcagccccaggaaatacgggaatggttcagggaccaagttctggtaatacttcgtcatcaagtcacagcaaagcctctaatgctgctgtaaaattggcag

SEQ ID NO: 352092 - DNA, 120 bp, Artificial Sequence
  ENSG00000139218_35 (sequence is synthesized)
aaagcaaagtaagtgttgcagtggaagccagcgcagatagctcgaagacagacaagaaattgcaaattcaagaaaaagcagcacaagaggtaaaattggccatcaagccattttaccaaa

SEQ ID NO: 352093 - DNA, 120 bp, Artificial Sequence
  ENSG00000139218_36 (sequence is synthesized)
ataaagatatcaccaaggaagaatataaagaaattgtacggaaagcagtagataaagtttgtcatagtaagagtggagaagtaaattctactaaagtggcaaatctggttaaagcctatg

SEQ ID NO: 352094 - DNA, 120 bp, Artificial Sequence
  ENSG00000139218_37 (sequence is synthesized)
tagacaaatacaaatattcacggaaggggagccaaaagaaaactctggaagaacctgtgtctactgaaaaaaacataggctgaaatggggaacgctgtcaaggacattatcaggatatct

SEQ ID NO: 352095 - DNA, 120 bp, Artificial Sequence
  ENSG00000139218_38 (sequence is synthesized)
gcaaagtgcaatttcaacatgtaccattaactgaaaatcatacataactgtgattgaaatttggttttgataaaattatttttttaacataggatatgatgttttgttctaaataaatat

SEQ ID NO: 352096 - DNA, 120 bp, Artificial Sequence
  ENSG00000139218_39 (sequence is synthesized)
aggtctgcactgcaacttctgtatccttccttcccctccaccctcccccacaaaattcaagggaaagtaaagggtttaaaggaatgtgcatctttactaggactgtgttatagtgtggat

SEQ ID NO: 352097 - DNA, 120 bp, Artificial Sequence
  ENSG00000139218_40 (sequence is synthesized)
actggaaaatgtatagctttttgattagggcaatggagtgcataaattagaaacttctaagtgcactggttttcaaagagatatatataatgcatttattctgtcaggttaaaatgtaaa

SEQ ID NO: 352098 - DNA, 120 bp, Artificial Sequence
  ENSG00000139218_41 (sequence is synthesized)
gtatgatctttatgattttttccctctaattatagaaagttaaataatgtattaccatgaaaaatgtttctaatattaaatagaacatatcagttgcaaagttcctaatgtgtattttta

SEQ ID NO: 352099 - DNA, 120 bp, Artificial Sequence
  ENSG00000139218_42 (sequence is synthesized)
aagcacatatctgaataaattgcctagatagaaaaaaaattatcacgagtaaaatttagtgttcaaaacattgagacactcttcacctattgtatgaccaaataaaggttatgctgcttg

SEQ ID NO: 352100 - DNA, 120 bp, Artificial Sequence
  ENSG00000139218_43 (sequence is synthesized)
tttttcttttgtgcctttgtttacccctaattgagataagcagtttgacttactagattacaactttggcagttcaaagtctttgttgaagactttgaggaaaaagatttggaaaaattg

SEQ ID NO: 352101 - DNA, 120 bp, Artificial Sequence
  ENSG00000139218_44 (sequence is synthesized)
tgcactccagcctgggcaacaggagcaaatctccgtctcaaaaaaaagaaaaaaaaaagtgttgactttgtagaaattatgttctttcatagtatcttcttctacccgttgcagacgata

SEQ ID NO: 352102 - DNA, 120 bp, Artificial Sequence
  ENSG00000139218_45 (sequence is synthesized)
ttgcagacgataaattatttgtgccaattcgagaattgctgttaggctgttatcctcccttccttggggctaagaattacaagactcatggcactggcgtaaagttgttgtttatctaat

SEQ ID NO: 352103 - DNA, 120 bp, Artificial Sequence
  ENSG00000139218_46 (sequence is synthesized)
cactgatgaaatattttcacacttgaaaatccccaaatgctttacaatgaatgaagtgttaatttggtgaccaggtggtagccattagccatgttgcaaaattctagacagtaaaacctg

SEQ ID NO: 352104 - DNA, 120 bp, Artificial Sequence
  ENSG00000139218_47 (sequence is synthesized)
tgttttagaaacagaggggaaatttaaataatggagtcctggttagcctttcagggattagggatttgggtttttttttttttctctttttaatactagaatatctcagtttttataaaa

SEQ ID NO: 352105 - DNA, 120 bp, Artificial Sequence
  ENSG00000139218_48 (sequence is synthesized)
ggtaagtttaaaatgtttattgtgccattattttaactggcatcttgaaagaacagtaggttttctccatgataaactgattccagtaagaattttcagtacataccaagtacctggaaa

SEQ ID NO: 352106 - DNA, 120 bp, Artificial Sequence
  ENSG00000139218_49 (sequence is synthesized)
gttcttcagataagttaatagatccaaggagatacatgcctcagtgagataaactgacctttttactagctaaactatttagccagagcaatactctgtagaactgtgcttttctaaagt

SEQ ID NO: 352107 - DNA, 120 bp, Artificial Sequence
  ENSG00000139218_50 (sequence is synthesized)
aaagattatctgtttctcaattttatgtgcataatacttttcctggtgctagctttgataggcaaaatattttgaaatgttggtcccataatgattgtgctagttcataagctttgttgt

SEQ ID NO: 352108 - DNA, 120 bp, Artificial Sequence
  ENSG00000139218_51 (sequence is synthesized)
tatgagtgtaatcataaaaatatttccaagcagtttttgacctttattctacatttctgggcatttgtaatatggtattctactggtatatatttttaaagtttgcgtttagattatggt

SEQ ID NO: 352109 - DNA, 120 bp, Artificial Sequence
  ENSG00000139218_52 (sequence is synthesized)
aaagaaatttcaagcatatttcttctaataaagtattaagacagtgtttcagaatatcaaggcacacctccttagttgttttagattagaactctagaaacaattttgtgaacattgaaa

SEQ ID NO: 352110 - DNA, 120 bp, Artificial Sequence
  ENSG00000139218_53 (sequence is synthesized)
gtattttgagttaagcctaagctgattaatcacacaatacatacttttcctgcattttctttcagtgacatttgagaattgggtgacattttaaaatgtgttttataccatttagctttt

SEQ ID NO: 352111 - DNA, 120 bp, Artificial Sequence
  ENSG00000139218_54 (sequence is synthesized)
gcaaacaagttctaaagttttggagaaaaagtgatgtggtcaagagttgaagtctcatatatctttagtagcactcccatgaattatttccgtgacagtaacaagtgtgtgttccatgtc

SEQ ID NO: 352112 - DNA, 120 bp, Artificial Sequence
  ENSG00000139218_55 (sequence is synthesized)
tgatttggggcactggttagactgcattaatagctacttgattagaattcgaacttttaaaattttgaaatgtttaagaatgtattagaaaatgcatgctttatgttgaaaaaatacatt

SEQ ID NO: 352113 - DNA, 120 bp, Artificial Sequence
  ENSG00000139218_56 (sequence is synthesized)
gctttaatattcctcattcttgagttaagaaatttatgttaattttgcatgggcacaaacttaatcagaaacattttgtggagttacatttcctcttattatttatcaaggttcagtatt

SEQ ID NO: 352114 - DNA, 120 bp, Artificial Sequence
  ENSG00000139218_57 (sequence is synthesized)
gatctttgaaaccttggtcccgttaacttactagtcacattgaccaatgttttatagaaatgcctagaattttgagactaatagtagttatccattaacattccaaaagttttgtgcttt

SEQ ID NO: 352115 - DNA, 120 bp, Artificial Sequence
  ENSG00000139218_58 (sequence is synthesized)
ttaaaatttgttttggtaattatcacatttttttctcttaccttcctttaaatggccacagtgtgtactgctggaatgttccatccaaaagatgtagcttcagaagcacagtgattgccc

SEQ ID NO: 352116 - DNA, 120 bp, Artificial Sequence
  ENSG00000139218_59 (sequence is synthesized)
cagggtccatgagatattgtttgtattatgaagttggagtgctgtctactgaaattatactcttaaataaatatgtatgtagtgtgtaatattttctaataaattcttttgataaactaa

SEQ ID NO: 352117 - DNA, 120 bp, Artificial Sequence
  ENSG00000139218_60 (sequence is synthesized)
gctccgacagcagccccaggaaatacgggaatggttcagggaccaagttctggtaatacttcgtcatcaagtcacagcaaagcctctaatgctgctgtaaaattggcagaaagcaaaaaa

SEQ ID NO: 352118 - DNA, 120 bp, Artificial Sequence
  ENSG00000139218_61 (sequence is synthesized)
agcagtagataaagtaagttatggctttagtggagtatgtgcacgttgttttgaaccacctctgttttaataaatgaatgctgaagtttaattaaaataataaaagctagctcctactaa

SEQ ID NO: 352119 - DNA, 120 bp, Artificial Sequence
  ENSG00000139218_62 (sequence is synthesized)
taggttatttgatttcttctttatatcagccttgtggaataaccagagcagatacgatagtgtccttccattttacagatgaggaaacttggattttatgttctatgacttggtcaagat

SEQ ID NO: 352120 - DNA, 120 bp, Artificial Sequence
  ENSG00000139218_63 (sequence is synthesized)
cagaagtgaatttagaactgattttctaattcctgtttttaatttagtgtggactaatttcagagtctgaattagagatattaccgtcatagacagtgaataagaaacaagacattcgtg

SEQ ID NO: 352121 - DNA, 120 bp, Artificial Sequence
  ENSG00000139218_64 (sequence is synthesized)
cgtgacttttaatgtattatgttgactcaatttgggccaaatactttgaagtaaatattaatttaatataagccttattgttatgaaatgttaagtaaaaaattattgttcatattatgc

SEQ ID NO: 352122 - DNA, 120 bp, Artificial Sequence
  ENSG00000139218_65 (sequence is synthesized)
ttttctaagttaatatttgtcagtctgtaaaaattagtaaagaagataatatcttaaaaatattttaacattagctgcattccaattgttaatgttcttaaatatgttggaattaattgc

SEQ ID NO: 352123 - DNA, 120 bp, Artificial Sequence
  ENSG00000139218_66 (sequence is synthesized)
atattacataattggggttttcaaagcgctatgttttgcttaaattttcattaatagtgtggaaaggagaatgtaactgtatagtgactctggctgagttctcaaaagaaggaagagaag

SEQ ID NO: 352124 - DNA, 120 bp, Artificial Sequence
  ENSG00000139218_67 (sequence is synthesized)
atttgttatacaaattgaattaataatagtatacatataaactattttaatttagtaaaacctaaactggtctttaacaagaagtgacaggataggtgaaaatgtattttggggaaaagt

SEQ ID NO: 352125 - DNA, 120 bp, Artificial Sequence
  ENSG00000139218_68 (sequence is synthesized)
attttgagttttgctgaattaatatggttggtaaatctctctctgtgtaggatcactgtttaatgaaataatgcatattttttttctgccacccaaataaagatttttatctgtgttgaa

SEQ ID NO: 352126 - DNA, 120 bp, Artificial Sequence
  ENSG00000139218_69 (sequence is synthesized)
ttttaatttaatggttgtgtcagagttctcatcagtaacacttcaggctggaaaatagtcctcagaactctgtacattgtgttaaatcctacataaattttgttttcatggagcaattta

SEQ ID NO: 352127 - DNA, 120 bp, Artificial Sequence
  ENSG00000139218_70 (sequence is synthesized)
cactgatatgaagaaagtttgcctgatctgggtagaaggtcaaaccagtcgtaacattctcttaactcaaagcctaatccagagcgcgtctctaacgctcttcaagccagtgaagtctga

SEQ ID NO: 352128 - DNA, 77 bp, Artificial Sequence
  ENSG00000139218_71 (sequence is synthesized)
agaggttggttcatgacgaagcagcaagtggtgatgcggaagctgcatcaggttatccagaagacctagctaacatc

SEQ ID NO: 352129 - DNA, 120 bp, Artificial Sequence
  ENSG00000139218_72 (sequence is synthesized)
ggaagctgcatcaggttatccagaagacctagctaacatcattgatgaaagtggctatactaaacaaaagatttttaatgcagatgagccagccttctattgaaagtagatgccatccag

SEQ ID NO: 352130 - DNA, 120 bp, Artificial Sequence
  ENSG00000139218_73 (sequence is synthesized)
ccttctattgaaagtagatgccatccaggactttcataagtagagaggagaagtcaatgcctggcttcaaagcttccaaggacaggctgactgtcttgttaggggctaatgcagctggtg

SEQ ID NO: 352131 - DNA, 120 bp, Artificial Sequence
  ENSG00000139218_74 (sequence is synthesized)
gaccgttctgaaaattccaggactcttaagaattatactgaatctactctgtgctctataaatggaacaacaaagcttggatgacagcacatccgtttacagcatggtttactgaatatt

SEQ ID NO: 352132 - DNA, 120 bp, Artificial Sequence
  ENSG00000139218_75 (sequence is synthesized)
ttgagctcactgttgagaccaaatgctcagataaaaagattcctttcaacatagtacttacttattgacagtgcacgtagccatccaagaactctgatggaaatacacggagataaatgt

SEQ ID NO: 352133 - DNA, 120 bp, Artificial Sequence
  ENSG00000139218_76 (sequence is synthesized)
aagaagtaattttgactgttaagtcttattctgttagaaatacatttcataaggctacagctgcttcagacagtgatttcttggatggatatgggcaaagtaatggaaaggattcaccat

SEQ ID NO: 352134 - DNA, 120 bp, Artificial Sequence
  ENSG00000139218_77 (sequence is synthesized)
atatgggcaaagtaatggaaaggattcaccattctagatgccataaagaacattcgtaattcatagaaggaggttaaaatatgaacaggattgtgaagaagttgattccaaccctcatgg

SEQ ID NO: 352135 - DNA, 120 bp, Artificial Sequence
  ENSG00000139218_78 (sequence is synthesized)
gaagtaactattacaggtgtggtataaacagcaggagaactattatagaattagaagtggagcctgaagacatgactgaattgctgcaattttatgataaattttgaatgaagagttgtt

SEQ ID NO: 352136 - DNA, 120 bp, Artificial Sequence
  ENSG00000139218_79 (sequence is synthesized)
tcttagggatgaacaaagaatgtggtttcttgagatggaatgtgctcttgctgaagatgtgaacattgttaaaatagtatataaacttagttgataacacagtggcagagtttgagagga

SEQ ID NO: 352137 - DNA, 120 bp, Artificial Sequence
  ENSG00000139218_80 (sequence is synthesized)
ttaactccaattttgaaagacattctgctgtggataaaatgctgtcaaatagcatcttgtacacagagaaattttttgtgaaaggagtgtcagtgtggcatacttgaatgttatctcatt

SEQ ID NO: 352138 - DNA, 120 bp, Artificial Sequence
  ENSG00000139218_81 (sequence is synthesized)
ttaaggaattgccacagccaaccctgcccttcagcaactaccatcctgtgattagtcagcaaccatcaacatcaaagcaagaccctccaccatcaaaaagattatgacttgctgaagcct

SEQ ID NO: 352139 - DNA, 120 bp, Artificial Sequence
  ENSG00000139218_82 (sequence is synthesized)
taaagagttgatactgcctttcataaattatttcacagtaatgtattttcttcctactttggacaaatttccttgtattattcaaattctgtcagtcattttcttctaattttcttttat

SEQ ID NO: 352140 - DNA, 120 bp, Artificial Sequence
  ENSG00000139218_83 (sequence is synthesized)
caggctttgattttgcaaataatattttaaatgcatacttttttaaaaaaagttaataaccttataggaagaacagatcaaactttttttctggtagaaatgcagtaattaatttttcag

SEQ ID NO: 352141 - DNA, 120 bp, Artificial Sequence
  ENSG00000139218_84 (sequence is synthesized)
gaaagtgccagaaaagcgacgtcctcagggcgggagcaggggacgccgcaacgtagtctgcgagaatgcaggaaggcggcagtgaagcggtcggtcggcggggccgcggcaaagtgggga

SEQ ID NO: 352142 - DNA, 120 bp, Artificial Sequence
  ENSG00000139218_85 (sequence is synthesized)
ggaaactcatcccgggcaggcgtcagggtggctggagagcgcagcacgcgcgaacagaacgggggcaggcgacaggaaaacgtgtgagcgcgcggctgaaagcgactgggacctgggaaa

SEQ ID NO: 352143 - DNA, 120 bp, Artificial Sequence
  ENSG00000139218_86 (sequence is synthesized)
caccaacgttgtaacagaaagctgtttcagtcagcacatctacttttccatcttagtataaaattggaaggaaagaacatacctgaagtgggtgccagtggctaaatggaaactctttat

SEQ ID NO: 352144 - DNA, 120 bp, Artificial Sequence
  ENSG00000139218_87 (sequence is synthesized)
tctataagcagcctatgtgattgaggatagagcagcaggaggaagcgagaaattagaaatcgaggatcctgaattcccaaataaggaaggtttcttgttcttacatttaaatgtgggttt

SEQ ID NO: 352145 - DNA, 120 bp, Artificial Sequence
  ENSG00000139218_88 (sequence is synthesized)
gtctgagctgagaatttataatgcttcagaatagtagggtgtgttttactgaaatcattaggaagattatttttttctatcaaaattgccttcttaactgatacaacaaccttagtacag

SEQ ID NO: 352146 - DNA, 120 bp, Artificial Sequence
  ENSG00000139218_89 (sequence is synthesized)
agcattcacagtaaaacatatgctctgtttaatacacattacactgtaaagcagtgagcaaattccattaattttgtagctgtatcataaagccaatgatgttattagactacttggtta

SEQ ID NO: 352147 - DNA, 120 bp, Artificial Sequence
  ENSG00000139218_90 (sequence is synthesized)
tgaaactgaattagatactttaaaaattattgaaatgaaagtcagtaattcaaacaagtgagtcattgaaggatattttgttgtatataaggaatcaaaatggtaaataattgaaggata

SEQ ID NO: 352148 - DNA, 120 bp, Artificial Sequence
  ENSG00000139218_91 (sequence is synthesized)
aggcaacaaaatttgagataattttcttcaaaattaaaataacttaaaaatagagtaagtattagttaaaatttctttacattagtttaaaatgtgaacttttaaaacctcacaacttgg

SEQ ID NO: 352149 - DNA, 120 bp, Artificial Sequence
  ENSG00000139218_92 (sequence is synthesized)
ttggaaatttaattgtaaattttactctgaaaactaaaaacatctttgagacctttctggatagatatctgctggatataagagtgaggcatccttgggagttccttaaaattaggccag

SEQ ID NO: 352150 - DNA, 70 bp, Artificial Sequence
  ENSG00000139218_93 (sequence is synthesized)
agagtgaggcatccttgggagttccttaaaattaggccagtctgggtgggccaatcgctttgagctcagg

SEQ ID NO: 352151 - DNA, 120 bp, Artificial Sequence
  ENSG00000139218_94 (sequence is synthesized)
tggtgcgtgcctgtagtcccaactacttgggaaactgaggtgaggccatcgcttgaacctaggaggttgaggttgcagtgagccgtgatgccgctgcactacagcctgggcaagagggtg

SEQ ID NO: 352152 - DNA, 120 bp, Artificial Sequence
  ENSG00000139218_95 (sequence is synthesized)
cactacagcctgggcaagagggtgagaccctgtttaaaaaaaaaattatgatggctgagtctgtgtcaaagaaaattaacttattttttggtgttaactaaattatctttaggtaattac

SEQ ID NO: 352153 - DNA, 120 bp, Artificial Sequence
  ENSG00000139218_96 (sequence is synthesized)
attttatatagattgtgatgatatatggcagtagttttcctattactactacttttttttcttgtttttcctttgtgtttttgtaataccagtggagccttttcttaaaatgaaactagg

SEQ ID NO: 352154 - DNA, 120 bp, Artificial Sequence
  ENSG00000139218_97 (sequence is synthesized)
caaacctaagacaattatgcttaaggaaaaaaaagggggggaatcttactcagaactgttttttgaaacggatcaaatggaatggctcagagcaggtgtgatggctcctcctgtaatccc

SEQ ID NO: 352155 - DNA, 77 bp, Artificial Sequence
  ENSG00000139218_98 (sequence is synthesized)
gctcagagcaggtgtgatggctcgtttgagcacaggagttcaagatgaagcctgagcaacatagtgagaccctgtct

SEQ ID NO: 352156 - DNA, 120 bp, Artificial Sequence
  ENSG00000139218_99 (sequence is synthesized)
gaataacagttaagttttggggagtaaaaactgtttcaatttttgactgtgttgggggttggtgctcctaatccctgtgttgttaaagggtcgactatattgtatttttgaaaattgcta

SEQ ID NO: 352157 - DNA, 120 bp, Artificial Sequence
  ENSG00000139218_100 (sequence is synthesized)
gagagtggacgtaaagtgttctcactaaacaaattataactatgtgaggtagtgcatatattaagtagctagatttggtcattccacaatgtatatgtacttcaaaacatcatgttgtac

SEQ ID NO: 352158 - DNA, 120 bp, Artificial Sequence
  ENSG00000139218_101 (sequence is synthesized)
atgagaaacacagttttatctgttagtcagttttaaaaataaaaaatattccaactagaaactctgttgtagtttttgaaattacaacttggaggctttgaggaactgattagaagtctc

SEQ ID NO: 352159 - DNA, 120 bp, Artificial Sequence
  ENSG00000139218_102 (sequence is synthesized)
ctttctgtttcaggctttcatatccaaaccatagatctttagaagtaacatctgttaattaattattaataaatagtttgagtctttattaattcatggataacttgaccattttctctc

SEQ ID NO: 352160 - DNA, 120 bp, Artificial Sequence
  ENSG00000139218_103 (sequence is synthesized)
tttattaattcatggataacttgaccattttctctctccttttgcttagataatcccagatcatggccgggcacagtagctcacgcctgtattcccagcagtttgggaggccgaggcagg

SEQ ID NO: 352161 - DNA, 120 bp, Artificial Sequence
  ENSG00000139218_104 (sequence is synthesized)
ccaaaagttattttcctttttttttttctctataaaattgcccatttggaccaaatctagttataacttatttcagtgtcattaagaaagttgatgaataagtcatattactcagatgtt

SEQ ID NO: 352162 - DNA, 120 bp, Artificial Sequence
  ENSG00000139218_105 (sequence is synthesized)
agtagctatgcatttattaatagttttatttataagtatttagtttcactctgttgcagactattttatgctaaaattagctaaagccaaattactatttcttaaaacatattttttact

SEQ ID NO: 352163 - DNA, 120 bp, Artificial Sequence
  ENSG00000139218_106 (sequence is synthesized)
agatacatagtctctccatatatctatatacacacacaatggaatattattctgccacaaaaagaaggaaatcttgtttgtgccaacgtggatgaacctggaggacattaggctaagtga

SEQ ID NO: 352164 - DNA, 120 bp, Artificial Sequence
  ENSG00000139218_107 (sequence is synthesized)
ataaggcaggcacagaaaggcacataaccacatgatctcacttatatgtggaatctaaaaaagttgatctcgtagaactagattgtagattagggggtggggtaggtgtggtggggtgga

SEQ ID NO: 352165 - DNA, 120 bp, Artificial Sequence
  ENSG00000139218_108 (sequence is synthesized)
ggttgttggtcagaggatacagtttcagctggatagaataagttctaaagatcaattgtgaaacgtgatgactataataatacagttgacccttgaacaacataggttttaactgggtgg

SEQ ID NO: 352166 - DNA, 120 bp, Artificial Sequence
  ENSG00000139219_0 (sequence is synthesized)
gcagagcgctgctgggctgccgggtctcccgcttccccctcctgctccaagggcctcctgcatgagggcgcggtagagacccggacccgcgccgtgctcctgccgtttcgctgcgctccg

SEQ ID NO: 352167 - DNA, 120 bp, Artificial Sequence
  ENSG00000139219_1 (sequence is synthesized)
cccgggcccggctcagccaggccccgcggtgagccatgattcgcctcggggctccccagacgctggtgctgctgacgctgctcgtcgccgctgtccttcggtgtcagggccaggatgtcc

SEQ ID NO: 352168 - DNA, 120 bp, Artificial Sequence
  ENSG00000139219_2 (sequence is synthesized)
aggaggctggcagctgtgtgcaggatgggcagaggtataatgataaggatgtgtggaagccggagccctgccggatctgtgtctgtgacactgggactgtcctctgcgacgacataatct

SEQ ID NO: 352169 - DNA, 120 bp, Artificial Sequence
  ENSG00000139219_3 (sequence is synthesized)
gtgaagacgtgaaagactgcctcagccctgagatccccttcggagagtgctgccccatctgcccaactgacctcgccactgccagtgggcaaccaggaccaaagggacagaaaggagaac

SEQ ID NO: 352170 - DNA, 120 bp, Artificial Sequence
  ENSG00000139219_4 (sequence is synthesized)
ctggagacatcaaggatattgtaggacccaaaggacctcctgggcctcagggacctgcaggggaacaaggacccagaggggatcgtggtgacaaaggtgaaaaaggtgcccctggacctc

SEQ ID NO: 352171 - DNA, 120 bp, Artificial Sequence
  ENSG00000139219_5 (sequence is synthesized)
gtggcagagatggagaacctgggacccctggaaatcctggcccccctggtcctcccggcccccctggtccccctggtcttggtggaaactttgctgcccagatggctggaggatttgatg

SEQ ID NO: 352172 - DNA, 120 bp, Artificial Sequence
  ENSG00000139219_6 (sequence is synthesized)
aaaaggctggtggcgcccagttgggagtaatgcaaggaccaatgggccccatgggacctcgaggacctccaggccctgcaggtgctcctgggcctcaaggatttcaaggcaatcctggtg

SEQ ID NO: 352173 - DNA, 120 bp, Artificial Sequence
  ENSG00000139219_7 (sequence is synthesized)
aacctggtgaacctggtgtctctggtcccatgggtccccgtggtcctcctggtccccctggaaagcctggtgatgatggtgaagctggaaaacctggaaaagctggtgaaaggggtccgc

SEQ ID NO: 352174 - DNA, 120 bp, Artificial Sequence
  ENSG00000139219_8 (sequence is synthesized)
ctggtcctcagggtgctcgtggtttcccaggaaccccaggccttcctggtgtcaaaggtcacagaggttatccaggcctggacggtgctaagggagaggcgggtgctcctggtgtgaagg

SEQ ID NO: 352175 - DNA, 120 bp, Artificial Sequence
  ENSG00000139219_9 (sequence is synthesized)
gtgagagtggttccccgggtgagaacggatctccgggcccaatgggtcctcgtggcctgcctggtgaaagaggacggactggccctgctggcgctgcgggtgcccgaggcaacgatggtc

SEQ ID NO: 352176 - DNA, 120 bp, Artificial Sequence
  ENSG00000139219_10 (sequence is synthesized)
agccaggccccgcagggcctccgggtcctgtcggtcctgctggtggtcctggcttccctggtgctcctggagccaagggtgaagccggccccactggtgcccgtggtcctgaaggtgctc

SEQ ID NO: 352177 - DNA, 120 bp, Artificial Sequence
  ENSG00000139219_11 (sequence is synthesized)
aaggtcctcgcggtgaacctggtactcctgggtcccctgggcctgctggtgcctccggtaaccctggaacagatggaattcctggagccaaaggatctgctggtgctcctggcattgctg

SEQ ID NO: 352178 - DNA, 120 bp, Artificial Sequence
  ENSG00000139219_12 (sequence is synthesized)
gtgctcctggcttccctgggccacggggccctcctggccctcaaggtgcaactggtcctctgggcccgaaaggtcagacgggtgaacctggtattgctggcttcaaaggtgaacaaggcc

SEQ ID NO: 352179 - DNA, 120 bp, Artificial Sequence
  ENSG00000139219_13 (sequence is synthesized)
ccaagggagaacctggccctgctggcccccagggagcccctggacccgctggtgaagaaggcaagagaggtgcccgtggagagcctggtggcgttgggcccatcggtccccctggagaaa

SEQ ID NO: 352180 - DNA, 120 bp, Artificial Sequence
  ENSG00000139219_14 (sequence is synthesized)
gaggtgctcccggcaaccgcggtttcccaggtcaagatggtctggcaggtcccaagggagcccctggagagcgagggcccagtggtcttgctggccccaagggagccaacggtgaccctg

SEQ ID NO: 352181 - DNA, 120 bp, Artificial Sequence
  ENSG00000139219_15 (sequence is synthesized)
gccgtcctggagaacctggccttcctggagcccggggtctcactggccgccctggtgatgctggtcctcaaggcaaagttggcccttctggagcccctggtgaagatggtcgtcctggac

SEQ ID NO: 352182 - DNA, 120 bp, Artificial Sequence
  ENSG00000139219_16 (sequence is synthesized)
ctccaggtcctcagggggctcgtgggcagcctggtgtcatgggtttccctggccccaaaggtgccaacggtgagcctggcaaagctggtgagaagggactgcctggtgctcctggtctga

SEQ ID NO: 352183 - DNA, 120 bp, Artificial Sequence
  ENSG00000139219_17 (sequence is synthesized)
ggggtcttcctggcaaagatggtgagacaggtgctgcaggaccccctggccctgctggacctgctggtgaacgaggcgagcagggtgctcctgggccatctgggttccagggacttcctg

SEQ ID NO: 352184 - DNA, 120 bp, Artificial Sequence
  ENSG00000139219_18 (sequence is synthesized)
gccctcctggtcccccaggtgaaggtggaaaaccaggtgaccagggtgttcccggtgaagctggagcccctggcctcgtgggtcccaggggtgaacgaggtttcccaggtgaacgtggct

SEQ ID NO: 352185 - DNA, 120 bp, Artificial Sequence
  ENSG00000139219_19 (sequence is synthesized)
ctcccggtgcccagggcctccagggtccccgtggcctccccggcactcctggcactgatggtcccaaaggtgcatctggcccagcaggcccccctggggctcagggccctccaggtcttc

SEQ ID NO: 352186 - DNA, 120 bp, Artificial Sequence
  ENSG00000139219_20 (sequence is synthesized)
agggaatgcctggcgagaggggagcagctggtatcgctgggcccaaaggcgacaggggtgacgttggtgagaaaggccctgagggagcccctggaaaggatggtggacgaggcctgacag

SEQ ID NO: 352187 - DNA, 120 bp, Artificial Sequence
  ENSG00000139219_21 (sequence is synthesized)
cccagctggtgctaatggcgagaagggagaagttggacctcctggtcctgcaggaagtgctggtgctcgtggcgctccgggtgaacgtggagagactgggccccccggaccagcgggatt

SEQ ID NO: 352188 - DNA, 120 bp, Artificial Sequence
  ENSG00000139219_22 (sequence is synthesized)
tgctgggcctcctggtgctgatggccagcctggggccaagggtgagcaaggagaggccggccagaaaggcgatgctggtgcccctggtcctcagggcccctctggagcacctgggcctca

SEQ ID NO: 352189 - DNA, 120 bp, Artificial Sequence
  ENSG00000139219_23 (sequence is synthesized)
gggtcctactggagtgactggtcctaaaggagcccgaggtgcccaaggccccccgggagccactggattccctggagctgctggccgcgttggacccccaggctccaatggcaaccctgg

SEQ ID NO: 352190 - DNA, 120 bp, Artificial Sequence
  ENSG00000139219_24 (sequence is synthesized)
accccctggtccccctggtccttctggaaaagatggtcccaaaggtgctcgaggagacagcggcccccctggccgagctggtgaacccggcctccaaggtcctgctggaccccctggcga

SEQ ID NO: 352191 - DNA, 120 bp, Artificial Sequence
  ENSG00000139219_25 (sequence is synthesized)
gaagggagagcctggagatgacggtccctctggtgccgaaggtccaccaggtccccagggtctggctggtcagagaggcatcgtcggtctgcctgggcaacgtggtgagagaggattccc

SEQ ID NO: 352192 - DNA, 120 bp, Artificial Sequence
  ENSG00000139219_26 (sequence is synthesized)
tggcttgcctggcccgtcgggtgagcccggcaagcagggtgctcctggagcatctggagacagaggtcctcctggccccgtgggtcctcctggcctgacgggtcctgcaggtgaacctgg

SEQ ID NO: 352193 - DNA, 120 bp, Artificial Sequence
  ENSG00000139219_27 (sequence is synthesized)
acgagagggaagccccggtgctgatggcccccctggcagagatggcgctgctggagtcaagggtgatcgtggtgagactggtgctgtgggagctcctggagcccctgggccccctggctc

SEQ ID NO: 352194 - DNA, 120 bp, Artificial Sequence
  ENSG00000139219_28 (sequence is synthesized)
ccctggccccgctggtccaactggcaagcaaggagacagaggagaagctggtgcacaaggccccatgggaccctcaggaccagctggagcccggggaatccagggtcctcaaggccccag

SEQ ID NO: 352195 - DNA, 120 bp, Artificial Sequence
  ENSG00000139219_29 (sequence is synthesized)
aggtgacaaaggagaggctggagagcctggcgagagaggcctgaagggacaccgtggcttcactggtctgcagggtctgcccggccctcctggtccttctggagaccaaggtgcttctgg

SEQ ID NO: 352196 - DNA, 120 bp, Artificial Sequence
  ENSG00000139219_30 (sequence is synthesized)
tcctgctggtccttctggccctagaggtcctcctggccccgtcggtccctctggcaaagatggtgctaatggaatccctggccccattgggcctcctggtccccgtggacgatcaggcga

SEQ ID NO: 352197 - DNA, 120 bp, Artificial Sequence
  ENSG00000139219_31 (sequence is synthesized)
aaccggccctgctggtcctcctggaaatcctggaccccctggtcctccaggtccccctggccctggcatcgacatgtccgcctttgctggcttaggcccgagagagaagggccccgaccc

SEQ ID NO: 352198 - DNA, 120 bp, Artificial Sequence
  ENSG00000139219_32 (sequence is synthesized)
cctgcagtacatgcgggccgaccaggcagccggtggcctgagacagcatgacgccgaggtggatgccacactcaagtccctcaacaaccagattgagagcatccgcagccccgagggctc

SEQ ID NO: 352199 - DNA, 120 bp, Artificial Sequence
  ENSG00000139219_33 (sequence is synthesized)
ccgcaagaaccctgctcgcacctgcagagacctgaaactctgccaccctgagtggaagagtggagactactggattgaccccaaccaaggctgcaccttggacgccatgaaggttttctg

SEQ ID NO: 352200 - DNA, 120 bp, Artificial Sequence
  ENSG00000139219_34 (sequence is synthesized)
caacatggagactggcgagacttgcgtctaccccaatccagcaaacgttcccaagaagaactggtggagcagcaagagcaaggagaagaaacacatctggtttggagaaaccatcaatgg

SEQ ID NO: 352201 - DNA, 120 bp, Artificial Sequence
  ENSG00000139219_35 (sequence is synthesized)
tggcttccatttcagctatggagatgacaatctggctcccaacactgccaacgtccagatgaccttcctacgcctgctgtccacggaaggctcccagaacatcacctaccactgcaagaa

SEQ ID NO: 352202 - DNA, 120 bp, Artificial Sequence
  ENSG00000139219_36 (sequence is synthesized)
cagcattgcctatctggacgaagcagctggcaacctcaagaaggccctgctcatccagggctccaatgacgtggagatccgggcagagggcaatagcaggttcacgtacactgccctgaa

SEQ ID NO: 352203 - DNA, 120 bp, Artificial Sequence
  ENSG00000139219_37 (sequence is synthesized)
ggatggctgcacgaaacataccggtaagtggggcaagactgttatcgagtaccggtcacagaagacctcacgcctccccatcattgacattgcacccatggacataggagggcccgagca

SEQ ID NO: 352204 - DNA, 120 bp, Artificial Sequence
  ENSG00000139219_38 (sequence is synthesized)
ggaattcggtgtggacatagggccggtctgcttcttgtaaaaacctgaacccagaaacaacacaatccgttgcaaacccaaaggacccaagtactttccaatctcagtcactctaggact

SEQ ID NO: 352205 - DNA, 120 bp, Artificial Sequence
  ENSG00000139219_39 (sequence is synthesized)
ctgcactgaatggctgacctgacctgatgtccattcatcccaccctctcacagttcggacttttctcccctctctttctaagagacctgaactgggcagactgcaaaataaaatctcggt

SEQ ID NO: 352206 - DNA, 120 bp, Artificial Sequence
  ENSG00000139219_40 (sequence is synthesized)
gttctatttatttattgtcttcctgtaagaccttcgggtcaaggcagaggcaggaaactaactggtgtgagtcaaatgccccctgagtgactgcccccagcccaggccagaagacctccc

SEQ ID NO: 352207 - DNA, 120 bp, Artificial Sequence
  ENSG00000139219_41 (sequence is synthesized)
ttcaggtgccgggcgcaggaactgtgtgtgtcctacacaatggtgctattctgtgtcaaacacctctgtattttttaaaacatcaattgatattaaaaatgaaaagattattggaaagta

SEQ ID NO: 352208 - DNA, 120 bp, Artificial Sequence
  ENSG00000139219_42 (sequence is synthesized)
ctagccctgcacccaggagagcaggagagagggctgggcagtctgccactggggtccctggtcctgtctctgtcggggctgggcaactgcagggacttctctgttaaaatggggccagag

SEQ ID NO: 352209 - DNA, 120 bp, Artificial Sequence
  ENSG00000139219_43 (sequence is synthesized)
cccagctctaatgtaagacctttctaagtacctaactcttcctctgggagggcttggggttcgggaacggctccctaccctgtggggggaagagagactgaatctgtgctttccttcttg

SEQ ID NO: 352210 - DNA, 120 bp, Artificial Sequence
  ENSG00000139219_44 (sequence is synthesized)
tcagcaaccccagggccacagtggccctaacaccccaacagaggggttcagtggagtcacaggaagctgccgccttccttgattgtgtccttttacttgtttgatctaatgagtgtttga

SEQ ID NO: 352211 - DNA, 120 bp, Artificial Sequence
  ENSG00000139219_45 (sequence is synthesized)
gtgacaagaataggtatttttccatctcaagattcttaccttcttcttctctatattttttcccttgcagggcaaccaggaccaaagggacagaaaggagaacctggagacatcaaggat

SEQ ID NO: 352212 - DNA, 120 bp, Artificial Sequence
  ENSG00000139219_46 (sequence is synthesized)
gagtggtgcaggaagacgcctgtgctgcccaccctgctgacctcccctgggccctactagctgtggctctcagggtctctggaacactggctcagctcaccttttcttttccactgcagg

SEQ ID NO: 352213 - DNA, 120 bp, Artificial Sequence
  ENSG00000139219_47 (sequence is synthesized)
acctcgccactgccagtggttgtaatttatttatttcctgttcaacataaataaattacttgcaagcactgcaaacacgctcccatagatgctggtcgtctctgcaaagcagaggggcta

SEQ ID NO: 352214 - DNA, 120 bp, Artificial Sequence
  ENSG00000139219_48 (sequence is synthesized)
gttatccatgggacctggtagctggggtagaaaggaaaggccacttctcacttgcaggttgaaactgagtgaacgagcctgagacactagaggggtccttctttgcccaacatctccaaa

SEQ ID NO: 352215 - DNA, 120 bp, Artificial Sequence
  ENSG00000139219_49 (sequence is synthesized)
agctgcgaggagccgggagcaggagactctggccgggtcacccggtagtgcgctaagctggaggcgcgctcctgggcatttgaggaatacagcgtgactatacgtggcctggactcagac

SEQ ID NO: 352216 - DNA, 120 bp, Artificial Sequence
  ENSG00000139219_50 (sequence is synthesized)
tgactatatttttgtactacatttacaagcacacgcccacaaagctgtcttcttgactgacccctgccttagtgcgcaatggaattagctgggtggctttaaaataattctcaaattctc

SEQ ID NO: 352217 - DNA, 120 bp, Artificial Sequence
  ENSG00000139220_0 (sequence is synthesized)
gaggcaagtgaggagagaagatgctgtagcgtcctcaccggctgccagcagggaaatggtccaggagtgctgggtgtgagcctcccttctcctcaagccggagactgcggttgtcattga

SEQ ID NO: 352218 - DNA, 120 bp, Artificial Sequence
  ENSG00000139220_1 (sequence is synthesized)
tcaattgaagaagcaaggacccgaaatcacagacattagcaatgatgtgtgaagtgatgcccacgattaatgaggacaccccaatgagccaaagggggtcccaaagcagtggctcggact

SEQ ID NO: 352219 - DNA, 120 bp, Artificial Sequence
  ENSG00000139220_2 (sequence is synthesized)
cagactcccattttgagcagctgatggtgaatatgctagatgaaagggatcgtcttctagacacccttcgggagacccaggaaagcctctcacttgcccagcaaagacttcaggatgtca

SEQ ID NO: 352220 - DNA, 120 bp, Artificial Sequence
  ENSG00000139220_3 (sequence is synthesized)
tctatgaccgagactcactccagagacagctcaattcagccctgccacaggatatcgaatccctaacaggagggctggctggttctaagggggctgatccaccggaatttgctgcactga

SEQ ID NO: 352221 - DNA, 120 bp, Artificial Sequence
  ENSG00000139220_4 (sequence is synthesized)
caaaagaattaaatgcctgcagggaacaacttctagaaaaggaagaagaaatctctgaacttaaagctgaaagaaacaacacaagactattactggagcatttggagtgccttgtgtcac

SEQ ID NO: 352222 - DNA, 120 bp, Artificial Sequence
  ENSG00000139220_5 (sequence is synthesized)
gacatgaaagatcactaagaatgacggtggtaaaacggcaagcccagtctccctcaggagtatccagtgaagttgaagttctcaaggcactgaaatctttgtttgagcaccacaaggcct

SEQ ID NO: 352223 - DNA, 120 bp, Artificial Sequence
  ENSG00000139220_6 (sequence is synthesized)
tggatgaaaaggtaagggagcgactgagggtttctttagaaagagtctctgcactggaagaagaactagctgctgctaatcaggagattgttgccttgcgtgaacaaaatgttcatatac

SEQ ID NO: 352224 - DNA, 120 bp, Artificial Sequence
  ENSG00000139220_7 (sequence is synthesized)
aaagaaaaatggcatcaagcgagggatccacagagtcagaacatcttgaagggatggaacctggacagaaagtccatgagaagcgtttgtccaatggttctatagactcaaccgatgaaa

SEQ ID NO: 352225 - DNA, 120 bp, Artificial Sequence
  ENSG00000139220_8 (sequence is synthesized)
ctagtcaaatagttgaactacaagaattgcttgaaaagcaaaactatgaaatggcccagatgaaagaacgtttagcagccctttcttcccgagtgggagaggtggaacaggaagcagaga

SEQ ID NO: 352226 - DNA, 120 bp, Artificial Sequence
  ENSG00000139220_9 (sequence is synthesized)
cagcaagaaaggatctcattaaaacagaagaaatgaacaccaagtatcaaagggacattagggaggccatggcacaaaaggaagatatggaagaaagaattacaacccttgaaaagcgtt

SEQ ID NO: 352227 - DNA, 120 bp, Artificial Sequence
  ENSG00000139220_10 (sequence is synthesized)
acctcagtgctcagagagaatctacctccatacatgacatgaatgataaactagaaaatgagttagcaaataaagaagctatcctgcggcagatggaagagaaaaacagacagttacaag

SEQ ID NO: 352228 - DNA, 120 bp, Artificial Sequence
  ENSG00000139220_11 (sequence is synthesized)
aacgtcttgagctagctgaacaaaagttgcagcagaccatgagaaaggctgaaaccttgcctgaagtagaggctgaactggctcagagaattgcagccctaaccaaggctgaagagagac

SEQ ID NO: 352229 - DNA, 120 bp, Artificial Sequence
  ENSG00000139220_12 (sequence is synthesized)
atggaaatattgaagaacgtatgagacatttagagggtcaacttgaagagaagaatcaagaacttcaaagagctaggcaaagagagaaaatgaatgaggagcataacaagagattatcgg

SEQ ID NO: 352230 - DNA, 120 bp, Artificial Sequence
  ENSG00000139220_13 (sequence is synthesized)
atacggttgatagacttctgactgaatccaatgaacgcctacaactacacttaaaggaaagaatggctgctctagaagaaaagaatgttttaattcaagaatcagaaactttcagaaaga

SEQ ID NO: 352231 - DNA, 120 bp, Artificial Sequence
  ENSG00000139220_14 (sequence is synthesized)
atcttgaagaatctttacatgataaggaaagattagcagaagaaattgaaaagctgagatctgaacttgaccaattgaaaatgagaactggctctttaattgaacccacaataccaagaa

SEQ ID NO: 352232 - DNA, 120 bp, Artificial Sequence
  ENSG00000139220_15 (sequence is synthesized)
ctcatctagacacctcagctgagttgcggtactcagtgggatccctagtggacagccagtctgattacagaacaactaaagtaataagaagaccaaggagaggccgcatgggtgtgcgaa

SEQ ID NO: 352233 - DNA, 120 bp, Artificial Sequence
  ENSG00000139220_16 (sequence is synthesized)
gagatgagccaaaggtgaaatctcttggggatcacgagtggaatagaactcaacagattggagtactaagcagccacccttttgaaagtgacactgaaatgtctgatattgatgatgatg

SEQ ID NO: 352234 - DNA, 120 bp, Artificial Sequence
  ENSG00000139220_17 (sequence is synthesized)
acagagaaacaatttttagctcaatggatcttctctctccaagtggtcattccgatgcccagacgctagccatgatgcttcaggaacaattggatgccatcaacaaagaaatcaggctaa

SEQ ID NO: 352235 - DNA, 120 bp, Artificial Sequence
  ENSG00000139220_18 (sequence is synthesized)
ttcaggaagaaaaagaatctacagagttgcgtgctgaagaaattgaaaatagagtggctagtgtgagcctcgaaggcctgaatttggcaagggtccacccaggtacctccattactgcct

SEQ ID NO: 352236 - DNA, 120 bp, Artificial Sequence
  ENSG00000139220_19 (sequence is synthesized)
ctgttacagcttcatcgctggccagttcatctccccccagtggacactcaactccaaagctcacccctcgaagccctgccagggaaatggatcggatgggagtcatgacactgccaagtg

SEQ ID NO: 352237 - DNA, 120 bp, Artificial Sequence
  ENSG00000139220_20 (sequence is synthesized)
atctgaggaaacatcggagaaagattgcagttgtggaagaagatggtcgagaggacaaagcaacaattaaatgtgaaacttctcctcctcctacccctagagccctcagaatgactcaca

SEQ ID NO: 352238 - DNA, 120 bp, Artificial Sequence
  ENSG00000139220_21 (sequence is synthesized)
ctctcccttcttcctaccacaatgatgctcgaagtagtttatctgtctctcttgagccagaaagcctcgggcttggtagtgccaacagcagccaagactctcttcacaaagcccccaaga

SEQ ID NO: 352239 - DNA, 120 bp, Artificial Sequence
  ENSG00000139220_22 (sequence is synthesized)
actgaagctgcagctcaggagtccctggggttaggcaaactcggaactcaagctgagaaggatcgaagactaaagaaaaagcatgaacttcttgaagaagctcggagaaagggattacct

SEQ ID NO: 352240 - DNA, 120 bp, Artificial Sequence
  ENSG00000139220_23 (sequence is synthesized)
tttgcccagtgggatgggccaactgtggtcgcatggctagagctttggttgggaatgcctgcgtggtacgtggcagcctgccgagccaacgtgaagagtggtgccatcatgtctgcttta

SEQ ID NO: 352241 - DNA, 120 bp, Artificial Sequence
  ENSG00000139220_24 (sequence is synthesized)
tctgacactgagatccagagagaaattggaatcagcaatccactgcatcgcttaaaacttcgattagcaatccaggagatggtttccctaacaagtccttcagctcctccaacatctcga

SEQ ID NO: 352242 - DNA, 120 bp, Artificial Sequence
  ENSG00000139220_25 (sequence is synthesized)
actccttcaggcaacgtttgggtgactcatgaagaaatggaaaatcttgcagctccagcaaaaacgaaagaatctgaggaaggaagctgggcccagtgtccggtttttctacagaccctg

SEQ ID NO: 352243 - DNA, 120 bp, Artificial Sequence
  ENSG00000139220_26 (sequence is synthesized)
gcttatggagatatgaatcatgagtggattggaaatgaatggcttcccagcttggggttacctcagtacagaagttactttatggaatgcttggtagatgcaagaatgttagatcaccta

SEQ ID NO: 352244 - DNA, 120 bp, Artificial Sequence
  ENSG00000139220_27 (sequence is synthesized)
acaaaaaaagatctccgtgtccatttaaaaatggtggatagtttccatcgaacaagtttacaatatggaattatgtgcttaaagaggttgaattatgacagaaaagaactagaaagaaga

SEQ ID NO: 352245 - DNA, 120 bp, Artificial Sequence
  ENSG00000139220_28 (sequence is synthesized)
cgggaagcaagccaacatgaaataaaagacgtgttggtgtggagcaatgaccgagttattcgctggatacaagcaattggacttcgagaatatgcaaataatatacttgagagcggtgtg

SEQ ID NO: 352246 - DNA, 120 bp, Artificial Sequence
  ENSG00000139220_29 (sequence is synthesized)
catggctcacttatagccctggatgaaaactttgactacagcagcttagctttattattacagattccaacacagaacacccaggcaaggcagattcttgaaagagaatacaataacctc

SEQ ID NO: 352247 - DNA, 120 bp, Artificial Sequence
  ENSG00000139220_30 (sequence is synthesized)
ttggccctgggaactgaaaggcgactggatgaaagtgatgacaagaacttcagacgtggatcaacctggagaaggcagtttcctcctcgtgaagtacatggaatcagcatgatgcctggg

SEQ ID NO: 352248 - DNA, 120 bp, Artificial Sequence
  ENSG00000139220_31 (sequence is synthesized)
tcctcagaaacattaccagctggatttaggttaaccacaacctctgggcagtcaagaaaaatgacaacagatgttgcttcatcaagactgcagaggttagacaactccactgttcgcaca

SEQ ID NO: 352249 - DNA, 120 bp, Artificial Sequence
  ENSG00000139220_32 (sequence is synthesized)
tactcatgttgaccagccactcaaaggaggcagcactgacctgctatggcgtcttttcagtctactctacctaaagtgcactaccatctaagaagacgagcagtgaaaacctttgtgaaa

SEQ ID NO: 352250 - DNA, 120 bp, Artificial Sequence
  ENSG00000139220_33 (sequence is synthesized)
actgaattctaaggaaataatgacgtcatgacttattaaaagctgaaaaatgtgatttttggggggagtcagatattacatttgattagtttactacaaattgtaataaaatgcttaagt

SEQ ID NO: 352251 - DNA, 120 bp, Artificial Sequence
  ENSG00000139220_34 (sequence is synthesized)
catttgaataataaacatcatctacatcataaactctgtacaacagatgcttttatgaaatgaagccagttgtttttcatgttttattgtaatatactaggcatttatgtattaccgtgc

SEQ ID NO: 352252 - DNA, 120 bp, Artificial Sequence
  ENSG00000139220_35 (sequence is synthesized)
atttctttttaaatgtgtaagtcttatgtaaatggatataaatatgattttttaaaaaataaaatatatggttcatggagtctcgagtgcaaacatttgacaattccaagtactgtttgt

SEQ ID NO: 352253 - DNA, 120 bp, Artificial Sequence
  ENSG00000139220_36 (sequence is synthesized)
attttaccattccaccatttttacagtttttggattgttaatagtcaaatcaatatgtttccttgaagcatgtttcatgcttcaacgtgtttctccttcaagtctgtcaatacttaaagc

SEQ ID NO: 352254 - DNA, 120 bp, Artificial Sequence
  ENSG00000139220_37 (sequence is synthesized)
tgaacaacctgcctctgatcatgtaaaaaagaatgatttaacctggaaccggagccaaaaatagagctttaaaggcaatcagggatgtcctatatctttagaaatagcactgtgatggct

SEQ ID NO: 352255 - DNA, 120 bp, Artificial Sequence
  ENSG00000139220_38 (sequence is synthesized)
tgatctccttttcaatacaaaacaaagccaagctgtttacaagggtcaaaagcaattatttaaaaatttatattaaaaaaccataatcttctcttgttacctgtggaccaagaaaaaaaa

SEQ ID NO: 352256 - DNA, 120 bp, Artificial Sequence
  ENSG00000139220_39 (sequence is synthesized)
aaagataaaaaaacttctttactaagaaccacatgttcattcaaatatcttgaaatgccagccagtactggacagtgaatgtcaaccaccgcagagtctgaggctcatttccactagaga

SEQ ID NO: 352257 - DNA, 120 bp, Artificial Sequence
  ENSG00000139220_40 (sequence is synthesized)
aaacgaaacccaagatacctttcccttttgtcaatgtaacagggcattagccagactcatgtctaatgttataagcttttagccgagatggccttgttgcgacttccctgaagtcagttt

SEQ ID NO: 352258 - DNA, 120 bp, Artificial Sequence
  ENSG00000139220_41 (sequence is synthesized)
tatcagaggaaataaatgaaagacagaatgattaacatatatagtgtataaaagtatagaagagtaatctcttccctgtggctttatttggtggtgttactgttgtttattctttgttta

SEQ ID NO: 352259 - DNA, 120 bp, Artificial Sequence
  ENSG00000139220_42 (sequence is synthesized)
tatgggagattcaaagtaaagcctatttaataataccatttatctaactgctgattttctgctgcttgatcttattaagcgcaagacctgtcattagtaatttcttttctgtattttaat

SEQ ID NO: 352260 - DNA, 120 bp, Artificial Sequence
  ENSG00000139220_43 (sequence is synthesized)
ttgctatgtttgcacgtacattacatttgttttgatgtctatttttatttaacagattcagtcaaaaggtaatgataacagaaaccctttccattgtcaataaaaaaaataataattcca

SEQ ID NO: 352261 - DNA, 120 bp, Artificial Sequence
  ENSG00000139220_44 (sequence is synthesized)
tttttccgatggacgcttctccttttggctgctgacggagccacgggaagatgccgagctcctgccacgccaccgggccggggcacgttccgggagggcgccggggcacgcgtgtgtctg

SEQ ID NO: 352262 - DNA, 120 bp, Artificial Sequence
  ENSG00000139220_45 (sequence is synthesized)
gagaacagatgggcaggtccacagcactgccagattctgcacaagctccatttatcgttggttcttgcttttttccttctgtgtttttaattttttaaaaaacattgtatgttctagaga

SEQ ID NO: 352263 - DNA, 120 bp, Artificial Sequence
  ENSG00000139220_46 (sequence is synthesized)
actagcttcacaaaaggtcggtggctgatgatctttcagctaagatttcaaatgtagaagaacaattcaaaatgctatcactgtgtatgtaagaaggatggggcagatttcattttaccc

SEQ ID NO: 352264 - DNA, 120 bp, Artificial Sequence
  ENSG00000139220_47 (sequence is synthesized)
tctagtctccctcaatgcatgcacggatttatctgtacgctaagctctctgctctgcatctgtagctccttgtggattatattgtctcagtgatcagaaatgattttctcggatatgaac

SEQ ID NO: 352265 - DNA, 120 bp, Artificial Sequence
  ENSG00000139220_48 (sequence is synthesized)
taaactatcaggaaatgtgttctttgggtgacccaaatatttagcttcaaaattgagtctgccacaagagggagatctaaacttgcttatgggagtgatcttaaaatttttttctaaaaa

SEQ ID NO: 352266 - DNA, 120 bp, Artificial Sequence
  ENSG00000139220_49 (sequence is synthesized)
tgtggcctgagtaggaacaatgagaagtagctttctaagctcatctaaacatgggcatcttgattcatagaaatgaaatagaatataggaactacgacattataatgccataactagatt

SEQ ID NO: 352267 - DNA, 120 bp, Artificial Sequence
  ENSG00000139220_50 (sequence is synthesized)
agaagaactagctgctgctaatcaggaggtaacctgccacactttctcctcttttgaggtgcaatatcgctgacattacatcccttgtgtttcacgtcacttttattataactgtcacaa

SEQ ID NO: 352268 - DNA, 120 bp, Artificial Sequence
  ENSG00000139220_51 (sequence is synthesized)
tgctcctccccttcctcagtgctaggcaaatagccgtgtgtctaagtctacagagcaaaattgtgacagcacacatttcaatgtcagcttgaattattctcaagagattaagcttgctct

SEQ ID NO: 352269 - DNA, 120 bp, Artificial Sequence
  ENSG00000139220_52 (sequence is synthesized)
ttattaaccttgctgctacttttaataggttttcaaatgaggaactatgattcatatcagacgtgaaagctagcatagcagacttttgagctagcatctgaagtttagatttttctccca

SEQ ID NO: 352270 - DNA, 120 bp, Artificial Sequence
  ENSG00000139220_53 (sequence is synthesized)
aaataactccaatgttttgctgatgcttggatgtaacaggcctttgtagctgacacatttcaagcaatgctgttcagctgcctgtttgaagaaagtttattttttaaaaactatgtttgc

SEQ ID NO: 352271 - DNA, 120 bp, Artificial Sequence
  ENSG00000139220_54 (sequence is synthesized)
caatgttttgctgatgcttggatgtaacaggcctttgtagctgacacatttcaagcaatgctgttcagctgcctgtttgaagaaagtttattttttaaaaactatgtttgcagttggtag

SEQ ID NO: 352272 - DNA, 120 bp, Artificial Sequence
  ENSG00000139220_55 (sequence is synthesized)
ctcggcagcccgggagcggctctgggggagacgagtgtatccgcgggcgcgtgtgcgtgaggaggagagcaaagacgtgattacttcagaatttatttaagggccggtggaaaccactgc

SEQ ID NO: 352273 - DNA, 120 bp, Artificial Sequence
  ENSG00000139220_56 (sequence is synthesized)
cacttaaaggaaagaatggctgctctagaagaaaagttggcagctaccagaccagcaagagttatgagagctggttaccaattccagagcataaattaagaatgttttaattcaagaatc

SEQ ID NO: 352274 - DNA, 120 bp, Artificial Sequence
  ENSG00000139220_57 (sequence is synthesized)
ctaatcaggaggttttggttaatcaacacttattccaagaagcatacatttgtatctatccatggaattagatggatttgcacctgcactgatatgtctgttgtatccagaacaagtggg

SEQ ID NO: 352275 - DNA, 120 bp, Artificial Sequence
  ENSG00000139220_58 (sequence is synthesized)
ggtacataagagatagcagtgggagatgggaagggagagccagaggccgaccaggacatcagcatggaaacattttcatgatacagcagctgctaaatgacttattggtactaaatgctt

SEQ ID NO: 352276 - DNA, 120 bp, Artificial Sequence
  ENSG00000139220_59 (sequence is synthesized)
actgtacatcagggacgtgagaaaatcgaggcaaccctgtcggatgctctgtgcttcagccctgctctggtcttcttttggtctcattccttaccactagaacagatgttcctgaggcca

SEQ ID NO: 352277 - DNA, 120 bp, Artificial Sequence
  ENSG00000139220_60 (sequence is synthesized)
aattcagtatcccattacctcttctacaccatctgcatgtaccaggaaccctgaaaatccctaatccaatgctctgagcctatttctaaggactgaatgggcctcctcctttgtctgcaa

SEQ ID NO: 352278 - DNA, 120 bp, Artificial Sequence
  ENSG00000139220_61 (sequence is synthesized)
acctcatctctgacatatgtatccttaggaccatagagccaaaaggagactgcttgtagttgagaagctggtacatgtggctcagggcatacacatgtacaagagggaactcattgtgtg

SEQ ID NO: 352279 - DNA, 120 bp, Artificial Sequence
  ENSG00000139220_62 (sequence is synthesized)
tcattaaatttaactattgatgaattgaattgtgtacacaccagattatcagttgattgcttgtatattatttgtcatatgcaggtactttttataaatacagctattatagaaactaat

SEQ ID NO: 352280 - DNA, 120 bp, Artificial Sequence
  ENSG00000139220_63 (sequence is synthesized)
aagatgctgtagcgtcctcaccggctgccagcaggttggttcttccggccaattgaagcaagcaaagaggcttgcagaaaggccgggaggagaaaaatggggaaatggtccaggagtgct

SEQ ID NO: 352281 - DNA, 120 bp, Artificial Sequence
  ENSG00000139220_64 (sequence is synthesized)
tgactacccctcaggcaaagtttcttgggacagtacctctgttgtgctagagtagaaccctcccttcggtctgagggactcaggaaagcctccccagaggagatggtgcctagactgagt

SEQ ID NO: 352282 - DNA, 120 bp, Artificial Sequence
  ENSG00000139220_65 (sequence is synthesized)
aattacattcacccacaaggatatcgaatccctaacaggagggctggctggttctaagggggctgatccaccgtgcttgcccatagaattcaacttacatcagaaaagtagatctactac

SEQ ID NO: 352283 - DNA, 120 bp, Artificial Sequence
  ENSG00000139220_66 (sequence is synthesized)
cttcaaaatacttccctcaactgttcactgattcctggaagaattctacagttagagattagttggtttcaaaggatttgtctcttgttcaaagcaaaataaaatatctgtcttctgcta

SEQ ID NO: 352284 - DNA, 120 bp, Artificial Sequence
  ENSG00000139223_0 (sequence is synthesized)
atggagatgggcaaatggattcatttagagctgcggaacaggacgccctccgatgtgaaagaacttttcctggacaacagtcagtcaaatgaaggcaaattggaaggcctcacagatgaa

SEQ ID NO: 352285 - DNA, 120 bp, Artificial Sequence
  ENSG00000139223_1 (sequence is synthesized)
tttgaagaactggaattattaaatacaatcaacataggcctcacctcaattgcaaacttgccaaagttaaacaaacttaagaagcttgaactaagcagtaacagagcctcagtgggccta

SEQ ID NO: 352286 - DNA, 120 bp, Artificial Sequence
  ENSG00000139223_2 (sequence is synthesized)
gaagtattggcagaaaagtgtccaaacctcatacatctaaatttaagtggcaacaaaattaaagacctcagcacaatagagcccctgaaaaagttagaaaacctcgagagcttagacctt

SEQ ID NO: 352287 - DNA, 120 bp, Artificial Sequence
  ENSG00000139223_3 (sequence is synthesized)
gtgagggctttgtggagtgcctggatgacaaggaggaggatgaggatgaggaggagtatgatgaagatgctcaggtaatggaagatgaggaggacgaggatgaggaggaggaacgtgaag

SEQ ID NO: 352288 - DNA, 120 bp, Artificial Sequence
  ENSG00000139223_4 (sequence is synthesized)
aggaggacgtgagtggagacgaggaggagaaggatgaaggttataacaatggagaggtagatgatgaggaagatgaagaagagcttggtgaagaagaaaggggtcagaagcgaaaataag

SEQ ID NO: 352289 - DNA, 120 bp, Artificial Sequence
  ENSG00000139223_5 (sequence is synthesized)
aaactgaagatgagggagaagacgatgcctaagtggaataatctattttgaaaaattccttttgtgattttactgtttttagccgtatcccctcccccactccaatcctgccccctgaaa

SEQ ID NO: 352290 - DNA, 120 bp, Artificial Sequence
  ENSG00000139223_6 (sequence is synthesized)
cttatttttttctgattgtaacgttgctgtgggagcaagagaggaaaagtgtactgggggttgtgagggaagggaggggaggagggggtggaataaaatactatttttactgccactctt

SEQ ID NO: 352291 - DNA, 120 bp, Artificial Sequence
  ENSG00000139233_0 (sequence is synthesized)
gacttccggtcggcgtgagcgtgaggtgtgggtgttcgtttctcaggtaaaacatggctaaaagcttacggagtaagtggaaaagaaagatgcgtgctgaaaagagaaaaaagaatgccc

SEQ ID NO: 352292 - DNA, 120 bp, Artificial Sequence
  ENSG00000139233_1 (sequence is synthesized)
caaaggaggccagcaggcttaaaagtattctcaaactagacggtgatgttttaatgaaagatgttcaagagatagcaactgtggtggtacccaaacccaaacattgccaagagaaaatgc

SEQ ID NO: 352293 - DNA, 120 bp, Artificial Sequence
  ENSG00000139233_2 (sequence is synthesized)
aatgtgaggtaaaagatgaaaaagatgacatgaaaatggagactgatattaagagaaacaaaaagactcttctagaccagcatggacagtacccaatatggatgaaccaaaggcaaagaa

SEQ ID NO: 352294 - DNA, 120 bp, Artificial Sequence
  ENSG00000139233_3 (sequence is synthesized)
aaaggctgaaggcaaagcgagagaaaagaaaggggaaaagcaaagcaaaagcagtgaaagtggcaaagggtttggcctggtagactcttaaaaccttggaaaatgccacatgggatagat

SEQ ID NO: 352295 - DNA, 120 bp, Artificial Sequence
  ENSG00000139233_4 (sequence is synthesized)
gacggattagaatgtatacacatgtatactttgatttcaactgccaccaaatgaaaaccatttgttttcctattttaacttggccttttttcttcaattcaaacccagcataactcctca

SEQ ID NO: 352296 - DNA, 120 bp, Artificial Sequence
  ENSG00000139233_5 (sequence is synthesized)
agtttgttttgggaacttgaataaaatattttctttgatacatccaagctctactgatactttaactggatgctacccaatatccagttataatcaggcctcaacgttctgtcaggtatt

SEQ ID NO: 352297 - DNA, 120 bp, Artificial Sequence
  ENSG00000139233_6 (sequence is synthesized)
aatatggttagaattgttcttacaactggtaattatagtcaatagagataaaacagatgatgtactgacaaatttttgtgaacttagattttaaagaaagttgttgtataatcatatcat

SEQ ID NO: 352298 - DNA, 120 bp, Artificial Sequence
  ENSG00000139233_7 (sequence is synthesized)
gccaagattgccccactgcactccaccctgggcaatggagtaggactctgtctcaaaaaaaaaaaaaataatggatcttataaagtacttgtgtggagctttgattccacagaataaaag

SEQ ID NO: 352299 - DNA, 120 bp, Artificial Sequence
  ENSG00000139233_8 (sequence is synthesized)
atattttgtgtgtagatcttcaagtctgatttttttttctttcatgtatgcttaaggttttttagtcctagagaagaccagatttcaattaaatgttttcttatcttaattttaggtaga

SEQ ID NO: 352300 - DNA, 120 bp, Artificial Sequence
  ENSG00000139233_9 (sequence is synthesized)
atattaacatatacaaatcagtatgctttttaggaaattagaacatttcaggtttttcatggaaactgatttaatgttctttagtgttaatattgtgtggcctaatatagtatcatgcag

SEQ ID NO: 352301 - DNA, 120 bp, Artificial Sequence
  ENSG00000139233_10 (sequence is synthesized)
cattccccggagtgtgttcttcagtatcagtttcctctggatgcttggttaaaaaaaataaattgtgttcacatcgatttgggaaatgctacatacttgaagatttacaaaagattttag

SEQ ID NO: 352302 - DNA, 120 bp, Artificial Sequence
  ENSG00000139233_11 (sequence is synthesized)
tttaggattagaatagtcctacagggttccagcagcaaagaaacctgtttagcgtctactctttgaaactagttttctgagaaatgatttttagttaaatctgtcttactacagtttgct

SEQ ID NO: 352303 - DNA, 120 bp, Artificial Sequence
  ENSG00000139233_12 (sequence is synthesized)
aaattcatttttattttacttttagttaagcaatctaaacttagcattccctctgaatttcactataatcagattaaccatctcatatgttaactggaacaaccaaatacttactgagtg

SEQ ID NO: 352304 - DNA, 120 bp, Artificial Sequence
  ENSG00000139233_13 (sequence is synthesized)
cctagtatgtgggccagggactttccagatgcttgggacagattgaataagataagatttctgctctcatagggctgagagctgtgtatctgtttagaagaagatgttaacttcccagga

SEQ ID NO: 352305 - DNA, 120 bp, Artificial Sequence
  ENSG00000139233_14 (sequence is synthesized)
gaactcaagtaaaatgtgaaatagaataaggccacttggtcatgaggtcacaaactttgtgccaggcacactgctaaattggggcacaatacatggacatgtattgtaataaagaggaca

SEQ ID NO: 352306 - DNA, 120 bp, Artificial Sequence
  ENSG00000139233_15 (sequence is synthesized)
tgacccaaatgtttcagaaaatttaagcttataaaatttgatgccagtaaactcttggaattgtttaaatatagtagacttttcttatttttctcaatagtttattgaaaagttggtaga

SEQ ID NO: 352307 - DNA, 120 bp, Artificial Sequence
  ENSG00000139233_16 (sequence is synthesized)
taactttaaatgcttaaaatttcttaacagctaagaaagatatgaattgaaagatgtcattcatgatctttgttgcctttggtgtaggtatgaataacactagcatttgtgagggaaaag

SEQ ID NO: 352308 - DNA, 120 bp, Artificial Sequence
  ENSG00000139233_17 (sequence is synthesized)
aaagtgaatatgtacatttttattcataaaataaaaaaaattgcaaacaaccagttaagccactgacaatatcagcctaaatacagtagctgaattatttatgttttttttttttttttt

SEQ ID NO: 352309 - DNA, 73 bp, Artificial Sequence
  ENSG00000139233_18 (sequence is synthesized)
attggcacaagtgtggctccgctgcaacctccacctcccaggctgaagcgattctcccacctcagcctcccca

SEQ ID NO: 352310 - DNA, 120 bp, Artificial Sequence
  ENSG00000139233_19 (sequence is synthesized)
aaagtggtgggattacatgcgtgagccaccacacccggcctaatgtagacattttttatgatttttggaaaagggggccaggcaccaaattctaacaatttgggaggctgaggcagatgg

SEQ ID NO: 352311 - DNA, 74 bp, Artificial Sequence
  ENSG00000139233_20 (sequence is synthesized)
ggaggcagaggttgcagtgagtcaagaccacaccattgcactccagcctgctacattcgtgatattacacagtt

SEQ ID NO: 352312 - DNA, 120 bp, Artificial Sequence
  ENSG00000139233_21 (sequence is synthesized)
aagtctacattcgtgatattacacagttggcacttatttacattttggcagcattgtcaggtagagaccaatgccagggttatgttcatgttttctgtggctgataacctctaatttgat

SEQ ID NO: 352313 - DNA, 120 bp, Artificial Sequence
  ENSG00000139233_22 (sequence is synthesized)
tctgttgatagtagctttgagctttcatccagagcctctctgatgttaggattttcacttcattgtgtccagtcatgaagtttgtccattcaggatttaacttgaaagttaacaaaatca

SEQ ID NO: 352314 - DNA, 120 bp, Artificial Sequence
  ENSG00000139233_23 (sequence is synthesized)
aaaatcaaagcaccattaccagaaaacatatttgggaatcatgttctcaagtgtcacatggcctctggaaaggcgactgctgaagagaagtttactgacacagtgttgtcagtaccctct

SEQ ID NO: 352315 - DNA, 120 bp, Artificial Sequence
  ENSG00000139233_24 (sequence is synthesized)
aaggcactgagttcctgaacactaccagcaagattctccccacctccaaatattggcaggaaatttagactagcatttcaaaattagtgcaggggtatggtcacatctttggcactttat

SEQ ID NO: 352316 - DNA, 120 bp, Artificial Sequence
  ENSG00000139233_25 (sequence is synthesized)
ttttaaagattacaaatcgagaagtatagcatagtccttttatcttttaaataattagcttatttttttgaaatttgtcatctttttgactgacattttccagagaattgctgtaaagcc

SEQ ID NO: 352317 - DNA, 120 bp, Artificial Sequence
  ENSG00000139233_26 (sequence is synthesized)
acaagatggagctcaagctaagcaccaaatcattttggaattagattgagtgagctaaatcacattaggaattgaatgtaacactttttgtgttttaagaaattaagtctgaaatcaaaa

SEQ ID NO: 352318 - DNA, 120 bp, Artificial Sequence
  ENSG00000139233_27 (sequence is synthesized)
tataatttaaagatgatcaaaactgcttcaagtattaactcatttaatctgcccagcaatctcatgagtttggtactaatgttatctgagtttggtactaatgtaatctctgtttacaca

SEQ ID NO: 352319 - DNA, 120 bp, Artificial Sequence
  ENSG00000139233_28 (sequence is synthesized)
attcaaatttaggcagtgtggctctagagcctatactcttacaatgccattctgcctctcaaggatgtgcaaactcttgctaagagagaaaggtgattttaggatagaatacctattttt

SEQ ID NO: 352320 - DNA, 120 bp, Artificial Sequence
  ENSG00000139233_29 (sequence is synthesized)
gggtcaacctgtgatagattgggttcatgtgggctcaggatcagataaagagcaggtttaagtagaataatgatgtacagaaccctcctcaaatctctaggcctaaggcagactggattt

SEQ ID NO: 352321 - DNA, 120 bp, Artificial Sequence
  ENSG00000139233_30 (sequence is synthesized)
cctcaggtgacacttcattaggaatgggctgaccaatccaaaaggggaaggtgtaggccatgatcagtagttgcccaaggtactaatcagagaagaaatgcaaactgcagttgaagctct

SEQ ID NO: 352322 - DNA, 120 bp, Artificial Sequence
  ENSG00000139233_31 (sequence is synthesized)
aaggtagaatcaagtagtggttttgaccacatcctattttctactgtcacattagtgtagatatctcttcccactatgtaattcacatgctacatcaaataaggatgcagcagtatatat

SEQ ID NO: 352323 - DNA, 120 bp, Artificial Sequence
  ENSG00000139233_32 (sequence is synthesized)
ttgcttattaggaaattcagatattttcaaaatttggatccgtgtttctggaatatggcttaagagttggagaagaaaaatagctataaatgacttgaatcaaatatctgaaatggactg

SEQ ID NO: 352324 - DNA, 120 bp, Artificial Sequence
  ENSG00000139233_33 (sequence is synthesized)
gtggtgatggtgaggggcagcaatgtgtaatttagggaagtgctgaccacaacataaaattgggaggaatctaaggcattgccaaatttataaatactacaatagaaatgcagatgctaa

SEQ ID NO: 352325 - DNA, 120 bp, Artificial Sequence
  ENSG00000139233_34 (sequence is synthesized)
gctgttggctaatcttactagttaagtgactaacttctgatgccatctggcagagtgattcaaatttgtgctaaacacaaaatatatgtctttttccctctatttgcctgcatgtattaa

SEQ ID NO: 352326 - DNA, 120 bp, Artificial Sequence
  ENSG00000139233_35 (sequence is synthesized)
taaaaacactgttgcagtagacacataccaattttacaaggaaatgtttaggggtgaggtgggactgttaaatacttacatcaggtcaaaggtcactctgctgtttccagaggactgtca

SEQ ID NO: 352327 - DNA, 120 bp, Artificial Sequence
  ENSG00000139233_36 (sequence is synthesized)
ggtagccaggaggcccagggccacttttgggcctgcttacaaaaccctaaattttccgcagttgaatgccaagagtcttttgcagttattttagagcaggggagaaaatacaatgtgttg

SEQ ID NO: 352328 - DNA, 120 bp, Artificial Sequence
  ENSG00000139233_37 (sequence is synthesized)
ccaaataagcttaatttggtaggcaagcagtaaaaataacccaacagccaacatttagagaatgcgtactctcttaaatgctttatgtatattatttaatctttaaaacactgtgggatc

SEQ ID NO: 352329 - DNA, 120 bp, Artificial Sequence
  ENSG00000139233_38 (sequence is synthesized)
aatactttaattatccctattttcagatgagaaaacagtttgaaaggttaactaaatttacccaaagtcatgcaactgctaagtagtgagcaagccgcctgtcccagagtatagaatgaa

SEQ ID NO: 352330 - DNA, 120 bp, Artificial Sequence
  ENSG00000139233_39 (sequence is synthesized)
tacctatgatggaaagctacagagagacagacttttatttgatttaaggaagcgccttctaaccaagattttgggagctgaaatgggcaccttgggatccttgaggtgtcagtctaaggt

SEQ ID NO: 352331 - DNA, 120 bp, Artificial Sequence
  ENSG00000139233_40 (sequence is synthesized)
ggacaggcatttggttggaatgtagcaaaatggattcaaacactgtagagttatccttcagaatctatcggggattggtgccaggatcttcacagataccaaaatccacagatgctcgaa

SEQ ID NO: 352332 - DNA, 120 bp, Artificial Sequence
  ENSG00000139233_41 (sequence is synthesized)
tcgcttacataaactggtgaaatatttgcatataacccatgcccatcctcccatatatagtcatatgtcactaaatgactgggatgtgttctgagaagtgtgtcactaggtaatatcgtt

SEQ ID NO: 352333 - DNA, 120 bp, Artificial Sequence
  ENSG00000139233_42 (sequence is synthesized)
aatcattgtgtgaatatcatagactgtacttacacaaatctagagggtatcgtctactacacttaggctatgtgatatagcctattgcttctaggctacaaattggtcaagcaagttact

SEQ ID NO: 352334 - DNA, 74 bp, Artificial Sequence
  ENSG00000139233_43 (sequence is synthesized)
cctattgcttctaggctacaaattggtcaagcaagttactgtactgagtactgtaggcaattgtatcacaatgg

SEQ ID NO: 352335 - DNA, 120 bp, Artificial Sequence
  ENSG00000139233_44 (sequence is synthesized)
aatagtgcttggaggactcgtgcttggggtgagtcaatgagtaagccatgagtgaatgtgaaggcctcagacatgactgtatactgctgtatattttttttttttttttttgagacggag

SEQ ID NO: 352336 - DNA, 120 bp, Artificial Sequence
  ENSG00000139233_45 (sequence is synthesized)
tgcgattacaggcgtgagccactgtactcggcctgctgtaggctttatatacactgtgcacttaggctacataaacttataaaaaactttcttcaataataaattaactttagcttcctg

SEQ ID NO: 352337 - DNA, 120 bp, Artificial Sequence
  ENSG00000139233_46 (sequence is synthesized)
cctgtaacttttttaccttataaacgttttaattttttaaactgtataacccttttatcataacacttaccttaaaacacaaatacattgtacaactgtacacaaatattttatattttt

SEQ ID NO: 352338 - DNA, 120 bp, Artificial Sequence
  ENSG00000139233_47 (sequence is synthesized)
gcttttttctatttccacaatttttaattttttaatttctttttttacttcttaagtttttttgttaaaaactaagacacaaacacattagcctccatctacactgtcttccacctccac

SEQ ID NO: 352339 - DNA, 120 bp, Artificial Sequence
  ENSG00000139233_48 (sequence is synthesized)
agcttgtcccactgcaaggccttcaggggcaataacaggcatggagttgccatctcctatgagagcaacaccttcttgtgcaataccttctggaggacctgcctgaggctgttcacagtc

SEQ ID NO: 352340 - DNA, 120 bp, Artificial Sequence
  ENSG00000139233_49 (sequence is synthesized)
aactttttctttaagtagaaggagtacactctaaaataaaaagtatagtaaagccataaaccgtagtcattattatcaagtattatgaactgtacataattgtatgtgctatacctttat

SEQ ID NO: 352341 - DNA, 120 bp, Artificial Sequence
  ENSG00000139233_50 (sequence is synthesized)
tttgtttacaccagcatcaccacaaacacgtgagtaatgcattgcactgtgatgttaagatggctacagtgtcactgggccataggaatgtttcagctctactgtaatcttatgggacca

SEQ ID NO: 352342 - DNA, 120 bp, Artificial Sequence
  ENSG00000139233_51 (sequence is synthesized)
gtgtcactgggccataggaatgtttcagctctactgtaatcttatgggaccactgcctatattgactgaaatgtcatcatgcaatgcatgactgtactttaaatcatctctagattactt

SEQ ID NO: 352343 - DNA, 120 bp, Artificial Sequence
  ENSG00000139233_52 (sequence is synthesized)
ttatactgtatttagggaataatgataagaaaaaaagtcggtacatgttcagtacagatgcaactgtagttttcttttgaatattttttatctcaggacgaagccccaaatgcagaattc

SEQ ID NO: 352344 - DNA, 120 bp, Artificial Sequence
  ENSG00000139233_53 (sequence is synthesized)
atagatacagagggccaactgttcttggaatttgggttgaaagctgttaaagttcttttcagccaaaaaaaaatgcctcgtaataaattgtcatgtttgaaatgtatcatgcttgttttg

SEQ ID NO: 352345 - DNA, 120 bp, Artificial Sequence
  ENSG00000139233_54 (sequence is synthesized)
ctctacatagttttttggtactacataactgtagacttaagtatctttttggtggaaataaaatatgaaatctctttaattttgttaatgttaggtctggtattcgttccattaagttcc

SEQ ID NO: 352346 - DNA, 120 bp, Artificial Sequence
  ENSG00000139233_55 (sequence is synthesized)
actttaaagtatggaaaaatgttataaacatctgctttaaacaatgaatggtactgcaatagtcctgtaaagaaaaatgaatggagtaaagtccttcaagttttcatttaaagaatggca

SEQ ID NO: 352347 - DNA, 120 bp, Artificial Sequence
  ENSG00000139233_56 (sequence is synthesized)
tagctttataatacattaagtttttaatatgcggaatgtatttaatatcctaaagcgatgaattgtcttggcattatgctatcttatgaaacactttcttactctcacattgtgtcttta

SEQ ID NO: 352348 - DNA, 120 bp, Artificial Sequence
  ENSG00000139233_57 (sequence is synthesized)
tagttttcaatatcagcaaaacctttaaatagtcttagttgggtgttgtgtatcattgtacagcaactgttagtacatgtggtatttctgatccatgtaataaagtacatttgtcatgta

SEQ ID NO: 352349 - DNA, 120 bp, Artificial Sequence
  ENSG00000139233_58 (sequence is synthesized)
gagttcggttcctcaccggtccagtgacacatgggacttggggcttgattccgccacccttggagaatttcgtttcttgacactcgctgggctatacttgagctccagtccggagatgca

SEQ ID NO: 352350 - DNA, 120 bp, Artificial Sequence
  ENSG00000139233_59 (sequence is synthesized)
ggccttgttgagggcgagggttccccttgctctttttggtgggggccctccggcttccgagtgcactggataaagtggagcccacccctgtcgttcactcccgctgaagttaacttcggc

SEQ ID NO: 352351 - DNA, 120 bp, Artificial Sequence
  ENSG00000139263_0 (sequence is synthesized)
ggcgaaaaagtttcttttgcagacaagaaggggcttcggcgagccgacgctgctcaagctgcaactctgttgcagttggcagttcttttcggtttccctcctgctgtttgggggcatgaa

SEQ ID NO: 352352 - DNA, 120 bp, Artificial Sequence
  ENSG00000139263_1 (sequence is synthesized)
agggcttcgccgccgggagtaaaagaaggaattgaccgggcagcgcgagggaggagcgcgcacgcgaccgcgagggcgggcgtgcaccctcggctggaagtttgtgccgggccccgagcg

SEQ ID NO: 352353 - DNA, 120 bp, Artificial Sequence
  ENSG00000139263_2 (sequence is synthesized)
cgcgccggctgggagcttcgggtagagacctaggccgctggaccgcgatgagcgcgccgagcctccgtgcgcgcgccgcggggttggggctgctgctgtgcgcggtgctggggcgcgctg

SEQ ID NO: 352354 - DNA, 120 bp, Artificial Sequence
  ENSG00000139263_3 (sequence is synthesized)
gccggtcagacagcggcggtcgcggggaactcgggcagccctctggggtagccgccgagcgcccatgccccactacctgccgctgcctcggggacctgctggactgcagtcgtaagcggc

SEQ ID NO: 352355 - DNA, 120 bp, Artificial Sequence
  ENSG00000139263_4 (sequence is synthesized)
tagcgcgtcttcccgagccactcccgtcctgggtcgctcggctggacttaagtcacaacagattatctttcatcaaggcaagttccatgagccaccttcaaagccttcgagaagtgaaac

SEQ ID NO: 352356 - DNA, 120 bp, Artificial Sequence
  ENSG00000139263_5 (sequence is synthesized)
tgaacaacaatgaattggagaccattccaaatctgggaccagtctcggcaaatattacacttctctccttggctggaaacaggattgttgaaatactccctgaacatctgaaagagtttc

SEQ ID NO: 352357 - DNA, 120 bp, Artificial Sequence
  ENSG00000139263_6 (sequence is synthesized)
agtcccttgaaactttggaccttagcagcaacaatatttcagagctccaaactgcatttccagccctacagctcaaatatctgtatctcaacagcaaccgagtcacatcaatggaacctg

SEQ ID NO: 352358 - DNA, 120 bp, Artificial Sequence
  ENSG00000139263_7 (sequence is synthesized)
ggtattttgacaatttggccaacacactccttgtgttaaagctgaacaggaaccgaatctcagctatcccacccaagatgtttaaactgccccaactgcaacatctcgaattgaaccgaa

SEQ ID NO: 352359 - DNA, 120 bp, Artificial Sequence
  ENSG00000139263_8 (sequence is synthesized)
acaagattaaaaatgtagatggactgacattccaaggccttggtgctctgaagtctctgaaaatgcaaagaaatggagtaacgaaacttatggatggagctttttgggggctgagcaaca

SEQ ID NO: 352360 - DNA, 120 bp, Artificial Sequence
  ENSG00000139263_9 (sequence is synthesized)
tggaaattttgcagctggaccataacaacctaacagagattaccaaaggctggctttacggcttgctgatgctgcaggaacttcatctcagccaaaatgccatcaacaggatcagccctg

SEQ ID NO: 352361 - DNA, 120 bp, Artificial Sequence
  ENSG00000139263_10 (sequence is synthesized)
atgcctgggagttctgccagaagctcagtgagctggacctaactttcaatcacttatcaaggttagatgattcaagcttccttggcctaagcttactaaatacactgcacattgggaaca

SEQ ID NO: 352362 - DNA, 120 bp, Artificial Sequence
  ENSG00000139263_11 (sequence is synthesized)
acagagtcagctacattgctgattgtgccttccgggggctttccagtttaaagactttggatctgaagaacaatgaaatttcctggactattgaagacatgaatggtgctttctctgggc

SEQ ID NO: 352363 - DNA, 120 bp, Artificial Sequence
  ENSG00000139263_12 (sequence is synthesized)
ttgacaaactgaggcgactgatactccaaggaaatcggatccgttctattactaaaaaagccttcactggtttggatgcattggagcatctagacctgagtgacaacgcaatcatgtctt

SEQ ID NO: 352364 - DNA, 120 bp, Artificial Sequence
  ENSG00000139263_13 (sequence is synthesized)
tacaaggcaatgcattttcacaaatgaagaaactgcaacaattgcatttaaatacatcaagccttttgtgcgattgccagctaaaatggctcccacagtgggtggcggaaaacaactttc

SEQ ID NO: 352365 - DNA, 120 bp, Artificial Sequence
  ENSG00000139263_14 (sequence is synthesized)
agagctttgtaaatgccagttgtgcccatcctcagctgctaaaaggaagaagcatttttgctgttagcccagatggctttgtgtgtgatgattttcccaaaccccagatcacggttcagc

SEQ ID NO: 352366 - DNA, 120 bp, Artificial Sequence
  ENSG00000139263_15 (sequence is synthesized)
cagaaacacagtcggcaataaaaggttccaatttgagtttcatctgctcagctgccagcagcagtgattccccaatgacttttgcttggaaaaaagacaatgaactactgcatgatgctg

SEQ ID NO: 352367 - DNA, 120 bp, Artificial Sequence
  ENSG00000139263_16 (sequence is synthesized)
gtcatctccaatcactttggttcatcctactctgtcaaagccaagcttacagtaaatatgcttccctcattcaccaagacccccatggatctcaccatccgagctggggccatggcacgc

SEQ ID NO: 352368 - DNA, 120 bp, Artificial Sequence
  ENSG00000139263_17 (sequence is synthesized)
ttggagtgtgctgctgtggggcacccagccccccagatagcctggcagaaggatgggggcacagacttcccagctgcacgggagagacgcatgcatgtgatgcccgaggatgacgtgttc

SEQ ID NO: 352369 - DNA, 120 bp, Artificial Sequence
  ENSG00000139263_18 (sequence is synthesized)
tttatcgtggatgtgaagatagaggacattggggtatacagctgcacagctcagaacagtgcaggaagtatttcagcaaatgcaactctgactgtcctagaaacaccatcatttttgcgg

SEQ ID NO: 352370 - DNA, 120 bp, Artificial Sequence
  ENSG00000139263_19 (sequence is synthesized)
ccactgttggaccgaactgtaaccaagggagaaacagccgtcctacagtgcattgctggaggaagccctccccctaaactgaactggaccaaagatgatagcccattggtggtaaccgag

SEQ ID NO: 352371 - DNA, 120 bp, Artificial Sequence
  ENSG00000139263_20 (sequence is synthesized)
aggcacttttttgcagcaggcaatcagcttctgattattgtggactcagatgtcagtgatgctgggaaatacacatgtgagatgtctaacacccttggcactgagagaggaaacgtgcgc

SEQ ID NO: 352372 - DNA, 120 bp, Artificial Sequence
  ENSG00000139263_21 (sequence is synthesized)
ctcagtgtgatccccactccaacctgcgactcccctcagatgacagccccatcgttagacgatgacggatgggccactgtgggtgtcgtgatcatagccgtggtttgctgtgtggtgggc

SEQ ID NO: 352373 - DNA, 120 bp, Artificial Sequence
  ENSG00000139263_22 (sequence is synthesized)
acgtcactcgtgtgggtggtcatcatataccacacaaggcggaggaatgaagattgcagcattaccaacacagatgagaccaacttgccagcagatattcctagttatttgtcatctcag

SEQ ID NO: 352374 - DNA, 120 bp, Artificial Sequence
  ENSG00000139263_23 (sequence is synthesized)
ggaacgttagctgacaggcaggatgggtacgtgtcttcagaaagtggaagccaccaccagtttgtcacatcttcaggtgctggatttttcttaccacaacatgacagtagtgggacctgc

SEQ ID NO: 352375 - DNA, 120 bp, Artificial Sequence
  ENSG00000139263_24 (sequence is synthesized)
catattgacaatagcagtgaagctgatgtggaagctgccacagatctgttcctttgtccgtttttgggatccacaggccctatgtatttgaagggaaatgtgtatggctcagatcctttt

SEQ ID NO: 352376 - DNA, 120 bp, Artificial Sequence
  ENSG00000139263_25 (sequence is synthesized)
gaaacatatcatacaggttgcagtcctgacccaagaacagttttaatggaccactatgagcccagttacataaagaaaaaggagtgctacccatgttctcatccttcagaagaatcctgc

SEQ ID NO: 352377 - DNA, 120 bp, Artificial Sequence
  ENSG00000139263_26 (sequence is synthesized)
gaacggagcttcagtaatatatcgtggccttcacatgtgaggaagctacttaacactagttactctcacaatgaaggacctggaatgaaaaatctgtgtctaaacaagtcctctttagat

SEQ ID NO: 352378 - DNA, 120 bp, Artificial Sequence
  ENSG00000139263_27 (sequence is synthesized)
tttagtgcaaatccagagccagcgtcggttgcctcgagtaattctttcatgggtacctttggaaaagctctcaggagacctcacctagatgcctattcaagctttggacagccatcagat

SEQ ID NO: 352379 - DNA, 120 bp, Artificial Sequence
  ENSG00000139263_28 (sequence is synthesized)
tgtcagccaagagccttttatttgaaagctcattcttccccagacttggactctgggtcagaggaagatgggaaagaaaggacagattttcaggaagaaaatcacatttgtacctttaaa

SEQ ID NO: 352380 - DNA, 120 bp, Artificial Sequence
  ENSG00000139263_29 (sequence is synthesized)
cagactttagaaaactacaggactccaaattttcagtcttatgacttggacacatagactgaatgagaccaaaggaaaagcttaacatactacctcaagtgaacttttatttaaaagaga

SEQ ID NO: 352381 - DNA, 120 bp, Artificial Sequence
  ENSG00000139263_30 (sequence is synthesized)
gagaatcttatgttttttaaatggagttatgaattttaaaaggataaaaatgctttatttatacagatgaaccaaaattacaaaaagttatgaaaatttttatactgggaatgatgctca

SEQ ID NO: 352382 - DNA, 120 bp, Artificial Sequence
  ENSG00000139263_31 (sequence is synthesized)
aagttatgaaaatttttatactgggaatgatgctcatataagaatacctttttaaactattttttaactttgttttatgcaaaaaagtatcttacgtaaattaatgatataaatcatgat

SEQ ID NO: 352383 - DNA, 120 bp, Artificial Sequence
  ENSG00000139263_32 (sequence is synthesized)
atggaaaatgagttactaaagcattttaaataatacctgccttgtaccattttttaaatagaagttacttcattatattttgcacattatatttaataaaatgtgtcaatttgatgccaa

SEQ ID NO: 352384 - DNA, 120 bp, Artificial Sequence
  ENSG00000139263_33 (sequence is synthesized)
gtaactgaagtcaggcttttcatttgggaagccccctcaacagaattcggtcattctccaagttatggtggacgtacttctgttgttctccctctgcttgctttttcacattagcagacc

SEQ ID NO: 352385 - DNA, 120 bp, Artificial Sequence
  ENSG00000139263_34 (sequence is synthesized)
gccaagcttacagtaaatagtatgtgatctgacttttcctttagcatttaaagataccttttagaaatagaaagcacctgtttttctctcttaatcttaaccctgtcttttcttctcaca

SEQ ID NO: 352386 - DNA, 120 bp, Artificial Sequence
  ENSG00000139263_35 (sequence is synthesized)
gttccccacctgactcttcctttccctacctttcattccacaaaattaagattcttggttatttgtatctaaacctgcaattatgttgaagacgacaccgtactcagtgtggtgagtaac

SEQ ID NO: 352387 - DNA, 120 bp, Artificial Sequence
  ENSG00000139263_36 (sequence is synthesized)
cgcgctttaaattggttaacttgttttctagcctctaactctctcactgctaaatttcatgtattcttataacaacacactttacactttgctgttgttgccgaactggtcttcgagatt

SEQ ID NO: 352388 - DNA, 120 bp, Artificial Sequence
  ENSG00000139263_37 (sequence is synthesized)
caaagaggccagctttacaccatagaaatgtgtattttatcgtattctgtagactaggactttaattttagtatcgctcaatggttggcatggggatctgtgggttatgtattacgtagt

SEQ ID NO: 352389 - DNA, 120 bp, Artificial Sequence
  ENSG00000139263_38 (sequence is synthesized)
tcctagtggagaatgatcagagttgctttgtgaggagaaaccggagttgagaataagccattggagtatcctgttttaagtgtggtacctgcagtgtaaatcagagttcagagacatcaa

SEQ ID NO: 352390 - DNA, 120 bp, Artificial Sequence
  ENSG00000139263_39 (sequence is synthesized)
tcttcctttccctacctttcattccacaaaattaagattcttggttatttgtatctaaacctgcaattatgttgaagacgacaccgtactcagtgtgtgcttccctcattcaccaagacc

SEQ ID NO: 352391 - DNA, 120 bp, Artificial Sequence
  ENSG00000139263_40 (sequence is synthesized)
gaaaaagagttttctattattttgagagaggtggagataatgtggggaattatgagaaattttttacaaatgatatgccacctgggtggtgatactaggctttctgagcttatcactcta

SEQ ID NO: 352392 - DNA, 120 bp, Artificial Sequence
  ENSG00000139263_41 (sequence is synthesized)
cttcttttaaaattagggatctgaagaacaatgaaatttcctggactattgaagacatgaatggtgctttctctgggcttgacaaactgaggcgactgatactccaaggaaatcggatcc

SEQ ID NO: 352393 - DNA, 120 bp, Artificial Sequence
  ENSG00000139263_42 (sequence is synthesized)
aaaaaaacatctcttaaaacatttgtgggcttaaagtatttgaatctgccagtctccctaaactaattttgtccttggagcttgtatttttgagtttggcattttggttgccatctagtt

SEQ ID NO: 352394 - DNA, 120 bp, Artificial Sequence
  ENSG00000139263_43 (sequence is synthesized)
tgtggacagaatagaccaattatttctcctgctctcactggtgttcatagagatacttcataagcccagttagcactattagtgatttttagaaatgacttataattttatttttgtttt

SEQ ID NO: 352395 - DNA, 120 bp, Artificial Sequence
  ENSG00000139263_44 (sequence is synthesized)
cctcgtctgaggatccatactccaagttgtgtgtgagagagcaatgacagccttgaatgtcaaactggtaaaaaatggtttcttgaatgaggctgccatgacatccgactagttagtgta

SEQ ID NO: 352396 - DNA, 120 bp, Artificial Sequence
  ENSG00000139263_45 (sequence is synthesized)
aatgcctccaaaagcaaagtcagaggtgggattttacttgatgatgtgtttaatctataactaagcctcaggagctttctgggtagcactgtgtgtggcatctactccaagacaagggtt

SEQ ID NO: 352397 - DNA, 120 bp, Artificial Sequence
  ENSG00000139263_46 (sequence is synthesized)
tggggaggacttaggagctcagcttgtcagccatgtggaaaaagtggttttgggctcccacggcctttggggtggagttgtgtgctctgcatgattgtggtttggtatgtctggtggctt

SEQ ID NO: 352398 - DNA, 120 bp, Artificial Sequence
  ENSG00000139263_47 (sequence is synthesized)
ccaactgaacccgcagtcgaagggtggaaaacaacatcctacctagcaacaactgctagtctgacaagctggactacctttggccaagaaaaccagccttaaggtccaagtcggtggtgt

SEQ ID NO: 352399 - DNA, 120 bp, Artificial Sequence
  ENSG00000139266_0 (sequence is synthesized)
agccgccatttgccaccgccgagcgcacgggccgagccaagcctgatcccggagccggagggggactgggaccgagagaacggcgatggggggcggccccgccgcaggaggacccgggcg

SEQ ID NO: 352400 - DNA, 80 bp, Artificial Sequence
  ENSG00000139266_1 (sequence is synthesized)
caggaggacccgggcgcgtaaccccgggggcccggcccgctccagacccagacccgcggggtgcggcaccctgagccccc

SEQ ID NO: 352401 - DNA, 120 bp, Artificial Sequence
  ENSG00000139266_2 (sequence is synthesized)
cccgctcggccccgcaagcaccggagccccggcggtggcagcagtgaacggctgtcgcaggccccgaagaccccggcccggctcggctctctagcgcgcgcccccttcccggccttgtcc

SEQ ID NO: 352402 - DNA, 120 bp, Artificial Sequence
  ENSG00000139266_3 (sequence is synthesized)
tctcccctccccccgccgctagcgagccccccttgcacgctgccccccgcccccggtgtccggacgatgctcaagtctcggctccgcatgtttctgaacgagctgaagctgctggtgctg

SEQ ID NO: 352403 - DNA, 120 bp, Artificial Sequence
  ENSG00000139266_4 (sequence is synthesized)
cgcatgtttctgaacgagctgaagctgctggtgctgacaggcggggggcggccccgggccgagccgcaaccccgggggggccggggaggcggctgcggctgggcgcccttcgctggctgc

SEQ ID NO: 352404 - DNA, 120 bp, Artificial Sequence
  ENSG00000139266_5 (sequence is synthesized)
gacaaggagccgcgggccggacccctgccgccgcccgcgccgccgctgccgcccccgggcgcgctggacgccctgtcgctcagcagtagcctggacagcggactccgaacccctcagtgc

SEQ ID NO: 352405 - DNA, 120 bp, Artificial Sequence
  ENSG00000139266_6 (sequence is synthesized)
agtagcctggacagcggactccgaacccctcagtgccggatctgcttccagggcccggagcagggggagctcttaagcccctgccgctgcgacggctcagtgcgctgcacgcatcagccc

SEQ ID NO: 352406 - DNA, 120 bp, Artificial Sequence
  ENSG00000139266_7 (sequence is synthesized)
tgcctcatccgctggatcagcgagaggggctcctggagctgtgagctctgctacttcaagtaccaggtcctggcgatcagcaccaagaacccactgcagtggcaggccatctccctgacg

SEQ ID NO: 352407 - DNA, 120 bp, Artificial Sequence
  ENSG00000139266_8 (sequence is synthesized)
gtcatcgagaaggtccagattgctgccatagttctgggctcgctcttcctggttgccagcatctcctggctcatctggtcctcactcagcccttcagccaagtggcaacgacaggatctg

SEQ ID NO: 352408 - DNA, 120 bp, Artificial Sequence
  ENSG00000139266_9 (sequence is synthesized)
ctctttcagatctgctacggcatgtatggcttcatggatgtcgtctgcataggcctcatcatccatgaaggctcctctgtctaccgcatcttcaagcgctggcaggcagtgaaccagcag

SEQ ID NO: 352409 - DNA, 120 bp, Artificial Sequence
  ENSG00000139266_10 (sequence is synthesized)
tggaaggtcctaaattatgacaagaccaaggacataggaggagatgcagggggagggacggcagggaagtcaggccccaggaactcacggacgggccccacctctggggccacgagccgc

SEQ ID NO: 352410 - DNA, 120 bp, Artificial Sequence
  ENSG00000139266_11 (sequence is synthesized)
cccccagctgcccagcgcatgcggacgctcttgcctcagcgctgcggttatacaatcttgcacctccttgggcagctgcggccaccagatgcccgttccagctcccattctggccgagag

SEQ ID NO: 352411 - DNA, 120 bp, Artificial Sequence
  ENSG00000139266_12 (sequence is synthesized)
agctggacaaggtgtttggggcatgctgcccccgtcaccgaggatctgtgtgggtagcctcaagctggagacattgtctggcctcactgcccactgggtagagacacctggatgacattt

SEQ ID NO: 352412 - DNA, 120 bp, Artificial Sequence
  ENSG00000139266_13 (sequence is synthesized)
cagtacccgctggcagctcctcccactcatccagagacggccggtgggcaggcggggagagcagctttccttccctggagagaaccgtctttacctcagctcctagggcctccagccccc

SEQ ID NO: 352413 - DNA, 120 bp, Artificial Sequence
  ENSG00000139266_14 (sequence is synthesized)
cagctccaccacggtgacttggtgaagggggaccaatgccagaagaaaggggctgtagacccctattccccaccccatggccacagggcatctggcaataagactagtatacattgacct

SEQ ID NO: 352414 - DNA, 120 bp, Artificial Sequence
  ENSG00000139266_15 (sequence is synthesized)
cccgttccctgcatgagggcggggagttccccctgctccatcccccattgcatgggggaagggcataaagaatcatttatatgcacgtggagactcctttctcatctggggcttttctgg

SEQ ID NO: 352415 - DNA, 120 bp, Artificial Sequence
  ENSG00000139266_16 (sequence is synthesized)
agggttgggagatgtggggaggtttctctgcacaggttgcaaatcccaaatgcagcagtgggttctgagttgtaggtgtgactcccacttgctggtgaataattcatgttggctgctagg

SEQ ID NO: 352416 - DNA, 120 bp, Artificial Sequence
  ENSG00000139266_17 (sequence is synthesized)
tggcagcactccgaggtatctaaagggtagacctggacctgccacctatgagttgtgtgatatagaaaaaaatctcttagctctggttttcctgtctacttcatagggttggaataagga

SEQ ID NO: 352417 - DNA, 120 bp, Artificial Sequence
  ENSG00000139266_18 (sequence is synthesized)
taaatgagggacaggttggatgccgttgcagagaaaatcagcaatgacataaagagatttctagaatagttgatggtccatttatttcaaatagtagctggtgtaacaaattctaaaatg

SEQ ID NO: 352418 - DNA, 120 bp, Artificial Sequence
  ENSG00000139266_19 (sequence is synthesized)
tgtttttcatctggagttgcacagaatcatggaattttgtgttgagtgacataataggtatggaaatatgaggggaaatagacattgcaaatgtgaagcatggtggttatttgttaagaa

SEQ ID NO: 352419 - DNA, 120 bp, Artificial Sequence
  ENSG00000139266_20 (sequence is synthesized)
tgagaactcctctgactctaaatatttgggcctgtgggctggggaaggctggagccatctgccttgttctggagatcatctgggttctatcagtccttctcaagtactgtgctcacccag

SEQ ID NO: 352420 - DNA, 120 bp, Artificial Sequence
  ENSG00000139266_21 (sequence is synthesized)
aaaagcagtgtgaagtgaatttggactcatttggagtgagatggagggaatccccccactcagtgttatgagtctccaaccccagtttaagctatttccatggcagtttagggtcacagg

SEQ ID NO: 352421 - DNA, 120 bp, Artificial Sequence
  ENSG00000139266_22 (sequence is synthesized)
tttgatcccggtgtgcccagccagtggtattaatggatggcattatgtttggaggcagcagcatagaggactgttgtttatagagaaaagatttgggaaggactgtttacaatgtgggtc

SEQ ID NO: 352422 - DNA, 120 bp, Artificial Sequence
  ENSG00000139266_23 (sequence is synthesized)
agcctgaagcctgggcactttcttctgtgaccttggggttgtgtattatatgaatgatgctgtttttaagtaaaccattcaacagcaattaaataattccttcattcacggctaaagtca

SEQ ID NO: 352423 - DNA, 76 bp, Artificial Sequence
  ENSG00000139266_24 (sequence is synthesized)
tacaaaaattagccaggcgtggtggctcgtgcctgtaagctactcgcgaagctgaggcgggagaagccactgcact

SEQ ID NO: 352424 - DNA, 85 bp, Artificial Sequence
  ENSG00000139266_25 (sequence is synthesized)
gttgatgatgatagcaaatatgtagtgttttctgtgtcaagttttggtgtgtattaactcttaatcttcacaataatcttattag

SEQ ID NO: 352425 - DNA, 120 bp, Artificial Sequence
  ENSG00000139266_26 (sequence is synthesized)
ggtgtgtattaactcttaatcttcacaataatcttattagatactattattatccccttttacaaacgaggacactgatgcacaaagatttgaaaacttacccaaggttacttagccagt

SEQ ID NO: 352426 - DNA, 120 bp, Artificial Sequence
  ENSG00000139266_27 (sequence is synthesized)
aagtgatggagtcaagatttaggattcaaatctagatgttttggtttcagagcacttgcccaatcctgcctttctaaagtaagacaaatggtgtcagacaagtgccacattctagattta

SEQ ID NO: 352427 - DNA, 120 bp, Artificial Sequence
  ENSG00000139266_28 (sequence is synthesized)
atcaaggcacagagaagacagatgttgatcctgcctgaaggttttagggaaggttcctggagcaccctgctcttcagggccacccatcacctggccctccatccctttctgggactcttt

SEQ ID NO: 352428 - DNA, 120 bp, Artificial Sequence
  ENSG00000139266_29 (sequence is synthesized)
gcccttaatttattcacagagatatttattgggtgccacttatattccaggcactgttctaggcactgggacaatcaccactccccacccgccacaaaaaaaaagaaaaaagaaagaaaa

SEQ ID NO: 352429 - DNA, 66 bp, Artificial Sequence
  ENSG00000139266_30 (sequence is synthesized)
gtgcctgtaagctactcgcgaagctgaggcgggagaatccttgaacccgggaggcagaggttgcag

SEQ ID NO: 352430 - DNA, 120 bp, Artificial Sequence
  ENSG00000139269_0 (sequence is synthesized)
agtagccagacatgagctgtgagggtcaagcacagctatccatcagatgatctactttcagccttcctgagtcccagacaatagaagacaggtggctgtacccttggccaagggtaggtg

SEQ ID NO: 352431 - DNA, 120 bp, Artificial Sequence
  ENSG00000139269_1 (sequence is synthesized)
tggcagtggtgtctgctgtcactgtgccctcattggcccccagcaatcagactcaacagacggagcaactgccatccgaggctcctgaaccagggccattcaccaggagcatgcggctcc

SEQ ID NO: 352432 - DNA, 120 bp, Artificial Sequence
  ENSG00000139269_2 (sequence is synthesized)
ctgatgtccagctctggctggtgctgctgtgggcactggtgcgagcacaggggacagggtctgtgtgtccctcctgtgggggctccaaactggcaccccaagcagaacgagctctggtgc

SEQ ID NO: 352433 - DNA, 120 bp, Artificial Sequence
  ENSG00000139269_3 (sequence is synthesized)
tggagctagccaagcagcaaatcctggatgggttgcacctgaccagtcgtcccagaataactcatcctccaccccaggcagcgctgaccagagccctccggagactacagccagggagtg

SEQ ID NO: 352434 - DNA, 120 bp, Artificial Sequence
  ENSG00000139269_4 (sequence is synthesized)
tggctccagggaatggggaggaggtcatcagctttgctactgtcacagactccacttcagcctacagctccctgctcacttttcacctgtccactcctcggtcccaccacctgtaccatg

SEQ ID NO: 352435 - DNA, 120 bp, Artificial Sequence
  ENSG00000139269_5 (sequence is synthesized)
cccgcctgtggctgcacgtgctccccacccttcctggcactctttgcttgaggatcttccgatggggaccaaggaggaggcgccaagggtcccgcactctcctggctgagcaccacatca

SEQ ID NO: 352436 - DNA, 120 bp, Artificial Sequence
  ENSG00000139269_6 (sequence is synthesized)
ccaacctgggctggcataccttaactctgccctctagtggcttgaggggtgagaagtctggtgtcctgaaactgcaactagactgcagacccctagaaggcaacagcacagttactggac

SEQ ID NO: 352437 - DNA, 120 bp, Artificial Sequence
  ENSG00000139269_7 (sequence is synthesized)
aaccgaggcggctcttggacacagcaggacaccagcagcccttcctagagcttaagatccgagccaatgagcctggagcaggccgggccaggaggaggacccccacctgtgagcctgcga

SEQ ID NO: 352438 - DNA, 120 bp, Artificial Sequence
  ENSG00000139269_8 (sequence is synthesized)
cccccttatgttgcaggcgagaccattacgtagacttccaggaactgggatggcgggactggatactgcagcccgaggggtaccagctgaattactgcagtgggcagtgccctccccacc

SEQ ID NO: 352439 - DNA, 120 bp, Artificial Sequence
  ENSG00000139269_9 (sequence is synthesized)
tggctggcagcccaggcattgctgcctctttccattctgccgtcttcagcctcctcaaagccaacaatccttggcctgccagtacctcctgttgtgtccctactgcccgaaggcccctct

SEQ ID NO: 352440 - DNA, 120 bp, Artificial Sequence
  ENSG00000139269_10 (sequence is synthesized)
tggaggcctgtggctgcagctagcaagaggacctggggctttggagtgaagagaccaagatgaagtttcccaggcacagggcatctgtgactggaggcatcagattcctgatccacaccc

SEQ ID NO: 352441 - DNA, 120 bp, Artificial Sequence
  ENSG00000139269_11 (sequence is synthesized)
caacccaacaaccacctggcaatatgactcacttgacccctatgggacccaaatgggcactttcttgtctgagactctggcttattccaggttggctgatgtgttgggagatgggtaaag

SEQ ID NO: 352442 - DNA, 120 bp, Artificial Sequence
  ENSG00000139269_12 (sequence is synthesized)
cgtttcttctaaaggggtctacccagaaagcatgatttcctgccctaagtcctgtgagaagatgtcagggactagggagggagggagggaaggcagagaaaaattacttagcctctccca

SEQ ID NO: 352443 - DNA, 120 bp, Artificial Sequence
  ENSG00000139269_13 (sequence is synthesized)
agatgagaaagtcctcaagtgaggggaggaggaagcagatagatggtccagcaggcttgaagcagggtaagcaggctggcccagggtaagggctgttgaggtaccttaagggaaggtcaa

SEQ ID NO: 352444 - DNA, 120 bp, Artificial Sequence
  ENSG00000139269_14 (sequence is synthesized)
gagggagatgggcaaggcgctgagggaggatgcttaggggacccccagaaacaggagtcaggaaaatgaggcactaagcctaagaagttccctggtttttcccaggggacaggacccact

SEQ ID NO: 352445 - DNA, 90 bp, Artificial Sequence
  ENSG00000139269_15 (sequence is synthesized)
taagaagttccctggtttttcccaggggacaggacccactgggagacaagcatttatactttctttcttcttttttatttttttgagatc

SEQ ID NO: 352446 - DNA, 70 bp, Artificial Sequence
  ENSG00000139269_16 (sequence is synthesized)
ccgagcagctgggattacaggcgcccactaatttttgtattcttagtagaaacgaacccgacttggcctc

SEQ ID NO: 352447 - DNA, 90 bp, Artificial Sequence
  ENSG00000139269_17 (sequence is synthesized)
tatactttcttaataaaaaggagaaagaaaatcaacaaatgtgagtcataaagaagggttagggtgatggtccagagcaacagttcttca

SEQ ID NO: 352448 - DNA, 120 bp, Artificial Sequence
  ENSG00000139269_18 (sequence is synthesized)
aagaagggttagggtgatggtccagagcaacagttcttcaagtgtactctgtaggcttctgggaggtcccttttcaggggtgtccacaaagtcaaagctattttcataataatactaaca

SEQ ID NO: 352449 - DNA, 120 bp, Artificial Sequence
  ENSG00000139269_19 (sequence is synthesized)
tgttatttgccttttgaattctcattatcttaaaattgtattgtggagttttccagaggccgtgtgacatgtgattacatcatctttctgacatcattgttaatggaatgtgtgcttgta

SEQ ID NO: 352450 - DNA, 120 bp, Artificial Sequence
  ENSG00000139269_20 (sequence is synthesized)
tccacatcatgctccaggccaactggactctgggcggccagcacaggcagggtcagggggtgacttctgtgcctcgtggcactgccacctgggcctgagcaagagggctccattctccta

SEQ ID NO: 352451 - DNA, 120 bp, Artificial Sequence
  ENSG00000139269_21 (sequence is synthesized)
cccgcccaaaccctcatccctgtcctagccccagtgctagaaataaagagaccagaattttccttctggcctaagggccccagaggaatacccactggaactcacagctgcctcatggaa

SEQ ID NO: 352452 - DNA, 120 bp, Artificial Sequence
  ENSG00000139269_22 (sequence is synthesized)
ttcttgggaaaagtgactaagatgctaagagcgtatttatagctgagctctgacgtaagtgtcagtggggaggtagggccaggccaggcacagcagcaagcgggtgggaagagctggaaa

SEQ ID NO: 352453 - DNA, 120 bp, Artificial Sequence
  ENSG00000139269_23 (sequence is synthesized)
ctgggggcatctgacagtgagggtggggagaggtggggtcagtgactcctgcagccacttcttgtcacttcccctgactgcctactgataccaacagactccacttcagcctacagctcc

SEQ ID NO: 352454 - DNA, 120 bp, Artificial Sequence
  ENSG00000139278_0 (sequence is synthesized)
ctgttttctcaaagctgaagtcggctaggtttgcaaagctgtgggctgagcactcaggcaatcacactctcagaaactgcggcggctctggactgcagcctcccaaggctccatgccaga

SEQ ID NO: 352455 - DNA, 120 bp, Artificial Sequence
  ENSG00000139278_1 (sequence is synthesized)
caaagcatgcgtgtcacacttgctacaatagcctggatggtttcttttgtctccaattattcacacacagcaaatattttgccagatatcgaaaatgaagatttcatcaaagactgcgtt

SEQ ID NO: 352456 - DNA, 120 bp, Artificial Sequence
  ENSG00000139278_2 (sequence is synthesized)
cgaatccataacaagttccgatcagaggtgaaaccaacagccagtgatatgctatacatgacttgggacccagcactagcccaaattgcaaaagcatgggccagcaattgccagttttca

SEQ ID NO: 352457 - DNA, 120 bp, Artificial Sequence
  ENSG00000139278_3 (sequence is synthesized)
cataatacacggctgaagccaccccacaagctgcacccaaacttcacttcactgggagagaacatctggactgggtctgtgcccattttttctgtgtcttccgccatcacaaactggtat

SEQ ID NO: 352458 - DNA, 120 bp, Artificial Sequence
  ENSG00000139278_4 (sequence is synthesized)
gacgaaatccaggactatgacttcaagactcggatatgcaaaaaagtctgtggccactacactcaggttgtttgggcagatagttacaaagttggctgcgcagttcaattttgccctaaa

SEQ ID NO: 352459 - DNA, 120 bp, Artificial Sequence
  ENSG00000139278_5 (sequence is synthesized)
gtttctggctttgacgctctttccaatggagcacattttatatgcaactacggaccaggagggaattacccaacttggccatataagagaggagccacctgcagtgcctgccccaataat

SEQ ID NO: 352460 - DNA, 120 bp, Artificial Sequence
  ENSG00000139278_6 (sequence is synthesized)
gacaagtgtttggacaatctctgtgttaaccgacagcgagaccaagtcaaacgttactactctgttgtatatccaggctggcccatatatccacgtaacagatacacttctctctttctc

SEQ ID NO: 352461 - DNA, 120 bp, Artificial Sequence
  ENSG00000139278_7 (sequence is synthesized)
attgttaattcagtaattctaatactgtctgttataattaccattttggtacagcacaagtaccctaatttagttcttttggactaatacaattcaggaaagaaaaaacccaaaaaccaa

SEQ ID NO: 352462 - DNA, 120 bp, Artificial Sequence
  ENSG00000139278_8 (sequence is synthesized)
cctcattcacatatggctttttttttaaccaataacaattaggtgtacttctattttaaaacatttcagaaaaaaatatatgttatagcaatactcttactcaaaagaagaaatttccta

SEQ ID NO: 352463 - DNA, 120 bp, Artificial Sequence
  ENSG00000139278_9 (sequence is synthesized)
actctatcagataaactcatctttagtataaataagcattatttgcaggttgccacaggtggacttttagtaagtaacctaacccatgtttcagcttctaaatctgcaaaatgagcaagg

SEQ ID NO: 352464 - DNA, 120 bp, Artificial Sequence
  ENSG00000139278_10 (sequence is synthesized)
tacagtagcacatttttaggtgattcttagtaactccagtagccttcattagttaaaaacattattattttttgcatgctgcttcgactctaaatatctggttttccctgtctttttggt

SEQ ID NO: 352465 - DNA, 120 bp, Artificial Sequence
  ENSG00000139278_11 (sequence is synthesized)
ttactacttccccagattcagaacagaggagtaactaggggatctgattttagaggccttaattttctgttcatggactgttaaaagtaaaaccaaactttcaaaagggataaacctaaa

SEQ ID NO: 352466 - DNA, 120 bp, Artificial Sequence
  ENSG00000139278_12 (sequence is synthesized)
tatttacttgttatcattagagagggaacatcaaatgctgggacatcattactaaccaatagcatcagacactggatttaatggataatcacaatggtcgtaatgtatacaaagacttat

SEQ ID NO: 352467 - DNA, 120 bp, Artificial Sequence
  ENSG00000139278_13 (sequence is synthesized)
ataccactttctcgtataaatttttcaaaaaatacaataataatataatttataaagaacactcttctatgaacaaccaccaccaccaaaaaaaaaaaaagccctcagaaaatttctcac

SEQ ID NO: 352468 - DNA, 120 bp, Artificial Sequence
  ENSG00000139278_14 (sequence is synthesized)
aaataaggcaactaatgcctgatatctcaaaatcctttacaaaaggagatagttctagtcaaggagttttgggtatgttacttttttttcttctttttcttttcatctgcctccatctta

SEQ ID NO: 352469 - DNA, 120 bp, Artificial Sequence
  ENSG00000139278_15 (sequence is synthesized)
agtgcaatttcttcagctgtaagagctcccagtttcttattctttgctttcttaaccttttccttgatgctggccacatcaattttagtttcagtagaagctagacaaattaaaagcaca

SEQ ID NO: 352470 - DNA, 120 bp, Artificial Sequence
  ENSG00000139278_16 (sequence is synthesized)
acacatgtaatactttagattttaccaagtaaaacaaagaatatatgtttaacaaagaatatatgtttaaggcagttaacttcagagtattcttataattgaataattgaaaggtgatca

SEQ ID NO: 352471 - DNA, 120 bp, Artificial Sequence
  ENSG00000139278_17 (sequence is synthesized)
cagtataaaatataaaaacacttgcctaaagcagttagaaatttcttcagattaagataaaacaaatcataaaatactttatatattagtacaagtatacataaaaatggcataaatggc

SEQ ID NO: 352472 - DNA, 120 bp, Artificial Sequence
  ENSG00000139278_18 (sequence is synthesized)
ataattgaaccaattactggattcaactatattaagactatttccttaaatcctacttcagactaaattattttacctacattcttttccatattttggaacttctgagtcattattttc

SEQ ID NO: 352473 - DNA, 120 bp, Artificial Sequence
  ENSG00000139278_19 (sequence is synthesized)
catcttgcacattaaaataatttaaaattacatgtatcccttctcaataagtttaatcagctaaccctaagctagaggtcaaaatctacttcctctaatatcaaaacgaaaatttaaagt

SEQ ID NO: 352474 - DNA, 120 bp, Artificial Sequence
  ENSG00000139278_20 (sequence is synthesized)
ggtatatttaacaacattttggtaataaagacaataatttgagagtgtgtggaagtccccctaatagaagccaactatctaatcaatgccaaaagtgtgaacaaaatagagaaaggaagc

SEQ ID NO: 352475 - DNA, 120 bp, Artificial Sequence
  ENSG00000139278_21 (sequence is synthesized)
agtgaaaaagaatgcaactttttcttaccattcaaagtacaggatcacagcataaaagaatcataagataaaacatcaaactacccagcaacctgagaagcacagagtgttaaagcctcc

SEQ ID NO: 352476 - DNA, 120 bp, Artificial Sequence
  ENSG00000139278_22 (sequence is synthesized)
accgtgtggagaaactaaattagggtaactagctattgagtatattgagtaccttcaaagcactcaactgacaggttttacagactggaaattataatacttatgacatttctacctttt

SEQ ID NO: 352477 - DNA, 120 bp, Artificial Sequence
  ENSG00000139278_23 (sequence is synthesized)
caatatattaaaataataatgtattatatctgtttctgacccagtctatgtacaatattgctggtgagccctctcccttcagtgtgtcactgttcactttggagggttactttaggaaga

SEQ ID NO: 352478 - DNA, 120 bp, Artificial Sequence
  ENSG00000139278_24 (sequence is synthesized)
ggataagtgttaccacaggggaaaaaaatgcagaagaggatgcatcagaagaaatggcatgacaatgttttctcttagtgtcttttaaatactaggttagtgcgaaagtgatttctgcca

SEQ ID NO: 352479 - DNA, 120 bp, Artificial Sequence
  ENSG00000139278_25 (sequence is synthesized)
tttaaaaaccacaatcactttcgcactaatagctcctgaataagacctgtcagcatcctttagtctaaggtgatgagaaatccatgttaccgatatagaagccaaactctaagccaagat

SEQ ID NO: 352480 - DNA, 120 bp, Artificial Sequence
  ENSG00000139278_26 (sequence is synthesized)
cacataaagagaagaaaaagtacaacttctgataattcctctttgagaggcatgacagcagagctcagggatcttcttgcatttctacagaagatgcactggctgccctgggtttgtatc

SEQ ID NO: 352481 - DNA, 120 bp, Artificial Sequence
  ENSG00000139278_27 (sequence is synthesized)
tttcacaacaaagagtcttttccaagcacagaccagaggtcaggagaggactgtcaatccagtttgcactgaaataggcattagctgcctctaaattataaattatctcagccatccctt

SEQ ID NO: 352482 - DNA, 120 bp, Artificial Sequence
  ENSG00000139278_28 (sequence is synthesized)
gtccttaggattagtaattaatgaaatgctaagagaactgatgaaaagatacaactgtttcttaaaaagattcagacaaatttattatgggtttacttttcctaattaataaagactttt

SEQ ID NO: 352483 - DNA, 120 bp, Artificial Sequence
  ENSG00000139278_29 (sequence is synthesized)
acatcatagaaagcattaccttccttaggtttcacaattggtttttccttaggtggaataaatgctttgtttctttcctcttgtctcttactgatggcttctgcttgtttagcctacatt

SEQ ID NO: 352484 - DNA, 120 bp, Artificial Sequence
  ENSG00000139278_30 (sequence is synthesized)
aataaataaaaaatatatcagttaaatgtatttatagttaaataattcaagtatctatgaactttgctattcatgtgagccagacataaagtgccgtacctttattgcttccattttctg

SEQ ID NO: 352485 - DNA, 120 bp, Artificial Sequence
  ENSG00000139278_31 (sequence is synthesized)
ccgcttcttctgatttgccttcaaaaagtattcaccactagccaattctttatcgatctgttgaaaacggtatttacaattacatcagaaataatgtagaggagaagtcatgtcctaagc

SEQ ID NO: 352486 - DNA, 120 bp, Artificial Sequence
  ENSG00000139278_32 (sequence is synthesized)
aagtcacaatatccttagggtaaaaacaatggggtcaaactgatttattaataaaaatggtagtgacataaaggaaacagagtctaagctgaggggaatacatacacaaaagtgtggagg

SEQ ID NO: 352487 - DNA, 120 bp, Artificial Sequence
  ENSG00000139278_33 (sequence is synthesized)
taggaaagcacctccatggaatacaacccagagtagttcagggatatggcatggaaggtcactgattcagaaaagtgtgagaagaaactggagagagagttttggggaaaatttgaagaa

SEQ ID NO: 352488 - DNA, 120 bp, Artificial Sequence
  ENSG00000139278_34 (sequence is synthesized)
gcttcaatggcagacaaagtaggagggataagatttagaaatgactgtaggtttctgagaagactgtaaagaccaaagaataattttaatggagaggaatgaagaatagatgagagcctg

SEQ ID NO: 352489 - DNA, 120 bp, Artificial Sequence
  ENSG00000139278_35 (sequence is synthesized)
gaataaaggtagtggcatgcagaataaaagccagaactatcaggaattggtgactaattagcaaaagcaacagcttgttcattcaatatacagccaacatgtaaaatgtgtataactgac

SEQ ID NO: 352490 - DNA, 120 bp, Artificial Sequence
  ENSG00000139278_36 (sequence is synthesized)
ctgtctcccacttacatagcattattatatctaaggcactgttctaagctctttataattactcatttaatcctcactaacaattctttaagataggtattaccattactcccactttag

SEQ ID NO: 352491 - DNA, 120 bp, Artificial Sequence
  ENSG00000139278_37 (sequence is synthesized)
gtatggggaaacttaagtatggatgggataaataactcgcccagtcacataatgaattaagtgttaagaacaagtcaatcgagacatcactgtttcaagaagcttacacagctacagaag

SEQ ID NO: 352492 - DNA, 120 bp, Artificial Sequence
  ENSG00000139278_38 (sequence is synthesized)
aaagataagtcaattactacaagaaagggccataagaaataaggcaggtgttatggaagcatggtttaatgactgcatcactccactttccccctaactactatcaatttcctccatgat

SEQ ID NO: 352493 - DNA, 120 bp, Artificial Sequence
  ENSG00000139278_39 (sequence is synthesized)
ccaaaacttccattgttttttcactatgatcatcattttccccgtcaatcacaaatcttccctgaaagactccaaccatggttgtggaaaaaagagatgtagaaagcaatgagttcacat

SEQ ID NO: 352494 - DNA, 120 bp, Artificial Sequence
  ENSG00000139278_40 (sequence is synthesized)
gctgagcagaagtagaaagggaaggctttaggatatagccaaggaagggaataatgaagcaagaacccccaggagacaggtgaagatggaattcaaagaacacatagaagaggctgatgc

SEQ ID NO: 352495 - DNA, 120 bp, Artificial Sequence
  ENSG00000139278_41 (sequence is synthesized)
aggtggaagaaaacccatacgtgagagaagaggaaacagaaaggggttcttatctggtggtctcaaatatttcaataaaatgcaatgtcatatgctaaacatgggagggcactgagagaa

SEQ ID NO: 352496 - DNA, 120 bp, Artificial Sequence
  ENSG00000139278_42 (sequence is synthesized)
ttaagaggaaacatgaattttgaatgaaattaatccaaagataaaactttctctaacttaatttggtagccacgttgcaaggaagaagtcaagtttttagactgatccaagttttagagc

SEQ ID NO: 352497 - DNA, 120 bp, Artificial Sequence
  ENSG00000139278_43 (sequence is synthesized)
tttgctgagaaggtgggacagaagtaaaaaggggcatgaatcaaaacaatgatgtgcaagaacaaaatggaaactggtcatggtgggaaaggaaatgaagcagaagacacctgacaaaag

SEQ ID NO: 352498 - DNA, 120 bp, Artificial Sequence
  ENSG00000139278_44 (sequence is synthesized)
gaatcataacttagaaaaacggtgggtgttacaatttacaatttaagatttcagaacaagaacaaccatagagcacacagtcacaataatgttgccaaatcagagaaaagagtattgcag

SEQ ID NO: 352499 - DNA, 120 bp, Artificial Sequence
  ENSG00000139278_45 (sequence is synthesized)
actaaacgaacttttatccatggaacatttacagtggctacagggtcacaaacctcctggatgcagtttataatcaatgtgaacgccccactgcacacccccatgcactcagctcaaaat

SEQ ID NO: 352500 - DNA, 120 bp, Artificial Sequence
  ENSG00000139278_46 (sequence is synthesized)
atgcctatttatatttaccctcagtttcttatagctctgcacacacacacacaatatatatatatacacatatcccacctgaaatactttcaataaagtttctgaccaaatacattaaaa

SEQ ID NO: 352501 - DNA, 120 bp, Artificial Sequence
  ENSG00000139278_47 (sequence is synthesized)
atccagtttagctctgtctacccaactgttgttataagcaagtgccacagcacattttacttctctttggacacttcctgttttctggttttcagtggattttacttctctttttgttat

SEQ ID NO: 352502 - DNA, 120 bp, Artificial Sequence
  ENSG00000139278_48 (sequence is synthesized)
tctttttttttttttttttttgtctctaaatttactttttttgctgctgacaaagtactgagttgctcagacttgggacccagcactagcccaaattgcaaaagcatgggccagcaattg

SEQ ID NO: 352503 - DNA, 120 bp, Artificial Sequence
  ENSG00000139278_49 (sequence is synthesized)
ttaaccgacagcgagaccaagtcaaacgtacgtacatcaatcttaaattgtttcattaagagctatgtgaattctgtcagtgcattatgaggaacaatgtctaagaggatattctatgtt

SEQ ID NO: 352504 - DNA, 120 bp, Artificial Sequence
  ENSG00000139287_0 (sequence is synthesized)
gcattgctcttcagcaccagggttctggacagcgccccaagcaggcagctgatcgcacgccccttcctctcaatctccgccagcgctgctactgcccctctagtaccccctgctgcagag

SEQ ID NO: 352505 - DNA, 120 bp, Artificial Sequence
  ENSG00000139287_1 (sequence is synthesized)
aaagaatattacaccgggatccatgcagccagcaatgatgatgttttccagtaaatactgggcacggagagggttttccctggattcagcagtgcccgaagagcatcagctacttggcag

SEQ ID NO: 352506 - DNA, 120 bp, Artificial Sequence
  ENSG00000139287_2 (sequence is synthesized)
ctcaacactaaataaacctaactctggcaaaaatgacgacaaaggcaacaagggaagcagcaaacgtgaagctgctaccgaaagtggcaagacagcagttgttttctccttgaagaatga

SEQ ID NO: 352507 - DNA, 120 bp, Artificial Sequence
  ENSG00000139287_3 (sequence is synthesized)
agttggtggattggtaaaagcactgaggctctttcaggaaaaacgtgtcaacatggttcatattgaatccaggaaatctcggcgaagaagttctgaggttgaaatctttgtggactgtga

SEQ ID NO: 352508 - DNA, 120 bp, Artificial Sequence
  ENSG00000139287_4 (sequence is synthesized)
gtgtgggaaaacagaattcaatgagctcattcagttgctgaaatttcaaaccactattgtgacgctgaatcctccagagaacatttggacagaggaagaagagctagaggatgtgccctg

SEQ ID NO: 352509 - DNA, 120 bp, Artificial Sequence
  ENSG00000139287_5 (sequence is synthesized)
gttccctcggaagatctctgagttagacaaatgctctcacagagttctcatgtatggttctgagcttgatgctgaccacccaggatttaaggacaatgtctatcgacagagaagaaagta

SEQ ID NO: 352510 - DNA, 120 bp, Artificial Sequence
  ENSG00000139287_6 (sequence is synthesized)
ttttgtggatgtggccatgggttataaatatggtcagcccattcccagggtggagtatactgaagaagaaactaaaacttggggtgttgtattccgggagctctccaaactctatcccac

SEQ ID NO: 352511 - DNA, 120 bp, Artificial Sequence
  ENSG00000139287_7 (sequence is synthesized)
tcatgcttgccgagagtatttgaaaaacttccctctgctgactaaatactgtggctacagagaggacaatgtgcctcaactcgaagatgtctccatgtttctgaaagaaaggtctggctt

SEQ ID NO: 352512 - DNA, 120 bp, Artificial Sequence
  ENSG00000139287_8 (sequence is synthesized)
cacggtgaggccggtggctggatacctgagcccacgagactttctggcaggactggcctacagagtgttccactgtacccagtacatccggcatggctcagatcccctctacaccccaga

SEQ ID NO: 352513 - DNA, 120 bp, Artificial Sequence
  ENSG00000139287_9 (sequence is synthesized)
gtctggcgtctctgggagcatcagatgaagatgttcagaaactagccacgtgctatttcttcacaatcgagtttggcctttgcaagcaagaagggcaactgcgggcatatggagcaggac

SEQ ID NO: 352514 - DNA, 120 bp, Artificial Sequence
  ENSG00000139287_10 (sequence is synthesized)
tcctttcctccattggagaattaaagcacgccctttctgacaaggcatgtgtgaaagcctttgacccaaagacaacttgcttacaggaatgccttatcaccaccttccaggaagcctact

SEQ ID NO: 352515 - DNA, 120 bp, Artificial Sequence
  ENSG00000139287_11 (sequence is synthesized)
ttgtttcagaaagttttgaagaagccaaagaaaagatgagggactttgcaaagtcaattacccgtcccttctcagtatacttcaatccctacacacagagtattgaaattctgaaagaca

SEQ ID NO: 352516 - DNA, 120 bp, Artificial Sequence
  ENSG00000139287_12 (sequence is synthesized)
ccagaagtattgaaaatgtggtgcaggaccttcgcagcgacttgaatacagtgtgtgatgctttaaacaaaatgaaccaatatctggggatttgatgcctggaactatgttgttgccagc

SEQ ID NO: 352517 - DNA, 120 bp, Artificial Sequence
  ENSG00000139287_13 (sequence is synthesized)
atgatctttttggggcttagcagcagttcagtcaatgtcatataacgcaaataaccttctgtgtcatggcttggctaataagcatgcaattccatatatctataccatcttgtaactcac

SEQ ID NO: 352518 - DNA, 120 bp, Artificial Sequence
  ENSG00000139287_14 (sequence is synthesized)
tgtgttagtatataaagcaccataagaaatccaatggcagataaccactcattgtatgaaataacgtattatgtttaaacatcttaaaaagatttgacattcctgcttagtgtccttaac

SEQ ID NO: 352519 - DNA, 120 bp, Artificial Sequence
  ENSG00000139287_15 (sequence is synthesized)
caaactgcatctagttaaaatttgtaacaaatagccctcttatgagtctcatttatgcccttttctttttcagatctaagcctttcctctgtgttcattagataaaatgaaaaaaagcag

SEQ ID NO: 352520 - DNA, 120 bp, Artificial Sequence
  ENSG00000139287_16 (sequence is synthesized)
tgaagctgtttccattttcaatagtatcagtgttttcacgcattatttgagataaacccagaattgtaggaaacttcccatcacaataacaaaggttcaatattctatttcaaaaattgt

SEQ ID NO: 352521 - DNA, 120 bp, Artificial Sequence
  ENSG00000139287_17 (sequence is synthesized)
tgaggtaacacagcagttggaatgatttttaggttgagtatttacacaatgcaagaaaacacctttttacaaatggaattatgtaggttgcgttgaccttgtagaacctgagttatgaca

SEQ ID NO: 352522 - DNA, 120 bp, Artificial Sequence
  ENSG00000139287_18 (sequence is synthesized)
agcttcctgaagtattttggaagatagtacttccggaaaggacattaggaaagactaaacagtggacaatcaatcttgggactatgaattttatgctggaataaagtaaattatcatgtt

SEQ ID NO: 352523 - DNA, 120 bp, Artificial Sequence
  ENSG00000139287_19 (sequence is synthesized)
ggccatgggttataaatatggcccaagactgttagctgctattggcgactgggaatttcagctcttttctgtatcaagttctttgagctcaagctccttgtgtatgttgagcgtgcacat

SEQ ID NO: 352524 - DNA, 120 bp, Artificial Sequence
  ENSG00000139287_20 (sequence is synthesized)
attgatggatgttagatccattgttgttgctgttgatatttaatttcatgatagtttttgcagatgaaaatcacttctctagaatatgaagaggactttctgcaaggtgagaaaatagtg

SEQ ID NO: 352525 - DNA, 120 bp, Artificial Sequence
  ENSG00000139287_21 (sequence is synthesized)
ggaagccctatcctgtggtgcacaggacaaataaaaacaaataatttctaggagttaaatctttgttctccctgaggctccttaggtgcagtagtttattttcattacgtctcttgtaaa

SEQ ID NO: 352526 - DNA, 120 bp, Artificial Sequence
  ENSG00000139287_22 (sequence is synthesized)
ggcagcaccaatattaacaacgcgaacaaaacaaactaatgtttttgtttgctcccatctgaaagttccttaaggcccgtagactcatttacgaaaattcatgtgtgcaaaactcatttg

SEQ ID NO: 352527 - DNA, 120 bp, Artificial Sequence
  ENSG00000139287_23 (sequence is synthesized)
caaaagcaaataaaatatgtgatcgcaaatgctctttacctgactggcctaggggactagctgaaaatgcgtttatgcctttatgtttactctatggcgtggcttagcagtcgtggggct

SEQ ID NO: 352528 - DNA, 120 bp, Artificial Sequence
  ENSG00000139287_24 (sequence is synthesized)
cctaacctcctctacagatgagtccccgtcaagccacgtatgtcagatgacttgaatgttttgaaattcaggcatcatttagatggttgttaagttgctgtactgatttgtgagtttttg

SEQ ID NO: 352529 - DNA, 120 bp, Artificial Sequence
  ENSG00000139287_25 (sequence is synthesized)
tttgtaaaaaaatattattaaatcattgtgctctgtagccttggaaatgtttttgaagttcattcattacaatgttcagccaaggaaacatctctgtatttagttaagttcggacttttc

SEQ ID NO: 352530 - DNA, 120 bp, Artificial Sequence
  ENSG00000139287_26 (sequence is synthesized)
agaaaaaagaaacccttatatgtaaattgtacataggaataattggaggctaccagaaagtttgttacaatcctgaatctttgctttttgcatagtaattgaaatatatgaggcaagaca

SEQ ID NO: 352531 - DNA, 120 bp, Artificial Sequence
  ENSG00000139287_27 (sequence is synthesized)
aatacatacctgccagactctctgaggcataactattttttccctaacatttaaatctgtgttttgctttaggctgattgattgatttactcacttaacaaatattatttttttgttttg

SEQ ID NO: 352532 - DNA, 120 bp, Artificial Sequence
  ENSG00000139287_28 (sequence is synthesized)
tagctggaattataggcacacgccaccatgcccggttaattttagtatttttagtatttttgtatttttagttgatgcagaatatatatatatattctggcaatatttttccagtctcag

SEQ ID NO: 352533 - DNA, 120 bp, Artificial Sequence
  ENSG00000139287_29 (sequence is synthesized)
aggcataagccatcttcttgaatactcattgagtatttggctgtatattgtagacacctggatgcaggtgatactatttcatgaaggtggtaccaactaatatagtactaggtaacacta

SEQ ID NO: 352534 - DNA, 120 bp, Artificial Sequence
  ENSG00000139287_30 (sequence is synthesized)
tggttactggctaaaaatgagagtcatcaattactgattgaaatttctacacacctggtgtgacacctcagttgtgagacatgcaacaaatgcttgataagagttaattataaattttgt

SEQ ID NO: 352535 - DNA, 120 bp, Artificial Sequence
  ENSG00000139287_31 (sequence is synthesized)
gatgatgaattttttttttaacttttactttaggtttaggggtacatgtgaaggtttgttacataggtaaacacatgtcatggggttttgttgtacatattatttcatcacccaggtgtt

SEQ ID NO: 352536 - DNA, 120 bp, Artificial Sequence
  ENSG00000139287_32 (sequence is synthesized)
cacccaggtgttaagcctagtacccaatagtttactttcctgctcctcaccctcctctcaccctccaccctccaggagaccccagtgtctgtggtttccttctttgtgttcataagttct

SEQ ID NO: 352537 - DNA, 76 bp, Artificial Sequence
  ENSG00000139287_33 (sequence is synthesized)
tgagaacatgcagtatttagttttctgttcctgctgcaaaagacattatctcatttttttatggctgcatagtatt

SEQ ID NO: 352538 - DNA, 120 bp, Artificial Sequence
  ENSG00000139287_34 (sequence is synthesized)
ctgcatagtattccatcgtgtatatgtaccacatttttctcatgcaatctgtcactgatggacatgtaggttgattctgtgtctttgctattgtaaatagtgctgcagtgaacttccgca

SEQ ID NO: 352539 - DNA, 88 bp, Artificial Sequence
  ENSG00000139287_35 (sequence is synthesized)
gatgtcagtaacgggattgctaggttgaatggtaattctgcttttagctctttgatgaatggccatactgctttccacaatggttgaa

SEQ ID NO: 352540 - DNA, 71 bp, Artificial Sequence
  ENSG00000139287_36 (sequence is synthesized)
cttttctctgcaaccttgccagcatctgttatttttttgacttttaaataataaacattctgactggtgtg

SEQ ID NO: 352541 - DNA, 120 bp, Artificial Sequence
  ENSG00000139287_37 (sequence is synthesized)
acaggaatgccttatcaccaccttccaggaagcctactttgtttcagaaagttttgaagaagccaaagaaaagatgagatgggatttttctacttacccatatgcatgatggaatatggt

SEQ ID NO: 352542 - DNA, 120 bp, Artificial Sequence
  ENSG00000139287_38 (sequence is synthesized)
gactttataacttctgaggtacagattggcaatatggcccgtacaagcactgtttggggtgctgttgttacagaaacacaactgatgtctcctaggggtggtaagacaacaggataagtg

SEQ ID NO: 352543 - DNA, 120 bp, Artificial Sequence
  ENSG00000139287_39 (sequence is synthesized)
aattctttatctaacaggtaataactcaaatgcttcgtcaaaggctggttttccaggcctgttggagacagaccacttggataagaaacagtcaagagactttatcatctgtttctccca

SEQ ID NO: 352544 - DNA, 120 bp, Artificial Sequence
  ENSG00000139287_40 (sequence is synthesized)
ctaacttgcagtgtgactgtatttggaaataggacctgcaggaagtaattaagcctaagtgaggtcataagggtagggcgctaatccgataagtctggtgccttatgagaagaggaagag

SEQ ID NO: 352545 - DNA, 120 bp, Artificial Sequence
  ENSG00000139287_41 (sequence is synthesized)
acaccagagctgtctttctaccatgtgaggacacagcgaggcttgttggtgttgattacatggctctaggaactgtctgagaatcaaggaatttctacaactgttctcgaaaaagctgtc

SEQ ID NO: 352546 - DNA, 120 bp, Artificial Sequence
  ENSG00000139287_42 (sequence is synthesized)
atcttttgtagcctcaagactaatttagatggaaatcagatggaaagcctgatgctgcagtttgttgaattataaggtaggttgaatttacagttttaccatttgtttttcaaaaaattg

SEQ ID NO: 352547 - DNA, 120 bp, Artificial Sequence
  ENSG00000139287_43 (sequence is synthesized)
ttgacccaaagacaacttgcttacaggaatgccttatcaccaccttccaggaagcctactttgtttcagaaagttttgaagaagccaaagaaaagatgaggtacagattggcaatatggc

SEQ ID NO: 352548 - DNA, 120 bp, Artificial Sequence
  ENSG00000139287_44 (sequence is synthesized)
ccgtacaagcactgtttggggtgctgttgttacagaaacacaactgatgtctcctaggggtggtaagacaacaggataagtgcaaaagaaataaagcatcaggttgatgcttaagggact

SEQ ID NO: 352549 - DNA, 120 bp, Artificial Sequence
  ENSG00000139287_45 (sequence is synthesized)
gcttaagggacttcactggtaataccaatccagaagcagttgctgtatacaatgatggaatggcctactgaagactcatttatgacagcattgctcactctttgggtccatgctgctttt

SEQ ID NO: 352550 - DNA, 120 bp, Artificial Sequence
  ENSG00000139287_46 (sequence is synthesized)
atcatacagctaataggtggcagtctgactccaagtctgtgcttttcactgctgtgctatgccactaaagggatccttgtactaccagactggggctgagagccttaaggtttgtaaata

SEQ ID NO: 352551 - DNA, 120 bp, Artificial Sequence
  ENSG00000139287_47 (sequence is synthesized)
agccctgtggttctggccattttacttgtcctttagagagaaccactaatgcccttccaacctcataatgattgcagagaggaatatcaacaaggaaatctgccttcaacagaagagaga

SEQ ID NO: 352552 - DNA, 120 bp, Artificial Sequence
  ENSG00000139287_48 (sequence is synthesized)
tttgaggaaagagaagttaagaaagggagtaaatatggtctttttcctgatccaggagagaattaataaagagtctggcaccttttaaagtctgacaagaaacattctattctctctgaa

SEQ ID NO: 352553 - DNA, 120 bp, Artificial Sequence
  ENSG00000139287_49 (sequence is synthesized)
gaatacatacatacagtctattctctctgaagccttcatctgcataacaacaaccttggaccccacaacccctatttcaactcagacactcccttgtactgactctaggtctatagataa

SEQ ID NO: 352554 - DNA, 120 bp, Artificial Sequence
  ENSG00000139287_50 (sequence is synthesized)
actctttcaatcaattacaaatcagataatctttgaatccatctaagacttggaatccacccccacccccgcttccagttgtttcacttttcctgacagaactaatgtgtatcttatatg

SEQ ID NO: 352555 - DNA, 120 bp, Artificial Sequence
  ENSG00000139287_51 (sequence is synthesized)
gattatattactctaaaacctcagtctcaaactcgaaaagccattaaaaaagaaaacaataaataaaacttctatcaaggctcaagacttctctcatcattgaaggtcatggtaaatctt

SEQ ID NO: 352556 - DNA, 120 bp, Artificial Sequence
  ENSG00000139287_52 (sequence is synthesized)
ttactttccatctcccaacctttatactgatattccttgtttggcacttacttattgccatgtgtatttatagatttggttgtatgatgtagtctcctttagagtgtgaacttgttgaag

SEQ ID NO: 352557 - DNA, 120 bp, Artificial Sequence
  ENSG00000139289_0 (sequence is synthesized)
tttttttttttaagttattttctgtaatgcattttctgtgaatttattgtcttaaaaattggcaaatatggccattttgacatatttgccaaatatgagcatatggcaactatgctctta

SEQ ID NO: 352558 - DNA, 120 bp, Artificial Sequence
  ENSG00000139289_1 (sequence is synthesized)
atttgttaagtcaccaactgttggtggtaactgttgaaataacaagagcaaagttatcaccaatctacgggatccttacactactgatattttcaataatgcaccgtagtcagacattgt

SEQ ID NO: 352559 - DNA, 120 bp, Artificial Sequence
  ENSG00000139289_2 (sequence is synthesized)
agacttaacctctgagctgctcacaaaattactaaatcattctgaaatacgtaactgcaaattctgggctttaaagtctctagttaaatgggtgattttgaaaattggtggctgttcaga

SEQ ID NO: 352560 - DNA, 120 bp, Artificial Sequence
  ENSG00000139289_3 (sequence is synthesized)
cattttcaaatgagaatagaatgcatttgtttcagactgataaactgcagaaggttagataacaccaaacacatttgagtttctcctaagaaaatgacttgggcctccagattacatctc

SEQ ID NO: 352561 - DNA, 120 bp, Artificial Sequence
  ENSG00000139289_4 (sequence is synthesized)
attttttttttttttaccctatcaagtttgtttttccatatgaaatgtctttcccaactacacctgcccttggagactgtgaataacagacttaaaggaagtatcctttccagatgagct

SEQ ID NO: 352562 - DNA, 120 bp, Artificial Sequence
  ENSG00000139289_5 (sequence is synthesized)
gaagaatgtcatcctcttaaaagaatgaacagctggtcatgtagaaattctctggaatgctcacttgtcctacaaaggcaggggagcagaaaacatgtagtttttttgttattggtatac

SEQ ID NO: 352563 - DNA, 120 bp, Artificial Sequence
  ENSG00000139289_6 (sequence is synthesized)
ataattgtaaatcttcgagataattttactagaagtccacataattttaataattgcctttctcctgaaaagattgctaataaattaacaatgtgaaggctagaaagctggccaagcata

SEQ ID NO: 352564 - DNA, 120 bp, Artificial Sequence
  ENSG00000139289_7 (sequence is synthesized)
atccggtgggactcaggattgctggctggattgtcccgtttgatcagacattgtttcttagatgaatattcaggacgccctcgtgtataaaagttgtcctttgttctgactaccttggta

SEQ ID NO: 352565 - DNA, 120 bp, Artificial Sequence
  ENSG00000139289_8 (sequence is synthesized)
ttaagttcgaatttcttaccatgacacacaaaggattcgattcttgcttagctctctaagctcctctcactttctcttcccctcttgaattctttgctcttgccacacaactagcagatg

SEQ ID NO: 352566 - DNA, 120 bp, Artificial Sequence
  ENSG00000139289_9 (sequence is synthesized)
aactaatctatctgttccaacgtgggcacagtagcagccgtaactcttaccttggcccactctgacttgtccagccctggttgaattcttcgtatccccgtgagggtccgcacgtagttg

SEQ ID NO: 352567 - DNA, 120 bp, Artificial Sequence
  ENSG00000139289_10 (sequence is synthesized)
gggctgtttactaaacggatgaacttccctaccgggaggctaggtctcggttatgccttacttcccaggaagcggcttctataggcattgtttaaatgtaggagtaggagggagctgggg

SEQ ID NO: 352568 - DNA, 120 bp, Artificial Sequence
  ENSG00000139289_11 (sequence is synthesized)
gtattgcattccccaggtcacagataaatgagattccaaaaccaagatctggctaggccttggaaagagggacctgcgaggccgaccagacgtttggaactgcgccttgcagtgtgggat

SEQ ID NO: 352569 - DNA, 120 bp, Artificial Sequence
  ENSG00000139289_12 (sequence is synthesized)
ctcagcaccggatattaccccggtttgtagagagttgagttactgttttaagagacgttgcaaaccgtacgggtcaagaagaaagccgaagacgggttagcgcctgcggtcggggtcgag

SEQ ID NO: 352570 - DNA, 120 bp, Artificial Sequence
  ENSG00000139289_13 (sequence is synthesized)
aaaagcaggcgagatgcgacctgacgtgggtccgcctctctccacccgtggcaagcccgacagtcgcactattgctttaacaatcgccctctttccaagaagagctacttagtgaccgtg

SEQ ID NO: 352571 - DNA, 120 bp, Artificial Sequence
  ENSG00000139289_14 (sequence is synthesized)
agcgaatatgcgtgggaagacacgatgtcctctcggcctctgtgcgctcagttgtttacctaggcgtccgggggaggcacactcgcgggactcgcgggactcggccccggcctcccagct

SEQ ID NO: 352572 - DNA, 120 bp, Artificial Sequence
  ENSG00000139289_15 (sequence is synthesized)
cgcccaggacacgacgctggttctgcgggctctcggagcccagcgcgaatcccccgggctaattcccaagaaccgagaggcagcactgcctggaggctgcccccgcctccgcgcccccgt

SEQ ID NO: 352573 - DNA, 120 bp, Artificial Sequence
  ENSG00000139289_16 (sequence is synthesized)
cctcactttctgaggctgttagcagagagtcccgcgggccggggagaagcgggacgcgggggatggcctcgcagcgccctgtgagcgtcggcagtagtcaggcagccagggctccttggg

SEQ ID NO: 352574 - DNA, 120 bp, Artificial Sequence
  ENSG00000139289_17 (sequence is synthesized)
cgatcgccctgggtagaggagaggagtttccggggctcgggtccgggtcgccttccaggggaacgagcgcggaagcaagtgggcggcgagaggcggagcaagagacgctggagggcgtgg

SEQ ID NO: 352575 - DNA, 120 bp, Artificial Sequence
  ENSG00000139289_18 (sequence is synthesized)
acgcagcgggctttggaaaggccccaagttaatgaggcgtgcgccggctgccgagcgcctcttggagctgggctttcccccgcggtgcgggcgccaggagccgccttttccgctgggtgt

SEQ ID NO: 352576 - DNA, 120 bp, Artificial Sequence
  ENSG00000139289_19 (sequence is synthesized)
cactcgggggtggggaagatggcccattcaaaagcgccgcgagggggcccggccagtgcccttcagtgagcgctcgcaagaggacggcagaggcccggcagctcggagctccgggacctt

SEQ ID NO: 352577 - DNA, 120 bp, Artificial Sequence
  ENSG00000139289_20 (sequence is synthesized)
gtggcgcatcaggacgcggctgtccctctgccgggacccagagccgccgccgccgctctgcctcctgcgtgttagcctcctctgcgcgctccgggcaggcggccgtgggagccgctgggg

SEQ ID NO: 352578 - DNA, 120 bp, Artificial Sequence
  ENSG00000139289_21 (sequence is synthesized)
cgaggacggcgcgaggctgctgctgctgcccccggcccgcgcggctggaaacggagaggccgagccaagcggcggcccctcttatgctgggaggatgctggagagtagcggctgcaaagc

SEQ ID NO: 352579 - DNA, 120 bp, Artificial Sequence
  ENSG00000139289_22 (sequence is synthesized)
gctgaaggagggcgtgctggagaagcgcagcgacgggttgttgcagctctggaagaaaaagtgttgcatcctcaccgaggaagggctgctgcttatcccgcccaagcagctgcaacacca

SEQ ID NO: 352580 - DNA, 120 bp, Artificial Sequence
  ENSG00000139289_23 (sequence is synthesized)
gcagcagcagcagcaacagcagcagcagcagcagcaacaacagcccgggcaggggccggccgagccgtcccaacccagtggccccgctgtcgccagcctcgagccgccggtcaagctcaa

SEQ ID NO: 352581 - DNA, 120 bp, Artificial Sequence
  ENSG00000139289_24 (sequence is synthesized)
ggaactgcacttctccaacatgaagaccgtggactgtgtggagcgcaagggcaagtacatgtacttcactgtggtgatggcagagggcaaggagatcgactttcggtgcccgcaagacca

SEQ ID NO: 352582 - DNA, 120 bp, Artificial Sequence
  ENSG00000139289_25 (sequence is synthesized)
gggctggaacgccgagatcacgctgcagatggtgcagtacaagaatcgtcaggccatcctggcggtcaaatccacgcggcagaagcagcagcacctggtccagcagcagcccccctcgca

SEQ ID NO: 352583 - DNA, 120 bp, Artificial Sequence
  ENSG00000139289_26 (sequence is synthesized)
gccgcagccgcagccgcagctccagccccaaccccagcctcagcctcagccgcaaccccagccccaatcacaaccccagcctcagccccaacccaagcctcagccccagcagctccaccc

SEQ ID NO: 352584 - DNA, 120 bp, Artificial Sequence
  ENSG00000139289_27 (sequence is synthesized)
gtatccgcatccacatccacatccacactctcatcctcactcgcacccacaccctcacccgcacccgcatccgcaccaaataccgcacccacacccacagccgcactcgcagccgcacgg

SEQ ID NO: 352585 - DNA, 120 bp, Artificial Sequence
  ENSG00000139289_28 (sequence is synthesized)
gcaccggcttctccgcagcacctccaactctgcctgaaaggggcagctcccgggcaagacaaggttttgaggacttgaggaagtgggacgagcacatttctattgtcttcacttggatca

SEQ ID NO: 352586 - DNA, 120 bp, Artificial Sequence
  ENSG00000139289_29 (sequence is synthesized)
aaagcaaaacagtctctccgccccgcaccagatcaagtagtttggacatcaccctactgaaaacttgcgattcttcttagttttctgcatacttttcatcacgatgcaggaaacgatttc

SEQ ID NO: 352587 - DNA, 120 bp, Artificial Sequence
  ENSG00000139289_30 (sequence is synthesized)
gagtcaagaagacttttatttatgaacctttgaaaggatcgtcttgtatggtgaattttctaggagcgatgatgtactgtaattttattttaatgtattttgatttatgattatttatta

SEQ ID NO: 352588 - DNA, 120 bp, Artificial Sequence
  ENSG00000139289_31 (sequence is synthesized)
gtttttttttaaatgcttgttctaagacatttctgaatgtagaccattttccaaaaaggaaactttattttcaaaaacctaatccgtagtaattcctaatcttggagaataaaaaagggc

SEQ ID NO: 352589 - DNA, 120 bp, Artificial Sequence
  ENSG00000139289_32 (sequence is synthesized)
ggtggaggggaaaacattaagaatttattcattatttctcgagtactttcagaaagtctgacactttcattgttgtgccagctggttgaaattaaaactctgatattactttttttgagg

SEQ ID NO: 352590 - DNA, 120 bp, Artificial Sequence
  ENSG00000139289_33 (sequence is synthesized)
tagtttgtctagaagtttaaaaagctaaaagttaaaaatggtgtaattatgaaaatctaacactcaagatagtttctaaaaggaaatcagtagttaaggatacctgatttcaaaatattt

SEQ ID NO: 352591 - DNA, 120 bp, Artificial Sequence
  ENSG00000139289_34 (sequence is synthesized)
aaagcataacctaactgatggtaggatgattgtatcttgaatatgtggtagggccacatctattgtaggaaaaccttgcttttatcatctgtgtgtaaagggcttaataaggagaagagg

SEQ ID NO: 352592 - DNA, 120 bp, Artificial Sequence
  ENSG00000139289_35 (sequence is synthesized)
ccttttgactgatttgtgagtataaatgcatttgctgtttcatttcaaaaatgttgtggaggaaaagagtacatttaacttgtataagagaatatttgtactcctgtccaggctgcagga

SEQ ID NO: 352593 - DNA, 120 bp, Artificial Sequence
  ENSG00000139289_36 (sequence is synthesized)
cctttcttcgagagctttgcacacttgacttgaaccacattttctgatccctttactttgttttagaagcacactgaaaaatctcgttgtttaaagtacaatttgtaaatatttcaaagg

SEQ ID NO: 352594 - DNA, 120 bp, Artificial Sequence
  ENSG00000139289_37 (sequence is synthesized)
tctaggagtcataacttttgttttcatactgaaaatgatgttgatcagagaaaccaactgttttgcttttcattgctctgtgagaaatttgaggattctgttttgctgttaggtaagcta

SEQ ID NO: 352595 - DNA, 120 bp, Artificial Sequence
  ENSG00000139289_38 (sequence is synthesized)
aactcagaaattgaaaaggaaaagactggataaacacaggattttcagtaagaaaacaaccccagtcttgtcttagaagccacttgttgaggagtctgttgggggaaaaaagaggatatg

SEQ ID NO: 352596 - DNA, 120 bp, Artificial Sequence
  ENSG00000139289_39 (sequence is synthesized)
cttttaaaggtagaacaaaccttcttctgtgttaaatcaaaaggatgttcaaaatccaccaggacagatgctacttgggtttaaatggagccatagatgatacaaagtcctcttggggct

SEQ ID NO: 352597 - DNA, 120 bp, Artificial Sequence
  ENSG00000139289_40 (sequence is synthesized)
gaaaatcacttcctatttgcatggctttactaactggtttctgttttccattatctttttcacagaaagtcttggtcagtatttttccagcatttaaattgaaacggtcagtattagacc

SEQ ID NO: 352598 - DNA, 120 bp, Artificial Sequence
  ENSG00000139289_41 (sequence is synthesized)
actgctaggttatgtagtcaagaaataaaaatagaattacatgctacagatgtctttattctccttccatctagaaaggagttccaaggtcaaattactttttagtgcaatagttaaatg

SEQ ID NO: 352599 - DNA, 120 bp, Artificial Sequence
  ENSG00000139289_42 (sequence is synthesized)
acattttgagatcataactcatatccaaaaagttgcagggaaaattaaaatagctttcccctattaagctaatggcaaacaaaacttaagtggacccccacttccagtggttgtttaggt

SEQ ID NO: 352600 - DNA, 120 bp, Artificial Sequence
  ENSG00000139289_43 (sequence is synthesized)
tgcagttgtgaaaatatgctgccaacatttaaaaacttgtttcatatgtatatatgtatacacatatatgaatatgtatgtatatatacatatatgagaacatgtgtgtacacatatatg

SEQ ID NO: 352601 - DNA, 120 bp, Artificial Sequence
  ENSG00000139289_44 (sequence is synthesized)
aatatgtatatatgtgtatgtatgtatatatgtatatgaaatgagagccacatctaaagatttcttaaatcaagtttggttcagcttccttagaactgtggctgtactttttgaggagta

SEQ ID NO: 352602 - DNA, 120 bp, Artificial Sequence
  ENSG00000139289_45 (sequence is synthesized)
cctcatagtactatatttttaatgcatgcaaatcataatagctccaaatgaaccacagttttttcccaatggaggatttttttttaattcttgtactaaaaaaaaaaaatccataccaaa

SEQ ID NO: 352603 - DNA, 120 bp, Artificial Sequence
  ENSG00000139289_46 (sequence is synthesized)
tatttttacaaattaagattgatgtaggttttaaaaaaggcatttgtatgttgttagcttacatatggggctaggtaatttcattgcttaaaaagatgcgcctaggctccctcttggtgg

SEQ ID NO: 352604 - DNA, 120 bp, Artificial Sequence
  ENSG00000139289_47 (sequence is synthesized)
taaaaagatgcgcctaggctccctcttggtggctggatttctttttcttcgcccgtggtggccatggttcttaatagggccaccggaatcatggtttctttttttttttttttttttgag

SEQ ID NO: 352605 - DNA, 120 bp, Artificial Sequence
  ENSG00000139289_48 (sequence is synthesized)
cccggccccagaataatggtttcttgactttctgtagcccttgttccttagtctgctgtgatatttatgttgacctttatcattttctattctgaacccctcttagcatttaatgtgaaa

SEQ ID NO: 352606 - DNA, 120 bp, Artificial Sequence
  ENSG00000139289_49 (sequence is synthesized)
tctaagaaattagaagtagaatggcttttattgttttgacacctttgaaattattattaataatttttccagagcaaaaaagcaaacacgctcaataagactaaacaaaacaaaatataa

SEQ ID NO: 352607 - DNA, 120 bp, Artificial Sequence
  ENSG00000139289_50 (sequence is synthesized)
atgtacatcatttaatgtcccagtggctctattctacctgtaagaaaatgatacaaaaccacctaagatattttgaagcctgacaaatcagcttcatggaaaaaggtaaaaaatgcattt

SEQ ID NO: 352608 - DNA, 120 bp, Artificial Sequence
  ENSG00000139289_51 (sequence is synthesized)
ttcaaccgaaagggcagatccaatagaagacccgctccttaaataaacataaaatgtaaaaagttggaaaattaagagtaatgttccatctggaaactgaacttttgtccttgaacttgt

SEQ ID NO: 352609 - DNA, 120 bp, Artificial Sequence
  ENSG00000139289_52 (sequence is synthesized)
gttggcaccaagcctcatacacagtgagctcaataactgttgggacaaaggaaggaaggacaaaatgtgtaacttcccagcatctgggagatgctgtctcttgcctcactgagtgttcct

SEQ ID NO: 352610 - DNA, 120 bp, Artificial Sequence
  ENSG00000139289_53 (sequence is synthesized)
tttctttgctctcatgtcattccctgagaacaatgaattctgggacaggctaaacatcatgatgaagtttcttaaacagactttcttagtggaaatccatttagatctgggtgtgctcta

SEQ ID NO: 352611 - DNA, 120 bp, Artificial Sequence
  ENSG00000139289_54 (sequence is synthesized)
tggggagtgctgacgtcaaagagcaaatgtctataaggggcccttttaaaatgaacattttcctcattgagcaagctgggattctctaatgtagaaatcaagccatctttataatttcac

SEQ ID NO: 352612 - DNA, 120 bp, Artificial Sequence
  ENSG00000139289_55 (sequence is synthesized)
ttcagatgtttatgtttttgttttttttgtctccaatgatggtaaaaataaaaactacgcattacttaaaggagtttccctcacatgtaaacactgttaggaagtctggattaagttgaa

SEQ ID NO: 352613 - DNA, 120 bp, Artificial Sequence
  ENSG00000139289_56 (sequence is synthesized)
agtcctgttttaactttttttctctcatataccaaacactctgtatttctcttaaagaagccctttaagagaaagccctaattttatatctgacagtaaagtttgctgcaagtgtatgag

SEQ ID NO: 352614 - DNA, 120 bp, Artificial Sequence
  ENSG00000139289_57 (sequence is synthesized)
ttcaaacacatcccttgttttctgtccctaggggaaaagtcatgtagttttagcttggctccagtgttaatattatattcagtagcagccttagaagagtggtctaagacttgaacctgg

SEQ ID NO: 352615 - DNA, 120 bp, Artificial Sequence
  ENSG00000139289_58 (sequence is synthesized)
agcaattttatagcacagaatcctacgaagataggactgtgaacatttgttttctttttcgtgtgtgtcaaactaactggtttttgctttaccaataaaatgtcctcggcagagtaaatt

SEQ ID NO: 352616 - DNA, 120 bp, Artificial Sequence
  ENSG00000139289_59 (sequence is synthesized)
ttaaacgtgaaaattatagatcttgatattgaatccatcagtgattcaagagatacacctatttgcctaaaacaacctaagatgtattggttatggaatcatgtgttggataggttctta

SEQ ID NO: 352617 - DNA, 120 bp, Artificial Sequence
  ENSG00000139289_60 (sequence is synthesized)
agacctgtttcctcaaatcttgacacagttttcaagggtggcttattgacttgcacggttgggcagataatccagatttacctaagattgggtaaaaaagtcatctgtgactttgctggc

SEQ ID NO: 352618 - DNA, 120 bp, Artificial Sequence
  ENSG00000139289_61 (sequence is synthesized)
agggcatttgctaagtggagtacaggatctaaaagggttttcttagaaagggcaatattgtccaatgaagtaagcagaaggactctgggttagaagcatctgcacaaaaactggtgagac

SEQ ID NO: 352619 - DNA, 120 bp, Artificial Sequence
  ENSG00000139289_62 (sequence is synthesized)
ctactctccactgctctgcagctggatggctgatggcaggctgagcagtggggaagcaggttttaacaacagggagtccttccaggtcactgtatattgagaagaaacataaaactattg

SEQ ID NO: 352620 - DNA, 120 bp, Artificial Sequence
  ENSG00000139289_63 (sequence is synthesized)
tctgttacattccgaggtcagccttcttcttaacgttttataatatgcaaatgccagcttctggaaagcaagtatcatcatgtaccaaatgctttatacaccatcacattcatgaatttt

SEQ ID NO: 352621 - DNA, 120 bp, Artificial Sequence
  ENSG00000139289_64 (sequence is synthesized)
ttagcatggtcagaacttgtgtaaatatgtctcttagatgattttggggagatgtgatttatttttcatattttcaaaatgcatttcatttcaaataaagttatctattgagacaaccga

SEQ ID NO: 352622 - DNA, 120 bp, Artificial Sequence
  ENSG00000139291_0 (sequence is synthesized)
atgcccacagcgggcgaggcgctagaggcgggggcgccgggaggcgcgggctttgctcctggggtctcggccttggccggctggacctgaccctagggcggcttgcgcagctgtcgggac

SEQ ID NO: 352623 - DNA, 120 bp, Artificial Sequence
  ENSG00000139291_1 (sequence is synthesized)
gtgactgcgttcagccgcgtcgggcgtgcttcccagacttgcccaagttcgggtgccctagctgcccctttgcagccgctggcctacccggcccgcgggtgagaaggttgcgacgggagg

SEQ ID NO: 352624 - DNA, 120 bp, Artificial Sequence
  ENSG00000139291_2 (sequence is synthesized)
tgggtggaactcgccagcgccgggaccgcggattggctgcctcggctttctcttttccccgtgggctccggcgtgaggcgctgaagcggccggcagccggcgaccggccctcaccgtccg

SEQ ID NO: 352625 - DNA, 120 bp, Artificial Sequence
  ENSG00000139291_3 (sequence is synthesized)
ccgggttgcgctctgcttttgcggtgaggcgttgaccacgcccatatgaattggagctctccgccagtaggagtttccggaaggagtttgaatttttgtgatttttatgcttgtttggtc

SEQ ID NO: 352626 - DNA, 120 bp, Artificial Sequence
  ENSG00000139291_4 (sequence is synthesized)
ggtggaatatgttgggatttatgtttgcctctgaacaagtgtcttgctcacatcgtaaatgactttctctccgaaacgctaaatattctttcccgcaggagctcatatccttattttcca

SEQ ID NO: 352627 - DNA, 120 bp, Artificial Sequence
  ENSG00000139291_5 (sequence is synthesized)
tgacagatcttaacgacaatatatgcaaaagatatataaagatgataactaatatagttatactgagcctgatcatttgcatttcgttagctttctggattatatcaatgactgcaagca

SEQ ID NO: 352628 - DNA, 120 bp, Artificial Sequence
  ENSG00000139291_6 (sequence is synthesized)
cctattatggtaacttacgacctatttctccgtggcgttggctgttttctgttgttgttcctgttctgatcgtctctaatggccttaaaaagaaaagtctagatcacagtggggctctag

SEQ ID NO: 352629 - DNA, 120 bp, Artificial Sequence
  ENSG00000139291_7 (sequence is synthesized)
gagggctagtcgttggatttatcctaaccattgcaaatttcagcttttttacctctttgctgatgtttttcttgtcttcttcgaaactcactaaatggaagggagaagtgaagaagcgtc

SEQ ID NO: 352630 - DNA, 120 bp, Artificial Sequence
  ENSG00000139291_8 (sequence is synthesized)
tagattcagaatataaggaaggtgggcaaaggaattgggttcaggtgttctgtaatggagctgtacccacagaactggccctgctgtacatgatagaaaatggccccggggaaatcccag

SEQ ID NO: 352631 - DNA, 120 bp, Artificial Sequence
  ENSG00000139291_9 (sequence is synthesized)
tcgatttttccaagcagtactccgcttcctggatgtgtttgtctctcttggctgcactggcctgctctgctggagacacatgggcttcagaagttggcccagttctgagtaaaagttctc

SEQ ID NO: 352632 - DNA, 120 bp, Artificial Sequence
  ENSG00000139291_10 (sequence is synthesized)
caagactgataacaacctgggagaaagttccagttggtaccaatggaggagttacagtggtgggccttgtctccagtctccttggtggtacctttgtgggcattgcatacttcctcacac

SEQ ID NO: 352633 - DNA, 120 bp, Artificial Sequence
  ENSG00000139291_11 (sequence is synthesized)
agctgatttttgtgaatgatttagacatttctgccccgcagtggccaattattgcatttggtggtttagctggattactaggatcaattgtggactcatacttaggggctacaatgcagt

SEQ ID NO: 352634 - DNA, 120 bp, Artificial Sequence
  ENSG00000139291_12 (sequence is synthesized)
atactgggttggatgaaagcactggcatggtggtcaacagcccaacaaataaggcaaggcacatagcagggaaacccattcttgataacaacgcagtgaatctgttttcttctgttctta

SEQ ID NO: 352635 - DNA, 120 bp, Artificial Sequence
  ENSG00000139291_13 (sequence is synthesized)
ttgccctcttgctcccaactgctgcttggggtttttggcccagggggtgaactttatttcatttccacaggttgaaactggtgagtccagctaaatttgcaattccaactttcatcctaa

SEQ ID NO: 352636 - DNA, 120 bp, Artificial Sequence
  ENSG00000139291_14 (sequence is synthesized)
gaataataactgtaatggcaaagcggaaatgccagttcctcctgtattccattgagatgggatttcacattttcctctcatcaactcccctgtaatagctagcgtctttctagtgaaaga

SEQ ID NO: 352637 - DNA, 120 bp, Artificial Sequence
  ENSG00000139291_15 (sequence is synthesized)
gaagaattcctagaacttatgcatttttttcctgctgaatggaagtcttgagcaatgaagctatattgtccctacatattactatatattgaactgaaagttcttacataatcaatgtca

SEQ ID NO: 352638 - DNA, 120 bp, Artificial Sequence
  ENSG00000139291_16 (sequence is synthesized)
agttttgtcttattttgttttgtttgtttaaaccagtgtaggaaataaaagtgatgatatttaaaatagttctcagttgaagcagagaaatgccactgtgctagttgcccaaatgttgta

SEQ ID NO: 352639 - DNA, 120 bp, Artificial Sequence
  ENSG00000139291_17 (sequence is synthesized)
tctattttaaatagtttaagctgatgtgtatgggagcctaaacaagtgtagtatcctgaacttctcccattaattgctattcacaattgggaaaagtgtggagattggttcctagtgagt

SEQ ID NO: 352640 - DNA, 120 bp, Artificial Sequence
  ENSG00000139291_18 (sequence is synthesized)
tttgtggcctactccacatttgttcttccttcctcagggttagtgatgaaaaaaagtaaatatctttttcatatgtccattagaatgtatgaaaaaaatcattttaactaaaagcaaaag

SEQ ID NO: 352641 - DNA, 120 bp, Artificial Sequence
  ENSG00000139291_19 (sequence is synthesized)
aattttatcttatatctaaaaaatatataacttactatatgtttcagttgctctctgaacaaaaattatcttcaatttaatatgtggaatgtgttttctagctttctttgaattatgtat

SEQ ID NO: 352642 - DNA, 120 bp, Artificial Sequence
  ENSG00000139291_20 (sequence is synthesized)
ggcaacctggtttagcactggcatcctgaacagttaagagtcactgggaaattattgtatttctttataaatttactgtcatatcaattgctggaaaatgctatgatttttctattatta

SEQ ID NO: 352643 - DNA, 120 bp, Artificial Sequence
  ENSG00000139291_21 (sequence is synthesized)
ccttctaagttgtattctctcttacactgtagcctcaactaaggcaattctgctatgtttgttcttcactatgatttactgtgtgccaaaggagttttgacagggtacagagtattttac

SEQ ID NO: 352644 - DNA, 120 bp, Artificial Sequence
  ENSG00000139291_22 (sequence is synthesized)
taaaagtatttttaaatgtttctcatgtgatttctgtaccttcttcctcctgccccttttgcttttttaaagaaactggggaaggatttatgaatacaccaccaccagagtggataatgc

SEQ ID NO: 352645 - DNA, 120 bp, Artificial Sequence
  ENSG00000139291_23 (sequence is synthesized)
ctactatggtgatgatctagaactgacttacttcaggacagaagaaaaaacaatcacacccttaacctttaagccagttagatcagggggttgcaacaattgggttaaactttgggtata

SEQ ID NO: 352646 - DNA, 120 bp, Artificial Sequence
  ENSG00000139291_24 (sequence is synthesized)
cattggaagcaccagggcatgtttgctttttttgtttatgtgtttgttttttgagacagagtctcacactgtggcccaggctggactccagcacagtggcatgatctcagctccgcctcc

SEQ ID NO: 352647 - DNA, 68 bp, Artificial Sequence
  ENSG00000139291_25 (sequence is synthesized)
ctggactccagcacagtggcatgatctcagctccgcctcctgggttcactcacgcccggctaattttt

SEQ ID NO: 352648 - DNA, 120 bp, Artificial Sequence
  ENSG00000139291_26 (sequence is synthesized)
gtgatctgcccatctcagcctcccaaagatctattacaagatgtgagccactgtgcccagccaccagggcatgtttttaaaaaagtactgatgtctgggtttcacactgcaaaattctga

SEQ ID NO: 352649 - DNA, 120 bp, Artificial Sequence
  ENSG00000139291_27 (sequence is synthesized)
gggtttcacactgcaaaattctgatttatctgatctaaggtacagcctggatattgagactttttaaagctctgactgtacattgaatcatcatgtaaggagtttttaaaacattgttgc

SEQ ID NO: 352650 - DNA, 120 bp, Artificial Sequence
  ENSG00000139291_28 (sequence is synthesized)
cagggcccctttctagaccaagttagtcagaatgttggacaatgaggcccatgcatgggtatttttacaaagctctctgggagattctaatgcttaaccaaattgagaagcactgaataa

SEQ ID NO: 352651 - DNA, 61 bp, Artificial Sequence
  ENSG00000139291_29 (sequence is synthesized)
gagattctaatgcttaaccaaattgagaagcactgaataagaatatcctgggccgggcgca

SEQ ID NO: 352652 - DNA, 120 bp, Artificial Sequence
  ENSG00000139291_30 (sequence is synthesized)
tacataagaatgtcctaaagcactgtatctaagcacttgaaaagaatgggacttttcggttttagggagataactattagcaaccacacaatatgttatctttatggatgaataacttct

SEQ ID NO: 352653 - DNA, 120 bp, Artificial Sequence
  ENSG00000139291_31 (sequence is synthesized)
ggtaatgacacagtgtcttacagctacatcatttataaaatcatgtgtcagttttcacacagcctgcacatcgttctgacatgccctttttttccctggagatttatcctcatgacatac

SEQ ID NO: 352654 - DNA, 120 bp, Artificial Sequence
  ENSG00000139291_32 (sequence is synthesized)
aaggggacaaaaatatttattgggactgtctttgaatttagtagaatcactgtatcattaacagtttggggaagtactgctttgcagtcctttatttgaaaacttaggtctagctgtgtt

SEQ ID NO: 352655 - DNA, 120 bp, Artificial Sequence
  ENSG00000139291_33 (sequence is synthesized)
ttgcatcaaaatttttgagctattcaaaaactaataggatctgtgtaaaatatttcactcaaaactactaaaaaaaagtctgggatggcagctcattatcaaatatactcctatttttgt

SEQ ID NO: 352656 - DNA, 120 bp, Artificial Sequence
  ENSG00000139291_34 (sequence is synthesized)
ggtgatttatgaacatccccactaagtataactaaagatcataaagagcctcagatcaagtttggtcaggttttgtcaccaagctttgtaaataaactggttttcatagctttttggaga

SEQ ID NO: 352657 - DNA, 120 bp, Artificial Sequence
  ENSG00000139291_35 (sequence is synthesized)
tgagaattgaggataagaaattgtgtctctgtcctttttttttttttttgttaagtcttacatgtattttactgtaacatcttttgaattggatatttaactaattcaacatatttttcc

SEQ ID NO: 352658 - DNA, 120 bp, Artificial Sequence
  ENSG00000139291_36 (sequence is synthesized)
tctttgcagaatgggcagttcatgttaaaatcacttttcatggaaagagctctatgtaacagcataataaaactgcctacctagcagcataaaggtgtactgtttcttatcatactgttc

SEQ ID NO: 352659 - DNA, 120 bp, Artificial Sequence
  ENSG00000139291_37 (sequence is synthesized)
catgatagaagagagcagatatatgtggcttggggcagctcctgaagaagacttgcaggagtagcatgttgaaaactcattaaatggagccaccaagagaccaaagaattgatacagcag

SEQ ID NO: 352660 - DNA, 120 bp, Artificial Sequence
  ENSG00000139291_38 (sequence is synthesized)
gtcattctattattagcttttctcattacttgagttatctgtttctcacatatatctttcctgtttctagctgctgtacacataggatgctgcctgcagaaatagcagccccgccccaat

SEQ ID NO: 352661 - DNA, 120 bp, Artificial Sequence
  ENSG00000139291_39 (sequence is synthesized)
tagataaaggactagtatagagaaaaagcatgtgaaatgatgttttaaactttgccgcatacctgtgatatgaacagctgctgcctgttaggcacagtgggtatactagggcccaatcat

SEQ ID NO: 352662 - DNA, 120 bp, Artificial Sequence
  ENSG00000139291_40 (sequence is synthesized)
ctgatcttcctgaagttttatgtaatgttcccagtgctatcacaatgagaatgatctatactagccaccagatctcaggtgaattgtggtgtgctttaaaaatgaaaacacagccggacg

SEQ ID NO: 352663 - DNA, 120 bp, Artificial Sequence
  ENSG00000139291_41 (sequence is synthesized)
caagactccatcttgaaaaaaaaaggaaaacacaattatgtggcttaattatttaatctcctttatggagtatctgtttttataactccaagtggttcttgatattttaaaaatacttaa

SEQ ID NO: 352664 - DNA, 120 bp, Artificial Sequence
  ENSG00000139291_42 (sequence is synthesized)
gcattcaatatgtattcattgaattaagttgtttgactctaatcattgtttcttttaagaatgactggaaggtgataatcagcaccatattcctggaggaaaatacaaaatgaaaaacca

SEQ ID NO: 352665 - DNA, 120 bp, Artificial Sequence
  ENSG00000139291_43 (sequence is synthesized)
tgaaagcactggcatggtggtcaacagcccaacaaataagaatgggcagttcatgttaaaatcacttttcatggaaagagctctatgtaacagcataataaaactgcctacctagcagca

SEQ ID NO: 352666 - DNA, 120 bp, Artificial Sequence
  ENSG00000139291_44 (sequence is synthesized)
cagggggtgaactttatttcatttccacaggttgaaactgaatgggcagttcatgttaaaatcacttttcatggaaagagctctatgtaacagcataataaaactgcctacctagcagca

SEQ ID NO: 352667 - DNA, 120 bp, Artificial Sequence
  ENSG00000139291_45 (sequence is synthesized)
ttgcaacttattggtatgttaaagaaatagggaaaagaaagaaaaaaatgttaacaatgaaaacaaatccaaagacacagggtgttgagggactagaaatgatagggcaaagtctctttc

SEQ ID NO: 352668 - DNA, 120 bp, Artificial Sequence
  ENSG00000139291_46 (sequence is synthesized)
acaattttggttttcttattcttttgtattaaattaattgaaagagaattagtcccgcgcagcaatgattagaagccatgtggggaagatacaatagtgcagagaacagacgtttttgtg

SEQ ID NO: 352669 - DNA, 120 bp, Artificial Sequence
  ENSG00000139291_47 (sequence is synthesized)
tgagccattacctaatcccagaaaagcaagacgtttgggatcagatcattttaatacaattccttccattcattttcctattccatttgaggagtaattgtacaaatctgactatacaca

SEQ ID NO: 352670 - DNA, 120 bp, Artificial Sequence
  ENSG00000139291_48 (sequence is synthesized)
tatacacacgacctactttcttactgtggtatcatgcttgctattcttgcccctgagttttttgcttcattaagatatatggtcgatgtctgggcacggtggctcacatctataatccca

SEQ ID NO: 352671 - DNA, 90 bp, Artificial Sequence
  ENSG00000139291_49 (sequence is synthesized)
tgttttctgttgttgttcctgttctgatcgtctctaatggccttaaaaagaaaagtctagatcacagtggggctctaggcggtctcgagc

SEQ ID NO: 352672 - DNA, 120 bp, Artificial Sequence
  ENSG00000139292_0 (sequence is synthesized)
gctccacaccgctcaggccgcgagcagcagcaaggcgcaccgccactgtcgccgctgcagccagggctgctccgaaggccggcgtggcggcaaccggcacctctgtccccgccgcgcttc

SEQ ID NO: 352673 - DNA, 120 bp, Artificial Sequence
  ENSG00000139292_1 (sequence is synthesized)
tcctcgccgcccacgccgtggggtcaggaacgcggcgtctggcgctgcagacgcccgctgagttgcagaagcccacggagcggcgcccggcgcgccacggcccgtagcagtccggtgctg

SEQ ID NO: 352674 - DNA, 120 bp, Artificial Sequence
  ENSG00000139292_2 (sequence is synthesized)
ctctccgcccgcgtccggctcgtggccccctacttcgggcaccatggacacctcccggctcggtgtgctcctgtccttgcctgtgctgctgcagctggcgaccgggggcagctctcccag

SEQ ID NO: 352675 - DNA, 120 bp, Artificial Sequence
  ENSG00000139292_3 (sequence is synthesized)
gtctggtgtgttgctgaggggctgccccacacactgtcattgcgagcccgacggcaggatgttgctcagggtggactgctccgacctggggctctcggagctgccttccaacctcagcgt

SEQ ID NO: 352676 - DNA, 120 bp, Artificial Sequence
  ENSG00000139292_4 (sequence is synthesized)
cttcacctcctacctagacctcagtatgaacaacatcagtcagctgctcccgaatcccctgcccagtctccgcttcctggaggagttacgtcttgcgggaaacgctctgacatacattcc

SEQ ID NO: 352677 - DNA, 120 bp, Artificial Sequence
  ENSG00000139292_5 (sequence is synthesized)
caagggagcattcactggcctttacagtcttaaagttcttatgctgcagaataatcagctaagacacgtacccacagaagctctgcagaatttgcgaagccttcaatccctgcgtctgga

SEQ ID NO: 352678 - DNA, 120 bp, Artificial Sequence
  ENSG00000139292_6 (sequence is synthesized)
tgctaaccacatcagctatgtgcccccaagctgtttcagtggcctgcattccctgaggcacctgtggctggatgacaatgcgttaacagaaatccccgtccaggcttttagaagtttatc

SEQ ID NO: 352679 - DNA, 120 bp, Artificial Sequence
  ENSG00000139292_7 (sequence is synthesized)
ggcattgcaagccatgaccttggccctgaacaaaatacaccacataccagactatgcctttggaaacctctccagcttggtagttctacatctccataacaatagaatccactccctggg

SEQ ID NO: 352680 - DNA, 120 bp, Artificial Sequence
  ENSG00000139292_8 (sequence is synthesized)
aaagaaatgctttgatgggctccacagcctagagactttagatttaaattacaataaccttgatgaattccccactgcaattaggacactctccaaccttaaagaactaggatttcatag

SEQ ID NO: 352681 - DNA, 120 bp, Artificial Sequence
  ENSG00000139292_9 (sequence is synthesized)
caacaatatcaggtcgatacctgagaaagcatttgtaggcaacccttctcttattacaatacatttctatgacaatcccatccagtttgttgggagatctgcttttcaacatttacctga

SEQ ID NO: 352682 - DNA, 120 bp, Artificial Sequence
  ENSG00000139292_10 (sequence is synthesized)
actaagaacactgactctgaatggtgcctcacaaataactgaatttcctgatttaactggaactgcaaacctggagagtctgactttaactggagcacagatctcatctcttcctcaaac

SEQ ID NO: 352683 - DNA, 120 bp, Artificial Sequence
  ENSG00000139292_11 (sequence is synthesized)
cgtctgcaatcagttacctaatctccaagtgctagatctgtcttacaacctattagaagatttacccagtttttcagtctgccaaaagcttcagaaaattgacctaagacataatgaaat

SEQ ID NO: 352684 - DNA, 120 bp, Artificial Sequence
  ENSG00000139292_12 (sequence is synthesized)
ctacgaaattaaagttgacactttccagcagttgcttagcctccgatcgctgaatttggcttggaacaaaattgctattattcaccccaatgcattttccactttgccatccctaataaa

SEQ ID NO: 352685 - DNA, 120 bp, Artificial Sequence
  ENSG00000139292_13 (sequence is synthesized)
gctggacctatcgtccaacctcctgtcgtcttttcctataactgggttacatggtttaactcacttaaaattaacaggaaatcatgccttacagagcttgatatcatctgaaaactttcc

SEQ ID NO: 352686 - DNA, 120 bp, Artificial Sequence
  ENSG00000139292_14 (sequence is synthesized)
agaactcaaggttatagaaatgccttatgcttaccagtgctgtgcatttggagtgtgtgagaatgcctataagatttctaatcaatggaataaaggtgacaacagcagtatggacgacct

SEQ ID NO: 352687 - DNA, 120 bp, Artificial Sequence
  ENSG00000139292_15 (sequence is synthesized)
tcataagaaagatgctggaatgtttcaggctcaagatgaacgtgaccttgaagatttcctgcttgactttgaggaagacctgaaagcccttcattcagtgcagtgttcaccttccccagg

SEQ ID NO: 352688 - DNA, 120 bp, Artificial Sequence
  ENSG00000139292_16 (sequence is synthesized)
ccccttcaaaccctgtgaacacctgcttgatggctggctgatcagaattggagtgtggaccatagcagttctggcacttacttgtaatgctttggtgacttcaacagttttcagatcccc

SEQ ID NO: 352689 - DNA, 120 bp, Artificial Sequence
  ENSG00000139292_17 (sequence is synthesized)
tctgtacatttcccccattaaactgttaattggggtcatcgcagcagtgaacatgctcacgggagtctccagtgccgtgctggctggtgtggatgcgttcacttttggcagctttgcacg

SEQ ID NO: 352690 - DNA, 120 bp, Artificial Sequence
  ENSG00000139292_18 (sequence is synthesized)
acatggtgcctggtgggagaatggggttggttgccatgtcattggttttttgtccatttttgcttcagaatcatctgttttcctgcttactctggcagccctggagcgtgggttctctgt

SEQ ID NO: 352691 - DNA, 120 bp, Artificial Sequence
  ENSG00000139292_19 (sequence is synthesized)
cgaaagctccattttctagcctgaaagtaatcattttgctctgtgccctgctggccttgaccatggccgcagttcccctgctgggtggcagcaagtatggcgcctcccctctctgcctgc

SEQ ID NO: 352692 - DNA, 120 bp, Artificial Sequence
  ENSG00000139292_20 (sequence is synthesized)
ctttgccttttggggagcccagcaccatgggctacatggtcgctctcatcttgctcaattccctttgcttcctcatgatgaccattgcctacaccaagctctactgcaatttggacaagg

SEQ ID NO: 352693 - DNA, 120 bp, Artificial Sequence
  ENSG00000139292_21 (sequence is synthesized)
gagacctggagaatatttgggactgctctatggtaaaacacattgccctgttgctcttcaccaactgcatcctaaactgccctgtggctttcttgtccttctcctctttaataaacctta

SEQ ID NO: 352694 - DNA, 120 bp, Artificial Sequence
  ENSG00000139292_22 (sequence is synthesized)
catttatcagtcctgaagtaattaagtttatccttctggtggtagtcccacttcctgcatgtctcaatccccttctctacatcttgttcaatcctcactttaaggaggatctggtgagcc

SEQ ID NO: 352695 - DNA, 120 bp, Artificial Sequence
  ENSG00000139292_23 (sequence is synthesized)
tgagaaagcaaacctacgtctggacaagatcaaaacacccaagcttgatgtcaattaactctgatgatgtcgaaaaacagtcctgtgactcaactcaagccttggtaacctttaccagct

SEQ ID NO: 352696 - DNA, 120 bp, Artificial Sequence
  ENSG00000139292_24 (sequence is synthesized)
ccagcatcacttatgacctgcctcccagttccgtgccatcaccagcttatccagtgactgagagctgccatctttcctctgtggcatttgtcccatgtctctaattaatatgtgaaggaa

SEQ ID NO: 352697 - DNA, 120 bp, Artificial Sequence
  ENSG00000139292_25 (sequence is synthesized)
aatgttttcaaaggttgagaacctgaaaatgtgagattgagtatatcagagcagtaattaataagaagagctgaggtgaaactcggtttaaaaaccaaaaaagaatctctcagttagtaa

SEQ ID NO: 352698 - DNA, 120 bp, Artificial Sequence
  ENSG00000139292_26 (sequence is synthesized)
gaaaaggctgaaaacctcttgatacttgagagtgaatataagtctaaatgctgctttgtataatttgttcagctaagggatagatcgatcacactatttaagtgagcccagatcaaaaaa

SEQ ID NO: 352699 - DNA, 120 bp, Artificial Sequence
  ENSG00000139292_27 (sequence is synthesized)
gcagattgaaattttctttagaaaagattctccatgatttgaattgcattctctttaaactcaccaatgtaatcattttgggaggagggagaacccacttgctttccaaatgggtttatt

SEQ ID NO: 352700 - DNA, 120 bp, Artificial Sequence
  ENSG00000139292_28 (sequence is synthesized)
taaacccacaaactcaagaggttgttgggggaattaggaaaataagggttttcaatgacctacattgctaggtagaggctgtgatccatgggatttcattctaatgaccatgtgaagatg

SEQ ID NO: 352701 - DNA, 120 bp, Artificial Sequence
  ENSG00000139292_29 (sequence is synthesized)
tttgagtcctcctttgcctttcctcagaaagaatccttctaaggcacaaatcccttagatggataatgtaaggtattgttaactcactcatattgagatcatttttagagataccaggtt

SEQ ID NO: 352702 - DNA, 120 bp, Artificial Sequence
  ENSG00000139292_30 (sequence is synthesized)
ttatgtatcagcactagatggttccaccctcatgggataaaactgcttacaagtattttgaaagaaaaactgaccaaaattcttaaattgttactaaggcaatcatgcacaggtgacgta

SEQ ID NO: 352703 - DNA, 120 bp, Artificial Sequence
  ENSG00000139292_31 (sequence is synthesized)
tgtcttatctgatttgtttttaactccttggtgcccaaagctcagaagggaattccactgccagcaatgaacatacctggaaaagaaagtaagcaatctgggattttttttctgggttag

SEQ ID NO: 352704 - DNA, 120 bp, Artificial Sequence
  ENSG00000139292_32 (sequence is synthesized)
taaagaatttttgcaataagttttatcagttgattcaaactgatgtgcatcttaatgatcaaatgtgcacattacataaattaagtccactgatacaacttcttacacatgtatctctag

SEQ ID NO: 352705 - DNA, 120 bp, Artificial Sequence
  ENSG00000139292_33 (sequence is synthesized)
tagctctggcaaacccaatatctgacaccactttggactcaagagactcagtaacgtattatcctgtttatttagcttggttttagctgtgttctctctggataacccacttgatgttag

SEQ ID NO: 352706 - DNA, 120 bp, Artificial Sequence
  ENSG00000139292_34 (sequence is synthesized)
gaacattacttctctgcttattccatattaatactgtgttaggtattttaagaagcaagttattaaataagaaaagtcaaagtattaattcttaccttctattatcctatattagcttca

SEQ ID NO: 352707 - DNA, 120 bp, Artificial Sequence
  ENSG00000139292_35 (sequence is synthesized)
atacatccaaaccaaatggctgttaggtagatttatttttatataagcatgtttattttgatcagatgttttaacttggatttgaaaaaatacatttatgagatgttttataagatgtgt

SEQ ID NO: 352708 - DNA, 120 bp, Artificial Sequence
  ENSG00000139292_36 (sequence is synthesized)
aaatatagaactgtatttattactatagtaaaggttcagtaacattaaggaccatgataatgataataaaccttgtacagtggcatattctttgatttatattgtgtttctctgcccatt

SEQ ID NO: 352709 - DNA, 120 bp, Artificial Sequence
  ENSG00000139292_37 (sequence is synthesized)
tgcccattttctttaaattcattaactgtatatatgtaaatatatagtacttgtaaatagattccaaatttgcttttctattgggtaaaaaataaatttgtaataaaatgtgtgactatg

SEQ ID NO: 352710 - DNA, 120 bp, Artificial Sequence
  ENSG00000139292_38 (sequence is synthesized)
caggcaacttccatttaggggtgaaatggcagacatgatttcaataatctctttaaaagaggagaaagtttttcctttcaggtctgcaggaggtcaagcctcctttgccctctttggtcc

SEQ ID NO: 352711 - DNA, 120 bp, Artificial Sequence
  ENSG00000139292_39 (sequence is synthesized)
aggctctctgacatgatcctggtaacaaatggctttgcagagcagaacaaaataacataatggatcaaccacccaatatggatgccaaaatcaaaaactgagatctcagatccacacaat

SEQ ID NO: 352712 - DNA, 120 bp, Artificial Sequence
  ENSG00000139292_40 (sequence is synthesized)
agcctccgatcgctgtgagtatcacctcccagtgcgttccccagcacagagcattttctttctctttggggccttcccctaatgttttcttttcattgtgtactattgtggtgggacttt

SEQ ID NO: 352713 - DNA, 120 bp, Artificial Sequence
  ENSG00000139292_41 (sequence is synthesized)
tataaatgaattcattaagtaaactatttaaatcaattaaagaagtataacagttacatttcagtaaacatttgaatctactggttaatccaataatggctgtgactacctgctccatgt

SEQ ID NO: 352714 - DNA, 120 bp, Artificial Sequence
  ENSG00000139292_42 (sequence is synthesized)
cagggctatgaaaatgttcagagtctgcctttgggagatataacatcttggagggaaaaggagagcaaagcatgtttctttatgatttatttgtaacagattttccctttttgcaccttc

SEQ ID NO: 352715 - DNA, 120 bp, Artificial Sequence
  ENSG00000139304_0 (sequence is synthesized)
gctcattaattgtgtacttgccagaaggatctgtctttaaatcattaatgcaggcaacatttctctctagagccatcaatgtgattctactggctgaaaaatgtaataaagatggatttt

SEQ ID NO: 352716 - DNA, 120 bp, Artificial Sequence
  ENSG00000139304_1 (sequence is synthesized)
cttatcatttttcttttactttttattgggacttcagagacacaggttgatgtttccaatgtcgttcctggtactaggtacgatataaccatctcttcaatttctacaacatacacctca

SEQ ID NO: 352717 - DNA, 120 bp, Artificial Sequence
  ENSG00000139304_2 (sequence is synthesized)
cctgttactagaatagtgacaacaaatgtaacaaaaccagggcctccagtcttcctagccggggaaagagtcggatctgctgggattcttctgtcttggaatacaccacctaatccaaat

SEQ ID NO: 352718 - DNA, 120 bp, Artificial Sequence
  ENSG00000139304_3 (sequence is synthesized)
ggaaggattatatcttacattgtcaaatataaggaagtttgtccgtggatgcaaacagtatatacacaagtcagatcaaagccagacagtctggaagttcttcttactaatcttaatcct

SEQ ID NO: 352719 - DNA, 120 bp, Artificial Sequence
  ENSG00000139304_4 (sequence is synthesized)
ggaacaacatatgaaattaaggttgctgctgaaaacagtgctggcattggagtgtttagtgatccatttctcttccaaactgcagaaagtgctccaggaaaagtggtgaatctcacagtt

SEQ ID NO: 352720 - DNA, 120 bp, Artificial Sequence
  ENSG00000139304_5 (sequence is synthesized)
gaggcctacaacgcttcagcagttaagctgatttggtatttacctcggcaaccaaatggcaaaattaccagcttcaagattagtgtcaagcatgccagaagtgggatagtagtgaaagat

SEQ ID NO: 352721 - DNA, 120 bp, Artificial Sequence
  ENSG00000139304_6 (sequence is synthesized)
gtctcaatcagagtagaggacattttgactgggaaattgccagaatgcaatgagaatagtgaatcttttttatggagtacagccagcccttctccaacccttggtagagttacacctcca

SEQ ID NO: 352722 - DNA, 120 bp, Artificial Sequence
  ENSG00000139304_7 (sequence is synthesized)
tcgcgtaccacacattcatcaagcacgttgacacagaatgagatcagctctgtgtggaaagagcctatcagttttgtagtgacacacttgagaccttatacaacatatctttttgaagtt

SEQ ID NO: 352723 - DNA, 120 bp, Artificial Sequence
  ENSG00000139304_8 (sequence is synthesized)
tcagctgctacaactgaagcaggttatattgatagtacgattgtcagaacaccagaatcagtgcctgaaggaccaccacaaaactgcgtaacaggcaacatcacaggaaagtccttttca

SEQ ID NO: 352724 - DNA, 120 bp, Artificial Sequence
  ENSG00000139304_9 (sequence is synthesized)
attttatgggacccaccaactatagtaacagggaaatttagttatagagttgaattatatggaccatcaggtcgcattttggataacagcacaaaagacctcaagtttgcattcactaac

SEQ ID NO: 352725 - DNA, 120 bp, Artificial Sequence
  ENSG00000139304_10 (sequence is synthesized)
ctaacaccatttacaatgtatgatgtctatattgcggctgaaaccagtgcagggactgggcccaagtcaaatatttcagtattcactccaccagatgttccaggggcagtgtttgattta

SEQ ID NO: 352726 - DNA, 120 bp, Artificial Sequence
  ENSG00000139304_11 (sequence is synthesized)
caacttgcagaggtagaatccacgcaagtaagaattacttggaagaaaccacgacaaccaaatggaattattaaccaataccgagtgaaagtgctagttccagagacaggaataattttg

SEQ ID NO: 352727 - DNA, 120 bp, Artificial Sequence
  ENSG00000139304_12 (sequence is synthesized)
gaaaatactttgctcactggaaataatgagtatataaatgaccccatggctccagaaattgtgaacatagtagagccaatggtaggattatatgagggttcagcagagatgtcgtctgac

SEQ ID NO: 352728 - DNA, 120 bp, Artificial Sequence
  ENSG00000139304_13 (sequence is synthesized)
cttcactcacttgctacatttatatataacagccatccagataaaaactttcctgcaaggaatagagctgaagaccagacttcaccagttgtaactacaaggaatcagtatattactgac

SEQ ID NO: 352729 - DNA, 120 bp, Artificial Sequence
  ENSG00000139304_14 (sequence is synthesized)
attgcagctgaacagctgtcttatgttatcaggagacttgtacctttcactgagcacatgattagtgtatctgctttcaccatcatgggagaaggaccaccaacagttctcagtgttagg

SEQ ID NO: 352730 - DNA, 120 bp, Artificial Sequence
  ENSG00000139304_15 (sequence is synthesized)
acacgtcagcaagtgccaagctccattaaaattataaactataaaaatattagttcttcatctattttgttatattgggatcctccagaatatcccaatggaaaaataactcactatacg

SEQ ID NO: 352731 - DNA, 120 bp, Artificial Sequence
  ENSG00000139304_16 (sequence is synthesized)
atttatgcaatggaattggatacaaacagagcattccagataactaccatagataacagctttctcataacagggttaaagaaatacacaaaatacaaaatgagagtggcagcctcaacc

SEQ ID NO: 352732 - DNA, 120 bp, Artificial Sequence
  ENSG00000139304_17 (sequence is synthesized)
cacgttggagaaagttctttgtctgaagaaaatgacatctttgtgagaacttcagaagatgaaccggaatcatcacctcaagatgtcgaagtaattgatgttaccgcagatgaaataagg

SEQ ID NO: 352733 - DNA, 120 bp, Artificial Sequence
  ENSG00000139304_18 (sequence is synthesized)
ttgaagtggtcaccacccgaaaagcccaatgggatcattattgcttatgaagtgctatataaaaatatagatactttatatatgaagaacacatcaacaacagacataatattaaggaac

SEQ ID NO: 352734 - DNA, 120 bp, Artificial Sequence
  ENSG00000139304_19 (sequence is synthesized)
ttaagacctcacaccctctataacatttctgtaaggtcttacaccagatttggtcatggcaatcaggtatcttctttactctctgtaaggacttcggagactgtgcctgatagtgcacca

SEQ ID NO: 352735 - DNA, 120 bp, Artificial Sequence
  ENSG00000139304_20 (sequence is synthesized)
gaaaatatcacttacaaaaatatttcttctggagagattgagctatcattccttcccccaagtagtcccaatggaatcatacaaaaatatacaatttatctcaagagaagtaatggaaat

SEQ ID NO: 352736 - DNA, 120 bp, Artificial Sequence
  ENSG00000139304_21 (sequence is synthesized)
gaggaaagaactataaatacaacctctttaacccaaaacattaaagtactgaagaaatatacccaatatatcattgaggtgtctgctagtacactcaaaggtgaaggagttcggagtgct

SEQ ID NO: 352737 - DNA, 120 bp, Artificial Sequence
  ENSG00000139304_22 (sequence is synthesized)
cccataagtatactgacggaggaagatgctcctgattctccccctcaagacttctctgtaaaacagttgtctggtgtcacggtgaagttgtcatggcaaccacccctggagccaaatgga

SEQ ID NO: 352738 - DNA, 120 bp, Artificial Sequence
  ENSG00000139304_23 (sequence is synthesized)
attatcctttattacacagtttatgtctggaatagatcatcattaaaaactattaatgtcactgaaacatcattggagttatcagatttggattataatgttgaatacagtgcttatgta

SEQ ID NO: 352739 - DNA, 120 bp, Artificial Sequence
  ENSG00000139304_24 (sequence is synthesized)
acagctagcaccagatttggtgatgggaaaacaagaagcaatatcattagctttcaaacaccagagggagcaccaagcgatcctcccaaagatgtttattatgcaaacctcagttcttca

SEQ ID NO: 352740 - DNA, 120 bp, Artificial Sequence
  ENSG00000139304_25 (sequence is synthesized)
tcaataattcttttctggacacctccttcaaaacctaatgggattatacaatattactctgtttattacagaaatacttcaggtacttttatgcagaattttacactccatgaagtaacc

SEQ ID NO: 352741 - DNA, 120 bp, Artificial Sequence
  ENSG00000139304_26 (sequence is synthesized)
aatgactttgacaatatgactgtatccacaattatagataaactgacaatattcagctactatacattttggttaacagcaagtacttcagttggaaatgggaataaaagcagtgacatc

SEQ ID NO: 352742 - DNA, 120 bp, Artificial Sequence
  ENSG00000139304_27 (sequence is synthesized)
attgaagtatacacagatcaagacatacctgaagggtttgttggaaacctgacttacgaatccatttcgtcaactgcaataaatgtaagctgggtcccaccggctcaaccaaacggtcta

SEQ ID NO: 352743 - DNA, 120 bp, Artificial Sequence
  ENSG00000139304_28 (sequence is synthesized)
gtcttctactatgtttcactgatcttacagcagactcctcgccatgtgagaccacctcttgttacatatgagagaagcatatattttgataatctggaaaaatacactgattatatatta

SEQ ID NO: 352744 - DNA, 120 bp, Artificial Sequence
  ENSG00000139304_29 (sequence is synthesized)
aaaattactccatcaacagaaaagggattctctgatacctatactgcccagctatacatcaagactgaagaagatgtcccagaaacttcaccaataatcaacacttttaaaaacctttcc

SEQ ID NO: 352745 - DNA, 120 bp, Artificial Sequence
  ENSG00000139304_30 (sequence is synthesized)
tctacctcagttctcttatcatgggatcccccagtaaagccaaatggtgcaataataagttatgatttaactttacaaggaccaaatgaaaattattctttcattacttctgataattac

SEQ ID NO: 352746 - DNA, 120 bp, Artificial Sequence
  ENSG00000139304_31 (sequence is synthesized)
ataatattggaagagctttcaccatttacattatatagcttttttgctgccgcaagaactagaaaaggacttggtccttccagtattcttttcttttacacagatgagtcagtgccgtta

SEQ ID NO: 352747 - DNA, 120 bp, Artificial Sequence
  ENSG00000139304_32 (sequence is synthesized)
gcacctccacaaaatttgactttaatcaactgtacttcagactttgtatggctgaaatggagcccaagtcctcttccaggtggtattgttaaagtatatagttttaaaattcatgaacat

SEQ ID NO: 352748 - DNA, 120 bp, Artificial Sequence
  ENSG00000139304_33 (sequence is synthesized)
gaaactgacactatatattataagaatatatcaggatttaaaactgaagccaaacttgttggactggaaccagtcagcacctactctatccgtgtatctgcgttcaccaaagttggaaat

SEQ ID NO: 352749 - DNA, 120 bp, Artificial Sequence
  ENSG00000139304_34 (sequence is synthesized)
agtgaaatgggatccacccaaaaaggcaaatggaataataacgcagtatatggtaacagttgaaaggaattctacaaaagtttctccccaagatcacatgtacactttcataaagcttct

SEQ ID NO: 352750 - DNA, 120 bp, Artificial Sequence
  ENSG00000139304_35 (sequence is synthesized)
tgccaatacctcatatgtctttaaagtaagagcttcaacctcagctggtgaaggtgatgaaagcacatgccatgtcagcacactacctgaaacagttcccagtgttcccacaaatattgc

SEQ ID NO: 352751 - DNA, 120 bp, Artificial Sequence
  ENSG00000139304_36 (sequence is synthesized)
tttttctgatgttcagtcaactagtgcaacattgacatggataagacctgacactatccttggctactttcaaaattacaaaattaccactcaacttcgtgctcaaaaatgcaaagaatg

SEQ ID NO: 352752 - DNA, 120 bp, Artificial Sequence
  ENSG00000139304_37 (sequence is synthesized)
ggaatccgaagaatgtgttgaatatcaaaaaattcaatacctctatgaagctcacttaactgaagagacagtatatggattaaagaaatttagatggtatagattccaagtggctgccag

SEQ ID NO: 352753 - DNA, 120 bp, Artificial Sequence
  ENSG00000139304_38 (sequence is synthesized)
caccaatgctggctatggcaatgcttcaaactggatttctacaaaaactctgcctggccctccagatggtcctcctgaaaatgttcatgtagtagcaacatcaccttttagcatcagcat

SEQ ID NO: 352754 - DNA, 120 bp, Artificial Sequence
  ENSG00000139304_39 (sequence is synthesized)
aagctggagtgaacctgctgtcattactggaccaacatgttatctgattgatgtcaaatcggtagataatgatgaatttaatatatccttcatcaagtcaaatgaagaaaataaaaccat

SEQ ID NO: 352755 - DNA, 120 bp, Artificial Sequence
  ENSG00000139304_40 (sequence is synthesized)
agaaattaaagatttagaaatattcacaaggtattctgtagtgatcactgcatttactgggaacattagtgctgcatatgtagaagggaagtcaagtgctgaaatgattgttactacttt

SEQ ID NO: 352756 - DNA, 120 bp, Artificial Sequence
  ENSG00000139304_41 (sequence is synthesized)
agaatcagccccaaaggacccacctaacaacatgacatttcagaagataccagatgaagttacaaaatttcaattaacgttccttcctccttctcaacctaatggaaatatccaagtata

SEQ ID NO: 352757 - DNA, 120 bp, Artificial Sequence
  ENSG00000139304_42 (sequence is synthesized)
tcaagctctggtttaccgagaagatgatcctactgctgtccagattcacaacctcagtattatacagaaaaccaacacattcgtcattgcaatgctagaaggactaaaaggtggacatac

SEQ ID NO: 352758 - DNA, 120 bp, Artificial Sequence
  ENSG00000139304_43 (sequence is synthesized)
atacaatatcagtgtttacgcagtcaatagtgctggtgcaggtccaaaggttccgatgagaataaccatggatatcaaagctccagcacgaccaaaaaccaaaccaacccctatttatga

SEQ ID NO: 352759 - DNA, 120 bp, Artificial Sequence
  ENSG00000139304_44 (sequence is synthesized)
tgccacaggaaaactgcttgtgacttcaacaacaattacaatcagaatgccaatatgttactacagtgatgatcatggaccaataaaaaatgtacaagtgcttgtgacagaaacaggagc

SEQ ID NO: 352760 - DNA, 120 bp, Artificial Sequence
  ENSG00000139304_45 (sequence is synthesized)
tcagcatgatggaaatgtaacaaagtggtatgatgcatattttaataaagcaaggccatattttacaaatgaaggctttcctaaccctccatgtacagaaggaaagacaaagtttagtgg

SEQ ID NO: 352761 - DNA, 120 bp, Artificial Sequence
  ENSG00000139304_46 (sequence is synthesized)
caatgaagaaatctacatcataggtgctgataatgcatgcatgattcctggcaatgaagacaaaatttgcaatggaccactgaaaccaaaaaagcaatacttatttaaatttagagctac

SEQ ID NO: 352762 - DNA, 120 bp, Artificial Sequence
  ENSG00000139304_47 (sequence is synthesized)
aaatattatgggacaatttactgactctgattattctgaccctgttaagactttaggggaaggactttcagaaagaaccgtagagatcattctttccgtcactttgtgtatcctttcaat

SEQ ID NO: 352763 - DNA, 120 bp, Artificial Sequence
  ENSG00000139304_48 (sequence is synthesized)
aattctccttggaacagctatttttgcatttgcaagaattcgacagaagcagaaagaaggtggcacatactctcctcaggatgcagaaattattgacactaaattgaagctggatcagct

SEQ ID NO: 352764 - DNA, 120 bp, Artificial Sequence
  ENSG00000139304_49 (sequence is synthesized)
catcacagtggcagacctggaactgaaggacgagagattaacgcggttacttagttatagaaaatccatcaagccaataagcaagaaatccttcctgcaacatgttgaagagctttgcac

SEQ ID NO: 352765 - DNA, 120 bp, Artificial Sequence
  ENSG00000139304_50 (sequence is synthesized)
aaacaacaacctaaagtttcaagaagaattttcggaattaccaaaatttcttcaggatctttcttcaactgatgctgatctgccttggaatagagcaaaaaaccgcttcccaaacataaa

SEQ ID NO: 352766 - DNA, 120 bp, Artificial Sequence
  ENSG00000139304_51 (sequence is synthesized)
accatataataataacagagtaaagctgatagctgacgctagtgttccaggttcggattatattaatgccagctatatttctggttatttatgtccaaatgaatttattgctactcaagg

SEQ ID NO: 352767 - DNA, 120 bp, Artificial Sequence
  ENSG00000139304_52 (sequence is synthesized)
tccactaccaggaacagttggagatttttggagaatggtgtgggaaaccagagcaaaaacattagtaatgctaacacagtgttttgaaaaaggacggatcagatgccatcagtattggcc

SEQ ID NO: 352768 - DNA, 120 bp, Artificial Sequence
  ENSG00000139304_53 (sequence is synthesized)
agaggacaacaagccagttactgtctttggagatatagtgattacaaagctaatggaggatgttcaaatagattggactatcagggatctgaaaattgaaaggcatggggattgcatgac

SEQ ID NO: 352769 - DNA, 120 bp, Artificial Sequence
  ENSG00000139304_54 (sequence is synthesized)
tgttcgacagtgtaactttactgcctggccagagcatggggttcctgagaacagcgcccctctaattcactttgtgaagttggttcgagcaagcagggcacatgacaccacacctatgat

SEQ ID NO: 352770 - DNA, 120 bp, Artificial Sequence
  ENSG00000139304_55 (sequence is synthesized)
tgttcactgcagtgctggagttggaagaactggagtttttattgctctggaccatttaacacaacatataaatgaccatgattttgtggatatatatggactagtagctgaactgagaag

SEQ ID NO: 352771 - DNA, 120 bp, Artificial Sequence
  ENSG00000139304_56 (sequence is synthesized)
tgaaagaatgtgcatggtgcagaatctggcacagtatatctttttacaccagtgcattctggatctcttatcaaataagggaagtaatcagcccatctgttttgttaactattcagcact

SEQ ID NO: 352772 - DNA, 120 bp, Artificial Sequence
  ENSG00000139304_57 (sequence is synthesized)
tcagaagatggactctttggacgccatggaaggtgatgttgagcttgaatgggaagaaaccactatgtaaatattcagaccaaaggatacaattggaagagatttttaaatcccaggggc

SEQ ID NO: 352773 - DNA, 120 bp, Artificial Sequence
  ENSG00000139304_58 (sequence is synthesized)
caaagttaccccctcattcttccgaattgaaatgtgcaaccttaaagaaatatctatgcttctctcactgtgcctttccaaacggattgaacattttaagactagttcttgaaaatagct

SEQ ID NO: 352774 - DNA, 120 bp, Artificial Sequence
  ENSG00000139304_59 (sequence is synthesized)
aatacagaataattatttgttttgtacagaataaatattatgcattttaaatgcttaagaaaagacatcccatatgtttttgaagtcctccatattttggaataagccaaatagaaaatt

SEQ ID NO: 352775 - DNA, 120 bp, Artificial Sequence
  ENSG00000139304_60 (sequence is synthesized)
attattatattagcattaatgtttcaatgtgaattttccctatgtattggatttaattttgagcaaaagttgtaaatgttgattcagtagtgttgttttggcttacagggtattgatgtt

SEQ ID NO: 352776 - DNA, 120 bp, Artificial Sequence
  ENSG00000139304_61 (sequence is synthesized)
tcttgtggataatttccaggactgtcataatgatctgtacttccatgtacacccctgtgttttgaatcctctgttttatgagtgctgagatatcatctcatgatcccgaacagctgaaca

SEQ ID NO: 352777 - DNA, 120 bp, Artificial Sequence
  ENSG00000139304_62 (sequence is synthesized)
gtaaccccctgacactgcagggattacttggcctttatacaacacacagtagctcttcagggacacttagggctatttaatttgcattgtgatcttcagtttgagaaccttaaaagaaaa

SEQ ID NO: 352778 - DNA, 120 bp, Artificial Sequence
  ENSG00000139304_63 (sequence is synthesized)
attaaaagtgcaattgcacacatgaaattacagagtaccattctagcaaacctacatttgtaaactttaaaacacaagttttaccccctgtattgtatattcaaatatatagtaaatgta

SEQ ID NO: 352779 - DNA, 120 bp, Artificial Sequence
  ENSG00000139304_64 (sequence is synthesized)
tcagagtatttgcccattagatatagtcaacctaatattaacaattctgaagagtttcttcagcaaaaatgtatcaaaagagtaataaaaacactgtgcgtgtttcaagcttgtaaacca

SEQ ID NO: 352780 - DNA, 120 bp, Artificial Sequence
  ENSG00000139304_65 (sequence is synthesized)
atgatgtgctgctgtggtgccaacagagacttccaaatggattatgttaaatggccgtcatttcatttcccaaggttgattttgagcagtatacttggtggaactgaaaacaaagaaatt

SEQ ID NO: 352781 - DNA, 120 bp, Artificial Sequence
  ENSG00000139304_66 (sequence is synthesized)
aaccatgtatagcaaattcaaggtttctttatagaaaatctttcagcctccatcttattaaatagtgacaatgtggtaagttttgaattacatgaactcattttgtcatagatttcaatt

SEQ ID NO: 352782 - DNA, 120 bp, Artificial Sequence
  ENSG00000139304_67 (sequence is synthesized)
aagagtaataaatagtattaattattctcttctatgataagaagtatatcttatgcttatttccgctggaacatatatatataagaaatgctatggccaataaaattgaattttaatgaa

SEQ ID NO: 352783 - DNA, 120 bp, Artificial Sequence
  ENSG00000139304_68 (sequence is synthesized)
atgaaaaaagtgcctataaaaccagaacaacctgagaaacttagagccttcaatatttccacacattccttttctctgcactggagcctaccctctggtcatgtggaaaggtatcaagtg

SEQ ID NO: 352784 - DNA, 120 bp, Artificial Sequence
  ENSG00000139304_69 (sequence is synthesized)
tttttgcaatgatgctggggttgatgaaagcactgattttagataaactattcatttctcattccctctgggtttaattcggtctcttttgggtaaatattcaatcaattcaaagtttaa

SEQ ID NO: 352785 - DNA, 120 bp, Artificial Sequence
  ENSG00000139304_70 (sequence is synthesized)
ctcttcaattgtactttttctctcatccttcaagaggatcttcctgcgagttggtgaggtctagtgtagtgactgtactttatcacaagtcactagctcagtgcctgaaacacagaatag

SEQ ID NO: 352786 - DNA, 120 bp, Artificial Sequence
  ENSG00000139304_71 (sequence is synthesized)
caaaccagtctggattgttatcccctatgaaagtcatagtacctctgtaatcttatttgttcaaatgcccaatgttgaagtgtttgatggactacatattgtaattgaaggaggggcaaa

SEQ ID NO: 352787 - DNA, 120 bp, Artificial Sequence
  ENSG00000139304_72 (sequence is synthesized)
tgtgaccatggctttacaccatggtctggaagcaccactgaatatccatgaaggcaaagttacagattcttctatagacattctctggaatcgagttgatgggaatttccagcattatga

SEQ ID NO: 352788 - DNA, 120 bp, Artificial Sequence
  ENSG00000139304_73 (sequence is synthesized)
aatcacatgcataaactatgctgctgctttcatgccccaagtgcagctgaatttatgaaacatagcagagacccaaatgcagtaactgttagctggccttcagctagaagtcttctggat

SEQ ID NO: 352789 - DNA, 120 bp, Artificial Sequence
  ENSG00000139304_74 (sequence is synthesized)
ggatatattatttcaatatccagtgaaagcttaatgagagaagaaattctgccctccactaaaaggacattcacatttaatagcctttctccagggactgactttttaattagtattatg

SEQ ID NO: 352790 - DNA, 120 bp, Artificial Sequence
  ENSG00000139304_75 (sequence is synthesized)
aagaagccatcctactgtcctcatggttagcacttatccagatccatcagatttgctaatctgggggcaagaagaaaacacgatatgtttgtcttggaaactatcagaaggagggtttga

SEQ ID NO: 352791 - DNA, 120 bp, Artificial Sequence
  ENSG00000139304_76 (sequence is synthesized)
aaagtttcagatatcatactgcatgccatccagacaggaaaagctgattaaagtgattgtttatggcaacaaagccaaagtaaaaaaattgactctgggcatggactacatgtttcaagt

SEQ ID NO: 352792 - DNA, 120 bp, Artificial Sequence
  ENSG00000139304_77 (sequence is synthesized)
agtttatatgataaagtatcattacttaagagtctactcaaagggaaattgcatttcagtgctttacgtttagtcttggtcttgtgtgaaatcatatgctgtatgtgtgtttatacatat

SEQ ID NO: 352793 - DNA, 120 bp, Artificial Sequence
  ENSG00000139304_78 (sequence is synthesized)
attttcacacatggtttttccttttgaacagaggaagttgaaataaaatagtagtttgggaacaaaatagccttctagatatctgtgaaaattacctaattcttagaactctttgagaca

SEQ ID NO: 352794 - DNA, 120 bp, Artificial Sequence
  ENSG00000139304_79 (sequence is synthesized)
gctggggaaaaagggggaaatgaactagcagtcacttttaacgggctgatttatatttttaatgaaacaatatctataattttcttttaagaagattagttgtgacatttggagagcatg

SEQ ID NO: 352795 - DNA, 120 bp, Artificial Sequence
  ENSG00000139304_80 (sequence is synthesized)
ttttgtattttcgtatctcaggtcaaacaatcaaataataatatggactggtcttaatgatatgaagaaagaaggtcttcttacatgggcagatggatcatcttttggccttaagaaaaa

SEQ ID NO: 352796 - DNA, 120 bp, Artificial Sequence
  ENSG00000139304_81 (sequence is synthesized)
tgaaatattttctttttcattgctatccaagaatgaaacacattgctacattttacagcaaaatgcaactggatcaaactatttctttacaagatttttctgttacgttccattgccata

SEQ ID NO: 352797 - DNA, 120 bp, Artificial Sequence
  ENSG00000139304_82 (sequence is synthesized)
tgtttgcgaatatgaattaccttctctgcaggaaagctttttgctttacataaaggatgttggaacaactgaagttgtattatttggaataatttgaatttttggaataatttgaataag

SEQ ID NO: 352798 - DNA, 120 bp, Artificial Sequence
  ENSG00000139304_83 (sequence is synthesized)
tgggtgaaattgggatataagattatcattaaatattctttagattatacagaagaacaatattttgaaagcatgcccccaaatactacagaaaaagcaattacccaactgtttcctggt

SEQ ID NO: 352799 - DNA, 120 bp, Artificial Sequence
  ENSG00000139304_84 (sequence is synthesized)
catatttatagatttttactcttcgcaataaatgaatgggaggcaaaaactactttaagtccaatattcactgtagaaacacgccctttgtcagcccaaaatttcagagttacacatgtt

SEQ ID NO: 352800 - DNA, 120 bp, Artificial Sequence
  ENSG00000139304_85 (sequence is synthesized)
accataacagaagtatttttacactgggatcctccagatcctgtattttttcatcattaccttatcactattttggatgttgaaaacaatacatcagaagaggtgcttgttgaaaaacgc

SEQ ID NO: 352801 - DNA, 120 bp, Artificial Sequence
  ENSG00000139304_86 (sequence is synthesized)
aacacagcaaccatagttggagacctcaagtcttttcatcattatctggtatatctattcagtgtagcagaaagaggaactttaagttgcttggagaaaccactttcagtcattacagaa

SEQ ID NO: 352802 - DNA, 120 bp, Artificial Sequence
  ENSG00000139304_87 (sequence is synthesized)
aacagcaatattctctaacctggatcctgccacagtgtacaccttttctattcgggctgaaaaagaaggttttaaagacattactgctaacataaaagaaatacagacaggttaccgcct

SEQ ID NO: 352803 - DNA, 120 bp, Artificial Sequence
  ENSG00000139304_88 (sequence is synthesized)
tagaaagaagggaggcatttcatattcagattgcaattaactttcctgctaattagacttggcactccttggtatttaattaggatgagtcctaaaaataattaaatatttctgaagtca

SEQ ID NO: 352804 - DNA, 120 bp, Artificial Sequence
  ENSG00000139304_89 (sequence is synthesized)
aggttacagtgtatctgtaatgaaaaaagtgcctataaaaccatctaggatttgtggcttaattttgaaagctgtgaatatttcttcaaatttaatgtggaatacaacagagatcaattt

SEQ ID NO: 352805 - DNA, 120 bp, Artificial Sequence
  ENSG00000139304_90 (sequence is synthesized)
cacccattataagatttatatatcaaatagaacatttgcaaaagactgtcttatttgggaagtggtgactgagcacacagttacagatgtgactcctggtgtaatatataacatcatggt

SEQ ID NO: 352806 - DNA, 120 bp, Artificial Sequence
  ENSG00000139304_91 (sequence is synthesized)
aatgtaccaatggctcaggccttcgtcaactaattcttcttaaatttagaacttcatcccaataacttattagaaaaaaaagaaagtagaataggttctatggaattaaaacaagaaaaa

SEQ ID NO: 352807 - DNA, 120 bp, Artificial Sequence
  ENSG00000139304_92 (sequence is synthesized)
gaagtcgagtagctataaatttgcaacatattcagagaggtgattttaacaaggaaattatttgactaaatgtctttacttaaaaagaaaactaaacctaattttatatactttgtgtga

SEQ ID NO: 352808 - DNA, 120 bp, Artificial Sequence
  ENSG00000139304_93 (sequence is synthesized)
atggagaaattaattattctgctgctctggttacagtatgttgttaagatctcaaaacattttcattatataccaatgaataaacaaacaacagaagtttttattgaatgggatgaattt

SEQ ID NO: 352809 - DNA, 120 bp, Artificial Sequence
  ENSG00000139304_94 (sequence is synthesized)
cctaagggaggaaatcctgaattttattttttaaaatatcaacttgttaatgattttgctcaaagaaatgtaaaaagtattctcgcagacccacaaagatgtcagaaattaataataaca

SEQ ID NO: 352810 - DNA, 120 bp, Artificial Sequence
  ENSG00000139304_95 (sequence is synthesized)
ctaaaggaaaatgaagattatcacatcattttacagtccatgagatatggacaaattttaagtgaaaagtcatttcaaattcgtggaatctcaactagcaatattaaaacaatagcaaca

SEQ ID NO: 352811 - DNA, 120 bp, Artificial Sequence
  ENSG00000139304_96 (sequence is synthesized)
agtacaagtatttcttttaactggagtgtgccctcttccaaagatatatcagtgtcaatatctttcaataattattcacaaattatgcaaaataatgttatggtttatgagtggggtaat

SEQ ID NO: 352812 - DNA, 120 bp, Artificial Sequence
  ENSG00000139304_97 (sequence is synthesized)
gggcagcattaaaaaataactgttatagaattaacaatgacagtaagccatggaatatagcccagcaacattgtaagttatccttaagttctgcacaccttgtggatataaaaaatgaag

SEQ ID NO: 352813 - DNA, 120 bp, Artificial Sequence
  ENSG00000139318_0 (sequence is synthesized)
atccattgaggagctgcctcgcgcagggggtgtgcgaggctgagtccaagagatagcaaatcgagtcttaaataatccggggagaaagacgcccgggtagatttgaggtgcagccttgga

SEQ ID NO: 352814 - DNA, 120 bp, Artificial Sequence
  ENSG00000139318_1 (sequence is synthesized)
gggagggattagaagccgctagactttttttcctcccctctcagtagcacggagtccgaattaattggatttcattcactggggaggaacaaaaactatctgggcagcttcattgagaga

SEQ ID NO: 352815 - DNA, 120 bp, Artificial Sequence
  ENSG00000139318_2 (sequence is synthesized)
gattcattgacactaagagccagcggctgcagctgggtgcagagagaacctccggctttacttctgtctcgtctgccccaaccgctagcctcggcttgggtaaggcgaggcggaattaaa

SEQ ID NO: 352816 - DNA, 120 bp, Artificial Sequence
  ENSG00000139318_3 (sequence is synthesized)
ccccgctccgagagcggcagcttcgcgcgcggtgcgctcggcctatgcctgccccgaggggcgtctggtaggcaccccgccctctcccgcagctcgacccccatgatagatacgctcaga

SEQ ID NO: 352817 - DNA, 120 bp, Artificial Sequence
  ENSG00000139318_4 (sequence is synthesized)
cccgtgcccttcgcgtcggaaatggcgatcagcaagacggtggcgtggctcaacgagcagctggagctgggcaacgagcggctgctgctgatggactgccggccgcaggagctatacgag

SEQ ID NO: 352818 - DNA, 120 bp, Artificial Sequence
  ENSG00000139318_5 (sequence is synthesized)
tcgtcgcacatcgagtcggccatcaacgtggccatcccgggcatcatgctgcggcgcctgcagaagggtaacctgccggtgcgcgcgctcttcacgcgcggcgaggaccgggaccgcttc

SEQ ID NO: 352819 - DNA, 120 bp, Artificial Sequence
  ENSG00000139318_6 (sequence is synthesized)
acccggcgctgtggcaccgacacagtggtgctctacgacgagagcagcagcgactggaacgagaatacgggcggcgagtcggtgctcgggctgctgctcaagaagctcaaggacgagggc

SEQ ID NO: 352820 - DNA, 120 bp, Artificial Sequence
  ENSG00000139318_7 (sequence is synthesized)
tgccgggcgttctacctggaaggtggcttcagtaagttccaagccgagttctccctgcattgcgagaccaatctagacggctcgtgtagcagcagctcgccgccgttgccagtgctgggg

SEQ ID NO: 352821 - DNA, 120 bp, Artificial Sequence
  ENSG00000139318_8 (sequence is synthesized)
ctcgggggcctgcggatcagctctgactcttcctcggacatcgagtctgaccttgaccgagaccccaatagtgcaacagactcggatggtagtccgctgtccaacagccagccttccttc

SEQ ID NO: 352822 - DNA, 120 bp, Artificial Sequence
  ENSG00000139318_9 (sequence is synthesized)
ccagtggagatcttgcccttcctctacttgggctgtgccaaagactccaccaacttggacgtgttggaggaattcggcatcaagtacatcttgaacgtcacccccaatttgccgaatctc

SEQ ID NO: 352823 - DNA, 120 bp, Artificial Sequence
  ENSG00000139318_10 (sequence is synthesized)
tttgagaacgcaggagagtttaaatacaagcaaatccccatctcggatcactggagccaaaacctgtcccagtttttccctgaggccatttctttcatagatgaagcccggggcaagaac

SEQ ID NO: 352824 - DNA, 120 bp, Artificial Sequence
  ENSG00000139318_11 (sequence is synthesized)
tgtggtgtcttggtacattgcttggctggcattagccgctcagtcactgtgactgtggcttaccttatgcagaagctcaatctgtcgatgaacgatgcctatgacattgtcaaaatgaaa

SEQ ID NO: 352825 - DNA, 120 bp, Artificial Sequence
  ENSG00000139318_12 (sequence is synthesized)
aaatccaacatatcccctaacttcaacttcatgggtcagctgctggacttcgagaggacgctgggactcagcagcccatgtgacaacagggttccagcacagcagctgtattttaccacc

SEQ ID NO: 352826 - DNA, 120 bp, Artificial Sequence
  ENSG00000139318_13 (sequence is synthesized)
ccttccaaccagaatgtataccaggtggactctctgcaatctacgtgaaagaccccacacccctccttgctggaatgtgtctggcccttcagcagtttctcttggcagcatcagctgggc

SEQ ID NO: 352827 - DNA, 120 bp, Artificial Sequence
  ENSG00000139318_14 (sequence is synthesized)
tgctttctttgtgtgtggccccaggtgtcaaaatgacaccagctgtctgtactagacaaggttaccaagtgcggaattggttaatactaacagagagatttgctccattctctttggaat

SEQ ID NO: 352828 - DNA, 120 bp, Artificial Sequence
  ENSG00000139318_15 (sequence is synthesized)
agtaggtttgctctgtacccatgtgtacagcctacccatgcagggactgggattcgaggacttccaggcgcatagggtagaaccaaatgatagggtaggagcatgtgttctttagggcct

SEQ ID NO: 352829 - DNA, 120 bp, Artificial Sequence
  ENSG00000139318_16 (sequence is synthesized)
tgtaaggctgtttccttttgcatctggaactgactatataattgtcttcaatgaagactaattcaattttgcatatagaggagccaaagagagatttcagctctgtatttgtggtatcag

SEQ ID NO: 352830 - DNA, 120 bp, Artificial Sequence
  ENSG00000139318_17 (sequence is synthesized)
tttggaaaaaaaaatctgatactccatttgattattgtaaatatttgatcttgaatcacttgacagtgtttgtttgaattgtgtttgttttttcctttgatgggcttaaaagaaattatc

SEQ ID NO: 352831 - DNA, 120 bp, Artificial Sequence
  ENSG00000139318_18 (sequence is synthesized)
caaagggagaaagagcagtatgccacttcttaaaacagaacaaaacaaaaaaagaaaattgtgctcttttctaatccaaagggtatatttgcagcatgcttgactttaccaattctgatg

SEQ ID NO: 352832 - DNA, 120 bp, Artificial Sequence
  ENSG00000139318_19 (sequence is synthesized)
acatctttacggacactattatcactaagaccttgttatggcgaagtctttagtctttttcatgtattttcctcatgattttttctctttatgtagtttgactatgccttacctttgtaa

SEQ ID NO: 352833 - DNA, 120 bp, Artificial Sequence
  ENSG00000139318_20 (sequence is synthesized)
atatttttgcttgtgttgtcgcaaaggggataatctgggaaagacaccaaatcatgggctcactttaaaaaaagaaagaataaaaaaaccttcagctgtgctaaacagtatattacctct

SEQ ID NO: 352834 - DNA, 120 bp, Artificial Sequence
  ENSG00000139318_21 (sequence is synthesized)
gtataaaattcttcagggagtgtcacctcaaatgcaatactttgggttggtttctttcctttaaaaaaatttgtataaaactggaagtgtgtgtgtgtgagcatgggtacccatttgata

SEQ ID NO: 352835 - DNA, 120 bp, Artificial Sequence
  ENSG00000139318_22 (sequence is synthesized)
agagaaatgcatttgattgtgaagaagggagagttaaattctccattatgttcgtggtgtaaagtttagagctggaatttattataagaatgtaaaaccttaaattattaataaataact

SEQ ID NO: 352836 - DNA, 120 bp, Artificial Sequence
  ENSG00000139318_23 (sequence is synthesized)
attttggctattgaatgtgtgtttttaaaaactcagttatacctatgtgtgaagtgacacattttagaactttttcattcagggattgattttgacttgtaggcatagtagggcaaggtt

SEQ ID NO: 352837 - DNA, 120 bp, Artificial Sequence
  ENSG00000139318_24 (sequence is synthesized)
cttttaagcttttcctagaacgtttttcagcagcagtttatgaaattcatcgtttgccacgaataaagatgacatcctagaatggaccgactgtaccgtgtatatgaacaatacctctta

SEQ ID NO: 352838 - DNA, 120 bp, Artificial Sequence
  ENSG00000139318_25 (sequence is synthesized)
tgagtatagttccggcttaagattttaaagcccctgaagaaaaatgaacctatagagcatagcttgctgaggaatacaatttggatattaaccacagagaggtgtagcagaataccaaga

SEQ ID NO: 352839 - DNA, 120 bp, Artificial Sequence
  ENSG00000139318_26 (sequence is synthesized)
tgacagccacatgttaacctcctccctatccttcactgtcaggatcttctgctttataatgctgagataatgccaaagaggaagtagggataattctttttccagtctgttgtcatgggc

SEQ ID NO: 352840 - DNA, 120 bp, Artificial Sequence
  ENSG00000139318_27 (sequence is synthesized)
aattctacctgcagatatcctagtgtgagaatgctgaatccagaatgatgtctccactttttcccctagcatgcgcatggcaaggcatatctaagcttcctcaccgtgtcaggatatggc

SEQ ID NO: 352841 - DNA, 120 bp, Artificial Sequence
  ENSG00000139318_28 (sequence is synthesized)
tttagaattttacattggcacttaggaggcaactttgtcatccctgttgtaatgtgcttttttgtttaactggcttgggatgtgggtcagaaacccttattgaaacttgtggggattatt

SEQ ID NO: 352842 - DNA, 120 bp, Artificial Sequence
  ENSG00000139318_29 (sequence is synthesized)
ttagtttcttttcaagctaaagactttatatcttgccatttttcttgggacctaccctctccttacctcaaatgtaaaaatacacaaaccaaaataaaaggcaggtgtatggaatcaaaa

SEQ ID NO: 352843 - DNA, 120 bp, Artificial Sequence
  ENSG00000139318_30 (sequence is synthesized)
aaagtgtgtttctcttatagatggttctgtatgtagggggttcgtaggatgcttgtggtgtttcttgcgccgggctgcggttcttacaagctgtgaaaactactacggcttctcaggtta

SEQ ID NO: 352844 - DNA, 120 bp, Artificial Sequence
  ENSG00000139323_0 (sequence is synthesized)
gactgggccgccgttgttgtagtgaccgggaggcgctgccgctctgggcagacggttccgggagccgcacggtcccctctccttccccatcctctcccctcccctctccgggttccccca

SEQ ID NO: 352845 - DNA, 120 bp, Artificial Sequence
  ENSG00000139323_1 (sequence is synthesized)
cccacaggagccttgggccgaccactcccccgatggcctcagccacggaggaccccgttctggagcgttatttcaaaggccacaaagctgcgatcacctccttggacctcagccccaacg

SEQ ID NO: 352846 - DNA, 120 bp, Artificial Sequence
  ENSG00000139323_2 (sequence is synthesized)
gcaagcaacttgctactgcttcttgggatacctttctcatgctatggaatttcaagccacatgctagagcttacagatatgtgggtcacaaggatgttgtaaccagcgtgcagttttctc

SEQ ID NO: 352847 - DNA, 120 bp, Artificial Sequence
  ENSG00000139323_3 (sequence is synthesized)
cacatggaaacttattggcgtctgcctcacgagacagaaccgtgagactctggattcctgataagagaggaaaattctcagaatttaaagctcatacagctccagttcgaagtgtagact

SEQ ID NO: 352848 - DNA, 120 bp, Artificial Sequence
  ENSG00000139323_4 (sequence is synthesized)
tttcagctgatggccagtttctagctacagcttctgaagacaaatccataaaagtatggagcatgtatcgccagcgcttcctgtattccttgtatcgacatacacactgggtacgctgtg

SEQ ID NO: 352849 - DNA, 120 bp, Artificial Sequence
  ENSG00000139323_5 (sequence is synthesized)
ccaaattttcacccgatggaagactaattgtgtcatgtagtgaggataaaactattaaaatttgggataccacaaataagcaatgtgttaataacttctcagattccgttggatttgcaa

SEQ ID NO: 352850 - DNA, 120 bp, Artificial Sequence
  ENSG00000139323_6 (sequence is synthesized)
attttgtggactttaaccctagtggtacatgcatagcttcagcaggttctgatcaaactgtgaaagtctgggatgtaagagtgaacaaattactacagcattaccaagttcacagcggtg

SEQ ID NO: 352851 - DNA, 120 bp, Artificial Sequence
  ENSG00000139323_7 (sequence is synthesized)
gagttaattgcatatcattccatccttcgggtaactatctcatcacagcttcttcagatggtacccttaagattctggacctcttagaaggaaggctcatctatacacttcaaggacata

SEQ ID NO: 352852 - DNA, 120 bp, Artificial Sequence
  ENSG00000139323_8 (sequence is synthesized)
cgggacctgtctttactgtttcattttcaaaaggtggagagctatttgcatcaggaggtgcagacacacaggtcttattatggaggactaactttgatgaattgcattgtaaaggtctta

SEQ ID NO: 352853 - DNA, 120 bp, Artificial Sequence
  ENSG00000139323_9 (sequence is synthesized)
ccaaaagaaatctcaaaagattacattttgattcaccaccacatcttcttgatatctacccaagaacaccacatccccatgaggaaaaagttgagactgtagaaattaatccaaagcttg

SEQ ID NO: 352854 - DNA, 120 bp, Artificial Sequence
  ENSG00000139323_10 (sequence is synthesized)
aggtaatcgatttgcagatctctactccccctgttatggatatcctttcttttgattctaccacaacaacagaaaccagtggtaggactctgccagacaagggtgaagaggcctgtggat

SEQ ID NO: 352855 - DNA, 120 bp, Artificial Sequence
  ENSG00000139323_11 (sequence is synthesized)
atttcttgaacccttccttaatgtcaccagaatgtttgccaacaaccacgaaaaagaaaacagaagacatgagtgacctcccctgtgaaagtcaaaggagcatacctctcgctgtgactg

SEQ ID NO: 352856 - DNA, 120 bp, Artificial Sequence
  ENSG00000139323_12 (sequence is synthesized)
aactcaatgttttgacacagactgtttcaatcttggagcagcgactgactttgacagaggataagctgaaagactgccttgaaaatcagcaaaagcttttcagtgctgtccaacagaaaa

SEQ ID NO: 352857 - DNA, 120 bp, Artificial Sequence
  ENSG00000139323_13 (sequence is synthesized)
gctgaataaaaaattcattttcatttgttgggcagaggcccaataaatgaacaaatgtacatacactcaggaaggtagtacaagatactccatacaacacaaccatgtgctatttatcat

SEQ ID NO: 352858 - DNA, 120 bp, Artificial Sequence
  ENSG00000139323_14 (sequence is synthesized)
ggcatttcttaaaagggtgagcaacagaacaaaaggcagaaaaggcatacctaaggactaatttaaacacatatcaatgtgaaggactaatttaaattactatcatttatgattgcagta

SEQ ID NO: 352859 - DNA, 120 bp, Artificial Sequence
  ENSG00000139323_15 (sequence is synthesized)
ataaagtgataagcattcaagcaactctgtattttccccatattattttaaatgtccattttcatttataggccaaatcctgccaggaaagtaaccagatctctggatttcactgttaag

SEQ ID NO: 352860 - DNA, 120 bp, Artificial Sequence
  ENSG00000139323_16 (sequence is synthesized)
tcatttcagattgaccatattcagacagtcatggggtgaaataattcacttacctccaaaatagcatcctatatgccaataatgagttattgatctgactagttgtatgtctttctgttc

SEQ ID NO: 352861 - DNA, 120 bp, Artificial Sequence
  ENSG00000139323_17 (sequence is synthesized)
aaaatagaaattatcctttcttactaatgccttgaaagaatgaacaaataaaaattcccagaccacagaatttccacagcaagaatacacttattttaattaacaatagcacagatatag

SEQ ID NO: 352862 - DNA, 120 bp, Artificial Sequence
  ENSG00000139323_18 (sequence is synthesized)
catagggcagtgggttttttagttaatttatggcgtactttgtttatccattggccaacctgaaggaaatgaaactcacctatctttctatcacagatgaatgtgctagatgaatgattt

SEQ ID NO: 352863 - DNA, 120 bp, Artificial Sequence
  ENSG00000139323_19 (sequence is synthesized)
gggttgtatctgatcatggttcacaaaaattatgttagtgtgttttcagtatgctaaaaagtcagagtgatacaaaagtgatatttaaaaatatacacacatgtatgtacacatgcttca

SEQ ID NO: 352864 - DNA, 120 bp, Artificial Sequence
  ENSG00000139323_20 (sequence is synthesized)
gaaatattgttgcttagggtgatttgggcagctaaatagtaagtactttttaaaatttttgcatcatcatcttcctatttaatgaattgtgatttaaaacaaaatgaaaataagccaggt

SEQ ID NO: 352865 - DNA, 120 bp, Artificial Sequence
  ENSG00000139323_21 (sequence is synthesized)
attctaaaagatcctggatacaaattaagaattttgctttattttaaaccaaattgagattaaattgaagaaaagcaagcaaattaatttcagcttgattatcaacctgtatcaagaaca

SEQ ID NO: 352866 - DNA, 120 bp, Artificial Sequence
  ENSG00000139323_22 (sequence is synthesized)
aaaatgggaggaggtgtccacatttatggtgtgtataggtaacatggggaaaatgctattctgtgttttggaaaagaagaaatagtgccgtcctatttatttctatatttagaaattttt

SEQ ID NO: 352867 - DNA, 120 bp, Artificial Sequence
  ENSG00000139323_23 (sequence is synthesized)
ctcaaagaaatttcaattgtatctatgagatgggtttctaagtatcttattgtgtgttataagtgccttttaatatcatactaagtgtgagcttctggacattttcaagagcttacaaaa

SEQ ID NO: 352868 - DNA, 120 bp, Artificial Sequence
  ENSG00000139323_24 (sequence is synthesized)
actaagtggcattgtatttttataaccccattgagaagactaagtaagaaatgaaatgtcctatcaattttattttgtcatgcttcaaacaataaagacatttctgctttaaaagaaaaa

SEQ ID NO: 352869 - DNA, 120 bp, Artificial Sequence
  ENSG00000139323_25 (sequence is synthesized)
aaaaaaaaaaaagtaccaaagccgaggcgcatcctcgcacctgcctgccttgggccagcgggcggggcccgggaacgtgcatttcaaaggggccgcggttcctgcgatgcgctggactct

SEQ ID NO: 352870 - DNA, 120 bp, Artificial Sequence
  ENSG00000139323_26 (sequence is synthesized)
gggaagcgcgaacagagcgttttgcgggctctgcggggagagctggcgccggcgtctccctgtagcaggactgggcgccgcgcccgtgggtgggctgctgcccggccccgccgcccagcc

SEQ ID NO: 352871 - DNA, 120 bp, Artificial Sequence
  ENSG00000139323_27 (sequence is synthesized)
aagccgccgcctgggtggccattcccaagccggactccggggaagtggcagcgtggatcccagccgccagaattcgaggtctgcggcggctttcaaaacttgacaactttcctttccagg

SEQ ID NO: 352872 - DNA, 120 bp, Artificial Sequence
  ENSG00000139323_28 (sequence is synthesized)
gttaatggcaggaggctgtgtttgatttctgctttatgggacagccaggaagagataacggttttggctagctgagctgattgcccctcatccttaccatgcacagctttattccttctt

SEQ ID NO: 352873 - DNA, 120 bp, Artificial Sequence
  ENSG00000139323_29 (sequence is synthesized)
tactatagcattgcagttatatctcccctttaacacactggctggataattataaaatgattttactgtttctaaaactacagccatacccatcaagcatgacaacagaaaccagtggta

SEQ ID NO: 352874 - DNA, 120 bp, Artificial Sequence
  ENSG00000139323_30 (sequence is synthesized)
aagctgaccctggctgctgctcatgcactgctgcctgcactgttattctcagtcacataaaaggcatgctgcccttgtggagaggaaaattctcagaatttaaagctcatacagctccag

SEQ ID NO: 352875 - DNA, 120 bp, Artificial Sequence
  ENSG00000139323_31 (sequence is synthesized)
ccatgtttttccctttgtacctttttaaaaaatacttatgaatggaatgtattgaacctcccccatgctgtgcatctcacttttctcctgtacaaacaggatgtaaagacagggttagtt

SEQ ID NO: 352876 - DNA, 120 bp, Artificial Sequence
  ENSG00000139323_32 (sequence is synthesized)
ggtagaaagctatctgctaatacctaggtttcaatacctttgagagacaaagagagatgtcagttggctaatgttgtaggatggagagctggcacccttttttctctctgcacatatgct

SEQ ID NO: 352877 - DNA, 120 bp, Artificial Sequence
  ENSG00000139323_33 (sequence is synthesized)
tttcccttttttctttcatttccatatgtcatatgataataatatattttttgcttgtgccaaacaagaaaacctattggagctcttttattgcttagattgtctatggtcttaaatcat

SEQ ID NO: 352878 - DNA, 120 bp, Artificial Sequence
  ENSG00000139323_34 (sequence is synthesized)
ctttgccaattttcctattgtcctttctatactaacgaccttgactgcaaacctccagagttcaatgaatgattggggcctttttccaagaaggtctgaagctgttattacaatatgatt

SEQ ID NO: 352879 - DNA, 120 bp, Artificial Sequence
  ENSG00000139323_35 (sequence is synthesized)
aataatatttgtggccatgtatgtacatacttagatatgttgtgatccatattttttcaaaaaaactgtcttggttatagataatttggtttccacctgtgagagcaataataaaatctg

SEQ ID NO: 352880 - DNA, 120 bp, Artificial Sequence
  ENSG00000139323_36 (sequence is synthesized)
agaatgagactccatctcaaaaaaaaaaatctgtatacaagtggttaacattttctaaaatattcaagcttctgctaagtactagaaatgatccaagggatacagtgatgagaagagtaa

SEQ ID NO: 352881 - DNA, 120 bp, Artificial Sequence
  ENSG00000139323_37 (sequence is synthesized)
ccaagggatacagtgatgagaagagtaaacatagtagtctagtgagggagacagacaatagacaagcagcaaatacataaatacaaattctggtcagttacagaggaaagcatcaggatg

SEQ ID NO: 352882 - DNA, 120 bp, Artificial Sequence
  ENSG00000139323_38 (sequence is synthesized)
ccatgctggagaatgaaaggtccagcttcagtagggtagtcagggcagggactgcatttctgaagatgggacagttaagctgaaatttggaggtcaagaaggatgcagtcatgctaggat

SEQ ID NO: 352883 - DNA, 120 bp, Artificial Sequence
  ENSG00000139323_39 (sequence is synthesized)
ggcagagaaagccattgcaggcagagcagaagcaatgttttttgtttgtttgttggtttgttttttaaagcctgttctttgagcaggaactatttgtttgggggtgaggatggttgtgga

SEQ ID NO: 352884 - DNA, 120 bp, Artificial Sequence
  ENSG00000139323_40 (sequence is synthesized)
gcatggacatccatattttgttcccagtgaatgaggtctaggatcaggaatgtagactatgatcatgagtcaagatttcttagagaatcctttgtatttccatactcacctctacagtgc

SEQ ID NO: 352885 - DNA, 120 bp, Artificial Sequence
  ENSG00000139323_41 (sequence is synthesized)
tcccattttagtccttgctgtcagctcagtagctgcagacccatgtagataagtgctgtatgttgtcttcctagttcctttagctcagagcatgaataggtggttggtccatagatgctt

SEQ ID NO: 352886 - DNA, 120 bp, Artificial Sequence
  ENSG00000139323_42 (sequence is synthesized)
ctaagtatgactgaatagcattaaaaatcctttatgttaacttgatctttcagaatctgtgattgttaggagcctttcttctggacgttttcagtacagttttagcttttctctgtcata

SEQ ID NO: 352887 - DNA, 120 bp, Artificial Sequence
  ENSG00000139323_43 (sequence is synthesized)
cataaggagttgagtaactcgaagtgatactaataggatcgttttgaggatgtggttttgttttgttttgttttgtttttaagagacagagtttctcactctgtagcccaggctggagtg

SEQ ID NO: 352888 - DNA, 90 bp, Artificial Sequence
  ENSG00000139323_44 (sequence is synthesized)
caagccgaactacaggcacacactagcatgcctgtctaagttttttatttttttattttttgtagagatggggtctccttatgttgccca

SEQ ID NO: 352889 - DNA, 90 bp, Artificial Sequence
  ENSG00000139323_45 (sequence is synthesized)
tacaggcacacactagcatgcctgtctaagttttttatttttttattttttgtagagatggggtctccttatgttgcccaggctgacatt

SEQ ID NO: 352890 - DNA, 120 bp, Artificial Sequence
  ENSG00000139323_46 (sequence is synthesized)
atgccctgccctttatgatccattttgagttaattttgtagatggtgtgaggtagagacccaaattcattgttttgaatgtggatattgggttttcctcacgccatttgttaaaaagata

SEQ ID NO: 352891 - DNA, 120 bp, Artificial Sequence
  ENSG00000139323_47 (sequence is synthesized)
attctttccagattaaattgtcttggcaaccttgtcaaaaatcaactgaccataaatggaagggtttatttctgcactctcagttttgtttctttgatttatatgtctattcttatgtca

SEQ ID NO: 352892 - DNA, 120 bp, Artificial Sequence
  ENSG00000139323_48 (sequence is synthesized)
gtgccacactgtcttaattactatagttttacaataagtttggaaatttggaagtatgagtccttcacatttttttcatcaatattattttagctgttatgggtttcttgcatttccata

SEQ ID NO: 352893 - DNA, 120 bp, Artificial Sequence
  ENSG00000139323_49 (sequence is synthesized)
tgagttttaggatcagcttatcaacctctgcaaaaaagacaaatgggattttgatagggtttgcactgaatctgcatatcaatgtggggagtattgccatcttaataatattaaggtttt

SEQ ID NO: 352894 - DNA, 120 bp, Artificial Sequence
  ENSG00000139323_50 (sequence is synthesized)
tgattcataaatttgggatatgggatgtttatttgtttagatcttttatttctttcaatgatggtttgtataatagtttccagtacacaagtcttacatttctttttttttttttttgaa

SEQ ID NO: 352895 - DNA, 90 bp, Artificial Sequence
  ENSG00000139323_51 (sequence is synthesized)
cagtacacaagtcttacatttctttttttttttttttgaaacatggccttggtctgtcacccaggctggagtaatgtctcccaggttcaa

SEQ ID NO: 352896 - DNA, 120 bp, Artificial Sequence
  ENSG00000139323_52 (sequence is synthesized)
ttccattgtaaatggaattattttcttaattttatttttggattgttcattgccatatggaggactttctgtttttctcttgtggtaacatatacataatgtaaaatttatcattttaac

SEQ ID NO: 352897 - DNA, 120 bp, Artificial Sequence
  ENSG00000139323_53 (sequence is synthesized)
cattcttaagtatacaattcactggcattaagtatattcacagtattcagtgttttataaccatcatcactatctatttccagaattttgtcatcattccaagtagaaactctgtactca

SEQ ID NO: 352898 - DNA, 120 bp, Artificial Sequence
  ENSG00000139323_54 (sequence is synthesized)
ttgagcaataactccccattacccctacctccagcccctggtaacctctactgtactttttgtctctaggaatttacctattctaggcacctcatataagtgcagtcacatagtctttgt

SEQ ID NO: 352899 - DNA, 120 bp, Artificial Sequence
  ENSG00000139323_55 (sequence is synthesized)
ccttttgtgtctggctcattttacttagcatgttttcaagatgtatccatgttataacatgtatcagaattccattcctttttatggctgaattatatttcattgtatgtttataccaca

SEQ ID NO: 352900 - DNA, 120 bp, Artificial Sequence
  ENSG00000139323_56 (sequence is synthesized)
ttttgtgtatacgttcatctatcgttgtttctagcttttggctattgtgaataatgttgctatgaacattgctgtacaagtatccagttgagtccctgctttcagagttctcctggatgt

SEQ ID NO: 352901 - DNA, 120 bp, Artificial Sequence
  ENSG00000139323_57 (sequence is synthesized)
atacgtaggagtagaattgctggatcatatggtaattttatgtttaattttgggggtaactaacagccaaactattttccaaagcagctgaaccattttacattcctactagcaatggac

SEQ ID NO: 352902 - DNA, 120 bp, Artificial Sequence
  ENSG00000139323_58 (sequence is synthesized)
aagtgtttcagtttctccacattctcaccaacacttgttatttttcatttttttgataatagtcaccctaatagatgtgaatattgtttttaaattaagaattaaactgcatctaacaat

SEQ ID NO: 352903 - DNA, 120 bp, Artificial Sequence
  ENSG00000139323_59 (sequence is synthesized)
ctttttaatggtagatccctcagatcagtgtatggaaagtgtgtttcattgaaaagaaagtcaaggaaattgtctctattcactgttagctttgtttccttattataagaattataataa

SEQ ID NO: 352904 - DNA, 120 bp, Artificial Sequence
  ENSG00000139323_60 (sequence is synthesized)
ttccttatttaattatagtaatttccataacttattatagttggggataaatcttcaatgtaagcctgggctttttagaagaggaatattttaaacttttatatatatcattttaaagtt

SEQ ID NO: 352905 - DNA, 120 bp, Artificial Sequence
  ENSG00000139323_61 (sequence is synthesized)
gaaatcttttattaaagagccgtcatatgccgtgtttcctccataggaagtctttctcactgtctaagccaagcttgtccagcccacaggtcacatgctggctttgaatccagcccaaca

SEQ ID NO: 352906 - DNA, 120 bp, Artificial Sequence
  ENSG00000139323_62 (sequence is synthesized)
acatgctggctttgaatccagcccaacacaaattcgtaaactgtcttaaaacattatgagatatttttgcaatttttttttttttagctcatcagctatcattaatgttagtgtatttta

SEQ ID NO: 352907 - DNA, 120 bp, Artificial Sequence
  ENSG00000139323_63 (sequence is synthesized)
tggcccagggaaagccaaagattggacactcctgataagcgctcagtcaatagtttcttctttaaggttcgttagtacacttattggtaccattcatttgatataaaactctgctatctt

SEQ ID NO: 352908 - DNA, 120 bp, Artificial Sequence
  ENSG00000139323_64 (sequence is synthesized)
tgttgctctttgtttacttctttgtattcataatgtttcaattttatttttaatttttatgtcttttcaaattctgaaatagcctccctcaaagttagtcaccactctaggtaatcattc

SEQ ID NO: 352909 - DNA, 120 bp, Artificial Sequence
  ENSG00000139323_65 (sequence is synthesized)
aggtaatcattctgttgcttttctttgtaactttatatatttgaatctataattattgtttaattttgaatgagtttgaactttatgtaaatggaattatattgaatgtatattttccgt

SEQ ID NO: 352910 - DNA, 120 bp, Artificial Sequence
  ENSG00000139324_0 (sequence is synthesized)
aagactgcgacggtaccggggcggcggggaaggaccgagaggcgggaggagcagcggctcaggcgcctgcaaactggtggcctgaacgaggtagaccatgactgtggtttcagtggcgtc

SEQ ID NO: 352911 - DNA, 120 bp, Artificial Sequence
  ENSG00000139324_1 (sequence is synthesized)
actcgctgggctgctcttcctgaggttttcctaagccatcccctggcggaaccgcccccagtttttgtccagaagtgcttatagaaaagatggctaatattaacctaaaagaaataacct

SEQ ID NO: 352912 - DNA, 120 bp, Artificial Sequence
  ENSG00000139324_2 (sequence is synthesized)
taatagtaggtgtggttactgcctgctattggaacagcctcttttgtggttttgtttttgatgatgtttcagcaatactggataacaaagacttgcatccatctacacctttaaaaactt

SEQ ID NO: 352913 - DNA, 120 bp, Artificial Sequence
  ENSG00000139324_3 (sequence is synthesized)
tatttcaaaatgacttctggggaacccctatgtctgaggagagaagccacaagtcttaccgtcccttaacagtattgacatttcgcttaaattatttgttaagtgaactaaaaccaatgt

SEQ ID NO: 352914 - DNA, 120 bp, Artificial Sequence
  ENSG00000139324_4 (sequence is synthesized)
catatcatctcctgaatatgatttttcatgctgtggttagtgtgatatttctcaaagtatgcaaactttttctggacaacaagagtagtgtgattgcttctttactttttgcagtgcacc

SEQ ID NO: 352915 - DNA, 120 bp, Artificial Sequence
  ENSG00000139324_5 (sequence is synthesized)
caatacacacagaagcagtaacaggagttgttggaagagcagaacttttgtcatctatcttttttctagcagcttttttgtcatataccagatcaaaaggaccagacaattccataatat

SEQ ID NO: 352916 - DNA, 120 bp, Artificial Sequence
  ENSG00000139324_6 (sequence is synthesized)
ggactccaattgccttgacagtgtttttagtggctgttgcaacattatgtaaagaacaaggaataacagttgtaggaatttgctgtgtgtatgaagtgtttattgcccaggggtatactt

SEQ ID NO: 352917 - DNA, 120 bp, Artificial Sequence
  ENSG00000139324_7 (sequence is synthesized)
tgccattactatgtactactgctggacagtttctccgtggaaagggtagcattccattttctatgctgcagacactagtaaaactcattgtcttgatgttcagtacattattacttgttg

SEQ ID NO: 352918 - DNA, 120 bp, Artificial Sequence
  ENSG00000139324_8 (sequence is synthesized)
tgattagagtccaggttattcaatcccaacttccagtattcaccaggtttgataacccagctgctgtaagcccaactcctacaaggcaactaacttttaactacctccttcctgtgaatg

SEQ ID NO: 352919 - DNA, 120 bp, Artificial Sequence
  ENSG00000139324_9 (sequence is synthesized)
cttggttgttattaaatccttcagagctctgctgtgattggaccatgggaacaataccacttatagagtcattactagatattcgaaatctggccacatttactttcttttgttttctgg

SEQ ID NO: 352920 - DNA, 120 bp, Artificial Sequence
  ENSG00000139324_10 (sequence is synthesized)
ggatgttgggagtattcagtatcagatactctggtgattcctccaagactgttttaatggcgctttgtttaatggcattaccatttattcctgcatcgaaccttttttttccagttggat

SEQ ID NO: 352921 - DNA, 120 bp, Artificial Sequence
  ENSG00000139324_11 (sequence is synthesized)
ttgttgttgccgagcgagtattatatgttcccagcatggggttctgtattttggtagcccatggatggcagaaaatatcaacaaaaagtgtatttaaaaagctatcctggatttgtctgt

SEQ ID NO: 352922 - DNA, 120 bp, Artificial Sequence
  ENSG00000139324_12 (sequence is synthesized)
ctatggtgatactcactcattccttaaaaacattccacagaaattgggattgggagtctgaatatacattgtttatgtcagccttgaaggtaaataaaaataatgccaaactttggaata

SEQ ID NO: 352923 - DNA, 120 bp, Artificial Sequence
  ENSG00000139324_13 (sequence is synthesized)
atgtgggtcatgctctggaaaatgaaaagaactttgagagagctttgaaatacttcttacaggctacccatgttcagccagatgatattggtgcccatatgaatgtaggaagaacttata

SEQ ID NO: 352924 - DNA, 120 bp, Artificial Sequence
  ENSG00000139324_14 (sequence is synthesized)
aaaatttaaatagaaccaaagaagctgaagaatcttacatgatggctaaatcactgatgcctcaaattattcctggtaaaaaatatgcagccagaattgcccctaaccacctaaatgttt

SEQ ID NO: 352925 - DNA, 120 bp, Artificial Sequence
  ENSG00000139324_15 (sequence is synthesized)
atatcaatctggctaacctgatccgagcaaatgagtcccgactggaagaagcagatcagctgtaccgtcaagcaataagcatgaggcccgacttcaagcaggcttacattagcagaggag

SEQ ID NO: 352926 - DNA, 120 bp, Artificial Sequence
  ENSG00000139324_16 (sequence is synthesized)
aattgcttttaaaaatgaataaacctcttaaagcaaaggaagcatatcttaaagcactagagctggacagaaataatgcagatctttggtacaacttggcaattgtacatattgaactta

SEQ ID NO: 352927 - DNA, 120 bp, Artificial Sequence
  ENSG00000139324_17 (sequence is synthesized)
aagaaccaaatgaagccctaaaaaactttaatcgtgctctggaactaaatccaaagcataaactagcattattcaactctgctatagtaatgcaagaatcaggtgaggttaaactcagac

SEQ ID NO: 352928 - DNA, 120 bp, Artificial Sequence
  ENSG00000139324_18 (sequence is synthesized)
ctgaagctagaaaacgacttctaagttatataaatgaagagccactagatgctaatgggtatttcaatttgggaatgcttgccatggatgacaaaaaggacaatgaagcagagatttgga

SEQ ID NO: 352929 - DNA, 120 bp, Artificial Sequence
  ENSG00000139324_19 (sequence is synthesized)
tgaagaaagccataaagttacaagccgacttccgaagtgctttgtttaatctggctctcctgtattcccagactgcaaaggaattaaaggctttgccaattttggaggagttactcagat

SEQ ID NO: 352930 - DNA, 120 bp, Artificial Sequence
  ENSG00000139324_20 (sequence is synthesized)
actaccctgatcatatcaagggcctcattttaaaaggagacattctgatgaatcaaaagaaagatatactaggagcaaaaaaatgttttgaaaggattttggagatggatccaagcaatg

SEQ ID NO: 352931 - DNA, 120 bp, Artificial Sequence
  ENSG00000139324_21 (sequence is synthesized)
tgcaaggaaaacacaatctttgtgttgtttattttgaagaaaaagacttattaaaagctgaaagatgccttcttgaaacactggcattagcaccacatgaagaatatattcagcgccatt

SEQ ID NO: 352932 - DNA, 120 bp, Artificial Sequence
  ENSG00000139324_22 (sequence is synthesized)
tgaatatagtcagggataagatttcctcatctagttttatagagccaatattcccaaccagtaagatttcaagtgtggaaggaaagaaaattccaactgaaagtgtaaaagaaattagag

SEQ ID NO: 352933 - DNA, 120 bp, Artificial Sequence
  ENSG00000139324_23 (sequence is synthesized)
gtgaatccagacaaacacaaatagtaaaaacaagtgataataaaagtcagtctaaatccaacaaacaattaggaaaaaatggagacgaagagacaccccacaaaacaacaaaagacatca

SEQ ID NO: 352934 - DNA, 120 bp, Artificial Sequence
  ENSG00000139324_24 (sequence is synthesized)
aagaaattgagaagaaaagagttgctgctttaaaaagactagaagagattgaacgtattttaaatggtgaataacattaatatttatcgtgacaatggtatcaaagaacatcaatccgta

SEQ ID NO: 352935 - DNA, 120 bp, Artificial Sequence
  ENSG00000139324_25 (sequence is synthesized)
tcatgtgattgcttttactgggagctttgaaaaaaagttcaagggttcctaatggtcaatcatgagctgccttgaagtaggatcaaaataagattttcattaaagacctgtattatccca

SEQ ID NO: 352936 - DNA, 120 bp, Artificial Sequence
  ENSG00000139324_26 (sequence is synthesized)
ggatgtatattatgtatcgctgttttcagagtgtgggtgaatatagcagaaatattacagcggaagtgacaaatttacaacttttattatagaaagaaggtgtttctggcaatgtaatct

SEQ ID NO: 352937 - DNA, 120 bp, Artificial Sequence
  ENSG00000139324_27 (sequence is synthesized)
ttactgctctcaattaaaaataattttgaggcctgaatgataatcccttgaggacaaatccaacatgtgctggtttattctgttaattcccatttatttgcctacttcatttttcttgca

SEQ ID NO: 352938 - DNA, 120 bp, Artificial Sequence
  ENSG00000139324_28 (sequence is synthesized)
cctcttagaatctaactatgaattgaaaacacttaagtaattctgtttaatcaagggatttacactacaaaagaatgctggctttttttatgttgtattccttagttgagttttagaagg

SEQ ID NO: 352939 - DNA, 120 bp, Artificial Sequence
  ENSG00000139324_29 (sequence is synthesized)
tgacacatgtatagctacatacacacatttttaatggtgctcatatatactgtattttttgttgtttagttttacttattgagagtgtcacaacatgaatcacataatcatgattttttt

SEQ ID NO: 352940 - DNA, 120 bp, Artificial Sequence
  ENSG00000139324_30 (sequence is synthesized)
tttttacttttactccccaaattattcatgtttcttagatcgtagtcattgagaagtcccaataactctaaacttttgagttataacgtagtaaacttctctttcatctttgtgttagct

SEQ ID NO: 352941 - DNA, 120 bp, Artificial Sequence
  ENSG00000139324_31 (sequence is synthesized)
ctgtagtcttaacctggattttaatttttttgtttccaaagtcacaattgaattattcttagataccttaagccactgaattcagttctgtttgactgaaagcaaaacaacgtgacagtt

SEQ ID NO: 352942 - DNA, 120 bp, Artificial Sequence
  ENSG00000139324_32 (sequence is synthesized)
aacgtgacagtttattttcaaacactaacttcttgatattttgttatggtatatctttttattaaatatttattttgactaagctttcataaaatatttgaagctattttaatcatcaag

SEQ ID NO: 352943 - DNA, 120 bp, Artificial Sequence
  ENSG00000139324_33 (sequence is synthesized)
attactattgcattttcctatatatgcatatattatggattaaccagaattgtatcatttttggcctaatgtctggatataaaagataattagcctactatagtattaataaatttttca

SEQ ID NO: 352944 - DNA, 120 bp, Artificial Sequence
  ENSG00000139324_34 (sequence is synthesized)
gttggtttgggcaaatttaaacctgaaaaataggttaaaaagtagttacaaattaaacttactaatttatacctgattttttttcttgaattaaagtacattttaaatgagctttataat

SEQ ID NO: 352945 - DNA, 120 bp, Artificial Sequence
  ENSG00000139324_35 (sequence is synthesized)
accttaaaaagttggttctaatttaaaatatgaaagctctggctatcatcctgggatagtaatttctaattatatagtatttcaaaactatatattttttagttcctttgagataactaa

SEQ ID NO: 352946 - DNA, 120 bp, Artificial Sequence
  ENSG00000139324_36 (sequence is synthesized)
tttctaattatatatgtttcaaaaaccatatcctgtattttttttaagaattgttttataaataggtcataagatacaaggtctgcattagaagacccactcttactaggttccctaagg

SEQ ID NO: 352947 - DNA, 120 bp, Artificial Sequence
  ENSG00000139324_37 (sequence is synthesized)
tttttttttttttttttaggtagtttaaagcaagcactgataccagtgggagttggtcttgatctaggagattctgttaagcatccaaaaacaatgcctaatttcagttcttaggttatg

SEQ ID NO: 352948 - DNA, 120 bp, Artificial Sequence
  ENSG00000139324_38 (sequence is synthesized)
atttcagttcttaggttatggcttgtgactccagataaaagatggagaatacctcatgtactgtgacttgaaaatgaattcttaaaattcttaggctctctccatgtatctttcttaagg

SEQ ID NO: 352949 - DNA, 120 bp, Artificial Sequence
  ENSG00000139324_39 (sequence is synthesized)
aaaagtttctgagtgtgatctctcttttgccatagtatcaagtggagggtagttcagaaaagttaataggaaatcttttgtgacagcagactataatagaagtttgagtaatattttaat

SEQ ID NO: 352950 - DNA, 120 bp, Artificial Sequence
  ENSG00000139324_40 (sequence is synthesized)
gtatcaatgttatccaatgatttttattaaaaaattaccttattattagaactgtgcctattacataaaaagtgctcatgtatttgaattttaaataatttatttaaatcaagaccacca

SEQ ID NO: 352951 - DNA, 120 bp, Artificial Sequence
  ENSG00000139324_41 (sequence is synthesized)
aaataatttatttaaatcaagaccaccataagtcattaataatttaataattgttttaaatcagtggttttcaaccctcacttcatattagaatcatctgaggacttttaatatggaatc

SEQ ID NO: 352952 - DNA, 120 bp, Artificial Sequence
  ENSG00000139324_42 (sequence is synthesized)
cacctcataacaattaagtctaaatttctggaagatggagccatgcttgtttttccaaaagctctttgagtgattctaatttgtagtcagagttgaagaccactgctctaaattagtgca

SEQ ID NO: 352953 - DNA, 120 bp, Artificial Sequence
  ENSG00000139324_43 (sequence is synthesized)
ggaaaatgcttttatttctcccatgttaacttttaaaactagtaatgtacccagttaagttttgatggtttaaattccactaaagaacatattcttctaataactagcatttattacatg

SEQ ID NO: 352954 - DNA, 120 bp, Artificial Sequence
  ENSG00000139324_44 (sequence is synthesized)
aaatttaagagtttaagttccatcaaactagcccttgtgtaagattattatttcttctctataacttcaaaatagatatttcattcaaactgttcaggtgagaaaacataatggattttt

SEQ ID NO: 352955 - DNA, 120 bp, Artificial Sequence
  ENSG00000139324_45 (sequence is synthesized)
ttttttttcctctggagctgcctgttcagtgagatggaggaggtgggcacatttaaggtcagttcactaacctatggttcagagttctgatcatatggaagtttggaaaagagagcttat

SEQ ID NO: 352956 - DNA, 120 bp, Artificial Sequence
  ENSG00000139324_46 (sequence is synthesized)
cacaggtttgtatgctggtgaatggatagttttaattctcactgtctcaaaagagaatcagctctccagcagttctagaaaagctttgacaatccccaaggggcagtgttaccttactcc

SEQ ID NO: 352957 - DNA, 120 bp, Artificial Sequence
  ENSG00000139324_47 (sequence is synthesized)
ttcactgcttcttagaaggtagaattaagtttctggaattgcacctacatgttttcttattaacattcagaattgggaatattaatttttccagtgagtagttttctgaaattggtaact

SEQ ID NO: 352958 - DNA, 120 bp, Artificial Sequence
  ENSG00000139324_48 (sequence is synthesized)
tggagagtaaaataacgtattttgcttttcaattttgtgtttgtttacttttatgtaaaaatttgatatgtgaattacacagttctaataaaacctcatgccttttcattacatctaatt

SEQ ID NO: 352959 - DNA, 120 bp, Artificial Sequence
  ENSG00000139324_49 (sequence is synthesized)
tgaactctcaacttcatgttacagaatgctttaaagatgctttaatgaaaagtattaagaaaatatatagatttgtatgtcagtttatacttcagaaatccatatatttgtcatatttat

SEQ ID NO: 352960 - DNA, 120 bp, Artificial Sequence
  ENSG00000139324_50 (sequence is synthesized)
ttttttagaaacctcctaattggataactagatggtatttaaaatgaatgcccaaaaatatcttgtacctttgtccaaaagtttatctgttggaagccgccagccattcatgtagagagt

SEQ ID NO: 352961 - DNA, 120 bp, Artificial Sequence
  ENSG00000139324_51 (sequence is synthesized)
ttataagaaaataatttaaaattgtatgcattttatattactatggtatctgtgtaccatatttctaagtattcattattaaattggtacttcttaaaaccataacctggcttgcctttt

SEQ ID NO: 352962 - DNA, 120 bp, Artificial Sequence
  ENSG00000139324_52 (sequence is synthesized)
agtgttaaaaaaatacaacattgtatatagagatttcttttatgaagaagagctgacgtaatttattagcagtgatctgagaaagacattaaataagtttctgagagtgatacattttca

SEQ ID NO: 352963 - DNA, 120 bp, Artificial Sequence
  ENSG00000139324_53 (sequence is synthesized)
aacatgaggagtgacaaccaccaaattaagaaaaggaaacaactcagacttggaattttatacgaatttcatttctatatgtgcctggtattgcctctggcataacttagaggaaattgt

SEQ ID NO: 352964 - DNA, 120 bp, Artificial Sequence
  ENSG00000139324_54 (sequence is synthesized)
ttgttctacctatatgtcctcagtttcttcatctacaagttgggaaaaacattttcctcttaaaattgtgaagaggatttatatatttatatgatatattgtatatattaatatatttaa

SEQ ID NO: 352965 - DNA, 120 bp, Artificial Sequence
  ENSG00000139324_55 (sequence is synthesized)
cttagagtttctagcacatagcaaataataaatattagttattagtataaacataaggcttaaagtcttggatttgatgcatatgacttaatttgtatttgtgctagtagctgtaatgtc

SEQ ID NO: 352966 - DNA, 120 bp, Artificial Sequence
  ENSG00000139324_56 (sequence is synthesized)
agtgacaggataacaagcaaatgattagaaatctaatagtaatgcttgttcctttgctatctatgctaacaagtacatagatagcctaagataaattatacttaggatgaagctaaaatg

SEQ ID NO: 352967 - DNA, 120 bp, Artificial Sequence
  ENSG00000139324_57 (sequence is synthesized)
cataactgagacaccttaaaattgtactaccttgtgctgttcactgccatcagggaggtagcataaaatgaaagataaagtctgaagactggatccaggcaaattcatgttctttctttg

SEQ ID NO: 352968 - DNA, 120 bp, Artificial Sequence
  ENSG00000139324_58 (sequence is synthesized)
taactcactttcttcgtcaacatttctgtgactcaatggatagcatatttccatcaagtagcacgtataacgtgatgctttcatgtttctgccttaaataaaataaccctcaaaaaacca

SEQ ID NO: 352969 - DNA, 120 bp, Artificial Sequence
  ENSG00000139324_59 (sequence is synthesized)
atgcaacgcgtaagactgcgacggtaccggggcggcggggaaggaccgagaggcgggaggagcagcggctcaggcgcctgcaaactggtggcctgaacgagtttttgtccagaagtgctt

SEQ ID NO: 352970 - DNA, 120 bp, Artificial Sequence
  ENSG00000139329_0 (sequence is synthesized)
agttccgtcctgacagagttcacagcatatattggtggattcttgtccatagtgcatctgctttaagaattaacgaaagcagtgtcaagacagtaaggattcaaaccatttgccaaaaat

SEQ ID NO: 352971 - DNA, 120 bp, Artificial Sequence
  ENSG00000139329_1 (sequence is synthesized)
gagtctaagtgcatttactctcttcctggcattgattggtggtaccagtggccagtactatgattatgattttcccctatcaatttatgggcaatcatcaccaaactgtgcaccagaatg

SEQ ID NO: 352972 - DNA, 120 bp, Artificial Sequence
  ENSG00000139329_2 (sequence is synthesized)
taactgccctgaaagctacccaagtgccatgtactgtgatgagctgaaattgaaaagtgtaccaatggtgcctcctggaatcaagtatctttaccttaggaataaccagattgaccatat

SEQ ID NO: 352973 - DNA, 120 bp, Artificial Sequence
  ENSG00000139329_3 (sequence is synthesized)
tgatgaaaaggcctttgagaatgtaactgatctgcagtggctcattctagatcacaaccttctagaaaactccaagataaaagggagagttttctctaaattgaaacaactgaagaagct

SEQ ID NO: 352974 - DNA, 120 bp, Artificial Sequence
  ENSG00000139329_4 (sequence is synthesized)
gcatataaaccacaacaacctgacagagtctgtgggcccacttcccaaatctctggaggatctgcagcttactcataacaagatcacaaagctgggctcttttgaaggattggtaaacct

SEQ ID NO: 352975 - DNA, 120 bp, Artificial Sequence
  ENSG00000139329_5 (sequence is synthesized)
gaccttcatccatctccagcacaatcggctgaaagaggatgctgtttcagctgcttttaaaggtcttaaatcactcgaataccttgacttgagcttcaatcagatagccagactgccttc

SEQ ID NO: 352976 - DNA, 120 bp, Artificial Sequence
  ENSG00000139329_6 (sequence is synthesized)
tggtctccctgtctctcttctaactctctacttagacaacaataagatcagcaacatccctgatgagtatttcaagcgttttaatgcattgcagtatctgcgtttatctcacaacgaact

SEQ ID NO: 352977 - DNA, 120 bp, Artificial Sequence
  ENSG00000139329_7 (sequence is synthesized)
ggctgatagtggaatacctggaaattctttcaatgtgtcatccctggttgagctggatctgtcctataacaagcttaaaaacataccaactgtcaatgaaaaccttgaaaactattacct

SEQ ID NO: 352978 - DNA, 120 bp, Artificial Sequence
  ENSG00000139329_8 (sequence is synthesized)
ggaggtcaatcaacttgagaagtttgacataaagagcttctgcaagatcctggggccattatcctactccaagatcaagcatttgcgtttggatggcaatcgcatctcagaaaccagtct

SEQ ID NO: 352979 - DNA, 120 bp, Artificial Sequence
  ENSG00000139329_9 (sequence is synthesized)
tccaccggatatgtatgaatgtctacgtgttgctaacgaagtcactcttaattaatatctgtatcctggaacaatattttatggttatgtttttctgtgtgtcagttttcatagtatcca

SEQ ID NO: 352980 - DNA, 120 bp, Artificial Sequence
  ENSG00000139329_10 (sequence is synthesized)
tattttattactgtttattacttccatgaattttaaaatctgagggaaatgttttgtaaacatttattttttttaaagaaaagatgaaaggcaggcctatttcatcacaagaacacacac

SEQ ID NO: 352981 - DNA, 120 bp, Artificial Sequence
  ENSG00000139329_11 (sequence is synthesized)
ttatttgtaaatttagtgtttttttatttctactgtcaaatgatgtgcaaaaccttttactggttgcatggaaatcagccaagttttataatccttaaatcttaatgttcctcaaagctt

SEQ ID NO: 352982 - DNA, 120 bp, Artificial Sequence
  ENSG00000139329_12 (sequence is synthesized)
ggattaaatacatatggatgttactctcttgcaccaaattatcttgatacattcaaatttgtctggttaaaaaataggtggtagatattgaggccaagaatattgcaaaatacatgaagc

SEQ ID NO: 352983 - DNA, 120 bp, Artificial Sequence
  ENSG00000139329_13 (sequence is synthesized)
ttcatgcacttaaagaagtatttttagaataagaatttgcatacttacctagtgaaacttttctagaattatttttcactctaagtcatgtatgtttctctttgattatttgcatgttat

SEQ ID NO: 352984 - DNA, 120 bp, Artificial Sequence
  ENSG00000139329_14 (sequence is synthesized)
gtttaataagctactagcaaaataaaacatagcaaatggcatcactgtgtttgacttcttgtgaaatttctgtactttgtatataaaatacataaaacaatagattagaaatcaaaagat

SEQ ID NO: 352985 - DNA, 120 bp, Artificial Sequence
  ENSG00000139329_15 (sequence is synthesized)
atctctggcctgcaatattttactgatgtgaacataggattttccactaaataatttgtctacttctagcattcacttacaaagagttcttaaaaacacctataataggtacttagattt

SEQ ID NO: 352986 - DNA, 120 bp, Artificial Sequence
  ENSG00000139329_16 (sequence is synthesized)
cacaacttacttagatatttgtcattattcccattcctggtgtttttactggttcatatacaatggtattctattagataagaagctgctatgtgatctcagcactcactccttggttgt

SEQ ID NO: 352987 - DNA, 120 bp, Artificial Sequence
  ENSG00000139329_17 (sequence is synthesized)
caagaaatggtggataactcacaggattaaaaatgaatgaatataaaattttctgaaatagatatttaaaaaatcattttagcttgaagccaatatgtctggatcataggttttgagttc

SEQ ID NO: 352988 - DNA, 120 bp, Artificial Sequence
  ENSG00000139329_18 (sequence is synthesized)
ataatccagtaataacagctttcagctttctatgagtatatacaattctatacaatgataaatactctgcatataatttataaaaataacttctgttttacctagttaacaataaaacct

SEQ ID NO: 352989 - DNA, 120 bp, Artificial Sequence
  ENSG00000139329_19 (sequence is synthesized)
atgtgtggagccaaatgttatgcagacaaaggtctgctcatcccataccagtgtatatatagtcaaatatgtgtctagtacaaataaaatgtatctctaaggcataaaatgttttaacac

SEQ ID NO: 352990 - DNA, 120 bp, Artificial Sequence
  ENSG00000139329_20 (sequence is synthesized)
accacttttagtgaactctatcttatggtacagcggcctttcatcagaggatcatcattgagactgagttgactggcagatatgtgcgatggatattacattaggtacaatgtgtatttt

SEQ ID NO: 352991 - DNA, 120 bp, Artificial Sequence
  ENSG00000139329_21 (sequence is synthesized)
tgattttcatgagttttctacattaaggtaaattccttagagtgtgatagcagcctcagtttatttgttggtttaaacttgaaatctactttttctcgataaaactataatgtagatgaa

SEQ ID NO: 352992 - DNA, 120 bp, Artificial Sequence
  ENSG00000139330_0 (sequence is synthesized)
gaagaagatccaagaaggctgaggtaagcagtcttctgaagccctgtcaaagtggaaacaatagatcaaaggtgttcatggtgactgggacgagtaggtttcactgtttctcatagacga

SEQ ID NO: 352993 - DNA, 120 bp, Artificial Sequence
  ENSG00000139330_1 (sequence is synthesized)
cttgacagcttaaagtaaaaacaaattattttcgtcaaagtttttttttttctcttaactgatttttagcaaacctcagactgagacacaggactcaacggtgtattcctggaaggcaag

SEQ ID NO: 352994 - DNA, 120 bp, Artificial Sequence
  ENSG00000139330_2 (sequence is synthesized)
gtgctataatggcaggcacaatctgtttcatcatgtgggtgttattcataacagacactgtgtggtctagaagtgtgaggcaggtctatgaagtacatgattcagatgattggactattc

SEQ ID NO: 352995 - DNA, 120 bp, Artificial Sequence
  ENSG00000139330_3 (sequence is synthesized)
atgacttcgagtgtcccatggaatgtttctgcccacccagttttcctactgctttatattgtgaaaatagaggtctcaaagaaattcctgctattccttcaagaatttggtatctttatc

SEQ ID NO: 352996 - DNA, 120 bp, Artificial Sequence
  ENSG00000139330_4 (sequence is synthesized)
ttcaaaacaacctgatagaaaccattcctgaaaagccatttgagaatgccacccagctaagatggataaatctaaacaagaacaaaataaccaactacggaattgaaaaaggagccctaa

SEQ ID NO: 352997 - DNA, 120 bp, Artificial Sequence
  ENSG00000139330_5 (sequence is synthesized)
gccagctgaagaagttgctcttcttatttctggaagataatgagctagaggaggtaccttctccattgccaagaagtttagaacaattacaattagctagaaataaggtgtccagaattc

SEQ ID NO: 352998 - DNA, 120 bp, Artificial Sequence
  ENSG00000139330_6 (sequence is synthesized)
ctcaagggacctttagcaatctggagaacctgacccttcttgacctacagaacaacaaattagtggacaatgcctttcaaagagacacttttaaaggactcaagaatctcatgcagctaa

SEQ ID NO: 352999 - DNA, 120 bp, Artificial Sequence
  ENSG00000139330_7 (sequence is synthesized)
acatggccaagaatgccctgaggaatatgcctccaagattaccagccaatacaatgcagttgtttttagacaacaattccattgaaggaataccagaaaattattttaatgtgattccta

SEQ ID NO: 353000 - DNA, 120 bp, Artificial Sequence
  ENSG00000139330_8 (sequence is synthesized)
aagtggcctttttgagactaaatcacaacaaactgtcagatgagggtctcccatcaagaggatttgatgtatcatcaattctagatcttcaactgtcgcacaatcaactcacaaaggttc

SEQ ID NO: 353001 - DNA, 120 bp, Artificial Sequence
  ENSG00000139330_9 (sequence is synthesized)
cgaatcagtgctcatctgcagcaccttcaccttgatcataacaaaattaaaagtgtgaatgtctctgtaatatgtcccagcccatccatgctgcctgcagaacgagattccttcagttat

SEQ ID NO: 353002 - DNA, 120 bp, Artificial Sequence
  ENSG00000139330_10 (sequence is synthesized)
ggacctcatcttcgctacctccgtctggatggaaatgaaatcaaaccaccaattccaatggctttaatgacctgcttcagacttctgcaggctgtcattatttaaacacattctcaccaa

SEQ ID NO: 353003 - DNA, 120 bp, Artificial Sequence
  ENSG00000139330_11 (sequence is synthesized)
atctaaaattagtttaatgagctgtttctgacatgaaatgtggttaccattaataggtttaggacacaagtcatattccccattgctctcggccaccattttcatttgtgcagtgtattt

SEQ ID NO: 353004 - DNA, 120 bp, Artificial Sequence
  ENSG00000139330_12 (sequence is synthesized)
tttctattcaaagatgcttttgccagttacatgcatcacagcctgcattaatttgcttttcttttaattaataaaacagacacagagttaagatagtttatcaactcaaagatagtttta

SEQ ID NO: 353005 - DNA, 120 bp, Artificial Sequence
  ENSG00000139330_13 (sequence is synthesized)
ttttggtctcttccatagcttattaacactaaagaaaacaattacattcttatacaataaaaaggacacatttgtgtatgtttaaaattacttatgcagataccgtaatttacagtataa

SEQ ID NO: 353006 - DNA, 120 bp, Artificial Sequence
  ENSG00000139330_14 (sequence is synthesized)
atgtaataatcaaacaggaggataacgacctgaagaaaatgagaaaataaaatatttcttaattgtaatcataataaaacaattgcagattgctaagtagctgttggtggtacaagtttg

SEQ ID NO: 353007 - DNA, 120 bp, Artificial Sequence
  ENSG00000139330_15 (sequence is synthesized)
atatttagcttgagaatgggtatggaatgaatcaaatacttcatcactaaagaattcttgttatttaatatcaaataatgaaacagcagtcacttctagttcattaccatttcttgtagc

SEQ ID NO: 353008 - DNA, 120 bp, Artificial Sequence
  ENSG00000139330_16 (sequence is synthesized)
tgttgtttttagatatagtccactgcattcttataagttctaaattttatgtttattataatgcatttcttgtggaatcttagtgttttaacatttgaaatccacttaaactgcaaattg

SEQ ID NO: 353009 - DNA, 120 bp, Artificial Sequence
  ENSG00000139330_17 (sequence is synthesized)
ttctttatatttgattgtgttttttggattttctaaataaaaatattgaatgctttctaacaaaacagaatatttcaaagaaattagcaagcttcattaaagaacatgttttaataaaaa

SEQ ID NO: 353010 - DNA, 120 bp, Artificial Sequence
  ENSG00000139343_0 (sequence is synthesized)
ggtgggaggtgaaaggtcatagtcctgtttggcggccatttctcttgaaactgcggctcgggacctgcggtacctgctgtagtcacgagggacgggcggcggcctggtcggcagagagta

SEQ ID NO: 353011 - DNA, 120 bp, Artificial Sequence
  ENSG00000139343_1 (sequence is synthesized)
gcctgcaacattcggccgtggttacgatgagtttacccctcaatcccaaacctttcctcaatggactaacaggaaagccagtgatggtgaaacttaagtggggaatggagtacaagggct

SEQ ID NO: 353012 - DNA, 120 bp, Artificial Sequence
  ENSG00000139343_2 (sequence is synthesized)
atctggtatctgtagatggctacatgaacatgcagcttgcaaatacagaagaatacatagatggagctttgtctggacatctgggtgaagttttaataaggtgtaataatgtcctttata

SEQ ID NO: 353013 - DNA, 120 bp, Artificial Sequence
  ENSG00000139343_3 (sequence is synthesized)
tcagaggtgtggaagaagaggaagaagatggggaaatgagagaatagcatcttttgtgggggattttttttatatatatttctagacaataaagatttgtttgtttttcaacttgacttg

SEQ ID NO: 353014 - DNA, 120 bp, Artificial Sequence
  ENSG00000139343_4 (sequence is synthesized)
tgaactatttgtattcagatatttacaagcaaagctgaaatgatgaaccaattgggaaagattactcactgaactaatgctttaaaagccactgaatttcatttaagttgcttttctttt

SEQ ID NO: 353015 - DNA, 120 bp, Artificial Sequence
  ENSG00000139343_5 (sequence is synthesized)
tgaatttcagaccttttcttgtaaaattatctattagctgagaccttttaaatgcaactttttcttttaaagttatttttgagctacttttaacgtataaaattaaacattttcttggta

SEQ ID NO: 353016 - DNA, 120 bp, Artificial Sequence
  ENSG00000139343_6 (sequence is synthesized)
ttaataatatactgtcttattttacttagtagtcaataaattacatgttaattctgtgtcaatataagctaaatgcacatattgcagctaaaattgaagcatcttctaaaaattaaaatg

SEQ ID NO: 353017 - DNA, 120 bp, Artificial Sequence
  ENSG00000139343_7 (sequence is synthesized)
attgtacagacagggcacaacagaaattgggaactgacattcaggctgaaggcatacggtttgttcactgaagagaaaaaagttctctgaacaaaatgtaatgtcaaataaaaaccagtc

SEQ ID NO: 353018 - DNA, 120 bp, Artificial Sequence
  ENSG00000139343_8 (sequence is synthesized)
tccccattatgttctgagacataacctcgaggttgagttttaagcccctcaaaacccttcaggtattttagggttgtacattgttaaaatgtatagtccatagtaataacagtatgctat

SEQ ID NO: 353019 - DNA, 120 bp, Artificial Sequence
  ENSG00000139343_9 (sequence is synthesized)
gaacttccctacagatgggttgagaaaatacatcatttacattctcatgttgtaagagaatggccattattacacttcagtgttcatttaccatagttttatcagtaaactatctttgtg

SEQ ID NO: 353020 - DNA, 120 bp, Artificial Sequence
  ENSG00000139343_10 (sequence is synthesized)
tatccccaagtgggacaactcaaagtatagaagaaagtgtttagctatatggaataatacttatgatatgaatacttaaagacttaaaatttacaaaatacacctaagacattctggtaa

SEQ ID NO: 353021 - DNA, 120 bp, Artificial Sequence
  ENSG00000139343_11 (sequence is synthesized)
actcctctggttccttgaaataaagtgctggctcctaattaatcaataatgaagaatataatttacttaaaaatatgctacctatgcacatgtgacttatctagaaaatacagtggggta

SEQ ID NO: 353022 - DNA, 120 bp, Artificial Sequence
  ENSG00000139343_12 (sequence is synthesized)
aaggaagacagttctaaggatgagggagacacaggtaggaacttgtatgggaaactcgcctatttccaagtgagagctggctttcagaaagagcacatttgcagtgttgtggggagatga

SEQ ID NO: 353023 - DNA, 120 bp, Artificial Sequence
  ENSG00000139343_13 (sequence is synthesized)
taagctaaagagctgtaaaggtcataacattgcatttattttgcttcaccttatttctcaaaggtttagtctgactaataagaatacatacaattaaattgacaaatatacggcaaaatt

SEQ ID NO: 353024 - DNA, 120 bp, Artificial Sequence
  ENSG00000139343_14 (sequence is synthesized)
aattcagctacagattttattcctagtagttaaagtaggaagagctcagacacttgattcataataataccataagggaaacacactactttgctggagaaaacaaaacatttctcatca

SEQ ID NO: 353025 - DNA, 120 bp, Artificial Sequence
  ENSG00000139343_15 (sequence is synthesized)
tttagccctgaaagaaagttttcaagtgaaattattgagtcttttaatgaatgctaaaggcacaacaccaaagctattgaggaaattcattccttcaggggaaagacagatctgccaaag

SEQ ID NO: 353026 - DNA, 120 bp, Artificial Sequence
  ENSG00000139343_16 (sequence is synthesized)
gaattgaactgactgtatgtctgtcaaacgagtttctgtaaatgattcagccatgtgttttggtgggtttttttgtaattaattatctttttattgtggtaaaatatacattacaatttt

SEQ ID NO: 353027 - DNA, 83 bp, Artificial Sequence
  ENSG00000139343_17 (sequence is synthesized)
tctggtatctgtagatggctacatgaacatgcagattttcatctacatcttgggaatattgaaacaaaatggagtttcactct

SEQ ID NO: 353028 - DNA, 120 bp, Artificial Sequence
  ENSG00000139343_18 (sequence is synthesized)
cttagggggaaagcattcagtcttttaccattagatatgtaatgttagtgataagtttctagtagatgtccttttataaagttgaggaacttctcttctgttcctactttgctgagagtc

SEQ ID NO: 353029 - DNA, 120 bp, Artificial Sequence
  ENSG00000139343_19 (sequence is synthesized)
tccatcaagaatgaattttggatattgttgagtggtttttctgcatcaattgggataatcatatgggttttcatttttaatttgttaatgtgtattacattgatttatttttaaatgtta

SEQ ID NO: 353030 - DNA, 120 bp, Artificial Sequence
  ENSG00000139343_20 (sequence is synthesized)
aattacttttgtattcttagattaaaccctaatttgtcataatgtattatctttttagtattattggatttggtttgttacattttgttcagaatgtttgcatatttgcttacgagagat

SEQ ID NO: 353031 - DNA, 120 bp, Artificial Sequence
  ENSG00000139343_21 (sequence is synthesized)
ataacctgggagattcagaaacttatgttgaaacaagctttgaatattaatttcgttgaaggtttatatgaaaccaaaagtactacaatagtaatagaaagctcatcttctgtttattaa

SEQ ID NO: 353032 - DNA, 120 bp, Artificial Sequence
  ENSG00000139343_22 (sequence is synthesized)
ttatagataaatttgagttgttggtatagaaaggtctcagttaatgagttctctcaccaatattagctgtattgtaatattttcctcctgtgtgattatactaatatatttctttttatt

SEQ ID NO: 353033 - DNA, 120 bp, Artificial Sequence
  ENSG00000139344_0 (sequence is synthesized)
gtcctccactgagtcctgccggtggcccgagcccggtggcctcccggcgaccctcggcgcgaggcgacatggcaagcggccacagcctcctgctggagaacgcgcagcaagtggtgctgg

SEQ ID NO: 353034 - DNA, 120 bp, Artificial Sequence
  ENSG00000139344_1 (sequence is synthesized)
tgtgcgcccgcggcgagcgcttcctggcgcgggatgcgctgcgcagcctggcggtgctggaaggcgccagcctggtggtgggcaaagatggatttataaaagctattggtcctgctgatg

SEQ ID NO: 353035 - DNA, 120 bp, Artificial Sequence
  ENSG00000139344_2 (sequence is synthesized)
ttattcaaagacagttttctggagaaacttttgaagaaataattgactgctctgggaaatgtattctaccaggtttggtggatgcacacacacatccagtatgggctggtgaaagagttc

SEQ ID NO: 353036 - DNA, 120 bp, Artificial Sequence
  ENSG00000139344_3 (sequence is synthesized)
acgaatttgcaatgaagttggcaggagccacctacatggaaattcaccaggccggaggagggatccactttaccgtggagcgcacgcgccaagccacagaggaggagctgttccgctcct

SEQ ID NO: 353037 - DNA, 120 bp, Artificial Sequence
  ENSG00000139344_4 (sequence is synthesized)
tgcagcaacggctccagtgcatgatgagggctggcaccacgctggtggagtgcaagagtggatatggcctcgacctggagaccgagctcaagatgctgcgcgtgattgagcgcgcccggc

SEQ ID NO: 353038 - DNA, 120 bp, Artificial Sequence
  ENSG00000139344_5 (sequence is synthesized)
gggagctggacatcggcatctcggctacctactgcggggctcattcagtgcctaaaggaaaaactgctactgaagctgctgatgacatcatcaataaccacctcccaaagctgaaggaac

SEQ ID NO: 353039 - DNA, 120 bp, Artificial Sequence
  ENSG00000139344_6 (sequence is synthesized)
ttggcagaaatggggaaatacacgtggacaatatagacgtattttgtgagaaaggtgtctttgatctcgattccaccagaaggattcttcaacgtggaaaagatatagggttacagatta

SEQ ID NO: 353040 - DNA, 120 bp, Artificial Sequence
  ENSG00000139344_7 (sequence is synthesized)
acttccatggggatgaactccacccgatgaaggctgctgagcttggggctgaactgggagcgcaggcaatcagccacctggaagaagtgagtgatgaaggcatcgttgccatggcaacgg

SEQ ID NO: 353041 - DNA, 120 bp, Artificial Sequence
  ENSG00000139344_8 (sequence is synthesized)
ccaggtgctctgccatccttctgcccaccacagcctacatgctgagactgaaacaacctcgagccaggaagatgttagatgaaggagtaatagttgctctgggaagtgatttcaacccca

SEQ ID NO: 353042 - DNA, 120 bp, Artificial Sequence
  ENSG00000139344_9 (sequence is synthesized)
ctgaggccttggccgctgccaccatcaatgcagcttatgcactgggaaagtctcacacacacggatcgttggaagttggcaaacagggagatctcattatcatcaattcatcccgatggg

SEQ ID NO: 353043 - DNA, 120 bp, Artificial Sequence
  ENSG00000139344_10 (sequence is synthesized)
agcatttgatttaccagttcggaggccatcatgaattaattgaatatgttatagctaaaggaaaactcatctataaaacatgatagatttgaaaagagaagactttttgactatatgaaa

SEQ ID NO: 353044 - DNA, 120 bp, Artificial Sequence
  ENSG00000139344_11 (sequence is synthesized)
taagtcaatatagttatattaaaagttaaaacaccttaatatttacaagaattatatcacttaaacctaaatgtacttcaatgtctttttaagtcactcaaaaaacccaagggatagatt

SEQ ID NO: 353045 - DNA, 120 bp, Artificial Sequence
  ENSG00000139344_12 (sequence is synthesized)
tattttcatttaacacatgcatttgacatataaacaggtaaacctattgtgattaaaatcacaaaacatccaattagttcacaaatattggttacaaatattctgtagattaatatggtg

SEQ ID NO: 353046 - DNA, 120 bp, Artificial Sequence
  ENSG00000139344_13 (sequence is synthesized)
gggtatcacaaaaatgcctttgtggggaaaagtaggcttggcttaaaatttccattttgtgtctgtatttcacatctcagtttttaaactatatttagtgaacattgagggatcgaaaga

SEQ ID NO: 353047 - DNA, 120 bp, Artificial Sequence
  ENSG00000139344_14 (sequence is synthesized)
aatctaagtgatacgccccaatgaagctaaaatatagccttctgttaagcaaatagtatttcctttccccaagtagttcattttctagatgcttgtcaaatgaattaatgtcctctgatg

SEQ ID NO: 353048 - DNA, 120 bp, Artificial Sequence
  ENSG00000139344_15 (sequence is synthesized)
aagagtgtccttccgtttctaaggtcttctcaatctcagcaatagagcttcccagcagcgttcaagacacatcatttatacacaggcacaggggccttcctgaaatgggtgcatttttac

SEQ ID NO: 353049 - DNA, 120 bp, Artificial Sequence
  ENSG00000139344_16 (sequence is synthesized)
caactacaatcatgtaatttttttggaaattttttaaaattttcgattctttacattacaattgggtgaaacacattttacagctctcaataaatgtttgctgtcgctcttattgttgtt

SEQ ID NO: 353050 - DNA, 120 bp, Artificial Sequence
  ENSG00000139344_17 (sequence is synthesized)
gtttcctttcagcctggaagtagatcagcagcgttgtctattagagtttttaggaaattacaaaattatttgtaaagagtcgataattatttacatataaatgggtgtttttaaaagcca

SEQ ID NO: 353051 - DNA, 120 bp, Artificial Sequence
  ENSG00000139350_0 (sequence is synthesized)
gaagtttaacagtccaggcgggagccggaagcccagcgcggagccggccgcggccccctgttgtgttgctgcggagaggtacttggatgcattttacaggttagcctcacttgagctgtt

SEQ ID NO: 353052 - DNA, 120 bp, Artificial Sequence
  ENSG00000139350_1 (sequence is synthesized)
gtcctgcaagtaaagtgtatttttggtgattgaaagttggagaactttcatttcagctgagtggtgtagttgaattggttcctgtagccgctgtccctaaacccaggccgacgttaccgc

SEQ ID NO: 353053 - DNA, 120 bp, Artificial Sequence
  ENSG00000139350_2 (sequence is synthesized)
cttgtgtcctgactgctagctttcgacgggaccgtctttgagggactcatgtaaagtctctcccttaatgctcagttcttagaagaccgaggcgcagtcatgcaggaaaacctcagattt

SEQ ID NO: 353054 - DNA, 120 bp, Artificial Sequence
  ENSG00000139350_3 (sequence is synthesized)
gcttcatcaggagatgatattaaaatatgggatgcttcatctatgacattggtggataaattcaacccacacacatcaccacatggaatcagctcaatatgttggagcagcaataataac

SEQ ID NO: 353055 - DNA, 120 bp, Artificial Sequence
  ENSG00000139350_4 (sequence is synthesized)
tttttagtaacagcatcttccagtggcgacaaaatagttgtctcaagttgcaaatgtaaacctgttccacttttagagcttgctgaagggcaaaagcagacatgtgtcaatttaaattct

SEQ ID NO: 353056 - DNA, 120 bp, Artificial Sequence
  ENSG00000139350_5 (sequence is synthesized)
acatctatgtatttggtaagcggaggcctaaataacactgttaatatttgggatttaaaatcaaaaagagttcatcgatctcttaaggatcataaagatcaagtaacttgtgtaacatac

SEQ ID NO: 353057 - DNA, 120 bp, Artificial Sequence
  ENSG00000139350_6 (sequence is synthesized)
aattggaatgattgctacattgcttctggatctcttagtggtgaaattattttacacagtgtaaccactaatttatctagtactccttttggccatggtagtaaccagtctgttcggcac

SEQ ID NO: 353058 - DNA, 120 bp, Artificial Sequence
  ENSG00000139350_7 (sequence is synthesized)
ttgaagtactccttgtttaagaaatcactactgggcagtgtttcggataatggaatagtaactctctgggatgtaaatagtcagagtccataccataactttgacagtgtacacaaagct

SEQ ID NO: 353059 - DNA, 120 bp, Artificial Sequence
  ENSG00000139350_8 (sequence is synthesized)
ccagcgtcaggcatctgtttttctcctgtcaatgaattgctctttgtaaccataggcttggataaaagaatcatcctctatgacacttcaagtaagaagctagtgaaaactttagtggct

SEQ ID NO: 353060 - DNA, 120 bp, Artificial Sequence
  ENSG00000139350_9 (sequence is synthesized)
gacactcctctaactgcggtagatttcatgcctgatggagccactttggctattggatcttcccgggggaaaatatatcaatatgatttaagaatgttgaaatcaccagttaagaccatc

SEQ ID NO: 353061 - DNA, 120 bp, Artificial Sequence
  ENSG00000139350_10 (sequence is synthesized)
agtgctcacaagacatctgtgcagtgtatagcatttcagtactccactgttcttactaagtcaagtttaaataaaggctgttcaaataagcccacaacagtgaacaaacgaagtgttaat

SEQ ID NO: 353062 - DNA, 120 bp, Artificial Sequence
  ENSG00000139350_11 (sequence is synthesized)
gtgaatgctgctagtggaggagttcagaattccggaattgtcagagaagcacctgccacgtccattgccacagttctaccacaacctatgacatcagctatggggaaaggaacagttgct

SEQ ID NO: 353063 - DNA, 120 bp, Artificial Sequence
  ENSG00000139350_12 (sequence is synthesized)
gttcaagaaaaagcaggtttgcctcgaagcataaacacagacactttatctaaggaaacagacagtggaaaaaatcaggatttctccagctttgatgatactgggaaaagtagtttaggt

SEQ ID NO: 353064 - DNA, 120 bp, Artificial Sequence
  ENSG00000139350_13 (sequence is synthesized)
gacatgttctcacctatcagagatgatgctgtagttaacaagggaagtgatgagtccataggcaaaggagatggctttgactttctaccgcagttgaactcagtgtttcctccaagaaaa

SEQ ID NO: 353065 - DNA, 120 bp, Artificial Sequence
  ENSG00000139350_14 (sequence is synthesized)
aatccagtaacttcaagtacttcagtattgcattctagtcctcttaatgtttttatgggatctccagggaaagaggaaaatgaaaaccgtgatctaacagctgagtctaagaaaatatat

SEQ ID NO: 353066 - DNA, 120 bp, Artificial Sequence
  ENSG00000139350_15 (sequence is synthesized)
atgggaaaacaggaatctaaagactccttcaaacagttagcaaagttggtcacatctggtgctgaaagtggaaatctaaatacctctccatcatctaaccaaacaagaaattctgagaaa

SEQ ID NO: 353067 - DNA, 120 bp, Artificial Sequence
  ENSG00000139350_16 (sequence is synthesized)
atcttctgtcactgctggagttgccagttcactctcagaaaaaatagccgacagcattggaaataaccggcaaaatgcaccattgacttccattcaaattcgttttattcagaacatgat

SEQ ID NO: 353068 - DNA, 120 bp, Artificial Sequence
  ENSG00000139350_17 (sequence is synthesized)
acaggaaacgttggatgactttagagaagcatgccatagggacattgtgaatttgcaagtggagatgattaaacagtttcatatgcaactgaatgaaatgcattctttgctggaaagata

SEQ ID NO: 353069 - DNA, 120 bp, Artificial Sequence
  ENSG00000139350_18 (sequence is synthesized)
ctcagtgaatgaaggtttagtggctgaaattgaaagactacgagaagaaaacaaaagattacgggcccacttttgaaatttcagtgaataccttaatgttctgtaatttgggaagtttct

SEQ ID NO: 353070 - DNA, 120 bp, Artificial Sequence
  ENSG00000139350_19 (sequence is synthesized)
ggcaacacagaactacatagaatcagtattgttttcatggcctccagggaaaaaatgtttttcaagtaagagtaaaaggatgatgggattttataccaacaactgtttcatcttaaaaat

SEQ ID NO: 353071 - DNA, 120 bp, Artificial Sequence
  ENSG00000139350_20 (sequence is synthesized)
atgtatatttttatattaaaaattgtacagtatgtcatctacccaataggaaagtcaacaggatctttattttttgaaagctttagccatccactaagtgccctttttcataagagaaga

SEQ ID NO: 353072 - DNA, 120 bp, Artificial Sequence
  ENSG00000139350_21 (sequence is synthesized)
aaattgtgcataaaaattggttatgtttgttttttagtcatcttttttaacatatatttttgattgacaaattgcctttcaaatttttggggctagttgagatttaaagagtttgatatg

SEQ ID NO: 353073 - DNA, 120 bp, Artificial Sequence
  ENSG00000139350_22 (sequence is synthesized)
ccttctatttttatggagaaagtaattttaaaatggcaattggtgtttctaagccattgactaataaaacatagggttggctagtaattattttgttaacttgatgaagtcaagtatgac

SEQ ID NO: 353074 - DNA, 120 bp, Artificial Sequence
  ENSG00000139350_23 (sequence is synthesized)
tattatttattgtacatttgataagacaatttttggaattttgaattgcacaaattacatgatatcttttgcatttatgttactatattgtacttctgacaaatctttattcctgggtgg

SEQ ID NO: 353075 - DNA, 120 bp, Artificial Sequence
  ENSG00000139350_24 (sequence is synthesized)
tatttttaagatatctttacctataaaaaatgtttaaggttcataggactcgacaagagctatctggtgattttctcattagtaacatgcaacgttgtactgcaaaatttcaatcaacat

SEQ ID NO: 353076 - DNA, 120 bp, Artificial Sequence
  ENSG00000139350_25 (sequence is synthesized)
gacaacttataatgagtggagatttcatattaggtactaaatattatagtattatttctattttctttttccaaataagaagcttggattattttattttgtggtctttatcattaactt

SEQ ID NO: 353077 - DNA, 120 bp, Artificial Sequence
  ENSG00000139350_26 (sequence is synthesized)
taattctttctgtactgtgtataatatttttatattattggccttaccataaaattatttagaaaggttgtcaaaataagttatacctctttggcaatagatagatgtatacatctacct

SEQ ID NO: 353078 - DNA, 120 bp, Artificial Sequence
  ENSG00000139350_27 (sequence is synthesized)
actatgatctacaattttaggttaagtgaagcttgggggggctactgacttggttaccttcttgtctcttgtcccaaagatttaaactgtgtacctttgtatagctcttctgccccattt

SEQ ID NO: 353079 - DNA, 120 bp, Artificial Sequence
  ENSG00000139350_28 (sequence is synthesized)
aattaaaaaaaaaaaaacaaaaaacaaacctttagctcactaactttatgggtttctgaagtgatggaaatttttaaggatatatttaataagcataaacttactaataattacttccaa

SEQ ID NO: 353080 - DNA, 120 bp, Artificial Sequence
  ENSG00000139350_29 (sequence is synthesized)
gcataaacttactaataattacttccaaaaataaaaacaggaatattacttttacccagtgtggtttatagcatacatttgtactgaagcatatagggatgttaatgtgatcttttcctg

SEQ ID NO: 353081 - DNA, 120 bp, Artificial Sequence
  ENSG00000139350_30 (sequence is synthesized)
acagattatgaaagcattatgacttgtaacaagtttccttgtatatcactaacaggtttagaagacataaatattagtgtgttttgcctacatggtgtatttaaatctattaatattttc

SEQ ID NO: 353082 - DNA, 120 bp, Artificial Sequence
  ENSG00000139350_31 (sequence is synthesized)
ctgttgcttttttaaaaaaataaatacacataatgtatattaaaagaggtgggatgaaataattttagtaattatgtgtacagatgaaacatttttgtcatggaatttaaaagctaagta

SEQ ID NO: 353083 - DNA, 120 bp, Artificial Sequence
  ENSG00000139350_32 (sequence is synthesized)
agtataaaaaataaaatgttatatgcaaaaaataggaaacatgaaattgaaatttcattgttggccaaaatgatatgagagatttaccttcccacctgaaattaaaaaagaaaatatgtg

SEQ ID NO: 353084 - DNA, 120 bp, Artificial Sequence
  ENSG00000139350_33 (sequence is synthesized)
agtccaggcgggagccggaagcccagcgcggagccggccgcggccccctgttgtgttgctgcggagaggtacttggatgcattttacagctgagtggtgtagttgaattggttcctgtag

SEQ ID NO: 353085 - DNA, 120 bp, Artificial Sequence
  ENSG00000139350_34 (sequence is synthesized)
gggaagtgtccggggaggcgcgggccggggtcgcgcacctcccggagccttgtggggtgtgctgcctccgaaaagtttgcctcgtctccacaagtctgtctccttttttgtcaacctcaa

SEQ ID NO: 353086 - DNA, 120 bp, Artificial Sequence
  ENSG00000139350_35 (sequence is synthesized)
agtcattgtaaggctagtgaaaactttagtggctgacactcctctaactgcggtagatttcatgcctgatggagccactttggctattggatcttcccgggggaaaatatatcaatatga

SEQ ID NO: 353087 - DNA, 120 bp, Artificial Sequence
  ENSG00000139350_36 (sequence is synthesized)
aatgtgagccatttttgaaagctactctgtaagctatactcattgcttgtcttcttagtgtgttagcttttataatcgcaattcttataatagtctagtgctatagatgttcatggattg

SEQ ID NO: 353088 - DNA, 120 bp, Artificial Sequence
  ENSG00000139350_37 (sequence is synthesized)
aacagtccaggcgggagccggaagcccagcgcggagccggccgcggccccctgttgtgttgctgcggagaggtgaggttccggaggccctgaggcgcagtcatgcaggaaaacctcagat

SEQ ID NO: 353089 - DNA, 120 bp, Artificial Sequence
  ENSG00000139350_38 (sequence is synthesized)
aacagtccaggcgggagccggaagcccagcgcggagccggccgcggccccctgttgtgttgctgcggagaggtacttggatgcattttacaggcgcagtcatgcaggaaaacctcagatt

SEQ ID NO: 353090 - DNA, 120 bp, Artificial Sequence
  ENSG00000139351_0 (sequence is synthesized)
cgcgcttgtggaggagttgtggaggacgcctgtcgacgaccagtaactggtcctcggccattgcggaagcatctaaatatggtgtcctccggaaaaaagtattccaggaaatctgggaag

SEQ ID NO: 353091 - DNA, 120 bp, Artificial Sequence
  ENSG00000139351_1 (sequence is synthesized)
ccgtctgtggaagatcagtttacgagagcctatgactttgagactgaagataagaaagatctgagtggatcagaggaagatgttattgaagggaagactgcagtcattgagaaacgtagg

SEQ ID NO: 353092 - DNA, 120 bp, Artificial Sequence
  ENSG00000139351_2 (sequence is synthesized)
aagaaaaggtcttctgcaggagtagttgaagatatggggggtgaagtgcagaatatgctggaaggagttggagttgacattaacaaggctcttcttgccaagagaaagagactagaaatg

SEQ ID NO: 353093 - DNA, 120 bp, Artificial Sequence
  ENSG00000139351_3 (sequence is synthesized)
tataccaaggcttctctcaaaactagtaaccagaaaattgaacatgtttggaaaacacaacaagatcaaaggcagaagcttaaccaagaatattctcagcagtttctgactttgtttcag

SEQ ID NO: 353094 - DNA, 120 bp, Artificial Sequence
  ENSG00000139351_4 (sequence is synthesized)
agattgaaaacaattaaacagttatatgagcagttcataaagagtatggaagagttggagaagaatcatgataatctacttactggtgcacaaaatgaatttaaaaaagaaatggctatg

SEQ ID NO: 353095 - DNA, 120 bp, Artificial Sequence
  ENSG00000139351_5 (sequence is synthesized)
ttgcaaaaaaaaattatgatggaaactcagcagcaagagatagcaagtgttcggaagtctcttcaatccatgttattctgatgactctttgaagaaagaacttgaacctaagtaatatga

SEQ ID NO: 353096 - DNA, 120 bp, Artificial Sequence
  ENSG00000139351_6 (sequence is synthesized)
tacaattataacgttagctaagaagcatattgtaagtctttagaatagtttaattgtaacatctttaatcataaacctgtttcattgtaagacctccctttctgttaagtcaaatctaaa

SEQ ID NO: 353097 - DNA, 120 bp, Artificial Sequence
  ENSG00000139351_7 (sequence is synthesized)
tagttatgagttagttagcaactattcctaaagaatatgtattaagctttcagctctttagtaatgatagtgaatttttctctctaacactgtcaattaaataaagacgatttaatttta

SEQ ID NO: 353098 - DNA, 120 bp, Artificial Sequence
  ENSG00000139351_8 (sequence is synthesized)
agaagcgtcgcggagaaggggccacctcaggtgaagcgcgcttgtggaggagttgtggaggacgcctgtcgacgaccagtaactggtcctcggccattgcggtgtgtttcagtcaggaag

SEQ ID NO: 353099 - DNA, 120 bp, Artificial Sequence
  ENSG00000139351_9 (sequence is synthesized)
ttgcctcagaagcgtcgcggagaaggggccacctcaggtgaagcgcgcttgtggaggagttgtggaggacgcctgtcgacgaccagtaactggtcctcggccattgcggtgtgtttcagg

SEQ ID NO: 353100 - DNA, 120 bp, Artificial Sequence
  ENSG00000139351_10 (sequence is synthesized)
agcttgcctcagaagcgtcgcggagaaggggccacctcaggtgaagcgcgcttgtggaggagttgtggaggacgcctgtcgacgaccagtaactggtcctcggccattgcgtcaggaagc

SEQ ID NO: 353101 - DNA, 120 bp, Artificial Sequence
  ENSG00000139351_11 (sequence is synthesized)
cagaggaagatgttattgaaggtgcagtacatctcatgttgggcagtgatgtccttcagttcatttgttttgaacccattgagactatcgtacaacttagtttgtaaagcattttcaggt

SEQ ID NO: 353102 - DNA, 120 bp, Artificial Sequence
  ENSG00000139351_12 (sequence is synthesized)
atggtcttccctcccccggtatttgtggttacagaacctgctgacacggatggccagctgtacttgtgtttctcatttgatccttatattgcagtatcggagttacagaagcttattcgg

SEQ ID NO: 353103 - DNA, 120 bp, Artificial Sequence
  ENSG00000139351_13 (sequence is synthesized)
caactcttgcttttgcagttatttccaaaatatctgatatatagtatgtggcttactgtgacattaacccagggagacttgaaaaattattcctataaaatggtcctgaatcctgattta

SEQ ID NO: 353104 - DNA, 120 bp, Artificial Sequence
  ENSG00000139351_14 (sequence is synthesized)
atttcacctaacctgcagagaatattgcatttttatgtctgctttgaaactgtatgttggcaaaaagcctaaaaatccccaaatgaagatgtttcattaaaatttaccaaaataacctat

SEQ ID NO: 353105 - DNA, 120 bp, Artificial Sequence
  ENSG00000139351_15 (sequence is synthesized)
tcagtttcaaaagctttttttttttttttttaattgtcaatacagggaagactgcagtcattgagaaacgtaggaagaaaaggtcttctgcaggagtagttgaagatatggggtaacgtg

SEQ ID NO: 353106 - DNA, 120 bp, Artificial Sequence
  ENSG00000139351_16 (sequence is synthesized)
ttcaaaataatttttgtttcttagataaagcacttcaagaaaagttgctaacaaataatatatgtaaaatacttggcatctggtatttcttccaaaacaagcatggtatgttgtggatct

SEQ ID NO: 353107 - DNA, 120 bp, Artificial Sequence
  ENSG00000139351_17 (sequence is synthesized)
gatttagatatgcagaaagctgaggaacaagaagaaaaaatacttgttggtatcatgattaggtttataatcaaccaagtctcaagtaggaatggacaacctagccttttattgtgacca

SEQ ID NO: 353108 - DNA, 120 bp, Artificial Sequence
  ENSG00000139351_18 (sequence is synthesized)
gtggaactgagccaggtttcattaaccattgctggccatgtgttttaaacctactgaactgtaaaccacagacgtataggcacataccatactcataaaaggcatttatattgtttgggg

SEQ ID NO: 353109 - DNA, 120 bp, Artificial Sequence
  ENSG00000139351_19 (sequence is synthesized)
ttcctgcatttccaagtgacagaaatttgtcaaagtacaaaagaaggatcattggtttatgtaaaagaagtcggggcagtttagcttcaggcatagccagatgggaacagggagggggtt

SEQ ID NO: 353110 - DNA, 120 bp, Artificial Sequence
  ENSG00000139351_20 (sequence is synthesized)
gctcatgtagtgtcatctgggttctgtcatcagtacttagtaaggtgtcttgatgtagtaagcaagatagtttttacagtcctaggcttattacaagtttagtaaccccagtggactgag

SEQ ID NO: 353111 - DNA, 120 bp, Artificial Sequence
  ENSG00000139351_21 (sequence is synthesized)
aaaatctttctcaatagctctggcaaaaaattcctctgggaaaatatgactgatgggagtttggatcatttgcccattcttgaaccaatcattgtatagttagccctctgtatataaggg

SEQ ID NO: 353112 - DNA, 120 bp, Artificial Sequence
  ENSG00000139351_22 (sequence is synthesized)
aaaaaaaaagaaaaaagaaaaaatgcaaattggaaaaataatccagtgttacaactatacagcatttacattgtgttaggtattataagagatctagaaatgatttaaagtatgtggaag

SEQ ID NO: 353113 - DNA, 120 bp, Artificial Sequence
  ENSG00000139351_23 (sequence is synthesized)
agtatgtggaaggatgtgcattggttatatgcaaatatgatgccattttgtaacaggaactcgagcatctgcacattttggtctcctgaggggttgggtgtcctggaactggtcccccca

SEQ ID NO: 353114 - DNA, 120 bp, Artificial Sequence
  ENSG00000139351_24 (sequence is synthesized)
ggatacctaaggatgtctgtagtcagaacattgttgacttttaatggccagacttgtgttacctgcaagtgaggatattgggggtagggatgacagtgtaaaatagataggatggatttg

SEQ ID NO: 353115 - DNA, 120 bp, Artificial Sequence
  ENSG00000139351_25 (sequence is synthesized)
tggcactgatagattattgagctgtagtactaaaaagagtaagttagaatggtaaagaagtagtggttaaatactaggatagacagagaaacagtatgtataatggttagagcctggatg

SEQ ID NO: 353116 - DNA, 120 bp, Artificial Sequence
  ENSG00000139351_26 (sequence is synthesized)
ccagcaacaatactgttttggatcaaattcttgtttgagcaattgtagctgtgaaaccatggacagattatgcctcagtttactcatctatgaaaggggaatgctgagtatctatctctt

SEQ ID NO: 353117 - DNA, 120 bp, Artificial Sequence
  ENSG00000139351_27 (sequence is synthesized)
agaaagtttaccattactaatactgtgtagtggttagaattattagtaatgacaaaatctagggtgggagtatgtaagtcaatggctaaagtagggtagaggccaaaatcattgagaaac

SEQ ID NO: 353118 - DNA, 120 bp, Artificial Sequence
  ENSG00000139351_28 (sequence is synthesized)
aggtcacgaaacggaaaaccattattattggaaggatcatctgtgtggacattgaaatcaccaagaattaagacatgacttgattattgttaaaatttcccattcagcaactggtagaat

SEQ ID NO: 353119 - DNA, 120 bp, Artificial Sequence
  ENSG00000139351_29 (sequence is synthesized)
cagcaactggtagaattaatatattgttacatattagtggtgaacataaattatctaaatgtggtcataatagttgttaaaattttaaaagcattgatttttaacactttcttttaagtt

SEQ ID NO: 353120 - DNA, 120 bp, Artificial Sequence
  ENSG00000139351_30 (sequence is synthesized)
tttctaaatttaaaattttacccaaattgttattacacagttttttttcttttatatttgtagaatatgtttcgacagcaacaaaagattcttcaacaatctagaattgttcagagccag

SEQ ID NO: 353121 - DNA, 120 bp, Artificial Sequence
  ENSG00000139352_0 (sequence is synthesized)
agcactctctcacttctggccagggaacgtggaaggcgcaccgacagggatccggccagggagggcgagtgaaagaaggaaatcagaaaggaagggagttaacaaaataataaaaacagc

SEQ ID NO: 353122 - DNA, 120 bp, Artificial Sequence
  ENSG00000139352_1 (sequence is synthesized)
ctgagccacggctggagagaccgagacccggcgcaagagagcgcagccttagtaggagaggaacgcgagacgcggcagagcgcgttcagcactgacttttgctgctgcttctgctttttt

SEQ ID NO: 353123 - DNA, 120 bp, Artificial Sequence
  ENSG00000139352_2 (sequence is synthesized)
ttttcttagaaacaagaaggcgccagcggcagcctcacacgcgagcgccacgcgaggctcccgaagccaacccgcgaagggaggaggggagggaggaggaggcggcgtgcagggaggaga

SEQ ID NO: 353124 - DNA, 120 bp, Artificial Sequence
  ENSG00000139352_3 (sequence is synthesized)
aaaagcattttcactttttttgctcccactctaagaagtctcccggggattttgtatatattttttaacttccgtcagggctcccgcttcatatttccttttctttccctctctgttcct

SEQ ID NO: 353125 - DNA, 120 bp, Artificial Sequence
  ENSG00000139352_4 (sequence is synthesized)
gcacccaagttctctctgtgtccccctcgcgggccccgcacctcgcgtcccggatcgctctgattccgcgactccttggccgccgctgcgcatggaaagctctgccaagatggagagcgg

SEQ ID NO: 353126 - DNA, 120 bp, Artificial Sequence
  ENSG00000139352_5 (sequence is synthesized)
aagctctgccaagatggagagcggcggcgccggccagcagccccagccgcagccccagcagcccttcctgccgcccgcagcctgtttctttgccacggccgcagccgcggcggccgcagc

SEQ ID NO: 353127 - DNA, 120 bp, Artificial Sequence
  ENSG00000139352_6 (sequence is synthesized)
gcagcagcagcagcagcagcagcaggcgccgcagctgagaccggcggccgacggccagccctcagggggcggtcacaagtcagcgcccaagcaagtcaagcgacagcgctcgtcttcgcc

SEQ ID NO: 353128 - DNA, 120 bp, Artificial Sequence
  ENSG00000139352_7 (sequence is synthesized)
ctcgtcttcgcccgaactgatgcgctgcaaacgccggctcaacttcagcggctttggctacagcctgccgcagcagcagccggccgccgtggcgcgccgcaacgagcgcgagcgcaaccg

SEQ ID NO: 353129 - DNA, 120 bp, Artificial Sequence
  ENSG00000139352_8 (sequence is synthesized)
cgtcaagttggtcaacctgggctttgccacccttcgggagcacgtccccaacggcgcggccaacaagaagatgagtaaggtggagacactgcgctcggcggtcgagtacatccgcgcgct

SEQ ID NO: 353130 - DNA, 120 bp, Artificial Sequence
  ENSG00000139352_9 (sequence is synthesized)
gcagcagctgctggacgagcatgacgcggtgagcgccgccttccaggcaggcgtcctgtcgcccaccatctcccccaactactccaacgacttgaactccatggccggctcgccggtctc

SEQ ID NO: 353131 - DNA, 120 bp, Artificial Sequence
  ENSG00000139352_10 (sequence is synthesized)
aggggctcggcctggtcaggccctggtgcgaatggactttggaagcagggtgatcgcacaacctgcatctttagtgctttcttgtcagtggcgttgggagggggagaaaaggaaaagaaa

SEQ ID NO: 353132 - DNA, 120 bp, Artificial Sequence
  ENSG00000139352_11 (sequence is synthesized)
aaaaaaagaagaagaagaagaaaagagaagaagaaaaaaacgaaaacagtcaaccaaccccatcgccaactaagcgaggcatgcctgagagacatggctttcagaaaacgggaagcgctc

SEQ ID NO: 353133 - DNA, 120 bp, Artificial Sequence
  ENSG00000139352_12 (sequence is synthesized)
agaacagtatctttgcactccaatcattcacggagatatgaagagcaactgggacctgagtcaatgcgcaaaatgcagcttgtgtgcaaaagcagtgggctcctggcagaagggagcagc

SEQ ID NO: 353134 - DNA, 120 bp, Artificial Sequence
  ENSG00000139352_13 (sequence is synthesized)
acacgcgttatagtaactcccatcacctctaacacgcacagctgaaagttcttgctcgggtcccttcacctcctcgccctttcttaaagtgcagttcttagccctctagaaacgagttgg

SEQ ID NO: 353135 - DNA, 120 bp, Artificial Sequence
  ENSG00000139352_14 (sequence is synthesized)
tgtctttcgtctcagtagcccccaccccaataagctgtagacattggtttacagtgaaactatgctattctcagccctttgaaactctgcttctcctccagggcccgattcccaaacccc

SEQ ID NO: 353136 - DNA, 120 bp, Artificial Sequence
  ENSG00000139352_15 (sequence is synthesized)
atggcttccctcacactgtcttttctaccattttcattatagaatgcttccaatcttttgtgaattttttattataaaaaatctatttgtatctatcctaaccagttcggggatatatta

SEQ ID NO: 353137 - DNA, 120 bp, Artificial Sequence
  ENSG00000139352_16 (sequence is synthesized)
agatatttttgtacataagagagaaagagagagaaaaatttatagaagttttgtacaaatggtttaaaatgtgtatatcttgatactttaacatgtaatgctattacctctgcatatttt

SEQ ID NO: 353138 - DNA, 120 bp, Artificial Sequence
  ENSG00000139352_17 (sequence is synthesized)
agatgtgtagttcaccttacaactgcaattttccctatgtggttttgtaaagaactctcctcataggtgagatcaagaggccaccagttgtacttcagcaccaatgtgtcttactttata

SEQ ID NO: 353139 - DNA, 120 bp, Artificial Sequence
  ENSG00000139352_18 (sequence is synthesized)
gaaatgttgttaatgtattaatgatgttattaaatactgttcaagaagaacaaagtttatgcagctactgtccaaactcaaagtggcagccagttggttttgataggttgccttttggag

SEQ ID NO: 353140 - DNA, 120 bp, Artificial Sequence
  ENSG00000139352_19 (sequence is synthesized)
atttctattactgcctttttttttcttactgttttattacaaacttacaaaaatatgtataaccctgttttatacaaactagtttcgtaataaaactttttcctttttttaaaatgaaaa

SEQ ID NO: 353141 - DNA, 120 bp, Artificial Sequence
  ENSG00000139354_0 (sequence is synthesized)
caggcggcggcggcagcggcggcggttggtcaggggcgtgttggccccgcacagattgagccgagttgtcgccccgctgggagaagtgaccctcctgcgcctgaaaagaaatttcatttc

SEQ ID NO: 353142 - DNA, 120 bp, Artificial Sequence
  ENSG00000139354_1 (sequence is synthesized)
aatataggtgactatgcagcctgcaattcaagtatggtttggagaagatctgcctctaagtcctcggagtcctctgactcccagacacggaccaggattggctaatgtttgtcagtacga

SEQ ID NO: 353143 - DNA, 120 bp, Artificial Sequence
  ENSG00000139354_2 (sequence is synthesized)
tgagtggatagctgtgaggcatgaagccactttgttgcccatgcaagaagatctgtcaatctggttatctggtttattaggtattaaagttaaggcagaaaaattattggaagaacttga

SEQ ID NO: 353144 - DNA, 120 bp, Artificial Sequence
  ENSG00000139354_3 (sequence is synthesized)
taatggagtactattatgtcaactgattgatgttcttcaaaacatggtgaaaacatgcaactctgaagaatcagggaattttccaatgagaaaagtgccctgtaagaaagatgctgcatc

SEQ ID NO: 353145 - DNA, 120 bp, Artificial Sequence
  ENSG00000139354_4 (sequence is synthesized)
aggttcattctttgctcgggacaataccgcaaacttccttcactggtgtagggacattggggttgatgaaacttacctctttgaatctgaaggtttagttttgcacaaagatccaagaca

SEQ ID NO: 353146 - DNA, 120 bp, Artificial Sequence
  ENSG00000139354_5 (sequence is synthesized)
ggtgtatctttgtcttcttgaaattggtcgaattgtgtcaagatacggggttgagccaccagtgttagtaaaacttgagaaagaaattgagttagaagagactttgcttaatacttctgg

SEQ ID NO: 353147 - DNA, 120 bp, Artificial Sequence
  ENSG00000139354_6 (sequence is synthesized)
gcctgaagattccatcagcattccaaaatcatgctgtcggcatgaagagctacatgaagctgttaaacatattgctgaggaccctccttgtagttgttctcatcgattttctattgagta

SEQ ID NO: 353148 - DNA, 120 bp, Artificial Sequence
  ENSG00000139354_7 (sequence is synthesized)
tttatctgaaggacggtaccgactaggggataaaatactctttataagaatgcttcatggaaaacatgtcatggttcgcgttggtggaggctgggatactcttcaaggatttttgcttaa

SEQ ID NO: 353149 - DNA, 120 bp, Artificial Sequence
  ENSG00000139354_8 (sequence is synthesized)
atatgacccctgtcgaatattacagtttgccacattagaacaaaaaattttagcatttcaaaaaggagtttctaatgaaagtgtacctgattcgcctgccagaacacctcagcctcctga

SEQ ID NO: 353150 - DNA, 120 bp, Artificial Sequence
  ENSG00000139354_9 (sequence is synthesized)
ccagttagtattccaaaaagcaaagaaaaacagggacgtccaccaggtgcattggtgccagcatcttcactgaaaggaggtaatctgggctctatgtcagtccgttctaaattgccaaat

SEQ ID NO: 353151 - DNA, 120 bp, Artificial Sequence
  ENSG00000139354_10 (sequence is synthesized)
tctccagcagcatcttctcatcccaagctcaagtcttcaaaaggcataacgaagaaaccgcaggctccttcaaacaatgcatcatcttcacttgcttcattaaatccagtaggtaaaaac

SEQ ID NO: 353152 - DNA, 120 bp, Artificial Sequence
  ENSG00000139354_11 (sequence is synthesized)
acttcttcaccagctttaccaagaactgcaccttgtatatctgagtcaccgagaaaatgtatttcatcccccaatacccccaaggccaaggttattccagcccagaattcagcagatctg

SEQ ID NO: 353153 - DNA, 120 bp, Artificial Sequence
  ENSG00000139354_12 (sequence is synthesized)
cccgagtccacacttttgccaaataagtgttcaggaaaaactcaacctaagtatttgaaacataatcatatttcttccagagataatgcagtatctcacttagctgcacattcaaattca

SEQ ID NO: 353154 - DNA, 120 bp, Artificial Sequence
  ENSG00000139354_13 (sequence is synthesized)
tcctcaaaatgtcccaagctgcctaaagcaaatatacctgtaagacctaaaccttctttccagtcctctgcaaaaatgacaaaaaccagttccaaaaccatagccacgggtctaggaaca

SEQ ID NO: 353155 - DNA, 120 bp, Artificial Sequence
  ENSG00000139354_14 (sequence is synthesized)
cagtctcaaccatccgatggagccccacaagcaaagccagtcccagcacagaaacttaaatcggccttgaatttaaatcagccagtttctgtgtcctcagtttctcctgtaaaagccaca

SEQ ID NO: 353156 - DNA, 120 bp, Artificial Sequence
  ENSG00000139354_15 (sequence is synthesized)
cagaaatcaaaagataagaatatagtttcagctaccaaaaagcagcctcagaataaaagtgcatttcagaagacaggacccagctccttgaagtctcctggccgtaccccactgtccatc

SEQ ID NO: 353157 - DNA, 120 bp, Artificial Sequence
  ENSG00000139354_16 (sequence is synthesized)
gtgagcctaccccagtcttctaccaaaacacaaactgcaccgaagtcagcacagactgtcgctaagagccagcattcaactaaagggcctcccagaagtggcaaaaccccagcttcaatc

SEQ ID NO: 353158 - DNA, 120 bp, Artificial Sequence
  ENSG00000139354_17 (sequence is synthesized)
aggaaaccaccctcatctgttaaggatgcagatagtggagataaaaaacctactgcaaagaaaaaggaagatgatgaccattattttgtcatgactggaagtaagaaacctagaaaataa

SEQ ID NO: 353159 - DNA, 120 bp, Artificial Sequence
  ENSG00000139354_18 (sequence is synthesized)
aggcggcggcggcagcggcggcggttggtcaggggcgtgttggccccgcacagattgagccgagttgtcgccccgctgggagaagtgaccctcctgcgcctgatcagaacactgaggctc

SEQ ID NO: 353160 - DNA, 120 bp, Artificial Sequence
  ENSG00000139354_19 (sequence is synthesized)
agagaagttaactactccaaagtcatatagccagtattttctggagctgtaattcaaatcagatgtgttcaataccttctactaccccattgctgtctttatgaaaagaaatttcatttc

SEQ ID NO: 353161 - DNA, 120 bp, Artificial Sequence
  ENSG00000139354_20 (sequence is synthesized)
agtttctcctatttgtgtctgtctaaataggtgcagacactaaggatagtgaggatggaggctgggatgaggaaagggttcatcagaattcacatatctgaattcactggaaagagccct

SEQ ID NO: 353162 - DNA, 120 bp, Artificial Sequence
  ENSG00000139354_21 (sequence is synthesized)
tctgaagcaaacagttgtaaaatcactgcaaggtttttattaataatagacatgtatatgattttcagtctatagcatctttgttaacatctgccttttgcaggaaatgtaaaagttatt

SEQ ID NO: 353163 - DNA, 120 bp, Artificial Sequence
  ENSG00000139354_22 (sequence is synthesized)
taacactacaagaattttaacaatagttgctctatttttgaatatgtattaaatatggagttcatatacctgctaatatcaacggtggtgctcttactattagttaattgcattttggtt

SEQ ID NO: 353164 - DNA, 120 bp, Artificial Sequence
  ENSG00000139354_23 (sequence is synthesized)
gctgctgctgactagcttggcattattctgtgttaggtagaattcttattatttatttttttaagctttccaaattggaaggaactgattgtttcatgtggcttatatttacattggtaa

SEQ ID NO: 353165 - DNA, 120 bp, Artificial Sequence
  ENSG00000139354_24 (sequence is synthesized)
tattttgtcaccaatatttttggttaaaaaaaatccaacaaattaacttactgaaatataaacaaattttgtaaacaattttttatattatctataaaaacgtagacaccttatgtttca

SEQ ID NO: 353166 - DNA, 120 bp, Artificial Sequence
  ENSG00000139354_25 (sequence is synthesized)
catgttgtgcaatgtgacaggggaagctgatttagtagcttttagcatattaaaaataattttttataatgtaatttcctgtgagtgcagacctgacattttacattaaaataatgtgaa

SEQ ID NO: 353167 - DNA, 120 bp, Artificial Sequence
  ENSG00000139354_26 (sequence is synthesized)
tgaaacatcagaattatgttttaacaactttaaaattaagatgatgttaaaataattttagagttatgctatgtaaaaattctatcatgaaattatttttctctagatagcacaatacca

SEQ ID NO: 353168 - DNA, 120 bp, Artificial Sequence
  ENSG00000139354_27 (sequence is synthesized)
taattaatttcttccaattaggttacttttctttaataaagttatgctgccttcagttttccaatggcaagtagacaggatatgttcaaggttttctgcactgtaggcacagtctctcaa

SEQ ID NO: 353169 - DNA, 120 bp, Artificial Sequence
  ENSG00000139354_28 (sequence is synthesized)
gcatatcctgatcatgtaatgactgcataaactccatcaacctaaggtgatacttgtaaataatttatttttaagggatggtgactttaaaaattattaatgaactttgagaagttttaa

SEQ ID NO: 353170 - DNA, 120 bp, Artificial Sequence
  ENSG00000139354_29 (sequence is synthesized)
gagtgcttttaaaacttcacagtattgccaattatcttaggttattcagtattcaggtttgtgtttctctgttttaaactaaaatgtgttttctgaagaaaaaaataatagtttacacaa

SEQ ID NO: 353171 - DNA, 120 bp, Artificial Sequence
  ENSG00000139354_30 (sequence is synthesized)
atgtacaatcatagaataagcattttaagctggcgactagtgttctatagattacaaagcaagaaaactttctatgaagataaatgaccttttgcctgaagagtacagataaaatcaaag

SEQ ID NO: 353172 - DNA, 120 bp, Artificial Sequence
  ENSG00000139354_31 (sequence is synthesized)
atgtgtgcaagctagtttttggaagaagtgatgcttctcttctttaaagagacagtcaccaaatacttggtttaactcgactattgacttgggcattgagagagatgatatatacatctt

SEQ ID NO: 353173 - DNA, 120 bp, Artificial Sequence
  ENSG00000139354_32 (sequence is synthesized)
tggaaagtgaagtcaatgttcaagaggtgatagaagctttactttttagtgatcagaaatatttagtgcatcttttcagacaggaagaattttatcatcaagtattcccttataaaacca

SEQ ID NO: 353174 - DNA, 120 bp, Artificial Sequence
  ENSG00000139354_33 (sequence is synthesized)
agtaacacttctttatcagtaacttttagaacttaaaagaaagcaaaaagtaaatggaattgtaggcaatttatgaatcctagtagattttacaatatgtaatttatgttgtttacagta

SEQ ID NO: 353175 - DNA, 120 bp, Artificial Sequence
  ENSG00000139354_34 (sequence is synthesized)
tataaacactaagttttgtgttaaatgtgatcaggaataaaagtatcccacaggcatctgacacaaattccagaattagccaaagaattgtttatttgaggccaggcaatcccagcattt

SEQ ID NO: 353176 - DNA, 120 bp, Artificial Sequence
  ENSG00000139354_35 (sequence is synthesized)
caaagaattgtttatttgaggccaggcaatcccagcattttgggaagccaagttgggcagatcacgaagtcaggagttcgaaatcagcctgaccaacatggtgaaacctcttctctacta

SEQ ID NO: 353177 - DNA, 120 bp, Artificial Sequence
  ENSG00000139354_36 (sequence is synthesized)
aaaaaaagaaaaagaaaagaaaaaggtttatttgaataattggaagtcagtttatacattactatttttcagcagtagggaatttctccaattacattcatgttgaatgaatttttattt

SEQ ID NO: 353178 - DNA, 120 bp, Artificial Sequence
  ENSG00000139354_37 (sequence is synthesized)
cagtagggaatttctccaattacattcatgttgaatgaatttttatttatatatagcttacccttccaaaataaaagtgtttttttaatgttgttttgttttgttttgtttttttccttt

SEQ ID NO: 353179 - DNA, 120 bp, Artificial Sequence
  ENSG00000139354_38 (sequence is synthesized)
cacccagcgaaaagttttgtttgaataaacaatatccgaaagacaattagtttcttcagatgtattttgaaattctcctaaagagctagtgtttctattcattttcacaatttaaaaaca

SEQ ID NO: 353180 - DNA, 120 bp, Artificial Sequence
  ENSG00000139354_39 (sequence is synthesized)
gctcttaacattgctgaagttgggagaactttccatctcttcttaataacagtgcaagattttgtaaattcttttttgtgtttaatgtttaataaaacgagtattaagcttaaattactg

SEQ ID NO: 353181 - DNA, 120 bp, Artificial Sequence
  ENSG00000139354_40 (sequence is synthesized)
aagtacctgggagaagtaatgatgtgtactttcaaaaaaatggaaaatgcttttattttattttctataatttgttaacatgatatgtaaaattaaacttcggagcacaatgaaatgccg

SEQ ID NO: 353182 - DNA, 120 bp, Artificial Sequence
  ENSG00000139354_41 (sequence is synthesized)
attatttttaccttgtttgggcttaaagtaggtatttaaggtttatgtgttcaaaatgccttggtaaattggatgacctctaactttactgtccatatggagtttgtcattctttatgga

SEQ ID NO: 353183 - DNA, 120 bp, Artificial Sequence
  ENSG00000139354_42 (sequence is synthesized)
taagagaacttaaggaaaagttactgtttttcttcagtctttttatatctatctgatttaaaatctgttactttattaaaaggcttcaacaacaggttgttaggatgtagtcttacatcc

SEQ ID NO: 353184 - DNA, 120 bp, Artificial Sequence
  ENSG00000139354_43 (sequence is synthesized)
aggttcacataataaccccatttgaatccaaatttgtgtatattttcttatgccagcagtatttgtatccaattttaacttaggtttgttttcttgagtattaaaatttaaacatatata

SEQ ID NO: 353185 - DNA, 120 bp, Artificial Sequence
  ENSG00000139354_44 (sequence is synthesized)
ctcttttcctggcgaacttttacgcgctgtctcggggcctccgcgcctcagcctgagggctccaggagccccccgctctctgaggccccgaagctgaggtttgttgggtctcccggctgc

SEQ ID NO: 353186 - DNA, 120 bp, Artificial Sequence
  ENSG00000139354_45 (sequence is synthesized)
ttggccccgcacagattgagccgagttgtcgccccgctgggagaagtgaccctcctgcgcctggtcaagtgtcttggcaaatcttcctttcttcacgtaagatgtgtattggcggcagcc

SEQ ID NO: 353187 - DNA, 120 bp, Artificial Sequence
  ENSG00000139354_46 (sequence is synthesized)
gcgtataaaggagaaggtgggcatggccagcctccctcagctacactgtctcagatcagaacactgaggctcagagaagttaactactccaaagtcatatagccagtattttctggagct

SEQ ID NO: 353188 - DNA, 120 bp, Artificial Sequence
  ENSG00000139354_47 (sequence is synthesized)
atgaagagctacatgaagctgtaagtagttgccacactttcttttgaccatgataccttgaagtctcatagttttaagcacttctagtgtgctacaggtgatgctatttttaaaagcaag

SEQ ID NO: 353189 - DNA, 120 bp, Artificial Sequence
  ENSG00000139354_48 (sequence is synthesized)
gcttactaggatgttttaatatccttcacctctaatttttctttccaaataaggactcaaatgcctcatctcattttcctagaaaaatgtatactttgaatatatgtagaattattggag

SEQ ID NO: 353190 - DNA, 120 bp, Artificial Sequence
  ENSG00000139354_49 (sequence is synthesized)
aatcagatactaaatcaaatatattaaccttttcacttaaagattttatgtgtctagaatgtcctaaaattctgaattcctaaatgagttggctacaggaaggttctggactaatgcttt

SEQ ID NO: 353191 - DNA, 120 bp, Artificial Sequence
  ENSG00000139354_50 (sequence is synthesized)
agtaattgatattttcattaagaattactccaccaagcctaaaaagtagtaacttccctttaaccggataattacggaaatgacaggaggcctaataatgtattatcacggtgtttagct

SEQ ID NO: 353192 - DNA, 120 bp, Artificial Sequence
  ENSG00000139354_51 (sequence is synthesized)
atgtggaactccattttaataggagcagcttctttgctgcatttttaaaaaatggtcttggaagcttcttacttccgagaagtggatctttgttgcggacaaaggattatttatgctaaa

SEQ ID NO: 353193 - DNA, 120 bp, Artificial Sequence
  ENSG00000139354_52 (sequence is synthesized)
ggaaaatgtattccccactgaattagctcgtgggaagcataacaagctcattaggaatgctcacttgtactttggccttttgctgtggtggagagaagggaaaatgacatcaaaaaggac

SEQ ID NO: 353194 - DNA, 120 bp, Artificial Sequence
  ENSG00000139354_53 (sequence is synthesized)
attctgttgtcttttgccttcctgcaaagaaaatgtgttataatattaggcttttcagtatggtttagctcaggttcaactttggtactagaagaaatgttcctgaaaggaaagtgaaaa

SEQ ID NO: 353195 - DNA, 84 bp, Artificial Sequence
  ENSG00000139354_54 (sequence is synthesized)
cagctgggactttagctacatgcaaccacgtctggctaatattaaaagaaatattttgtagagatgaggtcacactgtttccca

SEQ ID NO: 353196 - DNA, 86 bp, Artificial Sequence
  ENSG00000139354_55 (sequence is synthesized)
gcttcagcctccgaaagtactgggattacaaaattttccaatgagaaaagtgccctgtaagaaagatgctgcatcaggttcattct

SEQ ID NO: 353197 - DNA, 120 bp, Artificial Sequence
  ENSG00000139364_0 (sequence is synthesized)
tacgggaaatgtttggtgcagcatccagaatggacaccactgctgtctgcaccgggggagtgacagagagtcgagggattgtggatagcctgcagaagttttcctcgctccctgcttacc

SEQ ID NO: 353198 - DNA, 120 bp, Artificial Sequence
  ENSG00000139364_1 (sequence is synthesized)
tccccacgaacttgcacatctccaatgcagaggagtcctttttccttaaagaagccaaccaagacctcacaaggaactccagtctgcaggcccgggtggagccattcttcatctaccgag

SEQ ID NO: 353199 - DNA, 120 bp, Artificial Sequence
  ENSG00000139364_2 (sequence is synthesized)
ccaggacaccccctattatcaatgccagctatggcccattttcagtggagaagataatcccccaggagctcctgttgacatctacagcctttggaaacatggacaaatttcccttcaact

SEQ ID NO: 353200 - DNA, 120 bp, Artificial Sequence
  ENSG00000139364_3 (sequence is synthesized)
ggaaattgaaatcccacatccttgacagctccatctactccaacagacccaaagtgcagaccttgttttatgtcactggcatgggctgggatgacagtgaccttacggaagatctaccct

SEQ ID NO: 353201 - DNA, 120 bp, Artificial Sequence
  ENSG00000139364_4 (sequence is synthesized)
gtgtcaagatgtttgctttccctgaggccagggaagtggcagccagctgtcggctgcaaggggccccagggctgtgtgtggctgagctggagctgctgcccgagtggttcagctcaggcc

SEQ ID NO: 353202 - DNA, 120 bp, Artificial Sequence
  ENSG00000139364_5 (sequence is synthesized)
tggacctggaaccagaggaggagatcccagccctgctcgggggcaccacgatggagctcttcttcacgctctacccagctgacaaggctggccagtgtcctctggaggaggaaggcaagt

SEQ ID NO: 353203 - DNA, 120 bp, Artificial Sequence
  ENSG00000139364_6 (sequence is synthesized)
gggagaacaatatccactcgggcctggagagcccccagcaagcgtttccagcccgagagaggattgggagtgtggtggtctacccaacccaagatgatctgaagtggtccctggtgagct

SEQ ID NO: 353204 - DNA, 120 bp, Artificial Sequence
  ENSG00000139364_7 (sequence is synthesized)
tggacgagaatgtggtcatctcggtacctctgaatctagtccgggaaggggacacggccacctttttggtctctctgaccagtagctctgtggcagaccagttcactcttagaattaagg

SEQ ID NO: 353205 - DNA, 120 bp, Artificial Sequence
  ENSG00000139364_8 (sequence is synthesized)
cggcagcaggtgtgaagataacggcagtgagagtcagcagtgaggaccaatgggcagtccaggaggaaattgataatggcagcactcagacgtcggccaccctcacctgcatgggccatc

SEQ ID NO: 353206 - DNA, 120 bp, Artificial Sequence
  ENSG00000139364_9 (sequence is synthesized)
gcccggacacgcagagcagggtaaatggatccttctatgagatcttgcaagtggactttggaattgataatagcagtgacctggctggggcccagcagattacctggcaggtggagtacc

SEQ ID NO: 353207 - DNA, 120 bp, Artificial Sequence
  ENSG00000139364_10 (sequence is synthesized)
cgattgaggactccatgagtgagctggtcgtctccgagatcttcgtcagccagacaaccttcgtgggcatcgtccctcttgccatggacaccgaggttttgaacactgccattctcactg

SEQ ID NO: 353208 - DNA, 120 bp, Artificial Sequence
  ENSG00000139364_11 (sequence is synthesized)
gaaagcctgtttcagttcctgtcaaagtcgtgggggtccaggaggatggttctgtggtcgatgtgtctgagtctgtggaatgcaagtctgccgatgaagatgtcattaaggtttccaaca

SEQ ID NO: 353209 - DNA, 120 bp, Artificial Sequence
  ENSG00000139364_12 (sequence is synthesized)
actgtgattccatttttgtgaatgggaaggaaatgaagagcaaagtggacacgattgtgaacttcacccaccagcacttcacctcccagttcgaggtcactgtctgggcacccaggctcc

SEQ ID NO: 353210 - DNA, 120 bp, Artificial Sequence
  ENSG00000139364_13 (sequence is synthesized)
ccctgcagattgagatctcagacaccgagctgagccagatcaagggctggaggatcccggttgctgccaacagaaggcctacccgggaaagcgatgacgaggacgatgaggagaagaagg

SEQ ID NO: 353211 - DNA, 120 bp, Artificial Sequence
  ENSG00000139364_14 (sequence is synthesized)
gacgaggctgctccctgcagtaccagcacgccacagtgcgtgtcctcacccagtttgtggccgagtcacctgacttagggcagctgacctacatgctgggccccgactggcagtttgaca

SEQ ID NO: 353212 - DNA, 120 bp, Artificial Sequence
  ENSG00000139364_15 (sequence is synthesized)
tcactgaccttgtgaccgagttcatgaaggtggaggagccgaaaatcgctcagttacaggacggcaggaccctggctggtcgggagccgggaataaccacggtgcaggtcctctcgccgt

SEQ ID NO: 353213 - DNA, 120 bp, Artificial Sequence
  ENSG00000139364_16 (sequence is synthesized)
tgtctgactccatcctggctgagaagacggtgattgtcctggatgaccgagtcaccatcgcggagctgggagtgcagctcgtagctggcatgtctctctccctgcagccacaccgagcag

SEQ ID NO: 353214 - DNA, 120 bp, Artificial Sequence
  ENSG00000139364_17 (sequence is synthesized)
acaaaagggccatcgtctccacagctgctgccctggatgttcttcagtccccacagcaggaagcaatagtaagttcttggattttgttcagtgatggttcggtgacacctttagacattt

SEQ ID NO: 353215 - DNA, 120 bp, Artificial Sequence
  ENSG00000139364_18 (sequence is synthesized)
acgatcctaaggattattctgttactgtctcatcattggatgaaatggtggtgtctgtccaggcaaaccttgagtccaaatggccaattgtggttgcagagggtgaaggacaagggcctt

SEQ ID NO: 353216 - DNA, 120 bp, Artificial Sequence
  ENSG00000139364_19 (sequence is synthesized)
tgattaagttagaaatgatgataagtgaaccttgtcagaagaccaagaggaagagtgttcttgccgtgggtaaaggaaatgtcaaggtcaaattcgaaccaagtagtgatgagcaccaag

SEQ ID NO: 353217 - DNA, 120 bp, Artificial Sequence
  ENSG00000139364_20 (sequence is synthesized)
gaggcagcaatgatattgagggcataaatcgggaatataaagaccacctcagtaattccatagagcgcgaaggaaaccaggagagagcagtccaggaatggttccaccgtggcacacctg

SEQ ID NO: 353218 - DNA, 120 bp, Artificial Sequence
  ENSG00000139364_21 (sequence is synthesized)
ttggccaagaggaaagtaccaacaaaagcacaaccccccagtctcccatggaagggaagaataagttactcaaaagtggtggtccagatgcctttacaagcttccccactcaagggaagt

SEQ ID NO: 353219 - DNA, 120 bp, Artificial Sequence
  ENSG00000139364_22 (sequence is synthesized)
caccggaccccaataatcctagtgacctcacagtgacctcaagggggctaacggacttggagattggcatgtatgccttgctctgcgtcttctgtctggccattctggtcttcttgatca

SEQ ID NO: 353220 - DNA, 120 bp, Artificial Sequence
  ENSG00000139364_23 (sequence is synthesized)
actgcgtggcgtttgcctggaaatacagacacaaaaggtttgctgtgagtgagcagggcaacatcccccattcccacgactgggtctggcttgggaatgaagtggaacttttggagaacc

SEQ ID NO: 353221 - DNA, 120 bp, Artificial Sequence
  ENSG00000139364_24 (sequence is synthesized)
ctgttgacattacactcccatcagaggagtgcacaaccatgatagacaggggcctgcagttcgaggagaggaacttccttctgaatggcagttcccagaagacttttcatagtcaactac

SEQ ID NO: 353222 - DNA, 120 bp, Artificial Sequence
  ENSG00000139364_25 (sequence is synthesized)
tcagaccctctgactatgtctatgagaaagaaattaaaaatgaacctatgaattcttcgggcccaaagaggaagagagtcaagttcacttcctacaccaccatcctcccagaggacggcg

SEQ ID NO: 353223 - DNA, 120 bp, Artificial Sequence
  ENSG00000139364_26 (sequence is synthesized)
gcccatacaccaactccatcctgtttgacagcgatgataacatcaagtgggtctgccaagatatggggctgggggattcacaggactttagagactatatggaaagtctgcaagaccaga

SEQ ID NO: 353224 - DNA, 120 bp, Artificial Sequence
  ENSG00000139364_27 (sequence is synthesized)
tgtaaactcctttcttatgtttgtattcacctttatgccttctgttttttgaatgctggagcagtgagtttgatcagcaataggggatgatttaacaaagtttgatttgtggaggtctgg

SEQ ID NO: 353225 - DNA, 120 bp, Artificial Sequence
  ENSG00000139364_28 (sequence is synthesized)
tgggattcatttctaagcaggtaaaagaggtttggagagctatagaagctgggttttaagtttggaaatgcctctaaaacagccacatgtggggactggagaaattctaagacaacagtt

SEQ ID NO: 353226 - DNA, 120 bp, Artificial Sequence
  ENSG00000139364_29 (sequence is synthesized)
ttatggactgcctggtacgagctcagtgcaaatgtattaaacctgaccccacagacattgttagtcatctcgtgacaaatggccatgtggaattagaaaagatttgggtgttgatttttc

SEQ ID NO: 353227 - DNA, 120 bp, Artificial Sequence
  ENSG00000139364_30 (sequence is synthesized)
tatttctagaccttttaaagcacagtggacacttattgccccttggcctgagtttagacatacatgaaagatgactgaatgtagctatcctgatttgtcatgagcgctgctcattatttt

SEQ ID NO: 353228 - DNA, 120 bp, Artificial Sequence
  ENSG00000139364_31 (sequence is synthesized)
tatatacatttgcacctgcacctgttcctttgacctctggaattctttttgaaacatgaagagaagaaatttcagtcttttccttgagctctgtttgatttacacatgagttttcttccc

SEQ ID NO: 353229 - DNA, 120 bp, Artificial Sequence
  ENSG00000139364_32 (sequence is synthesized)
tgggatttgccatgccatgttatttcctgggtctccatgcaggatgtcaggtttttccagttttctgcacttcatcatctagggatggtatccaagaagcttattctcactttgtttttt

SEQ ID NO: 353230 - DNA, 120 bp, Artificial Sequence
  ENSG00000139364_33 (sequence is synthesized)
ccttccttttgttgttgaactttcttgtataacactgggacaaagggttttacttaaaatgttaatatacagtgagggagggccatctctttactgttttctatgtgaagtttcaaacat

SEQ ID NO: 353231 - DNA, 120 bp, Artificial Sequence
  ENSG00000139364_34 (sequence is synthesized)
ttggaaaaaagttgtcaatcacaaacatttatttttattctctgcttgttgaaaactcatggggaactcctggagtgcatttctgagggtaaaaaggccccaacatagctgtatttatac

SEQ ID NO: 353232 - DNA, 120 bp, Artificial Sequence
  ENSG00000139364_35 (sequence is synthesized)
aagtgctttgtggccaacacaatttactatccaaactgaagtcttaaagtagaattgacctacacagaaaggaaattgcctaggcaatagatgcagattacactttccattttaccagaa

SEQ ID NO: 353233 - DNA, 120 bp, Artificial Sequence
  ENSG00000139364_36 (sequence is synthesized)
caaaagtttttttttttttaaataagtagaatgacagttcaagttagcaatatatagaaatccatccatacaatgaccaaaataaataaataaataaaactcaatcatgactttggcaga

SEQ ID NO: 353234 - DNA, 120 bp, Artificial Sequence
  ENSG00000139364_37 (sequence is synthesized)
gataaaacattgacaagggtgtgcatttgtggagagaagcagtgggtttccccccaaaatccatacaaataaatgactattccagaactcaagaagcagctattatagaaaaaaaaatta

SEQ ID NO: 353235 - DNA, 120 bp, Artificial Sequence
  ENSG00000139364_38 (sequence is synthesized)
aaaaccacagctattgaaaaattaaaacggcaagagaaaaaaagaaacaactcctgcataatgtttaaataaaaatgttattttaatagcatcatgaatggtcttaaggcaaaaatttca

SEQ ID NO: 353236 - DNA, 120 bp, Artificial Sequence
  ENSG00000139364_39 (sequence is synthesized)
gattagcaaaatgtgatgacatatttattaagattgtattattggaaatgtagacactggactagtatgcctcattatgagctttactgagccatttgcatctctaagaaatatgatttt

SEQ ID NO: 353237 - DNA, 120 bp, Artificial Sequence
  ENSG00000139364_40 (sequence is synthesized)
aaaggcccaaagtaggaaggatctgcagggggtcacctgaagcagtgccctgactccaaatggctgataactgagctaatccaaggagaggcgttcagttgttctcttattatagatttc

SEQ ID NO: 353238 - DNA, 120 bp, Artificial Sequence
  ENSG00000139364_41 (sequence is synthesized)
cttgggtgggaacatgacaaccccgcctcctctagccatgacgtggcagccaaaaagttcttcctgtatctctggcccacaggactgtagtgtgtttgggaacagtgctgaaattgcaag

SEQ ID NO: 353239 - DNA, 120 bp, Artificial Sequence
  ENSG00000139364_42 (sequence is synthesized)
tgatgtaggcctgacctccagagcccagcgttcagttagttgtataaaatggggcttaggaaccgaagctgatgaagttccaaaagtagttcagtttgatgggataaggaagcaaggaga

SEQ ID NO: 353240 - DNA, 120 bp, Artificial Sequence
  ENSG00000139364_43 (sequence is synthesized)
gccaggcattagctgcaaaaggagcttgcagagagatggctgacactttatgggaagattcctcagtcagccaaaagcttttcaaagagtttggtgcagaggtagctcagagccaaccat

SEQ ID NO: 353241 - DNA, 120 bp, Artificial Sequence
  ENSG00000139364_44 (sequence is synthesized)
ccaggaccgaagaaagctcatgtgctgattgacacatagctatccaggtgagtcggctccttctatgaggcttttcaatcgtctctccctttggatctctggcattccagaaagactggg

SEQ ID NO: 353242 - DNA, 120 bp, Artificial Sequence
  ENSG00000139364_45 (sequence is synthesized)
tgtaactggggaggaggtgaaggaaattatccctgccatggggagtgttattcaggaacataaaaattagagcattccctctgatggcagtgcttgacggggtgcagggaacaaactggg

SEQ ID NO: 353243 - DNA, 120 bp, Artificial Sequence
  ENSG00000139364_46 (sequence is synthesized)
gagcgttcaaacatgccagtggtttctcagcagggctggaaactggccacagtcctgaagatgcttcttgtgacaacttagagtcactgggagtcacacagctcctgtgtagccgccttt

SEQ ID NO: 353244 - DNA, 120 bp, Artificial Sequence
  ENSG00000139364_47 (sequence is synthesized)
gctcctctgtgttaaaacccagtcagttcaaaataacaatcaaatggaaggccatgggggaagggttccttccaccatataacccacacccagatgtatataaacgcatatacatacata

SEQ ID NO: 353245 - DNA, 120 bp, Artificial Sequence
  ENSG00000139364_48 (sequence is synthesized)
tgtgtgtgtgtgtgtgtgtgtgaatactgaagagccagacaacaaactatttagtaagaatcaacagtgactgtcaattgttctcagatttggcatggatactatttctcatgaaataat

SEQ ID NO: 353246 - DNA, 120 bp, Artificial Sequence
  ENSG00000139364_49 (sequence is synthesized)
tttctcatgaaataatgtcattaaagtatttcctcctctaaatatttcctgaagatcataaaccatgggttatagcaccttgttttccagctagtcaatatacaactattaggtgctgtg

SEQ ID NO: 353247 - DNA, 120 bp, Artificial Sequence
  ENSG00000139364_50 (sequence is synthesized)
ccccaaaatatctaaaatgggggtaaagatataaactattaagccatgaaatctaattttctggggaccatgcatttgcctggattttccaggattttatggctgatagacccaaattat

SEQ ID NO: 353248 - DNA, 120 bp, Artificial Sequence
  ENSG00000139364_51 (sequence is synthesized)
tagtcttgataaacaacctgaaccaaacatttataaagtcccttcctctcccatgggaatggaatgctcagactcctgctgagggagacaccagcaagcctcttgagaaggcaccagaca

SEQ ID NO: 353249 - DNA, 120 bp, Artificial Sequence
  ENSG00000139364_52 (sequence is synthesized)
gtgaactctgtggtcacatgaagggaggttcagatgctagacgaccagcgtatgacctggaaccattgaggattgcaaccgctgcctccagggtccagatgtgctgcagtagagggcaga

SEQ ID NO: 353250 - DNA, 120 bp, Artificial Sequence
  ENSG00000139364_53 (sequence is synthesized)
gcacaggaatcaagaagcagctgccacaccaaagaactgatgcttaaacacacaggtgtgttgcatttgagagaaggcaagaagaaaagacaatagaaggttaccctggaaaaacaacac

SEQ ID NO: 353251 - DNA, 120 bp, Artificial Sequence
  ENSG00000139364_54 (sequence is synthesized)
ctagcaaacctcagaatactccatgtgtcccaagagaaggaataattgtctttctagctgttatatattgcacactggccaggataaattcccagactataataatcctgactatgtaga

SEQ ID NO: 353252 - DNA, 120 bp, Artificial Sequence
  ENSG00000139364_55 (sequence is synthesized)
cggaagtttctatttataaagtcatgcagggggaaagttgattaatttttgtcccattgccacatctgtagactaagtaatttttaacttgctaacttttagaatgtccacctttgtgca

SEQ ID NO: 353253 - DNA, 120 bp, Artificial Sequence
  ENSG00000139364_56 (sequence is synthesized)
ttttggtagcattcttgtttcattattttagaaaggggtcttcccattactgggatgtcggggccctgtcagagaactattattaaggctctgtgagggaactgttcagtctcacagcaa

SEQ ID NO: 353254 - DNA, 120 bp, Artificial Sequence
  ENSG00000139364_57 (sequence is synthesized)
ggaccacagagcgtggtttcatctgaaccctacaagtcagggacaccagtgtgttttctactcgagttacctaaaaatggtctcaattttccatttcattctctgtaaatgacacaatag

SEQ ID NO: 353255 - DNA, 120 bp, Artificial Sequence
  ENSG00000139364_58 (sequence is synthesized)
atggtttatagactcagcagccctcaccttttattaaaattatatatgtgtgatgtaatgcatatcacctgtcatgtaaagggacggtatggatggtggaaaagttatgctaaaatatgg

SEQ ID NO: 353256 - DNA, 120 bp, Artificial Sequence
  ENSG00000139364_59 (sequence is synthesized)
attgcagatatttttgtatgtaatataggcaatataatgaaacaccgagttttttaaagtgaaagcatgcaaaatcgtagcttttaaatgtacagacatcccactcaaaaatatctaaac

SEQ ID NO: 353257 - DNA, 120 bp, Artificial Sequence
  ENSG00000139364_60 (sequence is synthesized)
tgatagtgggaaaaacatttgagacctagtaacatcatgaaatgcactgaatttggaattctggcctagaaaggctgtggcttatgttgggattgatgatggaatctgccagaacatttt

SEQ ID NO: 353258 - DNA, 120 bp, Artificial Sequence
  ENSG00000139364_61 (sequence is synthesized)
catcttattcttcttgacttttggatttttttcttttctttttttctggaaatatttcggaaataaagtgacttcatttttcagcataaaagtatattctaaccacagggtaacacatcg

SEQ ID NO: 353259 - DNA, 120 bp, Artificial Sequence
  ENSG00000139364_62 (sequence is synthesized)
tttttaacatgaaaataaacatttaaacattcttcagttgtttcattattttatctgcatgttccataaagcagctgtatggttggctataatatagatttattttttcttttcagccag

SEQ ID NO: 353260 - DNA, 120 bp, Artificial Sequence
  ENSG00000139364_63 (sequence is synthesized)
agattttaatacccttgatgcagtaataaatggacatcaaaagaaaacatttcttaaaagttgccaacgtattttaccttgaaaacatttcttatttgttatcctagtaggctggggaaa

SEQ ID NO: 353261 - DNA, 120 bp, Artificial Sequence
  ENSG00000139364_64 (sequence is synthesized)
gcttctctccagatgtctcagaaaaagatctcctgtttctcatggccccgtccagggtcaaaccatgttgaaagtcagtgctgaaatgcatgatgctgcgggtgtttgagagcctttgac

SEQ ID NO: 353262 - DNA, 120 bp, Artificial Sequence
  ENSG00000139364_65 (sequence is synthesized)
ctctgtccaccctttggtctttgctcgtcaatggcttggtcttgtatatgtatctggggcaggggctttgtactgggcccagggtgctgagctttccagaacaggcagagctctagagac

SEQ ID NO: 353263 - DNA, 120 bp, Artificial Sequence
  ENSG00000139364_66 (sequence is synthesized)
ctaagaaaaccacaggacaggcggggattctttttgagaggctgaagtagatgtttcagctgaaagatgggtggtacacttgccaagtgcctagaggggctagaggctctctgttggtgt

SEQ ID NO: 353264 - DNA, 120 bp, Artificial Sequence
  ENSG00000139364_67 (sequence is synthesized)
gtgtgtatttcttgaaactgcagagtcatttttggcatgctggcaaatgctactccttgcttttaggatgaatagggatgcctctttggcgataatttgacgtgtcataataaatgccca

SEQ ID NO: 353265 - DNA, 120 bp, Artificial Sequence
  ENSG00000139364_68 (sequence is synthesized)
ataccaaacctagtctttctccaggcccttcagacatcattcaggtaactgggtgtaaacacaggagttggctttgtgaaactgaggcaggatttcctgcctctaaactattggcagcaa

SEQ ID NO: 353266 - DNA, 120 bp, Artificial Sequence
  ENSG00000139364_69 (sequence is synthesized)
aagagccaaaaatgtgctcccaggtgcaaaaccccagccccatcagaattgcttctcagcactttgggtaactgttttgcactaacagcttcctccttgtcttttccctgggaacatggg

SEQ ID NO: 353267 - DNA, 71 bp, Artificial Sequence
  ENSG00000139364_70 (sequence is synthesized)
actaacagcttcctccttgtcttttccctgggaacatgggagcactgacacagaactcaactggtccagcc

SEQ ID NO: 353268 - DNA, 70 bp, Artificial Sequence
  ENSG00000139364_71 (sequence is synthesized)
aaggttgtagtgagccaagatcgtaccactgcactctggcctgggcaacaagagcgagactttgtctcaa

SEQ ID NO: 353269 - DNA, 120 bp, Artificial Sequence
  ENSG00000139364_72 (sequence is synthesized)
gcactctggcctgggcaacaagagcgagactttgtctcaaacagaaacaaaacaagaaaaacaaaaagaacttaaccagttctccccagatctcagcgtgcatgcatatatagagtttag

SEQ ID NO: 353270 - DNA, 120 bp, Artificial Sequence
  ENSG00000139364_73 (sequence is synthesized)
taaaatgtgtttcaaaaaaagaaggataaaagaaagtttgaagtaagatttgtaaaagaatgaacactttaggttttgtgtgtgagtgcaaaatgtaaacacggcatttgaaattttttg

SEQ ID NO: 353271 - DNA, 120 bp, Artificial Sequence
  ENSG00000139364_74 (sequence is synthesized)
gtattgaaatccttaatgcctgttagtttctttatggttttatacaattgagataggttctgaagtttttttgttgtttgcttttagaaatttttaaaaatacaaaaaaaaagcgcagaa

SEQ ID NO: 353272 - DNA, 120 bp, Artificial Sequence
  ENSG00000139364_75 (sequence is synthesized)
acattttcatctgggttactgtgtttatagactattctatgactcaagacaactaggacaccatcattttccagataagaaataacagttcaagttcattagggaaattatcttcccagt

SEQ ID NO: 353273 - DNA, 120 bp, Artificial Sequence
  ENSG00000139364_76 (sequence is synthesized)
ccaagcaagcaataatgttatcaacttacaatattggacaatcttcatattctatgagatgcctttaaaatttctttggatttaatgctgctcttggtcagttgttcaaatgaaacattg

SEQ ID NO: 353274 - DNA, 120 bp, Artificial Sequence
  ENSG00000139364_77 (sequence is synthesized)
taatttcatgttaacgacaagagtctcacgggagtctctttagatgctgcaggaactgagaggatagaagacctctctatacatctacattgcccattggagtaaagcactttacagaga

SEQ ID NO: 353275 - DNA, 120 bp, Artificial Sequence
  ENSG00000139364_78 (sequence is synthesized)
gatggatgccgctttgggatttggggtctatgtaatgctgatttttttcaaacctgtttggaaatattacttctttgggatggctgaaataacttttgacctgacacatctttctgtact

SEQ ID NO: 353276 - DNA, 120 bp, Artificial Sequence
  ENSG00000139364_79 (sequence is synthesized)
tcctgtggccaaaaaagcaagtgagactttctgtttcccattgtaaggctggagctgaaatagtctgccacgttattgttatctcctttgtaagaatttgactttctgaatgaaataaca

SEQ ID NO: 353277 - DNA, 120 bp, Artificial Sequence
  ENSG00000139364_80 (sequence is synthesized)
gaatgccagtgtcaacactgaccatatgatatagttatttcacttagagatgcttcctcaaagagcgtgcctttttcctccatcataaccgctttaggatctctgttttatccatgtatt

SEQ ID NO: 353278 - DNA, 120 bp, Artificial Sequence
  ENSG00000139364_81 (sequence is synthesized)
tcccacatagtagaagcattttccatttccatgaatattacaggctgagaaggagcacacatctggcactgataagcacactggcccaggcactcagccttctcatttcattaatctggt

SEQ ID NO: 353279 - DNA, 120 bp, Artificial Sequence
  ENSG00000139364_82 (sequence is synthesized)
tggtgaccgtttccatcgggcacacctggaaatgtccatcggacatattgccatctcagttgctgcagtgcagtgaattaccccagagccaccagttcacatgcccaaagatgaactggc

SEQ ID NO: 353280 - DNA, 120 bp, Artificial Sequence
  ENSG00000139364_83 (sequence is synthesized)
ccatggagggacttgattgccaagtgacttcctttctgtagttatcctctgctgtgacccttattttggacttctagcaagggcattcagtgtggattccaagaacaaaaccaattgtcc

SEQ ID NO: 353281 - DNA, 120 bp, Artificial Sequence
  ENSG00000139364_84 (sequence is synthesized)
aacctccattacaggggtcttctaggtattccccacacattatttgtgggcataagcaaacaccataactatgaaaggctgagagtggagaattaagtcataaggaaatgatcaaaccta

SEQ ID NO: 353282 - DNA, 120 bp, Artificial Sequence
  ENSG00000139364_85 (sequence is synthesized)
gggaaaaataagtggctataaaacactgaaagatagtcacatccacatagcgtgtatcatgcaacagacccgtgctcttagagggaggtagtgtgtgtcttcccatggcaaataattttt

SEQ ID NO: 353283 - DNA, 120 bp, Artificial Sequence
  ENSG00000139364_86 (sequence is synthesized)
acaatactgctcatgtttaatgtgtgtctacagggcatgctgttgtctcaaaattgaaatgtgcatcttaggtatcagttcccagcctcagactcttctcaggcaggtggaccggatctc

SEQ ID NO: 353284 - DNA, 120 bp, Artificial Sequence
  ENSG00000139364_87 (sequence is synthesized)
agctgcagaacatagtgagtggccaaacctacacagcccagccagtagtgtgctttggggtgattgcaaggcagcaaacagtggggacaagttttgtctggcatttgaaaaggtgttatc

SEQ ID NO: 353285 - DNA, 120 bp, Artificial Sequence
  ENSG00000139364_88 (sequence is synthesized)
ccttactttccacatttctgaattggattcttgttccctggtaaacaccagatattataaacagagcatgctgttatgacattgtgcttctatatacctttttgtataatgtatctatct

SEQ ID NO: 353286 - DNA, 120 bp, Artificial Sequence
  ENSG00000139364_89 (sequence is synthesized)
cattatattacctatggtttcagtatgatctgttgtgtatgttccaccgtatatttaatgtctctgtaaaggcacttccaaacattttgaaaacgaagaaataaaacatgttggatgatt

SEQ ID NO: 353287 - DNA, 120 bp, Artificial Sequence
  ENSG00000139364_90 (sequence is synthesized)
aattaggaactggggggtgttgaataaagctgaagatttggtgccctcgcctcagctccagactctacgggaaatgtttggtgcagcatccagaatggacaccactgctgtctgcaccgg

SEQ ID NO: 353288 - DNA, 120 bp, Artificial Sequence
  ENSG00000139364_91 (sequence is synthesized)
gggagcaccctctcccctcccatcatagctaattgatgtccaagtcctaccagaatctcttcatttcctctccatcctggtggccctttctgcagtagaggctgcgtgacagagagtcga

SEQ ID NO: 353289 - DNA, 120 bp, Artificial Sequence
  ENSG00000139364_92 (sequence is synthesized)
acagtcaagaaaggtgtagatcctgcagactgcgtggaggccatgctttcacatcaagccttcctcggtgacttgctcagcctgactgtgttcttatttgctgggtctctctctggaaat

SEQ ID NO: 353290 - DNA, 120 bp, Artificial Sequence
  ENSG00000139364_93 (sequence is synthesized)
ggtcttgttctcactgagcatcccatgctctaaagggctggaggccagaatgacctcacgaaggaggaaacagctgaccgcagagactccctggaatcagcaggcggctgcagcaggtga

SEQ ID NO: 353291 - DNA, 120 bp, Artificial Sequence
  ENSG00000139364_94 (sequence is synthesized)
tgctgcttccctctccctggaaaggggaatccctgacccttaatctccagcagaaagaatttattctcctccccttcttgtctcccctattcttctctctatctttcctcgtaagacaat

SEQ ID NO: 353292 - DNA, 120 bp, Artificial Sequence
  ENSG00000139364_95 (sequence is synthesized)
attttcctaactttagcaatccaaataagaccttctcattttttgcaaactcactgtgcctaataatattatttactcaatatattttctttaaatgccttgcttctttcgggtagccag

SEQ ID NO: 353293 - DNA, 120 bp, Artificial Sequence
  ENSG00000139364_96 (sequence is synthesized)
ttagctcagtgggttagagtgtggtgctaataaatgcattactttttcaaacttaaaaactaatttagcttcattataagacaataaagtccgtgagcttggtgtattacattttttgtt

SEQ ID NO: 353294 - DNA, 120 bp, Artificial Sequence
  ENSG00000139364_97 (sequence is synthesized)
aatatgcattaaaataaataactattcaaataaaattaagttcacccatgtgccacctaactgaacttgaatataaccagtgggatacagtttaggaaatgggacatttctgctagattc

SEQ ID NO: 353295 - DNA, 120 bp, Artificial Sequence
  ENSG00000139364_98 (sequence is synthesized)
ttcactcaaattagctatgtttctgactccaaattctgctaggaaccagaaaatatttttttcatgctctctgaaggggtctttttgaaccaccaaatttaatatttctgcctatttttt

SEQ ID NO: 353296 - DNA, 120 bp, Artificial Sequence
  ENSG00000139364_99 (sequence is synthesized)
cttagcacattggttgctattgcttttgcagcagagacctcagggagaaaggatttgaatttttagaatgactgatccttcctcctttaaattattaagagagccccaaagtccaatcta

SEQ ID NO: 353297 - DNA, 120 bp, Artificial Sequence
  ENSG00000139364_100 (sequence is synthesized)
ttcagctattttagaaaaatacaataactcagagttctgcccttcctcacattctacaagctcttgtttagaggttacatgaaacttggtctcagtattgaaaacttcgtggtagacagg

SEQ ID NO: 353298 - DNA, 120 bp, Artificial Sequence
  ENSG00000139364_101 (sequence is synthesized)
aaaacctttaggggtttccctatagtagaaaaggtctgggaggggttgatttcttcttgttgtgacctacaggatgctgtgtcttaagcaagagacagtttcggaaaaaaagactgatgt

SEQ ID NO: 353299 - DNA, 120 bp, Artificial Sequence
  ENSG00000139364_102 (sequence is synthesized)
attcgtgaggtctaattaacaaagaaattaattcctaggaaactcaagtttggcatagactctttcctggacatggaatgctcatcgtccttagatatggaaggtggactggcttaaaac

SEQ ID NO: 353300 - DNA, 120 bp, Artificial Sequence
  ENSG00000139364_103 (sequence is synthesized)
ctgcacacatagccctgcctggggttcctggtggtccttgtattctgtaggcaggtttgattaaatatatggccttaaatattcagagtttagaaagagctgagccaagtcacaggagat

SEQ ID NO: 353301 - DNA, 120 bp, Artificial Sequence
  ENSG00000139364_104 (sequence is synthesized)
tatatgcaccaatgacaaatatggatgatgaactgctgttggttgctattgacaatgcgcaagttttacactatttttactattcccatgtcattctagaaaggagacactgataagaga

SEQ ID NO: 353302 - DNA, 120 bp, Artificial Sequence
  ENSG00000139364_105 (sequence is synthesized)
ggctcaaacaaatgattcagtctgtagtttcctaagccttttgttctgacctaagagcctgctatgaagccccatggggtggaatcctccttctcttgccctgaagagctctactctaga

SEQ ID NO: 353303 - DNA, 120 bp, Artificial Sequence
  ENSG00000139364_106 (sequence is synthesized)
ggggcaggtccaagttcacagatcccgttattgccatatacctggttttctccactccacacaaatgtactaaaagtatcctctgctcatcctcatagacgttgttttggaagatgatac

SEQ ID NO: 353304 - DNA, 120 bp, Artificial Sequence
  ENSG00000139364_107 (sequence is synthesized)
ctttttgctcagctgtcacctatatagcctcaggaggatggggattcgtctaacaaattattgcccagtcttcagaggaacaaagtgaaacctgcagatcgcaagctcagagctgtattc

SEQ ID NO: 353305 - DNA, 120 bp, Artificial Sequence
  ENSG00000139364_108 (sequence is synthesized)
acactttttaaggggattccaggactgttgcaagtttgggggcttgtgtcaattgaggcgatttaattaaatggctgtgatgcatttactatggcttcagtgtcaatgtttgtagtaaat

SEQ ID NO: 353306 - DNA, 120 bp, Artificial Sequence
  ENSG00000139364_109 (sequence is synthesized)
tttactataactccaagttgaatggagttgtccacagagctatgaccttggcatcatcccagggacatcctcaaatacatggcacattcattagcaccctttggagagatcctctgagtc

SEQ ID NO: 353307 - DNA, 120 bp, Artificial Sequence
  ENSG00000139364_110 (sequence is synthesized)
tgtggagttgtcacacagtcatacttcagagtacagaaaacactgaatgatttttagggagagtcttgcagggctcaccaaagatctttgtgccttggaaccatgagttagataagggaa

SEQ ID NO: 353308 - DNA, 120 bp, Artificial Sequence
  ENSG00000139364_111 (sequence is synthesized)
aaatgtgaatttagaaagatgtaagttatggtaatatccaaacaaatgaacttgtttggcctgtgattgtatgacttttgcgggacagaatcagaggacatacatgattttgaaaagctg

SEQ ID NO: 353309 - DNA, 120 bp, Artificial Sequence
  ENSG00000139364_112 (sequence is synthesized)
gaaccttggcctaatctggcaagattaaaagagataaatgtaaaatttcaagttgacaactatagtagtccttccttatctgtggtttcactttccgtggtttcatttcactgtggtcaa

SEQ ID NO: 353310 - DNA, 120 bp, Artificial Sequence
  ENSG00000139364_113 (sequence is synthesized)
tcacagtccaaaaacgttaaatgaaaattttcagaaagaagcaattcatgttttaaattgtgtactgttctgagtatcgtgaagaaatcttgagtcttcctgctccatcccacctgggtt

SEQ ID NO: 353311 - DNA, 120 bp, Artificial Sequence
  ENSG00000139364_114 (sequence is synthesized)
gtaactcatgactttgtctggcatatccatgctgtagataccacccacctctgagtcatttagtagctgcctgggtgatcaaatagactgtcgcggtatcacagtgcttgtgttcaagtc

SEQ ID NO: 353312 - DNA, 120 bp, Artificial Sequence
  ENSG00000139364_115 (sequence is synthesized)
acccttatgttatttacaaatgaccccaaagtataagagtagtgatgctggcaattcggctagaccaacaagaagtcataaagtgcttcttttaagtgaaaaggtgagagttcttgactt

SEQ ID NO: 353313 - DNA, 120 bp, Artificial Sequence
  ENSG00000139364_116 (sequence is synthesized)
aataaggaaggaaaaagatcatatgctggagttactaagatctacagtcagagcgaatcgtctatccatgaaatcgtgatgaaggaaaaaacattcatcgtagttttgctgtcacatctc

SEQ ID NO: 353314 - DNA, 120 bp, Artificial Sequence
  ENSG00000139364_117 (sequence is synthesized)
aaatacaaaagttaaggccacagtgtgtgataaattcttcattaagatgtgaaaagacattaaatttaggtgaaagacatgaacagaaacttgttctgctggatgacagtctgattcagt

SEQ ID NO: 353315 - DNA, 120 bp, Artificial Sequence
  ENSG00000139364_118 (sequence is synthesized)
tctatctgtggtttcaggcatccactgggggtcttagactatattacccatggatgggaggagactgggagactgctgtacttttaggttaaaaaaaaaaaaaacaagtagaggattgtg

SEQ ID NO: 353316 - DNA, 120 bp, Artificial Sequence
  ENSG00000139364_119 (sequence is synthesized)
tgtgtgtgtgtgtgtgtgtgtgcgcacacacacaagaagccttagcgtttttatcagtattgggatccagtgagtcaactgtttgataaggctgctacaggttgatttttattagcatga

SEQ ID NO: 353317 - DNA, 120 bp, Artificial Sequence
  ENSG00000139364_120 (sequence is synthesized)
atgggtgtgtgcctcagagcagaggtcacaggcaggcagtctgcagaccagatctgacccagaagtgtgtggggggtgcggggagggtctgcatagtttaaaaattgttacttaatttgt

SEQ ID NO: 353318 - DNA, 120 bp, Artificial Sequence
  ENSG00000139364_121 (sequence is synthesized)
tgcccccatgtaaaaattggcaagttcgcacagaaatctggatttacagtttcttatgaaaaatcacaggaccaggtggtcctgggtctccatgatttcctgtgaacctcgtctggagtt

SEQ ID NO: 353319 - DNA, 120 bp, Artificial Sequence
  ENSG00000139364_122 (sequence is synthesized)
gaagagaggatgctcctctgcataaaacctgtgccctccagctcactgtagtctccaccactcccttttgtctttcacatggaggttgaaggatatttgtcatttctggtcacacttgtg

SEQ ID NO: 353320 - DNA, 120 bp, Artificial Sequence
  ENSG00000139364_123 (sequence is synthesized)
ctcctagtttttgatagtggatttcagaggaaggtgagatattttttgtactccagtctctaaaaataaataagcaacaaatgatagacttcactctctcactctgatggagaattctgt

SEQ ID NO: 353321 - DNA, 120 bp, Artificial Sequence
  ENSG00000139364_124 (sequence is synthesized)
atctttctaggccgtaagaagaacaataaaaaattgggttgtgctctgccaaaaagtgtctgagaggctgaggactcttgaaatcaaatcacaggagaaatgattgaaggaagtgtgagt

SEQ ID NO: 353322 - DNA, 120 bp, Artificial Sequence
  ENSG00000139364_125 (sequence is synthesized)
gttaagcctattgatgagaagaaaaggctcaggggtgaggtggagagggagacatgacagctttttgtaagtctttcaagggccatcatgtagaagatggagtagctttgtgctttttag

SEQ ID NO: 353323 - DNA, 120 bp, Artificial Sequence
  ENSG00000139364_126 (sequence is synthesized)
attccaagaatggaagttgaaaggtaccagttttagctcaatataaagaaaaagactgcagaggtagtgagttctttggttgagcttccagacatgtgatgttgctaaagatcctgactc

SEQ ID NO: 353324 - DNA, 120 bp, Artificial Sequence
  ENSG00000139364_127 (sequence is synthesized)
caccttcctcaccgtttgaccttgggcaaattacttaccatctctgagcctagtttccttatctataaaatggggatggtaatgatacagtggaaacgtacttttctagagatttgttct

SEQ ID NO: 353325 - DNA, 120 bp, Artificial Sequence
  ENSG00000139364_128 (sequence is synthesized)
cttttctagagatttgttctaaagtcacagcaaacggcagaactaacaataaccaaactactccctaatccttgaaaatccccagtctcactgggtcatccaggctggagtgcagtggcg

SEQ ID NO: 353326 - DNA, 120 bp, Artificial Sequence
  ENSG00000139370_0 (sequence is synthesized)
gcgtgcggggccgtgctgctgacggagctgctggagcgcgccgctttctacggcatcacgtccaacctggtgctattcctgaacggggcgccgttctgctgggagggcgcgcaggccagc

SEQ ID NO: 353327 - DNA, 120 bp, Artificial Sequence
  ENSG00000139370_1 (sequence is synthesized)
gaggcgctgctgctcttcatgggcctcacctacctgggctcgccgttcggaggctggctggccgacgcgcggctgggccgggcgcgcgccatcctgctgagcctggcgctctacctgctg

SEQ ID NO: 353328 - DNA, 120 bp, Artificial Sequence
  ENSG00000139370_2 (sequence is synthesized)
ctctacctgctgggcatgctggccttcccgctgctggccgcgcccgccacgcgagccgcgctctgcggttccgcgcgcctgctcaactgcacggcgcctggtcccgacgccgccgcccgc

SEQ ID NO: 353329 - DNA, 120 bp, Artificial Sequence
  ENSG00000139370_3 (sequence is synthesized)
gccaccttcgcggggctggtgctggtgggcctgggcgtggccaccgtcaaggccaacatcacgcccttcggcgccgaccaggttaaagatcgaggtccggaagccactaggagatttttt

SEQ ID NO: 353330 - DNA, 120 bp, Artificial Sequence
  ENSG00000139370_4 (sequence is synthesized)
aattggttttattggagcattaacctgggagcgatcctgtcgttaggtggcattgcctatattcagcagaacgtcagctttgtcactggttatgcgatccccactgtctgcgtcggcctt

SEQ ID NO: 353331 - DNA, 120 bp, Artificial Sequence
  ENSG00000139370_5 (sequence is synthesized)
gcttttgtggtcttcctctgtggccagagcgttttcatcaccaagcctcctgatggcagtgccttcaccgacatgttcaagatactgacgtattcctgctgttcccagaagcgaagtgga

SEQ ID NO: 353332 - DNA, 120 bp, Artificial Sequence
  ENSG00000139370_6 (sequence is synthesized)
gagcgccagagtaatggtgaaggcattggagtctttcagcaatcttctaaacaaagtctgtttgattcatgtaagatgtctcatggtgggccatttacagaagagaaagtggaagatgtg

SEQ ID NO: 353333 - DNA, 120 bp, Artificial Sequence
  ENSG00000139370_7 (sequence is synthesized)
aaagctctggtcaagattgtccctgttttcttggctttgataccttactggacagtgtatttccaaatgcagacaacatatgttttacagagtcttcatttgaggattccagaaatttca

SEQ ID NO: 353334 - DNA, 120 bp, Artificial Sequence
  ENSG00000139370_8 (sequence is synthesized)
aatattacaaccactcctcacacgctccctgcagcctggctgaccatgtttgatgctgtgctcatcctcctgctcatccctctgaaggacaaactggtcgatcccattttgagaagacat

SEQ ID NO: 353335 - DNA, 120 bp, Artificial Sequence
  ENSG00000139370_9 (sequence is synthesized)
ggcctgctcccatcctccctgaagaggatcgccgtgggcatgttctttgtcatgtgctcggcctttgctgcaggaattttggagagtaaaaggctgaaccttgttaaagagaaaaccatt

SEQ ID NO: 353336 - DNA, 120 bp, Artificial Sequence
  ENSG00000139370_10 (sequence is synthesized)
ctggaatttgcatactcagctgcccccaagtccatgcagagtgccataatgggcttgttctttttcttctctggcgtcgggtcgttcgtgggttctggactgctggcactggtgtctatc

SEQ ID NO: 353337 - DNA, 120 bp, Artificial Sequence
  ENSG00000139370_11 (sequence is synthesized)
aaagccatcggatggatgagcagtcacacagactttggtaatattaacggctgctatttgaactattacttttttcttctggctgctattcaaggagctaccctcctgcttttcctcatt

SEQ ID NO: 353338 - DNA, 120 bp, Artificial Sequence
  ENSG00000139370_12 (sequence is synthesized)
atttctgtgaaatatgaccatcatcgagaccatcagcgatcaagagccaatggcgtgcccaccagcaggagggcctgaccttcctgaggccatgtgcggtttctgaggctgacatgtcag

SEQ ID NO: 353339 - DNA, 120 bp, Artificial Sequence
  ENSG00000139370_13 (sequence is synthesized)
taactgactggggtgcactgagaacaggcaagactttaaattcccataaaatgtctgacttcactgaaacttgcatgttgcctggattgatttcttctttccctctatccaaaggagctt

SEQ ID NO: 353340 - DNA, 120 bp, Artificial Sequence
  ENSG00000139370_14 (sequence is synthesized)
ggtaagtgccttactgcagcgtgtctcctggcacgctgggccctccgggaggagagctgcagatttcgagtatgtcgcttgtcattcaaggtctctgtgaatcctctagctgggttccct

SEQ ID NO: 353341 - DNA, 120 bp, Artificial Sequence
  ENSG00000139370_15 (sequence is synthesized)
tttttacagaaactcacaaatggagattgcaaagtcttggggaactccacgtgttagttggcatcccagtttcttaaacaaatagtatcacctgcttcccatagccatatctcactgtaa

SEQ ID NO: 353342 - DNA, 120 bp, Artificial Sequence
  ENSG00000139370_16 (sequence is synthesized)
aaaaaaaattaataaactgttacttatatttaagaaagtgaggatttttttttttttaaagataaaagcatggtcagatgctgcaaggattttacataaatgccatatttatggtttcct

SEQ ID NO: 353343 - DNA, 120 bp, Artificial Sequence
  ENSG00000139370_17 (sequence is synthesized)
tcctgagaacaatcttgctcttgccatgttctttgatttaggctggtagtaaacacatttcatctgctgcttcaaaaagtacttactttttaaaccatcaacattacttttctttcttaa

SEQ ID NO: 353344 - DNA, 120 bp, Artificial Sequence
  ENSG00000139370_18 (sequence is synthesized)
ggcaaggcatgcataagagtcatttgagaccatgtgtcccatctcaagccacagagcaactcacggggtacttcacaccttacctagtcagagtgcttatatatagctttattttggtac

SEQ ID NO: 353345 - DNA, 120 bp, Artificial Sequence
  ENSG00000139370_19 (sequence is synthesized)
gattgagactaaagactgatcatggttgtatgtaaggaaaacattcttttgaacagaaatagtgtaattaaaaataattgaaagtgttaaatgtgaacttgagctgtttgaccagtcaca

SEQ ID NO: 353346 - DNA, 120 bp, Artificial Sequence
  ENSG00000139370_20 (sequence is synthesized)
tttttgtattgttactgtacgtgtatctggggcttctccgtttgttaatactttttctgtatttgttgctgtatttttggcataactttattataaaaagcatctcaaatgcgaaatcca

SEQ ID NO: 353347 - DNA, 120 bp, Artificial Sequence
  ENSG00000139370_21 (sequence is synthesized)
agagtcttcatttgaggattccagaaatttcaaatattacaaccactcctcacacgaaaagcaaatgcagattcatttggaaagaaatcttttcccagttccgttgtctctaaactgaag

SEQ ID NO: 353348 - DNA, 120 bp, Artificial Sequence
  ENSG00000139370_22 (sequence is synthesized)
ggcctcactgaacaaatgtctctctttggggcctaagcatatttgtggggtgcctcatggtacttgcatgtagctcagtaaggcatggagctttataacattggttctaaaacttacctg

SEQ ID NO: 353349 - DNA, 120 bp, Artificial Sequence
  ENSG00000139370_23 (sequence is synthesized)
tgagtagaagtcacctgggaagttgcttgaaatgcagattcctgggcctgggccccagagaccgtgattcagtaggtctggagcgtgggtcctgtgactgtgtttgttttttgtttgttt

SEQ ID NO: 353350 - DNA, 74 bp, Artificial Sequence
  ENSG00000139370_24 (sequence is synthesized)
gtttgtttgagatggagtttcactcttgtcaaccaggtacagtggcacagtctcggttcactgcaacctccatg

SEQ ID NO: 353351 - DNA, 120 bp, Artificial Sequence
  ENSG00000139370_25 (sequence is synthesized)
attataggcgtgagccaccatgcccagcggactctgtttttaaagagcattccaggtaattccaaggcaagtggttcaggtacttagaaaattctacagcagaatatacttggaaaaact

SEQ ID NO: 353352 - DNA, 120 bp, Artificial Sequence
  ENSG00000139370_26 (sequence is synthesized)
tatacttggaaaaactctctagcatttgttggaatttagtgtaattaagtgaaacctacctagcaactgtagtaattaaaagcgtggggtgtgctttttgttgagatccgtgaatgtttc

SEQ ID NO: 353353 - DNA, 120 bp, Artificial Sequence
  ENSG00000139370_27 (sequence is synthesized)
tgacaacggtaattttaaccacttgaccgtatatggttttcatccttgaagactgtcatatattttcaagtgtctttcctccctgttattttaggttaaagatcgaggtccggaagccac

SEQ ID NO: 353354 - DNA, 120 bp, Artificial Sequence
  ENSG00000139370_28 (sequence is synthesized)
gatctgtcgctgtggtggcaggtgccgcagtacttgctgattgggatcagcgagatctttgcaagtatcgcaggtgaggacctttagtgccggaggtgtctgagtccaggcacaagcgtg

SEQ ID NO: 353355 - DNA, 120 bp, Artificial Sequence
  ENSG00000139370_29 (sequence is synthesized)
atttccagtggctgatttttgtttatagagtaggagctgctgcccttgcttgtttttctcatgtctttctgttacacttgataggtgaccagtaacttagcctgcacctgcagtgagatc

SEQ ID NO: 353356 - DNA, 120 bp, Artificial Sequence
  ENSG00000139370_30 (sequence is synthesized)
tcaatgctgctgagagcacaggttgatttgtgaagtcagcttactttgttgcaaagattaagcctaccctatgcagggaaaccaacatcatcatcatcattattatcatcatttgttgtt

SEQ ID NO: 353357 - DNA, 120 bp, Artificial Sequence
  ENSG00000139370_31 (sequence is synthesized)
ataataataaatcagtagatcaccttcgatccatcactatgattggaagaacatctcagtattacctgctgttgggtaaaatagcactactgttaattctacagtaggactttttaactt

SEQ ID NO: 353358 - DNA, 120 bp, Artificial Sequence
  ENSG00000139370_32 (sequence is synthesized)
tctcctactcccctttgtaagagacaaacgaggtatgggtgagcaatccagatatttgaggattaaatgaaacatgttgaacatctgattttatataagatgctgtaaaaagccgaagtg

SEQ ID NO: 353359 - DNA, 120 bp, Artificial Sequence
  ENSG00000139370_33 (sequence is synthesized)
aaataggtgtgctatgccatgacctccactcagcctgcttaggaggctgaaggctgggggcctattagtcctgggggaagctgtgattagacgtggtcctttcacgcatcagaatcacgt

SEQ ID NO: 353360 - DNA, 120 bp, Artificial Sequence
  ENSG00000139370_34 (sequence is synthesized)
ttgctacgaagtctcgtagccaacatcagatttttagattaactgtaaatgttaataaatgaatattacactaacctacttttgaattctaggaattttggagagtaaaaggctgaacct

SEQ ID NO: 353361 - DNA, 120 bp, Artificial Sequence
  ENSG00000139370_35 (sequence is synthesized)
ccaaaattacagtagcccagtttcactttgactagaaagtccctttgtcagctgtttcagtacattctgtgacatttagaaataatttaggtagctgtgttgggtgtgtacaattagtaa

SEQ ID NO: 353362 - DNA, 120 bp, Artificial Sequence
  ENSG00000139370_36 (sequence is synthesized)
gtgatggaatgagttgaagcagattcaatacagtgagctggtttcttacctccaaacttaatttgtgaccaaataattgattgctgggaggggaagaaaactaattccttcattttattt

SEQ ID NO: 353363 - DNA, 120 bp, Artificial Sequence
  ENSG00000139370_37 (sequence is synthesized)
tttggccatttctaaagtaggtaggactaggtgattttttttcccatgagtctacagaatcttggaatttttggttttagttatggagtcattttggctgctttaactatgtctaaagcc

SEQ ID NO: 353364 - DNA, 120 bp, Artificial Sequence
  ENSG00000139370_38 (sequence is synthesized)
tctctgaaaaagaagctgagaacaggtacgcttctggtttttcaggcccctcttgttaatgtaatttctcctttggataactggccattctttttcaaaattgatctccagaggacttta

SEQ ID NO: 353365 - DNA, 120 bp, Artificial Sequence
  ENSG00000139370_39 (sequence is synthesized)
cgcatctgagtctagcttaggggaggggcaggatgcttagagtgtttgagagcacagttggtccacatataatgatactgttttttatacctagatgcagacaacatatgttttacagag

SEQ ID NO: 353366 - DNA, 120 bp, Artificial Sequence
  ENSG00000139370_40 (sequence is synthesized)
ggcgagtaattgatacttcttaaaatgaggaggaaatggtgctcggttatctcagatgaatctgacagaatatgcgctctttcatccataattaaatgtggatgttgaaaggagatgtgc

SEQ ID NO: 353367 - DNA, 120 bp, Artificial Sequence
  ENSG00000139370_41 (sequence is synthesized)
ctggccgccccctgcagcgcgtgctgagtgattggatcccagctgctttcatggccgttcttcttggatgcttgggatagtttgtagaccgcctattagctaataatggaccaatgttgc

SEQ ID NO: 353368 - DNA, 120 bp, Artificial Sequence
  ENSG00000139370_42 (sequence is synthesized)
ctttcttaggttaaagatcgaggtccggaagccactaggagattttttaattggttttattggagcattaacctgggagcgatcctgtcgttaggtggcattgcctatattcagcagaac

SEQ ID NO: 353369 - DNA, 120 bp, Artificial Sequence
  ENSG00000139372_0 (sequence is synthesized)
agaagcctggaggaggagcttgagtccagccactgtctgggtactgccagccatcgggcccaggtctctggggttgtcttaccgcagtgagtaccacgcggtactacagagaccggctgc

SEQ ID NO: 353370 - DNA, 120 bp, Artificial Sequence
  ENSG00000139372_1 (sequence is synthesized)
ccgtgtgcccggcaggtggagccgcccgcatcagcggcctcggggaatggaagcggagaacgcgggcagctattcccttcagcaagctcaagctttttatacgtttccatttcaacaact

SEQ ID NO: 353371 - DNA, 120 bp, Artificial Sequence
  ENSG00000139372_2 (sequence is synthesized)
gatggctgaagctcctaatatggcagttgtgaatgaacagcaaatgccagaagaagttccagccccagctcctgctcaggaaccagtgcaagaggctccaaaaggaagaaaaagaaaacc

SEQ ID NO: 353372 - DNA, 120 bp, Artificial Sequence
  ENSG00000139372_3 (sequence is synthesized)
cagaacaacagaaccaaaacaaccagtggaacccaaaaaacctgttgagtcaaaaaaatctggcaagtctgcaaaatcaaaagaaaaacaagaaaaaattacagacacatttaaagtaaa

SEQ ID NO: 353373 - DNA, 120 bp, Artificial Sequence
  ENSG00000139372_4 (sequence is synthesized)
aagaaaagtagaccgttttaatggtgtttcagaagctgaacttctgaccaagactctccccgatattttgaccttcaatctggacattgtcattattggcataaacccgggactaatggc

SEQ ID NO: 353374 - DNA, 120 bp, Artificial Sequence
  ENSG00000139372_5 (sequence is synthesized)
tgcttacaaagggcatcattaccctggacctggaaaccatttttggaagtgtttgtttatgtcagggctcagtgaggtccagctgaaccatatggatgatcacactctaccagggaagta

SEQ ID NO: 353375 - DNA, 120 bp, Artificial Sequence
  ENSG00000139372_6 (sequence is synthesized)
tggtattggatttaccaacatggtggaaaggaccacgcccggcagcaaagatctctccagtaaagaatttcgtgaaggaggacgtattctagtacagaaattacagaaatatcagccacg

SEQ ID NO: 353376 - DNA, 120 bp, Artificial Sequence
  ENSG00000139372_7 (sequence is synthesized)
aatagcagtgtttaatggaaaatgtatttatgaaatttttagtaaagaagtttttggagtaaaggttaagaacttggaatttgggcttcagccccataagattccagacacagaaactct

SEQ ID NO: 353377 - DNA, 120 bp, Artificial Sequence
  ENSG00000139372_8 (sequence is synthesized)
ctgctatgttatgccatcatccagtgcaagatgtgctcagtttcctcgagcccaagacaaagttcattactacataaaactgaaggacttaagagatcagttgaaaggcattgaacgaaa

SEQ ID NO: 353378 - DNA, 120 bp, Artificial Sequence
  ENSG00000139372_9 (sequence is synthesized)
tatggacgttcaagaggtgcaatatacatttgacctacagcttgcccaagaggatgcaaagaagatggctgttaaggaagaaaaatatgatccaggttatgaggcagcatatggtggtgc

SEQ ID NO: 353379 - DNA, 120 bp, Artificial Sequence
  ENSG00000139372_10 (sequence is synthesized)
ttacggagaaaatccatgcagcagtgaaccttgtggcttctcttcaaatgggctaattgagagcgtggagttaagaggagaatcagctttcagtggcattcctaatgggcagtggatgac

SEQ ID NO: 353380 - DNA, 120 bp, Artificial Sequence
  ENSG00000139372_11 (sequence is synthesized)
ccagtcatttacagaccaaattccttcctttagtaatcactgtggaacacaagaacaggaagaagaaagccatgcttaagaatggtgcttctcagctctgcttaaatgctgcagttttaa

SEQ ID NO: 353381 - DNA, 120 bp, Artificial Sequence
  ENSG00000139372_12 (sequence is synthesized)
tgcagttgtcaacaagtagaacctcagtttgctaactgaagtgttttattagtattttactctagtggtgtaattgtaatgtagaacagttgtgtggtagtgtgaaccgtatgaacctaa

SEQ ID NO: 353382 - DNA, 120 bp, Artificial Sequence
  ENSG00000139372_13 (sequence is synthesized)
ccagctttttatatactatatttcatttatgaagaaattgattttcttttgggagtcacttttaatctgtaattttaaaatacaagtctgaatatttatagttgattcttaactgcataa

SEQ ID NO: 353383 - DNA, 120 bp, Artificial Sequence
  ENSG00000139372_14 (sequence is synthesized)
acctagatataccattatcccttttatacctaagaagggcatgctaataattaccactgtcaaagaggcaaaggtgttgatttttgtatatgaagttaagcctcagtggagtctcatttg

SEQ ID NO: 353384 - DNA, 120 bp, Artificial Sequence
  ENSG00000139372_15 (sequence is synthesized)
ttagtttttagtggtaactaagggtaaactcagggttccctgagctatatgcacactcagacctctttgctttaccagtggtgtttgtgagttgctcagtagtaaaaactggcccttacc

SEQ ID NO: 353385 - DNA, 120 bp, Artificial Sequence
  ENSG00000139372_16 (sequence is synthesized)
tgacagagccctggctttgacctgctcagccctgtgtgttaatcctctagtagccaattaactactctggggtggcaggttccagagaatgcagtagaccttttgccactcatctgtgtt

SEQ ID NO: 353386 - DNA, 120 bp, Artificial Sequence
  ENSG00000139372_17 (sequence is synthesized)
ttacttgagacatgtaaatatgatagggaaggaactgaatttctccattcatatttataaccattctagttttatcttccttggctttaagagtgtgccatggaaagtgataagaaatga

SEQ ID NO: 353387 - DNA, 120 bp, Artificial Sequence
  ENSG00000139372_18 (sequence is synthesized)
acttctaggctaagcaaaaagatgctggagatatttgatactctcatttaaactggtgctttatgtacatgagatgtactaaaataagtaatatagaatttttcttgctaggtaaatcca

SEQ ID NO: 353388 - DNA, 120 bp, Artificial Sequence
  ENSG00000139372_19 (sequence is synthesized)
gtaagccaataattttaaagattctttatctgcatcattgctgtttgttactataaattaaatgaacctcatggaaaggttgaggtgtatacctttgtgattttctaatgagttttccat

SEQ ID NO: 353389 - DNA, 120 bp, Artificial Sequence
  ENSG00000139372_20 (sequence is synthesized)
ggtgctacaaataatccagactaccaggtctggtagatattaaagctgggtactaagaaatgttatttgcatcctctcagttactcctgaatattctgatttcatacgtacccagggagc

SEQ ID NO: 353390 - DNA, 120 bp, Artificial Sequence
  ENSG00000139372_21 (sequence is synthesized)
atgctgttttgtcaatcaatataaaatatttatgaggtctcccccacccccaggaggttatatgattgctcttctctttataataagagaaacaaattcttattgtgaatcttaacatgc

SEQ ID NO: 353391 - DNA, 120 bp, Artificial Sequence
  ENSG00000139372_22 (sequence is synthesized)
tttttagctgtggctatgatggattttattttttcctaggtcaagctgtgtaaaagtcatttatgttatttaaatgatgtactgtactgctgtttacatggacgttttgtgcgggtgctt

SEQ ID NO: 353392 - DNA, 120 bp, Artificial Sequence
  ENSG00000139372_23 (sequence is synthesized)
tgaagtgccttgcatcagggattaggagcaattaaattattttttcacgggactgtgtaaagcatgtaactaggtattgctttggtatataactattgtagctttacaagagattgtttt

SEQ ID NO: 353393 - DNA, 120 bp, Artificial Sequence
  ENSG00000139372_24 (sequence is synthesized)
atttgaatggggaaaataccctttaaattatgacggacatccactagagatgggtttgaggattttccaagcgtgtaataatgatgtttttcctaacatgacagatgagtagtaaatgtt

SEQ ID NO: 353394 - DNA, 120 bp, Artificial Sequence
  ENSG00000139372_25 (sequence is synthesized)
gatatatcctatacatgacagtgtgagactttttcattaaataatattgaaagattttaaaattcatttgaaagtctgatggcttttacaataaaagatattaagaattgttatccttaa

SEQ ID NO: 353395 - DNA, 120 bp, Artificial Sequence
  ENSG00000139372_26 (sequence is synthesized)
cattgtaagatctttgtcctcgttggattttataagtagtattgggggatcagctttacttaacagttgtccttgcaaatagcattttgctgaaaaggaccatttctaagaatccttttg

SEQ ID NO: 353396 - DNA, 120 bp, Artificial Sequence
  ENSG00000139372_27 (sequence is synthesized)
gtggtaaatggtgtcagcttcatgaggttgtgttatatgagagtgtttaagagggtgggctccaaatttagactgtctgggttcaaatcctgtcacaagtataatcttggataagtctta

SEQ ID NO: 353397 - DNA, 120 bp, Artificial Sequence
  ENSG00000139372_28 (sequence is synthesized)
ttaacctttctaaacaccggttttctcattgataaaccaggggtgataataccaccccccgatagggttgcaagtaaatgagagaatccatgtgaatcacttcaactgaatgatgcctgt

SEQ ID NO: 353398 - DNA, 120 bp, Artificial Sequence
  ENSG00000139372_29 (sequence is synthesized)
ggagacctgatacatggcagcactaattttaagctcttatttttctcagtaactgtaagaaacatcagcatgtgaacaattgtgtaggtgatgtggagcgagcttcttgttgaaagttga

SEQ ID NO: 353399 - DNA, 120 bp, Artificial Sequence
  ENSG00000139372_30 (sequence is synthesized)
gaatcagaattgtggctggacatgggctcagattgattgttccaggacctgtctttccagactcaaagcagcccagttggtgagggtgcgaggcctgggatcataaaggagtcaaactgg

SEQ ID NO: 353400 - DNA, 120 bp, Artificial Sequence
  ENSG00000139372_31 (sequence is synthesized)
tggatttaccaacatggtggaaaggaccacgcccggcagcaaagatctctccaggtaagtacacagcatttgcttttatgggttggaaccttgagtatgctggtgccccaaatattctag

SEQ ID NO: 353401 - DNA, 120 bp, Artificial Sequence
  ENSG00000139372_32 (sequence is synthesized)
gaacatcatatgtatctagttcaagctgagctcaacaaatgtacaatatgctctttcattgaaagctgtctgaatttagcatattataaatattgtcatatttatatttttgactacttt

SEQ ID NO: 353402 - DNA, 120 bp, Artificial Sequence
  ENSG00000139372_33 (sequence is synthesized)
tagcagtgtttaatggaaaatgtaagatttacttttaaattttttttttctttgctaacattatgggcaatgtaaatatgtttgtatttcattttaggtatttatgaaatttttagtaaa

SEQ ID NO: 353403 - DNA, 120 bp, Artificial Sequence
  ENSG00000139372_34 (sequence is synthesized)
aagcggagaacgcgggcagagtttcactctgttgcccaagatggagtacagtggtgcgatcaccgttcactgcaacctctgcttcccgagtttaagcgattctcatgcctcagcctccca

SEQ ID NO: 353404 - DNA, 120 bp, Artificial Sequence
  ENSG00000139372_35 (sequence is synthesized)
ctttaagtcatgaactctaggccatcctagttgcattttcctcctttaataacaaatgagtcctgtatctgaagaacagaaacttaacagttgtattccggaagcttgcttaactatttt

SEQ ID NO: 353405 - DNA, 120 bp, Artificial Sequence
  ENSG00000139372_36 (sequence is synthesized)
agttgtattccggaagcttgcttaactattttaataataattctccttcactagactgttaaaatctcctactttgatcatttaaaacttccaggccgggcatggtggttcacgcctgta

SEQ ID NO: 353406 - DNA, 120 bp, Artificial Sequence
  ENSG00000139372_37 (sequence is synthesized)
agtgagccgaaatcacaccactggactccagcctgggtgacagaatgagacaccgtctcaaaaagaaaaaaaaaaacttcaaataagctgatacggtggctcacacctgtaatcccagtg

SEQ ID NO: 353407 - DNA, 83 bp, Artificial Sequence
  ENSG00000139372_38 (sequence is synthesized)
aaatagagtaagacccagtctctactttaaaaaaagcaaatatttctaaatggcataaactaactttgtttttcttttctggc

SEQ ID NO: 353408 - DNA, 120 bp, Artificial Sequence
  ENSG00000139372_39 (sequence is synthesized)
ttctaaatggcataaactaactttgtttttcttttctggcagttgagagcgtggagttaagaggagaatcagctttcagtggcattcctaatgggcagtggatgacccagtcatttacag

SEQ ID NO: 353409 - DNA, 120 bp, Artificial Sequence
  ENSG00000139405_0 (sequence is synthesized)
agtgctgctggctgctccctggttgctgggtgcaaagtgctgggttctgggtttctggattcgcgggccgttcacacgtagcctgtgccggctcctcgggtgagtccgtccgcgcgcggt

SEQ ID NO: 353410 - DNA, 120 bp, Artificial Sequence
  ENSG00000139405_1 (sequence is synthesized)
gccccgggacggcctaggctgccgggggtccggggccccaggcattccgggctgcagattgacggggatcccggatgcaccgcgcgcccccgcgccctcaccgacgggtccagacctggt

SEQ ID NO: 353411 - DNA, 120 bp, Artificial Sequence
  ENSG00000139405_2 (sequence is synthesized)
gggaagaaggtgcggggacgggtccctgaggatcccgatgcctacgagccaagatgctcagctttataggtgtgacctacacatgtgacttcacctcagttttgtgatccgtaaaatgga

SEQ ID NO: 353412 - DNA, 120 bp, Artificial Sequence
  ENSG00000139405_3 (sequence is synthesized)
caaattcgaagctacttcacagtgctgttgagaggattaaatgaaacaatgcttgtaaagctctttgcaggagggagcctcggaagcagggcctggccggcagagcacacctgctgtcac

SEQ ID NO: 353413 - DNA, 120 bp, Artificial Sequence
  ENSG00000139405_4 (sequence is synthesized)
cagggaccacaggcagcatgaagacccccgtggagctggccgtcagtgggatgcagaccctcggccttcagcaccgctgccgaggtggctaccgggtcaaggccaggacgtcatatgtgg

SEQ ID NO: 353414 - DNA, 120 bp, Artificial Sequence
  ENSG00000139405_5 (sequence is synthesized)
atgagactctgtttggcagcccagcaggcacccggcctaccccaccggacttcgatccgccctgggtggagaaggctaacagaaccagaggcgtgggcaaggaggcatcgaaggccttgg

SEQ ID NO: 353415 - DNA, 120 bp, Artificial Sequence
  ENSG00000139405_6 (sequence is synthesized)
gggcaaaggggagctgtgagaccaccccctcaaggggcagcacccccaccctcacaccaaggaagaagaacaaatacagacccatcagccacaccccgtcttactgtgatgagtcgctgt

SEQ ID NO: 353416 - DNA, 120 bp, Artificial Sequence
  ENSG00000139405_7 (sequence is synthesized)
cgcaaagctccgtgctctcttgtggacgccaccacctacccccaggggtagccactcgccccgccccagggaggcaccactgcgagccattcacccagctggtccctccaagacagagcc

SEQ ID NO: 353417 - DNA, 120 bp, Artificial Sequence
  ENSG00000139405_8 (sequence is synthesized)
ggggccagcggcagactcccagaagttatctatgggtgggttacactcttcacgccccctgaagcggggactttcccattccctcacccacctgaatgtccccagcactggtcatccagc

SEQ ID NO: 353418 - DNA, 120 bp, Artificial Sequence
  ENSG00000139405_9 (sequence is synthesized)
caccagtgccccccacacaaatgggcctcaggatctcaggccttccacgtcaggggtgaccttccggagccccctggtgacttccagggctcgctcagttagcatttcagtgccatctac

SEQ ID NO: 353419 - DNA, 120 bp, Artificial Sequence
  ENSG00000139405_10 (sequence is synthesized)
cccacgacgaggtggggccacccagaaaccaaagcccccttggaaatgatactctttcatcagggttgcctatggggccacggcgacaggtatggccccttgccagggtaggaggacatt

SEQ ID NO: 353420 - DNA, 120 bp, Artificial Sequence
  ENSG00000139405_11 (sequence is synthesized)
catcacccagggaaccccaggtattaaagaagcccctgtgggggcagacagacatagcaggggtgggcagtgcctccctttatcctgacaatctctagtcgattcttgcctttttctccc

SEQ ID NO: 353421 - DNA, 120 bp, Artificial Sequence
  ENSG00000139405_12 (sequence is synthesized)
gattgcggatttgggggccacctctaagatgcctctctccagccctgtctcaaccatactccaaattagtgccaacccaggggcctggcacctcccacatcatccattgtcttgctgcca

SEQ ID NO: 353422 - DNA, 120 bp, Artificial Sequence
  ENSG00000139405_13 (sequence is synthesized)
agtgcgaataaacggcgtgattgccaacctggagggtcccctcttatcccttcaagccaagcttcctgctcaggattagtttccagctaagtctgcaagccctagaggagtttttccagg

SEQ ID NO: 353423 - DNA, 120 bp, Artificial Sequence
  ENSG00000139405_14 (sequence is synthesized)
ctgtctgtgaagcctggggaacacaacggcaactgggagatttgtgagtgaacactgtttcatcttaatatgcttctgaatttattttcatgtactaaatagatcagctcatcaaagcca

SEQ ID NO: 353424 - DNA, 120 bp, Artificial Sequence
  ENSG00000139405_15 (sequence is synthesized)
gcggtgaccacgtgacctccgctgagctttcgccagtgcctgcggccctcggcggcctagtacacacgcacctgagtgagtggcaccagaggaccctctccatgtttagggacctcctgg

SEQ ID NO: 353425 - DNA, 120 bp, Artificial Sequence
  ENSG00000139405_16 (sequence is synthesized)
agaggcgtgggcaaggaggcatcgaaggccttgggggcaaaggggagctgtgagaccaccccctcaaggggcagcacccccaccctcacaccaaggaagaagaacaaatacaggtaatgg

SEQ ID NO: 353426 - DNA, 120 bp, Artificial Sequence
  ENSG00000139405_17 (sequence is synthesized)
atgcaaatcctgtactcagtgcagccacctggattccagttacagctctggtgttcacctgctctgtgaccttgggcaagcatcttgacctctctgagccagtttactcatgtggaaaat

SEQ ID NO: 353427 - DNA, 120 bp, Artificial Sequence
  ENSG00000139405_18 (sequence is synthesized)
aggaccaattattcctacctagggggattgttgatggattaaatgagagaggggtctgcagtgcttcgcacagtaacctaatacttagaaagctgtcaataaatggtagtgttgatggtt

SEQ ID NO: 353428 - DNA, 63 bp, Artificial Sequence
  ENSG00000139410_0 (sequence is synthesized)
ctggttccctggcaggctggagggcaggagctggggccacgctggtctgggatagttgggcag

SEQ ID NO: 353429 - DNA, 120 bp, Artificial Sequence
  ENSG00000139410_1 (sequence is synthesized)
ctcagccttctgagtagctggaattacaagctgtctacctggtctccagaatggacggccctgtggcagagcatgccaagcaggagccctttcacgtggtcacacctctgttggagagct

SEQ ID NO: 353430 - DNA, 120 bp, Artificial Sequence
  ENSG00000139410_2 (sequence is synthesized)
caggagccctttcacgtggtcacacctctgttggagagctgggcgctgtcccaggtggcgggcatgcctgtcttcctcaagtgtgagaatgtgcagcccagcggctccttcaagattcgg

SEQ ID NO: 353431 - DNA, 120 bp, Artificial Sequence
  ENSG00000139410_3 (sequence is synthesized)
ggcattgggcatttctgccaggagatggccaagaagggatgcagacacctggtgtgctcctcagggggtaatgcgggcatcgctgctgcctatgctgctaggaagctgggcattcctgcc

SEQ ID NO: 353432 - DNA, 120 bp, Artificial Sequence
  ENSG00000139410_4 (sequence is synthesized)
accatcgtgctccccgagagcacctccctgcaggtggtgcagaggctgcagggggagggggccgaggttcagctgactggaaaggtctgggacgaggccaatctgagggcgcaagagttg

SEQ ID NO: 353433 - DNA, 120 bp, Artificial Sequence
  ENSG00000139410_5 (sequence is synthesized)
ggagctgaaagcagtgctgaggaccccaccaggtgccctggtgctggcagttgggggtgggggtctcctggccggggtggtggctggcctgctggaggtgggctggcagcatgtacccat

SEQ ID NO: 353434 - DNA, 120 bp, Artificial Sequence
  ENSG00000139410_6 (sequence is synthesized)
cattgccatggagacccatggggcacactgcttcaatgcggccatcacagccggcaagctggtcacacttccagacatcaccagtgtggccaagagcctgggtgccaagacggtggccgc

SEQ ID NO: 353435 - DNA, 120 bp, Artificial Sequence
  ENSG00000139410_7 (sequence is synthesized)
tcgggccctggagtgcatgcaggtgtgcaagattcactctgaagtggtggaggacaccgaggctgtgagcgctgtgcagcagctcctggatgatgagcgtatgctggtggagcctgcctg

SEQ ID NO: 353436 - DNA, 120 bp, Artificial Sequence
  ENSG00000139410_8 (sequence is synthesized)
tggggcagccttagcagccatctactcaggcctcctgcggaggctccaggccgagggctgcctgcccccttccctgacttcagttgtggtaatcgtgtgtggaggcaacaacatcaacag

SEQ ID NO: 353437 - DNA, 120 bp, Artificial Sequence
  ENSG00000139410_9 (sequence is synthesized)
ccgagagctgcaggctttgaaaacccacctgggccaggtctgaggggtcccatcctggccccaaagacccctgagaggcccatggacagtcctgtgtctggatgaggaggactcagtgct

SEQ ID NO: 353438 - DNA, 120 bp, Artificial Sequence
  ENSG00000139410_10 (sequence is synthesized)
ggcagatggcagtggaagctgccctgtgcaactgtgctggctgcctcctgaaggaagccctcctggactgcttcttttggctctccgacaactccggccaataaacactttctgaattga

SEQ ID NO: 353439 - DNA, 120 bp, Artificial Sequence
  ENSG00000139410_11 (sequence is synthesized)
gaagctggacagagccggttcctggaaagagctggttccctggcaggctggagggcaggagctggggccacgctggtctgggatagttgggcagggaggctgtctacctggtctccagaa

SEQ ID NO: 353440 - DNA, 120 bp, Artificial Sequence
  ENSG00000139410_12 (sequence is synthesized)
tcctgggtgagtgatccctgtcctccacctgggctcagagacccacgaagtccctgcatcctctagcaagagtgtgttctgtcttatctgtatcctcagcaccaggcactggctaggtgt

SEQ ID NO: 353441 - DNA, 120 bp, Artificial Sequence
  ENSG00000139410_13 (sequence is synthesized)
gcagttactgtgcactaagtgcacgtcgagtagatggaagggggtgaggataaagaaggagtgtatcttgctgtctctagcccccagactttcatacatgctgctcctctctctggctgg

SEQ ID NO: 353442 - DNA, 120 bp, Artificial Sequence
  ENSG00000139410_14 (sequence is synthesized)
tggtctgggatagttgggcagggaggtaaggggtctggggccagctggggcccctggggctcagtgtgtgtgtgaatgagaggctgatgagaggctgcaggagtttgggaggctttgggc

SEQ ID NO: 353443 - DNA, 120 bp, Artificial Sequence
  ENSG00000139410_15 (sequence is synthesized)
aaagtccaagctgagcaggtgggagtgagagggcctgagcgtgttctaggccctcctgggaatgtcgattgaattcagggtgccctgcagaagaaagtgttgtgctggggaccctgaagg

SEQ ID NO: 353444 - DNA, 120 bp, Artificial Sequence
  ENSG00000139410_16 (sequence is synthesized)
cgaggtgtcccagccctggcaccagggatttggctgtggagtgccaccaaggtggcctctggggaaaggctttggggacaagtgaggtggacagcactggtggtccttacctcaactcat

SEQ ID NO: 353445 - DNA, 120 bp, Artificial Sequence
  ENSG00000139410_17 (sequence is synthesized)
agatgtgacaggctgtctacctggtctccagaatggacggccctgtggcagagcatgccaagcaggagccctttcacgtggtcacacctctgttggagagctgggcgctgtcccaggtgg

SEQ ID NO: 353446 - DNA, 120 bp, Artificial Sequence
  ENSG00000139410_18 (sequence is synthesized)
gatggccaagaagggatgcagacacctggtgtgctcctcaggtctgggacgaggccaatctgagggcgcaagagttggccaagagggacggctgggagaatgtccccccgtttgaccacc

SEQ ID NO: 353447 - DNA, 120 bp, Artificial Sequence
  ENSG00000139428_0 (sequence is synthesized)
aggtcccgtcaagcagcctggctcatggctgtgtgcggcctggggagccgtcttggcctggggagccgtcttggcctgcgcgggtgcttcggcgccgccaggctcctgtatccccgtttc

SEQ ID NO: 353448 - DNA, 120 bp, Artificial Sequence
  ENSG00000139428_1 (sequence is synthesized)
cagagccgcggccctcagggcgtggaagacggggacaggccacagccttcctcgaagacacccaggatccccaagatttacaccaaaacgggagacaaagggttttctagtaccttcaca

SEQ ID NO: 353449 - DNA, 120 bp, Artificial Sequence
  ENSG00000139428_2 (sequence is synthesized)
ggagaaaggagacccaaagatgaccaagtgtttgaagccgtgggaactacagatgaattaagttcagctattgggtttgctctggaattagtcacagaaaagggccatacatttgccgaa

SEQ ID NO: 353450 - DNA, 120 bp, Artificial Sequence
  ENSG00000139428_3 (sequence is synthesized)
gagcttcagaaaatccagtgcacattgcaggacgtcggctcggccctggcgacaccatgctcctcggcccgggaggctcacttaaagtataccacgttcaaggcggggcccatcctggag

SEQ ID NO: 353451 - DNA, 120 bp, Artificial Sequence
  ENSG00000139428_4 (sequence is synthesized)
ctggagcagtggatcgacaagtacaccagccagctcccaccactcacggccttcatcctgccttcgggaggcaagatcagctcggcgctgcatttctgccgggccgtgtgccgccgggcc

SEQ ID NO: 353452 - DNA, 120 bp, Artificial Sequence
  ENSG00000139428_5 (sequence is synthesized)
gagagacgtgtggtgcctcttgtccagatgggagagaccgatgcgaacgtggccaagttcttaaacagactcagtgactatctcttcacgctagccagatatgcagccatgaaggagggg

SEQ ID NO: 353453 - DNA, 120 bp, Artificial Sequence
  ENSG00000139428_6 (sequence is synthesized)
aatcaagagaaaatatacatgaaaaatgacccatcggccgagtctgagggactctgaaatcacagaaagtgggagcttggaggatccctccatggcgatggccgtggagagaggagcttg

SEQ ID NO: 353454 - DNA, 120 bp, Artificial Sequence
  ENSG00000139428_7 (sequence is synthesized)
cccttctggggtcctggttcctgaagagctcacccagagaggctcaaagcagccttttgtcccagctcagctttgatctacacctcttgccaccttcctcaagggactgtgaccctttgg

SEQ ID NO: 353455 - DNA, 120 bp, Artificial Sequence
  ENSG00000139428_8 (sequence is synthesized)
ggattctgtccctgaccctgcttccccaagctctcctgggtcttggagggatgtgggaatgaattggcattgcaggaaagacaggtaaagtgattgctgcaatgagaaggagctgtgcgg

SEQ ID NO: 353456 - DNA, 76 bp, Artificial Sequence
  ENSG00000139428_9 (sequence is synthesized)
ccctcccactgccagctcaggttgttcacagatttggaatgggaccagaggcccttgaaaatgtaattgtgattta

SEQ ID NO: 353457 - DNA, 120 bp, Artificial Sequence
  ENSG00000139428_10 (sequence is synthesized)
gaatgggaccagaggcccttgaaaatgtaattgtgatttacctgtgccaaaggtgctttaaatgtcacatttgtaaaggggaaggcggacaagatttggaagtttagtcacctctgagcc

SEQ ID NO: 353458 - DNA, 120 bp, Artificial Sequence
  ENSG00000139428_11 (sequence is synthesized)
acccatcaccgccaaagtgtgggggaaggatagctgcagattgacaggcgaggctcagaaactcctggcttagattgaagtgtgtgtgatgggggtgcagcttagaggaccccctctgaa

SEQ ID NO: 353459 - DNA, 120 bp, Artificial Sequence
  ENSG00000139428_12 (sequence is synthesized)
agggatggagatgctgatgagaacaacactaccacttgaaggtgaacattccctgtctggttggactgagtcaagggtctgcggtgcagcatcttcagcttgagaaaatgaggttgtcag

SEQ ID NO: 353460 - DNA, 120 bp, Artificial Sequence
  ENSG00000139428_13 (sequence is synthesized)
tttccagcaaggctgacatccaccagactgatttctccgatgttgcacttggctggcttatgcctctgagatcggtgccacggctgtatttatttcagttgtcactgctgctccctcctg

SEQ ID NO: 353461 - DNA, 120 bp, Artificial Sequence
  ENSG00000139428_14 (sequence is synthesized)
ctatgaaacgacactgccagtgccagcagtgtccttgggaaaggcaatatttatgaagggcagaagaggcagccccaagaacctaaagactgcaggctgctaattgcaggaaatgacttt

SEQ ID NO: 353462 - DNA, 120 bp, Artificial Sequence
  ENSG00000139428_15 (sequence is synthesized)
ggaagggcaggctcttgtccagtttcagggctgaaatgcctggcgaactccattcagccatcacatattgactgagtggctgcttagcatgggccaccgcgctaggctcgggacagctgg

SEQ ID NO: 353463 - DNA, 120 bp, Artificial Sequence
  ENSG00000139428_16 (sequence is synthesized)
tctttccggccatctttcttgctggcaagtcagcaaacattaccttcttagtcacgtgcatatttttgccttcattcttaccacctggcctgcaaagtttgcaggagggccaggtatatt

SEQ ID NO: 353464 - DNA, 120 bp, Artificial Sequence
  ENSG00000139428_17 (sequence is synthesized)
ttctgggtcctttcattgctgacaggctgtgatggccctcttgagccttgggcagggtgggtgaggtgcagatgaccaggagtgtgtgaatgccttccaggaggtggctttgttccgtgc

SEQ ID NO: 353465 - DNA, 120 bp, Artificial Sequence
  ENSG00000139428_18 (sequence is synthesized)
gaggtggctttgttccgtgcctccctgcccccatcgtcactaccaggtctggtacggagtcggtgctcagtgtttgcaaaacagagctgaaaacggactttgggaggccgaggcaggcag

SEQ ID NO: 353466 - DNA, 67 bp, Artificial Sequence
  ENSG00000139428_19 (sequence is synthesized)
gcagaggctgcagtgagccaagatcgtgacacgacactccagcctggctgacgcaatcactaaggct

SEQ ID NO: 353467 - DNA, 120 bp, Artificial Sequence
  ENSG00000139428_20 (sequence is synthesized)
cctgaaaacgcaatcactaaggctcggtcagggagtatgttcaaagagcttgcagcgaatcactcaattctgtctacacctcaaaatctcaaaatcttcctggaatatatatatatatat

SEQ ID NO: 353468 - DNA, 120 bp, Artificial Sequence
  ENSG00000139428_21 (sequence is synthesized)
aaaataacacagcagccctgcatgcctagccatgggaaagcacagcctccaaaggataaggaaagctttttgagtaaatacaacatcctaaagtgacaatctttgaaacaaggccgttca

SEQ ID NO: 353469 - DNA, 120 bp, Artificial Sequence
  ENSG00000139428_22 (sequence is synthesized)
cctgttgccaagtcctgtccttccaggaccgggtgtcacagcctggatgttaacagtcgcgttctcagacccccgcctctgtatctgtctcccggttcaccagcaaacacttctctgaga

SEQ ID NO: 353470 - DNA, 120 bp, Artificial Sequence
  ENSG00000139428_23 (sequence is synthesized)
aaccacctgggtgcagggcagatgccaccactcagcaggtgtttctctcctgtgctaccaacctgggaaaaatggagaaagcttgctttgggggctggaaggatggggtgtttaaaacat

SEQ ID NO: 353471 - DNA, 120 bp, Artificial Sequence
  ENSG00000139428_24 (sequence is synthesized)
ttgctcttctgcagtgcctttcaaaagctctatcaagagcccgaggcaaaagaaaagatgtgtacccctctgtacactgagcaaatgtcctcccatattttgaaccaggtgggaaaagtt

SEQ ID NO: 353472 - DNA, 120 bp, Artificial Sequence
  ENSG00000139428_25 (sequence is synthesized)
aatgaaagccctacagtcaggaaatgtgactgcgaagcccccgctgccccagtgtttgcacaccactggcaactctcagaaacaatcagtcccattgcacgggaacacggggttttgaaa

SEQ ID NO: 353473 - DNA, 120 bp, Artificial Sequence
  ENSG00000139428_26 (sequence is synthesized)
caaacagcagcctgtttttatttaaagtcgtgatcccttgcttatcgtagatttttttcataatttgattttggaaaatattgcacacaaatactactcgatccctgagtttgtgggcac

SEQ ID NO: 353474 - DNA, 120 bp, Artificial Sequence
  ENSG00000139428_27 (sequence is synthesized)
ttccttacattttgcacccatgaaaatgcctcctccgcctccaggtcaggctccctggaatggggtgtttagtgtcatttccagagacaagctggcagttggctcttgtgtcagagagaa

SEQ ID NO: 353475 - DNA, 120 bp, Artificial Sequence
  ENSG00000139428_28 (sequence is synthesized)
gcccacagtcacagtgacaccagcccgcactgtggaagggcttgctatgtgcagtgccctgagccaagtgttccacagacattatctcatttgaaccccatagcagccctggaaggaggc

SEQ ID NO: 353476 - DNA, 120 bp, Artificial Sequence
  ENSG00000139428_29 (sequence is synthesized)
attgggtggggaaccaagttgtcctggggagtcagtgccaagatgtgagccccggacgcggcctcgtcactcacagccccgtgctcctcagctcccacccactgccgcttgacagtcgtt

SEQ ID NO: 353477 - DNA, 120 bp, Artificial Sequence
  ENSG00000139428_30 (sequence is synthesized)
ttaatcactacctgggctgtggcgaacaatgccaggctctgatagatcctgctgtctcatttctcaacctagtttcccttaactaatatttcatggctatcgttaatgtgcgtttttcat

SEQ ID NO: 353478 - DNA, 120 bp, Artificial Sequence
  ENSG00000139428_31 (sequence is synthesized)
cgagtaatttccacagcccgaacttgtaacacatcccaatgacaaacgtccccagttcggaagcccccgtcagtggcaatgtcacccttgctgctgcctcgacaccttccgacagcccat

SEQ ID NO: 353479 - DNA, 120 bp, Artificial Sequence
  ENSG00000139428_32 (sequence is synthesized)
tcagttttatgatcgccctgtcccagtgatcactactgaacctttaagaatccagatgcatttcaagtttaattgaataaaattctttgtataataaattccgcatgaatgctacataaa

SEQ ID NO: 353480 - DNA, 120 bp, Artificial Sequence
  ENSG00000139428_33 (sequence is synthesized)
cttgacagacgctgtcctccagttccccaagtccctccaggtcctcaccggtccctcccagccctgcccactctggagcagcgtgcccgtcgggaggcaagatcagctcggcgctgcatt

SEQ ID NO: 353481 - DNA, 120 bp, Artificial Sequence
  ENSG00000139428_34 (sequence is synthesized)
aactacagatgaattaagttcagctattgggtaagggggacaggattggccttgaggttgcgtttgagtcgagtatgagtaaacgtaatgaatgtgaagctctcacgcatgctgggcagc

SEQ ID NO: 353482 - DNA, 120 bp, Artificial Sequence
  ENSG00000139428_35 (sequence is synthesized)
agcctcggaggttgtcagcccttattgaactttcctcagccctgaagcacaggctggtcagctccacaaggctgtggggctgcagactcctttcccttctggccctgcctgtgcctgcgc

SEQ ID NO: 353483 - DNA, 120 bp, Artificial Sequence
  ENSG00000139428_36 (sequence is synthesized)
gaagctgcctccctctcatccctcacttttcaggtgagcctgtgtgtgccactgaggttagtatactgagtgaaagaggtgagttagtataatgcacagtacatccaatgtgatcccttt

SEQ ID NO: 353484 - DNA, 120 bp, Artificial Sequence
  ENSG00000139428_37 (sequence is synthesized)
tgtgactgttgttttttacataagccaaagtttagaaggtggactcaaggatggaccagatcaggatgggccaggtcatgctgtgatcacagacaaccccaaaatctcctgacttatgac

SEQ ID NO: 353485 - DNA, 120 bp, Artificial Sequence
  ENSG00000139428_38 (sequence is synthesized)
accaaagatggacttgctgttcccacttcatgcccatcacagggtatattctttggctccatgcggccttcattctgggacacaggctgctagtacagctgctgcctggggcaattatca

SEQ ID NO: 353486 - DNA, 120 bp, Artificial Sequence
  ENSG00000139428_39 (sequence is synthesized)
gtcattgtggcagagggaaaagaggtcatggtgaagctcacattggctcctgacgctgccaggggattgtgcagtgtcagtgttgtcgccagtgaggtttacccaagatgtgattattgc

SEQ ID NO: 353487 - DNA, 120 bp, Artificial Sequence
  ENSG00000139428_40 (sequence is synthesized)
tgattgaaaacttttcccactaccccaccatgatgacttgaaatatagtcaacattggcagtttttgacagtctttatggagactaaactttgttggtaaataaaagttgaaaaaaaaat

SEQ ID NO: 353488 - DNA, 79 bp, Artificial Sequence
  ENSG00000139428_41 (sequence is synthesized)
agactaaactttgttggtaaataaaagttgaaaaaaaaatgactaggtgcagcggctcacatgtcgagctcaggagttt

SEQ ID NO: 353489 - DNA, 120 bp, Artificial Sequence
  ENSG00000139428_42 (sequence is synthesized)
cctcggcccgggaggctcacttaagtaattctcaaactcctgtgggtgttcagagggccctagggtcaggggactctcctagggtcaccatctgggatcccaggcccccagggacccacg

SEQ ID NO: 353490 - DNA, 61 bp, Artificial Sequence
  ENSG00000139428_43 (sequence is synthesized)
agtgtttgaagccgtgggaactacagatgaattaagttcagctattggacggagtttcgcg

SEQ ID NO: 353491 - DNA, 120 bp, Artificial Sequence
  ENSG00000139428_44 (sequence is synthesized)
cttacctgttcctggctaccatttctccatggcgggcctgactaggtttgctctggaattagtcacagaaaagggccatacatttgccgaagagcttcagaaaatccagtgcacattgca

SEQ ID NO: 353492 - DNA, 120 bp, Artificial Sequence
  ENSG00000139428_45 (sequence is synthesized)
tcagcatccagccaccagttactctttgtgtcacctggggctagttactctccctctgtgagctccatttcttcatctgtaaaatgcggacaggccaggtatggtggctcacacctgcaa

SEQ ID NO: 353493 - DNA, 89 bp, Artificial Sequence
  ENSG00000139428_46 (sequence is synthesized)
tctcagctacttgggagacctaggtaacataataagaccctgactctacaaaatatttgaaaattagccaggcatagtggtgaatgcct

SEQ ID NO: 353494 - DNA, 120 bp, Artificial Sequence
  ENSG00000139428_47 (sequence is synthesized)
ttggggggcagggctggacttcagaggagctcctgtccgcagtgggcacacctttcccaccctgctcaggcaatgtccctttctcctttcagtcgggaggcaagatcagctcggcgctgc

SEQ ID NO: 353495 - DNA, 80 bp, Artificial Sequence
  ENSG00000139433_0 (sequence is synthesized)
gagcgctcggctacgagggcgccgtgcgggcggaagtggcgacgctggcgtccccggagcctgcggcgggcggctgtgac

SEQ ID NO: 353496 - DNA, 120 bp, Artificial Sequence
  ENSG00000139433_1 (sequence is synthesized)
acgcccgcggcgccggctggggcatcaccgcgggcctcgaccccgaaatggcgctgctggccgaacacttgctgaagccgctgcccgcggacaagcagatcgagaccgggcccttcctcg

SEQ ID NO: 353497 - DNA, 120 bp, Artificial Sequence
  ENSG00000139433_2 (sequence is synthesized)
aggcggtgtcccacctgccgcccttcttcgattgccttgggtccccagtgtttactcccatcaaggcagacataagcggcaacatcacgaaaatcaaagctgtgtacgacaccaacccag

SEQ ID NO: 353498 - DNA, 120 bp, Artificial Sequence
  ENSG00000139433_3 (sequence is synthesized)
ccaagttccggaccctgcagaacatcctggaggtggagaaagaaatgtatggagcagagtggcccaaagtaggggccacactggcgctgatgtggctgaaaagaggcctccgcttcatcc

SEQ ID NO: 353499 - DNA, 120 bp, Artificial Sequence
  ENSG00000139433_4 (sequence is synthesized)
aggtcttcctccagagcatctgcgacggggagcgggacgagaaccaccccaacctcatccgtgtcaacgccaccaaggcctacgagatggccctcaagaagtaccatggctggatcgtgc

SEQ ID NO: 353500 - DNA, 120 bp, Artificial Sequence
  ENSG00000139433_5 (sequence is synthesized)
agaagatcttccaggcagcactgtacgcagcaccctataagtctgacttcctgaaagcgctctccaaggggcagaatgttacggaggaggagtgcctggagaagatccgcctcttcctag

SEQ ID NO: 353501 - DNA, 120 bp, Artificial Sequence
  ENSG00000139433_6 (sequence is synthesized)
tcaactacacggcgaccatcgatgtcatctacgagatgtacacccagatgaacgctgagcttaactacaaggtgtaggcatgcccactgctggacacgtccccgactcgtggccacatgg

SEQ ID NO: 353502 - DNA, 120 bp, Artificial Sequence
  ENSG00000139433_7 (sequence is synthesized)
agaaacaggcaaaccagaatcactgtgaatcaagtcggtgaactgcccctggcctgtgtcccccagagcagcccagggtcctgccagagtctgcaggggacagccctcgttttttaagtc

SEQ ID NO: 353503 - DNA, 120 bp, Artificial Sequence
  ENSG00000139433_8 (sequence is synthesized)
ttttttttttttttttttggtctattctaaaggaccagtaaataatgatcttacttccaaatctccttggaatttcacgacagcacagactgactttataccttcatttcagcgtggtaa

SEQ ID NO: 353504 - DNA, 120 bp, Artificial Sequence
  ENSG00000139433_9 (sequence is synthesized)
aaaccgattaacacttctaatgagtcaagtcctagggttttttggttttgttttgttgccaacgaggaacacagctctgggggaatggtgtcatccacctcgctttaaaaataagcacat

SEQ ID NO: 353505 - DNA, 69 bp, Artificial Sequence
  ENSG00000139433_10 (sequence is synthesized)
aaactctgtctcaaaaaaaaaaaaaagaggtgggtggattacttgaggtcaggtagaattagccaggca

SEQ ID NO: 353506 - DNA, 85 bp, Artificial Sequence
  ENSG00000139433_11 (sequence is synthesized)
tggtgaaaccctatctctactaaaaatatagaattagccaggcatggtagcgcacgcctgtaatcccatactgggaggtggaggt

SEQ ID NO: 353507 - DNA, 120 bp, Artificial Sequence
  ENSG00000139433_12 (sequence is synthesized)
aacaaaagcgaaactctgtctcaaaaaagaaaaaaaagaaaaaaaagcacgtgaccttatgaggctctcgctgtattgttattttaaggactataaagagtttgatttaaaattatgcag

SEQ ID NO: 353508 - DNA, 120 bp, Artificial Sequence
  ENSG00000139433_13 (sequence is synthesized)
agagtttgatttaaaattatgcagggcccctatgtgggattttttaaaaagcaaactggtgtgtattctcatgtggtttgcacagcccagcctcacagcactattgtaaaccctgctctt

SEQ ID NO: 353509 - DNA, 120 bp, Artificial Sequence
  ENSG00000139433_14 (sequence is synthesized)
tctgtctcgctagacagatttttttgtttgttttcttttttctggttgttttttgttgttgttgttgttgttttacagctgaaaccaaccagcaagcccttgatgaccaagaggcgtttc

SEQ ID NO: 353510 - DNA, 120 bp, Artificial Sequence
  ENSG00000139433_15 (sequence is synthesized)
tttcaaagctatagggcacaaacaattgaccatagatgactccgtttgcattcttctgcagaattatttccttcagggacagattttccaacctaagaaactacctaccgtgtgtattct

SEQ ID NO: 353511 - DNA, 120 bp, Artificial Sequence
  ENSG00000139433_16 (sequence is synthesized)
cttgacggggagagatgaacccttcagctgctaagatccaagaaaacgcctcactgccttaaccttaactgttcttcctggcgctaaaaagagctgtattttttaaagtgctggggcaaa

SEQ ID NO: 353512 - DNA, 120 bp, Artificial Sequence
  ENSG00000139433_17 (sequence is synthesized)
caaagcaaccccaaaagagttgatgtgtgttttaaaagaaaaaacccaatgaggaacaattggagatttttatgcagaaactaaataatccttaataaataaatctctattttggaatca

SEQ ID NO: 353513 - DNA, 120 bp, Artificial Sequence
  ENSG00000139433_18 (sequence is synthesized)
acccaggcctacctggctccatctcagaggccttcgttcctggacttcttggaatcctcggaacctatttccacttgtccaccaaagcaaaacttcagatacttggtgtctgaggcagtg

SEQ ID NO: 353514 - DNA, 120 bp, Artificial Sequence
  ENSG00000139433_19 (sequence is synthesized)
tcagtagtggctggagaacatgaactctgtaccaactgtgtgaccttgggcaagtccgtgctcctctgtgagcctcagtgtctctgcctgtaaaatgggataatgacagcaacatcaggt

SEQ ID NO: 353515 - DNA, 120 bp, Artificial Sequence
  ENSG00000139436_0 (sequence is synthesized)
gtgccaaggctgcaaggcgctgaggggagaggcgccgccgtcagcgccgccgcagctgggacccgttagagcggaagcgccgccgccaccgccgcctttgctgtcccccggcctctagtt

SEQ ID NO: 353516 - DNA, 120 bp, Artificial Sequence
  ENSG00000139436_1 (sequence is synthesized)
ccccgcaggtgggaggtgggagccatgtcgaaacggctccggagcagcgaggtgtgcgctgactgcagcgggccggatccttcctgggcatcagtaaataggggaacgtttttatgtgat

SEQ ID NO: 353517 - DNA, 120 bp, Artificial Sequence
  ENSG00000139436_2 (sequence is synthesized)
gagtgctgcagtgtccatcggagtctagggcgccatatctcccaagtgaggcatctgaaacacacaccgtggcctccaacactgcttcagatggttgagaccttgtataataacggtgct

SEQ ID NO: 353518 - DNA, 120 bp, Artificial Sequence
  ENSG00000139436_3 (sequence is synthesized)
aactctatatgggagcattctttgctggaccctgcgtctattatgagtggaagacgtaaagctaatccacaggataaagtacatcccaataaagcggaattcatcagagccaagtatcag

SEQ ID NO: 353519 - DNA, 120 bp, Artificial Sequence
  ENSG00000139436_4 (sequence is synthesized)
atgttagcgttcgtccatcgcttgccctgccgggatgacgatagtgtgactgccaaagatcttagcaagcaactccattcgagcgtgagaacagggaatcttgaaacctgtttgagactg

SEQ ID NO: 353520 - DNA, 120 bp, Artificial Sequence
  ENSG00000139436_5 (sequence is synthesized)
ttatctttaggagcacaagccaacttctttcatcctgaaaaaggaaacaccccactccatgttgcctccaaagcagggcagattttacaggctgaattattggcagtatatggagcagac

SEQ ID NO: 353521 - DNA, 120 bp, Artificial Sequence
  ENSG00000139436_6 (sequence is synthesized)
ccaggcacacaggattctagtgggaaaactcccgttgattatgcaaggcaaggagggcaccatgagctggcagagcgcctcgtggaaatacagtatgagctaacggacagactagccttc

SEQ ID NO: 353522 - DNA, 120 bp, Artificial Sequence
  ENSG00000139436_7 (sequence is synthesized)
tatctctgtggcaggaaaccagatcacaaaaatggacagcactttataatacctcaaatggcagacagcagcctggatttgtctgaattggcaaaagctgctaagaagaaacttcaatct

SEQ ID NO: 353523 - DNA, 120 bp, Artificial Sequence
  ENSG00000139436_8 (sequence is synthesized)
ctaagtaatcatttgtttgaagaacttgccatggatgtgtacgatgaagttgacaggcgagagacggatgcagtctggcttgccacgcaaaaccacagcgccctggtaaccgagacaacg

SEQ ID NO: 353524 - DNA, 120 bp, Artificial Sequence
  ENSG00000139436_9 (sequence is synthesized)
gtcgtcccctttcttccggtcaatcctgagtactcatcaacacgaaatcagggcagacagaagttagctcggttcaacgcccatgagtttgccacgctggtcattgacattctcagtgac

SEQ ID NO: 353525 - DNA, 120 bp, Artificial Sequence
  ENSG00000139436_10 (sequence is synthesized)
gccaagaggagacagcagggcagttctctctcgggttcaaaagacaatgtggagctcatactgaaaaccatcaataaccagcacagcgttgagagtcaagacaacgatcagcccgactat

SEQ ID NO: 353526 - DNA, 120 bp, Artificial Sequence
  ENSG00000139436_11 (sequence is synthesized)
gacagcgtggcatcagacgaagacacagatttggaaaccactgcaagcaaaacaaaccggcagaagagcctagattcagatttatcagatggaccagtcactgtacaggaatttatggag

SEQ ID NO: 353527 - DNA, 120 bp, Artificial Sequence
  ENSG00000139436_12 (sequence is synthesized)
gtcaaaaacgctctagtggcttctgaggccaagatacagcagctaatgaaggtgaataacaacttgagtgacgagctgagaattatgcagaaaaagcttcaaacactccagagtgaaaat

SEQ ID NO: 353528 - DNA, 120 bp, Artificial Sequence
  ENSG00000139436_13 (sequence is synthesized)
tcgaacctcaggaaacaggccacaaccaatgtatatcaggtgcaaactggttctgagtacacagacacttccaaccactcttccttaaagagacgtccgtctgcccggggcagtaggccc

SEQ ID NO: 353529 - DNA, 120 bp, Artificial Sequence
  ENSG00000139436_14 (sequence is synthesized)
atgtccatgtacgagaccggatcaggtcagaaaccatatctcccaatgggagaagcgagccgccccgaagagagcaggatgagactccagcccttccccgcgcacatcgggaggagtgca

SEQ ID NO: 353530 - DNA, 120 bp, Artificial Sequence
  ENSG00000139436_15 (sequence is synthesized)
cttgtgacctcctcttcatctctgccttccttcccctccacactttcctggtcgagggacgaaagcgcccgaagggcatccaggctggagaagcagaacagcacacctgagagtgactac

SEQ ID NO: 353531 - DNA, 120 bp, Artificial Sequence
  ENSG00000139436_16 (sequence is synthesized)
gacaacactcccaacgacatggagccagatggcatggggtcaagccgaaagggacggcaaagaagtatggtgtggccaggggatggcttggtaccagacacagcagaaccccatgtggcc

SEQ ID NO: 353532 - DNA, 120 bp, Artificial Sequence
  ENSG00000139436_17 (sequence is synthesized)
ccaagccccactctccctagcaccgaagatgtcatcaggaagactgaacagatcaccaaaaacatacaggagctcttaagagcagcccaagaaaataaacatgacagttatattccctgc

SEQ ID NO: 353533 - DNA, 120 bp, Artificial Sequence
  ENSG00000139436_18 (sequence is synthesized)
tcagagaggatacacgtagctgttacagaaatggcagcattattccccaaaaaacccaagtctgatatggtgaggacttcccttcgtttactgacgtccagtgcctaccgactgcagtca

SEQ ID NO: 353534 - DNA, 120 bp, Artificial Sequence
  ENSG00000139436_19 (sequence is synthesized)
gagtgcaagaagaccctcccaggggaccccggctcacccacagacgttcagctggtcacgcagcaggtcatccagtgtgcgtacgacatcgccaaggctgccaagcagctggttaccatc

SEQ ID NO: 353535 - DNA, 120 bp, Artificial Sequence
  ENSG00000139436_20 (sequence is synthesized)
accaccaaagagaacaacaactgacaagggcagggcaccgcctcctctgttttctaggctttataaagtccaatttcaaattcagacgcagaactcttcagatttctacaaaaagaaaca

SEQ ID NO: 353536 - DNA, 120 bp, Artificial Sequence
  ENSG00000139436_21 (sequence is synthesized)
tttaatgacggtttaaaactttttaaaagaaaactcagtattatttttgcatgttttctaaccaattttcaactatttaacccacttgccttattttgtgcctatttgctggtttagttt

SEQ ID NO: 353537 - DNA, 120 bp, Artificial Sequence
  ENSG00000139436_22 (sequence is synthesized)
ctgatgttcggttgtgttgtcaacaactgttgagttgatcacatacatccaaaagtatagtttcattgtctaaagtttgtgaaaacttttccatcccttaaaactccctgcctatggctg

SEQ ID NO: 353538 - DNA, 120 bp, Artificial Sequence
  ENSG00000139436_23 (sequence is synthesized)
ccctgccaagcatcgtgcaataagtgaatttcctggcctacttcataatctctaagtttggggtatctccaagcatgtatgtagagaaaggactttgccgctttttaaaactagtgtcac

SEQ ID NO: 353539 - DNA, 120 bp, Artificial Sequence
  ENSG00000139436_24 (sequence is synthesized)
agtctctcttgggaggaaacaatgaattggttcatttcttctcagtgttttaccctgttacatgttctgttatttaatgttgttatctcaagctcctatctcttgatgttttcttgtcat

SEQ ID NO: 353540 - DNA, 120 bp, Artificial Sequence
  ENSG00000139436_25 (sequence is synthesized)
cttgaaggctccatggaatgagataaagcattgacccaccacaggacatctcatgaagccatgttcagggtaggagctccacgcacatcaccacccattgtcaggtgctctccctcaccc

SEQ ID NO: 353541 - DNA, 120 bp, Artificial Sequence
  ENSG00000139436_26 (sequence is synthesized)
ctgtaagccagacagtttgttcaaaacctgcagcaaagagaagcatcagtctaacaagccagaactcattttgtgccacccatttaggtatcactaccatgaactatagggaaaagaaat

SEQ ID NO: 353542 - DNA, 120 bp, Artificial Sequence
  ENSG00000139436_27 (sequence is synthesized)
cacctactccctgacactgtgttgtacccttcatccaaaagtcagcttgcttctctgaccacttacagctttctcacatgagttgcttcacatttttcatcatctttaaggacttcttat

SEQ ID NO: 353543 - DNA, 120 bp, Artificial Sequence
  ENSG00000139436_28 (sequence is synthesized)
aaggaaagatgtatcgtatcgcagtcatctgagttagtttctcctccatcacctcatgagtacttaaaaattagacatcaactttcaagagttccttagagagtgtgctctagctggctg

SEQ ID NO: 353544 - DNA, 120 bp, Artificial Sequence
  ENSG00000139436_29 (sequence is synthesized)
cctgctaccccaaagctctgaaagagtaaggttgaagtgctggaacatgctcagattgttttttagttactcaaaagccccttcttgttctgaatgtgaaagctcttcccgttcctgctt

SEQ ID NO: 353545 - DNA, 120 bp, Artificial Sequence
  ENSG00000139436_30 (sequence is synthesized)
actgcagccattctgtgtgtgtggttcagaccctggcctagggccggtgatgtggatgagtgaagggagccaggtacacggcagcagggcagaggagactatggggagcccaccgcctac

SEQ ID NO: 353546 - DNA, 120 bp, Artificial Sequence
  ENSG00000139436_31 (sequence is synthesized)
acagtaggggcagtagcccccagctccacgcctgttgccatgtggaaaagtgggcctagggtggccacagctttgatttttcaagagacaagaaacctagatgttttttggtgccatctc

SEQ ID NO: 353547 - DNA, 120 bp, Artificial Sequence
  ENSG00000139436_32 (sequence is synthesized)
tccatttataaatgttggcaaccaatttgaacactttcagagaccatgtgcaggtgagctgtgtcctctaggctgccagctcacagcccccaccccagggccctgtaagctgtgcagtgt

SEQ ID NO: 353548 - DNA, 120 bp, Artificial Sequence
  ENSG00000139436_33 (sequence is synthesized)
gagggcctggcttccccggacacacctggagcagcctctgagtcttacccgtaatggagccggccaaccctgtgtgttatgttgctgtcgctcctgtttttaaccatatgttctgtccca

SEQ ID NO: 353549 - DNA, 120 bp, Artificial Sequence
  ENSG00000139436_34 (sequence is synthesized)
tagcagtcattcacacatgtgaagaagacacaagaatcaaagtacaagttgcctcaatacatgctaataactaagcttctattttcacaggactgatcgatgcacacctttatagcttga

SEQ ID NO: 353550 - DNA, 120 bp, Artificial Sequence
  ENSG00000139436_35 (sequence is synthesized)
ccatatgctgtcatgaaagtagcaccccgacggtgcttgctttactaagtcaccgtgtgtggatgcttttgtcgcattttgcttcactgtgagtagcatgggaaaagggtccacgtctcc

SEQ ID NO: 353551 - DNA, 120 bp, Artificial Sequence
  ENSG00000139436_36 (sequence is synthesized)
aaaagactcttccacttgtttgtcccacagccctaagtgccacattgctgttggatgctcccgggatgccttctagaagggggcctcccaccttaagttcaggcgccatctgatagcctt

SEQ ID NO: 353552 - DNA, 120 bp, Artificial Sequence
  ENSG00000139436_37 (sequence is synthesized)
ttctgcaggcttcatgtccttagctgaccctcctttatcttgcaaacccctgcccctgctgtcccagggaggacgggcttctgtagaggcttctgggaaatgagctgtctgcaggaggtg

SEQ ID NO: 353553 - DNA, 120 bp, Artificial Sequence
  ENSG00000139436_38 (sequence is synthesized)
aagcagtgttttccttggaatgtttgaggacctgcaatagaagatgttgcctttatggccctagagaaagtcaaggaacatggggaccaacaaagcatttccagttgtaagaatatgtca

SEQ ID NO: 353554 - DNA, 120 bp, Artificial Sequence
  ENSG00000139436_39 (sequence is synthesized)
gaagagtgctcggttagcccacggtgccaaaactccaaacaagttccccggtggaatgacgtggccattggagggctgcaggtcgtcctctctgtatgtgccccgcgcatttccttggcc

SEQ ID NO: 353555 - DNA, 120 bp, Artificial Sequence
  ENSG00000139436_40 (sequence is synthesized)
tcatctgagatctggtgtcagagttctctgctcctgttggcaaatcgcaccttatctgaacatttgttccagccaccttttgcacatggattccgtaccttgcactagcaatgtctacct

SEQ ID NO: 353556 - DNA, 120 bp, Artificial Sequence
  ENSG00000139436_41 (sequence is synthesized)
tcagtaacgtcgttctttttcaccctgtattctcaatgatcccttcctccccatatgccacccttcccccaaagctgatagggcagaggtgcactttatgaaactggcacttgactgaac

SEQ ID NO: 353557 - DNA, 120 bp, Artificial Sequence
  ENSG00000139436_42 (sequence is synthesized)
agaaggaaacagctgtacctctaagctcctttcacagaaatcgtcatctgccttggaatgcaaatagttcttatttgccaaagaacagtgaattgggcccaaagatcaaacacagcattt

SEQ ID NO: 353558 - DNA, 120 bp, Artificial Sequence
  ENSG00000139436_43 (sequence is synthesized)
catgtaatcagaattctaaacgcacaactcgggagctgtgcacggcttctcaagtgattcagttgcagaaccaagagcaaaactcgcctgtttttgtcctcaatggcacccatgagcttt

SEQ ID NO: 353559 - DNA, 120 bp, Artificial Sequence
  ENSG00000139436_44 (sequence is synthesized)
ccaatagtatagttttctttctttccttgtcctggttgaaggtaacgtgttcctagaaaagaaaatgctgcataggaaaactgagatgccttttattccaacgtgtttgatccctgtcac

SEQ ID NO: 353560 - DNA, 120 bp, Artificial Sequence
  ENSG00000139436_45 (sequence is synthesized)
tcattattctgtactttttattgtacattctattcctgtaattattgtgccctttaagtgttgtaaaatcgttttggaatttgtgcctgctagttatgcaataaacaggctctacaagtg

SEQ ID NO: 353561 - DNA, 120 bp, Artificial Sequence
  ENSG00000139436_46 (sequence is synthesized)
attgaaccagcaccagctataaggtaaccttcctattaacagctttgagagagcagcactcttaaccaatagcttttggctctgcatgcttataatatttttgatacaattaaatgctgg

SEQ ID NO: 353562 - DNA, 120 bp, Artificial Sequence
  ENSG00000139436_47 (sequence is synthesized)
ccagtgtgctaagcttccagtcttttacttgatcctttataacacagtgatgtttgagctgtagtcagattccaaatcaagtatcaagaattacagaatgtactcttctgttttttaata

SEQ ID NO: 353563 - DNA, 120 bp, Artificial Sequence
  ENSG00000139436_48 (sequence is synthesized)
ctcttagttatttcttgaacttaaaagcaaatatatacatagatatgtgattaaacaagtatagtaaaaagttaattgtaaggtttgggtagtagacatctaagtgctcactctaggcca

SEQ ID NO: 353564 - DNA, 81 bp, Artificial Sequence
  ENSG00000139436_49 (sequence is synthesized)
gtccaaggcgggtgggttacttgaggccagaagttcgagatcagcctggccagcatgctgaaaccctgtctctactaaaaa

SEQ ID NO: 353565 - DNA, 120 bp, Artificial Sequence
  ENSG00000139436_50 (sequence is synthesized)
tgtctcaaaaaaaaaaaaaaaaaaaagtgctcactgtaaaattatttaaatttttctttattaataaagtccttgaaaaataaatctataggttagtcttgaatatcatttaaatggcca

SEQ ID NO: 353566 - DNA, 120 bp, Artificial Sequence
  ENSG00000139436_51 (sequence is synthesized)
tctataggttagtcttgaatatcatttaaatggccaaagatcagtcatctttccttctttttccaaagtacttttattaactgtgaagcacaatactctgttccacagaggataaaatgg

SEQ ID NO: 353567 - DNA, 120 bp, Artificial Sequence
  ENSG00000139436_52 (sequence is synthesized)
gtgaataacaaaactctgccttcccagaatttactctcttggaaaagatgattcataaatgcctgaaagagttcaaggaggcaagaccatatgggattcattgccaaaatagataattgg

SEQ ID NO: 353568 - DNA, 120 bp, Artificial Sequence
  ENSG00000139436_53 (sequence is synthesized)
tcttaaaaagcatatatagggtttcttcattgtggtccaaatcatttaagaaatttcttcagctggtcttgaagaatgggttggatttgaatgtgtgaagggagagctgaagcattccag

SEQ ID NO: 353569 - DNA, 120 bp, Artificial Sequence
  ENSG00000139436_54 (sequence is synthesized)
gtaagaggaaaggcaggagtcaagatcaggaggcagggagggacaaagtgtgttcagcacagcaggagacctgactggaaagaacagagtgggtctgggaataacagcaggagtacagta

SEQ ID NO: 353570 - DNA, 120 bp, Artificial Sequence
  ENSG00000139436_55 (sequence is synthesized)
ggacatttcctgatttcacagatactaaaaaatgaaaataagatgtgcctctcacaaatcaaagctgtgtggtaggttgaagggtgttgtgagtgccttgaatggtggggagagaagctg

SEQ ID NO: 353571 - DNA, 120 bp, Artificial Sequence
  ENSG00000139436_56 (sequence is synthesized)
aattgcagtttttgccattacttttaaggacaaaaaccacaaaatatacttgatcttggacgagagccctgggtaaatgatacttattatcacttaccttggaattttcgcacttgtacc

SEQ ID NO: 353572 - DNA, 120 bp, Artificial Sequence
  ENSG00000139436_57 (sequence is synthesized)
cttaccttggaattttcgcacttgtaccttgcatataataatctcaatataatttgtatccttgttgctgaaaggattctaagcagcctaagtatttatttcatggatgttgaaaggtaa

SEQ ID NO: 353573 - DNA, 120 bp, Artificial Sequence
  ENSG00000139436_58 (sequence is synthesized)
acttaatattttctgttgtgcaaattgaagataaggaggcagaagtagctgcaggcgtgagctgtgcgttaggttggcgtgtctctcactgatttgaagcctttgaagtggttactagac

SEQ ID NO: 353574 - DNA, 120 bp, Artificial Sequence
  ENSG00000139436_59 (sequence is synthesized)
tcttatccagagtcagactggctgcatcagcatcacctaggggaaggaccttcttcaacatattggcccctggccccatcctgtccccattgattcagaatttccaagggtggggcctgc

SEQ ID NO: 353575 - DNA, 120 bp, Artificial Sequence
  ENSG00000139436_60 (sequence is synthesized)
acatggtatatttctagaaatgcgctagttaatttttgagaacttctaccgtaaaccattgattaatttcatttttttacctcattaaattaagtcattctgtatccttccctctcataa

SEQ ID NO: 353576 - DNA, 120 bp, Artificial Sequence
  ENSG00000139436_61 (sequence is synthesized)
gtctttgaatttcttattaaatattctattttggccttaataaaggaaaggcgatagttcagatggtgaaaacagtttataaaagtgggatgcaaagtagacttcagaaatctacctacc

SEQ ID NO: 353577 - DNA, 120 bp, Artificial Sequence
  ENSG00000139436_62 (sequence is synthesized)
acaagaaggttgatgattctcaaaagtcttgtgtgataaactgctcaggtgtctcaggagacgtctttgtactccattttaaagtcagtgaatagtgagcaatataaatggtactttgtt

SEQ ID NO: 353578 - DNA, 120 bp, Artificial Sequence
  ENSG00000139436_63 (sequence is synthesized)
cgctcgtagtttacatgtcttgtcatctcacattgttgccgaaaggcctttttctttgtaccagcatgttatgtgtctctagctgtctgtagtgtgtttaaagtcattaccccacttcat

SEQ ID NO: 353579 - DNA, 120 bp, Artificial Sequence
  ENSG00000139436_64 (sequence is synthesized)
catgaagacaacattaggttacattctgcatttgtacccaaggagttggcccacctgaggatggctttataaacaaacaccctccccgctccaggtcaagccgaaagggacggcaaagaa

SEQ ID NO: 353580 - DNA, 120 bp, Artificial Sequence
  ENSG00000139436_65 (sequence is synthesized)
gaaaaaggtaacatgttaataaatgccaggacggttgacgctttaatcccatagtacaaggaagaatctcaggcactgtgatgtggtccgaggaaagaaaaacagttattgtaacagcct

SEQ ID NO: 353581 - DNA, 120 bp, Artificial Sequence
  ENSG00000139436_66 (sequence is synthesized)
tagaaatctttgggccaagttgtctttttgaagcaggatgtatttggatatttaaaatgaaatatatccagagtaagttccccaggtaggagaaacctaacatctatttaagcatttgtg

SEQ ID NO: 353582 - DNA, 120 bp, Artificial Sequence
  ENSG00000139436_67 (sequence is synthesized)
cccattagaataacccttggactattctgtgcttcctggaaacctggatggggctccatggatgtgattcttcccattgctagggaaggatgatcacaccatggagacagagccaatgag

SEQ ID NO: 353583 - DNA, 120 bp, Artificial Sequence
  ENSG00000139436_68 (sequence is synthesized)
agccctgggcaggggcatgtttatcagcattcaaaccctgctcccaccctggcagccctatcccacatccccaccttattgctcaccagtttttactactaacttgtattatccccagag

SEQ ID NO: 353584 - DNA, 120 bp, Artificial Sequence
  ENSG00000139436_69 (sequence is synthesized)
gaaagtaactcctaacattgaatgggtttgctactgaaaaagtaatgatcttctggtgcaaacagttgcttgtggacttaaaccttggcactggtggggaatttggtcagattttacaat

SEQ ID NO: 353585 - DNA, 120 bp, Artificial Sequence
  ENSG00000139436_70 (sequence is synthesized)
ctctgtcaaagagtagacagctgaactcacaccacacccagcttatagaatgtccatggaagatgaaggcgcaccagaagggaaggaccctgcgcagaatggacgtggtgaatggtgttt

SEQ ID NO: 353586 - DNA, 120 bp, Artificial Sequence
  ENSG00000139436_71 (sequence is synthesized)
aaaatgccagatgccaaagagtaacacgattccctgctgaccccttaactctaatccatccagcaccatggagcagcctgcatgtgaggaatggaaggagcattcagggcctccaagtga

SEQ ID NO: 353587 - DNA, 120 bp, Artificial Sequence
  ENSG00000139436_72 (sequence is synthesized)
cagtctctaaaatggggtggtgccaggcagattagcatgttcaaagctgacaccactgaggtcgtgttttttgggtgacaaagccaaaggagagaaaggccaaatattccagccctggcc

SEQ ID NO: 353588 - DNA, 120 bp, Artificial Sequence
  ENSG00000139436_73 (sequence is synthesized)
gaaagatgatcactcaccagacggaagcaagcgtgctgcgtggagcatccatgcgaagatgtcaattccatagatcaataggtttccagttttcttcgtgatatgttaatatagcaaact

SEQ ID NO: 353589 - DNA, 120 bp, Artificial Sequence
  ENSG00000139436_74 (sequence is synthesized)
taccatgatccggttttctcttttttctttttttttttacaaagtgctgaattgtttggaatatcaagagtattatgtaataaaaacttgttgatcataatttttcttgttggctttttg

SEQ ID NO: 353590 - DNA, 120 bp, Artificial Sequence
  ENSG00000139436_75 (sequence is synthesized)
gaaagcaataggcgatctgatttttcacaagctgaacttctgtctttcttgctttgcaaagcaaccctagtcatctttgtgctgcttccatggtgtctgctgtcatttttggcctttaca

SEQ ID NO: 353591 - DNA, 120 bp, Artificial Sequence
  ENSG00000139436_76 (sequence is synthesized)
aattgctcagggctcatttgaaaagcaagttacctaaatgatgttttaatgatctcgaactcttgcttgaaacagccttagtaataatccagtgtacagcttgcctgcaaacatttccca

SEQ ID NO: 353592 - DNA, 120 bp, Artificial Sequence
  ENSG00000139436_77 (sequence is synthesized)
gccccaccatgacaaattttaaagtggttagacattttgttttgaggaagtccaaaccacaacttttccacattcagaaatgaagctatttaatttgcttacgtgatgaagggagttgat

SEQ ID NO: 353593 - DNA, 120 bp, Artificial Sequence
  ENSG00000139436_78 (sequence is synthesized)
tgtgtttcacccaatccagaagaaagggtccttgtttgtattggctttttactttcagcccggctagctgttactgtccttattgtttaaaactggtagttgtattcatttacttggtgt

SEQ ID NO: 353594 - DNA, 120 bp, Artificial Sequence
  ENSG00000139436_79 (sequence is synthesized)
catctctgggaaacaatattagaagtcagagtttgagttgcctgaaagaaatcagagagacttgggtagtttgtgaaatcttttgttcaaagtgtattagatcctctagaataatccctg

SEQ ID NO: 353595 - DNA, 120 bp, Artificial Sequence
  ENSG00000139436_80 (sequence is synthesized)
ctccctatgggatagacactccctgtaacatgcacatgtgtatttgtttgattcattctcctttatctctttctctcgctgagatgcaggtaattgactaaatgccaatgtttctattct

SEQ ID NO: 353596 - DNA, 120 bp, Artificial Sequence
  ENSG00000139436_81 (sequence is synthesized)
aggcgtgagccaccgcgcccggcccagtgcttctattgtttgagtgcctaggttctggctccagtttaacaatttgctttctgttttgagtgacattaccttgtaaatatgttataggta

SEQ ID NO: 353597 - DNA, 120 bp, Artificial Sequence
  ENSG00000139436_82 (sequence is synthesized)
ttgtaaatatgttataggtattcatagaattacagtttatcttccattacctacagccttatcttcatgacctggagctaggctctatctctagaaacttgggaacctgccttctttatc

SEQ ID NO: 353598 - DNA, 120 bp, Artificial Sequence
  ENSG00000139436_83 (sequence is synthesized)
tgagcagttccttcctaagccatctgtttaatttgcccatatttggcaggtagatgagaggaatgctggagtctcttatgtagctgtccacctggttgaaaactttttctgttatctctg

SEQ ID NO: 353599 - DNA, 120 bp, Artificial Sequence
  ENSG00000139436_84 (sequence is synthesized)
tattggtgtgaatataacgttgccatttctgtcattttttttcagtccttgttcattttgtttttgtctttgtttttgctcttagagacagggcctcactctgatgcccaggctggagta

SEQ ID NO: 353600 - DNA, 120 bp, Artificial Sequence
  ENSG00000139436_85 (sequence is synthesized)
atctcctgggctcaagcaatcctcctgtcttagcctcctgagtagctagtagctgggactacaggcctgtgacaccaggcctggataatttttaaattattgtgtagggatggagtctca

SEQ ID NO: 353601 - DNA, 120 bp, Artificial Sequence
  ENSG00000139436_86 (sequence is synthesized)
tttttaaattattgtgtagggatggagtctcattgtgttgcctaggtaggtctcaaactcctggcctcaagcagttctcctccttggcctcctagaatgctgggattacaggcaagagca

SEQ ID NO: 353602 - DNA, 120 bp, Artificial Sequence
  ENSG00000139436_87 (sequence is synthesized)
cagcattcagccctttaagtcctttaaatggctaaaccaaaaaatcctctccgtagttttttggaagaaaagcaatgttttaagcctgaagtaaagttgtttgcttttattgatagacaa

SEQ ID NO: 353603 - DNA, 120 bp, Artificial Sequence
  ENSG00000139436_88 (sequence is synthesized)
gccctgccaaagctgctgtgcagtgaggttgggtttgttactagctcaggccaagcaaaggtgaaacaaggttaaatggttttaaaatagggatccttgtccctgcatcacagccctgct

SEQ ID NO: 353604 - DNA, 120 bp, Artificial Sequence
  ENSG00000139436_89 (sequence is synthesized)
gcagttgagactttataaaacttgtgaggagtgattggtgtgttttattcattcaacaagtgtttactgagtgacttctctggatattactctcctgaatgaggcctcgtccctttcctg

SEQ ID NO: 353605 - DNA, 120 bp, Artificial Sequence
  ENSG00000139436_90 (sequence is synthesized)
tgaggctctcattgcctaggagagagagaactgcggagaaggcacaaagtgatgtgtgtcatacgaagcacacacaggctgagggagtgagcagagagagaatctatggctgggagcatc

SEQ ID NO: 353606 - DNA, 120 bp, Artificial Sequence
  ENSG00000139436_91 (sequence is synthesized)
aaatagccgattttagagccttaccatgagtctcctgctagacaggataaaggaaatgacgagaccagcctgctcatgcatttagccagtgcatacaaagtggctcctagaagcagaggg

SEQ ID NO: 353607 - DNA, 120 bp, Artificial Sequence
  ENSG00000139436_92 (sequence is synthesized)
ctcaatttgctttcttagcttgaatgaaaaagcatgcatctgaaatggtagatccacattagggctacaaactgtggccctgaaccagaaagaagataactgtttacccaaggctcccac

SEQ ID NO: 353608 - DNA, 120 bp, Artificial Sequence
  ENSG00000139436_93 (sequence is synthesized)
tggtgtttttagtctcaattaacattgtacctaatcagccaaggtaggtcataccatccaacaagatgaccagcctgatgcattgatgagcatactgaaacaaaaatgtctcctttttct

SEQ ID NO: 353609 - DNA, 120 bp, Artificial Sequence
  ENSG00000139436_94 (sequence is synthesized)
gacaaaccaaacttcagtcatcttttgccatctggcggtatagcaacctgctggtatccctgccactgagatttcactctctttccagatccttcctgggcatcagtaaataggggaacg

SEQ ID NO: 353610 - DNA, 120 bp, Artificial Sequence
  ENSG00000139436_95 (sequence is synthesized)
tctgtgtccttagccacattttattgcagcatcaataaaactccttagtcccatgttttgattaacttggatgaaattcaaggagtaaagctagaaatagctcacacttatattttataa

SEQ ID NO: 353611 - DNA, 120 bp, Artificial Sequence
  ENSG00000139436_96 (sequence is synthesized)
ggtaagtggtttaggttttaaattagcctccactgatctctgttccagagaagttctcaagcattatgggtgaaataaatagggaaaataatgttcatgaaatactcagaacatagtccc

SEQ ID NO: 353612 - DNA, 120 bp, Artificial Sequence
  ENSG00000139436_97 (sequence is synthesized)
cttcgaaggaataaagtccccttcaaatttcgtcaccctagaagatcgtgtgtttagcagtgctgccatttgttcaaaacatttttaggattcctcttttgaatctgtatcccatttttg

SEQ ID NO: 353613 - DNA, 120 bp, Artificial Sequence
  ENSG00000139436_98 (sequence is synthesized)
atcaccacagttgcaccaaatctttacattttaaggggtagatttgagcccaggcatgaaatattggaggtagcaggaggcaggagacctggtgcttggtcctgtttttctgcagacttt

SEQ ID NO: 353614 - DNA, 120 bp, Artificial Sequence
  ENSG00000139436_99 (sequence is synthesized)
tcatataagtgctggcatgtttttttgtttgtttgtttctgagacagggtcttatcttactctgtttcccaggctggagtacagtggtgcgaccatggctcaatgcaaccttgaactcct

SEQ ID NO: 353615 - DNA, 87 bp, Artificial Sequence
  ENSG00000139436_100 (sequence is synthesized)
ccaggctggtctcaaactcctagccttaagcaatcgtcctgcctcagcctcccaaaatacagtattttaactgcatctcattatgtt

SEQ ID NO: 353616 - DNA, 120 bp, Artificial Sequence
  ENSG00000139436_101 (sequence is synthesized)
attttaactgcatctcattatgttataaatttgagaactaaatgaggatatgttgccttgcatgtctgttagtttgtactaaggatctgattaggaagtggccactgagctaagaagaaa

SEQ ID NO: 353617 - DNA, 120 bp, Artificial Sequence
  ENSG00000139436_102 (sequence is synthesized)
ccctgtcccaaatgagatttgggatgtgaaggccagtagcctaacaggtaacaattcctggggaagactcctgagaagagtctcatgttacaaactcatgagggtccctcttctttcttg

SEQ ID NO: 353618 - DNA, 120 bp, Artificial Sequence
  ENSG00000139436_103 (sequence is synthesized)
taggcatccaggctggagaagcagaacagcacacctgagagtgactacgacaacactcccaacgacatggagccagatggcatggggtcaagccgaaagggacggcaaagaagtatggtg

SEQ ID NO: 353619 - DNA, 120 bp, Artificial Sequence
  ENSG00000139437_0 (sequence is synthesized)
gggcgcgagctcagggcgcctccggggtcctcactgcgctccccacgcgctgtgaccccatttgttgcacgtgcatgttcaggtcgagagagggatgcgacgtgttcggggagcagccca

SEQ ID NO: 353620 - DNA, 120 bp, Artificial Sequence
  ENSG00000139437_1 (sequence is synthesized)
ccttgtgggtggccaatccgggacgggaatcttaaacttttaactcttggtgcaaagactgatccactggcggctttacgggagcgggaaaaaaatggcgctcccgacgctgccgtccta

SEQ ID NO: 353621 - DNA, 120 bp, Artificial Sequence
  ENSG00000139437_2 (sequence is synthesized)
ctggtgcagccagcagcgcctgaatcagcagctagcacgacagcgagagcaggaggcccggcttcggcagcagtgggagcagaacagccgttacttcaggatgtctgacatctgcagctc

SEQ ID NO: 353622 - DNA, 120 bp, Artificial Sequence
  ENSG00000139437_3 (sequence is synthesized)
caaacaggcagaatggagctctaaaacctcctaccagcggagcatgcatgcctatcagcgggagaagatgaaggaggagaagaggaggagtctggaggcccgacgggaaaagctcaggca

SEQ ID NO: 353623 - DNA, 120 bp, Artificial Sequence
  ENSG00000139437_4 (sequence is synthesized)
gctcatgcaggaggagcaggacctgctggccagagaactggaggagctgaggctgagcatgaacttgcaggaaagaagaatccgggagcagcacgggaagctgaaatcagccaaagaaga

SEQ ID NO: 353624 - DNA, 120 bp, Artificial Sequence
  ENSG00000139437_5 (sequence is synthesized)
gcagaggaaactgattgctgaacaacttttgtacgaacactggaaaaagaacaacccgaaacttcgagagatggagctggaccttcaccagaagcatgtcgtaaactcttgggaaatgca

SEQ ID NO: 353625 - DNA, 120 bp, Artificial Sequence
  ENSG00000139437_6 (sequence is synthesized)
gaaagaagaaaaaaaacagcaagaagccaccgcagagcaagagaacaaacggtatgaaaatgaatatgaaagggcccgaagggaggcgctagaaaggatgaaagctgaagaggagaggag

SEQ ID NO: 353626 - DNA, 120 bp, Artificial Sequence
  ENSG00000139437_7 (sequence is synthesized)
gcagctggaggacaagctccaggccgaggcactgctgcaacagatggaggagctgaagctgaaggaggtggaggcgaccaaactaaagaaggagcaggagaatctgttgaagcagcggtg

SEQ ID NO: 353627 - DNA, 120 bp, Artificial Sequence
  ENSG00000139437_8 (sequence is synthesized)
ggagctagagaggctggaggaagagcgaaagcagatggaagccttccggcagaaggcagagctggggcgtttcttgagacatcagtataacgctcaactcagcagacgcacacagcagat

SEQ ID NO: 353628 - DNA, 120 bp, Artificial Sequence
  ENSG00000139437_9 (sequence is synthesized)
ccaagaggagctggaggcagacaggcggatcctgcaggccctcctcgagaaggaggacgagagccagcgcctccacctggccaggcgggagcaggtcatggccgatgtggcctggatgaa

SEQ ID NO: 353629 - DNA, 120 bp, Artificial Sequence
  ENSG00000139437_10 (sequence is synthesized)
gcaggccattgaggagcagctgcagctggagcgggcgcgggaggcagagctgcagatgctgctgagggaggaggccaaggagatgtgggaaaagagagaggcagagtgggcccgagagcg

SEQ ID NO: 353630 - DNA, 120 bp, Artificial Sequence
  ENSG00000139437_11 (sequence is synthesized)
cagcgcacgggacagactgatgagcgaggttctgacagggagacaacagcaaatacaagagaagattgagcagaaccgacgggcacaagaggaatccctgaaacacagggagcaacttat

SEQ ID NO: 353631 - DNA, 120 bp, Artificial Sequence
  ENSG00000139437_12 (sequence is synthesized)
tcgaaatcttgaggaggtgagagagttggctcgtcgcgagaaagaggagagtgaaaagctgaaatcggccaggaagcaggagctggaagcccaggttgcagagcgccggctgcaggcatg

SEQ ID NO: 353632 - DNA, 120 bp, Artificial Sequence
  ENSG00000139437_13 (sequence is synthesized)
gaggaggcccggcgggtcgagcagctctcagatgccctgctgcagcaggaggcggagactatggctgagcagggctaccggcctaagccttacggacatccaaaaattgcttggaactga

SEQ ID NO: 353633 - DNA, 120 bp, Artificial Sequence
  ENSG00000139437_14 (sequence is synthesized)
cttcatgggtaccataagtacagagaacaagggatgctgaggcttctgatcccagccgccaggcagttttacagggctctgttaacagtaagtgcccggggcactgtcagatggctcagc

SEQ ID NO: 353634 - DNA, 120 bp, Artificial Sequence
  ENSG00000139437_15 (sequence is synthesized)
agtgcctgctcaggttcatcattgaaacatcccagtgtttggccagacattaaggtgtcgtgagagtccctttcatgcctttcttacccaagcaagggtctttgatgggcacgtgtttac

SEQ ID NO: 353635 - DNA, 120 bp, Artificial Sequence
  ENSG00000139437_16 (sequence is synthesized)
agcgctgctgcatagtcttgtaatatattaacagtcacatcaactgaaggtcaatactaagagccacaggttgtacctgtgatggggcgtgtggtttcctgttgtctcacctttaattgt

SEQ ID NO: 353636 - DNA, 120 bp, Artificial Sequence
  ENSG00000139437_17 (sequence is synthesized)
caacctccagtgttgactctagaaatatgaggaaagcttttcagtttttaaaattgccatttaaatttagtctattaaaaacaaacctagaggtcttggtgcagttgatttcagagttta

SEQ ID NO: 353637 - DNA, 120 bp, Artificial Sequence
  ENSG00000139437_18 (sequence is synthesized)
ttaatttagtggtcccaaaagtattacatcttttatattctggaagaaaagaactgtgaacaaattagaaccccggaacactctgacgtccatggacgcattccagaaaagtggcaagag

SEQ ID NO: 353638 - DNA, 120 bp, Artificial Sequence
  ENSG00000139437_19 (sequence is synthesized)
atgagtctttcctcctccaggaagcattttggtagaatttccatagagcattgtctgtgagtgactgatcccaacatgtatgttactaagccccaaaacgaacttcaaactgggtgtggt

SEQ ID NO: 353639 - DNA, 120 bp, Artificial Sequence
  ENSG00000139437_20 (sequence is synthesized)
aagaggattgcttgagcccaggagttcgagtccaacctgggcaaaagagtgagaccccatctctaaaaccaaaaaggtaccttagaaggtcacctggttggctaaccttttaaaggcagg

SEQ ID NO: 353640 - DNA, 120 bp, Artificial Sequence
  ENSG00000139437_21 (sequence is synthesized)
cttagaaggtcacctggttggctaaccttttaaaggcaggggcgtgacacgtaggacacattgggaatgtcttggctactacatgtagccttctgggatatatgtgcccagagggagaag

SEQ ID NO: 353641 - DNA, 120 bp, Artificial Sequence
  ENSG00000139437_22 (sequence is synthesized)
cactgagcctgaagaaactagatgagtctcagaaccacagaccggccagaaatctctcccaccattatatcagcgtgatacaggtctacattcatttctacaaacaggaacaagttcctt

SEQ ID NO: 353642 - DNA, 120 bp, Artificial Sequence
  ENSG00000139437_23 (sequence is synthesized)
gcagcaataatattattttatgacttgtatttttactatacccttcctctgaggtttagttttcatcacattatgttcaagattccatatctccgtaaattacagctaattacagggcat

SEQ ID NO: 353643 - DNA, 120 bp, Artificial Sequence
  ENSG00000139437_24 (sequence is synthesized)
tgttccatggttattaaaaatcagagtttattaaaaatcctgagtcttaagggctgtcttacctttcacttccactgtcctgtagaaacagatcaagctgcaaaccacgtccttcatctg

SEQ ID NO: 353644 - DNA, 120 bp, Artificial Sequence
  ENSG00000139437_25 (sequence is synthesized)
ttgttcattttcttgcaactctttgactctgatcccctgagcagcacgttcatcacgcatgctctctgttgcgttccccatttcagatgtccagtaatggtgaaataaaatcctgcttcg

SEQ ID NO: 353645 - DNA, 120 bp, Artificial Sequence
  ENSG00000139437_26 (sequence is synthesized)
gtcgtcgggctcgttgccggtgcaaacagggaggaaacagccggcgttgctgtagcgcgtctgggaattacaccgggggactggccggcccgcttcgtgcctgcgggaagtcgggccggg

SEQ ID NO: 353646 - DNA, 120 bp, Artificial Sequence
  ENSG00000139437_27 (sequence is synthesized)
tttacagggctctgttaacaaaatctgaagagttctgcgtctgaatttgaaattggactttataaagcctagaaaacagaggaggcggtgccctgcccttgtcagttgttgttctctttg

SEQ ID NO: 353647 - DNA, 120 bp, Artificial Sequence
  ENSG00000139437_28 (sequence is synthesized)
gtggtgatggtaaccagctgcttggcagccttggcgatgtcgtacgcacactggatgacctgctgcgtgaccagctgaacgtctgtggtggtttccaaatctgtgtcttcgtctgatgcc

SEQ ID NO: 353648 - DNA, 120 bp, Artificial Sequence
  ENSG00000139437_29 (sequence is synthesized)
acgctgtcatagtcgggctgatcgttgtcttgactctcaacgctgtgctggttattgatggttttcagtatgagctccacattgtctatcaataaaagcaaacaactttacttcaggctt

SEQ ID NO: 353649 - DNA, 120 bp, Artificial Sequence
  ENSG00000139437_30 (sequence is synthesized)
agtctggatacattttgtgtgtcttgggttgcgagggaaacatttcttgtatactggcaagcgtggccgacatcgtgagagcaaatcctgtcatctggctctgcctctgcgtacctgggc

SEQ ID NO: 353650 - DNA, 120 bp, Artificial Sequence
  ENSG00000139437_31 (sequence is synthesized)
ctgaggcccaaggatgaggctgggccttgctgtggctgcagcctgtccaaggcttgtagaaccaggatctgttagggtcaacctcaaagctgcccttttctttctgctgaggttaggttc

SEQ ID NO: 353651 - DNA, 120 bp, Artificial Sequence
  ENSG00000139437_32 (sequence is synthesized)
gggacagggttcagagccgctggactgcctggcagggcttgcgcacgtttgagagcacggtgctcccgtttccatcccagctgcagtcctcatcctcttgactgtggcttctttccctcc

SEQ ID NO: 353652 - DNA, 120 bp, Artificial Sequence
  ENSG00000139437_33 (sequence is synthesized)
acatcctccatgtcgtgtgggtgaggccggtactgctgtctgttctctttactctgtctgcttctgcaagcagttggcttaccgggggccatagatctctcttcatttcagtccctgata

SEQ ID NO: 353653 - DNA, 120 bp, Artificial Sequence
  ENSG00000139437_34 (sequence is synthesized)
cataagacagaacagtcctccaaacacctggccacaggccgagcttttcacgaggtacacgccacgcatatgtatagcctctccagctttccatgaggtacacgccacgcatacagcctc

SEQ ID NO: 353654 - DNA, 120 bp, Artificial Sequence
  ENSG00000139437_35 (sequence is synthesized)
tccagctttctacgaggtacatgccatgcatacagcctctccagctttctaccaggtacacacaatgcatacagcctctccagctttccacgaggtacacgccacgcatacagcctctcc

SEQ ID NO: 353655 - DNA, 120 bp, Artificial Sequence
  ENSG00000139437_36 (sequence is synthesized)
agctttccacgaggtaagcgccacgcatacagcctctccagctttctatgaggtacacaccatgcatacagcctttcaagtcccgcatgctcccttccgttccttggcacgtgcattgct

SEQ ID NO: 353656 - DNA, 120 bp, Artificial Sequence
  ENSG00000139437_37 (sequence is synthesized)
gttgctcagctggattctccagtctgggtagggccgcaggcttaccttcctcatcagaggcagggctctgccctgtgggccttgtcttggggtggtgactttgctcttggcactcaggtt

SEQ ID NO: 353657 - DNA, 120 bp, Artificial Sequence
  ENSG00000139437_38 (sequence is synthesized)
aaagtatgtgaagcttgccacggtctcgagaccgaggtcacacgttagcagcctgccggctacatttggaccatagacgcagagtgtttgcccccaaaactggaggacctccagaatgag

SEQ ID NO: 353658 - DNA, 120 bp, Artificial Sequence
  ENSG00000139437_39 (sequence is synthesized)
attcttggcgtgcaccaggccttttcgctcattcagccggcgttcctacccaggcactgcatcgaccctacacttgaggacagcttttgggtcaggggaattggtgcctggagtgagact

SEQ ID NO: 353659 - DNA, 120 bp, Artificial Sequence
  ENSG00000139437_40 (sequence is synthesized)
ttccaaaacgattttacaacacttaaagggcacaataattacaggaatagaatgtacaataaaaagtacagaataatgagtgacagggatcaaacacgttggaataaaaggcatctcagt

SEQ ID NO: 353660 - DNA, 120 bp, Artificial Sequence
  ENSG00000139437_41 (sequence is synthesized)
tttcctatgcagcattttcttttctaggaacacgttaccttcaaccaggacaaggaaagaaagaaaactatactattggaaagctcatgggtgccattgaggacaaaaacaggcgagttt

SEQ ID NO: 353661 - DNA, 120 bp, Artificial Sequence
  ENSG00000139437_42 (sequence is synthesized)
tgctcttggttctgcaactgaatcacttgagaagccgtgcacagctcccgagttgtgcgtttagaattctgattacatgaaatgctgtgtttgatctttgggcccaattcactgttcttt

SEQ ID NO: 353662 - DNA, 120 bp, Artificial Sequence
  ENSG00000139437_43 (sequence is synthesized)
ggcaaataagaactatttgcattccaaggcagatgacgatttctgtgaaaggagcttagaggtacagctgtttccttctgttcagtcaagtgccagtttcataaagtgcacctctgccct

SEQ ID NO: 353663 - DNA, 120 bp, Artificial Sequence
  ENSG00000139437_44 (sequence is synthesized)
atcagctttgggggaagggtggcatatggggaggaagggatcattgagaatacagggtgaaaaagaacgacgttactgaaggtagacattgctagtgcaaggtacggaatccatgtgcaa

SEQ ID NO: 353664 - DNA, 120 bp, Artificial Sequence
  ENSG00000139437_45 (sequence is synthesized)
aaggtggctggaacaaatgttcagataaggtgcgatttgccaacaggagcagagaactctgacaccagatctcagatgaggccaaggaaatgcgcggggcacatacagagaggacgacct

SEQ ID NO: 353665 - DNA, 120 bp, Artificial Sequence
  ENSG00000139437_46 (sequence is synthesized)
gcagccctccaatggccacgtcattccaccggggaacttgtttggagttttggcaccgtgggctaaccgagcactcttctgacatattcttacaactggaaatgctttgttggtccccat

SEQ ID NO: 353666 - DNA, 120 bp, Artificial Sequence
  ENSG00000139437_47 (sequence is synthesized)
gttccttgactttctctagggccataaaggcaacatcttctattgcaggtcctcaaacattccaaggaaaacactgcttcacctcctgcagacagctcatttcccagaagcctctacaga

SEQ ID NO: 353667 - DNA, 120 bp, Artificial Sequence
  ENSG00000139437_48 (sequence is synthesized)
agcccgtcctccctgggacagcaggggcaggggtttgcaagataaaggagggtcagctaaggacatgaagcctgcagaaaaggctatcagatggcgcctgaacttaaggtgggaggcccc

SEQ ID NO: 353668 - DNA, 120 bp, Artificial Sequence
  ENSG00000139437_49 (sequence is synthesized)
cttctagaaggcatcccgggagcatccaacagcaatgtggcacttagggctgtgggacaaacaagtggaagagtcttttggagacgtggacccttttcccatgctactcacagtgaagca

SEQ ID NO: 353669 - DNA, 120 bp, Artificial Sequence
  ENSG00000139437_50 (sequence is synthesized)
aaatgcgacaaaagcatccacacacggtgacttagtaaagcaagcaccgtcggggtgctactttcatgacagcatatggtcaagctataaaggtgtgcatcgatcagtcctgtgaaaata

SEQ ID NO: 353670 - DNA, 120 bp, Artificial Sequence
  ENSG00000139437_51 (sequence is synthesized)
gaagcttagttattagcatgtattgaggcaacttgtactttgattcttgtgtcttcttcacatgtgtgaatgactgctatgggacagaacatatggttaaaaacaggagcgacagcaaca

SEQ ID NO: 353671 - DNA, 120 bp, Artificial Sequence
  ENSG00000139437_52 (sequence is synthesized)
taacacacagggttggccggctccattacgggtaagactcagaggctgctccaggtgtgtccggggaagccaggccctcacactgcacagcttacagggccctggggtgggggctgtgag

SEQ ID NO: 353672 - DNA, 120 bp, Artificial Sequence
  ENSG00000139437_53 (sequence is synthesized)
ctggcagcctagaggacacagctcacctgcacatggtctctgaaagtgttcaaattggttgccaacatttataaatggagagatggcaccaaaaaacatctaggtttcttgtctcttgaa

SEQ ID NO: 353673 - DNA, 120 bp, Artificial Sequence
  ENSG00000139437_54 (sequence is synthesized)
gcccctactgtgtaggcggtgggctccccatagtctcctctgccctgctgccgtgtacctggctcccttcactcatccacatcaccggccctaggccagggtctgaaccacacacacaga

SEQ ID NO: 353674 - DNA, 120 bp, Artificial Sequence
  ENSG00000139437_55 (sequence is synthesized)
atggctgcagtaagcaggaacgggaagagctttcacattcagaacaagaaggggcttttgagtaactaaaaaacaatctgagcatgttccagcacttcaaccttactctttcagagcttt

SEQ ID NO: 353675 - DNA, 120 bp, Artificial Sequence
  ENSG00000139437_56 (sequence is synthesized)
ggggtagcaggcagccagctagagcacactctctaaggaactcttgaaagttgatgtctaatttttaagtactcatgaggtgatggaggagaaactaactcagatgactgcgatacgata

SEQ ID NO: 353676 - DNA, 120 bp, Artificial Sequence
  ENSG00000139437_57 (sequence is synthesized)
tgaacgtctgtgggtgagccggggtcccctgggagggtcttcttgcactctgactgcagtcggtaggcactggacgtcagtaaacgaagggaagtcctcaccatatcagacttgggtttc

SEQ ID NO: 353677 - DNA, 120 bp, Artificial Sequence
  ENSG00000139437_58 (sequence is synthesized)
taaaaggaaaaagacagccgtttaccctgaactgcagggcagacatccaaaagcaggggacaaacattcttctaaagcaaaccaagctgctccccagagtgaaaggcggtttggtcctgc

SEQ ID NO: 353678 - DNA, 120 bp, Artificial Sequence
  ENSG00000139437_59 (sequence is synthesized)
cctttctcaaaggggtgcttcacacactccaagctttgcagcccacagcgtaagagatgctgaaatattctgattcaaaggtcaaagtgcatgcagggtaattttagtagtatgtggtat

SEQ ID NO: 353679 - DNA, 120 bp, Artificial Sequence
  ENSG00000139437_60 (sequence is synthesized)
tttgaagtagtttttgaaaaatattaatccatgtgggtaaaatattccagaaaatcctataaattttaaaatgtgccttttagcacgacttgtatatccttgtcttattaaatcaacatt

SEQ ID NO: 353680 - DNA, 120 bp, Artificial Sequence
  ENSG00000139437_61 (sequence is synthesized)
tgtcttattaaatcaacattcatgcagaacaaaaatatttcaaagctctatacgactgcatattttattttattttacttttttttgagacttgagtttcactcttgttgcccaggctgg

SEQ ID NO: 353681 - DNA, 120 bp, Artificial Sequence
  ENSG00000139437_62 (sequence is synthesized)
ttttaaaactgcatgtgctacaaaaaagctaatgtaatatataggtcataaagaaatttcttgctgttcatttaaaaggatttaaaccaagtgagtaggaagtgacttactttggggaat

SEQ ID NO: 353682 - DNA, 120 bp, Artificial Sequence
  ENSG00000139437_63 (sequence is synthesized)
aatgctgccatttctgtaacagctacgtgtatcctctctgagcagggaatataactgcaagaatattgaagaagttattcaatgacagtaaaaatgattcggaggcaaagaggactcaag

SEQ ID NO: 353683 - DNA, 120 bp, Artificial Sequence
  ENSG00000139437_64 (sequence is synthesized)
acactggatgacctgctgcgtgaccagctgaacgtctgtggaaccttcccaactggagatgtgaaacggtcattctccatccactcacctggtttcctgccacagagatagaaggctagt

SEQ ID NO: 353684 - DNA, 120 bp, Artificial Sequence
  ENSG00000139437_65 (sequence is synthesized)
ctgtccgttagctcatactgtatttccacgaggcgctctgccagctcatggtgccctccttgcctaccaagagaaaacaaagtaccatttatattgctcactattcactgactttaaaat

SEQ ID NO: 353685 - DNA, 120 bp, Artificial Sequence
  ENSG00000139437_66 (sequence is synthesized)
ttcttgtggatgaaagaagttggcttgtgctcctaaagataacagtctcaaacaggtttcaagattccctgttctcacgctcgaatggagttgctgaaaaacgcagaaacaaaaaaggaa

SEQ ID NO: 353686 - DNA, 120 bp, Artificial Sequence
  ENSG00000139437_67 (sequence is synthesized)
tcgtggttagaggtgtaaagaatgatgtcctagggcagctgatagaccattttaatatatgttacatcagtaacgcataatctttatttgtctcggtaaagtgcatggaccagtctctcc

SEQ ID NO: 353687 - DNA, 120 bp, Artificial Sequence
  ENSG00000139437_68 (sequence is synthesized)
cgagaggtgaaaatcagagatctccattgatttatctaagtagatgaaatcatgtttccagacacttttttttttgaacacgtatcttgtaccgggttgaaacagaggagggaaccttga

SEQ ID NO: 353688 - DNA, 120 bp, Artificial Sequence
  ENSG00000139437_69 (sequence is synthesized)
gccacctgaaaagagcgccaggcagaagatctggcacaggctgcgctgagcggctcattcggttgttgaacaaatgttgattgaacctccgctgcctggtctgccaggtgcgggcatgga

SEQ ID NO: 353689 - DNA, 120 bp, Artificial Sequence
  ENSG00000139438_0 (sequence is synthesized)
actttctaaatcacagtgcctgtggccggatgacatggagggagctccctgaccataggaggggttagagacacgacgcccctctaccctcactcacagcagaggtggaaagctggagac

SEQ ID NO: 353690 - DNA, 120 bp, Artificial Sequence
  ENSG00000139438_1 (sequence is synthesized)
tgacccacacatggagcgcaccccactggggacccccagctcagccatgctggcctgtctgcagaggacccagaacgccccgggccaacacctggcctgcccgagcaagagcctggagct

SEQ ID NO: 353691 - DNA, 120 bp, Artificial Sequence
  ENSG00000139438_2 (sequence is synthesized)
gcgcaagtgcgaggcggtggccagcgccatgcattcctcccgctacccgagcccagcagaactggacgcctatgccgagaaggtggccaacagcccgctgtccatcaagatcttccccac

SEQ ID NO: 353692 - DNA, 120 bp, Artificial Sequence
  ENSG00000139438_3 (sequence is synthesized)
caacatccgtgtgccccagcacaagcacctcagccgcacagtcaatggctatgacaccagtggccagcgctacagcccctacccacagcacaccgctggctaccagggccttctggccat

SEQ ID NO: 353693 - DNA, 120 bp, Artificial Sequence
  ENSG00000139438_4 (sequence is synthesized)
tgtcaaggccgcggtttcctcctccagcacggccgcaccagctgggcccgccaaaagtgtgctcaagagcgccgagggcaagcggaccaagctgtcaccggccgccgtgcaggtgggcat

SEQ ID NO: 353694 - DNA, 120 bp, Artificial Sequence
  ENSG00000139438_5 (sequence is synthesized)
tgcgccctacccagtgcccagcactctgggtcccttggcctaccccaagccacctgaggcgcctgctccaccacccggcctgcccgcagccgccactgccgcctccgtcatccccctgcc

SEQ ID NO: 353695 - DNA, 120 bp, Artificial Sequence
  ENSG00000139438_6 (sequence is synthesized)
gggccggggcctgcccctgccaccttccaacctgccctccatccacagcctcctgtaccagctcaaccagcagtgccaggccccgggcgccgcaccccctgcctgccagggcatggctat

SEQ ID NO: 353696 - DNA, 120 bp, Artificial Sequence
  ENSG00000139438_7 (sequence is synthesized)
tccccatcccagccctgccaagcacggcccagtgcccagcttccccagcatggcctactcggctgcagccggtctgcccgactgccggaaaggcactgagctgggccagggagccaccca

SEQ ID NO: 353697 - DNA, 120 bp, Artificial Sequence
  ENSG00000139438_8 (sequence is synthesized)
agccttgacgttggctggggccgccaagcctgcagggtacgcagacagcggcctggattacctgctgtggccgcagaaaccgcccccaccgccgccccagccactgcgtgcctacagtgg

SEQ ID NO: 353698 - DNA, 120 bp, Artificial Sequence
  ENSG00000139438_9 (sequence is synthesized)
gagcacggtggccagcaagtcccctgaggcttgcgggggccgggcatacgagcgggccagcgggtcacccctcaactgtggcgtggggctgcccaccagcttcaccgtaggccagtactt

SEQ ID NO: 353699 - DNA, 120 bp, Artificial Sequence
  ENSG00000139438_10 (sequence is synthesized)
tgcggccccgtggaacagtgtgctggtgacacccaccagcgactgctacaacccagcggcggcggtggtggtcacggagctggggccgggggcagcccgggagctggctgggccccctgc

SEQ ID NO: 353700 - DNA, 120 bp, Artificial Sequence
  ENSG00000139438_11 (sequence is synthesized)
atccggccgccctgcatcaaggagcagatgctgggcaagggctatgagacggtggccgtgccccggctactcgaccaccagcatgcccacatccgcctacccgtctacagataaggcctg

SEQ ID NO: 353701 - DNA, 120 bp, Artificial Sequence
  ENSG00000139438_12 (sequence is synthesized)
ccctgcggacatacggacatgcggacagggcgcagagccgggaggcaggccgcagaacagggtgggcggctcgcaggggcgctcagccccaccctgtgcctgctgatgcccacaggggag

SEQ ID NO: 353702 - DNA, 120 bp, Artificial Sequence
  ENSG00000139438_13 (sequence is synthesized)
ccaggctggctgccgcctcgctgtggccggatggagggtggcagggcaacctcacataccaaggcccctccccaccatcggttgccccaggacacagtgagggcctgggggcagccactg

SEQ ID NO: 353703 - DNA, 120 bp, Artificial Sequence
  ENSG00000139438_14 (sequence is synthesized)
acgcccatgccttcctttatctaagctggcagaggcagggagagagaaaccactcaaaaacaggaatggttctttctgggcctcctgggacaggggcccaggccaaggtggggtgcagga

SEQ ID NO: 353704 - DNA, 120 bp, Artificial Sequence
  ENSG00000139438_15 (sequence is synthesized)
ggaaacaggcgcaccagagtcagggtgggggcagggcagcccccccaggggtcaggcagctgtgtctccccacactggctccccagtattctggaaaaggggtacaggaggccgatagga

SEQ ID NO: 353705 - DNA, 120 bp, Artificial Sequence
  ENSG00000139438_16 (sequence is synthesized)
agtcactgggcccaaagtgtctccccaccagccaggtgaagaccactctgacagaggctccagggactataccagtccccctgttcctccttcccctacccccaccattccttcctaaca

SEQ ID NO: 353706 - DNA, 120 bp, Artificial Sequence
  ENSG00000139438_17 (sequence is synthesized)
cagagttgcacccccatccccattctccaaaccctggactaccatattcccccttccctccaatacatcttatagggctgctgggtacagttgttcaggctgtgcactgcacaagggcac

SEQ ID NO: 353707 - DNA, 120 bp, Artificial Sequence
  ENSG00000139438_18 (sequence is synthesized)
cttgtccaaggagacaccactttcacccaaacttgtatatttattacaattttctgcatcttgaggaaggggcgtcattttcctgttcgcacaaaggcaccacaggggctaacagtgggc

SEQ ID NO: 353708 - DNA, 120 bp, Artificial Sequence
  ENSG00000139438_19 (sequence is synthesized)
ctgcaatcttagatcccatccttgccttcttcgagggatctcttgggaccctcctggttttaactgggaggcccagaccaactcctttcctgcaaaccaccctccaaggcctgtcccaca

SEQ ID NO: 353709 - DNA, 120 bp, Artificial Sequence
  ENSG00000139438_20 (sequence is synthesized)
cgatcaaggcagggaaagataggcaggagtcccctcacgaagtcctcaagtcctggcccctctggcgctctggaagcggtactgtatctctctccaaggcctggtcaagcactaagtgca

SEQ ID NO: 353710 - DNA, 120 bp, Artificial Sequence
  ENSG00000139438_21 (sequence is synthesized)
tttacaaatctctgagaatgttttttttatactaaaattgaccattatattctactgtgagaagtgcagtctgcactatattgttttaaaaacgaagagaaagaagaaaaaggaaaacac

SEQ ID NO: 353711 - DNA, 120 bp, Artificial Sequence
  ENSG00000139438_22 (sequence is synthesized)
cgctgttcgccggcttcccctccccccacacccggggctcagagcaggaggaggaggggccggtgcattctcgccgctgttctttgcaacctgcaggggccggtgtatgtccggcgagga

SEQ ID NO: 353712 - DNA, 120 bp, Artificial Sequence
  ENSG00000139438_23 (sequence is synthesized)
gccggggccgctgcgggtgcgtgcaacccccgaaggagacaatccctccacctcggggcgaacccgggggctgcaagccgcgggcgggcgggcgagcgagaggaagcaacaaagacaggc

SEQ ID NO: 353713 - DNA, 120 bp, Artificial Sequence
  ENSG00000139438_24 (sequence is synthesized)
aggaagcaacaaagacaggctgcagctggggctggcgaaaggggccgcggccgccgggctcccagcgcgggcggagagggcgccctgggagcggcgcgggccgagctgcagccttgagcg

SEQ ID NO: 353714 - DNA, 120 bp, Artificial Sequence
  ENSG00000139438_25 (sequence is synthesized)
cgccggacgtggcgatcacgggccccggcgaagatgcgtcgcctgagcgcccgcgcggcccccgtccggggcgggcgtgacccctgctgaacggagacctcccctcccccccgacttcgg

SEQ ID NO: 353715 - DNA, 120 bp, Artificial Sequence
  ENSG00000139438_26 (sequence is synthesized)
gacttcggacggcgcaggccggcgccaggatagccctcaccgacagcgccccttcccacccggagagaggcatcgacccccaaggagggcttcgtcaggcagcctctgccactcctgcat

SEQ ID NO: 353716 - DNA, 120 bp, Artificial Sequence
  ENSG00000139438_27 (sequence is synthesized)
aacaccaggcctggcagtgacgggcaggagaaggggccaggcaggtacctgggacagggcttccccttcaccactcccctaccctgctgcctgtccccaggacccctcctagaccttcct

SEQ ID NO: 353717 - DNA, 120 bp, Artificial Sequence
  ENSG00000139438_28 (sequence is synthesized)
gctgggctgtctgcacctttcgagccacacctggcgggcagtgtgggcccagcgcttggggggatgaaagatgaaggttcgtgaccattttttaactcaataaagggagagacaagctgc

SEQ ID NO: 353718 - DNA, 120 bp, Artificial Sequence
  ENSG00000139445_0 (sequence is synthesized)
atgctctgagctggacagctccagagagggaaatttaaaaacggttcgagctgcgacggcggccaaattgcggaacgcgaggggcgagcgcgagggagcccccctccggaacccctgccc

SEQ ID NO: 353719 - DNA, 120 bp, Artificial Sequence
  ENSG00000139445_1 (sequence is synthesized)
acccccggagcgccggcagcggcggccccgcgaggatcggctccaggagatgatagaaagtgacacctcatccataatgtcaggaattattcgaaactcagggcaaaatcaccacccctc

SEQ ID NO: 353720 - DNA, 120 bp, Artificial Sequence
  ENSG00000139445_2 (sequence is synthesized)
tccacaggaatacaggcttctagccaccaccagcgatgatgaccttcccggggacctgcagtcgctgtcgtggctcacggcggtggatgtgcctcggctgcagcagatggcaagtggccg

SEQ ID NO: 353721 - DNA, 120 bp, Artificial Sequence
  ENSG00000139445_3 (sequence is synthesized)
cgtggacctgggtggcccctgcgtgccacatccacacccaggtgccttggctggggtggccgacctgcatgtgggagccactccaagtccccttctccatggcccagcaggcatggcccc

SEQ ID NO: 353722 - DNA, 120 bp, Artificial Sequence
  ENSG00000139445_4 (sequence is synthesized)
ccgaggcatgccaggtctgggccccataactggccacagagacagcatgagccagttccccgtggggggccagccctcatctggcctgcaggacccgccgcatctgtactcacctgccac

SEQ ID NO: 353723 - DNA, 120 bp, Artificial Sequence
  ENSG00000139445_5 (sequence is synthesized)
ccaaccacagttcccgctccccccgggtgcccagcagtgccctcctgtgggcctctatggccccccatttggggtgcggcccccctacccccagccccacgtggctgtgcattcatctca

SEQ ID NO: 353724 - DNA, 120 bp, Artificial Sequence
  ENSG00000139445_6 (sequence is synthesized)
agaactgcaccccaaacactaccccaagcccatctactcgtacagctgtctgatcgccatggccctgaagaacagcaagacaggcagcctgcctgtgagcgagatctacagcttcatgaa

SEQ ID NO: 353725 - DNA, 120 bp, Artificial Sequence
  ENSG00000139445_7 (sequence is synthesized)
ggagcacttcccctacttcaagacggcccccgacgggtggaagaactcggtgcggcacaacctgtctctgaacaagtgcttcgagaaggtggagaacaagatgagcggctcctcccgcaa

SEQ ID NO: 353726 - DNA, 120 bp, Artificial Sequence
  ENSG00000139445_8 (sequence is synthesized)
gggctgcctgtgggctctgaacctggcccgcatcgacaagatggaggaggagatgcacaagtggaagaggaaggacctggctgccatccaccggagtatggccaaccctgaggagttgga

SEQ ID NO: 353727 - DNA, 120 bp, Artificial Sequence
  ENSG00000139445_9 (sequence is synthesized)
caagctgatctccgaccggcctgaaagctgccggcgccccggcaaaccgggggaaccagaggcccccgtgctgactcacgccaccacagtggccgtggcgcatggctgcctggctgtctc

SEQ ID NO: 353728 - DNA, 120 bp, Artificial Sequence
  ENSG00000139445_10 (sequence is synthesized)
ccagctcccaccccagccactgatgaccctgtccctgcagtcagtccccctgcaccaccaggtccagccccaggcacatcttgctccagactctccagcaccagcccagaccccgccact

SEQ ID NO: 353729 - DNA, 120 bp, Artificial Sequence
  ENSG00000139445_11 (sequence is synthesized)
gcacgccctgccggacctcagccccagcccgctcccccaccccgccatgggaagggctcctgtagacttcatcaacatcagcaccgacatgaacactgaggtggatgccctcgacccgag

SEQ ID NO: 353730 - DNA, 120 bp, Artificial Sequence
  ENSG00000139445_12 (sequence is synthesized)
catcatggacttcgctctgcaggggaacctgtgggaggagatgaaggatgagggattcagcttggacacactgggcgcctttgcagactccccgcttggctgtgacctgggggcctcagg

SEQ ID NO: 353731 - DNA, 120 bp, Artificial Sequence
  ENSG00000139445_13 (sequence is synthesized)
cctaacccctgcctcgggtggcagcgaccagtccttcccagacttgcaggtgacgggtctctacacagcgtactccactccggacagtgtggctgcatcgggcaccagctcctcctccca

SEQ ID NO: 353732 - DNA, 120 bp, Artificial Sequence
  ENSG00000139445_14 (sequence is synthesized)
cctgccctggaaccccggcacccggcttgggcagagaactgactagaacagggtgttcccagaaggcaggtccctcattgtccccgaagcctctcctggacctgtggcgaagttgccggc

SEQ ID NO: 353733 - DNA, 120 bp, Artificial Sequence
  ENSG00000139445_15 (sequence is synthesized)
tggacagggaagcggttcccctcagcagcccctctccttctcgtgcctccccctggagcttccggagcagtttctgggggctcttccaagtcagaagaatggaggaaggtggacaagcaa

SEQ ID NO: 353734 - DNA, 120 bp, Artificial Sequence
  ENSG00000139445_16 (sequence is synthesized)
cccagcatcccccgaccccttgacactcctccgaggcctgagccgcaatgcctgcccgtgttgagtgagacttctccatcctggatcctggctgcgtgacctcagtgacctgcaccccat

SEQ ID NO: 353735 - DNA, 120 bp, Artificial Sequence
  ENSG00000139445_17 (sequence is synthesized)
tttgggacaccttggtgcattaaggaaacaccctggggtgaaagcccttgaattcatcctcatgggaaatggctgagtggatcaaacctcagccgcagcctccgggggacaggcccaggg

SEQ ID NO: 353736 - DNA, 120 bp, Artificial Sequence
  ENSG00000139445_18 (sequence is synthesized)
cgggaaatggagccggagaagcttgagcctctctcttggacaggacaagctgaactctgaaatgggagccggtccaggtggccttcagccccacctttccgatagtctgttagaatttta

SEQ ID NO: 353737 - DNA, 120 bp, Artificial Sequence
  ENSG00000139445_19 (sequence is synthesized)
ttagcgcagattcctgggccatgccgggtaccgtgaccttgtgtaaatttatttatatttattgtggcccatccaccccacttctgcaaacccatcccgaggcctctggaatgggactcc

SEQ ID NO: 353738 - DNA, 120 bp, Artificial Sequence
  ENSG00000139445_20 (sequence is synthesized)
ttctccctccctacctcccagccatcctaactcctacaggccagagaatgacatctctaactggctcataatcccttggcagcctggggctactttttagaaccagcaagcactgttgat

SEQ ID NO: 353739 - DNA, 120 bp, Artificial Sequence
  ENSG00000139445_21 (sequence is synthesized)
actgtgaaacatcccattttttccgtattagagaccagatatttttctacctgttcatgattcacatctcttcttgcatgtacctaagaggggcggtgccattgtttgggggcttggggg

SEQ ID NO: 353740 - DNA, 120 bp, Artificial Sequence
  ENSG00000139445_22 (sequence is synthesized)
gctttcaaaggggaaaatgcgatgggagagggaggaactggaggggggtgcttttgtactgggatttaagacacccctgatggaatgaaagccaactgaaccacgtaaagctcgaaccac

SEQ ID NO: 353741 - DNA, 120 bp, Artificial Sequence
  ENSG00000139445_23 (sequence is synthesized)
gtggcaagtggtggacaaaacttcaacgcatgatatttattggcacttcctcacctccctttgccctgcagctgtttttatgcttctttttctctccttgctaattactgactccccaag

SEQ ID NO: 353742 - DNA, 120 bp, Artificial Sequence
  ENSG00000139445_24 (sequence is synthesized)
tggcaagttccgcagatagctgggttagaagagagacaggggagtgagctagtcaaatgtgaaaaatgctctcccagcaaagctgagacaaaattggagaagctgcagcctcacgcacca

SEQ ID NO: 353743 - DNA, 120 bp, Artificial Sequence
  ENSG00000139445_25 (sequence is synthesized)
tccccctctttccaccagatggatgttgacttggtgtctgggagttcccgaaccctagagccaggatgttctgtttaatcaacagctcagccagctgcctgggagttttggcattaagcc

SEQ ID NO: 353744 - DNA, 120 bp, Artificial Sequence
  ENSG00000139445_26 (sequence is synthesized)
ccgccttgaagggcgagctttaagtttttcccagttctggaactttctaccgagtatccaccacccttagacacaatcccagtgctacccgtctgacctgcactgctcatctgctttgtg

SEQ ID NO: 353745 - DNA, 120 bp, Artificial Sequence
  ENSG00000139445_27 (sequence is synthesized)
taacatgacccctgataagatgttgaaactgttattcacaaagactccgtgtttgggcaacatcaagactgtaagtgtagaattgagcaactgtcttctatcaataaaggctgaatggca

SEQ ID NO: 353746 - DNA, 120 bp, Artificial Sequence
  ENSG00000139445_28 (sequence is synthesized)
atgagccagttccccgtggggggccagccctcatctggcctgcaggacccgccgcatctgtactcacctgccacccaaccacagttcccgctccccccgggtgcccagcagctgtctgat

SEQ ID NO: 353747 - DNA, 120 bp, Artificial Sequence
  ENSG00000139496_0 (sequence is synthesized)
cttcgccgccgttggggctggaagttcccgccaggtccgtgccgggcgagagagatgctgcccggcccgcctcggctttgaggcgagagaagtgtcccagacccatttcgccttgctgac

SEQ ID NO: 353748 - DNA, 120 bp, Artificial Sequence
  ENSG00000139496_1 (sequence is synthesized)
ggcgtcgagccctggccagacatgtccacagggttctccttcgggtccgggactctgggctccaccaccgtggccgccggcgggaccagcacaggcggcgttttctccttcggaacggga

SEQ ID NO: 353749 - DNA, 120 bp, Artificial Sequence
  ENSG00000139496_2 (sequence is synthesized)
gcgtctagcaacccttctgtggggctcaattttggaaatcttggaagtacttcaactccagcaactacatctgctccttcaagtggttttggaaccgggctctttggatctaaacctgcc

SEQ ID NO: 353750 - DNA, 120 bp, Artificial Sequence
  ENSG00000139496_3 (sequence is synthesized)
actgggttcactctaggaggaacaaatacaggaacgccagccactacatctgcagctacaacaggcttcagtttaggattcaataaacctgcagcatctgccacaccatttgctctacct

SEQ ID NO: 353751 - DNA, 120 bp, Artificial Sequence
  ENSG00000139496_4 (sequence is synthesized)
attacctctacctcagctagcggtctgactctttcgtctgctctgacatcaactccagcagcatccacaggatttactctaaataatttgggtgggacaacagccacaactacaactgca

SEQ ID NO: 353752 - DNA, 120 bp, Artificial Sequence
  ENSG00000139496_5 (sequence is synthesized)
tcaacaggcctctctttagggggagccttagctggtttgggaggttcacttttccagagtacaaacacaggaacatcaggacttggacagaatgctttagggttgactttgggaactaca

SEQ ID NO: 353753 - DNA, 120 bp, Artificial Sequence
  ENSG00000139496_6 (sequence is synthesized)
gcagctacttcaactgcaggcaatgaaggccttggtggtatagatttcagtagctcctcagataaaaagagtgataaaacgggaacaagaccagaggatagtaaagctctgaaggatgaa

SEQ ID NO: 353754 - DNA, 120 bp, Artificial Sequence
  ENSG00000139496_7 (sequence is synthesized)
aatctacctcctgtcatctgccaggatgttgaaaatctccagaaatttgtgaaggagcagaaacaagttcaagaagaaattagtagaatgtcttcaaaagcaatgcttaaggtacaagaa

SEQ ID NO: 353755 - DNA, 120 bp, Artificial Sequence
  ENSG00000139496_8 (sequence is synthesized)
gatattaaagctctgaagcagctcctgtcgttggctgccaatggaatacagagaaacactctcaacattgacaaattgaaaatagaaactgctcaggagttgaagaatgctgaaatagct

SEQ ID NO: 353756 - DNA, 120 bp, Artificial Sequence
  ENSG00000139496_9 (sequence is synthesized)
ttaagaacccagaagacaccacctggacttcaacatgaatatgcagctcctgctgactacttcagaatcttggttcagcaatttgaggtacagcttcagcagtacaggcagcagattgaa

SEQ ID NO: 353757 - DNA, 120 bp, Artificial Sequence
  ENSG00000139496_10 (sequence is synthesized)
atttgtagctttagcggcacaacttcagtctattcatgaaaatgtaaaggttctgaaagaacagtaccttggctacaggaaaatgttcttgggagatgctgttgatgtgtttgaaacaag

SEQ ID NO: 353758 - DNA, 120 bp, Artificial Sequence
  ENSG00000139496_11 (sequence is synthesized)
gcgagcagaagccaagaagtggcagaacacacccagagttactactggacccactcctttcagcaccatgccaaacgcagcagccgttgccatggctgcaacacttacacagcagcaaca

SEQ ID NO: 353759 - DNA, 120 bp, Artificial Sequence
  ENSG00000139496_12 (sequence is synthesized)
gcctgctacagggccacagccatctctgggagttagttttggaacgccattcggctcaggtattggcactggcttgcaatcaagtggcttaggttcttcaaaccttggaggatttggaac

SEQ ID NO: 353760 - DNA, 120 bp, Artificial Sequence
  ENSG00000139496_13 (sequence is synthesized)
tagctctggttttggatgcagcaccacaggggcctccacatttggatttggaacaacaaataaaccctcaggaagtcttagtgcaggctttggcagctcaagtacatctgggtttaactt

SEQ ID NO: 353761 - DNA, 120 bp, Artificial Sequence
  ENSG00000139496_14 (sequence is synthesized)
cagcaatcctggcatcacggcatcagctggtttgacttttggggtgtccaatcctgcctctgcaggttttggaacaggaggacaactccttcagttgaagaaacctccagctggaaacaa

SEQ ID NO: 353762 - DNA, 120 bp, Artificial Sequence
  ENSG00000139496_15 (sequence is synthesized)
aagaggaaaaagataaacatgggttgatgtgttgagagaatccatagcagcaccgttcattctatgagtctatttttctaatgatgcagtaattaaattgcatcccaggagatttataaa

SEQ ID NO: 353763 - DNA, 120 bp, Artificial Sequence
  ENSG00000139496_16 (sequence is synthesized)
gttttgatatttttccctactctggaatttgaactttcttcatgtttgccatactgaacatcttttttcttgtggaatttaaagtccagctgtgttttctttttaatttgattctcagtg

SEQ ID NO: 353764 - DNA, 120 bp, Artificial Sequence
  ENSG00000139496_17 (sequence is synthesized)
taagaaatgttctgattacatcactgattggtaatggttagaaaccattaacctaaaacttactatttaacctagtgtttttgttgatgaggtttacattatgtgaatacatgcacattt

SEQ ID NO: 353765 - DNA, 120 bp, Artificial Sequence
  ENSG00000139496_18 (sequence is synthesized)
gtttcttatacaggtggtgtgaactctagggcctatactagaatcaatttgttccttgttaaaggccttttgaattatactgcagggcatcttgtgaatatgtatgtaaatatatacaga

SEQ ID NO: 353766 - DNA, 80 bp, Artificial Sequence
  ENSG00000139496_19 (sequence is synthesized)
tgcagggcatcttgtgaatatgtatgtaaatatatacagaataatacacacagttgtgtgtgcatataaaatacatattt

SEQ ID NO: 353767 - DNA, 120 bp, Artificial Sequence
  ENSG00000139496_20 (sequence is synthesized)
ctctctttacaaggatcatcactggtagtagaccttaaaaaatggtaaatgctaagatgaaaagaaatgcaaggaattggaattaagggctagtgataggcccaatcattgactgtcatc

SEQ ID NO: 353768 - DNA, 120 bp, Artificial Sequence
  ENSG00000139496_21 (sequence is synthesized)
gataggtggcaattttagagatactaaatatgaaagaaaaaaatcttaataaaatacaaaacatggaaacataaattacagttggatgaaagaggtaaaaaagtaaaaccccatgtgcag

SEQ ID NO: 353769 - DNA, 120 bp, Artificial Sequence
  ENSG00000139496_22 (sequence is synthesized)
acaagagcaaaactccgtctcaaaaaagatgaaaataaaataaaatatatatttacaggcctacaacttttgcctcagactgttccccttttctaagggtattcaagttttcacctttta

SEQ ID NO: 353770 - DNA, 120 bp, Artificial Sequence
  ENSG00000139496_23 (sequence is synthesized)
ccccttttctaagggtattcaagttttcaccttttaagcttcatatcctcagtgcttgtagaatgatgagcttagaggtaccaggtcattgcagttgtttgcttaaagacttattgaaat

SEQ ID NO: 353771 - DNA, 120 bp, Artificial Sequence
  ENSG00000139496_24 (sequence is synthesized)
ggttactggcgtaaatacttggccaactcaactttattgcccctgatcttttccatttttgtttccaccttaacctatagcagctcctccaaatgaggaatgctgtaagtaagactcatc

SEQ ID NO: 353772 - DNA, 120 bp, Artificial Sequence
  ENSG00000139496_25 (sequence is synthesized)
aaacagattttaaccattttattatcctgtgtgtccttacattgcttctgtgagatgtttttttcttatctgagatgaactttcaggagcctatttgaactccagactggtgttctgggg

SEQ ID NO: 353773 - DNA, 120 bp, Artificial Sequence
  ENSG00000139496_26 (sequence is synthesized)
caaagagctattagccaaactgattctatgcaggtgaaggatgcactaaagttctcactttagtgagaacttttctagctattccaatacagagttctttcttatagggctattgatatt

SEQ ID NO: 353774 - DNA, 120 bp, Artificial Sequence
  ENSG00000139496_27 (sequence is synthesized)
gacaccaaatggagtggcttctcagcctcttaatgtcttaagtaagtgcttaatttggaatagagaaaccagtatattttaaaaaagaaaaatattctttgtagcaactgtaaattctcc

SEQ ID NO: 353775 - DNA, 120 bp, Artificial Sequence
  ENSG00000139496_28 (sequence is synthesized)
cattataacagtgaacagagctccaggtaataacgcataggcatgtcaggttgcatctgtatatttgactacattagtattagtgacatcaggtggatataaaagaaaacccttggaaag

SEQ ID NO: 353776 - DNA, 120 bp, Artificial Sequence
  ENSG00000139496_29 (sequence is synthesized)
agaactgccttagccatgatttcgttagtagacctatttatgattcaattgcaattttcagataggatgtgaacatggaatttcattgaaaatagtttaattttttatataaaaggtttt

SEQ ID NO: 353777 - DNA, 120 bp, Artificial Sequence
  ENSG00000139496_30 (sequence is synthesized)
gtatataatgtgtgtcagtgactattttcaaaatcattttcatcaagacaccttttttctaaaataggcattgcatacacatatgcacacgtatgtgcatgtgccacacattttttgtat

SEQ ID NO: 353778 - DNA, 120 bp, Artificial Sequence
  ENSG00000139496_31 (sequence is synthesized)
aatgttgggtttgattataaaagtgttgtcaaatgttttatttatctgcatatagcagtggttggcttttttgaattgaaatttttgcgcattgatgcattgaaataaggaaaattattt

SEQ ID NO: 353779 - DNA, 120 bp, Artificial Sequence
  ENSG00000139496_32 (sequence is synthesized)
atctctgagcactaaacttatttttgcatatttctgtaatattgcagtccccagatccagaacatgggaagttagggaaaatgtgtgattttgtgttttgaattactgtcagaattacat

SEQ ID NO: 353780 - DNA, 120 bp, Artificial Sequence
  ENSG00000139496_33 (sequence is synthesized)
acacaattacaacaaactttttttaaaagacatttcattgtactgcaaaaatctgaatatttatatttcttgtttttttctttatatgttttgcattttaatatgttgagccactggaaa

SEQ ID NO: 353781 - DNA, 120 bp, Artificial Sequence
  ENSG00000139496_34 (sequence is synthesized)
tttgtaacagattaatttgttataggagtttaaatgtgttgtcattgtctccattgtctttgtccagagcctattattatggaaacaataaaatttattgtgtcagttgctttgattctt

SEQ ID NO: 353782 - DNA, 120 bp, Artificial Sequence
  ENSG00000139496_35 (sequence is synthesized)
gtaatgtagcagagcttaagaatagaactcaattatcactttttgtgaacaagttggaattgtcatgttactgtgtaattgatttgctttacaatgaacaataaatttaataaaataaaa

SEQ ID NO: 353783 - DNA, 120 bp, Artificial Sequence
  ENSG00000139496_36 (sequence is synthesized)
gcaaatttaaaggtgtaaattatttaatttaaaagtatgtgttgttatttccagtaacccaaaaagttccctccctgattcagtttttactccctggatgaagtgtgcaagcctaactaa

SEQ ID NO: 353784 - DNA, 120 bp, Artificial Sequence
  ENSG00000139496_37 (sequence is synthesized)
ctggaaaacaacacatctgtttatcagcaaagttttggactggatcagctgcaaacacaagaacgccagccactacatctgcagctacaacaggcttcagtttaggattcaataaacctg

SEQ ID NO: 353785 - DNA, 120 bp, Artificial Sequence
  ENSG00000139496_38 (sequence is synthesized)
ctctgtggtcttctaataattttaataaattgagtgatctttctactcttctctcttctaatatttcacagagctggagtatagaaaaaagtgtgtatcacagatggtgacttatcggag

SEQ ID NO: 353786 - DNA, 120 bp, Artificial Sequence
  ENSG00000139496_39 (sequence is synthesized)
ttaatagatgccaatcttcttagataagaaatcttcatgtcagatgaattgttaaaattattttatagatcctatttacaataaatttatgttttttataaagagctttgaaatcatcca

SEQ ID NO: 353787 - DNA, 120 bp, Artificial Sequence
  ENSG00000139496_40 (sequence is synthesized)
tgaaatcatccagagaagccatacgtgcttttttgctatattttcttgtgtcttaatactctaatactctattaaaactcagctgtcaactttttaaaatctcaatgaccttaatacatg

SEQ ID NO: 353788 - DNA, 120 bp, Artificial Sequence
  ENSG00000139496_41 (sequence is synthesized)
tgagtagctgttccaatacaatctaaaattgtgatggacacgattataaacatacctgataaaaaaggcagggtagtcttagcaataattatacatcaattagatattgaatattgtgaa

SEQ ID NO: 353789 - DNA, 120 bp, Artificial Sequence
  ENSG00000139496_42 (sequence is synthesized)
tctacttaatgttatttgctgtaatgctataaatgccctttagaacatggtgtttcactagtgaattacatttaagaataacattagattctgaaatcatgactgtaccatttattgttt

SEQ ID NO: 353790 - DNA, 120 bp, Artificial Sequence
  ENSG00000139496_43 (sequence is synthesized)
taaagtcagagatcatccatccattctttgaatttttcatatatgatactgataggtggtgcattctcattttcctcatacatagtgattacaaagtacccacattcaggatgaagtatg

SEQ ID NO: 353791 - DNA, 120 bp, Artificial Sequence
  ENSG00000139496_44 (sequence is synthesized)
cttttattgactgaaggtatgttgaagatcaataggcttgtttgtatgtatgttgactgtaaacagaatacaagccctctaaaccaaattttgaagatgatacatgctagaattgtacct

SEQ ID NO: 353792 - DNA, 120 bp, Artificial Sequence
  ENSG00000139496_45 (sequence is synthesized)
ttccaaggtgaacagaacagcaagagcaggaaaaagatgttttgagatgtggattgcacattaaggagcaactgggaagttgaacagatgaaaataattggtgacatggaaagcagattg

SEQ ID NO: 353793 - DNA, 120 bp, Artificial Sequence
  ENSG00000139496_46 (sequence is synthesized)
ttttatttcttggtttagttacacttctaattagagaaacattttttgtggtcattctacagtgttttatttggtcctgtgtctttcggaggttaatagttatcttaatcctgccatccc

SEQ ID NO: 353794 - DNA, 120 bp, Artificial Sequence
  ENSG00000139496_47 (sequence is synthesized)
ttttgtcaggtttgaagcttgacatggaaaaatagtcttaatcgatattgatttttttattttaatcattcataaatttcttagtaatgcttactattcaatagcatgtgtctttctgag

SEQ ID NO: 353795 - DNA, 120 bp, Artificial Sequence
  ENSG00000139496_48 (sequence is synthesized)
agttccatatagtccagtagtacattataatacacacaaaaaaattaatacatatttagattgcattcaagctacctatactagggaagcattctctggttttcactattggcagtttaa

SEQ ID NO: 353796 - DNA, 120 bp, Artificial Sequence
  ENSG00000139496_49 (sequence is synthesized)
aaaattgttcttcacatttggagatgacagaattgacttgccataagtaaagggttgatgatagatttatgccaaatcctccatatcccgtggctggacccatgtgaatagtggctcgca

SEQ ID NO: 353797 - DNA, 120 bp, Artificial Sequence
  ENSG00000139496_50 (sequence is synthesized)
cgagcactgtctggtagctctctagctggctggagtgtaggattgcattgttaagttatggagggaaaaagtcattatgggattgattcctttgaggattgatatttcttcttaaaagga

SEQ ID NO: 353798 - DNA, 120 bp, Artificial Sequence
  ENSG00000139496_51 (sequence is synthesized)
ttcaatcccataattatgaccatcagctctcatgattacctaaccagttaatcaaaccaaccatagtactagtttactttttagagccagtattaatcctaaagtagataagtgtagatt

SEQ ID NO: 353799 - DNA, 120 bp, Artificial Sequence
  ENSG00000139496_52 (sequence is synthesized)
tggttaagtgttctttaaacatagtgaatttccattctattaaatagaacttgagaaatgtcagttatataaaaagttatgttgtaagtgaatatattctatgataaatacctaaacttg

SEQ ID NO: 353800 - DNA, 120 bp, Artificial Sequence
  ENSG00000139496_53 (sequence is synthesized)
aagcaaaatctcctgtcaagggtttgtgtgtgtgtgtgtgtttaactttcttatctatagattattattttgagaaattcataggttttcacttatacattttgagcttgtggacatatg

SEQ ID NO: 353801 - DNA, 120 bp, Artificial Sequence
  ENSG00000139496_54 (sequence is synthesized)
gagatgtgtgttcattctctaaatgagtgcctactatgtgctgggctcgaggaatacaaaggtagacaatatagattttgtctttgccctctgtggtggttgacaatgttagcttaatct

SEQ ID NO: 353802 - DNA, 120 bp, Artificial Sequence
  ENSG00000139496_55 (sequence is synthesized)
ggagtattcttgaggagccttttgctcataggctttaattttgtctgtgacttttgccaggctttggggaaattgactgccttcactcttccctgaaactttgaagtccacataagggct

SEQ ID NO: 353803 - DNA, 120 bp, Artificial Sequence
  ENSG00000139496_56 (sequence is synthesized)
ttctcatcagatggcagaaattataatttattaacctaaacaaccttacagtgttttcgctttgaattgtatgaattcttagaactgagaagctaaacaacagtgataacaattttacat

SEQ ID NO: 353804 - DNA, 120 bp, Artificial Sequence
  ENSG00000139496_57 (sequence is synthesized)
tatcttttctttctccttttgtttctctaaaggtctcccaggccttcccagtcaaaattttcgttatttttagtcatgtcaccatgatgtgagatttctgagctctgttagatacattta

SEQ ID NO: 353805 - DNA, 120 bp, Artificial Sequence
  ENSG00000139496_58 (sequence is synthesized)
gaaatgtccctatttatcaaatggtgttttgtaccccataagttatcccttatgccctgtgacttctgtgaaatctttgtttttaagtgccagtaacaaattttagaccatctagatgag

SEQ ID NO: 353806 - DNA, 120 bp, Artificial Sequence
  ENSG00000139496_59 (sequence is synthesized)
ggtagagagagcttatgcattgtttttatacatcactgttgatctatacaagatttgagttatcagaagggttttgcttttatttgcatatgaaatttttattaacatgaatatgggcac

SEQ ID NO: 353807 - DNA, 120 bp, Artificial Sequence
  ENSG00000139496_60 (sequence is synthesized)
agagcaaatagcttcttagactgctgccttctgaaggtggcttctgtatctttctcagaggaggaggaatagacttaaacgacttctttgtcctccttcaattttttttttaatgaaaaa

SEQ ID NO: 353808 - DNA, 120 bp, Artificial Sequence
  ENSG00000139496_61 (sequence is synthesized)
gtatactagggcttaggcatgtgtgatttacagttatttgttctgaaggctgcagagaattgaaaatccagcaggctatttgtgtatgaaatcatgagcatcgataacgtggataacgta

SEQ ID NO: 353809 - DNA, 120 bp, Artificial Sequence
  ENSG00000139496_62 (sequence is synthesized)
gttccatgttggcagaacttgacacttgtctataagtgcttcccaagcctcctgaaaaactgaagacatttacattaggcttttcagtataattttaatttaggataggttttttagcaa

SEQ ID NO: 353810 - DNA, 120 bp, Artificial Sequence
  ENSG00000139496_63 (sequence is synthesized)
tgtatctgggattgagttttgctattgtgttttgacactttaagagttcttgatgtttacataataagactttcttatgtgacttagctgctgttttaaggagagccaagacgttttgtt

SEQ ID NO: 353811 - DNA, 120 bp, Artificial Sequence
  ENSG00000139496_64 (sequence is synthesized)
aggaattcctaatttttagcttagtgtaggtttggacatttaaggtgtagtgttaaataggaaacattaagtatttcatcttagtttcttgtggttttgtgattttgttgtatttaataa

SEQ ID NO: 353812 - DNA, 120 bp, Artificial Sequence
  ENSG00000139496_65 (sequence is synthesized)
ccaaaggaacattccccattaaatcagtaagagtaaaatttttcaaactggggaaaacgcattttaggttttttaaagaaaaattattttaaaatgtgacttagaaataaccatactaat

SEQ ID NO: 353813 - DNA, 120 bp, Artificial Sequence
  ENSG00000139496_66 (sequence is synthesized)
tacattaggcatttggggtgatcatggaaaattataaaatatttttagcactttagtcctttttctgttaatgcagttttacttttaagaaagtaaaatttattctggaaaatatgaatt

SEQ ID NO: 353814 - DNA, 120 bp, Artificial Sequence
  ENSG00000139496_67 (sequence is synthesized)
acagcgctaaacctggttttgttgtgtgtgaatatattatatggtaacttttgtaaaatgttactctacatgaagatttcactttggccagtcattggtatatatcactacaaacttaat

SEQ ID NO: 353815 - DNA, 120 bp, Artificial Sequence
  ENSG00000139496_68 (sequence is synthesized)
tttatttatggaaataagaacctctcattggatgactattcaaatttcaaagcagacttcttgaattgtttacgtaacttttgcctgaaggatttagactgctttctaatagtgaaacta

SEQ ID NO: 353816 - DNA, 120 bp, Artificial Sequence
  ENSG00000139496_69 (sequence is synthesized)
atatatatggtggccagagtgtaatatatgctaatactttggcatgggagatatttatcatgagtttttactattaaaaaatgttatacatttgcctacgagttttataaatgatgttgc

SEQ ID NO: 353817 - DNA, 120 bp, Artificial Sequence
  ENSG00000139496_70 (sequence is synthesized)
cttcagaatttgtgtgaaggtacaaaactaaaaatatcatgtatctgatgtgcaatggaaagtcttgtcatcattagatatgagttcttgattatattctgaatattgatgattagaaaa

SEQ ID NO: 353818 - DNA, 120 bp, Artificial Sequence
  ENSG00000139496_71 (sequence is synthesized)
atcttatgttctgttgctcttaacaacagacccacacacaacaaaaagcatgctatttgagtaactcttacgacttacaaggctgagggctgtggtgtgcattattctttagggtcttcc

SEQ ID NO: 353819 - DNA, 120 bp, Artificial Sequence
  ENSG00000139496_72 (sequence is synthesized)
accagcagtgcctcctattaacctgtgacaaacaagtctctcaatgttaaagaactggacatgtgttttttatgttttttgttaggaatcagaaagtataataatatgcttggtttcttt

SEQ ID NO: 353820 - DNA, 120 bp, Artificial Sequence
  ENSG00000139496_73 (sequence is synthesized)
ttcctatagtaacattttacaaaagagctgctaggcaggtattttattctcaaagtgatctcaaactggatgtaaaattttaaattatttttttaatagtagtataagaattctggctgc

SEQ ID NO: 353821 - DNA, 120 bp, Artificial Sequence
  ENSG00000139496_74 (sequence is synthesized)
tattagttattgtttgttttctgggttagaagctattcgaaaagtccagtttctgtcccagtgtagcaaaatgtagttcctcggttgtttttctttaaatgctttataattttacactac

SEQ ID NO: 353822 - DNA, 120 bp, Artificial Sequence
  ENSG00000139496_75 (sequence is synthesized)
ctttttaatatacaaacctcattcttcattggataacttgaaggctttgatttctttaaaaatttaaattttagtgtgtatattactttgacagttccctcatctttgagatgcactgat

SEQ ID NO: 353823 - DNA, 120 bp, Artificial Sequence
  ENSG00000139496_76 (sequence is synthesized)
cactgtgcttgaaaaagacaatactgaagattgtactatgaagtttattgaataattttcataaattatttatccaaatgagagatttttagatttttgtattctgcttagttttaaaaa

SEQ ID NO: 353824 - DNA, 120 bp, Artificial Sequence
  ENSG00000139496_77 (sequence is synthesized)
aaaaaaatagtagtttaaaagagaggctagtaagtttgatgctattcttgccaaacaaactcagccaaaatctttaaagtaacaagagggaaaaggatgactaatcgttctgcttctgag

SEQ ID NO: 353825 - DNA, 120 bp, Artificial Sequence
  ENSG00000139496_78 (sequence is synthesized)
tacattttccaaaacgttggaaagaaacttctgaattgaaatcttgaatgtattgaatctgtcaaggtacacagcggtgcctttgtaaatgttcattactttatttaatcaggtgataag

SEQ ID NO: 353826 - DNA, 120 bp, Artificial Sequence
  ENSG00000139496_79 (sequence is synthesized)
ggcaacaaatcacaggttttaactgaatttcgaaaacccagtgttacagaaaccaatgaaataggaagaaaaatacagttctgagcagtccttgaatcaacaaatatctacctttaagga

SEQ ID NO: 353827 - DNA, 120 bp, Artificial Sequence
  ENSG00000139496_80 (sequence is synthesized)
acttctaattctcattttgtaaatcccattattcaagaaaagcacattaagcttagagtaggtttgatcaagatgtttagaattaaggaaataaaacttgcctttggtgtttaaggacaa

SEQ ID NO: 353828 - DNA, 120 bp, Artificial Sequence
  ENSG00000139505_0 (sequence is synthesized)
tttcgttatgtgatatccctctacaggatgagttttaatggatgctggtgctaacatcgtatgaaattgaggtaggaggcgggactctgacaccagaccagattgaggactagctaatca

SEQ ID NO: 353829 - DNA, 120 bp, Artificial Sequence
  ENSG00000139505_1 (sequence is synthesized)
tcatactttacataaggaatccgtaggattggagagttgattgtttcaaataaggctggtttccttatttggttatttccttagaataataactccaaatctgattatttccttagaata

SEQ ID NO: 353830 - DNA, 120 bp, Artificial Sequence
  ENSG00000139505_2 (sequence is synthesized)
cattcttatgagtagaactgcagctcaaactaaatttggtgctgtccagtggtatggcgatggacttcagaacatcctccactcttgccctcaccccacaagaaccctttactcgggatc

SEQ ID NO: 353831 - DNA, 120 bp, Artificial Sequence
  ENSG00000139505_3 (sequence is synthesized)
cattctcacgcagtcttcctccccgaccgccccgcgcgtccgctcggcgggatgacaaagaccgcctcgggtggggtggtgagcagtaccggcctcctccagcagggggcgctgtgggat

SEQ ID NO: 353832 - DNA, 120 bp, Artificial Sequence
  ENSG00000139505_4 (sequence is synthesized)
ccgccgctgtccgggacgaaccagcaagccgctctcggtccacacacgctctgtctgcctgccccgagtcccccgggaggccgcggggtttggggaagtgtttctaggagacggcgctca

SEQ ID NO: 353833 - DNA, 120 bp, Artificial Sequence
  ENSG00000139505_5 (sequence is synthesized)
ccggctgcacctgcgccgttgacgccaccggggccggcagacagacccgcggcgctggctggtggagggagttcccgcttgctctctgtcgctgtcaccgccctgtttctgtagccgtat

SEQ ID NO: 353834 - DNA, 120 bp, Artificial Sequence
  ENSG00000139505_6 (sequence is synthesized)
ggtacgcctgtgagaccggctgccggctgacgtctccttgcgatggagcatatccggacgaccaaggtcgaacaagtaaaattacttgaccgattcagtaccagcaacaagtcattaaca

SEQ ID NO: 353835 - DNA, 120 bp, Artificial Sequence
  ENSG00000139505_7 (sequence is synthesized)
ggaacactgtatcttacggctacacatctattatttatcgactctcatcaaaaagaaacctggatattacaccaccatattgcctcagtagagaaacttgctttgactacttctggatgc

SEQ ID NO: 353836 - DNA, 120 bp, Artificial Sequence
  ENSG00000139505_8 (sequence is synthesized)
ccccttgtgatacagtgcaagaacttcagaactgtgcatttcattgttcccagagaaagagattgccatgatatttacaactctttgctacaactgtcaaaacaagcaaaatatgaagat

SEQ ID NO: 353837 - DNA, 120 bp, Artificial Sequence
  ENSG00000139505_9 (sequence is synthesized)
ctctatgcattttcttataatcccaaacaaaatgattcagaacgactacaaggctggcagctcattgatctcgctgaggaatataagaggatgggagtgccaaactcacactggcagttg

SEQ ID NO: 353838 - DNA, 120 bp, Artificial Sequence
  ENSG00000139505_10 (sequence is synthesized)
tctgatgccaaccgggactacaagatttgtgaaacttaccccagagaactttatgttccccggatagcaagcaaaccaataattgttggtagttccaagttccggagcaagggaagattc

SEQ ID NO: 353839 - DNA, 120 bp, Artificial Sequence
  ENSG00000139505_11 (sequence is synthesized)
ccagttctttcctactatcatcaagataaggaggctgccatttgtcgatgtagtcagccactctctggattcagtgccaggtgcctggaggatgaacatttgcttcaagccattagtaaa

SEQ ID NO: 353840 - DNA, 120 bp, Artificial Sequence
  ENSG00000139505_12 (sequence is synthesized)
gccaatccagtcaatcgctatatgtacgtcatggataccaggccaaaactgaatgcaatggccaacagagcagctggaaaaggttatgaaaatgaagacaactattccaatattagattt

SEQ ID NO: 353841 - DNA, 120 bp, Artificial Sequence
  ENSG00000139505_13 (sequence is synthesized)
cagtttgttggaattgaaaatattcatgtcatgaggtccagccttcagaaattattggaagtcaatggcactaaagggctttctgtcaatgatttctactccggtttggagagctcggga

SEQ ID NO: 353842 - DNA, 120 bp, Artificial Sequence
  ENSG00000139505_14 (sequence is synthesized)
tggcttcgccatatcaaagctgttatggatgctgcaatcttcttggccaaagcaataacagttgaaaatgcaagtgtgttggtgcattgttccgatggttgggataggacttcccaggtt

SEQ ID NO: 353843 - DNA, 120 bp, Artificial Sequence
  ENSG00000139505_15 (sequence is synthesized)
tgttccctgggttctcttttattggattcctactacaggacaatcaaaggattcatggttttaatagaaaaggattggatctcttttggacataaattttcagagaggtgtggccagttg

SEQ ID NO: 353844 - DNA, 120 bp, Artificial Sequence
  ENSG00000139505_16 (sequence is synthesized)
gatggtgacccaaaggaagtctcaccagtgtttactcagttcttggaatgtgtgtggcatttgaccgaacagtttccacaagcctttgaattcagtgaagcatttcttcttcagatccat

SEQ ID NO: 353845 - DNA, 120 bp, Artificial Sequence
  ENSG00000139505_17 (sequence is synthesized)
gagcatattcattcatgccagtttggaaacttccttggaaattgtcagaaggaaagagaagagctcaagttgaaggagaagacttattccctgtggccatttcttttggaagaccaaaag

SEQ ID NO: 353846 - DNA, 120 bp, Artificial Sequence
  ENSG00000139505_18 (sequence is synthesized)
aagtacttaaatcctctctacagttccgaatctcacagatttacagttttggagccaaatacagtatctttcaattttaagttttggaggaacatgtaccatcaatttgatcgaacactg

SEQ ID NO: 353847 - DNA, 120 bp, Artificial Sequence
  ENSG00000139505_19 (sequence is synthesized)
catcctaggcagtctgtatttaatataattatgaatatgaatgagcaaaataaacaattagagaaagatattaaagacctagaatctaaaattaaacaacgcaaaaataagcaaacagat

SEQ ID NO: 353848 - DNA, 120 bp, Artificial Sequence
  ENSG00000139505_20 (sequence is synthesized)
ggcatcctcaccaaggaattgttacattcagttcatcctgaatcacctaacctcaaaacttccctgtgttttaaagagcagactctgctacccgtaaatgatgctcttcgaactatagag

SEQ ID NO: 353849 - DNA, 120 bp, Artificial Sequence
  ENSG00000139505_21 (sequence is synthesized)
ggcagcagcccggcagataatcgttatagtgaatatgcagaagagttttctaaatcagaacctgctgtggtcagcttagagtatggtgtggcaagaatgacttgttagactcatagagtt

SEQ ID NO: 353850 - DNA, 120 bp, Artificial Sequence
  ENSG00000139505_22 (sequence is synthesized)
ttttctgcaatgattgcagtacaagaaaaggattattgtgaggatggtctgtaagcataaccaaaaggaatttgtctaataacaattttagggtttaacagtaggctaatagttgaagga

SEQ ID NO: 353851 - DNA, 120 bp, Artificial Sequence
  ENSG00000139505_23 (sequence is synthesized)
tgagagaaataagtcattttaattgcatttccagcaaggaatgacattcagttctgtaagaaatgagtggtatttgatgtatttactcaaaacacaatttgcactgtacactagtgaatt

SEQ ID NO: 353852 - DNA, 120 bp, Artificial Sequence
  ENSG00000139505_24 (sequence is synthesized)
gacgtttatgatttatgttaattcagccaaacataaataaccttccttaagtacaatttaacttcaagaaaacaaaatttgacaacatagtttcttaataaatgatatggcatgtacttt

SEQ ID NO: 353853 - DNA, 120 bp, Artificial Sequence
  ENSG00000139505_25 (sequence is synthesized)
caattatgtagctttgtaactatgaatatttacatattttgccttttagtgatatttaatgttaaagtgccatgaaaaatatttctaagaaagccttaaattcccagtggattctttacc

SEQ ID NO: 353854 - DNA, 120 bp, Artificial Sequence
  ENSG00000139505_26 (sequence is synthesized)
cttaagttttacagcctacaacaagattttttgttttgtttttcttctggtcagccttgttttgtttgtaaagaattgtgctctcattactgctgggggtgcatgctacaatacttctat

SEQ ID NO: 353855 - DNA, 120 bp, Artificial Sequence
  ENSG00000139505_27 (sequence is synthesized)
ataaacacttgtagaagtacactgttcacgtttagcctgccccacttttgtattcaaaattaatgaaactgaaggtttattctgatcataatttgtttagtgctacatttgataatttat

SEQ ID NO: 353856 - DNA, 120 bp, Artificial Sequence
  ENSG00000139505_28 (sequence is synthesized)
tatttacagcttagaatattgatttcttgaatacgtataagcacatttgactgtcttttatatatggattactgcattccattgattcttattttgtggttggctttatttctttcacaa

SEQ ID NO: 353857 - DNA, 120 bp, Artificial Sequence
  ENSG00000139505_29 (sequence is synthesized)
ctgtgtaagtttaaagagctaaagctctaaaactgttctgagaaacaatgaatagtacatgtatatgtatatttttaaactgccttattgctcaatgagttgctgttcctggagtatcta

SEQ ID NO: 353858 - DNA, 120 bp, Artificial Sequence
  ENSG00000139505_30 (sequence is synthesized)
actttcagtttactcaaaaacttttgggtaaataaaaaagggaagtacagatagtttaggttgtgcatggttgcatgaattttgaagtcatttctatgtggagcattatttttcttcttg

SEQ ID NO: 353859 - DNA, 120 bp, Artificial Sequence
  ENSG00000139505_31 (sequence is synthesized)
ttaaatatagaaaaaaaaagagattctagtacaaagttactgtttaacaaaagcaacataaactctgggaaagatttcattttgccatgttatatttactgtttattctgtgtactagta

SEQ ID NO: 353860 - DNA, 120 bp, Artificial Sequence
  ENSG00000139505_32 (sequence is synthesized)
catatctttaaattaccaaaaaacaagaaacaaaacataaaaaccccaaaactatcacttggaattagcaatatcacccaactggctttaaaattgaaaatttaaataacatggtggcat

SEQ ID NO: 353861 - DNA, 120 bp, Artificial Sequence
  ENSG00000139505_33 (sequence is synthesized)
gaagtacaattcgagtattaggcaatttgcatagtgttcctcatgctactttctgttacacctctattatattagttttgaatataaacatctttttcagaccaaaaaaaactttattgt

SEQ ID NO: 353862 - DNA, 120 bp, Artificial Sequence
  ENSG00000139505_34 (sequence is synthesized)
atgagagcttatcttatcctgtttatttttccaatgcttttctgtaatacattatgtaatttaaaaaatattcctttttaaacagcaacagaaatgcactataaaatatagtatgtgatt

SEQ ID NO: 353863 - DNA, 120 bp, Artificial Sequence
  ENSG00000139505_35 (sequence is synthesized)
aaccaatcctgcttccatatttaagcactgggaatggaaacttaatctctgtgactacaaagggaagtttttgtgccttggtgttccagtcactgattgtggttttagaatcttctgtgg

SEQ ID NO: 353864 - DNA, 120 bp, Artificial Sequence
  ENSG00000139505_36 (sequence is synthesized)
ctgacttcttgtattcaactctggtttattatcttaatcttcaacttcagacatatatttgtgtgtttatatgctcacaggtggactgagaaatcagttacatcttaagtgacctacagg

SEQ ID NO: 353865 - DNA, 120 bp, Artificial Sequence
  ENSG00000139505_37 (sequence is synthesized)
gtatatgttggcaaaagcagactgtgtatatgtcttataaagttgaatttatgttcagtgtgtttggaagtgtatagcatgtaaattacttcatatatgatttaaaggtaattaaatgtt

SEQ ID NO: 353866 - DNA, 120 bp, Artificial Sequence
  ENSG00000139505_38 (sequence is synthesized)
cacattttactttgaatgtttttcttctggataaaacaaatggaatcaagttgtagttgttttttttttcttctcacctaggcaagtagacttgcccattacattaacataacagcataa

SEQ ID NO: 353867 - DNA, 120 bp, Artificial Sequence
  ENSG00000139505_39 (sequence is synthesized)
ggtttgaggagtttattttccaaaagtttgttgataaataatacctgtttcatacaaaaataatttccagaatatttaaaataggtatagtgggctaaaaggcccatcagatgtaggtaa

SEQ ID NO: 353868 - DNA, 120 bp, Artificial Sequence
  ENSG00000139505_40 (sequence is synthesized)
taatgtcattaagttttcattttgttcctgtcacttgcttatattacaatcactatttttttgtgcccttgccaacttgatggaaggcagggtccattgagtacaaacattcgaggtgaa

SEQ ID NO: 353869 - DNA, 120 bp, Artificial Sequence
  ENSG00000139505_41 (sequence is synthesized)
atgtctctccaaaggcagatctggatgtaaatatgaggaagaaaataactggctgacaagaggataattttattgagggtgttttgaaaaggtcagctaggctagaagtagctcagggaa

SEQ ID NO: 353870 - DNA, 120 bp, Artificial Sequence
  ENSG00000139505_42 (sequence is synthesized)
tcttgagtaaagatgaagggaactcttttaaaacaaattcaatttatttggtcgggtagcagagcagggaggtggtgtcagtcaagcctgttttgaaacattttttgcagaaggtcagct

SEQ ID NO: 353871 - DNA, 120 bp, Artificial Sequence
  ENSG00000139505_43 (sequence is synthesized)
ttaaaatattgaaaaatttccagttgacatgctaagttggattaaatgctgatcatttataaaactatatagttgctgcaaaagtaattggggcttttgccattgaaagtgatgacaaaa

SEQ ID NO: 353872 - DNA, 120 bp, Artificial Sequence
  ENSG00000139505_44 (sequence is synthesized)
accgcaattacttttgcaccaacctaatactacagttgcagacttttattagtgacgctgatcttcattagtcaagttttagttattttgttggcttttccatgtagaattccaagtgac

SEQ ID NO: 353873 - DNA, 120 bp, Artificial Sequence
  ENSG00000139505_45 (sequence is synthesized)
attaacatactttgattaattaaagaaaatttggagactgtttaagatatatgtctagatatcaatgtaaactataagctttaggaacttacatctagaagaaagcctggaatctagaat

SEQ ID NO: 353874 - DNA, 120 bp, Artificial Sequence
  ENSG00000139505_46 (sequence is synthesized)
aattatctcaaaaaaaagtatatataccattgtacttgatataagaaaatgtaaacatgaaaccttgacattttaataaacagtatttgtgctactctagttatttctaggaaagtaaaa

SEQ ID NO: 353875 - DNA, 120 bp, Artificial Sequence
  ENSG00000139505_47 (sequence is synthesized)
aaaatccagaatgatgagaaaataagagaaagcaatgagaaaaagcgactgaatgcaatggccaacagagcagctggaaaaggttatgaaaatgaagacaactattccaatattagattt

SEQ ID NO: 353876 - DNA, 120 bp, Artificial Sequence
  ENSG00000139508_0 (sequence is synthesized)
gcgccgcgctgaggccgaggtccgcagggccgcggggaagccgagggctgccggagaaccctgcaggtgtcactcgggacgcggaagtgcgcttgccgaggtttgctttacaatacgctt

SEQ ID NO: 353877 - DNA, 120 bp, Artificial Sequence
  ENSG00000139508_1 (sequence is synthesized)
gagactccccgacaagcgtaatttggtcgagttcgacgggaaagtactctccccaccccagcgccggccgcgtagtccgaggttactgtccccggcgcgtcctctgttgccccagtccag

SEQ ID NO: 353878 - DNA, 120 bp, Artificial Sequence
  ENSG00000139508_2 (sequence is synthesized)
aggctgcccttgaacccgggcgcgcacgagcgcagggcatccgaggcgacagcccctggcacggcccgacctgtacccagcctggcaggaagactgtaatcgtgggaatacagctaccta

SEQ ID NO: 353879 - DNA, 120 bp, Artificial Sequence
  ENSG00000139508_3 (sequence is synthesized)
cccaggcaatatgaagattttatttgtagaacctgccattttccttagtgcatttgctatgactttgaccggtccactgacaacgcaatatgtttatcggagaatatgggaagaaactgg

SEQ ID NO: 353880 - DNA, 120 bp, Artificial Sequence
  ENSG00000139508_4 (sequence is synthesized)
caactacactttttcatctgatagcaatatttctgagtgtgaaaaaaacaaaagcagcccaatttttgcattccaggaggaagttcagaaaaaagtgtcacgttttaatctgcagatgga

SEQ ID NO: 353881 - DNA, 120 bp, Artificial Sequence
  ENSG00000139508_5 (sequence is synthesized)
cataagtggattaattcctggtctagtgtctacattcatacttttgtctattagtgatcactacggacgaaaattccctatgattttgtcttccgttggtgctcttgcaaccagcgtttg

SEQ ID NO: 353882 - DNA, 120 bp, Artificial Sequence
  ENSG00000139508_6 (sequence is synthesized)
gctctgtttgctttgctattttgcctttccattccagcttttgattgcatctaccttcattggtgcattttgtggcaattataccacattttggggagcttgctttgcctatatagttga

SEQ ID NO: 353883 - DNA, 120 bp, Artificial Sequence
  ENSG00000139508_7 (sequence is synthesized)
tcagtgtaaagaacacaaacaaaaaacaattcgaatagctatcattgactttctacttggacttgttactggactaacaggactgtcatctggctattttattagagagctaggttttga

SEQ ID NO: 353884 - DNA, 120 bp, Artificial Sequence
  ENSG00000139508_8 (sequence is synthesized)
gtggtcgtttctaattattgctgtgtctcttgctgttaatttgatctatattttattttttctcggagatccagtgaaagagtgttcatctcagaatgttactatgtcatgtagtgaagg

SEQ ID NO: 353885 - DNA, 120 bp, Artificial Sequence
  ENSG00000139508_9 (sequence is synthesized)
cttcaaaaacctattttaccgaacttacatgctttttaagaatgcttctggtaagagacgatttttgctctgtttgttactttttacagtaatcacttatttttttgtggtaattggcat

SEQ ID NO: 353886 - DNA, 120 bp, Artificial Sequence
  ENSG00000139508_10 (sequence is synthesized)
tgccccaatttttatcctttatgaattggattcaccactctgctggaatgaagtttttataggttatggatcagctttgggtagtgcctcttttttgactagtttcctaggaatatggct

SEQ ID NO: 353887 - DNA, 120 bp, Artificial Sequence
  ENSG00000139508_11 (sequence is synthesized)
tttttcttattgtatggaagatattcatatggccttcattgggatttttaccacgatgacaggaatggctatgaccgcgtttgccagtacaacactgatgatgtttttagccagggtgcc

SEQ ID NO: 353888 - DNA, 120 bp, Artificial Sequence
  ENSG00000139508_12 (sequence is synthesized)
gttccttttcactattgtgccattctctgttctacggtccatgttgtcaaaagtggttcgttcgactgaacaaggtaccctgtttgcttgtattgctttcttagaaacacttggaggagt

SEQ ID NO: 353889 - DNA, 120 bp, Artificial Sequence
  ENSG00000139508_13 (sequence is synthesized)
ctggcttcactttcctgctgtctgctggtctgttactacttccagccatcagtctatgtgttgtcaagtgtaccagctggaatgagggaagctatgaacttcttatacaagaagaatcca

SEQ ID NO: 353890 - DNA, 120 bp, Artificial Sequence
  ENSG00000139508_14 (sequence is synthesized)
gtgaagatgcttcagacaggtgactgtgatttaaacaaacaaaaaaaatctatgaatgcacatatcatataccatgacttctgaagactataaatgaattccacaatcagtgcttcactg

SEQ ID NO: 353891 - DNA, 120 bp, Artificial Sequence
  ENSG00000139508_15 (sequence is synthesized)
agaaccaattttacctatcttttcttctaaactgaacagtcagagagacagctcctggctttagcttcttgtggtaccacgcactttgagcactttgtgcgtatcatgcaatatacttgc

SEQ ID NO: 353892 - DNA, 120 bp, Artificial Sequence
  ENSG00000139508_16 (sequence is synthesized)
aatacacagaacaaatttcaaatacgcctcacttttagacttagaagagaaacattaaaacttaagggtgtaaggagggatcaagaaacttgataaggtcaaaagcaataatctctctga

SEQ ID NO: 353893 - DNA, 120 bp, Artificial Sequence
  ENSG00000139508_17 (sequence is synthesized)
catattccaggctcttacactgagaccaaagagaaatctttacctcagtttcttcatcagcagaatgggtttctggcctctctcagggataattttgaaggcataatgaaaattatgatg

SEQ ID NO: 353894 - DNA, 120 bp, Artificial Sequence
  ENSG00000139508_18 (sequence is synthesized)
aatcactcattggtaggaaaataatgatataagtttcaaatatgtatgattttacctatacttggtaatgctttattttatagagcctgttaagctgctattgatagtcggagcttatat

SEQ ID NO: 353895 - DNA, 120 bp, Artificial Sequence
  ENSG00000139508_19 (sequence is synthesized)
actgtgacttctgaagactatacatgaattccacaatcagtgctttgttgatacaaaatccttaaaagggaggcactttaaagaatatgtatttttcacttttcttaatatgtttcatcg

SEQ ID NO: 353896 - DNA, 120 bp, Artificial Sequence
  ENSG00000139508_20 (sequence is synthesized)
gtgacaggcatgataatatttctatatgtaatgggtaattgggaaaaaatagatgataaataaaattgctctaaagaagttaaaaaactgaatgaacagctaatactggtataaagtaac

SEQ ID NO: 353897 - DNA, 120 bp, Artificial Sequence
  ENSG00000139508_21 (sequence is synthesized)
taatgtttggagccaacatttgttccttgtgtcagcaaaaggatattcacattccatgatccctggctgagaattctgcctctagtctttcttacccagctgttgtctatccttgttcaa

SEQ ID NO: 353898 - DNA, 120 bp, Artificial Sequence
  ENSG00000139508_22 (sequence is synthesized)
ttataaatactgctaagggcatttttaaaatacgatcttgtactccttaaatttgaatccgtcaacacggtcactcataggaaaatgatcaaacaagcaagccagtcatgatttgactcc

SEQ ID NO: 353899 - DNA, 120 bp, Artificial Sequence
  ENSG00000139508_23 (sequence is synthesized)
ttcccatctcatttcttactgccttacgctcatcctgaggtccaccttggtctctaaaaacaccatgtgttctcatgcctccatgtcttttcacacactgttccatttgctcttcctccc

SEQ ID NO: 353900 - DNA, 120 bp, Artificial Sequence
  ENSG00000139508_24 (sequence is synthesized)
acattacattgaaactttcaagcctcagtcgaaacattgcttcttctggatagcagccttcttgacatccctcctcactccccagtccctacagggcttccatagctctttgtgtgcact

SEQ ID NO: 353901 - DNA, 120 bp, Artificial Sequence
  ENSG00000139508_25 (sequence is synthesized)
tcgatcccagcattttccatcgacttgtaattgtttctgctacctgacaatcatcgccttgagtactgggacaacctttgattactcattatatcctcaataaatatttgttgaactaaa

SEQ ID NO: 353902 - DNA, 120 bp, Artificial Sequence
  ENSG00000139508_26 (sequence is synthesized)
ggacagcgatgctcagctggctgcggccgagtcatcgcctagcgctggcagggccgctgaccgaccgacggaggcgccgattggccgattgtccactgcgcagaaggagcagctgctccg

SEQ ID NO: 353903 - DNA, 120 bp, Artificial Sequence
  ENSG00000139508_27 (sequence is synthesized)
aggctcttgcaggaagcattgcttgttaggagccatcctgtgctttcaggtgtcacagattagcatggggttggagggtgggagacagcatcctgaagagcaggggtaggtgtggctttg

SEQ ID NO: 353904 - DNA, 120 bp, Artificial Sequence
  ENSG00000139508_28 (sequence is synthesized)
cctggggctgtggcagagaggagagacatgcagttatcaaaagagtcagctgcactgtctttttagctttgccctgtggacactggaactcagctatttggagtttccaacatctctcac

SEQ ID NO: 353905 - DNA, 120 bp, Artificial Sequence
  ENSG00000139508_29 (sequence is synthesized)
atcaagtccaaggagaacctttcccttagtttcctcagctgcagaatgggctgctgacttctcagggactttgagggaataactttcatttcattcacccagcagtgccctcatgtttac

SEQ ID NO: 353906 - DNA, 120 bp, Artificial Sequence
  ENSG00000139508_30 (sequence is synthesized)
tgttttcaatgagtaacagttgtctccattagtttgtgtttgttgttttgtaattctgccttttttttttcctctctctctatccctactccaaacaggtaccctgtttgcttgtattgc

SEQ ID NO: 353907 - DNA, 120 bp, Artificial Sequence
  ENSG00000139514_0 (sequence is synthesized)
gcactgctgatgaaacctggcgccggaacccgccagccctcggcgcccattcagtccgcgcaggcaggtgtgagcagcgggtcaactacctggcaggcgcgcacgcggccgcgggctccc

SEQ ID NO: 353908 - DNA, 120 bp, Artificial Sequence
  ENSG00000139514_1 (sequence is synthesized)
gctaaccgcagcctccactcctctccccgcgcgccgcgcccccgccccgccccgccccgcccggtctcgccggccgagcgtccgttggtccttgagcgcgtccgacagtctgtctgttcg

SEQ ID NO: 353909 - DNA, 120 bp, Artificial Sequence
  ENSG00000139514_2 (sequence is synthesized)
cgatcctgccggagccccgccgccgccggcttggattctgaaaccttccttgtatccctcctgagacatctttgctgcaagatcgaggctgtcctctggtgagaaggtggtgaggcttcc

SEQ ID NO: 353910 - DNA, 120 bp, Artificial Sequence
  ENSG00000139514_3 (sequence is synthesized)
cgtcatattccagctctgaacagcaacatggggtgcaaagtcctgctcaacattgggcagcagatgctgcggcggaaggtggtggactgtagccgggaggagacgcggctgtctcgctgc

SEQ ID NO: 353911 - DNA, 120 bp, Artificial Sequence
  ENSG00000139514_4 (sequence is synthesized)
ctgaacacttttgatctggtggccctcggggtgggcagcacactgggtgctggtgtctacgtcctggctggagctgtggcccgtgagaatgcaggccctgccattgtcatctccttcctg

SEQ ID NO: 353912 - DNA, 120 bp, Artificial Sequence
  ENSG00000139514_5 (sequence is synthesized)
atcgctgcgctggcctcagtgctggctggcctgtgctatggcgagtttggtgctcgggtccccaagacgggctcagcttacctctacagctatgtcaccgttggagagctctgggccttc

SEQ ID NO: 353913 - DNA, 120 bp, Artificial Sequence
  ENSG00000139514_6 (sequence is synthesized)
atcaccggctggaacttaatcctctcctacatcatcggtacttcaagcgtagcgagggcctggagcgccaccttcgacgagctgataggcagacccatcggggagttctcacggacacac

SEQ ID NO: 353914 - DNA, 120 bp, Artificial Sequence
  ENSG00000139514_7 (sequence is synthesized)
atgactctgaacgcccccggcgtgctggctgaaaaccccgacatattcgcagtgatcataattctcatcttgacaggacttttaactcttggtgtgaaagagtcggccatggtcaacaaa

SEQ ID NO: 353915 - DNA, 120 bp, Artificial Sequence
  ENSG00000139514_8 (sequence is synthesized)
atattcacttgtattaacgtcctggtcctgggcttcataatggtgtcaggatttgtgaaaggatcggttaaaaactggcagctcacggaggaggattttgggaacacatcaggccgtctc

SEQ ID NO: 353916 - DNA, 120 bp, Artificial Sequence
  ENSG00000139514_9 (sequence is synthesized)
tgtttgaacaatgacacaaaagaagggaagcccggtgttggtggattcatgcccttcgggttctctggtgtcctgtcgggggcagcgacttgcttctatgccttcgtgggctttgactgc

SEQ ID NO: 353917 - DNA, 120 bp, Artificial Sequence
  ENSG00000139514_10 (sequence is synthesized)
atcgccaccacaggtgaagaggtgaagaacccacagaaggccatccccgtggggatcgtggcgtccctcttgatctgcttcatcgcctactttggggtgtcggctgccctcacgctcatg

SEQ ID NO: 353918 - DNA, 120 bp, Artificial Sequence
  ENSG00000139514_11 (sequence is synthesized)
atgccctacttctgcctggacaataacagccccctgcccgacgcctttaagcacgtgggctgggaaggtgccaagtacgcagtggccgtgggctccctctgcgctctttccgccagtctt

SEQ ID NO: 353919 - DNA, 120 bp, Artificial Sequence
  ENSG00000139514_12 (sequence is synthesized)
ctaggttccatgtttcccatgcctcgggttatctatgccatggctgaggatggactgctatttaaattcttagccaacgtcaatgataggaccaaaacaccaataatcgccacattagcc

SEQ ID NO: 353920 - DNA, 120 bp, Artificial Sequence
  ENSG00000139514_13 (sequence is synthesized)
tcgggtgccgttgctgctgtgatggccttcctctttgacctgaaggacttggtggacctcatgtccattggcactctcctggcttactcgttggtggctgcctgtgtgttggtcttacgg

SEQ ID NO: 353921 - DNA, 120 bp, Artificial Sequence
  ENSG00000139514_14 (sequence is synthesized)
taccagccagagcagcctaacctggtataccagatggccagtacttccgacgagttagatccagcagaccaaaatgaattggcaagcaccaatgattcccagctgggctttttaccagag

SEQ ID NO: 353922 - DNA, 120 bp, Artificial Sequence
  ENSG00000139514_15 (sequence is synthesized)
gcagagatgttctctttgaaaaccatactctcacccaaaaacatggagccttccaaaatctctgggctaattgtgaacatttcaaccagcctcatagctgttctcatcatcaccttctgc

SEQ ID NO: 353923 - DNA, 120 bp, Artificial Sequence
  ENSG00000139514_16 (sequence is synthesized)
attgtgaccgtgcttggaagggaggctctcaccaaaggggcgctgtgggcagtctttctgctcgcagggtctgccctcctctgtgccgtggtcacgggcgtcatctggaggcagcccgag

SEQ ID NO: 353924 - DNA, 120 bp, Artificial Sequence
  ENSG00000139514_17 (sequence is synthesized)
agcaagaccaagctctcatttaaggttcccttcctgccagtgctccccatcctgagcatcttcgtgaacgtctatctcatgatgcagctggaccagggcacctgggtccggtttgctgtg

SEQ ID NO: 353925 - DNA, 120 bp, Artificial Sequence
  ENSG00000139514_18 (sequence is synthesized)
tggatgctgataggcttcatcatctactttggctatggcctgtggcacagcgaggaggcgtccctggatgccgaccaagcaaggactcctgacggcaacttggaccagtgcaagtgacgc

SEQ ID NO: 353926 - DNA, 120 bp, Artificial Sequence
  ENSG00000139514_19 (sequence is synthesized)
acagccccgccccccggaggtggcagcagccccgagggacgcccccagaggaccgggaggcaccccaccctccccaccagtgcaacagaaaccacctgcgtccacaccctcactgcagcc

SEQ ID NO: 353927 - DNA, 120 bp, Artificial Sequence
  ENSG00000139514_20 (sequence is synthesized)
aaaggtgcaattacttgacctgcagccccagcccaccctcggctctgcagccggttctccgggccctggtcacctccagacagctgcctggccggggccactaggctgcggctggccact

SEQ ID NO: 353928 - DNA, 120 bp, Artificial Sequence
  ENSG00000139514_21 (sequence is synthesized)
gtgtctcctcacttctctgaacaaagcagttcctcccctaccagctcagccccgagctgccgcagcctcaggcagaacggaggtcaccttctctccttatcttgggaaccaggccttcct

SEQ ID NO: 353929 - DNA, 120 bp, Artificial Sequence
  ENSG00000139514_22 (sequence is synthesized)
cccggggactgttctgggattgaaattgtgcatactccaaactttcgcagccatcttcccgctcagccccagacacccagcaatcaagccagatgagtaccacaaaacagtgtgtcccca

SEQ ID NO: 353930 - DNA, 120 bp, Artificial Sequence
  ENSG00000139514_23 (sequence is synthesized)
gcagctccccaccccagagccaaatgacagtagtgcacttaaaaaggaaaatcaggcctgttgtccttctccggttgcattcagatgggtcattagggccggaccctgcctgccccttgg

SEQ ID NO: 353931 - DNA, 120 bp, Artificial Sequence
  ENSG00000139514_24 (sequence is synthesized)
cttctcagggctttgctctgacaccatgacagctgcccggggctgagggcagctggctccactcaaatgaggaagaagggatcactcccattagggcctgctttgcttatgcatgtgtgt

SEQ ID NO: 353932 - DNA, 120 bp, Artificial Sequence
  ENSG00000139514_25 (sequence is synthesized)
gcacatgcatgtaaaccagggaccttcagctcacggcctccaggcctgggccagttcttgctgctcctgccgtctcccccgactggctgtgtcctgagtaactggaacatgagacagtat

SEQ ID NO: 353933 - DNA, 120 bp, Artificial Sequence
  ENSG00000139514_26 (sequence is synthesized)
ctgcaggactggccccatggtggccgagtcagaagtctgtttcctgtgagtcgccaccgttcactcagtcttgccctcccatgctttggagccagtctggtggctcctgtaaggttctca

SEQ ID NO: 353934 - DNA, 120 bp, Artificial Sequence
  ENSG00000139514_27 (sequence is synthesized)
aggctggtggcagctcagtctggggtcaggacatgtcggggtcatgcgtttctggccctgacataagctgtctggcctctctgtgacatgatgaaattgaaatcaatccacagtccatga

SEQ ID NO: 353935 - DNA, 120 bp, Artificial Sequence
  ENSG00000139514_28 (sequence is synthesized)
aattgtgacactccaccagattaagttagggcataacattaacttggaaatggccatgtcatcacccctgcggctgtcctatagctgagatgcgtgggtcgcaggggaggtgatttctag

SEQ ID NO: 353936 - DNA, 120 bp, Artificial Sequence
  ENSG00000139514_29 (sequence is synthesized)
gcatattgctgtcccttttgtgtatctgtcatccggatgcttcggaccccacgcctctgcaagtgggagagacccgagcatcctccccacccccatagctccagtgcacgccacccccgt

SEQ ID NO: 353937 - DNA, 120 bp, Artificial Sequence
  ENSG00000139514_30 (sequence is synthesized)
ccagcaccatttcacacacactccttgtagatgggagccagaggaaacctgaacgtgggtggagcgttccactgagtctacttcaggagacagaaggcccatgctgatgggggaggagga

SEQ ID NO: 353938 - DNA, 120 bp, Artificial Sequence
  ENSG00000139514_31 (sequence is synthesized)
gggatgtgggcattttggacaccaggggaaatggaaatgctgctttcaaaacttagtttcctttccatttcttcctagtctggcctttgacacaaatctggtagaaagaagcctgataaa

SEQ ID NO: 353939 - DNA, 120 bp, Artificial Sequence
  ENSG00000139514_32 (sequence is synthesized)
ttgagggcacttgtaccctccctgtgcccccagaaggttcttggagagaagtgcaagaatttgtgaacacggcggtggagggcgggtggatggccatgggctgagcctccgtatcaggcc

SEQ ID NO: 353940 - DNA, 120 bp, Artificial Sequence
  ENSG00000139514_33 (sequence is synthesized)
tgctcaccttgctgggagctttattctgatctcattttgaatgttccagagggagcatcataagagcccagagctccgatttccaaagagtgatattgacatttatggagattggtgttg

SEQ ID NO: 353941 - DNA, 120 bp, Artificial Sequence
  ENSG00000139514_34 (sequence is synthesized)
taacatattttgataaatactaacttattttgttggggttttggttgtctcttgtcttaggacctggtagttatttgcttgatttttttttccgttattttctacataggcaaagagaat

SEQ ID NO: 353942 - DNA, 120 bp, Artificial Sequence
  ENSG00000139514_35 (sequence is synthesized)
tcgagggatagacagtctccaagaaaagtgaagtggtgggagagaattgcttttttcttttttttcttttctctagtttttctttctggctgagatttccgtgcaagacagcacccaata

SEQ ID NO: 353943 - DNA, 120 bp, Artificial Sequence
  ENSG00000139514_36 (sequence is synthesized)
gactatttagagttgacatttgacattttaatgggcgccatggctcattttgtagattgagaaggtgcgtctcccctgctccaagtctcatcatgacagcgtgctgacagctgggagtct

SEQ ID NO: 353944 - DNA, 120 bp, Artificial Sequence
  ENSG00000139514_37 (sequence is synthesized)
gtggccttcctcacgcagaggccttaaagctggacacagaagcacgcctaggctgggcagggatgggacccatgccccctccttagaggacgggcttcctggttaggaaaggacacgtgg

SEQ ID NO: 353945 - DNA, 120 bp, Artificial Sequence
  ENSG00000139514_38 (sequence is synthesized)
gggtgccttgcataatagttcactggtcaccgtgcttttatgagtagtgtttttgtgcacttgccaggggttttctctctgtgtgagaggggagtgatttaagcaatggtgtctggagta

SEQ ID NO: 353946 - DNA, 120 bp, Artificial Sequence
  ENSG00000139514_39 (sequence is synthesized)
agccttacaattttaatagactttttcttatcatatccctcatttctttccctgaaataaaaatacacacaagcaaaaaaaaaatgatagtttcacatctcttagttcccttgcccaaac

SEQ ID NO: 353947 - DNA, 120 bp, Artificial Sequence
  ENSG00000139514_40 (sequence is synthesized)
aagaatattcttagttccactggccaggattttcctacatagtcagaacttacacattactagaggcacacccaccaaggagtattgtgtctacttttatctgtgcaccagccacaaata

SEQ ID NO: 353948 - DNA, 120 bp, Artificial Sequence
  ENSG00000139514_41 (sequence is synthesized)
cccacattggaaagacccatttgtgatgggtaaacatcccttcctgtctcccacaacccctgtgactgccctgcatgtgttcatgacctccgaaggcccaaattcatgaagcagcaaacc

SEQ ID NO: 353949 - DNA, 120 bp, Artificial Sequence
  ENSG00000139514_42 (sequence is synthesized)
cagcagatctccacccccctgcctcaggacctctgctgaagagggggatgaagtgggtctccagggaggcagtgggggccttgttggcagctggctcgggagccggcttacaggagggca

SEQ ID NO: 353950 - DNA, 120 bp, Artificial Sequence
  ENSG00000139514_43 (sequence is synthesized)
gctctgcagttgggaggggcaccgtccggaggagaccaggcctctacacaccccccactctacttatcatccctgctcacacacccttgtccaaggctttatgcatcggatttatttttc

SEQ ID NO: 353951 - DNA, 120 bp, Artificial Sequence
  ENSG00000139514_44 (sequence is synthesized)
caaatcaagaggacagtgatagatgcattttccccaggctgtctcagaaaggtcgctaaatgtatactgttgtcagaattgctgagatctccccccacttttggtttttgcagcagtaaa

SEQ ID NO: 353952 - DNA, 120 bp, Artificial Sequence
  ENSG00000139514_45 (sequence is synthesized)
aactctttccactgtgacttattttctctctcaggcagccagccacctggtcccttgtgctgactctagcacagtggccaggatccaatacgagtccaggggtgaccgcaggatggtggg

SEQ ID NO: 353953 - DNA, 120 bp, Artificial Sequence
  ENSG00000139514_46 (sequence is synthesized)
ggcagcgggcttctccacctaccccagccaccaaggccctgacgcactgcctcctgcaccttcagcacatccctgtgcacagctggaagggtgcatggcccgctcacctttgttcagatg

SEQ ID NO: 353954 - DNA, 120 bp, Artificial Sequence
  ENSG00000139514_47 (sequence is synthesized)
ggtggaaacgctgatgataccagctcctccctgccgtgcccctgccacggagcaggcattgtgaactggctggtgtttgcagtcccacgtggcatggcctccagcccaacccacagtgga

SEQ ID NO: 353955 - DNA, 120 bp, Artificial Sequence
  ENSG00000139514_48 (sequence is synthesized)
gactggagacagggcaatgagtctggtggggggcacgtggacatgccccataggggccccacccagacttaacaggcaaggtcctgggcattgcgcgacgcaggactcaatgctaaagca

SEQ ID NO: 353956 - DNA, 120 bp, Artificial Sequence
  ENSG00000139514_49 (sequence is synthesized)
agcctgcctggctctgtgccagggcccctcttctgattcacacatcccatttttacacagacccttccttcttaataaaggctgacagttctgttggcagccaagaacccacaccatgaa

SEQ ID NO: 353957 - DNA, 120 bp, Artificial Sequence
  ENSG00000139514_50 (sequence is synthesized)
gacagggagtgaggggcctttgtgcccaactccagcacagctgcgttctggggtgtgtgagaggcatgttcgtgtctgtgcgctggtggtctcgtgagacagttccgaggacggggaaat

SEQ ID NO: 353958 - DNA, 120 bp, Artificial Sequence
  ENSG00000139514_51 (sequence is synthesized)
tgcagggtggtgggggcgtgaggcttatatgtggaactgatgcagagttcgcctgcagacggatctggatatacactatgtataattgttacgtgtaatttaaaatatatctgtttgcca

SEQ ID NO: 353959 - DNA, 120 bp, Artificial Sequence
  ENSG00000139514_52 (sequence is synthesized)
tcgtcatgagaagattatatgtaaggctctgaagggagagggagatgtacattctgccaggctcctggggaccttatccgagtcatgaaattgattactgttgatccagtggtgcaagaa

SEQ ID NO: 353960 - DNA, 120 bp, Artificial Sequence
  ENSG00000139514_53 (sequence is synthesized)
gctacactccatgtgtcatcacgcttatgactcctaatgtatttttaaggcaaaaaatgtcagccgactccatcttcacccctcgattcctcgagtccagcctttctgtgccagtgcttc

SEQ ID NO: 353961 - DNA, 120 bp, Artificial Sequence
  ENSG00000139514_54 (sequence is synthesized)
actgagccacaacgctctcgccatcgggacccggctgggcctggagtctcggggcacagttgccatggagccctcctgggtcattctacaaatgtgctgagtgccagctgaaaaccccac

SEQ ID NO: 353962 - DNA, 120 bp, Artificial Sequence
  ENSG00000139514_55 (sequence is synthesized)
aggagatggagtaccttggccaagcttaaagagaagattttctcagggtatttattagtgtgtccagcagggtcaggaagcaggatggaaagatgcactcagactgttaatttattaaca

SEQ ID NO: 353963 - DNA, 120 bp, Artificial Sequence
  ENSG00000139514_56 (sequence is synthesized)
aggcaaatgattttgtgtttcttgatgacagactattaagtttgggacttattttcccatttgagaagttataatatatatttaagatgataagtttcctgcttaagttgtgcctttcag

SEQ ID NO: 353964 - DNA, 120 bp, Artificial Sequence
  ENSG00000139514_57 (sequence is synthesized)
cttcaatgagtttaaggagcactaagggtaatgataccaatgagggttggtttattatcaaacctgaatagctgtggtttctccagtaaatattttcttctactgaacatggagccatta

SEQ ID NO: 353965 - DNA, 120 bp, Artificial Sequence
  ENSG00000139514_58 (sequence is synthesized)
ttaagagttgtgtgttttttattatgtacatttgtatatttttttgcttgtttgatgttctatttttctaatagttttcttttagtttcttaaagttgtgatactagatttagattctga

SEQ ID NO: 353966 - DNA, 120 bp, Artificial Sequence
  ENSG00000139514_59 (sequence is synthesized)
tgctaactgcaaatcaggttggtctctgctgggtctctcctgcttttattttactttaaggacaagtgtagttgtcgtccaccacctttcaaaaaatgtgaaactgccctgcctcccctt

SEQ ID NO: 353967 - DNA, 120 bp, Artificial Sequence
  ENSG00000139514_60 (sequence is synthesized)
tttgctgacaacactgtgtacattgaccacttcctaccatactttatgttgtaaaatcaaactcttttgtggtacattatctcatgcttctgcaaattcgaataaattctatggcttcca

SEQ ID NO: 353968 - DNA, 120 bp, Artificial Sequence
  ENSG00000139514_61 (sequence is synthesized)
agaccctggccctcctgatgcctggccagccctgcgtgggctcagccgggcctgggtgctcccgaggaaggtttttgctagccagcttcaggtaagatggggcaggggtcctgaaggcac

SEQ ID NO: 353969 - DNA, 120 bp, Artificial Sequence
  ENSG00000139514_62 (sequence is synthesized)
agagaggaccagaccctggaaggaggcagcagcccttctcccctggacgtttccctgagtagtcaagggcaggctgacaccttcctgcatgacacaggccaagagagacctcgccagtcc

SEQ ID NO: 353970 - DNA, 120 bp, Artificial Sequence
  ENSG00000139515_0 (sequence is synthesized)
gagatcagtgcggagctgtcaaagcgagcaggggtggcgccgggagtgggaacgccacacagtgccaaatccccggctccagctcccgactcccggctcccggctcccggctcccggtgc

SEQ ID NO: 353971 - DNA, 120 bp, Artificial Sequence
  ENSG00000139515_1 (sequence is synthesized)
ccaatcccgggccgcagccatgaacggcgaggagcagtactacgcggccacgcagctttacaaggacccatgcgcgttccagcgaggcccggcgccggagttcagcgccagcccccctgc

SEQ ID NO: 353972 - DNA, 120 bp, Artificial Sequence
  ENSG00000139515_2 (sequence is synthesized)
gccgcacccgttccctggcgccctgggcgcgctggagcagggcagccccccggacatctccccgtacgaggtgccccccctcgccgacgaccccgcggtggcgcaccttcaccaccacct

SEQ ID NO: 353973 - DNA, 120 bp, Artificial Sequence
  ENSG00000139515_3 (sequence is synthesized)
cgacgaccccgcggtggcgcaccttcaccaccacctcccggctcagctcgcgctcccccacccgcccgccgggcccttcccggagggagccgagccgggcgtcctggaggagcccaaccg

SEQ ID NO: 353974 - DNA, 120 bp, Artificial Sequence
  ENSG00000139515_4 (sequence is synthesized)
cgtccagctgcctttcccatggatgaagtctaccaaagctcacgcgtggaaaggccagtgggcaggcggcgcctacgctgcggagccggaggagaacaagcggacgcgcacggcctacac

SEQ ID NO: 353975 - DNA, 120 bp, Artificial Sequence
  ENSG00000139515_5 (sequence is synthesized)
gcgcgcacagctgctagagctggagaaggagttcctattcaacaagtacatctcacggccgcgccgggtggagctggctgtcatgttgaacttgaccgagagacacatcaagatctggtt

SEQ ID NO: 353976 - DNA, 120 bp, Artificial Sequence
  ENSG00000139515_6 (sequence is synthesized)
ccaaaaccgccgcatgaagtggaaaaaggaggaggacaagaagcgcggcggcgggacagctgtcgggggtggcggggtcgcggagcctgagcaggactgcgccgtgacctccggcgagga

SEQ ID NO: 353977 - DNA, 120 bp, Artificial Sequence
  ENSG00000139515_7 (sequence is synthesized)
gaggtgctgtgccgcccgctgcccccgttgccgcccgagagggccgcctgccgcctggccttagcgcgtcgccacagccctccagcgtcgcgcctcggcggccgcaggaaccacgatgag

SEQ ID NO: 353978 - DNA, 120 bp, Artificial Sequence
  ENSG00000139515_8 (sequence is synthesized)
cgcgcctcggcggccgcaggaaccacgatgagaggcaggagctgctcctggctgaggggcttcaaccactcgccgaggaggagcagagggcctaggaggaccccgggcgtggaccacccg

SEQ ID NO: 353979 - DNA, 120 bp, Artificial Sequence
  ENSG00000139515_9 (sequence is synthesized)
ccctggcagttgaatggggcggcaattgcggggcccaccttagaccgaaggggaaaacccgctctctcaggcgcatgtgccagttggggccccgcgggtagatgccggcaggccttccgg

SEQ ID NO: 353980 - DNA, 120 bp, Artificial Sequence
  ENSG00000139515_10 (sequence is synthesized)
atccctgccctcctacagcactccaccttgggacctgtttagagaagccggctcttcaaagacaatggaaactgtaccatacacattggaaggctccctaacacacacagcggggaagct

SEQ ID NO: 353981 - DNA, 120 bp, Artificial Sequence
  ENSG00000139515_11 (sequence is synthesized)
gggccgagtaccttaatctgccataaagccattcttactcgggcgacccctttaagtttagaaataattgaaaggaaatgtttgagttttcaaagatcccgtgaaattgatgccagtgga

SEQ ID NO: 353982 - DNA, 120 bp, Artificial Sequence
  ENSG00000139515_12 (sequence is synthesized)
atacagtgagtcctcctcttcctcctcctcctcttccccctccccttcctcctcctcctcttcttttccctcctcttcctcttcctcctgctctcctttcctccccctcctcttttccct

SEQ ID NO: 353983 - DNA, 120 bp, Artificial Sequence
  ENSG00000139515_13 (sequence is synthesized)
cctcttcctcttcctcctgctctcctttcctccccctcctctttctcctcctcctcctcttcttccccctcctctccctcctcctcttcttccccctcctctccctcctcctcttcttct

SEQ ID NO: 353984 - DNA, 120 bp, Artificial Sequence
  ENSG00000139515_14 (sequence is synthesized)
ccctcctcttcctcttcctcctcttccacgtgctctcctttcctccccctcctcttgctccccttcttccccgtcctcttcctcctcctcctcttcttctccctcctcttcctcctcctc

SEQ ID NO: 353985 - DNA, 120 bp, Artificial Sequence
  ENSG00000139515_15 (sequence is synthesized)
tttcttcctgacctctttctttctcctcctcctccttctacctccccttctcatccctcctcttcctcttctctagctgcacacttcactactgcacatcttataacttgcacccctttc

SEQ ID NO: 353986 - DNA, 120 bp, Artificial Sequence
  ENSG00000139515_16 (sequence is synthesized)
ttctgaggaagagaacatcttgcaaggcagggcgagcagcggcagggctggcttaggagcagtgcaagagtccctgtgctccagttccacactgctggcagggaaggcaaggggggacgg

SEQ ID NO: 353987 - DNA, 120 bp, Artificial Sequence
  ENSG00000139515_17 (sequence is synthesized)
gcctggatctgggggtgagggagaaagatggacccctgggtgaccactaaaccaaagatattcggaactttctatttaggatgtggacgtaattcctgttccgaggtagaggctgtgctg

SEQ ID NO: 353988 - DNA, 120 bp, Artificial Sequence
  ENSG00000139515_18 (sequence is synthesized)
aagacaagcacagtggcctggtgcgccttggaaaccaacaactattcacgagccagtatgaccttcacatctttagaaattatgaaaacgtatgtgattggagggtttggaaaaccagtt

SEQ ID NO: 353989 - DNA, 120 bp, Artificial Sequence
  ENSG00000139515_19 (sequence is synthesized)
atcttatttaacattttaaaaattacctaacagttatttacaaacaggtctgtgcatcccaggtctgtcttcttttcaaggtctgggccttgtgctcgggttatgtttgtgggaaatgct

SEQ ID NO: 353990 - DNA, 120 bp, Artificial Sequence
  ENSG00000139515_20 (sequence is synthesized)
taataaatactgataatatgggaagagatgaaaactgattctcctcactttgtttcaaacctttctggcagtgggatgattcgaattcacttttaaaattaaattagcgtgttttgtttt

SEQ ID NO: 353991 - DNA, 120 bp, Artificial Sequence
  ENSG00000139517_0 (sequence is synthesized)
gcggagcggagccgggcaggctctccgctccctcagcgggccgcggagagcgggagctggtgccgagcagcggcgccaggagcccgtgcgcggcccgggcagccgcgctttcccaaaaaa

SEQ ID NO: 353992 - DNA, 120 bp, Artificial Sequence
  ENSG00000139517_1 (sequence is synthesized)
agcccgtgcgcggcccgggcagccgcgctttcccaaaaaacacaccttgactttagtcagatacatcactgtctgttaaaggaaaccaagcgtgaagtggaagtctaacacatgaggata

SEQ ID NO: 353993 - DNA, 120 bp, Artificial Sequence
  ENSG00000139517_2 (sequence is synthesized)
cagaattgattcaaaatgggaacaacaagtgatgagatggtgtctgtggaacagacctcctcctcttctctaaaccccctgtgttttgaatgtggccaacagcactggacaagagaaaac

SEQ ID NO: 353994 - DNA, 120 bp, Artificial Sequence
  ENSG00000139517_3 (sequence is synthesized)
catttgtacaattaccagaatgaagtggatgatgacctagtctgccatatttgccttcaacctctgctgcagccactagacacaccctgtggacatacattctgctacaagtgcctcaga

SEQ ID NO: 353995 - DNA, 120 bp, Artificial Sequence
  ENSG00000139517_4 (sequence is synthesized)
aactttttacaagagaaagatttctgtccgttggaccggaaaagacttcattttaagttgtgcaagaagtctagtattctagttcataaactcctagacaaattattagttttatgtcca

SEQ ID NO: 353996 - DNA, 120 bp, Artificial Sequence
  ENSG00000139517_5 (sequence is synthesized)
ttttcttcagtgtgcaaagatgtaatgcaacgttgtgatctggaggcacatctcaaaaacagatgtcctggagcttctcatcggagagttgccctggagagaaggaaaactagtagaact

SEQ ID NO: 353997 - DNA, 120 bp, Artificial Sequence
  ENSG00000139517_6 (sequence is synthesized)
caagcagagattgagaatgaaaatgggcccactctactagatcctgcaggtaccttatctccagaagcagactgtttggggacaggcgcagtgcctgtggagcggcacttgacatcagcg

SEQ ID NO: 353998 - DNA, 120 bp, Artificial Sequence
  ENSG00000139517_7 (sequence is synthesized)
tctctttccacatggagtgaggagcctggccttgacaaccctgcctttgaggagagcgctggagctgacaccacacaacagccacttagtttaccagaaggagaaatcaccacgattgaa

SEQ ID NO: 353999 - DNA, 120 bp, Artificial Sequence
  ENSG00000139517_8 (sequence is synthesized)
attcatcggtccaatccttacattcagttaggaatcagcattgtgggtggcaacgaaacacctttgattaacattgtcatccaggaggtctatcgggatggggtcattgccagagacggg

SEQ ID NO: 354000 - DNA, 120 bp, Artificial Sequence
  ENSG00000139517_9 (sequence is synthesized)
agacttcttgctggagaccagattcttcaggtcaacaactacaatatcagcaatgtgtcccataactatgcccgagctgtcctttcccagccctgcaacacactgcatcttactgtgctt

SEQ ID NO: 354001 - DNA, 120 bp, Artificial Sequence
  ENSG00000139517_10 (sequence is synthesized)
cgagagaggcgctttggcaaccgagcacacaaccattctgatagtaactctccacgagaagagattttccaagtggctcttcataaacgggactctggtgaacagcttggcattaaattg

SEQ ID NO: 354002 - DNA, 120 bp, Artificial Sequence
  ENSG00000139517_11 (sequence is synthesized)
gtgcgaaggacagatgagccaggggtttttattcttgacctgttggaaggggggttggctgcccaggacggcaggctaagcagcaatgaccgagtgctggccatcaatgggcacgacctg

SEQ ID NO: 354003 - DNA, 120 bp, Artificial Sequence
  ENSG00000139517_12 (sequence is synthesized)
aagtatggaactccggagcttgctgcccagattattcaggccagtggagagagagtgaatttaacaattgctagaccagggaaaccccagcctggtaacaccattagagaagcaggaaat

SEQ ID NO: 354004 - DNA, 120 bp, Artificial Sequence
  ENSG00000139517_13 (sequence is synthesized)
catagcagcagcagccagcaccacacaccaccaccgtattatagcagaccaagctcacataaggatcttactcagtgtgttacatgccaagaaaaacacattactgtaaagaaggaacca

SEQ ID NO: 354005 - DNA, 120 bp, Artificial Sequence
  ENSG00000139517_14 (sequence is synthesized)
catgaatcccttggcatgaccgttgctgggggcaggggaagtaagagtggtgagctgcccatctttgtgaccagtgtgccaccccatggctgccttgcacgagatggcagaataaagaga

SEQ ID NO: 354006 - DNA, 120 bp, Artificial Sequence
  ENSG00000139517_15 (sequence is synthesized)
ggtgatgtgttgctaaatatcaacggcattgatttgaccaatttaagtcacagtgaggcagttgcaatgctgaaagccagtgccgcgtcccctgctgttgcccttaaagcacttgaggtc

SEQ ID NO: 354007 - DNA, 120 bp, Artificial Sequence
  ENSG00000139517_16 (sequence is synthesized)
cagattgttgaggaggcgactcagaacgcggaggagcagccgagtactttcagcgaaaatgagtatgatgccagttggtccccatcatgggtcatgtggcttgggcttcccagcacactt

SEQ ID NO: 354008 - DNA, 120 bp, Artificial Sequence
  ENSG00000139517_17 (sequence is synthesized)
catagctgccacgatatagttttacgaagaagttacttgggaagttggggctttagtatcgttggtggatatgaagagaaccacaccaatcagccttttttcattaaaactattgtcttg

SEQ ID NO: 354009 - DNA, 120 bp, Artificial Sequence
  ENSG00000139517_18 (sequence is synthesized)
ggaactcctgcttattatgatggaagattaaagtgtggtgacatgattgtggccgtaaatgggctgtcaaccgtgggcatgagccactctgcactagttcccatgttgaaggagcagagg

SEQ ID NO: 354010 - DNA, 120 bp, Artificial Sequence
  ENSG00000139517_19 (sequence is synthesized)
cttgcatcttccttttttagatttttgaaagaaaaccctttggtttcattgtgtttgtggtttaggagctgctgacactgctggtatacacagggccaaaacccactaagattgtccgtt

SEQ ID NO: 354011 - DNA, 120 bp, Artificial Sequence
  ENSG00000139517_20 (sequence is synthesized)
tatgtttatttaaatggtttcctaagttagttacatttcttttagcttggaaacagtcttccactaacctttgtgagtttatattttcagaattcagacttagttgttaaaatgttacct

SEQ ID NO: 354012 - DNA, 120 bp, Artificial Sequence
  ENSG00000139517_21 (sequence is synthesized)
atggtaatgagcaaagctcacccaaactgtgccccagatggagtaaagaccttctggtgggtctttgttttcagtaactgaatcatagaacgagttctgtatccctcaggcctgatgtca

SEQ ID NO: 354013 - DNA, 120 bp, Artificial Sequence
  ENSG00000139517_22 (sequence is synthesized)
gcaaagccagtaacaacagcgtgtactgccactgtcataaccaataccatgaatgaatatactttaaattttggtgataactgttccccatttttttttgaaccacagtctcactctcac

SEQ ID NO: 354014 - DNA, 120 bp, Artificial Sequence
  ENSG00000139517_23 (sequence is synthesized)
gagctgccgcacccggccgttcccattttttattggtgccaacatttcaaaacttcatactgtttataaactgattttctggtttatttctactgtaatctctcaatattcatagaagat

SEQ ID NO: 354015 - DNA, 120 bp, Artificial Sequence
  ENSG00000139517_24 (sequence is synthesized)
agatgaagaaataagtctgacaacactaaagaaatttcttaatatactattattagaatagtagaggataaaagataatgttatccagttacaaaggaatttggatgataattataactt

SEQ ID NO: 354016 - DNA, 120 bp, Artificial Sequence
  ENSG00000139517_25 (sequence is synthesized)
ttagagatggtaaagctgcacttacttgaacagcccaaaagcattaaaaatctatttccagaggaatgttttgctatgtagggaaattttgaagtagtttttgctaaaaaattatttcta

SEQ ID NO: 354017 - DNA, 120 bp, Artificial Sequence
  ENSG00000139517_26 (sequence is synthesized)
gagttgtgttattcttagcagtaatcttggctagaaatgtttttgtgatttatgcgattaaacgaaatgataaagataaaaccatattattaaatacctatatatcacagctaagtagga

SEQ ID NO: 354018 - DNA, 120 bp, Artificial Sequence
  ENSG00000139517_27 (sequence is synthesized)
gaaagggagacctttttattttgttcaggtaggagtatttcttgtgtattttagaaacaattatttttcccattatttcttatgagattagttgtttcaagtaggagacagaaaagttct

SEQ ID NO: 354019 - DNA, 120 bp, Artificial Sequence
  ENSG00000139517_28 (sequence is synthesized)
gttttgttggaaatgtaggttttagatgtatctttcagtcagctctcagtcactagactatttcatattttttgaaatgtttttgaaaattatgactagcccattttttgtcctttattc

SEQ ID NO: 354020 - DNA, 120 bp, Artificial Sequence
  ENSG00000139517_29 (sequence is synthesized)
aacatacttatcctctgaacacataaataagtgaataagataaaaatatctttaccttattaatattatacatacttgaaaaaaatttcatttagaaacctagttcagaatctgagcaaa

SEQ ID NO: 354021 - DNA, 120 bp, Artificial Sequence
  ENSG00000139517_30 (sequence is synthesized)
tttacaagtgacctctgtaataaatggtattgataatcagagaatgtatttcagaatactacagtacaatatattatgaagcatgaccactttattttgaaacttagcaattgtattgct

SEQ ID NO: 354022 - DNA, 120 bp, Artificial Sequence
  ENSG00000139517_31 (sequence is synthesized)
ggggtttattgtatctgtagcatgtcactgattatttcagttagttttataatgatttttaaaaaacatatctatttggaataagatacagcaacaatcattgctactgacttgttcaac

SEQ ID NO: 354023 - DNA, 120 bp, Artificial Sequence
  ENSG00000139517_32 (sequence is synthesized)
cccttagttacactgtatgatcaacatataacaagatacagtggaatggcccatacagtatattactgttgtgtgatgattggctttggaagcagtttgattttgaaatgctttgatatt

SEQ ID NO: 354024 - DNA, 120 bp, Artificial Sequence
  ENSG00000139517_33 (sequence is synthesized)
ctaattgacatggaacaagttttttccctgctccccaaatagaattttgtaaccaactttgctatttttttaaagtttgtaagaatgtgtcatttcttggggagtagccatccatcaaca

SEQ ID NO: 354025 - DNA, 120 bp, Artificial Sequence
  ENSG00000139517_34 (sequence is synthesized)
aatatcctgactgctactttgttatatacaaaatacttacattgaacctggtggcataatgagtattttgaaagaagaaatttcttcactctcatttttatagaaatcttggaatcagct

SEQ ID NO: 354026 - DNA, 120 bp, Artificial Sequence
  ENSG00000139517_35 (sequence is synthesized)
taagctgtagcttttatgacaaaagacagtcatttttggtcagagtgatatttggtgacggaaacttgttcataatttattgttactatagaactatttggattttctcatttttagttc

SEQ ID NO: 354027 - DNA, 120 bp, Artificial Sequence
  ENSG00000139517_36 (sequence is synthesized)
tgatagttaaatattttggtttgttctgtgccttcagtttaaattatttcaggatttttcagatgtttaaataatggtgtgaatcattcaggatggaaataaaagtcatcctttctgtaa

SEQ ID NO: 354028 - DNA, 120 bp, Artificial Sequence
  ENSG00000139531_0 (sequence is synthesized)
gccccttctcgagaactcgcagagctgggctggtaaaattgcagtgctgaagacactggacccgcaaaaggctgtccctcccaaacctgggattctgggctcactgagttcacctgcgag

SEQ ID NO: 354029 - DNA, 120 bp, Artificial Sequence
  ENSG00000139531_1 (sequence is synthesized)
tcagccctacctgcactgctctggtctagtacaaacaggctgctggcattgaggtctgctacaatgctgctgctgcacagagctgtggtcctcaggctccaacaggcctgcagactcaag

SEQ ID NO: 354030 - DNA, 120 bp, Artificial Sequence
  ENSG00000139531_2 (sequence is synthesized)
tcaatcccctcaaggatctgcattcaggcctgctccacaaatgattcatttcagccccagcgccccagcctcaccttctctggtgataactccagcacccagggatggagagtcatgggg

SEQ ID NO: 354031 - DNA, 120 bp, Artificial Sequence
  ENSG00000139531_3 (sequence is synthesized)
accctattaggtctcggtgcagtgttggcctatcaggaccatcggtgtagggctgctcaggagtcaacacacatatacactaaggaggaagtgagttcccacaccagccctgagactggg

SEQ ID NO: 354032 - DNA, 120 bp, Artificial Sequence
  ENSG00000139531_4 (sequence is synthesized)
atctgggtgactctgggctctgaggtctttgatgtcacagaatttgtggacctacatccaggggggccttcaaagctgatgctagcagctgggggtcccctagagcccttctgggccctc

SEQ ID NO: 354033 - DNA, 120 bp, Artificial Sequence
  ENSG00000139531_5 (sequence is synthesized)
tatgctgttcacaaccagtcccatgtgcgtgagttactggctcagtacaagattggggagctgaatcctgaagacaaggtagcccccaccgtggagacctctgacccttatgctgatgat

SEQ ID NO: 354034 - DNA, 120 bp, Artificial Sequence
  ENSG00000139531_6 (sequence is synthesized)
cctgtacgtcacccagccctgaaggtcaacagccagcggccctttaatgcagagcctccccctgagctgctgacagaaaactacatcacacccaaccctatcttcttcacccggaaccat

SEQ ID NO: 354035 - DNA, 120 bp, Artificial Sequence
  ENSG00000139531_7 (sequence is synthesized)
ctgcctgtacctaacctggatccagacacctatcgcttacacgtagtaggagcacctgggggtcagtcactgtctctttccctggatgacttgcacaactttcccaggtacgagatcaca

SEQ ID NO: 354036 - DNA, 120 bp, Artificial Sequence
  ENSG00000139531_8 (sequence is synthesized)
gtcactctgcagtgtgccggcaaccgacgctctgagatgactcaggtcaaagaagtaaaaggtctggagtggagaacaggagccatcagcactgcacgctgggctggggcacggctctgt

SEQ ID NO: 354037 - DNA, 120 bp, Artificial Sequence
  ENSG00000139531_9 (sequence is synthesized)
gaggcccacgtctgctttgagggactggactcagaccctactgggactgcctatggagcatccatccctctggctcgggccatggaccctgaagctgaggtcctgctggcatatgagatg

SEQ ID NO: 354038 - DNA, 120 bp, Artificial Sequence
  ENSG00000139531_10 (sequence is synthesized)
aatgggcagcctctgccacgtgaccacggcttccctgtgcgtgtggtggttcctggagtggtgggtgcccgccatgtcaaatggctgggcagagtgagtgtgcagccagaggaaagttac

SEQ ID NO: 354039 - DNA, 120 bp, Artificial Sequence
  ENSG00000139531_11 (sequence is synthesized)
agccactggcaacggcgggattacaaaggcttctctccatctgtggactgggagactgtagattttgactctgctccatccattcaggaacttcctgtccagtcggccatcacagagccc

SEQ ID NO: 354040 - DNA, 120 bp, Artificial Sequence
  ENSG00000139531_12 (sequence is synthesized)
cgggatggagagactgtagaatcaggggaggtgaccatcaagggctatgcatggagtggtggtggcagggctgtgatccgggtggatgtgtctctggatgggggcctaacctggcaggtg

SEQ ID NO: 354041 - DNA, 120 bp, Artificial Sequence
  ENSG00000139531_13 (sequence is synthesized)
gctaagctggatggagaggaacagcgccccaggaaggcctgggcatggcgtctgtggcagttgaaagcccctgtgccagctggacaaaaggaactgaacattgtttgtaaggctgtggat

SEQ ID NO: 354042 - DNA, 120 bp, Artificial Sequence
  ENSG00000139531_14 (sequence is synthesized)
gatggttacaatgtgcagccagacaccgtggccccaatctggaacctgcgaggtgttctcagcaatgcctggcatcgtgtccatgtctatgtctccccatgagcatggaaaggagccacc

SEQ ID NO: 354043 - DNA, 120 bp, Artificial Sequence
  ENSG00000139531_15 (sequence is synthesized)
tccacccctttccccacccattagcctcactgcttcagaaaaatctttcccacctttcaacttcttggatcacaactctggccttcctaagccatacccaagtacacatatagcacattt

SEQ ID NO: 354044 - DNA, 120 bp, Artificial Sequence
  ENSG00000139531_16 (sequence is synthesized)
cacccaaggaccttccctctttggacactatgttacatacccctcttggcctttgaacctgtgccaggaagtgtgagctgttacagcaaggggctagaagtgaaaaaagtaattctggag

SEQ ID NO: 354045 - DNA, 120 bp, Artificial Sequence
  ENSG00000139531_17 (sequence is synthesized)
acaagcactattttctcttcctaccccacctccatttctaatgcctactgccatcaaggccttgttttgcttttctttttggattgttcagagaaatgtgtgtggcatgtgtaagaaaag

SEQ ID NO: 354046 - DNA, 120 bp, Artificial Sequence
  ENSG00000139531_18 (sequence is synthesized)
tgtatatactatcttatactacctctccaggttgccagagagttgcgaggagagcaaggggcacaaccgtctccctttatagttctacttttctaataaatagtctgtttaagatcataa

SEQ ID NO: 354047 - DNA, 120 bp, Artificial Sequence
  ENSG00000139531_19 (sequence is synthesized)
aatggttgagccacccgcttccagccaatggctgagggataagctgaggggagtgagaggtcacttactgcagccggacataacggcgctggccccgccccttctcgagaactcgcagag

SEQ ID NO: 354048 - DNA, 120 bp, Artificial Sequence
  ENSG00000139531_20 (sequence is synthesized)
gtaatatagggtttggtgcaatctgtggtttcaaacatctactgggggtcgtagaacatatccccagtggataagggggtactactgtacttgttggctcttcatgttagctctgctagg

SEQ ID NO: 354049 - DNA, 120 bp, Artificial Sequence
  ENSG00000139531_21 (sequence is synthesized)
cagatgtcatttcagagatgaggaagcaagttcagaacggcttggaatcttgctcaggaaatcgggctggttaatgaataacaagagatccagtttcacaaacccaaggcattttgcccc

SEQ ID NO: 354050 - DNA, 120 bp, Artificial Sequence
  ENSG00000139531_22 (sequence is synthesized)
cagaatctgggcttcttcacccatttaggctgtcactacttttttttcacttttttatccctgtttaagtcagtctgacccacagttgtcctctgctgacttcagaaataataatctggc

SEQ ID NO: 354051 - DNA, 120 bp, Artificial Sequence
  ENSG00000139531_23 (sequence is synthesized)
cagtagacatttggtttcggtcctttaggcccttcgccccaggcatcgttctctatggtggacaaagttcagaatggaagatgggagaaaggtgattctgattctagaagcacccatccc

SEQ ID NO: 354052 - DNA, 120 bp, Artificial Sequence
  ENSG00000139531_24 (sequence is synthesized)
tcctaccccattccccacccgcattacctgccatcctgtcagcacagtctgtctctgaagtgctccaagttttctctaagggcccatttggactcccactctcaagactcctcacttgcc

SEQ ID NO: 354053 - DNA, 120 bp, Artificial Sequence
  ENSG00000139531_25 (sequence is synthesized)
cagaaagctccttgctgaccttctctgtgtcttcctctcacccattcccttaggcctccctaatatcccctcccagggtctccctatcttgatcccagaatcttccttctacaggtctgc

SEQ ID NO: 354054 - DNA, 120 bp, Artificial Sequence
  ENSG00000139531_26 (sequence is synthesized)
gcactgctctggtctagtacaaacaggctgctggcattgagggacggagtctccaactcctggcctctagcagtcctcctgtgtaggtctcccaaagtgctagtgtgtccggaattggtg

SEQ ID NO: 354055 - DNA, 120 bp, Artificial Sequence
  ENSG00000139531_27 (sequence is synthesized)
tgggattacagacgtgagccactgcgccgggcattgttgttaatctcttactgtgggtaatttagtaattaaactataagaggtctgctacaatgctgctgctgcacagagctgtggtcc

SEQ ID NO: 354056 - DNA, 120 bp, Artificial Sequence
  ENSG00000139531_28 (sequence is synthesized)
actggacccggtaaggagactgggggtggtaaagaagctggggaggaagggctgctgagctgggcagcggagggggccttggtgtccagctgtgctccgaacctcaagggcaacaaaact

SEQ ID NO: 354057 - DNA, 120 bp, Artificial Sequence
  ENSG00000139531_29 (sequence is synthesized)
atcagtacctgcctccactccttctgtctgggtgctcttgagatcgcggggtgttgccgcaagacccttttgtgcctggatgccggacgtatgttcctacctaacgtgcccatggggagt

SEQ ID NO: 354058 - DNA, 120 bp, Artificial Sequence
  ENSG00000139531_30 (sequence is synthesized)
gaggggtcatcacctgcaccaacgggtggcatttctgtattacagcaaaaggctgtccctcccaaacctgggattctgggctcactgagttcacctgcgagtcagccctacctgcactgc

SEQ ID NO: 354059 - DNA, 120 bp, Artificial Sequence
  ENSG00000139531_31 (sequence is synthesized)
ataacggcgctggccccgccccttctcgagaactcgcagagctgggctggtaaaattgcagtgctgaagacactggacccggctgctcaggagtcaacacacatatacactaaggaggaa

SEQ ID NO: 354060 - DNA, 120 bp, Artificial Sequence
  ENSG00000139531_32 (sequence is synthesized)
gtgaagctgcagaccttcacatcagtctgacccacagttgtcctctgctgacttcagaaataataatctggccagtagacatttggtttcggtcctttaggcccttcgccccaggcatcg

SEQ ID NO: 354061 - DNA, 120 bp, Artificial Sequence
  ENSG00000139531_33 (sequence is synthesized)
gggaccctattaggtctcggtgcagtgttggcctatcaggaccatcggtgtagggtaagtagggaaagtgcttcattgtcagaacagactgggtgcagtggctcacgcctgttatcccag

SEQ ID NO: 354062 - DNA, 90 bp, Artificial Sequence
  ENSG00000139531_34 (sequence is synthesized)
tgggcaacatggcaaaaccccatctctagtaaaaattagccaggtgtggtggtacataacacaagaatcacttaaacccaggaggctaag

SEQ ID NO: 354063 - DNA, 90 bp, Artificial Sequence
  ENSG00000139531_35 (sequence is synthesized)
tacataacacaagaatcacttaaacccaggaggctaagtctgcagtgagccaagatcaagatcaggccactgctctccagcctgggtgac

SEQ ID NO: 354064 - DNA, 120 bp, Artificial Sequence
  ENSG00000139531_36 (sequence is synthesized)
tgtggtcctcaggctccaacaggcctgcaggtaggccagcccatcccaggacttgcctcctagcccctatctgccacccttagtgtcttttacaatgtcataccttgcaaataagacagt

SEQ ID NO: 354065 - DNA, 120 bp, Artificial Sequence
  ENSG00000139531_37 (sequence is synthesized)
aaatagtctgtttaagatcataactcttgggcctggggagtgagcctattgcaggaggaaggatgcatttgtactgggatgtataatgagattagaccaaaacaaacaaaactggggagg

SEQ ID NO: 354066 - DNA, 84 bp, Artificial Sequence
  ENSG00000139531_38 (sequence is synthesized)
gtataatgagattagaccaaaacaaacaaaactggggaggaagacagagaggaagtaggcttgtaggttaagaagtagggcttc

SEQ ID NO: 354067 - DNA, 120 bp, Artificial Sequence
  ENSG00000139531_39 (sequence is synthesized)
cgcttgaaccaaggaggcagagttcaagcaattctgtctcagcctcccaggtagctgggacgacaggcgcacaccgccacgcccggctaatttcttttgtattttagtagagatgggttt

SEQ ID NO: 354068 - DNA, 120 bp, Artificial Sequence
  ENSG00000139537_0 (sequence is synthesized)
agacgcgtcttacagtgggagagctcagcctcactgatagccggggatctctcctgttcgagggctgagatctccggtcccacaaccgcccacaaccaggggcacttctggaagtcccct

SEQ ID NO: 354069 - DNA, 120 bp, Artificial Sequence
  ENSG00000139537_1 (sequence is synthesized)
ttctagggacatttttcttctaagctctgtaacgcgggccgaggcagaccgaggcttctttcccggatccaatcccctgcccccatgcctaagaaagaaaaaatggccaagacgcccctg

SEQ ID NO: 354070 - DNA, 120 bp, Artificial Sequence
  ENSG00000139537_2 (sequence is synthesized)
tccgatgagaagcagctgcttctgtttcagcagaagttgctggcagaggaggagatggccaaaaagaaggagaggctcctcagccagttcttgaaggacaagctggccaaggaggaacac

SEQ ID NO: 354071 - DNA, 120 bp, Artificial Sequence
  ENSG00000139537_3 (sequence is synthesized)
aacagtgctctgaaccttaataagattaacacacagtggagaactgtccttcgggaagtcaagaccagagaacttcataaggacattgagatcctcagccaaacatttgaacgagtggtg

SEQ ID NO: 354072 - DNA, 120 bp, Artificial Sequence
  ENSG00000139537_4 (sequence is synthesized)
gactgtaaggacaatgtcatcaagtctttagctaaagacctgtccgaagccgaggagcagtacgcccatgccctgcgcagccacttgcacaatgttgaccagctcttggccctgcagagg

SEQ ID NO: 354073 - DNA, 120 bp, Artificial Sequence
  ENSG00000139537_5 (sequence is synthesized)
caccggctcagtctcctggaggaaagttacaacatggagctggaagccctaaccaaggagtttgagacagaaaggaagacaattattgaccaacatgagaaagagattcactatctgcaa

SEQ ID NO: 354074 - DNA, 120 bp, Artificial Sequence
  ENSG00000139537_6 (sequence is synthesized)
gatatcttcatggccatggagcagaactatatagattctgagtatgaaagcaagctggagttccagagcatgtggaatgatctcaaaaacatgaatttagaagagaagcactttctaaga

SEQ ID NO: 354075 - DNA, 120 bp, Artificial Sequence
  ENSG00000139537_7 (sequence is synthesized)
aggatgagaagagctccaaagagattgaagtacagatgaaaaaaatacagaaactacaggatgccataactatttcaaaaggcaagatcatgatacacagccgtgagagtgaagatgaga

SEQ ID NO: 354076 - DNA, 120 bp, Artificial Sequence
  ENSG00000139537_8 (sequence is synthesized)
accggtatatccgtaatgacaaggaattggtccttgtacaactgcgaaaacttaaggcccaaagaactcaggcccgggcagcatcccagaagaacttagtcagactcaccctggaaagta

SEQ ID NO: 354077 - DNA, 120 bp, Artificial Sequence
  ENSG00000139537_9 (sequence is synthesized)
atgccaccctcaaggccctgagaaagattgttgataagggtgaaaagatccttaaacttgctgaaatatgtaggaaatttgaaaccgaagaagaaaaagtgctgcctttttattcatcag

SEQ ID NO: 354078 - DNA, 120 bp, Artificial Sequence
  ENSG00000139537_10 (sequence is synthesized)
tattgactcctaaggagcaggaggggattcagaagaataatctagaagagcttactgaggagctcaccaaggtgatggtggactacataggaatggagaatttctggaaaaggtacaaca

SEQ ID NO: 354079 - DNA, 120 bp, Artificial Sequence
  ENSG00000139537_11 (sequence is synthesized)
aagtgaaactggagcaactgagcctccaacatagacgagcccagctgctagatatcaatgggaagctgcgggagatgctgaagcagtacttggatggcatctcagtgagtgacgaagtgc

SEQ ID NO: 354080 - DNA, 120 bp, Artificial Sequence
  ENSG00000139537_12 (sequence is synthesized)
tgagccagctcaacccactctttatagtcaactatcaaagcaacttactccagcccttgtccatacgtatagcccatccaggtgataaacaacatccaaccacttaaaatataattgaag

SEQ ID NO: 354081 - DNA, 120 bp, Artificial Sequence
  ENSG00000139537_13 (sequence is synthesized)
cagcccagatgatcttccacaacctgtgatctaaggaaaaaaatctttcaactcctagagatttttttttttttttgagaaatgtagggatgttgctattaaaaatttccatggagttta

SEQ ID NO: 354082 - DNA, 120 bp, Artificial Sequence
  ENSG00000139537_14 (sequence is synthesized)
aaatccaaacaacagagaaaggtgagatgattcttggaaagataggagagttggcccacccctggctggagatacaacttaatcacagaaccattgctagaaaagcctccacactcaaag

SEQ ID NO: 354083 - DNA, 120 bp, Artificial Sequence
  ENSG00000139537_15 (sequence is synthesized)
gtgtctctgtcagtgtgtaggagaaaccctaccacagtacctgggcttccaagactcatggggcacccaccatgcccagcttgattaaagacaatggtgtttattaattcatccatttgt

SEQ ID NO: 354084 - DNA, 120 bp, Artificial Sequence
  ENSG00000139537_16 (sequence is synthesized)
tcatcaaggttgcatgactattatgtgccaaagaataagcagaacactgctctttaaatgttcttaagtgtttatttataacaggttgttaataaagtaaaagcctgagttggcatatat

SEQ ID NO: 354085 - DNA, 120 bp, Artificial Sequence
  ENSG00000139537_17 (sequence is synthesized)
aggcattttcatgggagacctctgtactaaactatgctacaaacagttcaagagggtgggattgctggtagaagtgaaagggcactaataaggtaattccaaacatttgctattttgggg

SEQ ID NO: 354086 - DNA, 120 bp, Artificial Sequence
  ENSG00000139540_0 (sequence is synthesized)
agtgaaccattaactcctctcttatgtgagccttcacacactggccccacccctgaccccgccccaaggcaggtgggctaggagggggtgcatgtccatctcagccttctatgtgacgtg

SEQ ID NO: 354087 - DNA, 120 bp, Artificial Sequence
  ENSG00000139540_1 (sequence is synthesized)
gcctccgatccacctggacacctggaggctaagcctggattcccccttccctgactcaggaactgcttaacgtctacagcaaggcctaataggggacctgagggcacagtcctcaggatg

SEQ ID NO: 354088 - DNA, 120 bp, Artificial Sequence
  ENSG00000139540_2 (sequence is synthesized)
tttcggggagaataggagccagaacctgagcccctaagctattcccctcaccaatgatggggtccccagtgagtcatctgctggccggcttctgtgtgtgggtcgtcttgggctgggtag

SEQ ID NO: 354089 - DNA, 120 bp, Artificial Sequence
  ENSG00000139540_3 (sequence is synthesized)
ggggctcagtccccaacctgggccctgctgagcaggagcagaaccattacctggcccagctgtttggcctgtacggcgagaatgggacgctgactgcagggggcttggcgcggcttctcc

SEQ ID NO: 354090 - DNA, 120 bp, Artificial Sequence
  ENSG00000139540_4 (sequence is synthesized)
acagcctggggctaggccgagttcaggggcttcgcctgggacagcatgggcctctgactggacgggctgcatccccagctgcagacaattccacacacaggccacagaaccctgagctga

SEQ ID NO: 354091 - DNA, 120 bp, Artificial Sequence
  ENSG00000139540_5 (sequence is synthesized)
gtgtggatgtctgggcagggatgcctctgggtccctcagggtggggtgacctggaagagtcaaaggcccctcacctaccccgtgggccagccccctcgggcctggacctccttcacaggc

SEQ ID NO: 354092 - DNA, 120 bp, Artificial Sequence
  ENSG00000139540_6 (sequence is synthesized)
ttctgttgctggaccactcattggctgaccacctgaatgaggattgtctgaacggctcccagctgctggtcaattttggcttgagccccgctgctcctctgacccctcgtcagtttgctc

SEQ ID NO: 354093 - DNA, 120 bp, Artificial Sequence
  ENSG00000139540_7 (sequence is synthesized)
tgctgtgcccagccctgctttatcagatcgacagccgcgtctgcatcggcgctccggcccctgcacccccaggggatctactatctgccctgcttcagagtgccctggcagtcctgttgc

SEQ ID NO: 354094 - DNA, 120 bp, Artificial Sequence
  ENSG00000139540_8 (sequence is synthesized)
atgcactgctacatctgctaccgcatgcacaagaagggcggcacgcaggacctggcggactaccagagaaggacctgggcccggggctgtcagtgctcggaggcctcttcctgctctttg

SEQ ID NO: 354095 - DNA, 120 bp, Artificial Sequence
  ENSG00000139540_9 (sequence is synthesized)
tgctggagaacatgctggggcttttgcggcaccgagggctcaggccaagatgctgcaggcgaaaacgaaggaatctcgaaacacgcaacttggatccggagaatggcagtgggatggccc

SEQ ID NO: 354096 - DNA, 120 bp, Artificial Sequence
  ENSG00000139540_10 (sequence is synthesized)
ttcagcccctacaggcagctccagagccaggggctcagggccagagggagaagaacagccagcacccaccagctctggcccctcctgggcaccaaggccacagtcatgggcaccagggtg

SEQ ID NO: 354097 - DNA, 120 bp, Artificial Sequence
  ENSG00000139540_11 (sequence is synthesized)
gcactgatatcacgtggatggtcctcctgggagatggtctacacaacctcactgatgggctggccataggtgctgccttctctgatggcttctccagcggcctcagtaccaccttagcgg

SEQ ID NO: 354098 - DNA, 120 bp, Artificial Sequence
  ENSG00000139540_12 (sequence is synthesized)
tcttctgccatgagctgccccacgaactgggtgactttgccatgctgctccagtcagggctgtcctttcggcggctgctgctgctgagcctcgtgtctggagccctgggattggggggtg

SEQ ID NO: 354099 - DNA, 120 bp, Artificial Sequence
  ENSG00000139540_13 (sequence is synthesized)
cagtcctgggggtggggctcagcctgggccctgtccccctcactccctgggtgtttggggtcactgctggggtcttcctctatgtggcccttgtggacatgctaccagccctgcttcgtc

SEQ ID NO: 354100 - DNA, 120 bp, Artificial Sequence
  ENSG00000139540_14 (sequence is synthesized)
ctccggagcccctgcctacgccccatgtgctcctgcaggggctggggctgctgctggggggcggcctcatgcttgccataaccctgctggaggagcggctactgcccgtgaccactgagg

SEQ ID NO: 354101 - DNA, 120 bp, Artificial Sequence
  ENSG00000139540_15 (sequence is synthesized)
gctgatggggccagtggaaaggggtcgggttgcccttccttccccccaaccacaggaatggaggcgggacacagggccagtaggagcaataggattttaataaacagaacccatcccaaa

SEQ ID NO: 354102 - DNA, 120 bp, Artificial Sequence
  ENSG00000139540_16 (sequence is synthesized)
gcctgcccccccagctggaaccaagaaggttgtgtcccccttcctctgggtgtccttgtctcctgctatcagggcttcccctttcttggtcatcgatccctagagctctggctctttctc

SEQ ID NO: 354103 - DNA, 120 bp, Artificial Sequence
  ENSG00000139540_17 (sequence is synthesized)
ggaaccaagaaggttgtgtcccccttcctctgggtgtccttgtctcctgctatcagggcttcccctttcttggtcatcgatccctagagctctggctctttctcttcttgggggcacagt

SEQ ID NO: 354104 - DNA, 120 bp, Artificial Sequence
  ENSG00000139540_18 (sequence is synthesized)
atgtgacgtggcctccgatccacctggacacctggaggctaagcctggattcccccttccctgactcaggaactgcttaacgtctacagcaaggcctaataggggacctgaggtgacagc

SEQ ID NO: 354105 - DNA, 120 bp, Artificial Sequence
  ENSG00000139540_19 (sequence is synthesized)
atgctggggcttttgcggcaccgagggctcaggccagtgagtgatacccttttctcctccttctgctgagaccagagtcccagtcaagaactgggccaggccgggcgcggtggctcacgc

SEQ ID NO: 354106 - DNA, 120 bp, Artificial Sequence
  ENSG00000139540_20 (sequence is synthesized)
aggcccgcaaaagtctgagaaacaagggactaaggtgtttgggtgggggctgctgatgctttctgacaccattcctctggagttgagaggtcaggggcaaggccagaatcctgacatcct

SEQ ID NO: 354107 - DNA, 120 bp, Artificial Sequence
  ENSG00000139540_21 (sequence is synthesized)
ggggtgagaaactgctaagaacagtttatttcccatgcatgcatctgggcttgccactgatctgccttttcccccctcctccccaggttagggacacctgggtccaaccttcccaaggaa

SEQ ID NO: 354108 - DNA, 120 bp, Artificial Sequence
  ENSG00000139540_22 (sequence is synthesized)
tgagggaaagggctaaaatggtactaatggtgttaaggatagggtgaattatttaagaggaaaaagactaggcccaggttctccttagccatgtggctttcccagggcagagggtggccc

SEQ ID NO: 354109 - DNA, 120 bp, Artificial Sequence
  ENSG00000139540_23 (sequence is synthesized)
ctccctacccaggggcccagcagagactgacttttgatccctaccccagagaccagtgaaccattaactcctctcttatgtgagccttcacacactggccccacccctgaccccgcccca

SEQ ID NO: 354110 - DNA, 120 bp, Artificial Sequence
  ENSG00000139540_24 (sequence is synthesized)
ctgcctgcccccccagctggaaccaagaaggttgtgtcccccttcctctgggtgtccttgtctcctgctatcaggaactgcttaacgtctacagcaaggcctaataggggacctgagggc

SEQ ID NO: 354111 - DNA, 120 bp, Artificial Sequence
  ENSG00000139546_0 (sequence is synthesized)
agcgtgccccgcggcgggccctaccggccgcgactccgggcttggccccggccctagctcgtcggctgtgtattggggcgcgtggaggctgcagtcacggtggcgcccgcggggacggag

SEQ ID NO: 354112 - DNA, 120 bp, Artificial Sequence
  ENSG00000139546_1 (sequence is synthesized)
gagggaatgagtgaagaggagcaaggctccggcactaccacgggctgcgggctgcctagtatagagcaaatgctggccgccaacccaggcaagaccccgatcagccttctgcaggagtat

SEQ ID NO: 354113 - DNA, 120 bp, Artificial Sequence
  ENSG00000139546_2 (sequence is synthesized)
gggaccagaatagggaagacgcctgtgtacgaccttctcaaagccgagggccaagcccaccagcctaatttcaccttccgggtcaccgttggcgacaccagctgcactggtcagggcccc

SEQ ID NO: 354114 - DNA, 120 bp, Artificial Sequence
  ENSG00000139546_3 (sequence is synthesized)
agcaagaaggcagccaagcacaaggcagctgaggtggccctcaaacacctcaaaggggggagcatgctggagccggccctggaggacagcagttctttttctcccctagactcttcactg

SEQ ID NO: 354115 - DNA, 120 bp, Artificial Sequence
  ENSG00000139546_4 (sequence is synthesized)
cctgaggacattccggtttttactgctgcagcagctgctaccccagttccatctgtagtcctaaccaggagcccccccatggaactgcagccccctgtctcccctcagcagtctgagtgc

SEQ ID NO: 354116 - DNA, 120 bp, Artificial Sequence
  ENSG00000139546_5 (sequence is synthesized)
aaccccgttggtgctctgcaggagctggtggtgcagaaaggctggcggttgccggagtacacagtgacccaggagtctgggccagcccaccgcaaagaattcaccatgacctgtcgagtg

SEQ ID NO: 354117 - DNA, 120 bp, Artificial Sequence
  ENSG00000139546_6 (sequence is synthesized)
tgcttcgagtgcacacggtgcctctggatgcccgggatggcaatgaggtggagcctgatgatgaccacttctccattggtgtgggctcccgcctggatggtcttcgaaaccggggcccag

SEQ ID NO: 354118 - DNA, 120 bp, Artificial Sequence
  ENSG00000139546_7 (sequence is synthesized)
gttgcacctgggattctctacgaaattcagtaggagagaagatcctgtccctccgcagttgctccctgggctccctgggtgccctgggccctgcctgctgccgtgtcctcagtgagctct

SEQ ID NO: 354119 - DNA, 120 bp, Artificial Sequence
  ENSG00000139546_8 (sequence is synthesized)
ctgaggagcaggcctttcacgtcagctacctggatattgaggagctgagcctgagtggactctgccagtgcctggtggaactgtccacccagccggccactgtgtgtcatggctctgcaa

SEQ ID NO: 354120 - DNA, 120 bp, Artificial Sequence
  ENSG00000139546_9 (sequence is synthesized)
ccaccagggaggcagcccgtggtgaggctgcccgccgtgccctgcagtacctcaagatcatggcaggcagcaagtgaagccccagctggactcatggatgtgcaccctttgctccctgct

SEQ ID NO: 354121 - DNA, 120 bp, Artificial Sequence
  ENSG00000139546_10 (sequence is synthesized)
ctttctgcctctgggctcatgtatctgcgcagctctggtaccctctgtgggtgccatctctacctctgacacagactgcctgccttgaagctgagaaggcacagggcaaggagccaagga

SEQ ID NO: 354122 - DNA, 120 bp, Artificial Sequence
  ENSG00000139546_11 (sequence is synthesized)
ccacagagcctcagccagcccaggatccgtcctcattttattggtgatgatgaatgggaatgaaatcagggggctgtctactagagcctggaataaatatgctgctttgtggatttttaa

SEQ ID NO: 354123 - DNA, 120 bp, Artificial Sequence
  ENSG00000139546_12 (sequence is synthesized)
ctgcctccagctctaaatagtttggggttggcccggttcccagactgcactggaacactgggctttatgcccccacattcagtgcatttgtatagagcaaatgctggccgccaacccagg

SEQ ID NO: 354124 - DNA, 120 bp, Artificial Sequence
  ENSG00000139546_13 (sequence is synthesized)
gcgtgcaccggggcagtggctgctgcctccagctctaaatagtttggggttggcccggttcccagactgcactggaacactgggctttatgcccccacattcagtgcatttggtcagggc

SEQ ID NO: 354125 - DNA, 120 bp, Artificial Sequence
  ENSG00000139546_14 (sequence is synthesized)
gcatttgcaggtccccatggctttgtttcttggagtctctctcttcacagtccttttctccaaggccagtgagggaaggagagatttcaggggaaaagctactgactggattgggagaac

SEQ ID NO: 354126 - DNA, 120 bp, Artificial Sequence
  ENSG00000139546_15 (sequence is synthesized)
agataactgaaatcccagtggagtatttgggggagtgagtgcctggcgtgctgggctctgttcccggtgcttaaccaaattcccgtttaattttaaacctcagtctaaccaatgattgta

SEQ ID NO: 354127 - DNA, 120 bp, Artificial Sequence
  ENSG00000139546_16 (sequence is synthesized)
ggtggtagtatccgcccccccgactcctccccccgcccgcccatgttgaatatgaggaaactgagtgtttgagatagtaaatggctggtgcatggtcacatgcctagtatgtggcagagt

SEQ ID NO: 354128 - DNA, 120 bp, Artificial Sequence
  ENSG00000139546_17 (sequence is synthesized)
ggggcttttactccagagcctaccctctcttattccagctctctgtatttattgagggaaaagaaagtgctttgcaaaggaaattaaagcatttgcgctcagaagtccacccaaggcgtt

SEQ ID NO: 354129 - DNA, 120 bp, Artificial Sequence
  ENSG00000139546_18 (sequence is synthesized)
tgagctcagaagtcctgcttggcatggcttaattctggaagctaacggaaagataagggctcttccttccagcaattagtgaaacacttccagtcttcagcagggggaggttggtcagaa

SEQ ID NO: 354130 - DNA, 120 bp, Artificial Sequence
  ENSG00000139546_19 (sequence is synthesized)
ggtgggtggaggaaggggttctggtttttggtccctcagtccttggacccaagctggtcaggcatgaggaagtctgagaataaacagaatggaatagttgggaaccagaacttgaagaaa

SEQ ID NO: 354131 - DNA, 120 bp, Artificial Sequence
  ENSG00000139546_20 (sequence is synthesized)
tcacagcagctggtaagctcttgggacaagaggtcatttgtgattttcagacagccttatgaatgatgtccgaccatgtttaagggtcttgcaggccccattttcttctgggttgaccac

SEQ ID NO: 354132 - DNA, 120 bp, Artificial Sequence
  ENSG00000139546_21 (sequence is synthesized)
gttctgtgtttgaggcccatcaggcacttctgggactggaaatacagctcttctcccactgtcctggcttagatgatacccaagtgttccagaatggaaatgggctggggcctggagaag

SEQ ID NO: 354133 - DNA, 120 bp, Artificial Sequence
  ENSG00000139546_22 (sequence is synthesized)
gcctcccttgagtgggagggggaaggaagccggctagagcaggaggagcaggctagatgtgtggacagacagctccccacccggtggaatcgggagatggtagtcaggaatctaaagtag

SEQ ID NO: 354134 - DNA, 120 bp, Artificial Sequence
  ENSG00000139546_23 (sequence is synthesized)
tggttaggtttggagctcatgggcaggctcagatggaacccttcacctcaactttggccctgtgccttttccttcaggagcccccccatggaactgcagccccctgtctcccctcagcag

SEQ ID NO: 354135 - DNA, 120 bp, Artificial Sequence
  ENSG00000139546_24 (sequence is synthesized)
ggagccggccctggaggacagcaggtgagggaggaaccgaggcatcccagaagcccttcaaggaacccaggccctgcaccacccactctgccccgaggcctggccagttctttttctccc

SEQ ID NO: 354136 - DNA, 120 bp, Artificial Sequence
  ENSG00000139546_25 (sequence is synthesized)
cttagccaccctgacctggcctcttcctgagagtccctctggacctgaacagggttttccagggcttctgctgctatgaagaattcttggggtggaggggttggttagccccatagaggg

SEQ ID NO: 354137 - DNA, 120 bp, Artificial Sequence
  ENSG00000139546_26 (sequence is synthesized)
gttgtggcagtaggttggggcctgggttagggagggagaggggtagaggcttgaggctaaagggagttactccccaacatacctccttgttctagcaagatgtccttccttcacgcgcag

SEQ ID NO: 354138 - DNA, 120 bp, Artificial Sequence
  ENSG00000139546_27 (sequence is synthesized)
gttggagtttgttgctcctctggttcttgggtacaaagataccctcttctctgagactctcttttctcagtcttttcgccggtgtttggcagcaaaggatccgaggaggaagctgttggt

SEQ ID NO: 354139 - DNA, 120 bp, Artificial Sequence
  ENSG00000139546_28 (sequence is synthesized)
tgagcctccctgattctttggctcaatttggaagttctcttaggggattgggaggtcaggaggacgtgggtcccccacccctctcttccccctatacatgggtgtgaatcaaaggccccc

SEQ ID NO: 354140 - DNA, 120 bp, Artificial Sequence
  ENSG00000139546_29 (sequence is synthesized)
gcctctccagctgcgacacagatggcgcgcgggctcttgggttctgtagttttctcgcgatccaaaaggctccgtgcccaagtgagtccttaccgcctccctacccagcggcttcccctc

SEQ ID NO: 354141 - DNA, 120 bp, Artificial Sequence
  ENSG00000139546_30 (sequence is synthesized)
cgctagtacgcatgtccacagcttcacggaccgggagagagggggcgcggaaggaaggaggcgggacggtattacaaacaaaaaaatacggccttctcgagaagcgacggcggagggccc

SEQ ID NO: 354142 - DNA, 120 bp, Artificial Sequence
  ENSG00000139546_31 (sequence is synthesized)
gctcctcccagaaggcggtgcagcctgcccgggcgagccacgcacgcagagggttgtggggcggatagctcccctccagatggaggctcacgaagtagggtgggcgggggactccatatc

SEQ ID NO: 354143 - DNA, 120 bp, Artificial Sequence
  ENSG00000139547_0 (sequence is synthesized)
gggagctgcagaccggagctgttcctatttgcccatcctctccctgctttctttacctctgaggttggattctccctgtgggatcctgcaatccttctgccccaaaaaactattatagca

SEQ ID NO: 354144 - DNA, 120 bp, Artificial Sequence
  ENSG00000139547_1 (sequence is synthesized)
ccttctgccccaaaaaactattatagcaggagggaacctgttcctgctcactctttgccttctccttctcatcctagacagcctgaccgtgccctagttttcagaggagtgattgattct

SEQ ID NO: 354145 - DNA, 120 bp, Artificial Sequence
  ENSG00000139547_2 (sequence is synthesized)
ggggtgcggagcaggatgaggaaactcaggctcagagagggatttccacctaatgtgcctggaaaccatgggtagctacccaataaggcctttctatgttcagaaggtcatggaccagga

SEQ ID NO: 354146 - DNA, 120 bp, Artificial Sequence
  ENSG00000139547_3 (sequence is synthesized)
gtgttggtatcggagctttgtagagacagttttgacccctgtacttagagcagaggggtgtgtttgccatggagagtgtgtgtgggcagctgtgtgtaagcctgtgtgagttctgtgtat

SEQ ID NO: 354147 - DNA, 120 bp, Artificial Sequence
  ENSG00000139547_4 (sequence is synthesized)
gttcctgtgtgaatatatgtgtgtgctccttcatggacacagcatgcatgtagtgggcatagcaaggcagagagaaatcaggagactaggggcacattgcccagtaggaagatagtatct

SEQ ID NO: 354148 - DNA, 120 bp, Artificial Sequence
  ENSG00000139547_5 (sequence is synthesized)
tcctactgggcaggacttgaggtgtgcaaaggtgtgcatgagtactgcaaaagcagttcaaagagcagagaggtggggccagaataaatatgttgcagaaaggcagtcatcagggaggaa

SEQ ID NO: 354149 - DNA, 120 bp, Artificial Sequence
  ENSG00000139547_6 (sequence is synthesized)
agtgaggattccctgccaaaatgcctgagggcttccctgcctaccacagccctctgtgttcttaaatcctcctgtctgaacagaggccagactctggtttcccccacagcctgtctgtgt

SEQ ID NO: 354150 - DNA, 120 bp, Artificial Sequence
  ENSG00000139547_7 (sequence is synthesized)
ctgtcctctgcaaagccatgtggctctacctggcggttttcgtgggcctgtactaccttctgcactggtaccgggagaggcaggtgctgagccacctgagagataagtatgtgttcatca

SEQ ID NO: 354151 - DNA, 120 bp, Artificial Sequence
  ENSG00000139547_8 (sequence is synthesized)
cgggctgtgactctggcttcgggaaactgctggccagacagctggatgcacgaggcttgcgggtgctggctgcatgtctgacggagaaaggagccgagcagctgaggggccagacttcag

SEQ ID NO: 354152 - DNA, 120 bp, Artificial Sequence
  ENSG00000139547_9 (sequence is synthesized)
acaggctggagacggtgaccctggatgttaccaagacagagagcgttgctgcagccgcccagtgggtgaaggagtgcgtgagagacaaaggactctggggcctggtgaataatgctggca

SEQ ID NO: 354153 - DNA, 120 bp, Artificial Sequence
  ENSG00000139547_10 (sequence is synthesized)
ccacggctcccaatgagttgctcaccaagcaggacttcgtgaccatactggacgtgaacttgttgggggtgattgatgtgactctgagcctgctgcccttagtgaggagggccaggggcc

SEQ ID NO: 354154 - DNA, 120 bp, Artificial Sequence
  ENSG00000139547_11 (sequence is synthesized)
gtgtggtcaacgtctccagtgtcatgggccgggtgtcactttttggtggaggctactgcatctccaagtatggcgtggaagccttctctgactccctcaggagggaactctcctactttg

SEQ ID NO: 354155 - DNA, 120 bp, Artificial Sequence
  ENSG00000139547_12 (sequence is synthesized)
gggtgaaggtggctatgattgaacctggctatttcaagactgctgtgaccagtaaggagagattcttaaagagcttcctggagatttgggaccggtccagtccagaggtcaaggaggcct

SEQ ID NO: 354156 - DNA, 120 bp, Artificial Sequence
  ENSG00000139547_13 (sequence is synthesized)
atggcgagaagtttgttgcagactataagaaatcagctgaacaaatggagcagaagtgcacacaggatctgtcgttggtgaccaactgcatggagcatgcgctgattgcctgccaccccc

SEQ ID NO: 354157 - DNA, 120 bp, Artificial Sequence
  ENSG00000139547_14 (sequence is synthesized)
gtactcgctactcagctggctgggatgccaagcttctctacctccccatgagctacatgcccaccttcctggtggatgccattatgtactgggtctctccaagcccggccaaggctctat

SEQ ID NO: 354158 - DNA, 120 bp, Artificial Sequence
  ENSG00000139547_15 (sequence is synthesized)
gaagctaaggttggatgcatggttgcatggatttggggtgtgctatgaggggtggtgtatccttgggagagatataaagtggagggagggagccgtccggtcagtagggcaccaatccca

SEQ ID NO: 354159 - DNA, 120 bp, Artificial Sequence
  ENSG00000139547_16 (sequence is synthesized)
cctccttcattacctcctggccatgattctcctgggagataattctgctctctggagatgttggtaggaaagtttcaagttacgcagctgagaaacagggaccaaatagtgctcctgggt

SEQ ID NO: 354160 - DNA, 120 bp, Artificial Sequence
  ENSG00000139547_17 (sequence is synthesized)
gcattgtcaccgtgggtggccactcaagggtccaagcctctagggccatccttgggctaacaactggggtgggtgtgagcaggtggaaggagcctcagcccatgccattacctcctgctt

SEQ ID NO: 354161 - DNA, 120 bp, Artificial Sequence
  ENSG00000139547_18 (sequence is synthesized)
ccttatcaggctgtgtgttaattctgggccagtctacaccctcccacggggtggaaatggcctggaggatgtgagggcacccctcctctgaagatccctgtacacgtggtgttgggactg

SEQ ID NO: 354162 - DNA, 120 bp, Artificial Sequence
  ENSG00000139547_19 (sequence is synthesized)
gaaccattatgcggccccataggcctcaggagtcatcccagaagcagtggctgggaggtggtgtcctaagtaaggatctgtgcagaggacaaataaatcagtttttgatttgtcttgaaa

SEQ ID NO: 354163 - DNA, 78 bp, Artificial Sequence
  ENSG00000139547_20 (sequence is synthesized)
ttggaggagaagaggcactctggttttttgaattttcagattttctgctctggtattggcgacctacagatggggttt

SEQ ID NO: 354164 - DNA, 77 bp, Artificial Sequence
  ENSG00000139547_21 (sequence is synthesized)
gttggctttgagctatttctttctgtttgttagttttccttcaaacagtttcctcagctgcaggtctgttggagttt

SEQ ID NO: 354165 - DNA, 87 bp, Artificial Sequence
  ENSG00000139547_22 (sequence is synthesized)
atgagatgtcatctacacagggttcagggacccatttgagaaggcagtctgtctgttctaagagctcaaacaccatgctgggagaac

SEQ ID NO: 354166 - DNA, 83 bp, Artificial Sequence
  ENSG00000139547_23 (sequence is synthesized)
cagtgctgtcagacagggatgttatgcactgctcccagaggtggagtctatagaggcagaaagccttgccttgctgcagtggg

SEQ ID NO: 354167 - DNA, 120 bp, Artificial Sequence
  ENSG00000139547_24 (sequence is synthesized)
gagtctatagaggcagaaagccttgccttgctgcagtgggcttcgcccagtttgagctgcccagctgctttgctttcctactcaagcctcagcaatggtgagcaaccctcctcctgccag

SEQ ID NO: 354168 - DNA, 120 bp, Artificial Sequence
  ENSG00000139547_25 (sequence is synthesized)
accctcctcctgccaggctgctgccttgcaggttgatctcagactactgcactagcagtgagcaaagctctgtgggaatgggacccaccaaaccaggcacaggatataatctcctggtgt

SEQ ID NO: 354169 - DNA, 90 bp, Artificial Sequence
  ENSG00000139547_26 (sequence is synthesized)
tctaggaaagggaaatcccctgacctcttacacttcctgggtaaggcaatgccctgccttgcttcggctcaccctctgtgggctgcacgc

SEQ ID NO: 354170 - DNA, 120 bp, Artificial Sequence
  ENSG00000139549_0 (sequence is synthesized)
ctggcagcaccagagtcctgcagcagagacgggctgggctggcactcacccacgaccccccttccctgctatgatggtttgtcagtagcaggtcctagacaccccccgcccgctcccggg

SEQ ID NO: 354171 - DNA, 120 bp, Artificial Sequence
  ENSG00000139549_1 (sequence is synthesized)
gcacgtgggcagagctagcagcagccaggtgcacggagccacaagagctctagggcactctgggggcagctgtgcctgctgccctctctggtgcctgtggagatgcctaactgacaggag

SEQ ID NO: 354172 - DNA, 120 bp, Artificial Sequence
  ENSG00000139549_2 (sequence is synthesized)
agttagtgaggacaagaacgctcccttttggccgaggtccgctgtatccatggctctcctgaccaatctactgcccctgtgctgcttggcacttctggcgctgccagcccagagctgcgg

SEQ ID NO: 354173 - DNA, 120 bp, Artificial Sequence
  ENSG00000139549_3 (sequence is synthesized)
gccgggccgggggccggttggccggcgccgctatgcgcgcaagcagctcgtgccgctactctacaagcaatttgtgcccggcgtgccagagcggaccctgggcgccagtgggccagcgga

SEQ ID NO: 354174 - DNA, 120 bp, Artificial Sequence
  ENSG00000139549_4 (sequence is synthesized)
ggggagggtggcaaggggctccgagcgcttccgggacctcgtgcccaactacaaccccgacatcatcttcaaggatgaggagaacagtggagccgaccgcctgatgaccgagcgttgtaa

SEQ ID NO: 354175 - DNA, 120 bp, Artificial Sequence
  ENSG00000139549_5 (sequence is synthesized)
ggagcgggtgaacgctttggccattgccgtgatgaacatgtggcccggagtgcgcctacgagtgactgagggctgggacgaggacggccaccacgctcaggattcactccactacgaagg

SEQ ID NO: 354176 - DNA, 120 bp, Artificial Sequence
  ENSG00000139549_6 (sequence is synthesized)
ccgtgctttggacatcactacgtctgaccgcgaccgcaacaagtatgggttgctggcgcgcctcgcagtggaagccggcttcgactgggtctactacgagtcccgcaaccacgtccacgt

SEQ ID NO: 354177 - DNA, 120 bp, Artificial Sequence
  ENSG00000139549_7 (sequence is synthesized)
gtcggtcaaagctgataactcactggcggtccgggcgggcggctgctttccgggaaatgcaactgtgcgcctgtggagcggcgagcggaaagggctgcgggaactgcaccgcggagactg

SEQ ID NO: 354178 - DNA, 120 bp, Artificial Sequence
  ENSG00000139549_8 (sequence is synthesized)
ggttttggcggccgatgcgtcaggccgggtggtgcccacgccggtgctgctcttcctggaccgggacttgcagcgccgggcttcatttgtggctgtggagaccgagtggcctccacgcaa

SEQ ID NO: 354179 - DNA, 120 bp, Artificial Sequence
  ENSG00000139549_9 (sequence is synthesized)
actgttgctcacgccctggcacctggtgtttgccgctcgagggccggcgcccgcgccaggcgactttgcaccggtgttcgcgcgccggctacgcgctggggactcggtgctggcgcccgg

SEQ ID NO: 354180 - DNA, 120 bp, Artificial Sequence
  ENSG00000139549_10 (sequence is synthesized)
cggggatgcgcttcggccagcgcgcgtggcccgtgtggcgcgggaggaagccgtgggcgtgttcgcgccgctcaccgcgcacgggacgctgctggtgaacgatgtcctggcctcttgcta

SEQ ID NO: 354181 - DNA, 120 bp, Artificial Sequence
  ENSG00000139549_11 (sequence is synthesized)
cgcggttctggagagtcaccagtgggcgcaccgcgcttttgcccccttgagactgctgcacgcgctaggggcgctgctccccggcggggccgtccagccgactggcatgcattggtactc

SEQ ID NO: 354182 - DNA, 120 bp, Artificial Sequence
  ENSG00000139549_12 (sequence is synthesized)
tcggctcctctaccgcttagcggaggagctactgggctgagcgtcccaggcatagaaacctcgaagcgcccgaggaaacgagggcctgctggctgagatatggggctgtgggcagcagac

SEQ ID NO: 354183 - DNA, 120 bp, Artificial Sequence
  ENSG00000139549_13 (sequence is synthesized)
gatgccgactggaagggagggagagggagggggagggagaaaatggggctatgcctggcttaggggcaacctcgtactgagaggaggtgataccgggtcctaggtaggtagggctgatgg

SEQ ID NO: 354184 - DNA, 120 bp, Artificial Sequence
  ENSG00000139549_14 (sequence is synthesized)
tgcgcactccttaaagaggactatttagcctctcccccagtgcttcagccccacccgataattttattttatttcttatttataaattgtaatataatgattcccttgcccagcttgcca

SEQ ID NO: 354185 - DNA, 120 bp, Artificial Sequence
  ENSG00000139549_15 (sequence is synthesized)
aggtgaggggctggggcatggcattaacactgtctgacacagccagccagtctgacatctgacgttttcctgcaaggtgggctaataaagggaaggctttcaggagcttactggaaaaca

SEQ ID NO: 354186 - DNA, 120 bp, Artificial Sequence
  ENSG00000139549_16 (sequence is synthesized)
cttccattcagagggtgattcacctccagagagggggataaaggtggccaacctgagttaacagcttacttccggctccccctccttcctcagcagggtctttgggacccttttcctccc

SEQ ID NO: 354187 - DNA, 120 bp, Artificial Sequence
  ENSG00000139549_17 (sequence is synthesized)
ttcagaaggggcatcccaacccataagcaacagagcccacaagagtcgtacccttttccaggctgctgtttccgtctcccatccagagaggaccagcatttcgctcctgcggctgaaggg

SEQ ID NO: 354188 - DNA, 120 bp, Artificial Sequence
  ENSG00000139549_18 (sequence is synthesized)
tccagggttgtcccaggtgggaaagactgtgcacacctcttctctgtttataggggctccagcaggggctcaggcccctatgagtactgatactcaaagcatctagtcccctattgttag

SEQ ID NO: 354189 - DNA, 120 bp, Artificial Sequence
  ENSG00000139549_19 (sequence is synthesized)
gtagtcctggtccccatcctaccttggtggcagggcctggatggggtggatgttttttctgatatgccactgggccaactgatgatccatgggaaacctgggtaataatttgcaatcgtc

SEQ ID NO: 354190 - DNA, 120 bp, Artificial Sequence
  ENSG00000139549_20 (sequence is synthesized)
gcatagtcatggcctgaaaaaggaaggggggcacagtaagaggctggaatatttccttactgaagggctgctcagagagagagaatggattcagcctgggtgtatgtgggggaagtagat

SEQ ID NO: 354191 - DNA, 120 bp, Artificial Sequence
  ENSG00000139549_21 (sequence is synthesized)
tccctaaacaagggcatatcagcattacaacccgagctcccctcctgatcgctggccctgattgttgtttctactggcttggtcttcagcgcctcctcctccctctcccattatcaccag

SEQ ID NO: 354192 - DNA, 120 bp, Artificial Sequence
  ENSG00000139549_22 (sequence is synthesized)
ctctacttccctagcctgggtgtttttggaacctttaggttccaacgcagtagacacctggaatccaggcaggcaggtgcccctgagttaggaatggaagctctggaggaagctgggctg

SEQ ID NO: 354193 - DNA, 120 bp, Artificial Sequence
  ENSG00000139549_23 (sequence is synthesized)
ctccagaagggaagtgtcttgggtggaggtgaggcggggaggaggaaatagtcgggggttgttggtaccacccggagctcgcccttgccagtagccgctgtgcgctcccatcgcacaggg

SEQ ID NO: 354194 - DNA, 120 bp, Artificial Sequence
  ENSG00000139549_24 (sequence is synthesized)
tccctgctatacaccgccctctggtggccttcaagagaattctaggcctatgcatatggttctctgaaacggaaggcaagcggtctcagacatggaagggtgtactggacctgcgcaaag

SEQ ID NO: 354195 - DNA, 120 bp, Artificial Sequence
  ENSG00000139549_25 (sequence is synthesized)
gagcccgctcccaggagggagagatgatgggtgggccttgttaagctgccagcgctgagtcacacatatcaggagctgtcaaggagtccacctgcttctccttgggcaagtcgttccaaa

SEQ ID NO: 354196 - DNA, 120 bp, Artificial Sequence
  ENSG00000139549_26 (sequence is synthesized)
ccatggcacttttacatcactcctgcctagtttagctctgtggttcctggaagctgcagatgccctactagtatacctgtagtagcccagacttccttatgtatcaaagttgccgcctca

SEQ ID NO: 354197 - DNA, 120 bp, Artificial Sequence
  ENSG00000139549_27 (sequence is synthesized)
tgtccctcaccctcatgacccttgagttcaattgtcaaggaggtgaaagcataatagggttccaggtagtgcttgataaaggcaatatttggaagcaggtcaagtttacctttggtgtcc

SEQ ID NO: 354198 - DNA, 120 bp, Artificial Sequence
  ENSG00000139549_28 (sequence is synthesized)
ttccacccactgctgccctcaacccacactgaggctctgttgccacctttgtttttccgggtctcagaaacacatcccaagctgtggacctttcctactttctaaacctgcccttgtctc

SEQ ID NO: 354199 - DNA, 120 bp, Artificial Sequence
  ENSG00000139549_29 (sequence is synthesized)
tttttatcagatctggtgccttcctgtcatgtcaccacaggtgatgactaatccgataaatgaattagttgtcctatgttgatgggctccttggttttactgcccttcccaggtaatcag

SEQ ID NO: 354200 - DNA, 120 bp, Artificial Sequence
  ENSG00000139549_30 (sequence is synthesized)
gtaatgcatatatatatacatgtattttttaaagagacaggatctcgctctgttgcccacgctggagtgcagtggtgtgaccttggtcccctgtagcttcaacctcctgggctcaagcaa

SEQ ID NO: 354201 - DNA, 83 bp, Artificial Sequence
  ENSG00000139549_31 (sequence is synthesized)
aagtagctgggactacaggtgcatgccgctatgcctggctaatgtttgtattttctgtagagacagagtcttgcgcctttgcc

SEQ ID NO: 354202 - DNA, 120 bp, Artificial Sequence
  ENSG00000139549_32 (sequence is synthesized)
cctgggctcccgcctttgccccacaaagtgctggaattacaggtgtgagcccctgtgcccagcagtaatacatatatcttacagttttaacctttaaccataaaatcataatggtgatga

SEQ ID NO: 354203 - DNA, 120 bp, Artificial Sequence
  ENSG00000139549_33 (sequence is synthesized)
ttcctagcactgtaataagttagctagggagatatttcaggacaaggagaactcattggtttcccttaaactacatcctgtaagtaactttctaggcttgaggcttacctctcaaccctc

SEQ ID NO: 354204 - DNA, 120 bp, Artificial Sequence
  ENSG00000139549_34 (sequence is synthesized)
acttcctccctttattatctttattcctttgaggcccctcctaactctcaaaaaaaaaaaaaatccatgacttgccttcaagcggcaatgcgcaccatcttggtgcagcaggtgggcata

SEQ ID NO: 354205 - DNA, 120 bp, Artificial Sequence
  ENSG00000139549_35 (sequence is synthesized)
ttcacttggccatgcaacacctcccaattgcagcacctttcaccatcaacaaaataggcgatgatgatttggcttagaagccagctagatctggggataatgatacctccgtgacaggat

SEQ ID NO: 354206 - DNA, 120 bp, Artificial Sequence
  ENSG00000139549_36 (sequence is synthesized)
ggttgagaaggattgtgctggatgtggagtaggcgctcagtaaatgttttctattctttggccacttctgactgactttgctgccttccgatcacttctttcctcaccactccactaaaa

SEQ ID NO: 354207 - DNA, 120 bp, Artificial Sequence
  ENSG00000139549_37 (sequence is synthesized)
gcatcagtcgtgcaaactttctggggttttgtcacagcactttcagaagctggaggtatactagcagcatttctgtagtagtccagacttccttacatatagaagttgactcttcatgtc

SEQ ID NO: 354208 - DNA, 120 bp, Artificial Sequence
  ENSG00000139549_38 (sequence is synthesized)
cctcacctttgtgacccttgagctcagtagtcaaggaggtgaaagcataatggggttccaggtagtgcctgaaactacttttctgaagaagtataattaaaagtaatcttgttttgagaa

SEQ ID NO: 354209 - DNA, 120 bp, Artificial Sequence
  ENSG00000139567_0 (sequence is synthesized)
aggaaacggtttattaggagggagtggtggagctgggccaggcaggaagacgctggaataagaaacatttttgctccagcccccatcccagtcccgggaggctgccgcgccagctgcgcc

SEQ ID NO: 354210 - DNA, 80 bp, Artificial Sequence
  ENSG00000139567_1 (sequence is synthesized)
ggaccccagcccgccgtccagcgctggcggtgcaactgcggccgcgcggtggaggggaggtggccccggtccgccgaagg

SEQ ID NO: 354211 - DNA, 120 bp, Artificial Sequence
  ENSG00000139567_2 (sequence is synthesized)
aaggctagcgccccgccacccgcagagcgggcccagagggaccatgaccttgggctcccccaggaaaggccttctgatgctgctgatggccttggtgacccagggagaccctgtgaagcc

SEQ ID NO: 354212 - DNA, 120 bp, Artificial Sequence
  ENSG00000139567_3 (sequence is synthesized)
gtctcggggcccgctggtgacctgcacgtgtgagagcccacattgcaaggggcctacctgccggggggcctggtgcacagtagtgctggtgcgggaggaggggaggcacccccaggaaca

SEQ ID NO: 354213 - DNA, 120 bp, Artificial Sequence
  ENSG00000139567_4 (sequence is synthesized)
tcggggctgcgggaacttgcacagggagctctgcagggggcgccccaccgagttcgtcaaccactactgctgcgacagccacctctgcaaccacaacgtgtccctggtgctggaggccac

SEQ ID NO: 354214 - DNA, 120 bp, Artificial Sequence
  ENSG00000139567_5 (sequence is synthesized)
ccaacctccttcggagcagccgggaacagatggccagctggccctgatcctgggccccgtgctggccttgctggccctggtggccctgggtgtcctgggcctgtggcatgtccgacggag

SEQ ID NO: 354215 - DNA, 120 bp, Artificial Sequence
  ENSG00000139567_6 (sequence is synthesized)
gcaggagaagcagcgtggcctgcacagcgagctgggagagtccagtctcatcctgaaagcatctgagcagggcgacagcatgttgggggacctcctggacagtgactgcaccacagggag

SEQ ID NO: 354216 - DNA, 120 bp, Artificial Sequence
  ENSG00000139567_7 (sequence is synthesized)
tggctcagggctccccttcctggtgcagaggacagtggcacggcaggttgccttggtggagtgtgtgggaaaaggccgctatggcgaagtgtggcggggcttgtggcacggtgagagtgt

SEQ ID NO: 354217 - DNA, 120 bp, Artificial Sequence
  ENSG00000139567_8 (sequence is synthesized)
tgagatctataacacagtgttgctcagacacgacaacatcctaggcttcatcgcctcagacatgacctcccgcaactcgagcacgcagctgtggctcatcacgcactaccacgagcacgg

SEQ ID NO: 354218 - DNA, 120 bp, Artificial Sequence
  ENSG00000139567_9 (sequence is synthesized)
ctccctctacgactttctgcagagacagacgctggagccccatctggctctgaggctagctgtgtccgcggcatgcggcctggcgcacctgcacgtggagatcttcggtacacagggcaa

SEQ ID NO: 354219 - DNA, 120 bp, Artificial Sequence
  ENSG00000139567_10 (sequence is synthesized)
accagccattgcccaccgcgacttcaagagccgcaatgtgctggtcaagagcaacctgcagtgttgcatcgccgacctgggcctggctgtgatgcactcacagggcagcgattacctgga

SEQ ID NO: 354220 - DNA, 120 bp, Artificial Sequence
  ENSG00000139567_11 (sequence is synthesized)
catcggcaacaacccgagagtgggcaccaagcggtacatggcacccgaggtgctggacgagcagatccgcacggactgctttgagtcctacaagtggactgacatctgggcctttggcct

SEQ ID NO: 354221 - DNA, 120 bp, Artificial Sequence
  ENSG00000139567_12 (sequence is synthesized)
ggtgctgtgggagattgcccgccggaccatcgtgaatggcatcgtggaggactatagaccacccttctatgatgtggtgcccaatgaccccagctttgaggacatgaagaaggtggtgtg

SEQ ID NO: 354222 - DNA, 120 bp, Artificial Sequence
  ENSG00000139567_13 (sequence is synthesized)
tgtggatcagcagacccccaccatccctaaccggctggctgcagacccggtcctctcaggcctagctcagatgatgcgggagtgctggtacccaaacccctctgcccgactcaccgcgct

SEQ ID NO: 354223 - DNA, 120 bp, Artificial Sequence
  ENSG00000139567_14 (sequence is synthesized)
gcggatcaagaagacactacaaaaaattagcaacagtccagagaagcctaaagtgattcaatagcccaggagcacctgattcctttctgcctgcagggggctgggggggtggggggcagt

SEQ ID NO: 354224 - DNA, 120 bp, Artificial Sequence
  ENSG00000139567_15 (sequence is synthesized)
ggatggtgccctatctgggtagaggtagtgtgagtgtggtgtgtgctggggatgggcagctgcgcctgcctgctcggcccccagcccacccagccaaaaatacagctgggctgaaacctg

SEQ ID NO: 354225 - DNA, 120 bp, Artificial Sequence
  ENSG00000139567_16 (sequence is synthesized)
aaaacgcatctggattttgctagccccaaactctgccctcattgctgcaagcctcctagaccgaggacccccgggctgagggtgggcccccatcccagtcccgggaggctgccgcgccag

SEQ ID NO: 354226 - DNA, 120 bp, Artificial Sequence
  ENSG00000139567_17 (sequence is synthesized)
aaaaaaaactctgtgatttcctctgggcaggagggagccacggccagcggctgtcacacttcatggctcttactccacctctcttgctcctctctgcagggaccatgaccttgggctccc

SEQ ID NO: 354227 - DNA, 120 bp, Artificial Sequence
  ENSG00000139567_18 (sequence is synthesized)
ctgtctggcctgctcaaagcggcaggctccctgacgcctggctctctccccacccctatggccagcatggtgcaccccctaccactcccgggacaggatgcaaaagaggctccagagtca

SEQ ID NO: 354228 - DNA, 120 bp, Artificial Sequence
  ENSG00000139567_19 (sequence is synthesized)
ggagaaaggaggcaggagccaggaacctgggttctcatcctggtttcgccagcctccaggtctgctctgtgaagtgggctcataatgcctgccttgcccactcacatctcgctgggttct

SEQ ID NO: 354229 - DNA, 120 bp, Artificial Sequence
  ENSG00000139567_20 (sequence is synthesized)
tgggaacctagagagcactacacaagcaaagagtacctggggccatggttctctctgtggccactgccttccagcccatctccgtgcacgtctccatctgccttcccctctctgtcccac

SEQ ID NO: 354230 - DNA, 120 bp, Artificial Sequence
  ENSG00000139567_21 (sequence is synthesized)
tgtttctctcagtccccaccttgcctgccccctggatcccaggtttgggagaggggcaggagtgacaggcctcacccccacaggcctggctgtgatgcactcacagggcagcgattacct

SEQ ID NO: 354231 - DNA, 120 bp, Artificial Sequence
  ENSG00000139567_22 (sequence is synthesized)
cccccaccatccctaaccggctggctgcagacccggtgaggcctctgctgggactaggatggcgtggggtggtggctcatggctgggatttctgggcccaggaacttgtgtctgaggcct

SEQ ID NO: 354232 - DNA, 120 bp, Artificial Sequence
  ENSG00000139567_23 (sequence is synthesized)
ctgcttcatctcatagatactgagtgtcctggttagggcacctctctaggtactccctctttcaaccctggcccatgctccctgcccccagggccatctggtcattctgggattttaaga

SEQ ID NO: 354233 - DNA, 88 bp, Artificial Sequence
  ENSG00000139567_24 (sequence is synthesized)
tcaagagacccaggtctgaccccggatgtttgctccatgtgacaaaagcaggcctgtctcaggaccgacacggagtttcgctcttgtt

SEQ ID NO: 354234 - DNA, 120 bp, Artificial Sequence
  ENSG00000139567_25 (sequence is synthesized)
gcaacgtctacctcccaggaagtggagtgacaggggacaggtagagagaagggggcccaatggccagggagtgaaggaggtggcgttgctgagagcagtctgcacatgcttctgtctgag

SEQ ID NO: 354235 - DNA, 120 bp, Artificial Sequence
  ENSG00000139567_26 (sequence is synthesized)
tgcaggaaggtgttccagggtcgaaattacacttctcgtacctggagacgctgtttgtgggagcactgggctcatgcctggcacacaataggtctgcaataaaccatggttaaatcctga

SEQ ID NO: 354236 - DNA, 120 bp, Artificial Sequence
  ENSG00000139567_27 (sequence is synthesized)
ccctggcacacacttccctgccaggcctcagcctctagcataagctccagagagccagggcccatcagtttctctctgtggatttgtatctcagctccatgatgccttgggctttctgtc

SEQ ID NO: 354237 - DNA, 120 bp, Artificial Sequence
  ENSG00000139567_28 (sequence is synthesized)
tcctcaacaagagtgcagcttgctgaatgtcagctgcctgagagagctggggcctgacttactagggcattaaatcctaagaggtcctactgaggtgtggcaggatcacaggccagtgga

SEQ ID NO: 354238 - DNA, 85 bp, Artificial Sequence
  ENSG00000139567_29 (sequence is synthesized)
ttcgctcttgttgtccaggctagagtgcaatggcatgatcccagctcaccgcaacgtctacctcccaggttcaaatcattctctc

SEQ ID NO: 354239 - DNA, 80 bp, Artificial Sequence
  ENSG00000139567_30 (sequence is synthesized)
atgccaccatgcctggctaattttgtatatttagtagaaacagggtttcaccatgccctacctcagcctcccaaagtgct

SEQ ID NO: 354240 - DNA, 120 bp, Artificial Sequence
  ENSG00000139567_31 (sequence is synthesized)
tgtttcttatctacatattggaagatttggtcctgatgtcctttgaggcttctttagctctagttctctgacacttcagcctatatcacagctaacttcttcagtctcatctattcctta

SEQ ID NO: 354241 - DNA, 120 bp, Artificial Sequence
  ENSG00000139567_32 (sequence is synthesized)
tgctccagcccctggcaatttgcctcaagatgggggtttgaaaataactttacctgactcaaggagtgtctggagcacctcctagtctaagtctgcaagctccagttcttgcctaaaacc

SEQ ID NO: 354242 - DNA, 120 bp, Artificial Sequence
  ENSG00000139567_33 (sequence is synthesized)
atgccagtggccacccttgggctcagacagctctgggccttttgaccacaagccagcccctcgccctctctgtggcatagtcttctctgccccaggactgcagggcggcttcctccaagg

SEQ ID NO: 354243 - DNA, 120 bp, Artificial Sequence
  ENSG00000139567_34 (sequence is synthesized)
cttccaaggctcaaaagaaatttggctccatccaagaaggctccagctcccctactggcccctggctcaggcccacacccctggccaggcccagagagtgtgtctcaggagaattcaatg

SEQ ID NO: 354244 - DNA, 120 bp, Artificial Sequence
  ENSG00000139567_35 (sequence is synthesized)
gctctagagagacacacagaaagtttggcatttggaaatttcaaggatgtatgtatgctcacgtatggagcaggttgtcctggtccctgggtgcagggaagtgggctgcagggaagtgga

SEQ ID NO: 354245 - DNA, 120 bp, Artificial Sequence
  ENSG00000139567_36 (sequence is synthesized)
ttggaggggagcttgaggaatataaggagcgggggtggagactcaggctatggacaaggacagccccaaggttgggaagacctggccttagtcgtcctcagcctaggggcagggcagtga

SEQ ID NO: 354246 - DNA, 120 bp, Artificial Sequence
  ENSG00000139567_37 (sequence is synthesized)
agaaagctctccccgctcctgctgtaatgacccagagtagcctccccaggccggcatcttatgtgtgtcttccaccatcctcatggtggcacttttctaggcctgtctcccagcattgtg

SEQ ID NO: 354247 - DNA, 120 bp, Artificial Sequence
  ENSG00000139567_38 (sequence is synthesized)
caaggctcggaagagaaccaggaagtgaaactgggtgaaaacagaaagctcaatggatgggctaggttcccagatcattagggcagagtttgcacgtcctctggtcactggaatccaccc

SEQ ID NO: 354248 - DNA, 120 bp, Artificial Sequence
  ENSG00000139567_39 (sequence is synthesized)
agcccacgaatcatctccctcttgaaggattttatttctactgggttttggaacaaactcctgctgagaccccacagccagaaactgaaagcagcagctccccaaagcctggaaaatccc

SEQ ID NO: 354249 - DNA, 120 bp, Artificial Sequence
  ENSG00000139572_0 (sequence is synthesized)
ctgcttgaagcctaactgtccaccagaaaggactgctctttgggtgagttgaacttcttccattatagaaagaattgaaggctgagaaactcagcctctatcatgtggaacagctctgac

SEQ ID NO: 354250 - DNA, 120 bp, Artificial Sequence
  ENSG00000139572_1 (sequence is synthesized)
gccaacttctcctgctaccatgagtctgtgctgggctatcgttatgttgcagttagctggggggtggtggtggctgtgacaggcaccgtgggcaatgtgctcaccctactggccttggcc

SEQ ID NO: 354251 - DNA, 120 bp, Artificial Sequence
  ENSG00000139572_2 (sequence is synthesized)
atccagcccaagctccgtacccgattcaacctgctcatagccaacctcacactggctgatctcctctactgcacgctccttcagcccttctctgtggacacctacctccacctgcactgg

SEQ ID NO: 354252 - DNA, 120 bp, Artificial Sequence
  ENSG00000139572_3 (sequence is synthesized)
cgcaccggtgccaccttctgcagggtatttgggctcctcctttttgcctccaattctgtctccatcctgaccctctgcctcatcgcactgggacgctacctcctcattgcccaccctaag

SEQ ID NO: 354253 - DNA, 120 bp, Artificial Sequence
  ENSG00000139572_4 (sequence is synthesized)
ctttttccccaagttttcagtgccaaggggatagtgctggcactggtgagcacctgggttgtgggcgtggccagctttgctcccctctggcctatttatatcctggtacctgtagtctgc

SEQ ID NO: 354254 - DNA, 120 bp, Artificial Sequence
  ENSG00000139572_5 (sequence is synthesized)
acctgcagctttgaccgcatccgaggccggccttacaccaccatcctcatgggcatctactttgtgcttgggctcagcagtgttggcatcttctattgcctcatccaccgccaggtcaaa

SEQ ID NO: 354255 - DNA, 120 bp, Artificial Sequence
  ENSG00000139572_6 (sequence is synthesized)
actgatgaggccatgcctggtcgtttccaggagctggacagcaggttagcatcaggaggacccagtgaggggatttcatctgagccagtcagtgctgccaccacccagaccctggaaggg

SEQ ID NO: 354256 - DNA, 120 bp, Artificial Sequence
  ENSG00000139572_7 (sequence is synthesized)
gactcatcagaagtgggagaccagatcaacagcaagagagctaagcagatggcagagaaaagccctccagaagcatctgccaaagcccagccaattaaaggagccagaagagctccggat

SEQ ID NO: 354257 - DNA, 120 bp, Artificial Sequence
  ENSG00000139572_8 (sequence is synthesized)
tcttcatcggaatttgggaaggtgactcgaatgtgttttgctgtgttcctctgctttgccctgagctacatccccttcttgctgctcaacattctggatgccagagtccaggctccccgg

SEQ ID NO: 354258 - DNA, 120 bp, Artificial Sequence
  ENSG00000139572_9 (sequence is synthesized)
gtggtccacatgcttgctgccaacctcacctggctcaatggttgcatcaaccctgtgctctatgcagccatgaaccgccaattccgccaagcatatggctccattttaaaaagagggccc

SEQ ID NO: 354259 - DNA, 120 bp, Artificial Sequence
  ENSG00000139572_10 (sequence is synthesized)
cggagtttccataggctccattagaactgtgaccctagtcaccagaattcaggactgtctcctccaggaccaaagtggccaggtaataggagaataggtgaaataacacatgtgggcatt

SEQ ID NO: 354260 - DNA, 120 bp, Artificial Sequence
  ENSG00000139572_11 (sequence is synthesized)
ttcacaacaatctctccccagcctcccaaatcaagtctctccatcacttgatcaatgtttcagccctagactgcccaaggagtattattaattattaataaatgaattctgtgcttttaa

SEQ ID NO: 354261 - DNA, 120 bp, Artificial Sequence
  ENSG00000139572_12 (sequence is synthesized)
cctgcttgaagcctaactgtccaccagaaaggactgctctttgggtgagttgaacttcttccattatagaaagaattgaaggctgagaaactcaggtaagcacttttgttgtgggtatac

SEQ ID NO: 354262 - DNA, 120 bp, Artificial Sequence
  ENSG00000139572_13 (sequence is synthesized)
ttttaccttcttggtctcctcatctcccaggtggtaacaaacagaaatgactaaagcctatatgtgtgtgtagtggaaaggagcagagggaactgaatacagagaggatcctgaatacac

SEQ ID NO: 354263 - DNA, 120 bp, Artificial Sequence
  ENSG00000139572_14 (sequence is synthesized)
gatgctgaatagagagaggggactcctgggggtctttggggatggggaaggaattaaaaaagttggagggcactgggtttactgagagcagcgggatggatatagaagaggactgaggtt

SEQ ID NO: 354264 - DNA, 120 bp, Artificial Sequence
  ENSG00000139572_15 (sequence is synthesized)
tggagcagaataagactaagatatttaggcaagagatatttagataaaaacttggggaaatatttgagaatgggaaaggactaagagaacctaaggagagagttagggatcttgagatga

SEQ ID NO: 354265 - DNA, 120 bp, Artificial Sequence
  ENSG00000139572_16 (sequence is synthesized)
agaggcctgggaatggttcaggaggatactgaattaaggtgaggtccaggaacagtttagatgtccagggtcccagaactgttcaagagatctaagttgaatgctaggttctgattccct

SEQ ID NO: 354266 - DNA, 120 bp, Artificial Sequence
  ENSG00000139574_0 (sequence is synthesized)
catgaagtcctgggggcgccatgggaggagatcccaggtggctcctaatgagccctgcatttccatttgcctgctctagattcccctaaggctactgtgaggctgggggtgggggaacag

SEQ ID NO: 354267 - DNA, 120 bp, Artificial Sequence
  ENSG00000139574_1 (sequence is synthesized)
caggtataagaggttggggtggctgtaggagggtaggtggcagcatggattctaggcaggctgctgcactgctggtgctgctgctgttaatagacgggggctgtgctgaagggccaggag

SEQ ID NO: 354268 - DNA, 120 bp, Artificial Sequence
  ENSG00000139574_2 (sequence is synthesized)
tggccggagccaagccttcctgtttcagccccagaggtttggcagaaatacccagggatcctggaggaatgaatggctgagtccccgggctggagaggggctgaattcccagttctggag

SEQ ID NO: 354269 - DNA, 120 bp, Artificial Sequence
  ENSG00000139574_3 (sequence is synthesized)
cctggctgcccctcaacgctttgggaagaagtgacatgtcatcccttgatatgtctgcatgcaaggtccacacccaaaagtgtcaatgtttgccccccaaataaaattgtctggcttctg

SEQ ID NO: 354270 - DNA, 120 bp, Artificial Sequence
  ENSG00000139579_0 (sequence is synthesized)
gcactcccgcgttccacggggcagcatccggcggcagcggagcctgtggctccccctgcgggctgctcagcggcgtgcacagtcctgccggctggcttggtggggtgccgaggctcaggc

SEQ ID NO: 354271 - DNA, 120 bp, Artificial Sequence
  ENSG00000139579_1 (sequence is synthesized)
agcatgacgacggagacctttgtgaaggatatcaagcctgggctcaagaatctgaaccttatcttcattgtgctggagacaggccgagtgaccaagacaaaggacgggcatgaggttcgg

SEQ ID NO: 354272 - DNA, 120 bp, Artificial Sequence
  ENSG00000139579_2 (sequence is synthesized)
acctgcaaagtggcggacaaaacaggcagcatcaatatctctgtctgggacgatgttggcaatctgatccagcctggggacattatccggctcaccaaagggtacgcttcagttttcaaa

SEQ ID NO: 354273 - DNA, 120 bp, Artificial Sequence
  ENSG00000139579_3 (sequence is synthesized)
ggttgtctgacactatatactggccgtgggggtgatctgcagaagattggagaattctgtatggtttattctgaggttcctaacttcagtgagccaaacccagagtacagcacccagcag

SEQ ID NO: 354274 - DNA, 120 bp, Artificial Sequence
  ENSG00000139579_4 (sequence is synthesized)
gcacccaacaaggcggtgcagaacgacagcaacccttcagcttcccagcctaccactggaccctctgctgcctctccagcctctgagaaccagaatgggaatggactgagtgccccacca

SEQ ID NO: 354275 - DNA, 120 bp, Artificial Sequence
  ENSG00000139579_5 (sequence is synthesized)
cacacctgcaggcccgcctggcccttccagcaaccctgttagtaacggcaaagaaacccggaggagcagcaagagatagcatgacattctttcttcctgccaccaaccacatcccaagtg

SEQ ID NO: 354276 - DNA, 120 bp, Artificial Sequence
  ENSG00000139579_6 (sequence is synthesized)
tcccctggagagcaagatagccttccactgattggctggtgtagcagtattttagccactgaacttcagtggagggtggtgagcagtgtccttatccaccctaatctcatactccctcat

SEQ ID NO: 354277 - DNA, 120 bp, Artificial Sequence
  ENSG00000139579_7 (sequence is synthesized)
tctcatactccctcattgtccagctgaactacctgtcccctgggagtcaggaccctctgcctgctctctttcctctttagaaatggcagttactggctgggcgcagtggctcacgcttgt

SEQ ID NO: 354278 - DNA, 80 bp, Artificial Sequence
  ENSG00000139579_8 (sequence is synthesized)
gcagttaccatctgtttcttctgtgtgagacatgggagtctaactgaagtctctccttcctaataaatgttaccactcta

SEQ ID NO: 354279 - DNA, 120 bp, Artificial Sequence
  ENSG00000139579_9 (sequence is synthesized)
gggctgctcagcggcgtgcacagtcctgccggctggcttgggtgggtggtgggctgcgggtaggggaggggatggaccgagtcccggcttgtcgggatgagggttccggaagatctggcc

SEQ ID NO: 354280 - DNA, 120 bp, Artificial Sequence
  ENSG00000139579_10 (sequence is synthesized)
ctaaaagagcatcccggcagggggccttccagccccaaagcagcctgtccagagacccccaaattctgatcctgaagttggaggcctccggggatgttcttttttaatcttttagaaggg

SEQ ID NO: 354281 - DNA, 120 bp, Artificial Sequence
  ENSG00000139579_11 (sequence is synthesized)
ttagaggggttgaggctgcctgaccccagcctaatggggtaggtaggccttgggaagtggagcatgggggcaaaggatccaagcattgagccttcatcctctattccccatccagtgggg

SEQ ID NO: 354282 - DNA, 120 bp, Artificial Sequence
  ENSG00000139579_12 (sequence is synthesized)
tcaagacaagaagcatgggagggagcaggatctgaatatgtaatctgtgccttcaggtgcagaacgacagcaacccttcagcttcccagcctaccactggaccctctgctgcctctccag

SEQ ID NO: 354283 - DNA, 120 bp, Artificial Sequence
  ENSG00000139579_13 (sequence is synthesized)
agccaggagctgcctacgaggagggacgaaggctggccaggcctccactctagacaggaagtctagtctagagtctatatggtcccagccaggactatgtagccatttaggagggagaac

SEQ ID NO: 354284 - DNA, 120 bp, Artificial Sequence
  ENSG00000139579_14 (sequence is synthesized)
tctatgttcttcccggcaaaaacgtgtgggcctggccggccacgcttcgctttggaggggtgcaggttccatttcttccaagaagggtgagcctgccttttgtctctggtgtaaatgcca

SEQ ID NO: 354285 - DNA, 120 bp, Artificial Sequence
  ENSG00000139597_0 (sequence is synthesized)
gacttcagtaaagggaacccggggctctcgcagccagccctcctgcccatggaggacagtttccttcaatcttttgggaggctgagcctccagccccagcagcagcagcagcggcagcgg

SEQ ID NO: 354286 - DNA, 120 bp, Artificial Sequence
  ENSG00000139597_1 (sequence is synthesized)
ccgccccggccgcccccgcgggggacacctcctcgccgccacagctttaggaaacacctctacctcctgcgaggcctcccgggctccgggaaaactacactggccagacaattgcagcat

SEQ ID NO: 354287 - DNA, 120 bp, Artificial Sequence
  ENSG00000139597_2 (sequence is synthesized)
gactttcccagggccctgattttcagcacggatgattttttcttcagggaagatggtgcctatgagttcaatcctgacttcctggaggaagctcatgaatggaaccaaaaaagagcaaga

SEQ ID NO: 354288 - DNA, 120 bp, Artificial Sequence
  ENSG00000139597_3 (sequence is synthesized)
aaagcaatgaggaatggcatatcccccattattattgataataccaacctccacgcctgggaaatgaagccctatgcagtcatggcacttgaaaataactatgaagttatattccgagaa

SEQ ID NO: 354289 - DNA, 120 bp, Artificial Sequence
  ENSG00000139597_4 (sequence is synthesized)
cctgacactcgctggaaattcaacgttcaagagttagcaagaagaaacattcatggtgtctcaagagaaaaaatccaccgaatgaaagaacggtatgaacacgatgttacttttcacagt

SEQ ID NO: 354290 - DNA, 120 bp, Artificial Sequence
  ENSG00000139597_5 (sequence is synthesized)
gtgcttcatgcagaaaagccaagcagaatgaacagaaaccaggacaggaataatgcattgccttccaacaatgccagatactggaattcctacacagagtttccaaaccggagggcccac

SEQ ID NO: 354291 - DNA, 120 bp, Artificial Sequence
  ENSG00000139597_6 (sequence is synthesized)
ggtggatttacaaatgagagctcctatcacagaaggggcggttgtcaccatggatattagaggcctatcttacagccaggcagaattttcctaagtcagtttctacttcagtttttgtta

SEQ ID NO: 354292 - DNA, 120 bp, Artificial Sequence
  ENSG00000139597_7 (sequence is synthesized)
ttttttgttgcattttagtcagagctccaattccagtgtaaatagctgaactcaaaagtttctgagcaaagtcattatattcactttcttcaccaaaatttgttaaagtgcttctatatg

SEQ ID NO: 354293 - DNA, 120 bp, Artificial Sequence
  ENSG00000139597_8 (sequence is synthesized)
catggtctgatgctgggaattctgcagatttgagtaaacagtctctttctctagggtaagaatttgaaaccaaaacttgagaacacacccaagaatatatttacataggttcatagatga

SEQ ID NO: 354294 - DNA, 120 bp, Artificial Sequence
  ENSG00000139597_9 (sequence is synthesized)
aataaagtgtttatattatatataagcttcagtaccatttgctctgaagtgatctatttattttttcaggaaattcatctccatcggtaaagttgggaaggtggagagaagtggtggggg

SEQ ID NO: 354295 - DNA, 120 bp, Artificial Sequence
  ENSG00000139597_10 (sequence is synthesized)
ggcattgctacttatcaaagtgccattgctactttgataatctatgtatctaaaaatgtgagatgtgcgactcttatgatactgattttcctttaatgttaatatgccagaaagcataca

SEQ ID NO: 354296 - DNA, 120 bp, Artificial Sequence
  ENSG00000139597_11 (sequence is synthesized)
tctaagggaacattgtccttcaaagtagacactttgggaagttatttctttattttaatgatgtatcattgttaaaaatgctgtcaaatccttaatagctacaggagctactgagggaaa

SEQ ID NO: 354297 - DNA, 120 bp, Artificial Sequence
  ENSG00000139597_12 (sequence is synthesized)
aacactaacttttaaaaggaataaacgacttctaaaattatgcctattaacatgtgtaattagtcggcagctcaaatgtttgggagtgcaagaaattaggcaccccaggatataggtcat

SEQ ID NO: 354298 - DNA, 120 bp, Artificial Sequence
  ENSG00000139597_13 (sequence is synthesized)
acagggatatataaaagccatgctcattacaaaatgagcagttgatgttttatgtggcattaagacaatcaagtcctcacaactctggaatgtcttcttatactgatgctgaatttatga

SEQ ID NO: 354299 - DNA, 120 bp, Artificial Sequence
  ENSG00000139597_14 (sequence is synthesized)
atccaaattaatttccaacaggttggaatcagatttaatgtgagatcatgatagacaagaccacagaggacgtatgctctatttcttgttggccaacagcttctttctaatgttctgtga

SEQ ID NO: 354300 - DNA, 120 bp, Artificial Sequence
  ENSG00000139597_15 (sequence is synthesized)
aaaattattttaagtgtcttatataatggtgcttttatggttattaaaaattgtaaatggtatcacatttatatggatttgtcattggatctttttttggttcaacaataaaaaaattta

SEQ ID NO: 354301 - DNA, 120 bp, Artificial Sequence
  ENSG00000139597_16 (sequence is synthesized)
attacctaaatgccaagaaactcaacaatataccagtttttctgtatcacaggcttatttaccagtcttttttttaataaataggaatcgtaaaggtaatgacaaaagcagccttataat

SEQ ID NO: 354302 - DNA, 120 bp, Artificial Sequence
  ENSG00000139597_17 (sequence is synthesized)
ttagttgcttatatatttgatctgtgtacatgagactgttttaacgttatctgacactactgaaacctgctcgacatctccatgactaccaacaccatgtgtaatgttttcttcactaac

SEQ ID NO: 354303 - DNA, 120 bp, Artificial Sequence
  ENSG00000139597_18 (sequence is synthesized)
attttaaaaactggtatctcctttgagtaagtttggctgacaatagtaaatcccaatgaatctaaggtgttatcagctttgctaacttctgtatctccaagcacaacataaaataatctc

SEQ ID NO: 354304 - DNA, 120 bp, Artificial Sequence
  ENSG00000139597_19 (sequence is synthesized)
ctaatgatctacttaataatgctcccattttccaggcccaggtagtcctgggtatcttggttgatagggtggtggcataaccagctcaatatggatggcttgactcgtctgggctggtag

SEQ ID NO: 354305 - DNA, 120 bp, Artificial Sequence
  ENSG00000139597_20 (sequence is synthesized)
aggggagaaatgtcagagagctcaaagtggaaattaccatcctttgatttcacatgagcggttcaaaggaccagattcaagccctcctgacttggctggctccctgctttagggtttttg

SEQ ID NO: 354306 - DNA, 120 bp, Artificial Sequence
  ENSG00000139597_21 (sequence is synthesized)
gctcacttgggttaagtgagtgaccactatggagaagtggctctgggttacataacttttctagagctctaaagaatagtttcctggcctatttaatgtctcttctttccctagctgacc

SEQ ID NO: 354307 - DNA, 120 bp, Artificial Sequence
  ENSG00000139597_22 (sequence is synthesized)
cctgaaatatttggtttgtaaaccataaaaattgattaaatgccatcaactttatcccctgtagaagtgatctgtttttcaactcccatggcttctgatttgtgtaactctttgaacacc

SEQ ID NO: 354308 - DNA, 120 bp, Artificial Sequence
  ENSG00000139597_23 (sequence is synthesized)
caatattgacttgtattgtgttcgctgtttgcatcattcatagaactggcaaatgctctttatgggcaatagggtctcattaaatgattgctgaataaataacacaaatttttaccatta

SEQ ID NO: 354309 - DNA, 120 bp, Artificial Sequence
  ENSG00000139597_24 (sequence is synthesized)
gcggccgccccggccgcccccgcgggggacacctcctcgccgccacagctttaggaaacacctctacctcctgcgaggcctcccgggctccgggaaaactacactggccagggacgactg

SEQ ID NO: 354310 - DNA, 120 bp, Artificial Sequence
  ENSG00000139597_25 (sequence is synthesized)
gagtgagcactggcctgggagtctgaagattgtgccttcagacctacttcgtcacttactagctggcgactttggtcagtcatctagtttttccgggccttatgttccttacatgtgact

SEQ ID NO: 354311 - DNA, 120 bp, Artificial Sequence
  ENSG00000139597_26 (sequence is synthesized)
actaaaaggctactagattataggatttattaaagatccttctgactcttaatttccagtggtcagattaaaaatagtttgctaataatggctatgttaaagagctctgaccttggagtc

SEQ ID NO: 354312 - DNA, 120 bp, Artificial Sequence
  ENSG00000139597_27 (sequence is synthesized)
aatttatggctccacatccaagctctaccattcactagttttgcttttcacccaacccctctgtgcctcggtttccttttctgttaaatggggatatctgttctgtttgcctctgagggt

SEQ ID NO: 354313 - DNA, 120 bp, Artificial Sequence
  ENSG00000139597_28 (sequence is synthesized)
gtgttagttactgctccgttgttggtcagctgagataaatcttcagtgttccctggatcctggctctggagtgaagaaggtagcttggcagttgactttgagtcctcccgtttcgctggg

SEQ ID NO: 354314 - DNA, 120 bp, Artificial Sequence
  ENSG00000139597_29 (sequence is synthesized)
cattggcagttctgggagcagagcagccttggcatgccatggggtggattgtgtgtttatagaaaagtctgggacgtaagcgaggaaatgggccacagctcagcggaagggaggccggtg

SEQ ID NO: 354315 - DNA, 120 bp, Artificial Sequence
  ENSG00000139597_30 (sequence is synthesized)
gtgaggatggaatggtggagaggcaggctcaggtgtggcccaccaggagctgccttccccacttttttgggaggtagggtggggaagaagaaaagagcaaattgtttaaaaatacacatg

SEQ ID NO: 354316 - DNA, 120 bp, Artificial Sequence
  ENSG00000139597_31 (sequence is synthesized)
tatatagaaaatagtaaaactgtaaggttatctgtgtgttgttggattctgggaaattcacattttctctattctctgtattttccaaattttctataacgaatatgtatttcttagaat

SEQ ID NO: 354317 - DNA, 120 bp, Artificial Sequence
  ENSG00000139597_32 (sequence is synthesized)
aaaaatttttttcttcaaaatttggaggaaatcgctttttacaaatgtgggttcatctttttctgcttaaccttttttctcatttgattaaagaactaataaaaatgtttttgaaattaa

SEQ ID NO: 354318 - DNA, 120 bp, Artificial Sequence
  ENSG00000139597_33 (sequence is synthesized)
tccttcccaaactcctgggaaaccctgatgtgcacatagattgtagctgctgcagaatgaataaattttatggaaggagtttaaccgaaagttctgccaatttttcccccaaaacagaac

SEQ ID NO: 354319 - DNA, 120 bp, Artificial Sequence
  ENSG00000139597_34 (sequence is synthesized)
accagagcataacctccttagattccagagaaagaaaattattgattgatagtgggctctgaagttgtgtgatgaggagatgagggcatcctgtaataaaaatgacgaatagagattacg

SEQ ID NO: 354320 - DNA, 120 bp, Artificial Sequence
  ENSG00000139597_35 (sequence is synthesized)
ctcaccttccctctgattgttgcatgttgttcactgttatgtaacattgtgttgcagcaagaaaagcaatgaggaatggcatatcccccattattattgataataccaacctccacgcct

SEQ ID NO: 354321 - DNA, 120 bp, Artificial Sequence
  ENSG00000139597_36 (sequence is synthesized)
ttctgatgttccatgatttcatatttgctaacagtggttctcccagggagaaggtaacgaggttttattttagtgtttctctgctgttcaatggctgaagtttgctgagatgctaatctc

SEQ ID NO: 354322 - DNA, 120 bp, Artificial Sequence
  ENSG00000139597_37 (sequence is synthesized)
acttgaggatacaatttaaaaatagtccttggcaaatggtctttggtgtgaatccttgataacttttctgtcttaattactttcctacggcaaggcatacagagaagcacccaccgaaat

SEQ ID NO: 354323 - DNA, 120 bp, Artificial Sequence
  ENSG00000139597_38 (sequence is synthesized)
gttcagatcaatactaatactgaattagatggcgctcgtagtggagctacaggtcacaacaggacggttctgcctctggtgagccgggaatttccacactgtgtgctgttgctccctggg

SEQ ID NO: 354324 - DNA, 79 bp, Artificial Sequence
  ENSG00000139597_39 (sequence is synthesized)
gagccgggaatttccacactgtgtgctgttgctccctgggagttccagggcaacagaatattttagtctaaagacagat

SEQ ID NO: 354325 - DNA, 120 bp, Artificial Sequence
  ENSG00000139597_40 (sequence is synthesized)
atgtgccggctcctttacctcatagttacagtaagaagaaatttaaaaattgggatcaaagatgcagccgccttcccatttaagcagcacagacagcccaaagtgacagttttcctgtac

SEQ ID NO: 354326 - DNA, 120 bp, Artificial Sequence
  ENSG00000139597_41 (sequence is synthesized)
agttactcttctgttatctgtaactgatctatgacattttgggaaaaaacagccaaaaaaaattagtactgagatgctcagaatggagcagtggacaaaggagacaaaaatccctgcctt

SEQ ID NO: 354327 - DNA, 120 bp, Artificial Sequence
  ENSG00000139597_42 (sequence is synthesized)
catggaacatgtattctatcagagaaaaaaaattctcaaggaaaaaaggcaattttagcatctgctctgctctgttctctcaaaaaataagcaaaggatttcacaggtatgccaccggag

SEQ ID NO: 354328 - DNA, 120 bp, Artificial Sequence
  ENSG00000139597_43 (sequence is synthesized)
gtatatatccccaggaaatgtccacatacacacaagagtgttctaggtacttgggaatcatcagtgaacaaaacaaagatcctgcccttgtggaccttatgtgccagaggctcctgacca

SEQ ID NO: 354329 - DNA, 120 bp, Artificial Sequence
  ENSG00000139597_44 (sequence is synthesized)
cgtcacccttgttttccgggctgtgagtctcccagcgtccccagctttccaggtagggacgccccctcccacgcagcacggttccggcgggtggaaaggaggggctgggctcccagcgcc

SEQ ID NO: 354330 - DNA, 120 bp, Artificial Sequence
  ENSG00000139597_45 (sequence is synthesized)
tatgcagtcatggtatttcagaccgaacaaaagaatcttttcaggctggaaatggacatggtagttttcaggccagaaatgaagaaacattcatggtgtctcaagagaaaaaatccaccg

SEQ ID NO: 354331 - DNA, 120 bp, Artificial Sequence
  ENSG00000139610_0 (sequence is synthesized)
ttggtccaagcaagaaggcagtggtctactccatcggcaacatgctggtcctttatggacacagcacccaggaccttccggaaaccaatgcccgcgtagtcggagggactgaggccggga

SEQ ID NO: 354332 - DNA, 120 bp, Artificial Sequence
  ENSG00000139610_1 (sequence is synthesized)
ggaattcctggccctctcagatttccctccagtaccggtctggaggttcccggtatcacacctgtggagggacccttatcagacagaactgggtgatgacagctgctcactgcgtggatt

SEQ ID NO: 354333 - DNA, 120 bp, Artificial Sequence
  ENSG00000139610_2 (sequence is synthesized)
accagaagactttccgcgtggtggctggagaccataacctgagccagaatgatggcactgagcagtacgtgagtgtgcagaagatcgtggtgcatccatactggaacagcgataacgtgg

SEQ ID NO: 354334 - DNA, 120 bp, Artificial Sequence
  ENSG00000139610_3 (sequence is synthesized)
tgctacatcacaggctggggcaagaccaagaccaatgggcagctggcccagaccctgcagcaggcttacctgccctctgtggactacgccatctgctccagctcctcctactggggctcc

SEQ ID NO: 354335 - DNA, 120 bp, Artificial Sequence
  ENSG00000139610_4 (sequence is synthesized)
actgtgaagaacaccatggtgtgtgctggtggagatggagttcgctctggatgccagggtgactctgggggccccctccattgcttggtgaatggcaagtattctgtccatggagtgacc

SEQ ID NO: 354336 - DNA, 120 bp, Artificial Sequence
  ENSG00000139610_5 (sequence is synthesized)
agctttgtgtccagccggggctgtaatgtctccaggaagcctacagtcttcacccaggtctctgcttacatctcctggataaataatgtcatcgcctccaactgaacattttcctgagtc

SEQ ID NO: 354337 - DNA, 120 bp, Artificial Sequence
  ENSG00000139610_6 (sequence is synthesized)
caacgaccttcccaaaatggttcttagatctgcagtaggacttgcgatcaaaaagtaaaacacattctgaaagactattgagccattgatagaaaagcaaataaaactagatatacatta

SEQ ID NO: 354338 - DNA, 120 bp, Artificial Sequence
  ENSG00000139613_0 (sequence is synthesized)
gcggcgggaggcgggcggaggaggaggcggaggaggcgggagctgagctgagtggggcgggcggcggcggggcccgagccggagaagatggcggtgcggaagaaggacggcggccccaac

SEQ ID NO: 354339 - DNA, 120 bp, Artificial Sequence
  ENSG00000139613_1 (sequence is synthesized)
gtgaagtactacgaggccgcggacaccgtgacccagttcgacaacgtgcggctgtggctcggcaagaactacaagaagtatatacaagctgaaccacccaccaacaagtccctgtctagc

SEQ ID NO: 354340 - DNA, 120 bp, Artificial Sequence
  ENSG00000139613_2 (sequence is synthesized)
ctggttgtacagttgctacaatttcaggaagaagtttttggcaaacatgtcagcaatgcaccgctcactaaactgccgatcaaatgtttcctagatttcaaagcgggaggctccttgtgc

SEQ ID NO: 354341 - DNA, 120 bp, Artificial Sequence
  ENSG00000139613_3 (sequence is synthesized)
cacattcttgcagctgcctacaaattcaagagtgaccagggatggcggcgttacgatttccagaatccatcacgcatggaccgcaatgtggaaatgtttatgaccattgagaagtccttg

SEQ ID NO: 354342 - DNA, 120 bp, Artificial Sequence
  ENSG00000139613_4 (sequence is synthesized)
gtgcagaataattgcctgtctcgacctaacatttttctgtgcccagaaattgagcccaaactactagggaaattaaaggacattatcaagagacaccagggaacagtcactgaggataag

SEQ ID NO: 354343 - DNA, 120 bp, Artificial Sequence
  ENSG00000139613_5 (sequence is synthesized)
aacaatgcctcccatgttgtgtatcctgtcccggggaatctagaagaagaggaatgggtacgaccagtcatgaagagggataagcaggttcttctgcactggggctactatcctgacagt

SEQ ID NO: 354344 - DNA, 120 bp, Artificial Sequence
  ENSG00000139613_6 (sequence is synthesized)
tacgacacgtggatcccagcgagtgaaattgaggcatctgtggaagatgctccaactcctgagaaacctaggaaggttcatgcaaagtggatcctggacaccgacaccttcaatgaatgg

SEQ ID NO: 354345 - DNA, 120 bp, Artificial Sequence
  ENSG00000139613_7 (sequence is synthesized)
atgaatgaggaagactatgaagtaaatgatgacaaaaaccctgtctcccgccgaaagaagatttcagccaagacactgacagatgaggtgaacagcccagattcagatcgacgggacaag

SEQ ID NO: 354346 - DNA, 120 bp, Artificial Sequence
  ENSG00000139613_8 (sequence is synthesized)
aaggggggaaactataagaagaggaagcgctccccctctccttcaccaaccccagaagcaaagaagaaaaatgctaagaaaggtccctcaacaccttacactaagtcaaagcgtggccac

SEQ ID NO: 354347 - DNA, 120 bp, Artificial Sequence
  ENSG00000139613_9 (sequence is synthesized)
agagaagaggagcaagaagacctgacaaaggacatggacgagccctcaccagtccccaatgtagaagaggtgacacttcccaaaacagtcaacacaaagaaagactcagagtcggcccca

SEQ ID NO: 354348 - DNA, 120 bp, Artificial Sequence
  ENSG00000139613_10 (sequence is synthesized)
gtcaaaggcggcaccatgaccgacctggatgaacaggaagatgaaagcatggagacgacgggcaaggatgaggatgagaacagtacggggaacaagggagagcagaccaagaatccagac

SEQ ID NO: 354349 - DNA, 120 bp, Artificial Sequence
  ENSG00000139613_11 (sequence is synthesized)
ctgcatgaggacaatgtgactgaacagacccaccacatcatcattcccagctacgctgcctggtttgactacaatagtgttcatgccattgagcggagggctctccccgagttcttcaac

SEQ ID NO: 354350 - DNA, 120 bp, Artificial Sequence
  ENSG00000139613_12 (sequence is synthesized)
ggcaagaacaagtccaagactccagagatctacctggcctatcgaaactttatgattgacacttaccgactgaacccccaagagtatcttacctctaccgcctgccgccgaaacctagcg

SEQ ID NO: 354351 - DNA, 120 bp, Artificial Sequence
  ENSG00000139613_13 (sequence is synthesized)
ggtgatgtctgtgccatcatgagggtccatgccttcctagaacagtggggtcttattaactaccaggtggatgctgagagtcgaccaaccccaatggggcctccgcctacctctcacttc

SEQ ID NO: 354352 - DNA, 120 bp, Artificial Sequence
  ENSG00000139613_14 (sequence is synthesized)
catgtcttggctgacacaccatcagggctggtgcctctgcagcccaagacacctcagcagacctctgcttcccaacaaatgctcaactttcctgacaaaggcaaagagaaaccaacagac

SEQ ID NO: 354353 - DNA, 120 bp, Artificial Sequence
  ENSG00000139613_15 (sequence is synthesized)
atgcaaaactttgggctgcgcacagacatgtacacaaaaaagaatgttccctccaagagcaaggctgcagccagtgccactcgtgagtggacagaacaggaaaccctgcttctcctggag

SEQ ID NO: 354354 - DNA, 120 bp, Artificial Sequence
  ENSG00000139613_16 (sequence is synthesized)
ggactcagaggcctccctaggccccctggcctaccaacccatccccttcagtcagtcgggcaaccctgttatgagcactgttgccttcctggcctctgtcgtcgatccccgagtcgcctc

SEQ ID NO: 354355 - DNA, 120 bp, Artificial Sequence
  ENSG00000139613_17 (sequence is synthesized)
tgctgctgcaaagtcagccctagaggagttctccaaaatgaaggaagaggtacccacggccttggtggaggcccatgttcgaaaagtggaagaagcagccaaagtaacaggcaaggcgga

SEQ ID NO: 354356 - DNA, 120 bp, Artificial Sequence
  ENSG00000139613_18 (sequence is synthesized)
ccctgccttcggtctggaaagcagtggcattgcaggaaccacctctgatgagcctgagcggattgaggagagcgggaatgacgaggctcgggtggaaggccaggccacagatgagaagaa

SEQ ID NO: 354357 - DNA, 120 bp, Artificial Sequence
  ENSG00000139613_19 (sequence is synthesized)
ggagcccaaggaaccccgagaaggagggggtgctatagaggaggaagcaaaagagaaaaccagcgaggctcccaagaaggatgaggagaaagggaaagaaggcgacagtgagaaggagtc

SEQ ID NO: 354358 - DNA, 120 bp, Artificial Sequence
  ENSG00000139613_20 (sequence is synthesized)
cgagaagagtgatggagacccaatagtcgatcctgagaaggagaaggagccaaaggaagggcaggaggaagtgctgaaggaagtggtggagtctgagggggaaaggaagacaaaggtgga

SEQ ID NO: 354359 - DNA, 120 bp, Artificial Sequence
  ENSG00000139613_21 (sequence is synthesized)
gcgggacattggcgagggcaacctctccaccgctgctgccgccgccctggccgccgccgcagtgaaagctaagcacttggctgctgttgaggaaaggaagatcaaatctttggtggccct

SEQ ID NO: 354360 - DNA, 120 bp, Artificial Sequence
  ENSG00000139613_22 (sequence is synthesized)
gctggtggagacccagatgaaaaagttggagatcaaacttcggcactttgaggagctggagactatcatggaccgggagcgagaagcactggagtatcagaggcagcagctcctggccga

SEQ ID NO: 354361 - DNA, 120 bp, Artificial Sequence
  ENSG00000139613_23 (sequence is synthesized)
cagacaagccttccacatggagcagctgaagtatgcggagatgagggctcggcagcagcacttccaacagatgcaccaacagcagcagcagccaccaccagccctgcccccaggctccca

SEQ ID NO: 354362 - DNA, 120 bp, Artificial Sequence
  ENSG00000139613_24 (sequence is synthesized)
gcctatccccccaacaggggctgctgggccacccgcagtccatggcttggctgtggctccagcctctgtagtccctgctcctgctggcagtggggcccctccaggaagtttgggcccttc

SEQ ID NO: 354363 - DNA, 120 bp, Artificial Sequence
  ENSG00000139613_25 (sequence is synthesized)
tgaacagattgggcaggcagggtcaactgcagggccacagcagcagcaaccagctggagccccccagcctggggcagtcccaccaggggttcccccccctggaccccatggcccctcacc

SEQ ID NO: 354364 - DNA, 120 bp, Artificial Sequence
  ENSG00000139613_26 (sequence is synthesized)
gttccccaaccaacaaactcctccctcaatgatgccaggggcagtgccaggcagcgggcacccaggcgtggcgggtaatgctcctttgggtttgccttttggcatgccgcctcctcctcc

SEQ ID NO: 354365 - DNA, 120 bp, Artificial Sequence
  ENSG00000139613_27 (sequence is synthesized)
tcctcctgctccatccatcatcccatttggtagtctagctgactccatcagtattaacctccccgctcctcctaacctgcatgggcatcaccaccatctcccgttcgccccgggcactct

SEQ ID NO: 354366 - DNA, 120 bp, Artificial Sequence
  ENSG00000139613_28 (sequence is synthesized)
ccccccacctaacctgcctgtgtccatggcgaaccctctacatcctaacctgccggcgaccaccaccatgccatcttccttgcctctcgggccggggctcggatccgccgcagcccaaag

SEQ ID NO: 354367 - DNA, 120 bp, Artificial Sequence
  ENSG00000139613_29 (sequence is synthesized)
ccctgccattgtggcagctgttcagggcaacctcctgcccagtgccagcccactgccagacccaggcacccccctgcctccagaccccacagccccgagcccaggcacggtcacccctgt

SEQ ID NO: 354368 - DNA, 120 bp, Artificial Sequence
  ENSG00000139613_30 (sequence is synthesized)
gccacctccacagtgaggagccagccagacatctctccccctcaccccctgtggacatcacggttccaggaacagcccttcccccaccactgggaccctccccagcctggagagttcatc

SEQ ID NO: 354369 - DNA, 120 bp, Artificial Sequence
  ENSG00000139613_31 (sequence is synthesized)
actacgtaaggaaagctccttccgcccctccaaagccctcaccatgcctaacagaggcatgcatttttatatcagattattcaaggacttctgtttaaaagatgtttataatgtctggga

SEQ ID NO: 354370 - DNA, 120 bp, Artificial Sequence
  ENSG00000139613_32 (sequence is synthesized)
gagaggataggatgggaatgctgccctaaaggaagggctggtgaaaggtgtttatacaaggttctattaaccacttctaagggtacacctccctccaaactactgcattttctatggatt

SEQ ID NO: 354371 - DNA, 120 bp, Artificial Sequence
  ENSG00000139613_33 (sequence is synthesized)
catgtcttggctgacacaccatcagggctggtgcctctgcagcccaagacacctcagggccgccaggttgatgctgataccaaggctgggcgaaagggcaaagagctggatgacctggtg

SEQ ID NO: 354372 - DNA, 120 bp, Artificial Sequence
  ENSG00000139613_34 (sequence is synthesized)
aaaaaaaaaaaaaaagtagattttaaaaagccacattggagctcccttctacccactaaaaaataaccaatttttacattttttgagggggagtgagttttaggaaaggggaattaagat

SEQ ID NO: 354373 - DNA, 120 bp, Artificial Sequence
  ENSG00000139613_35 (sequence is synthesized)
tccagggagagctctggggatagaacagggcgcagattccatctctccccaagcccctttttagtgactaagtcaaggccccaactcccctcccccaccctacgctgagcttattcgagt

SEQ ID NO: 354374 - DNA, 120 bp, Artificial Sequence
  ENSG00000139613_36 (sequence is synthesized)
tcattcgtactaataatccctcctgcggcttcctcattgttgctgttttaggccaccccagctcagccaatgattcctttccctctgaatgtcagttttgtttttaaaagtcacttgctt

SEQ ID NO: 354375 - DNA, 120 bp, Artificial Sequence
  ENSG00000139613_37 (sequence is synthesized)
tggtggggaaaacctaatttcggggatttctgtggtaggtaataggagaagaaagggcactgggggctgttctccttccttccctgggctgtatccatggactcctggaaggcacagaga

SEQ ID NO: 354376 - DNA, 120 bp, Artificial Sequence
  ENSG00000139613_38 (sequence is synthesized)
agggagctataagaggatgtgaagttttaaaacctgaaattgttttttaaagcacttaagcacctccatattatgacttggtgggtcaccccttagcttcctccctctcccaccaagact

SEQ ID NO: 354377 - DNA, 120 bp, Artificial Sequence
  ENSG00000139613_39 (sequence is synthesized)
atgagaacttcagctgatagctgggggctccccagatgaggatgcagggatttgggagcagtggaagagggtgcccaaccttgggttggaccaacccttggctcgcagctcaactctgct

SEQ ID NO: 354378 - DNA, 120 bp, Artificial Sequence
  ENSG00000139613_40 (sequence is synthesized)
tcccgcattcctgctccacgtgtcccagcttctcccctgtgacgggaaggcaggtgtgactccaggctctgcactggttcttcttggttcctcccaccaggccctttgttcctcatgtcc

SEQ ID NO: 354379 - DNA, 120 bp, Artificial Sequence
  ENSG00000139613_41 (sequence is synthesized)
tggttcctcccaccaggccctttgttcctcatgtccccatgtttctctccctctgcgtcttagcacctttcttctgttcaaagttttctgtaaattttctctttttttctttctttcttt

SEQ ID NO: 354380 - DNA, 120 bp, Artificial Sequence
  ENSG00000139613_42 (sequence is synthesized)
tactgcaggtgtcctgagagggaagatgaggagatctttagctgctcagttgttagttctggttctggccccactagtacatttaaagagagctttatcaagtgaaaagcctttgccact

SEQ ID NO: 354381 - DNA, 120 bp, Artificial Sequence
  ENSG00000139613_43 (sequence is synthesized)
tcccattactgtgtgattactggtttctgtttgtactcagctctacccttggaattctctgtcacttcccttcccttgaacttcaacttccagggactccttgtccaaggatgactgggt

SEQ ID NO: 354382 - DNA, 120 bp, Artificial Sequence
  ENSG00000139613_44 (sequence is synthesized)
catctttagtgtccacattcctggggtgtgggagaagcagagggttgctagggaggaagcaggaatgctgagtgtccagcagcctccatactcgtaggatgaggatgagaacagtacggg

SEQ ID NO: 354383 - DNA, 120 bp, Artificial Sequence
  ENSG00000139613_45 (sequence is synthesized)
gtgggtcttgtggctgaggggaagggggtacatgaggatgcctgcctatggatgtgttttggcaacagtagagatgccagcaaggaacacagaggagcagacagaaaaaagcacctctag

SEQ ID NO: 354384 - DNA, 120 bp, Artificial Sequence
  ENSG00000139613_46 (sequence is synthesized)
atgattctctctattcttcttatatttagtttagaggaaatccccctttttgattccctgggatctttctggggtagaaattcttgtgagtctctttattttgctgggtcagtagacctg

SEQ ID NO: 354385 - DNA, 120 bp, Artificial Sequence
  ENSG00000139613_47 (sequence is synthesized)
acttactacgtcaggaagatggttgggagtcagagccaaaacagtctccaagagtgagtgtgtgagtatcactgtgtgttttgtagaggaaaagggattcttaggttggcatctcaaacc

SEQ ID NO: 354386 - DNA, 120 bp, Artificial Sequence
  ENSG00000139613_48 (sequence is synthesized)
tttttttgtccctttgaagtaagcacagagagtgattcatggagttgagatcagtgaacctcagatcccaggtgatgtttggcaatagctgtgagcaagcttgcctcctaatttcccata

SEQ ID NO: 354387 - DNA, 120 bp, Artificial Sequence
  ENSG00000139613_49 (sequence is synthesized)
gcaagactccatctcaaaaaacaaacaaaaaagtcacgtgccctcacctcatctgcagacctgagctataccactcactagattattgcctcttcacaaggcggcgttacgatttccaga

SEQ ID NO: 354388 - DNA, 120 bp, Artificial Sequence
  ENSG00000139613_50 (sequence is synthesized)
cgggcaaggtggagccagtttagagaggccctacctctctatgtgattctgatttgtgattataaagttcattctgcccaaacttttcactgcccagactttacccactgtagactaatt

SEQ ID NO: 354389 - DNA, 120 bp, Artificial Sequence
  ENSG00000139613_51 (sequence is synthesized)
cactaaactgccggtgagtgcagaagtagcagggagggtggggggtggtggtggtgaatccttcaaactgaagagttgtattttaaaaaaagatttgtgaattttgtaatttttgaaatt

SEQ ID NO: 354390 - DNA, 120 bp, Artificial Sequence
  ENSG00000139613_52 (sequence is synthesized)
tgggttattttccaccatccctatccctgatcagggcattattggcttggcctagtctccagtttaccattctttttgtcttagtaatattttgtgcaacaaattatttcagagtacctg

SEQ ID NO: 354391 - DNA, 120 bp, Artificial Sequence
  ENSG00000139613_53 (sequence is synthesized)
ggatcagtccacaggtctctcatggcatggttaaaaggggacttgagatttggatttgtgcaggcttgtgttcaaatcctggctttgccattggatggctctgtgatcttgggcaacatt

SEQ ID NO: 354392 - DNA, 120 bp, Artificial Sequence
  ENSG00000139613_54 (sequence is synthesized)
catgagtcttggttccttcatctctagatgggattagtaaacctaccttgtagagtttccttaatggtacctgaggtaatccagtaaagtgttagcacaaggtggtgctttctgtgtgtt

SEQ ID NO: 354393 - DNA, 120 bp, Artificial Sequence
  ENSG00000139613_55 (sequence is synthesized)
tagcacaaggtggtgctttctgtgtgttggtttctttcactcccctcttccaggccacatgatgcaatggcacaagggttaaagaatttcagctttgaggccgggcgtggtggctcacgc

SEQ ID NO: 354394 - DNA, 82 bp, Artificial Sequence
  ENSG00000139613_56 (sequence is synthesized)
gggaggctgaggcaggagaatggcttgcacataggaggcagaggttgcagctggccaagatcgcctctcaagaaaaaaaaaa

SEQ ID NO: 354395 - DNA, 66 bp, Artificial Sequence
  ENSG00000139613_57 (sequence is synthesized)
ttgaccaatatggtgaaacctcgtctctacttactaaaaatacaaaaattagccacgtgaggtggt

SEQ ID NO: 354396 - DNA, 88 bp, Artificial Sequence
  ENSG00000139613_58 (sequence is synthesized)
agttcaagaccagtttgaccaatatggtgaaacctcgtctctacttactaaaaatacaaaaattagccacgtgaggtggtgtgtgcct

SEQ ID NO: 354397 - DNA, 120 bp, Artificial Sequence
  ENSG00000139613_59 (sequence is synthesized)
cccttccctcagtgagaatctaaaacacccctttcctataatctcattctatttcttctctccacagaataattgcctgtctcgacctaacatttttctgtgcccagaaattgagcccaa

SEQ ID NO: 354398 - DNA, 120 bp, Artificial Sequence
  ENSG00000139613_60 (sequence is synthesized)
actactagggaaattaaaggacattatcaagagacaccaggtaaatggtctggtgaggagaggtttcagaaactccatgactgttttcccagtgttttctataccaagcagcagccctga

SEQ ID NO: 354399 - DNA, 120 bp, Artificial Sequence
  ENSG00000139613_61 (sequence is synthesized)
attaccatgttttctgcttcagaggtggctctgtctacttggaaaaagacttgagttaaagccttgagtctgtctttttctgtctgcttctcccatttttcagtcctgacaggtttgcat

SEQ ID NO: 354400 - DNA, 120 bp, Artificial Sequence
  ENSG00000139613_62 (sequence is synthesized)
tactgttctagagactatgttggcctggggaaaaatagtatccacttctactgagctagagattgcgtgatctcagataaatgaaattcctgctctttggaactttatagtaatgaatag

SEQ ID NO: 354401 - DNA, 120 bp, Artificial Sequence
  ENSG00000139613_63 (sequence is synthesized)
atgtcattgataaggatgtacagtggactttaaatttcccatgtatagattatctgttcagaagattatttttggcaatttttaattctttgacttttctccattattagcacaatccca

SEQ ID NO: 354402 - DNA, 120 bp, Artificial Sequence
  ENSG00000139613_64 (sequence is synthesized)
gctgtttccctctgccacttagctggtgtgtgcttagagaatacaaactaactttaatactattataagcaaaatatggttaggaaggcagctctgtggctaaaccttgagtaattcaga

SEQ ID NO: 354403 - DNA, 120 bp, Artificial Sequence
  ENSG00000139613_65 (sequence is synthesized)
ggggaccataatttacccgcttctccttttaccatccagggaacagtcactgaggataagaacaatgcctcccatgttgtgtatcctgtcccggggaatctagaagaaggtgagacctgg

SEQ ID NO: 354404 - DNA, 120 bp, Artificial Sequence
  ENSG00000139613_66 (sequence is synthesized)
gttttcctgtccacttgagtggatggtttggactaggaggcagaggactaagatcaccattcagtacctgggctcctcctcttctttcaatcttgaatcctcttaccaccttaagttcct

SEQ ID NO: 354405 - DNA, 120 bp, Artificial Sequence
  ENSG00000139613_67 (sequence is synthesized)
attaccaagtcccctgctacaacaggagagtgcattagttagggcttttgtacagtattttttttgtgtccccctttagcttatatctctcccttctcttcctctatccccagaggaatg

SEQ ID NO: 354406 - DNA, 120 bp, Artificial Sequence
  ENSG00000139613_68 (sequence is synthesized)
ggtacgaccagtcatgaagagggataagcaggttcttctgcactggggctactatcctgacaggtgaggatgggttcctggggcaggtttaagtataagagccagacccagaagccctag

SEQ ID NO: 354407 - DNA, 120 bp, Artificial Sequence
  ENSG00000139613_69 (sequence is synthesized)
gacatctagcagagcaagaggccactctttcagagttatttttagatcacttaatttgttttcctctcacctagtaagtgaacctctgtcttgggggaggtttggacttagtggacaagc

SEQ ID NO: 354408 - DNA, 120 bp, Artificial Sequence
  ENSG00000139613_70 (sequence is synthesized)
cttgggctaaaaggattgaggctttatgtgtgaattgattatcccagcatcattttcgataagtaaatgttagaaacaatctaaatgtctaacagtaggaaaatgtttcagtaaatttgt

SEQ ID NO: 354409 - DNA, 120 bp, Artificial Sequence
  ENSG00000139613_71 (sequence is synthesized)
atatctactcagtggactattatgcagtctttaaagtgatataacatggataatttataagtgaatattattaataattgcaaaaagtagcatgtaggcctggcatggtggctcacgcct

SEQ ID NO: 354410 - DNA, 120 bp, Artificial Sequence
  ENSG00000139618_0 (sequence is synthesized)
gggcttgtggcgcgagcttctgaaactaggcggcagaggcggagccgctgtggcactgctgcgcctctgctgcgcctcgggtgtcttttgcggcggtgggtcgccgccgggagaagcgtg

SEQ ID NO: 354411 - DNA, 120 bp, Artificial Sequence
  ENSG00000139618_1 (sequence is synthesized)
aggggacagatttgtgaccggcgcggtttttgtcagcttactccggccaaaaaagaactgcacctctggagcggacttatttaccaagcattggaggaatatcgtaggtaaaaatgccta

SEQ ID NO: 354412 - DNA, 120 bp, Artificial Sequence
  ENSG00000139618_2 (sequence is synthesized)
ttggatccaaagagaggccaacattttttgaaatttttaagacacgctgcaacaaagcagatttaggaccaataagtcttaattggtttgaagaactttcttcagaagctccaccctata

SEQ ID NO: 354413 - DNA, 120 bp, Artificial Sequence
  ENSG00000139618_3 (sequence is synthesized)
attctgaacctgcagaagaatctgaacataaaaacaacaattacgaaccaaacctatttaaaactccacaaaggaaaccatcttataatcagctggcttcaactccaataatattcaaag

SEQ ID NO: 354414 - DNA, 120 bp, Artificial Sequence
  ENSG00000139618_4 (sequence is synthesized)
agcaagggctgactctgccgctgtaccaatctcctgtaaaagaattagataaattcaaattagacttaggaaggaatgttcccaatagtagacataaaagtcttcgcacagtgaaaacta

SEQ ID NO: 354415 - DNA, 120 bp, Artificial Sequence
  ENSG00000139618_5 (sequence is synthesized)
aaatggatcaagcagatgatgtttcctgtccacttctaaattcttgtcttagtgaaagtcctgttgttctacaatgtacacatgtaacaccacaaagagataagtcagtggtatgtggga

SEQ ID NO: 354416 - DNA, 120 bp, Artificial Sequence
  ENSG00000139618_6 (sequence is synthesized)
gtttgtttcatacaccaaagtttgtgaagggtcgtcagacaccaaaacatatttctgaaagtctaggagctgaggtggatcctgatatgtcttggtcaagttctttagctacaccaccca

SEQ ID NO: 354417 - DNA, 120 bp, Artificial Sequence
  ENSG00000139618_7 (sequence is synthesized)
cccttagttctactgtgctcatagtcagaaatgaagaagcatctgaaactgtatttcctcatgatactactgctaatgtgaaaagctatttttccaatcatgatgaaagtctgaagaaaa

SEQ ID NO: 354418 - DNA, 120 bp, Artificial Sequence
  ENSG00000139618_8 (sequence is synthesized)
atgatagatttatcgcttctgtgacagacagtgaaaacacaaatcaaagagaagctgcaagtcatggatttggaaaaacatcagggaattcatttaaagtaaatagctgcaaagaccaca

SEQ ID NO: 354419 - DNA, 120 bp, Artificial Sequence
  ENSG00000139618_9 (sequence is synthesized)
ttggaaagtcaatgccaaatgtcctagaagatgaagtatatgaaacagttgtagatacctctgaagaagatagtttttcattatgtttttctaaatgtagaacaaaaaatctacaaaaag

SEQ ID NO: 354420 - DNA, 120 bp, Artificial Sequence
  ENSG00000139618_10 (sequence is synthesized)
taagaactagcaagactaggaaaaaaattttccatgaagcaaacgctgatgaatgtgaaaaatctaaaaaccaagtgaaagaaaaatactcatttgtatctgaagtggaaccaaatgata

SEQ ID NO: 354421 - DNA, 120 bp, Artificial Sequence
  ENSG00000139618_11 (sequence is synthesized)
ctgatccattagattcaaatgtagcaaatcagaagccctttgagagtggaagtgacaaaatctccaaggaagttgtaccgtctttggcctgtgaatggtctcaactaaccctttcaggtc

SEQ ID NO: 354422 - DNA, 120 bp, Artificial Sequence
  ENSG00000139618_12 (sequence is synthesized)
taaatggagcccagatggagaaaatacccctattgcatatttcttcatgtgaccaaaatatttcagaaaaagacctattagacacagagaacaaaagaaagaaagattttcttacttcag

SEQ ID NO: 354423 - DNA, 120 bp, Artificial Sequence
  ENSG00000139618_13 (sequence is synthesized)
agaattctttgccacgtatttctagcctaccaaaatcagagaagccattaaatgaggaaacagtggtaaataagagagatgaagagcagcatcttgaatctcatacagactgcattcttg

SEQ ID NO: 354424 - DNA, 120 bp, Artificial Sequence
  ENSG00000139618_14 (sequence is synthesized)
cagtaaagcaggcaatatctggaacttctccagtggcttcttcatttcagggtatcaaaaagtctatattcagaataagagaatcacctaaagagactttcaatgcaagtttttcaggtc

SEQ ID NO: 354425 - DNA, 120 bp, Artificial Sequence
  ENSG00000139618_15 (sequence is synthesized)
atatgactgatccaaactttaaaaaagaaactgaagcctctgaaagtggactggaaatacatactgtttgctcacagaaggaggactccttatgtccaaatttaattgataatggaagct

SEQ ID NO: 354426 - DNA, 120 bp, Artificial Sequence
  ENSG00000139618_16 (sequence is synthesized)
ggccagccaccaccacacagaattctgtagctttgaagaatgcaggtttaatatccactttgaaaaagaaaacaaataagtttatttatgctatacatgatgaaacatcttataaaggaa

SEQ ID NO: 354427 - DNA, 120 bp, Artificial Sequence
  ENSG00000139618_17 (sequence is synthesized)
aaaaaataccgaaagaccaaaaatcagaactaattaactgttcagcccagtttgaagcaaatgcttttgaagcaccacttacatttgcaaatgctgattcaggtttattgcattcttctg

SEQ ID NO: 354428 - DNA, 120 bp, Artificial Sequence
  ENSG00000139618_18 (sequence is synthesized)
tgaaaagaagctgttcacagaatgattctgaagaaccaactttgtccttaactagctcttttgggacaattctgaggaaatgttctagaaatgaaacatgttctaataatacagtaatct

SEQ ID NO: 354429 - DNA, 120 bp, Artificial Sequence
  ENSG00000139618_19 (sequence is synthesized)
ctcaggatcttgattataaagaagcaaaatgtaataaggaaaaactacagttatttattaccccagaagctgattctctgtcatgcctgcaggaaggacagtgtgaaaatgatccaaaaa

SEQ ID NO: 354430 - DNA, 120 bp, Artificial Sequence
  ENSG00000139618_20 (sequence is synthesized)
gcaaaaaagtttcagatataaaagaagaggtcttggctgcagcatgtcacccagtacaacattcaaaagtggaatacagtgatactgactttcaatcccagaaaagtcttttatatgatc

SEQ ID NO: 354431 - DNA, 120 bp, Artificial Sequence
  ENSG00000139618_21 (sequence is synthesized)
atgaaaatgccagcactcttattttaactcctacttccaaggatgttctgtcaaacctagtcatgatttctagaggcaaagaatcatacaaaatgtcagacaagctcaaaggtaacaatt

SEQ ID NO: 354432 - DNA, 120 bp, Artificial Sequence
  ENSG00000139618_22 (sequence is synthesized)
atgaatctgatgttgaattaaccaaaaatattcccatggaaaagaatcaagatgtatgtgctttaaatgaaaattataaaaacgttgagctgttgccacctgaaaaatacatgagagtag

SEQ ID NO: 354433 - DNA, 120 bp, Artificial Sequence
  ENSG00000139618_23 (sequence is synthesized)
catcaccttcaagaaaggtacaattcaaccaaaacacaaatctaagagtaatccaaaaaaatcaagaagaaactacttcaatttcaaaaataactgtcaatccagactctgaagaacttt

SEQ ID NO: 354434 - DNA, 120 bp, Artificial Sequence
  ENSG00000139618_24 (sequence is synthesized)
tctcagacaatgagaataattttgtcttccaagtagctaatgaaaggaataatcttgctttaggaaatactaaggaacttcatgaaacagacttgacttgtgtaaacgaacccattttca

SEQ ID NO: 354435 - DNA, 120 bp, Artificial Sequence
  ENSG00000139618_25 (sequence is synthesized)
agaactctaccatggttttatatggagacacaggtgataaacaagcaacccaagtgtcaattaaaaaagatttggtttatgttcttgcagaggagaacaaaaatagtgtaaagcagcata

SEQ ID NO: 354436 - DNA, 120 bp, Artificial Sequence
  ENSG00000139618_26 (sequence is synthesized)
taaaaatgactctaggtcaagatttaaaatcggacatctccttgaatatagataaaataccagaaaaaaataatgattacatgaacaaatgggcaggactcttaggtccaatttcaaatc

SEQ ID NO: 354437 - DNA, 120 bp, Artificial Sequence
  ENSG00000139618_27 (sequence is synthesized)
acagttttggaggtagcttcagaacagcttcaaataaggaaatcaagctctctgaacataacattaagaagagcaaaatgttcttcaaagatattgaagaacaatatcctactagtttag

SEQ ID NO: 354438 - DNA, 120 bp, Artificial Sequence
  ENSG00000139618_28 (sequence is synthesized)
cttgtgttgaaattgtaaataccttggcattagataatcaaaagaaactgagcaagcctcagtcaattaatactgtatctgcacatttacagagtagtgtagttgtttctgattgtaaaa

SEQ ID NO: 354439 - DNA, 120 bp, Artificial Sequence
  ENSG00000139618_29 (sequence is synthesized)
atagtcatataacccctcagatgttattttccaagcaggattttaattcaaaccataatttaacacctagccaaaaggcagaaattacagaactttctactatattagaagaatcaggaa

SEQ ID NO: 354440 - DNA, 120 bp, Artificial Sequence
  ENSG00000139618_30 (sequence is synthesized)
gtcagtttgaatttactcagtttagaaaaccaagctacatattgcagaagagtacatttgaagtgcctgaaaaccagatgactatcttaaagaccacttctgaggaatgcagagatgctg

SEQ ID NO: 354441 - DNA, 120 bp, Artificial Sequence
  ENSG00000139618_31 (sequence is synthesized)
atcttcatgtcataatgaatgccccatcgattggtcaggtagacagcagcaagcaatttgaaggtacagttgaaattaaacggaagtttgctggcctgttgaaaaatgactgtaacaaaa

SEQ ID NO: 354442 - DNA, 120 bp, Artificial Sequence
  ENSG00000139618_32 (sequence is synthesized)
gtgcttctggttatttaacagatgaaaatgaagtggggtttaggggcttttattctgctcatggcacaaaactgaatgtttctactgaagctctgcaaaaagctgtgaaactgtttagtg

SEQ ID NO: 354443 - DNA, 120 bp, Artificial Sequence
  ENSG00000139618_33 (sequence is synthesized)
atattgagaatattagtgaggaaacttctgcagaggtacatccaataagtttatcttcaagtaaatgtcatgattctgttgtttcaatgtttaagatagaaaatcataatgataaaactg

SEQ ID NO: 354444 - DNA, 120 bp, Artificial Sequence
  ENSG00000139618_34 (sequence is synthesized)
taagtgaaaaaaataataaatgccaactgatattacaaaataatattgaaatgactactggcacttttgttgaagaaattactgaaaattacaagagaaatactgaaaatgaagataaca

SEQ ID NO: 354445 - DNA, 120 bp, Artificial Sequence
  ENSG00000139618_35 (sequence is synthesized)
aatatactgctgccagtagaaattctcataacttagaatttgatggcagtgattcaagtaaaaatgatactgtttgtattcataaagatgaaacggacttgctatttactgatcagcaca

SEQ ID NO: 354446 - DNA, 120 bp, Artificial Sequence
  ENSG00000139618_36 (sequence is synthesized)
acatatgtcttaaattatctggccagtttatgaaggagggaaacactcagattaaagaagatttgtcagatttaacttttttggaagttgcgaaagctcaagaagcatgtcatggtaata

SEQ ID NO: 354447 - DNA, 120 bp, Artificial Sequence
  ENSG00000139618_37 (sequence is synthesized)
cttcaaataaagaacagttaactgctactaaaacggagcaaaatataaaagattttgagacttctgatacattttttcagactgcaagtgggaaaaatattagtgtcgccaaagagtcat

SEQ ID NO: 354448 - DNA, 120 bp, Artificial Sequence
  ENSG00000139618_38 (sequence is synthesized)
ttaataaaattgtaaatttctttgatcagaaaccagaagaattgcataacttttccttaaattctgaattacattctgacataagaaagaacaaaatggacattctaagttatgaggaaa

SEQ ID NO: 354449 - DNA, 120 bp, Artificial Sequence
  ENSG00000139618_39 (sequence is synthesized)
cagacatagttaaacacaaaatactgaaagaaagtgtcccagttggtactggaaatcaactagtgaccttccagggacaacccgaacgtgatgaaaagatcaaagaacctactctattgg

SEQ ID NO: 354450 - DNA, 120 bp, Artificial Sequence
  ENSG00000139618_40 (sequence is synthesized)
gttttcatacagctagcgggaaaaaagttaaaattgcaaaggaatctttggacaaagtgaaaaacctttttgatgaaaaagagcaaggtactagtgaaatcaccagttttagccatcaat

SEQ ID NO: 354451 - DNA, 120 bp, Artificial Sequence
  ENSG00000139618_41 (sequence is synthesized)
gggcaaagaccctaaagtacagagaggcctgtaaagaccttgaattagcatgtgagaccattgagatcacagctgccccaaagtgtaaagaaatgcagaattctctcaataatgataaaa

SEQ ID NO: 354452 - DNA, 120 bp, Artificial Sequence
  ENSG00000139618_42 (sequence is synthesized)
accttgtttctattgagactgtggtgccacctaagctcttaagtgataatttatgtagacaaactgaaaatctcaaaacatcaaaaagtatctttttgaaagttaaagtacatgaaaatg

SEQ ID NO: 354453 - DNA, 120 bp, Artificial Sequence
  ENSG00000139618_43 (sequence is synthesized)
tagaaaaagaaacagcaaaaagtcctgcaacttgttacacaaatcagtccccttattcagtcattgaaaattcagccttagctttttacacaagttgtagtagaaaaacttctgtgagtc

SEQ ID NO: 354454 - DNA, 120 bp, Artificial Sequence
  ENSG00000139618_44 (sequence is synthesized)
agacttcattacttgaagcaaaaaaatggcttagagaaggaatatttgatggtcaaccagaaagaataaatactgcagattatgtaggaaattatttgtatgaaaataattcaaacagta

SEQ ID NO: 354455 - DNA, 120 bp, Artificial Sequence
  ENSG00000139618_45 (sequence is synthesized)
ctatagctgaaaatgacaaaaatcatctctccgaaaaacaagatacttatttaagtaacagtagcatgtctaacagctattcctaccattctgatgaggtatataatgattcaggatatc

SEQ ID NO: 354456 - DNA, 120 bp, Artificial Sequence
  ENSG00000139618_46 (sequence is synthesized)
tctcaaaaaataaacttgattctggtattgagccagtattgaagaatgttgaagatcaaaaaaacactagtttttccaaagtaatatccaatgtaaaagatgcaaatgcatacccacaaa

SEQ ID NO: 354457 - DNA, 120 bp, Artificial Sequence
  ENSG00000139618_47 (sequence is synthesized)
ctgtaaatgaagatatttgcgttgaggaacttgtgactagctcttcaccctgcaaaaataaaaatgcagccattaaattgtccatatctaatagtaataattttgaggtagggccacctg

SEQ ID NO: 354458 - DNA, 120 bp, Artificial Sequence
  ENSG00000139618_48 (sequence is synthesized)
catttaggatagccagtggtaaaatcgtttgtgtttcacatgaaacaattaaaaaagtgaaagacatatttacagacagtttcagtaaagtaattaaggaaaacaacgagaataaatcaa

SEQ ID NO: 354459 - DNA, 120 bp, Artificial Sequence
  ENSG00000139618_49 (sequence is synthesized)
taaggtttttgctgacattcagagtgaagaaattttacaacataaccaaaatatgtctggattggagaaagtttctaaaatatcaccttgtgatgttagtttggaaacttcagatatatg

SEQ ID NO: 354460 - DNA, 120 bp, Artificial Sequence
  ENSG00000139618_50 (sequence is synthesized)
taaatgtagtatagggaagcttcataagtcagtctcatctgcaaatacttgtgggatttttagcacagcaagtggaaaatctgtccaggtatcagatgcttcattacaaaacgcaagaca

SEQ ID NO: 354461 - DNA, 120 bp, Artificial Sequence
  ENSG00000139618_51 (sequence is synthesized)
agtgttttctgaaatagaagatagtaccaagcaagtcttttccaaagtattgtttaaaagtaacgaacattcagaccagctcacaagagaagaaaatactgctatacgtactccagaaca

SEQ ID NO: 354462 - DNA, 120 bp, Artificial Sequence
  ENSG00000139618_52 (sequence is synthesized)
tttaatatcccaaaaaggcttttcatataatgtggtaaattcatctgctttctctggatttagtacagcaagtggaaagcaagtttccattttagaaagttccttacacaaagttaaggg

SEQ ID NO: 354463 - DNA, 120 bp, Artificial Sequence
  ENSG00000139618_53 (sequence is synthesized)
agtgttagaggaatttgatttaatcagaactgagcatagtcttcactattcacctacgtctagacaaaatgtatcaaaaatacttcctcgtgttgataagagaaacccagagcactgtgt

SEQ ID NO: 354464 - DNA, 120 bp, Artificial Sequence
  ENSG00000139618_54 (sequence is synthesized)
aaactcagaaatggaaaaaacctgcagtaaagaatttaaattatcaaataacttaaatgttgaaggtggttcttcagaaaataatcactctattaaagtttctccatatctctctcaatt

SEQ ID NO: 354465 - DNA, 120 bp, Artificial Sequence
  ENSG00000139618_55 (sequence is synthesized)
tcaacaagacaaacaacagttggtattaggaaccaaagtgtcacttgttgagaacattcatgttttgggaaaagaacaggcttcacctaaaaacgtaaaaatggaaattggtaaaactga

SEQ ID NO: 354466 - DNA, 120 bp, Artificial Sequence
  ENSG00000139618_56 (sequence is synthesized)
aactttttctgatgttcctgtgaaaacaaatatagaagtttgttctacttactccaaagattcagaaaactactttgaaacagaagcagtagaaattgctaaagcttttatggaagatga

SEQ ID NO: 354467 - DNA, 120 bp, Artificial Sequence
  ENSG00000139618_57 (sequence is synthesized)
tgaactgacagattctaaactgccaagtcatgccacacattctctttttacatgtcccgaaaatgaggaaatggttttgtcaaattcaagaattggaaaaagaagaggagagccccttat

SEQ ID NO: 354468 - DNA, 120 bp, Artificial Sequence
  ENSG00000139618_58 (sequence is synthesized)
aagaaacttattaaatgaatttgacaggataatagaaaatcaagaaaaatccttaaaggcttcaaaaagcactccagatggcacaataaaagatcgaagattgtttatgcatcatgtttc

SEQ ID NO: 354469 - DNA, 120 bp, Artificial Sequence
  ENSG00000139618_59 (sequence is synthesized)
aagattgtttatgcatcatgtttctttagagccgattacctgtgtaccctttcgcacaactaaggaacgtcaagagatacagaatccaaattttaccgcacctggtcaagaatttctgtc

SEQ ID NO: 354470 - DNA, 120 bp, Artificial Sequence
  ENSG00000139618_60 (sequence is synthesized)
taaatctcatttgtatgaacatctgactttggaaaaatcttcaagcaatttagcagtttcaggacatccattttatcaagtttctgctacaagaaatgaaaaaatgagacacttgattac

SEQ ID NO: 354471 - DNA, 120 bp, Artificial Sequence
  ENSG00000139618_61 (sequence is synthesized)
tacaggcagaccaaccaaagtctttgttccaccttttaaaactaaatcacattttcacagagttgaacagtgtgttaggaatattaacttggaggaaaacagacaaaagcaaaacattga

SEQ ID NO: 354472 - DNA, 120 bp, Artificial Sequence
  ENSG00000139618_62 (sequence is synthesized)
tggacatggctctgatgatagtaaaaataagattaatgacaatgagattcatcagtttaacaaaaacaactccaatcaagcagtagctgtaactttcacaaagtgtgaagaagaaccttt

SEQ ID NO: 354473 - DNA, 120 bp, Artificial Sequence
  ENSG00000139618_63 (sequence is synthesized)
agatttaattacaagtcttcagaatgccagagatatacaggatatgcgaattaagaagaaacaaaggcaacgcgtctttccacagccaggcagtctgtatcttgcaaaaacatccactct

SEQ ID NO: 354474 - DNA, 120 bp, Artificial Sequence
  ENSG00000139618_64 (sequence is synthesized)
gcctcgaatctctctgaaagcagcagtaggaggccaagttccctctgcgtgttctcataaacagctgtatacgtatggcgtttctaaacattgcataaaaattaacagcaaaaatgcaga

SEQ ID NO: 354475 - DNA, 120 bp, Artificial Sequence
  ENSG00000139618_65 (sequence is synthesized)
gtcttttcagtttcacactgaagattattttggtaaggaaagtttatggactggaaaaggaatacagttggctgatggtggatggctcataccctccaatgatggaaaggctggaaaaga

SEQ ID NO: 354476 - DNA, 120 bp, Artificial Sequence
  ENSG00000139618_66 (sequence is synthesized)
agaattttatagggctctgtgtgacactccaggtgtggatccaaagcttatttctagaatttgggtttataatcactatagatggatcatatggaaactggcagctatggaatgtgcctt

SEQ ID NO: 354477 - DNA, 120 bp, Artificial Sequence
  ENSG00000139618_67 (sequence is synthesized)
tcctaaggaatttgctaatagatgcctaagcccagaaagggtgcttcttcaactaaaatacagatatgatacggaaattgatagaagcagaagatcggctataaaaaagataatggaaag

SEQ ID NO: 354478 - DNA, 120 bp, Artificial Sequence
  ENSG00000139618_68 (sequence is synthesized)
ggatgacacagctgcaaaaacacttgttctctgtgtttctgacataatttcattgagcgcaaatatatctgaaacttctagcaataaaactagtagtgcagatacccaaaaagtggccat

SEQ ID NO: 354479 - DNA, 120 bp, Artificial Sequence
  ENSG00000139618_69 (sequence is synthesized)
tattgaacttacagatgggtggtatgctgttaaggcccagttagatcctcccctcttagctgtcttaaagaatggcagactgacagttggtcagaagattattcttcatggagcagaact

SEQ ID NO: 354480 - DNA, 120 bp, Artificial Sequence
  ENSG00000139618_70 (sequence is synthesized)
ggtgggctctcctgatgcctgtacacctcttgaagccccagaatctcttatgttaaagatttctgctaacagtactcggcctgctcgctggtataccaaacttggattctttcctgaccc

SEQ ID NO: 354481 - DNA, 120 bp, Artificial Sequence
  ENSG00000139618_71 (sequence is synthesized)
tagaccttttcctctgcccttatcatcgcttttcagtgatggaggaaatgttggttgtgttgatgtaattattcaaagagcataccctatacagtggatggagaagacatcatctggatt

SEQ ID NO: 354482 - DNA, 120 bp, Artificial Sequence
  ENSG00000139618_72 (sequence is synthesized)
atacatatttcgcaatgaaagagaggaagaaaaggaagcagcaaaatatgtggaggcccaacaaaagagactagaagccttattcactaaaattcaggaggaatttgaagaacatgaaga

SEQ ID NO: 354483 - DNA, 120 bp, Artificial Sequence
  ENSG00000139618_73 (sequence is synthesized)
aaacacaacaaaaccatatttaccatcacgtgcactaacaagacagcaagttcgtgctttgcaagatggtgcagagctttatgaagcagtgaagaatgcagcagacccagcttaccttga

SEQ ID NO: 354484 - DNA, 120 bp, Artificial Sequence
  ENSG00000139618_74 (sequence is synthesized)
gggttatttcagtgaagagcagttaagagccttgaataatcacaggcaaatgttgaatgataagaaacaagctcagatccagttggaaattaggaaggccatggaatctgctgaacaaaa

SEQ ID NO: 354485 - DNA, 120 bp, Artificial Sequence
  ENSG00000139618_75 (sequence is synthesized)
ggaacaaggtttatcaagggatgtcacaaccgtgtggaagttgcgtattgtaagctattcaaaaaaagaaaaagattcagttatactgagtatttggcgtccatcatcagatttatattc

SEQ ID NO: 354486 - DNA, 120 bp, Artificial Sequence
  ENSG00000139618_76 (sequence is synthesized)
tctgttaacagaaggaaagagatacagaatttatcatcttgcaacttcaaaatctaaaagtaaatctgaaagagctaacatacagttagcagcgacaaaaaaaactcagtatcaacaact

SEQ ID NO: 354487 - DNA, 120 bp, Artificial Sequence
  ENSG00000139618_77 (sequence is synthesized)
accggtttcagatgaaattttatttcagatttaccagccacgggagccccttcacttcagcaaatttttagatccagactttcagccatcttgttctgaggtggacctaataggatttgt

SEQ ID NO: 354488 - DNA, 120 bp, Artificial Sequence
  ENSG00000139618_78 (sequence is synthesized)
cgtttctgttgtgaaaaaaacaggacttgcccctttcgtctatttgtcagacgaatgttacaatttactggcaataaagttttggatagaccttaatgaggacattattaagcctcatat

SEQ ID NO: 354489 - DNA, 120 bp, Artificial Sequence
  ENSG00000139618_79 (sequence is synthesized)
gttaattgctgcaagcaacctccagtggcgaccagaatccaaatcaggccttcttactttatttgctggagatttttctgtgttttctgctagtccaaaagagggccactttcaagagac

SEQ ID NO: 354490 - DNA, 120 bp, Artificial Sequence
  ENSG00000139618_80 (sequence is synthesized)
attcaacaaaatgaaaaatactgttgagaatattgacatactttgcaatgaagcagaaaacaagcttatgcatatactgcatgcaaatgatcccaagtggtccaccccaactaaagactg

SEQ ID NO: 354491 - DNA, 120 bp, Artificial Sequence
  ENSG00000139618_81 (sequence is synthesized)
tacttcagggccgtacactgctcaaatcattcctggtacaggaaacaagcttctgatgtcttctcctaattgtgagatatattatcaaagtcctttatcactttgtatggccaaaaggaa

SEQ ID NO: 354492 - DNA, 120 bp, Artificial Sequence
  ENSG00000139618_82 (sequence is synthesized)
gtctgtttccacacctgtctcagcccagatgacttcaaagtcttgtaaaggggagaaagagattgatgaccaaaagaactgcaaaaagagaagagccttggatttcttgagtagactgcc

SEQ ID NO: 354493 - DNA, 120 bp, Artificial Sequence
  ENSG00000139618_83 (sequence is synthesized)
tttacctccacctgttagtcccatttgtacatttgtttctccggctgcacagaaggcatttcagccaccaaggagttgtggcaccaaatacgaaacacccataaagaaaaaagaactgaa

SEQ ID NO: 354494 - DNA, 120 bp, Artificial Sequence
  ENSG00000139618_84 (sequence is synthesized)
ttctcctcagatgactccatttaaaaaattcaatgaaatttctcttttggaaagtaattcaatagctgacgaagaacttgcattgataaatacccaagctcttttgtctggttcaacagg

SEQ ID NO: 354495 - DNA, 120 bp, Artificial Sequence
  ENSG00000139618_85 (sequence is synthesized)
agaaaaacaatttatatctgtcagtgaatccactaggactgctcccaccagttcagaagattatctcagactgaaacgacgttgtactacatctctgatcaaagaacaggagagttccca

SEQ ID NO: 354496 - DNA, 120 bp, Artificial Sequence
  ENSG00000139618_86 (sequence is synthesized)
ggccagtacggaagaatgtgagaaaaataagcaggacacaattacaactaaaaaatatatctaagcatttgcaaaggcgacaataaattattgacgcttaacctttccagtttataagac

SEQ ID NO: 354497 - DNA, 120 bp, Artificial Sequence
  ENSG00000139618_87 (sequence is synthesized)
tggaatataatttcaaaccacacattagtacttatgttgcacaatgagaaaagaaattagtttcaaatttacctcagcgtttgtgtatcgggcaaaaatcgttttgcccgattccgtatt

SEQ ID NO: 354498 - DNA, 120 bp, Artificial Sequence
  ENSG00000139618_88 (sequence is synthesized)
cgattccgtattggtatacttttgcttcagttgcatatcttaaaactaaatgtaatttattaactaatcaagaaaaacatctttggctgagctcggtggctcatgcctgtaatcccaaca

SEQ ID NO: 354499 - DNA, 120 bp, Artificial Sequence
  ENSG00000139618_89 (sequence is synthesized)
cctgggcaacatagggagacccccatctttacaaagaaaaaaaaaaggggaaaagaaaatcttttaaatctttggatttgatcactacaagtattattttacaagtgaaataaacatacc

SEQ ID NO: 354500 - DNA, 120 bp, Artificial Sequence
  ENSG00000139618_90 (sequence is synthesized)
atcactacaagtattattttacaagtgaaataaacataccattttcttttagattgtgtcattaaatggaatgaggtctcttagtacagttattttgatgcagataattccttttagttt

SEQ ID NO: 354501 - DNA, 120 bp, Artificial Sequence
  ENSG00000139618_91 (sequence is synthesized)
agctactattttaggggattttttttagaggtaactcactatgaaatagttctccttaatgcaaatatgttggttctgctatagttccatcctgttcaaaagtcaggatgaatatgaaga

SEQ ID NO: 354502 - DNA, 120 bp, Artificial Sequence
  ENSG00000139618_92 (sequence is synthesized)
gtggtgtttccttttgagcaattcttcatccttaagtcagcatgattataagaaaaatagaaccctcagtgtaactctaattcctttttactattccagtgtgatctctgaaattaaatt

SEQ ID NO: 354503 - DNA, 120 bp, Artificial Sequence
  ENSG00000139618_93 (sequence is synthesized)
acttcaactaaaaattcaaatactttaaatcagaagatttcatagttaatttattttttttttcaacaaaatggtcatccaaactcaaacttgagaaaatatcttgctttcaaattggca

SEQ ID NO: 354504 - DNA, 120 bp, Artificial Sequence
  ENSG00000139618_94 (sequence is synthesized)
ctgattctgcctgctttatttttagcgctatcacaggacccagagcctatgcccttttaaacttaccacaaaagcagaagattaattcaatttaagatgatactctcatttgttacgtcc

SEQ ID NO: 354505 - DNA, 80 bp, Artificial Sequence
  ENSG00000139618_95 (sequence is synthesized)
catcacttcccgggttcacgtaattctcccacctcaagcctccctagtagctgggattacagggacgcaccaccatgccc

SEQ ID NO: 354506 - DNA, 70 bp, Artificial Sequence
  ENSG00000139618_96 (sequence is synthesized)
ctccacttcccgggttcacgtaattctcccacctcaagcctccctagtagctgggattacagggatacca

SEQ ID NO: 354507 - DNA, 120 bp, Artificial Sequence
  ENSG00000139618_97 (sequence is synthesized)
tataggcgtgagccactgtgcccggccaatatttgttactttcttaggtttaatagagaaaagggataaaacatttctaactgggagttaattgcatggagaaggtcttaaatcagatgt

SEQ ID NO: 354508 - DNA, 120 bp, Artificial Sequence
  ENSG00000139618_98 (sequence is synthesized)
taattgcatggagaaggtcttaaatcagatgttttaatgccttaaatgtctgtataatatcatgttttcaaatctaattataaatacgtttaaagccaagaataaatcttttaaaaaatt

SEQ ID NO: 354509 - DNA, 120 bp, Artificial Sequence
  ENSG00000139618_99 (sequence is synthesized)
aatactgttgagagacagagtcttgctttgtcacccccaggctggagtacaatagcacaatctcggatcactgcagtgtctgcctcctgggctcaagcgattctcgtgccttagcctccc

SEQ ID NO: 354510 - DNA, 120 bp, Artificial Sequence
  ENSG00000139618_100 (sequence is synthesized)
ggcaggaaagagagtacagggagaactctcacttttaagccatcagatcttgtgagaactccctcactatcatggaacagcatgggagaaactgcccccgtgatccagttacctcccacc

SEQ ID NO: 354511 - DNA, 120 bp, Artificial Sequence
  ENSG00000139618_101 (sequence is synthesized)
tctgttgtgaaaaaaacagtgagttaccagtggaaaatagaggacatgatcatttaggaagaaaacaaggaacttgggagcaacagagtattggaaggattgcctgtgaggatactgaaa

SEQ ID NO: 354512 - DNA, 120 bp, Artificial Sequence
  ENSG00000139618_102 (sequence is synthesized)
acatcccttttaagacttatttaccaagcattggaggaatatcgtaggtaaaaatgcctattggatccaaagagaggccaacattttttgaaatttttaagacacgctgcaacaaagcag

SEQ ID NO: 354513 - DNA, 120 bp, Artificial Sequence
  ENSG00000139618_103 (sequence is synthesized)
gccacgcgtcactgacttatttaccaagcattggaggaatatcgtaggtaaaaatgcctattggatccaaagagaggccaacattttttgaaatttttaagacacgctgcaacaaagcag

SEQ ID NO: 354514 - DNA, 120 bp, Artificial Sequence
  ENSG00000139620_0 (sequence is synthesized)
gagcggcgcggcagagtgcggcgcagcgcagctcctgaggttttggttatgaacaggattcggattcacgtcttgccaaccaatcgggggaggatcactccagtgcccaggtctcaggaa

SEQ ID NO: 354515 - DNA, 120 bp, Artificial Sequence
  ENSG00000139620_1 (sequence is synthesized)
cctctgtcttgtgcattcactcatcgtccatgctctcaccctcgtctggaggggcaggagttttgcattaagcatatccttgaagacaagaatgcacccttcaagcagtgtagttatata

SEQ ID NO: 354516 - DNA, 120 bp, Artificial Sequence
  ENSG00000139620_2 (sequence is synthesized)
tcgacgaagaatggaaaaagatgtcccaatgctgccccaaagccagagaagaaagatggggtgtccttctgtgctgaacatgtccgtaggaatgccctggcacttcatgctcaaatgaag

SEQ ID NO: 354517 - DNA, 120 bp, Artificial Sequence
  ENSG00000139620_3 (sequence is synthesized)
aagaccaacccagggcctgtgggtgaaacactcctgtgccagctgagctcatatgctaagacagagctggggtctcagactccagaaagtagtcgcagtgaagccagccgaatactagat

SEQ ID NO: 354518 - DNA, 120 bp, Artificial Sequence
  ENSG00000139620_4 (sequence is synthesized)
gaagacagctggagtgatggggagcaggaacccattactgtggatcagacatggagaggtgaccctgacagtgaagctgatagcatagacagtgatcaagaagatcccctaaaacatgct

SEQ ID NO: 354519 - DNA, 120 bp, Artificial Sequence
  ENSG00000139620_5 (sequence is synthesized)
ggtgtctacacagcagaagaagtggccctgattatgcgtgaaaagctaattcgtttgcagtcgttgtatattgatcagtttaaacgacttcagcatctgctcaaggagaagaagcgccga

SEQ ID NO: 354520 - DNA, 120 bp, Artificial Sequence
  ENSG00000139620_6 (sequence is synthesized)
tacttacataatcgcaaagtggaacatgaagctctaggcagtagtctcctgactggcccagagggacttttggccaaagaacgagagaacttaaagcgattaaaatgtctgcgacgatac

SEQ ID NO: 354521 - DNA, 120 bp, Artificial Sequence
  ENSG00000139620_7 (sequence is synthesized)
cgccagcgctatggagtggaagccttactgcataggcagttgaaggaacggagaatgctggccacagatggtgctgcccaacaggcccataccactcgttccagtcagaggtgcttggcc

SEQ ID NO: 354522 - DNA, 120 bp, Artificial Sequence
  ENSG00000139620_8 (sequence is synthesized)
aggtaccctgcaacaaacctgttcctgtaagcctctctgaggatccctgctgcccactgcatttccagttgcctcctcagatgtataagcccgagcaggtactgtctgtgccagacgatc

SEQ ID NO: 354523 - DNA, 120 bp, Artificial Sequence
  ENSG00000139620_9 (sequence is synthesized)
tggaagccggccccatggatctgtacttgagtgctgctgagcttcagcccactgagagtttacctctggagttcagtgatgacttggatgttgtgggtgatggtatgcagtgtcctcctt

SEQ ID NO: 354524 - DNA, 120 bp, Artificial Sequence
  ENSG00000139620_10 (sequence is synthesized)
cacctttgctttttgatccttcactaacccttgaagatcatttagtcaaagaaattgctgaagacccagtggatattttgggccagatgcagatggctggagatgggtgcagatcccagg

SEQ ID NO: 354525 - DNA, 120 bp, Artificial Sequence
  ENSG00000139620_11 (sequence is synthesized)
gatctcgaaattctgagaaagcctctgcaccattgtctcagagtggattggctactgcaaatgggaagccagaacccacttctattagttgatagtttggggaaccattttactttggtg

SEQ ID NO: 354526 - DNA, 120 bp, Artificial Sequence
  ENSG00000139620_12 (sequence is synthesized)
gatttaaatttctcgttcttcaaagaagtatttctgatcatctctcacaaaacacaggcaacccagactaccttgtttttcttctggattgagtattatagtcaaacgtaaagccaaatt

SEQ ID NO: 354527 - DNA, 120 bp, Artificial Sequence
  ENSG00000139620_13 (sequence is synthesized)
ttgaggacgtggaccgtgggtttcttcccactcagggcaaggaagagaaagagagataatccctatcaaagcttctgggattatttgggactatacctaaaaggaaagtgacatctttgt

SEQ ID NO: 354528 - DNA, 120 bp, Artificial Sequence
  ENSG00000139620_14 (sequence is synthesized)
aatgggatttcccaagtcatggatagaaatccacttaagtagctaggtgggagctgtctttgtgagtggtgtctttgagatactgatggccctaatatcggttatctctatctgaagacc

SEQ ID NO: 354529 - DNA, 120 bp, Artificial Sequence
  ENSG00000139620_15 (sequence is synthesized)
tgcagtttagcttttcttcacctctacttaattgggcagtctttaacccctttccctggtgaactctggctttttatcctctgagaaaacagcccacaggactgggtcctccttatccgt

SEQ ID NO: 354530 - DNA, 120 bp, Artificial Sequence
  ENSG00000139620_16 (sequence is synthesized)
ccgtcttgcttttaacctatgtaaatttctgtggttgctatcttatgtaaaatatagtaaaaatttattgtatatagtttctattaaatgttaaagaaaatgttatgaaaatatcaaaca

SEQ ID NO: 354531 - DNA, 120 bp, Artificial Sequence
  ENSG00000139620_17 (sequence is synthesized)
cgttgttccaatcagtctcttccaatgaccagacactgccttacccagaaagatgcgactgccattggtgacctgttaactctttactgtggtctaatggagacagcactcgactgaaag

SEQ ID NO: 354532 - DNA, 120 bp, Artificial Sequence
  ENSG00000139620_18 (sequence is synthesized)
actagagaagggcgagcggcgcggcagagtgcggcgcagcgcagctcctgaggcttccaggagccaggatctccggtgactggagccgtaggacaaaatggcgctcgcataggcttccga

SEQ ID NO: 354533 - DNA, 120 bp, Artificial Sequence
  ENSG00000139620_19 (sequence is synthesized)
ggccaggcccagtcgtgcgctctgaggcaggccgggacaaaggcggcgtgcggggaggcggcgtggccgccgcgtggggctggtgttgtcgcttcccttcgtgctgcagctgtgcgagtc

SEQ ID NO: 354534 - DNA, 120 bp, Artificial Sequence
  ENSG00000139620_20 (sequence is synthesized)
gagcggcgcggcagagtgcggcgcagcgcagctcctgaggtaagatggcggtgctctttcctctaagctcttgcggttgggctgctatttcgctctttttgtcagctcagagctgctact

SEQ ID NO: 354535 - DNA, 120 bp, Artificial Sequence
  ENSG00000139620_21 (sequence is synthesized)
tcagcgtggtgtggttcggggtggggccgggcatggagggacacgctaaagggaggcaaagccacagatgcctgtggagacttggggagggcggcggggacttacggagcgtaccttacg

SEQ ID NO: 354536 - DNA, 120 bp, Artificial Sequence
  ENSG00000139620_22 (sequence is synthesized)
gggacgacttctgcatgtcctttggaaactgtccgcgcgatctgtgtggagcaggaattttcgggaagggtaagggctttttggtctttcgtttgaccccgcaggttttggttatgaaca

SEQ ID NO: 354537 - DNA, 120 bp, Artificial Sequence
  ENSG00000139620_23 (sequence is synthesized)
ctcgactgaaagtgaaggacccagactctagttgatcataaaaggattcctctgtactagcacactcccctaaaaaaaaaagatatttgtcaggatacgaatcaggttctcttcaagtgc

SEQ ID NO: 354538 - DNA, 120 bp, Artificial Sequence
  ENSG00000139620_24 (sequence is synthesized)
cgagggggtatgtgatatgatgcgggcttcagcatagctgccgcgtttgagattttgtccttgtaaatttggggttatggttgtatccttggaaaactgaaaaaacggtgaagactggaa

SEQ ID NO: 354539 - DNA, 120 bp, Artificial Sequence
  ENSG00000139620_25 (sequence is synthesized)
tgctgggattacaagggtgaaccacttcatccgtcctgttatttccctttaataaagtcaaatgagttgaccttgggccagttaaattcctctgacttgcatttttagaaatgaatgtaa

SEQ ID NO: 354540 - DNA, 120 bp, Artificial Sequence
  ENSG00000139620_26 (sequence is synthesized)
tagtcattttaattccctaaaaatgatttaaagattagggactgtgaacattattgaacgctttcaagaaggaacttataaaatattaatgttttgtctcttcagggtgtccttctgtgc

SEQ ID NO: 354541 - DNA, 120 bp, Artificial Sequence
  ENSG00000139624_0 (sequence is synthesized)
ctccccgcgggttccgttggctgtggcggcagctgacgcttgtggcggcggtggcttcggggtgggcgtaagatggcgacagcagcgcagggacccctaagcttgctgtggggctggctg

SEQ ID NO: 354542 - DNA, 120 bp, Artificial Sequence
  ENSG00000139624_1 (sequence is synthesized)
tggagcgagcgcttctggctacccgagaacgtgagctgggctgatctggaggggccggccgacggctacggttacccccgcggccggcacatcctctcggtgttcccgctggcggcgggc

SEQ ID NO: 354543 - DNA, 120 bp, Artificial Sequence
  ENSG00000139624_2 (sequence is synthesized)
atcttcttcgtgaggctgctcttcgagcgatttattgccaaaccctgtgcactctgtattggcatcgaggacagtggtccttatcaggcccaacccaatgccatccttgaaaaggtgttc

SEQ ID NO: 354544 - DNA, 120 bp, Artificial Sequence
  ENSG00000139624_3 (sequence is synthesized)
atatctattaccaagtatcctgataagaaaaggctggagggcctgtcaaagcagctggattggaatgtccgaaaaatccaatgctggtttcgccatcggaggaatcaggacaagccccca

SEQ ID NO: 354545 - DNA, 120 bp, Artificial Sequence
  ENSG00000139624_4 (sequence is synthesized)
acgcttactaaattctgtgaaagcatgtggagattcacattttatttatgtatattctgctatggaattagatttctctggtcgtcaccttggttctgggacatccgacagtgctggcat

SEQ ID NO: 354546 - DNA, 120 bp, Artificial Sequence
  ENSG00000139624_5 (sequence is synthesized)
aactatccatttcagcctctttcaagtgggctttatcactattatatcatggaattggccttctattggtcccttatgttttctcagtttacagacattaaaagaaaggacttcctgatc

SEQ ID NO: 354547 - DNA, 120 bp, Artificial Sequence
  ENSG00000139624_6 (sequence is synthesized)
atgtttgtgcatcacttggtcaccattgggcttatctccttctcctacatcaacaatatggttcgagtgggaactctgatcatgtgtctacatgatgtctcagacttcttgctggaggca

SEQ ID NO: 354548 - DNA, 120 bp, Artificial Sequence
  ENSG00000139624_7 (sequence is synthesized)
gccaaactggccaattatgccaagtatcagcggctctgtgacaccctttttgtgatcttcagtgctgtttttatggttacacgactaggaatctatccattctggattctgaacacgacc

SEQ ID NO: 354549 - DNA, 120 bp, Artificial Sequence
  ENSG00000139624_8 (sequence is synthesized)
ctctttgagagttgggagataatcgggccttatgcttcatggtggctcctcaatggcctgctgctgaccctacagcttctgcatgtcatctggtcctacctaattgcacggattgctttg

SEQ ID NO: 354550 - DNA, 120 bp, Artificial Sequence
  ENSG00000139624_9 (sequence is synthesized)
aaagccttgatcaggggaaaggtatcgaaggatgatcgcagtgatgtggagagcagctcagaggaagaagatgtgaccacctgcacaaaaagtccctgtgacagtagctccagcaatggt

SEQ ID NO: 354551 - DNA, 120 bp, Artificial Sequence
  ENSG00000139624_10 (sequence is synthesized)
tggcaacatactcctcttggcccttcccatatctactcttctgtgattgggagactgcaaggcactgaggagtatcaaagaagcaaatattttcactttgaaagaaaactgccattttgt

SEQ ID NO: 354552 - DNA, 120 bp, Artificial Sequence
  ENSG00000139624_11 (sequence is synthesized)
atttaatagcctccaggttctttcagtaatgttatttgctctgtgtgtttttgtgtgtttgttgatgtgcgtttgtgcatatgcgtgagtttcattgccggggttggggcacaattgtgg

SEQ ID NO: 354553 - DNA, 120 bp, Artificial Sequence
  ENSG00000139624_12 (sequence is synthesized)
actggggccatgaggccttccctggtccccactgaacccaccttagttccacatttggctgcatcttgaattatgccaactccagacttctccttcttttttgcccttggctcttgacac

SEQ ID NO: 354554 - DNA, 120 bp, Artificial Sequence
  ENSG00000139624_13 (sequence is synthesized)
tctaaacccctggaccatctgaatggagcagccaagttcagtcccacatttctgtactgttcctctttcacagctggaatatgtcacatgatgaagttgtatagaaacagaaccatggat

SEQ ID NO: 354555 - DNA, 120 bp, Artificial Sequence
  ENSG00000139624_14 (sequence is synthesized)
ggatggccaggattgccgtggtccctagctagatccccttcctatcaatcacctgatagcaacagggacagctgccaataccctgctctttactcaatggtacccagggagggagcatgg

SEQ ID NO: 354556 - DNA, 120 bp, Artificial Sequence
  ENSG00000139624_15 (sequence is synthesized)
gaagagggtgagctgagggctggaggagggcaacagccactgggtgagctgttcacggtcttatactattgtttgtttgtgattaaaagtgcttcaacccacctctactgtctcaacctc

SEQ ID NO: 354557 - DNA, 120 bp, Artificial Sequence
  ENSG00000139624_16 (sequence is synthesized)
ttcagtgactctatccgcagtttcctgaatccataagctaattaagagcttttccaggtctgattcagaaggccctggacaccaaatttttcctttctgtgcatggtaggaagagtcagc

SEQ ID NO: 354558 - DNA, 81 bp, Artificial Sequence
  ENSG00000139624_17 (sequence is synthesized)
accaaatttttcctttctgtgcatggtaggaagagtcagccagggtgcttacattttagagctttatgttttttaagaaaa

SEQ ID NO: 354559 - DNA, 120 bp, Artificial Sequence
  ENSG00000139624_18 (sequence is synthesized)
ctgtctaaaaaaaaaaaaaaaaaaaaaaattaggtcatacttttagttcctcaacttgctatattgaatagactaatattgttgtgaaatatgaatgaatatgcttttgaaagtcagatg

SEQ ID NO: 354560 - DNA, 120 bp, Artificial Sequence
  ENSG00000139624_19 (sequence is synthesized)
gtcagatgagaaatgtattttgccttctgaaatttgaacaattgccttgttaatacaaactggattggttggtgtagctaatctgacaaaagatgcaattggataaaacaataataaaaa

SEQ ID NO: 354561 - DNA, 120 bp, Artificial Sequence
  ENSG00000139624_20 (sequence is synthesized)
ggatccccggaggcggtccccgggttgcagtgagggaagtgggccgggaggagagatgggcggtgaagaggcccggccctgccagggaggcgggcggatccgtggcagtgaccagaaggg

SEQ ID NO: 354562 - DNA, 88 bp, Artificial Sequence
  ENSG00000139624_21 (sequence is synthesized)
ttattctttttaaaaatttaaatccttgggactctgcttgatataacctcttcttttagatgatgaaaccaagacccaagagatttat

SEQ ID NO: 354563 - DNA, 120 bp, Artificial Sequence
  ENSG00000139624_22 (sequence is synthesized)
gcgatggagtctcgctctgttacccaggccagagagagtgcaatggcgtgatctcagctcattgtaatttccgcctcctggatttattgccaaaccctgtgcactctgtattggcatcga

SEQ ID NO: 354564 - DNA, 120 bp, Artificial Sequence
  ENSG00000139624_23 (sequence is synthesized)
ttgccaattctcattttgcccattcagtttttctgttctattctattctactttcgccaatagaacacaagaaccctattgccctgcttttaccttagcctgtgctgaccttctgtggac

SEQ ID NO: 354565 - DNA, 120 bp, Artificial Sequence
  ENSG00000139624_24 (sequence is synthesized)
tctcataggacctctgctgcctcagaccgtatttctagcaaggtcggatccagactcagagtacccggcttggttggcttctcaggactgactcatctctgaggaacagtcctcatttta

SEQ ID NO: 354566 - DNA, 86 bp, Artificial Sequence
  ENSG00000139624_25 (sequence is synthesized)
ctgttttaccttttaagatgtgacttagacgcaagaggaaagttctaccttcttcctgtcccttaggaatggcttttgttaaagga

SEQ ID NO: 354567 - DNA, 120 bp, Artificial Sequence
  ENSG00000139624_26 (sequence is synthesized)
accttcttcctgtcccttaggaatggcttttgttaaaggatgatagggttaagagttttttaagagatggcctcaaccatttcctaccccttacctacctgcttcagtggatttcatatt

SEQ ID NO: 354568 - DNA, 120 bp, Artificial Sequence
  ENSG00000139624_27 (sequence is synthesized)
aggtgaccatgctgtgatattcaagatatggtttatataaggaactaaatacccacctcaccccactagtgtatgaggcaagtgtcctaagtgaatgggtatgtagtgtttcaaataccc

SEQ ID NO: 354569 - DNA, 120 bp, Artificial Sequence
  ENSG00000139624_28 (sequence is synthesized)
atcttatgccaagagcgaaagaaaggtgccacttaatgataaactcataattgaactttgcaagttttgaagcagtcagactgtagtcaaagggctagggatttcagcctaaaggaatac

SEQ ID NO: 354570 - DNA, 120 bp, Artificial Sequence
  ENSG00000139624_29 (sequence is synthesized)
agaatcccaagtgggaggggctctgcttgagcaggtactgatactaggaccaagtgatggaatgtggcctagatattgatgatctcctgcatcattattccttatagctgccattggctc

SEQ ID NO: 354571 - DNA, 120 bp, Artificial Sequence
  ENSG00000139624_30 (sequence is synthesized)
agaacttgctcagtgtgcctgtgcatcttgctgtagctactggacatctctgttctctcctgcttttctttcctgactaggtgacctgtccaggaaggattagaccctgtactctccact

SEQ ID NO: 354572 - DNA, 87 bp, Artificial Sequence
  ENSG00000139624_31 (sequence is synthesized)
tcccgagttcaagagatcctcttttattgccaaaccctgtgcactctgtattggcatcgaggacagtggtccttatcaggcccaacc

SEQ ID NO: 354573 - DNA, 120 bp, Artificial Sequence
  ENSG00000139624_32 (sequence is synthesized)
atatgtaagataaaatttcttactaaaaatgactttgggataaaacttggaaagataaacatcacttgagccacttatggctatcataccttgtcgctcagctagtcaatgggattgaag

SEQ ID NO: 354574 - DNA, 120 bp, Artificial Sequence
  ENSG00000139624_33 (sequence is synthesized)
ccaccgcacccggccttgagccagcttctaaatgagtttagcagaattgcagtatactttgttcaaccacatgatttcacctttaagtgaatggatcatatgtttgtccaagataaagat

SEQ ID NO: 354575 - DNA, 120 bp, Artificial Sequence
  ENSG00000139624_34 (sequence is synthesized)
caggggaggatagagagcacgtacctctaagggtaaggataggatgggatggtccttcatatttgagtagtccatgtagctatatggagagctttatcccctcagggaaaacctttgggc

SEQ ID NO: 354576 - DNA, 120 bp, Artificial Sequence
  ENSG00000139624_35 (sequence is synthesized)
cctacgtatgtcaagtttacgtacgtagtaggtttgagttttaggcccagcagccacccttacccctctttccccagacacataccatatctggtttttgtttttccttgttccagtttc

SEQ ID NO: 354577 - DNA, 120 bp, Artificial Sequence
  ENSG00000139624_36 (sequence is synthesized)
tccttgttccagtttctgtcactgcctagttgtgtgatcgagatggagacagtactgatagcctttgcagtttgggttttttgttttttggagagacaaggttttgccatgttgcccagg

SEQ ID NO: 354578 - DNA, 86 bp, Artificial Sequence
  ENSG00000139624_37 (sequence is synthesized)
ccaatttgggtttttaatatccttttttactcagcttgggctggaggaagagacaaaaggatatgtataggtgagcagtacaggtc

SEQ ID NO: 354579 - DNA, 84 bp, Artificial Sequence
  ENSG00000139624_38 (sequence is synthesized)
aatgcagattctgattttgcaagtctgagatgggctcaagattatgcatctctaaaaagcttccagccagcacagtggcctggt

SEQ ID NO: 354580 - DNA, 120 bp, Artificial Sequence
  ENSG00000139624_39 (sequence is synthesized)
gaacattgtcaccctaaagaagtgataaatgttgaaagtgatggatatggtaattaccccagtttcatcattatactatgtatacatgcattgaaacatcacattgtaccccataaatat

SEQ ID NO: 354581 - DNA, 120 bp, Artificial Sequence
  ENSG00000139624_40 (sequence is synthesized)
aatcacctcctttgtgccagggtctttcatatacattatctcactgaattacttacaagattcttatgaagtagattagtggttctcacattttaatggacatgtgaatcacctggggat

SEQ ID NO: 354582 - DNA, 120 bp, Artificial Sequence
  ENSG00000139624_41 (sequence is synthesized)
ctggaacttcagctgataaaagggctggtaggaaaacacacagggctctgcatccccaggactcagcttcatccctgtctgctgagctttgactctagaatctgactattggcctccctc

SEQ ID NO: 354583 - DNA, 120 bp, Artificial Sequence
  ENSG00000139625_0 (sequence is synthesized)
agaaagctgaagctgacacccgtgcatccggacaccgcacgagcatcgcctgtgacagcgccccgggtccggtggagggcagcggggggaggagggaaggaggaggagaaggaggaggag

SEQ ID NO: 354584 - DNA, 120 bp, Artificial Sequence
  ENSG00000139625_1 (sequence is synthesized)
gcgggagcagcatccggagcggagctgcagcagcgccgccttttgtgctgcggccgcggagcccccgagggcccagtgttcaccatcataccaggggccagaggcgatggcttgcctcca

SEQ ID NO: 354585 - DNA, 120 bp, Artificial Sequence
  ENSG00000139625_2 (sequence is synthesized)
tgagacccgaacaccctctccttcctttgggggctttgtgtctaccctaagtgaggcatccatgcgcaagctggacccagacacttctgactgcactcccgagaaggacctgacgcctac

SEQ ID NO: 354586 - DNA, 120 bp, Artificial Sequence
  ENSG00000139625_3 (sequence is synthesized)
ccatgtcctgcagctacatgagcaggatgcagggggcccagggggagcagctgggtcacctgagagtcgggcatccagagttcgagctgacgaggtgcgactgcagtgccagagtggcag

SEQ ID NO: 354587 - DNA, 120 bp, Artificial Sequence
  ENSG00000139625_4 (sequence is synthesized)
tggcttccttgagggcctctttggctgcctgcgccctgtctggaccatgattggcaaagcctactccactgagcacaagcagcagcaggaagacctttgggaggtcccctttgaggaaat

SEQ ID NO: 354588 - DNA, 120 bp, Artificial Sequence
  ENSG00000139625_5 (sequence is synthesized)
cctggacctgcagtgggtgggctcaggggcccagggtgctgtcttcctggggcgcttccacggggaggaggtggctgtgaagaaggtgcgagacctcaaagaaaccgacatcaagcactt

SEQ ID NO: 354589 - DNA, 120 bp, Artificial Sequence
  ENSG00000139625_6 (sequence is synthesized)
gcgaaagctgaagcaccccaacatcatcactttcaagggtgtgtgcacccaggctccctgctactgcatcctcatggagttctgcgcccagggccagctgtatgaggtactgcgggctgg

SEQ ID NO: 354590 - DNA, 120 bp, Artificial Sequence
  ENSG00000139625_7 (sequence is synthesized)
ccgccctgtcaccccctccttactggttgactggtccatgggcatcgctggtggcatgaactacctgcacctgcacaagattatccacagggatctcaagtcacccaacatgctaatcac

SEQ ID NO: 354591 - DNA, 120 bp, Artificial Sequence
  ENSG00000139625_8 (sequence is synthesized)
ctacgacgatgtggtgaagatctcagattttggcacttccaaggagctgagtgacaagagcaccaagatgtcctttgcagggacagtagcctggatggcccctgaggtgatccgcaatga

SEQ ID NO: 354592 - DNA, 120 bp, Artificial Sequence
  ENSG00000139625_9 (sequence is synthesized)
acctgtgtctgagaaggtcgacatctggtcctttggcgtggtgctatgggaactgctgactggtgagatcccctacaaagacgtagattcctcagccattatctggggtgtgggaagcaa

SEQ ID NO: 354593 - DNA, 120 bp, Artificial Sequence
  ENSG00000139625_10 (sequence is synthesized)
cagtctccatctgcccgtgccctccagttgcccagatggtttcaagatcctgcttcgccagtgctggaatagcaaaccacgaaatcgcccatcattccgacagatcctgctgcatctgga

SEQ ID NO: 354594 - DNA, 120 bp, Artificial Sequence
  ENSG00000139625_11 (sequence is synthesized)
cattgcctcagctgatgtactctccacaccccaggagacttactttaagtcccaggcagagtggcgggaagaagtaaaactgcactttgaaaagattaagtcagaagggacctgtctgca

SEQ ID NO: 354595 - DNA, 120 bp, Artificial Sequence
  ENSG00000139625_12 (sequence is synthesized)
ccgcctagaagaggaactggtgatgaggaggagggaggagctcagacacgccctggacatcagggagcactatgaaaggaagctggagagagccaacaacctgtatatggaacttaatgc

SEQ ID NO: 354596 - DNA, 120 bp, Artificial Sequence
  ENSG00000139625_13 (sequence is synthesized)
cctcatgttgcagctggaactcaaggagagggagctgctcaggcgagagcaagctttagagcggaggtgcccaggcctgctgaagccacacccttcccggggcctcctgcatggaaacac

SEQ ID NO: 354597 - DNA, 120 bp, Artificial Sequence
  ENSG00000139625_14 (sequence is synthesized)
aatggagaagcttatcaagaagaggaatgtgccacagaagctgtcaccccatagcaaaaggccagatatcctcaagacggagtctttgctccctaaactagatgcagccctgagtggggt

SEQ ID NO: 354598 - DNA, 120 bp, Artificial Sequence
  ENSG00000139625_15 (sequence is synthesized)
ggggcttcctgggtgtcctaagggccccccctcaccaggacggagtcgccgtggcaagacccgtcaccgcaaggccagcgccaaggggagctgtggggacctgcctgggcttcgtacagc

SEQ ID NO: 354599 - DNA, 120 bp, Artificial Sequence
  ENSG00000139625_16 (sequence is synthesized)
tgtgccaccccatgaacctggaggaccaggaagcccagggggcctaggagggggaccctcagcctgggaggcctgccctcccgccctccgtgggcttcatcatgacctcctgctccgcaa

SEQ ID NO: 354600 - DNA, 120 bp, Artificial Sequence
  ENSG00000139625_17 (sequence is synthesized)
gtgagggctcagcccctggctccaccagcccagattcacctgggggagccaaaggggaaccacctcctccagtagggcctggtgaaggtgtggggcttctgggaactggaagggaaggga

SEQ ID NO: 354601 - DNA, 120 bp, Artificial Sequence
  ENSG00000139625_18 (sequence is synthesized)
cctcaggccggggaggaagccgggctgggtcccagcacttgaccccagctgcactgctgtacagggctgccgtcacccgaagtcagaaacgtggcatctcatcggaagaggaggaaggag

SEQ ID NO: 354602 - DNA, 120 bp, Artificial Sequence
  ENSG00000139625_19 (sequence is synthesized)
aggtagacagtgaagtagagctgacatcaagccagaggtggcctcagagcctgaacatgcgccagtcactatctaccttcagctcagagaatccatcagatggggaggaaggcacagcta

SEQ ID NO: 354603 - DNA, 120 bp, Artificial Sequence
  ENSG00000139625_20 (sequence is synthesized)
gtgaaccttcccccagtggcacacctgaagttggcagcaccaacactgatgagcggccagatgagcggtctgatgacatgtgctcccagggctcagaaatcccactggacccacctcctt

SEQ ID NO: 354604 - DNA, 120 bp, Artificial Sequence
  ENSG00000139625_21 (sequence is synthesized)
cagaggtcatccctggccctgaacccagctccctgcccattccacaccaggaacttctcagagagcggggccctcccaattctgaggactcagactgtgacagcactgaattggacaact

SEQ ID NO: 354605 - DNA, 120 bp, Artificial Sequence
  ENSG00000139625_22 (sequence is synthesized)
ccaacagcgttgatgccttgcggcccccagcttccctccctccatgaaagccactcgtattccttgtacatagagaaatatttatataaattatatatatatacatatatatatatatat

SEQ ID NO: 354606 - DNA, 120 bp, Artificial Sequence
  ENSG00000139625_23 (sequence is synthesized)
gcgccacataatcaacagaaagatggggctgtcccagccgtaagtcaggctcgagggagactgatcccctgaccaattcacctgataaactctagggacactggcagctgtggaaatgaa

SEQ ID NO: 354607 - DNA, 120 bp, Artificial Sequence
  ENSG00000139625_24 (sequence is synthesized)
tgaggcacagccgtagagctgtggctaagggcaagccccttcctgccccaccccattccttatattcagcaagcaacaaggcaatagaaaagccagggttgtctttatattctttatccc

SEQ ID NO: 354608 - DNA, 120 bp, Artificial Sequence
  ENSG00000139625_25 (sequence is synthesized)
caaataatagggggtggggggaggggcggtgggaggggcaggagagaaaaccacttagactgcacttttctgttccgtttactctgtttacacattttgcacttgggaggagggaggcta

SEQ ID NO: 354609 - DNA, 120 bp, Artificial Sequence
  ENSG00000139625_26 (sequence is synthesized)
aggctgggtcctcccctctgaggtttctcaggtggcaatgtaactcatttttttgtcccaccatttatcttctctgcccaagccctgtcttaaggcccagggggaggttaggagactgat

SEQ ID NO: 354610 - DNA, 120 bp, Artificial Sequence
  ENSG00000139625_27 (sequence is synthesized)
agcatgtgatggctcaggctgaagaaccggggtgctgtttaagtccctgcttttatcctggtgcctgattggggtggggactgtcctactgtaacccctgtgaaaaaccttgaaatataa

SEQ ID NO: 354611 - DNA, 120 bp, Artificial Sequence
  ENSG00000139625_28 (sequence is synthesized)
cactccatgcaggcccagctgttgagggttttcttgatgaatgaatggggtaccatacatggttaagataaagccttgggctccggactttatctgaggtgtctggagaagttctcctgc

SEQ ID NO: 354612 - DNA, 120 bp, Artificial Sequence
  ENSG00000139625_29 (sequence is synthesized)
ccctccacttttttgcatctactctcactaaatgagtataatgtcaagccccaactttctaaaattataggaataaatggtagcagatacatccttctaacttgttatggaggactataa

SEQ ID NO: 354613 - DNA, 120 bp, Artificial Sequence
  ENSG00000139625_30 (sequence is synthesized)
atgaagttactaaaaacaatagactgaaatttttagtttaaaatatgcaagcctgaacaaggggaccaacattcccaagaaactggaacccagtcagacatatgatcaactgcttaatgt

SEQ ID NO: 354614 - DNA, 120 bp, Artificial Sequence
  ENSG00000139625_31 (sequence is synthesized)
gtatgccatgtatgtcatgtgtcattcctttcccccaccccctccctagtggaagtgcttgcctactcccctaggacaggtaagtcctcggaaagtctaatcctcaatcttttgggcaca

SEQ ID NO: 354615 - DNA, 120 bp, Artificial Sequence
  ENSG00000139625_32 (sequence is synthesized)
agttttataagggccaaccaagcatggagtcagggaaaaataggatcgagggccacaaaaaaagatggaagtggtaaaatagaagaaaacatcttaaccggaataaaggcttccattcaa

SEQ ID NO: 354616 - DNA, 120 bp, Artificial Sequence
  ENSG00000139625_33 (sequence is synthesized)
aacccaagaagggtcctttgagggataaaaggtacaaaaataacagcaagacaagaggaataaaacccacatgaatcactgtggcatccagtttctattcacaaagaaaaagctccagtc

SEQ ID NO: 354617 - DNA, 120 bp, Artificial Sequence
  ENSG00000139625_34 (sequence is synthesized)
catcttttaatttttttgaaaaattcctgacattacagaactaaactgaaatgtattaatattccactcttacatttccatgacaaacagaaaaattcatgagccaaaaaaaaaaaacca

SEQ ID NO: 354618 - DNA, 120 bp, Artificial Sequence
  ENSG00000139625_35 (sequence is synthesized)
ccccagctgctggccctggataccagaagggcctctggggaagcctggtgaactggagggaggctcggctggctgcaagtgtctctgagcatgtcaccctttctatgcctaaaccaccta

SEQ ID NO: 354619 - DNA, 120 bp, Artificial Sequence
  ENSG00000139625_36 (sequence is synthesized)
gggctgccgtcacccgaagtcaggtaaagtatgggaaggctcccaagctctttccctttttccttatcctccctggggtccaagtctaatcccccacattatgctcaattttaagccatt

SEQ ID NO: 354620 - DNA, 120 bp, Artificial Sequence
  ENSG00000139625_37 (sequence is synthesized)
ccctacttcacccttcgtaactatgttcccttctcctggattcttagtgacctctttccacttctaatcagaccccccccaccccatctctcctgcagaaacgtggcatctcatcggaag

SEQ ID NO: 354621 - DNA, 120 bp, Artificial Sequence
  ENSG00000139625_38 (sequence is synthesized)
gaggtctaggtgttactattgtgtgcctgaggttgaccccgaggtaaaggtgtaaatgtgagacccttctgatacctgtgtgtgcctgtgagtctcgggtgaaaaaaatgtgctgcagca

SEQ ID NO: 354622 - DNA, 120 bp, Artificial Sequence
  ENSG00000139625_39 (sequence is synthesized)
atgaattagtcatcttacagggagaagggaactcatctgttaccattactcttgaatttgagacatattttaccagtgtgtacccacgtggggctgttacctgagaatgatactcaggta

SEQ ID NO: 354623 - DNA, 120 bp, Artificial Sequence
  ENSG00000139625_40 (sequence is synthesized)
cgatacctgtctacctattacttgccttactaacatgcctgagaggaagcccaagtgtatcagatttcctaagatggctcaaggtgcaatttggagggccatgggaaacggagccacaag

SEQ ID NO: 354624 - DNA, 120 bp, Artificial Sequence
  ENSG00000139625_41 (sequence is synthesized)
tgttacctccagcggggctactgtgaacccagcaccccagtctgtgcctctgggataagtgtcctgagcaggcagtcctggggctttaacagcccagcccctccttccttcattcccaca

SEQ ID NO: 354625 - DNA, 120 bp, Artificial Sequence
  ENSG00000139625_42 (sequence is synthesized)
ttccaaggcccagtgttcaccatcataccaggggccagaggcgatggcttgcctccatgagacccgaacaccctctccttcctttgggggctttgtgtctaccctaagtgaggcatccat

SEQ ID NO: 354626 - DNA, 120 bp, Artificial Sequence
  ENSG00000139625_43 (sequence is synthesized)
tgagactccgtctcaaacaaacaaacaaaaaaacctgaaaggcagagttgctgcagagttagatgaggtgtgtggaggggtgtggaccccagctgactacactctttaccagcatgctaa

SEQ ID NO: 354627 - DNA, 120 bp, Artificial Sequence
  ENSG00000139625_44 (sequence is synthesized)
gcacaagcagcagcaggaaggtaggccacgtccttgtgggagcctcctctctgtttccctgagcccgagatctgttggtcagctccgctaaagtcacgcaatggtcccttccctccccat

SEQ ID NO: 354628 - DNA, 120 bp, Artificial Sequence
  ENSG00000139625_45 (sequence is synthesized)
ctgcctcaccctccttaagtcaattcagccaacccaatgctatcctgtccctggccttgagtgtggctctttctgaggcttgtggcactgtgcctcctgcccacagacctttgggaggtc

SEQ ID NO: 354629 - DNA, 120 bp, Artificial Sequence
  ENSG00000139625_46 (sequence is synthesized)
acctaccccatccttccccagaggagatccataggtggaatgggtgggaatgggggttccaggtatgaatcaggtgaatgctgagccagctgaggccttcataccattgtttggctccca

SEQ ID NO: 354630 - DNA, 120 bp, Artificial Sequence
  ENSG00000139625_47 (sequence is synthesized)
tcaagtcagtgtggccttctcccggcttccaaaccatgccctaggtccatgtggccatctcagaaacctcttccaagtgacagtcccatctcagaagggctgtagtgagcccctcacctt

SEQ ID NO: 354631 - DNA, 73 bp, Artificial Sequence
  ENSG00000139625_48 (sequence is synthesized)
cagtcccatctcagaagggctgtagtgagcccctcacctttgagtgtcccaaatgattttaaactgaaaggca

SEQ ID NO: 354632 - DNA, 120 bp, Artificial Sequence
  ENSG00000139625_49 (sequence is synthesized)
cgccagtgctggtaaggatggtctgggctgggatactgggcctggagaagttgagaagcacggtagtactgggctggactgaccaataaatggcaggggtacatttaattcaaagagact

SEQ ID NO: 354633 - DNA, 120 bp, Artificial Sequence
  ENSG00000139625_50 (sequence is synthesized)
gactttcatctgaatcaggctcatgctaccttctgagctgagtcaccaggggtaattggtatctactctgaacctgtttcctcatctataaaatacacttaacgatatctgcattcctga

SEQ ID NO: 354634 - DNA, 120 bp, Artificial Sequence
  ENSG00000139625_51 (sequence is synthesized)
tttgtcatgaagtgccagtgagtgcatacaagtacaaggaaggagcagcataaccaccaagcatggttggttgagcctcaagtaaacaaccttagaacacagaaggaaaggaccccagac

SEQ ID NO: 354635 - DNA, 120 bp, Artificial Sequence
  ENSG00000139625_52 (sequence is synthesized)
cctcatttggaacctagacccagggaagtttgacgattgctaatctgtcactgagcatttcccaaaatgtggttccttcaatgaagttattcagaaaaggcttttattttgggagacaag

SEQ ID NO: 354636 - DNA, 120 bp, Artificial Sequence
  ENSG00000139625_53 (sequence is synthesized)
ttggaaaatatggggttcaataggtttccttactgcaggattttgacacactaatgaatagtgtgtaatattctctagagacagttgaccataagttcttttgtcacagagtacattcta

SEQ ID NO: 354637 - DNA, 120 bp, Artificial Sequence
  ENSG00000139625_54 (sequence is synthesized)
ggattggattctccaggacacactttgggaaaggatgctccagttcctatctgatcctccctcaaattctcccctctccttcctaactccattcctttcaggaatagcaaaccacgaaat

SEQ ID NO: 354638 - DNA, 120 bp, Artificial Sequence
  ENSG00000139625_55 (sequence is synthesized)
tactgtggttccaatatggcaagagggatactgaagtggcaacaggtatattagcagggagatgtgtactttagtgtccaaggttagggagtgctttgagtacatagatttggcagtctt

SEQ ID NO: 354639 - DNA, 120 bp, Artificial Sequence
  ENSG00000139625_56 (sequence is synthesized)
aacagcaaaaagcagatattgaacagggagagctgtaagcagatgccttgtcttttaacagcttttggggagacagctgcacaggccagaaagtaccataaagagcaaatatccacgtgg

SEQ ID NO: 354640 - DNA, 120 bp, Artificial Sequence
  ENSG00000139625_57 (sequence is synthesized)
tggaatttcagaagcctcttgcacagagcatctattacgatgcctgaccagtagcttgcatgtagctataaattgcagccagggaatgattctgaaaggagtctgacaccttggagaatg

SEQ ID NO: 354641 - DNA, 120 bp, Artificial Sequence
  ENSG00000139625_58 (sequence is synthesized)
aggagtctgacaccttggagaatggcctgagcaactgaaatctggaaggaataaaaccagtaagctggctgggcatggtgactcacgcctggaatcccagaactttgggaggccgaggcg

SEQ ID NO: 354642 - DNA, 88 bp, Artificial Sequence
  ENSG00000139625_59 (sequence is synthesized)
cttgtcttaaaaaacaaatcagtaagccactggctattaaaatgaccccagcaaagaaccccaaggaatctcactccatttctactct

SEQ ID NO: 354643 - DNA, 120 bp, Artificial Sequence
  ENSG00000139626_0 (sequence is synthesized)
acacaaaggctgctgctgccgccagaggaaggactgctctgcacgcacctatgtggaaactaaagcccagagagaaagtctgacttgccccacagccagtgagtgactgcagcagcacca

SEQ ID NO: 354644 - DNA, 120 bp, Artificial Sequence
  ENSG00000139626_1 (sequence is synthesized)
gaatctggtctgtttcctgtttggctcttctaccactacggcttgggatctcgggcatggtggctttgccaatggtccttgttttgctgctggtcctgagcagaggtgagagtgaattgg

SEQ ID NO: 354645 - DNA, 120 bp, Artificial Sequence
  ENSG00000139626_2 (sequence is synthesized)
acgccaagatcccatccacaggggatgccacagaatggcggaatcctcacctgtccatgctggggtcctgccagccagccccctcctgccagaagtgcatcctctcacaccccagctgtg

SEQ ID NO: 354646 - DNA, 120 bp, Artificial Sequence
  ENSG00000139626_3 (sequence is synthesized)
catggtgcaagcaactgaacttcaccgcgtcgggagaggcggaggcgcggcgctgcgcccgacgagaggagctgctggctcgaggctgcccgctggaggagctggaggagccccgcggcc

SEQ ID NO: 354647 - DNA, 120 bp, Artificial Sequence
  ENSG00000139626_4 (sequence is synthesized)
agcaggaggtgctgcaggaccagccgctcagccagggcgcccgcggagagggtgccacccagctggcgccgcagcgggtccgggtcacgctgcggcctggggagccccagcagctccagg

SEQ ID NO: 354648 - DNA, 120 bp, Artificial Sequence
  ENSG00000139626_5 (sequence is synthesized)
tccgcttccttcgtgctgagggatacccggtggacctgtactaccttatggacctgagctactccatgaaggacgacctggaacgcgtgcgccagctcgggcacgctctgctggtccggc

SEQ ID NO: 354649 - DNA, 120 bp, Artificial Sequence
  ENSG00000139626_6 (sequence is synthesized)
tgcaggaagtcacccattctgtgcgcattggttttggttcctttgtggacaaaacggtgctgccctttgtgagcacagtaccctccaaactgcgccacccctgccccacccggctggagc

SEQ ID NO: 354650 - DNA, 120 bp, Artificial Sequence
  ENSG00000139626_7 (sequence is synthesized)
gctgccagtcaccattcagctttcaccatgtgctgtccctgacgggggacgcacaagccttcgagcgggaggtggggcgccagagtgtgtccggcaatctggactcgcctgaaggtggct

SEQ ID NO: 354651 - DNA, 120 bp, Artificial Sequence
  ENSG00000139626_8 (sequence is synthesized)
tcgatgccattctgcaggctgcactctgccaggagcagattggctggagaaatgtgtcccggctgctggtgttcacttcagacgacacattccatacagctggggacgggaagttgggcg

SEQ ID NO: 354652 - DNA, 120 bp, Artificial Sequence
  ENSG00000139626_9 (sequence is synthesized)
gcattttcatgcccagtgatgggcactgccacttggacagcaatggcctctacagtcgcagcacagagtttgactacccttctgtgggtcaggtagcccaggccctctctgcagcaaata

SEQ ID NO: 354653 - DNA, 120 bp, Artificial Sequence
  ENSG00000139626_10 (sequence is synthesized)
tccagcccatctttgctgtcaccagtgccgcactgcctgtctaccaggagctgagtaaactgattcctaagtctgcagttggggagctgagtgaggactccagcaacgtggtacagctca

SEQ ID NO: 354654 - DNA, 120 bp, Artificial Sequence
  ENSG00000139626_11 (sequence is synthesized)
ctcttcactccctcctggggtccacatttcttacgaatcccagtgtgagggtcctgagaagagggagggtaaggctgaggatcgaggacagtgcaaccacgtccgaatcaaccagacggt

SEQ ID NO: 354655 - DNA, 120 bp, Artificial Sequence
  ENSG00000139626_12 (sequence is synthesized)
gactttctgggtttctctccaagccacccactgcctcccagagccccatctcctgaggctccgggcccttggcttctcagaggagctgattgtggagttgcacacgctgtgtgactgtaa

SEQ ID NO: 354656 - DNA, 120 bp, Artificial Sequence
  ENSG00000139626_13 (sequence is synthesized)
ttgcagtgacacccagccccaggctccccactgcagtgatggccagggacacctacaatgtggtgtatgcagctgtgcccctggccgcctaggtcggctctgtgagtgctctgtggcaga

SEQ ID NO: 354657 - DNA, 120 bp, Artificial Sequence
  ENSG00000139626_14 (sequence is synthesized)
gctgtcctccccagacctggaatctgggtgccgggctcccaatggcacagggcccctgtgcagtggaaagggtcactgtcaatgtggacgctgcagctgcagtggacagagctctgggca

SEQ ID NO: 354658 - DNA, 120 bp, Artificial Sequence
  ENSG00000139626_15 (sequence is synthesized)
tctgtgcgagtgtgacgatgccagctgtgagcgacatgagggcatcctctgcggaggctttggtcgctgccaatgtggagtatgtcactgtcatgccaaccgcacgggcagagcatgcga

SEQ ID NO: 354659 - DNA, 120 bp, Artificial Sequence
  ENSG00000139626_16 (sequence is synthesized)
atgcagtggggacatggacagttgcatcagtcccgagggagggctctgcagtgggcatggacgctgcaaatgcaaccgctgccagtgcttggacggctactatggtgctctatgcgacca

SEQ ID NO: 354660 - DNA, 120 bp, Artificial Sequence
  ENSG00000139626_17 (sequence is synthesized)
atgcccaggctgcaagacaccatgcgagagacaccgggactgtgcagagtgtggggccttcaggactggcccactggccaccaactgcagtacagcttgtgcccataccaatgtgaccct

SEQ ID NO: 354661 - DNA, 120 bp, Artificial Sequence
  ENSG00000139626_18 (sequence is synthesized)
ggccttggcccctatcttggatgatggctggtgcaaagagcggaccctggacaaccagctgttcttcttcttggtggaggatgacgccagaggcacggtcgtgctcagagtgagacccca

SEQ ID NO: 354662 - DNA, 120 bp, Artificial Sequence
  ENSG00000139626_19 (sequence is synthesized)
agaaaagggagcagaccacacgcaggccattgtgctgggctgcgtagggggcatcgtggcagtggggctggggctggtcctggcttaccggctctcggtggaaatctatgaccgccggga

SEQ ID NO: 354663 - DNA, 120 bp, Artificial Sequence
  ENSG00000139626_20 (sequence is synthesized)
atacagtcgctttgagaaggagcagcaacaactcaactggaagcaggacagtaatcctctctacaaaagtgccatcacgaccaccatcaatcctcgctttcaagaggcagacagtcccac

SEQ ID NO: 354664 - DNA, 120 bp, Artificial Sequence
  ENSG00000139626_21 (sequence is synthesized)
tctctgaaggagggagggacacttacccaaggctcttctccttggaggacagtgggaactggagggtgagaggaagggtgggtctgtaagaccttggtaggggactaattcactggcgag

SEQ ID NO: 354665 - DNA, 120 bp, Artificial Sequence
  ENSG00000139626_22 (sequence is synthesized)
gtgcggccaccaccctacttcattttcagagtgacacccaagagggctgcttcccatgcctgcaaccttgcatccatctgggctaccccacccaagtatacaataaagtcttacctcaga

SEQ ID NO: 354666 - DNA, 120 bp, Artificial Sequence
  ENSG00000139626_23 (sequence is synthesized)
ttccttcctttgcctcatgctgctaccatatcctatacccgggccttcttccgccttctggaagttcccatttgcccaggaagttgtgtcctcctcttaatgtcttctacctgccacttc

SEQ ID NO: 354667 - DNA, 120 bp, Artificial Sequence
  ENSG00000139626_24 (sequence is synthesized)
cctgagccagtggtctcactgctttgcttgccagttaccaggtccctgccccctaggtgcaccctctcccatcaccgtcctccccaccccacttcccatagagcgctctcatgggtcctc

SEQ ID NO: 354668 - DNA, 120 bp, Artificial Sequence
  ENSG00000139626_25 (sequence is synthesized)
cttttctttaattcccagtcactgaccctcttctcttatttagaatccaagattgtaaaagccgccaagtatgtcagactatttattcaacttctccactttgcagatgtggaaactaaa

SEQ ID NO: 354669 - DNA, 120 bp, Artificial Sequence
  ENSG00000139626_26 (sequence is synthesized)
agtacacaaaggctgctgctgccgccagaggaaggactgctctgcacgcacctctcagacttcttcctaatcggcaccttggtcacagactccactgtcctgggacactgaggcccagca

SEQ ID NO: 354670 - DNA, 120 bp, Artificial Sequence
  ENSG00000139626_27 (sequence is synthesized)
acttcctcctctgccgtctcccagatcagtacacaaaggctgctgctgccgccagaggaaggactgctctgcacgcacctggcatggtggctttgccaatggtccttgttttgctgctgg

SEQ ID NO: 354671 - DNA, 120 bp, Artificial Sequence
  ENSG00000139626_28 (sequence is synthesized)
cttaggctctgggaatctcctggcatggaaggcaaatatcaaaagattccggtgtatgggttagagggtgtggttggcatacttcaaaaagattggatgcgtgggcttgtcgtgccacat

SEQ ID NO: 354672 - DNA, 120 bp, Artificial Sequence
  ENSG00000139626_29 (sequence is synthesized)
ctagcctctgccaacatcctggactcacaagggccccaacttgccctcccagttgttgacaggcctagccaggccacaggttcgttcctgcatctctccctagacacccatcttctaggt

SEQ ID NO: 354673 - DNA, 120 bp, Artificial Sequence
  ENSG00000139626_30 (sequence is synthesized)
cagagctggagaggactcaagagactatccgttttacaggcctgagacccagcgtctggagagactgtgctcaggcactctctgggcctggacagctgccctgggcctaccaacctggaa

SEQ ID NO: 354674 - DNA, 120 bp, Artificial Sequence
  ENSG00000139626_31 (sequence is synthesized)
ggtggggcggggatctgagcctggaggtctgtttgggaacaggactgccccttatggttgtgtagtgcacagttctagggggtgccattcataccatagttgctgtagtttgtatattta

SEQ ID NO: 354675 - DNA, 120 bp, Artificial Sequence
  ENSG00000139626_32 (sequence is synthesized)
gcaattacctggtgggttggagtaaaatatcttgaggaggaggcatgtttttcgaattcacaagtaagcctccactagcagcagccttctttagggggctggagagagcagggagaagca

SEQ ID NO: 354676 - DNA, 120 bp, Artificial Sequence
  ENSG00000139626_33 (sequence is synthesized)
caggtggcagagggcagggtgctggcagaattgggaacacctggagaggacataaggtggggttggagtccttttctgccttcacgtggttatccactcgctctcttcccatagagcctg

SEQ ID NO: 354677 - DNA, 120 bp, Artificial Sequence
  ENSG00000139629_0 (sequence is synthesized)
ccctcctgccttcgctctctgctggtcgcggtggcctgtagctcctccctcggtaggacccccctccaccttggcgcttacgagatgaatgaggagcccagacctctggaacttggaggg

SEQ ID NO: 354678 - DNA, 120 bp, Artificial Sequence
  ENSG00000139629_1 (sequence is synthesized)
ttgttcagattcccaggctgacaaaaaggagaaacagcttttacttgcatccagggccaatcatcgcagacccagacgtctgcagagggctgaggccccagcttgtggccaccacaacgt

SEQ ID NO: 354679 - DNA, 120 bp, Artificial Sequence
  ENSG00000139629_2 (sequence is synthesized)
atcaagctatctccagggttgggctcaggactcagagctgacgcagctggggtgccccttggttctggaggatgaggctcctccgcagacgccacatgcccctgcgcctggccatggtgg

SEQ ID NO: 354680 - DNA, 120 bp, Artificial Sequence
  ENSG00000139629_3 (sequence is synthesized)
gctgcgcctttgtgctcttcctcttcctcctgcatagggatgtgagcagcagagaggaggccacagagaagccgtggctgaagtccctggtgagccggaaggatcacgtcctggacctca

SEQ ID NO: 354681 - DNA, 120 bp, Artificial Sequence
  ENSG00000139629_4 (sequence is synthesized)
tgctggaggccatgaacaaccttagagattcaatgcccaagctccaaatcagggctccagaagcccagcagactctgttctccataaaccagtcctgcctccctgggttctataccccag

SEQ ID NO: 354682 - DNA, 120 bp, Artificial Sequence
  ENSG00000139629_5 (sequence is synthesized)
ctgaactgaagcccttctgggaacggccaccacaggaccccaatgcccctggggcagatggaaaagcatttcagaagagcaagtggacccccctggagacccaggaaaaggaagaaggct

SEQ ID NO: 354683 - DNA, 120 bp, Artificial Sequence
  ENSG00000139629_6 (sequence is synthesized)
ataagaagcactgtttcaatgcctttgccagcgaccggatctccctgcagaggtccctggggccagacacccgaccacctgagtgtgtggaccagaagttccggcgctgccccccactgg

SEQ ID NO: 354684 - DNA, 120 bp, Artificial Sequence
  ENSG00000139629_7 (sequence is synthesized)
ccaccaccagcgtgatcattgtgttccacaacgaagcctggtccacactgctgcgaacagtgtacagcgtcctacacaccacccctgccatcttgctcaaggagatcatactggtggatg

SEQ ID NO: 354685 - DNA, 120 bp, Artificial Sequence
  ENSG00000139629_8 (sequence is synthesized)
atgccagcacagaggagcacctaaaggagaagctggagcagtacgtgaagcagctgcaggtggtgagggtggtgcggcaggaggagcggaaggggctgatcaccgcccggctgctggggg

SEQ ID NO: 354686 - DNA, 120 bp, Artificial Sequence
  ENSG00000139629_9 (sequence is synthesized)
ccagcgtggcacaggcggaggtgctcacgttcctggatgcccactgtgagtgcttccacggctggctggagcccctcctggctcgaatcgctgaggacaagacagtggtggtgagcccag

SEQ ID NO: 354687 - DNA, 120 bp, Artificial Sequence
  ENSG00000139629_10 (sequence is synthesized)
acatcgtcaccatcgaccttaatacttttgagttcgccaagcccgtccagaggggcagagtccatagccgaggcaactttgactggagcctgaccttcggctgggaaacacttcctccac

SEQ ID NO: 354688 - DNA, 120 bp, Artificial Sequence
  ENSG00000139629_11 (sequence is synthesized)
atgagaagcagaggcgcaaggatgaaacctaccccatcaaatccccgacgtttgctggtggcctcttctccatctccaagtcctactttgagcacatcggtacctatgataatcagatgg

SEQ ID NO: 354689 - DNA, 120 bp, Artificial Sequence
  ENSG00000139629_12 (sequence is synthesized)
agatctggggaggggagaacgtggaaatgtccttccgggtgtggcagtgtgggggccagctggagatcatcccctgctctgtcgtaggccatgtgttccggaccaagagcccccacacct

SEQ ID NO: 354690 - DNA, 120 bp, Artificial Sequence
  ENSG00000139629_13 (sequence is synthesized)
tccccaagggcactagtgtcattgctcgcaatcaagtgcgcctggcagaggtctggatggacagctacaagaagattttctataggagaaatctgcaggcagcaaagatggcccaagaga

SEQ ID NO: 354691 - DNA, 120 bp, Artificial Sequence
  ENSG00000139629_14 (sequence is synthesized)
aatccttcggtgacatttcggaacgactgcagctgagggaacaactgcactgtcacaacttttcctggtacctgcacaatgtctacccagagatgtttgttcctgacctgacgcccacct

SEQ ID NO: 354692 - DNA, 120 bp, Artificial Sequence
  ENSG00000139629_15 (sequence is synthesized)
tctatggtgccatcaagaacctcggcaccaaccaatgcctggatgtgggtgagaacaaccgcggggggaagcccctcatcatgtactcctgccacggccttggcggcaaccagtactttg

SEQ ID NO: 354693 - DNA, 120 bp, Artificial Sequence
  ENSG00000139629_16 (sequence is synthesized)
agtacacaactcagagggaccttcgccacaacatcgcaaagcagctgtgtctacatgtcagcaagggtgctctgggccttgggagctgtcacttcactggcaagaatagccaggtcccca

SEQ ID NO: 354694 - DNA, 120 bp, Artificial Sequence
  ENSG00000139629_17 (sequence is synthesized)
aggacgaggaatgggaattggcccaggatcagctcatcaggaactcaggatctggtacctgcctgacatcccaggacaaaaagccagccatggccccctgcaatcccagtgacccccatc

SEQ ID NO: 354695 - DNA, 120 bp, Artificial Sequence
  ENSG00000139629_18 (sequence is synthesized)
agttgtggctctttgtctaggacccagatcatccccagagagagcccccacaagctcctcaggaaacaggattgctgatgtctgggaacctgatcaccagcttctctggaggccgtaaag

SEQ ID NO: 354696 - DNA, 120 bp, Artificial Sequence
  ENSG00000139629_19 (sequence is synthesized)
atggatttctaaacccactgggtggcaaggcaggaccttcctaatccttgcaacaacattgggcccattttctttccttcacaccgatggaagagaccattaggacatatatttagccta

SEQ ID NO: 354697 - DNA, 120 bp, Artificial Sequence
  ENSG00000139629_20 (sequence is synthesized)
gcgttttcctgttctagaaatagaggctcccaaagtagggaaggcagctgggggagggttcagggcagcaatgctgagttcaagaaaagtacttcaggctgggcacagtggctcatgcct

SEQ ID NO: 354698 - DNA, 120 bp, Artificial Sequence
  ENSG00000139629_21 (sequence is synthesized)
gaaatcctagcactttgggaagacaatgtgggagaatggcttgagcccaggagttcaagaccggcctgagcaacatagtgaggatcccatctctacgcccaccctccccccggcaaaaaa

SEQ ID NO: 354699 - DNA, 87 bp, Artificial Sequence
  ENSG00000139629_22 (sequence is synthesized)
cagaaggctgaggtgggaggattgcttgttccccggaggttgaagctacagtgagccttgtaagactctgtctcaaaaaaaaacaaa

SEQ ID NO: 354700 - DNA, 120 bp, Artificial Sequence
  ENSG00000139629_23 (sequence is synthesized)
ctcaaaaaaaaacaaaaaagaagaagaaaagtacttctacagccatgtcctattccttgatcatccaaagcacctgcagagtccagtgaaatgatatattctggctgggcacagtggctc

SEQ ID NO: 354701 - DNA, 120 bp, Artificial Sequence
  ENSG00000139629_24 (sequence is synthesized)
agcaacaagagcgaaactccatctcaggaaaaaaaaaaaaaaaaaaagtatattctaacagacagatcagaggtctaagagatcctcccttgctattattacctgaagtctgtagaactg

SEQ ID NO: 354702 - DNA, 120 bp, Artificial Sequence
  ENSG00000139629_25 (sequence is synthesized)
tttacagatatctccttgacaggtgtcctttatcttactttatctgtacagtaatcctgtgagaaagacaggacagaaaccactgtgcctattttacagatacgaaaactgagacacagg

SEQ ID NO: 354703 - DNA, 120 bp, Artificial Sequence
  ENSG00000139629_26 (sequence is synthesized)
taaaggggcttgtctgtagtcccatagctagcagatggctggagccaagactgaggctcgttcttcaatgctgagccagggctccttccgctgcaccacaagaacgctagaccactcgcc

SEQ ID NO: 354704 - DNA, 120 bp, Artificial Sequence
  ENSG00000139629_27 (sequence is synthesized)
cgctagaccactcgccaccagccttctcattccctcttcctccattctaatcatttctagctggctggcctccacagagcataggaaaacagccagggccgggcacggtggctcatgcct

SEQ ID NO: 354705 - DNA, 120 bp, Artificial Sequence
  ENSG00000139629_28 (sequence is synthesized)
ctccaaaaaaaagaaaggaaaaacagggccaggtagccattgtggagagagcacacttaggaatcctgggatgttagtgttaaaagaaagctcctggagccagtgattctcaggtttgtc

SEQ ID NO: 354706 - DNA, 120 bp, Artificial Sequence
  ENSG00000139629_29 (sequence is synthesized)
ccagaacccttttttctaagccccatataaaaggtagattaaaaaaacaaagtagcatgagtgaaattgagagagggacaggtaatgccttccagcccctaacttctaacaatctggaag

SEQ ID NO: 354707 - DNA, 120 bp, Artificial Sequence
  ENSG00000139629_30 (sequence is synthesized)
cacaacgtgaaaatcacgtagcccaaccctatcattttcatattatgaaactgagtccaggtaagtgaatctgtccaaggtcacccagcaaggtatcagtagccctgagggtaaggactc

SEQ ID NO: 354708 - DNA, 120 bp, Artificial Sequence
  ENSG00000139629_31 (sequence is synthesized)
tgataaggctcgggagggtcctggaaagcctgaggcggcaggaagagtgtgcagagttgagcgtgtctggaaggctgatccactgctgggcccacatcaaagcccccatggggagcagac

SEQ ID NO: 354709 - DNA, 120 bp, Artificial Sequence
  ENSG00000139629_32 (sequence is synthesized)
ccgactgcacatggctcttttgctggaagaagagcatggctgcgcagaggactaaaatttcatctgggaaggcttcttttgactgtcagtagcaggatgtcaccagatgagggtgctatg

SEQ ID NO: 354710 - DNA, 120 bp, Artificial Sequence
  ENSG00000139629_33 (sequence is synthesized)
ggaccacagctgtctttgttcccattgcaactcaaccctgcgggaggccgcctacatccctgagagccttctggagcctacagaggagacattggccagccaaaaggaaaggagtggcca

SEQ ID NO: 354711 - DNA, 120 bp, Artificial Sequence
  ENSG00000139629_34 (sequence is synthesized)
gggtacgacctggagtagggaagggaaaaagttcccggaaagaagagaattggatgagaggtctcagtggaaataaaggttttctggcattggtcaaggaaactcgcgttgtgttctctt

SEQ ID NO: 354712 - DNA, 120 bp, Artificial Sequence
  ENSG00000139629_35 (sequence is synthesized)
acctgtgttgtcccttagctgaatcagttgatttgggctatgaagaaccacacacatctgaaaagttctgttacagccactgtctcatgtccccaaacattctctggccctaaatctagc

SEQ ID NO: 354713 - DNA, 120 bp, Artificial Sequence
  ENSG00000139629_36 (sequence is synthesized)
ttatgtattgtgtcaagcacgtggagacgtgagacgtcaaacgaggtcctgtccccgtggaactcacacgctaaatgtaagcaaatcatagcaagcctggagatgctccaagaggtgctg

SEQ ID NO: 354714 - DNA, 120 bp, Artificial Sequence
  ENSG00000139629_37 (sequence is synthesized)
gatgagttagaaggagcaattccttccacttagggaatcagataaggcctcacaaagatggcaatgtttgacctaagacctcggaagatgagtcctcagatgggaagggctcaataagca

SEQ ID NO: 354715 - DNA, 120 bp, Artificial Sequence
  ENSG00000139629_38 (sequence is synthesized)
gagttgttacacaggcagcagcctggcaggagcaaagccacagaggacatgtggccccagtgggtctgagaaacccagaggacattggggtgagggagtgactggtgtagaagctggaag

SEQ ID NO: 354716 - DNA, 120 bp, Artificial Sequence
  ENSG00000139629_39 (sequence is synthesized)
atcagagttacatcatgaatttcaggggccctaggcactttagccttcacggagctcttgctccattcaaaaaaaaattaatgttatgactatgttggtataaagatgaatgtaatccag

SEQ ID NO: 354717 - DNA, 120 bp, Artificial Sequence
  ENSG00000139629_40 (sequence is synthesized)
aacaggccctgctgtgagggaccacgaggcagtgccaggatgaaagagttggagtaacctaggtgattctgagtgaatcagtcaggaggccttcctggagggggctgaggccccagcttg

SEQ ID NO: 354718 - DNA, 120 bp, Artificial Sequence
  ENSG00000139629_41 (sequence is synthesized)
gtccggtggggaaacccgggagccaccccgcggcgcggctgcggctttgcctcggcgcgacagttgttcagattcccaggctgacaaaaaggagaaacagcttttacttgcatccagggc

SEQ ID NO: 354719 - DNA, 120 bp, Artificial Sequence
  ENSG00000139629_42 (sequence is synthesized)
tactcgccagttagtgttcggcccatttctgcccccgtgagatttcttcacagatgttgccctcccccatttgctgagtttcctgcatgccggctccttcagcactcaagggtacctctt

SEQ ID NO: 354720 - DNA, 120 bp, Artificial Sequence
  ENSG00000139629_43 (sequence is synthesized)
aaacccgggagccaccccgcggcgcggctgcggctttgcctcggcgcgacagatcgggccaccccatgtgctctggtacggcaactcttgcagagaggtttcctcctgccctgccacgtt

SEQ ID NO: 354721 - DNA, 120 bp, Artificial Sequence
  ENSG00000139629_44 (sequence is synthesized)
taaaatgaaggggctgggccaggctggtccctcctgccttcgctctctgctggtcgcggtggcctgtagctcctccctcgttgttcagattcccaggctgacaaaaaggagaaacagctt

SEQ ID NO: 354722 - DNA, 120 bp, Artificial Sequence
  ENSG00000139629_45 (sequence is synthesized)
ggaacttggaggggtgagagggggacaagccagagccagggctccacaccctcttcccctcacccacccatgccctgcattccttctgtgccccgtctccccagatcgggccaccccatg

SEQ ID NO: 354723 - DNA, 120 bp, Artificial Sequence
  ENSG00000139629_46 (sequence is synthesized)
attccggttccatgcacccgccgcccgcggctctgctaatgcctgtcctctttggggtgactaggaccctccaatctttttccgcgctgaaagcctggccgcaaagaccgcacccccggg

SEQ ID NO: 354724 - DNA, 120 bp, Artificial Sequence
  ENSG00000139629_47 (sequence is synthesized)
gcaaagaccgcacccccggggcgggctgagacgcagagaagccggggcgcccctctgccggtccgccgggagttcccgggcccgcagcaggctgaggacacggcgggacccgctgcacct

SEQ ID NO: 354725 - DNA, 120 bp, Artificial Sequence
  ENSG00000139629_48 (sequence is synthesized)
agaaggagcccgcgaccctctccccgggagggcccccctgagctccccgactgctcggacttcccttcggcggatctcgcttctgccgagtcctcgctctcacctcctcctccgccagcc

SEQ ID NO: 354726 - DNA, 120 bp, Artificial Sequence
  ENSG00000139629_49 (sequence is synthesized)
aagatggtggccccaactctggtggaccccagaactctgagagattccaggaattaggcaaatcaggattaggtcaggaagcaaggattgcctctccatgaaacctacacaaatctccat

SEQ ID NO: 354727 - DNA, 120 bp, Artificial Sequence
  ENSG00000139629_50 (sequence is synthesized)
gccatggaaaagtaattagtaagtagatgagctcatttatgaagtcacctctcacggtgcctgatgcatattaagcacgtaattgatgcctgctgttactataacgattatgtatttctg

SEQ ID NO: 354728 - DNA, 120 bp, Artificial Sequence
  ENSG00000139629_51 (sequence is synthesized)
ttgctgccacactaaaatgaataacaacatactttcccacctaaaacccaaaagaagaaaccagtgggagggatgtcttcagccagcccaccagcatagaaaagggtcacctgccagtca

SEQ ID NO: 354729 - DNA, 120 bp, Artificial Sequence
  ENSG00000139629_52 (sequence is synthesized)
ccccaactcccagcggcccaatcctaggctcctccatgagcctctgacctctgttcaccttcctaggcagccagtgtgctaagggcccaagtgactaccactagccacctagcagccaac

SEQ ID NO: 354730 - DNA, 120 bp, Artificial Sequence
  ENSG00000139629_53 (sequence is synthesized)
tatccttgctattaattaacagactgatgctctggtttttatcacctgagggagctgataaactcacatttccaggtcaaaaagccaagtgatcagagctcagagtaggtatacaggcac

SEQ ID NO: 354731 - DNA, 120 bp, Artificial Sequence
  ENSG00000139629_54 (sequence is synthesized)
aggtaacaaaaattaaccagcaggcttttccctaaagtgggccctggtaaacacaggaccctgcagtctccctgtgcttaagtcagagtgaaccaacatcagaaagcctgggatcgtgta

SEQ ID NO: 354732 - DNA, 120 bp, Artificial Sequence
  ENSG00000139629_55 (sequence is synthesized)
gtcatggcctaggaagaagcctggtcggtatcctttttcccagggagagagagcagcatttgcccaagtccttggacctggggtctggtgctctgggaatagaatagagctgcttatggg

SEQ ID NO: 354733 - DNA, 120 bp, Artificial Sequence
  ENSG00000139631_0 (sequence is synthesized)
ccacggcttgcgagctactgaagcgctgccgtctgtacggacgacgctgcggtctttggggcttgctcctacctgccaggcgcggcctcccgctggctccctggccgcgcggcgcctcct

SEQ ID NO: 354734 - DNA, 120 bp, Artificial Sequence
  ENSG00000139631_1 (sequence is synthesized)
gcctcccgctggctccctggccgcgcggcgcctcctccaggccccagcacaccctgccaaccccaccgccgcggctgcccccaccgggaccgagggtggctcacacctgtaatcccagca

SEQ ID NO: 354735 - DNA, 120 bp, Artificial Sequence
  ENSG00000139631_2 (sequence is synthesized)
tccggctctcctgagcagagagatcctgatggctgactcagaagcactcccctcccttgctggggacccagtggctgtggaagccttgctccgggccgtgtttggggttgttgtggatga

SEQ ID NO: 354736 - DNA, 120 bp, Artificial Sequence
  ENSG00000139631_3 (sequence is synthesized)
ggccattcagaaaggaaccagtgtctcccagaaggtctgtgagtggaaggagcctgaggagctgaagcagctgctggatttggagctgcggagccagggcgagtcacagaagcagatcct

SEQ ID NO: 354737 - DNA, 120 bp, Artificial Sequence
  ENSG00000139631_4 (sequence is synthesized)
ggagcggtgtcgggctgtgattcgctacagtgtcaagactggtcaccctcggttcttcaaccagctcttctctgggttggatccccatgctctggccgggcgcattatcactgagagcct

SEQ ID NO: 354738 - DNA, 120 bp, Artificial Sequence
  ENSG00000139631_5 (sequence is synthesized)
caacaccagccagtacacatatgaaatcgcccccgtgtttgtgctcatggaagaggaggtgctgaggaaactgcgggccctggtgggctggagctctggggacggaatcttctgccctgg

SEQ ID NO: 354739 - DNA, 120 bp, Artificial Sequence
  ENSG00000139631_6 (sequence is synthesized)
tggctccatctccaacatgtatgctgtaaatctggcccgctatcagcgctacccggattgcaagcagaggggcctccgcacactgccgcccctggccctattcacatcgaaggagtgtca

SEQ ID NO: 354740 - DNA, 120 bp, Artificial Sequence
  ENSG00000139631_7 (sequence is synthesized)
ctactccatccagaagggagctgcgtttctgggacttggcaccgacagtgtccgagtggtcaaggctgatgagagagggaaaatggtccccgaggatctggagaggcagattggtatggc

SEQ ID NO: 354741 - DNA, 120 bp, Artificial Sequence
  ENSG00000139631_8 (sequence is synthesized)
attgctgatgtgtgccagcgtcatgggctatggctgcatgtggatgctgcctggggtgggagcgtcctgctgtcacagacacacaggcatctcctggatgggatccagagggctgactct

SEQ ID NO: 354742 - DNA, 120 bp, Artificial Sequence
  ENSG00000139631_9 (sequence is synthesized)
gtggcctggaatccccacaagctcctcgcagcaggcctgcaatgctctgcacttcttctccaggatacctcgaacctgctcaagcgctgccatgggtcccaggccagctaccttttccag

SEQ ID NO: 354743 - DNA, 120 bp, Artificial Sequence
  ENSG00000139631_10 (sequence is synthesized)
caggacaagttctacgatgtggctctggacacgggagacaaggtggtgcagtgtggccgccgtgtggactgtctgaagctgtggctcatgtggaaggcacagggcgatcaagggctggag

SEQ ID NO: 354744 - DNA, 120 bp, Artificial Sequence
  ENSG00000139631_11 (sequence is synthesized)
cggcgcatcgaccaggcctttgtccttgcccggtacctggtggaggaaatgaagaagcgggaagggtttgagctagtcatggagcctgagtttgtcaatgtgtgtttctggttcgtaccc

SEQ ID NO: 354745 - DNA, 120 bp, Artificial Sequence
  ENSG00000139631_12 (sequence is synthesized)
cccagcctgcgagggaagcaggagagtccagattaccacgaaaggctgtcaaaggtggcccccgtgctcaaggagcgcatggtgaaggagggctccatgatgattggctaccagccccac

SEQ ID NO: 354746 - DNA, 120 bp, Artificial Sequence
  ENSG00000139631_13 (sequence is synthesized)
gggacccggggcaacttcttccgtgtggttgtggccaactctgcactgacctgtgctgatatggacttcctcctcaacgagctggagcggctaggccaggacctgtgagccttctctgtc

SEQ ID NO: 354747 - DNA, 120 bp, Artificial Sequence
  ENSG00000139631_14 (sequence is synthesized)
gagcggctaggccaggacctgtgagccttctctgtcttgctgccggccttgataccacccctcacccgcagagtcactgcattccctcccagcctttgaggccgggtgcagtggctcacg

SEQ ID NO: 354748 - DNA, 62 bp, Artificial Sequence
  ENSG00000139631_15 (sequence is synthesized)
ctgtgcctgtaaacccagctactcaggaggttggggcagaattgcttgaacccagggggcag

SEQ ID NO: 354749 - DNA, 120 bp, Artificial Sequence
  ENSG00000139631_16 (sequence is synthesized)
acttccgggctcggcagctagactagcgggggcagcctcagagcgggccgtccagcatcaaacactagcctccacacgtggaaaagaccctgactcccacagtagactagtcttatggga

SEQ ID NO: 354750 - DNA, 120 bp, Artificial Sequence
  ENSG00000139631_17 (sequence is synthesized)
gtcctggctcttgggccaggctgcattaggaaaatggaaaccagactgtcttcaaattcttctgcctagccttagccattagagagaggtcctgctaaagatggactgcaaatgcgcttg

SEQ ID NO: 354751 - DNA, 120 bp, Artificial Sequence
  ENSG00000139631_18 (sequence is synthesized)
tgctactgaggtttttttttgggtgatgaaaatgttctggcgttagatagtgatgatggttgcaacaactttgtgaatttatgaaaaaaacacttaattgtacacttttcaccccacttc

SEQ ID NO: 354752 - DNA, 120 bp, Artificial Sequence
  ENSG00000139631_19 (sequence is synthesized)
cagaatcttgggccccaccctagaccccagacctagtggaccagaacctgcatttcattttaaccagacacccaggcgattcgtatgcacgctgacatttgagaagccctggtctacagg

SEQ ID NO: 354753 - DNA, 120 bp, Artificial Sequence
  ENSG00000139631_20 (sequence is synthesized)
agaacagcctttttaggccacagtgacctgcgcaatgtttatatgctttgacctactaactttctcctaactaaatatttgattttaggagagtgtttaaataaattacagtatgtctat

SEQ ID NO: 354754 - DNA, 120 bp, Artificial Sequence
  ENSG00000139631_21 (sequence is synthesized)
cagtatgtctatatgatgaaatgttattttgccattaaaattttgtttacaaagataatttttattgacataaaaataactttaatgtaatttatgttgaaaaagctgaatacaagtctt

SEQ ID NO: 354755 - DNA, 120 bp, Artificial Sequence
  ENSG00000139631_22 (sequence is synthesized)
tatttgagctgtgttcaaaaatacataggaaaagactgataaaatgaaatatggcaaaatgttaatagttttccctggaataggataataggcaattttaaaacagactcctttaaaaaa

SEQ ID NO: 354756 - DNA, 120 bp, Artificial Sequence
  ENSG00000139631_23 (sequence is synthesized)
acaaacaaacaaaaaaaacatagacttctttatatcttttgagctccctcccttttattatgtaatgaatatgtgttgcttttgtaataggaaaataataaagttaaaatttcaactgca

SEQ ID NO: 354757 - DNA, 120 bp, Artificial Sequence
  ENSG00000139631_24 (sequence is synthesized)
gtaacttcctgccgccagaaagctctggcatcagacccttaccgctggtggacctctctcccctcgctattcagtagaattgctgttcctgtctaccagagcctgccagcgtctcccacc

SEQ ID NO: 354758 - DNA, 120 bp, Artificial Sequence
  ENSG00000139631_25 (sequence is synthesized)
tctgccctgagatctgtttcaccccctgagggaaaaactagcactgttgtctctgcattgctaaccccaccttaccctgccttcaacagagaacctgtccctgctctaccctctgcattt

SEQ ID NO: 354759 - DNA, 120 bp, Artificial Sequence
  ENSG00000139631_26 (sequence is synthesized)
tttttgaaacttttattttggattcagtaagtacatgtgcaggtttgttataagggtatattttgtgattctgaggtttggggcacgattgaacccatcacccaggtagtgagcatagta

SEQ ID NO: 354760 - DNA, 120 bp, Artificial Sequence
  ENSG00000139636_0 (sequence is synthesized)
tgtgtcgtcactagatctcttaaaaagatggaccctcagcggcgcttcctcgtagcgagcctagtggcgggtgtttgcattgaaacgtgagcgcgacccgaccttaaagagtggggagca

SEQ ID NO: 354761 - DNA, 120 bp, Artificial Sequence
  ENSG00000139636_1 (sequence is synthesized)
aagggaggacagagccctttaaaacgaggcgggtggtgcctgcccctttaagggcggggcgtccggacgactgtatctgagccccagactgccccgagtttctgtcgcaggctgcgagga

SEQ ID NO: 354762 - DNA, 120 bp, Artificial Sequence
  ENSG00000139636_2 (sequence is synthesized)
aaggcccctaggctgggtctgggtgcttggcggcggcggcttcctccccgctcgtcctccccgggcccagaggcacctcggcttcagtcatgctgagcagagtatggaagcacctgacta

SEQ ID NO: 354763 - DNA, 120 bp, Artificial Sequence
  ENSG00000139636_3 (sequence is synthesized)
cgaagtgctatccgtgcgagaacagctattccacgagaggatccgcgagtgtattatatcaacacttctgtttgcaacactgtacatcctctgccacatcttcctgacccgcttcaagaa

SEQ ID NO: 354764 - DNA, 120 bp, Artificial Sequence
  ENSG00000139636_4 (sequence is synthesized)
gcctgctgagttcaccacagtggatgatgaagatgccaccgtcaacaagattgcgctcgagctgtgcacctttaccctggcaattgccctgggtgctgtcctgctcctgcccttctccat

SEQ ID NO: 354765 - DNA, 120 bp, Artificial Sequence
  ENSG00000139636_5 (sequence is synthesized)
catcagcaatgaggtgctgctctccctgcctcggaactactacatccagtggctcaacggctccctcatccatggcctctggaaccttgtttttctcttctccaacctgtccctcatctt

SEQ ID NO: 354766 - DNA, 120 bp, Artificial Sequence
  ENSG00000139636_6 (sequence is synthesized)
cctcatgccctttgcatatttcttcactgagtctgagggctttgctggctccagaaagggtgtcctgggccgggtctatgagacagtggtgatgttgatgctcctcactctgctggtgct

SEQ ID NO: 354767 - DNA, 120 bp, Artificial Sequence
  ENSG00000139636_7 (sequence is synthesized)
aggtatggtgtgggtggcatcagccattgtggacaagaacaaggccaacagagagtcactctatgacttttgggagtactatctcccctacctctactcatgcatctccttccttggggt

SEQ ID NO: 354768 - DNA, 120 bp, Artificial Sequence
  ENSG00000139636_8 (sequence is synthesized)
tctgctgctcctggtgtgtactccactgggtctcgcccgcatgttctccgtcactgggaagctgctagtcaagccccggctgctggaagacctggaggagcagctgtactgctcagcctt

SEQ ID NO: 354769 - DNA, 120 bp, Artificial Sequence
  ENSG00000139636_9 (sequence is synthesized)
tgaggaggcagccctgacccgcaggatctgtaatcctacttcctgctggctgcctttagacatggagctgctacacagacaggtcctggctctgcagacacagagggtcctgctggagaa

SEQ ID NO: 354770 - DNA, 120 bp, Artificial Sequence
  ENSG00000139636_10 (sequence is synthesized)
gaggcggaaggcttcagcctggcaacggaacctgggctaccccctggctatgctgtgcttgctggtgctgacgggcctgtctgtgctcattgtggccatccacatcctggagctgctcat

SEQ ID NO: 354771 - DNA, 120 bp, Artificial Sequence
  ENSG00000139636_11 (sequence is synthesized)
cgatgaggctgccatgccccgaggcatgcagggtacctccttaggccaggtctccttctccaagctgggctcctttggtgccgtcattcaggttgtactcatcttttacctaatggtgtc

SEQ ID NO: 354772 - DNA, 120 bp, Artificial Sequence
  ENSG00000139636_12 (sequence is synthesized)
gcacgacactgccatgacgcagataattgggaactgtgtctgtctcctggtcctaagctcagcacttcctgtcttctctcgaaccctggggctcactcgctttgacctgctgggtgactt

SEQ ID NO: 354773 - DNA, 120 bp, Artificial Sequence
  ENSG00000139636_13 (sequence is synthesized)
tggacgcttcaactggctgggcaatttctacattgtgttcctctacaacgcagcctttgcaggcctcaccacactctgtctggtgaagaccttcactgcagctgtgcgggcagagctgat

SEQ ID NO: 354774 - DNA, 120 bp, Artificial Sequence
  ENSG00000139636_14 (sequence is synthesized)
ccgggcctttgggctggacagactgccgctgcccgtctccggtttcccccaggcatctaggaagacccagcaccagtgacctccagctgggggtgggaaggaaaaaactggacactgcca

SEQ ID NO: 354775 - DNA, 120 bp, Artificial Sequence
  ENSG00000139636_15 (sequence is synthesized)
tctgctgcctaggcctggagggaagcccaaggctacttggacctcaggacctggaatctgagagggtgggtggcagaggggagcagagccatctgcactattgcataatctgagccagag

SEQ ID NO: 354776 - DNA, 120 bp, Artificial Sequence
  ENSG00000139636_16 (sequence is synthesized)
tttgggaccaggacctcctgcttttccatacttaactgtggcctcagcatggggtagggctgggtgactgggtctagcccctgatcccaaatctgtttacacatcaatctgcctcactgc

SEQ ID NO: 354777 - DNA, 120 bp, Artificial Sequence
  ENSG00000139636_17 (sequence is synthesized)
tgttctgggccatccccatagccatgtttacatgatttgatgtgcaatagggtggggtaggggcagggaaaggactgggccagggcaggctcgggagatagattgtctcccttgcctctg

SEQ ID NO: 354778 - DNA, 120 bp, Artificial Sequence
  ENSG00000139636_18 (sequence is synthesized)
gcccagcagagcctaagcactgtgctatcctggaggggctttggaccacctgaaagaccaaggggatagggaggaggaggcttcagccatcagcaataaagttgatcccagggtttgctt

SEQ ID NO: 354779 - DNA, 120 bp, Artificial Sequence
  ENSG00000139636_19 (sequence is synthesized)
tgtttttttaaagcacctgtctctgtgtatatttgaacagccttgctcccaccagcccggcgtctgcccagtaagagaagcagaggggtcctgcccaccatccttttccttccccttcat

SEQ ID NO: 354780 - DNA, 120 bp, Artificial Sequence
  ENSG00000139636_20 (sequence is synthesized)
ctatattattaccatcctttggggacttggatctggtgttaggccatgcagttgggcagtgggaaactcctccatcctcagtcttgcttaaagctggcttgtcccctgactcctccttat

SEQ ID NO: 354781 - DNA, 120 bp, Artificial Sequence
  ENSG00000139636_21 (sequence is synthesized)
attcatggccttgtttctgtaccttgagtattgggggtaggacatgggcataggagtaggctaacctccccgatacactcataccttcagccctatcctccctggcttaactattggata

SEQ ID NO: 354782 - DNA, 120 bp, Artificial Sequence
  ENSG00000139636_22 (sequence is synthesized)
tagagtaaaataagtggctggctgacaaggattttcatttcctacctgagagaagaatctagctttttactagaggccatcagtttcttgaaaagcccatgtgctatgttgggagtaaga

SEQ ID NO: 354783 - DNA, 120 bp, Artificial Sequence
  ENSG00000139636_23 (sequence is synthesized)
gcgcaaaacttaggcttatacagattgtgtattgcacagcttccagggacaccattcacctcatagtcattgtgtggatagttactatgatagttttctaataaatgtcagtcatcttga

SEQ ID NO: 354784 - DNA, 120 bp, Artificial Sequence
  ENSG00000139636_24 (sequence is synthesized)
agagaagccaggtcccctagttttggcatcatacctggcataactgataggcatgtatgggaggaccacattcctggggacagcctgggtatgtgacatggcaggtgaccaggttcccat

SEQ ID NO: 354785 - DNA, 120 bp, Artificial Sequence
  ENSG00000139636_25 (sequence is synthesized)
gaatgcccgaggctgtgcccatcccatgagctggggcttccctggaggtaaagagctagggtggggtggcagtgggtagaaccccagctggacagctccttccttagctctgtgattgct

SEQ ID NO: 354786 - DNA, 120 bp, Artificial Sequence
  ENSG00000139636_26 (sequence is synthesized)
gatgaggctgccatgccccgaggcatgcagcaaacctgtctcctgggactctagaccgagcacttcttggactttgtctcctttgggactctgagcaacgctgatgggaagtggggcaag

SEQ ID NO: 354787 - DNA, 120 bp, Artificial Sequence
  ENSG00000139636_27 (sequence is synthesized)
ttttcatcaacctcaggttcagaaagaaggaaaagacttaatttgaaaggagggctggtggttcagtagaatctgatcagaagaaaataaaaagaggccaggtgcagtggctcacacctg

SEQ ID NO: 354788 - DNA, 87 bp, Artificial Sequence
  ENSG00000139636_28 (sequence is synthesized)
ttaggatggcctctacaaaaagtacaaaaaattagccagacgtggtggtgcgtgcttgcattcccagctacgtgggaggctgacgtg

SEQ ID NO: 354789 - DNA, 120 bp, Artificial Sequence
  ENSG00000139636_29 (sequence is synthesized)
aagtacaaaaaattagccagacgtggtggtgcgtgcttgcattcccagctacgtgggaggctgacgtgggaagatcgcttaagcccagaaggtcaaggttgcagtgagctgaaatcgcac

SEQ ID NO: 354790 - DNA, 120 bp, Artificial Sequence
  ENSG00000139636_30 (sequence is synthesized)
tgcgagaacagctattccacgagaggatccgcgagtgtattgctgggttcccagcctctcagccattccggggtttccccagtgagtggtcctcccagggcttcagagggtacctggctg

SEQ ID NO: 354791 - DNA, 120 bp, Artificial Sequence
  ENSG00000139636_31 (sequence is synthesized)
ccttacgccctccctgccacttagagcgacaactgaaccttgcgcacagaagtggactactcaattctgggatatcaacacttctgtttgcaacactgtacatcctctgccacatcttcc

SEQ ID NO: 354792 - DNA, 120 bp, Artificial Sequence
  ENSG00000139636_32 (sequence is synthesized)
gaacctgaagtgagcaactgctggatgaatgtcattacgggcacaggctctgtgtcatctcctctcctagtgcttccacagccaggaccagagacctccctgatgactggggaacctggt

SEQ ID NO: 354793 - DNA, 120 bp, Artificial Sequence
  ENSG00000139636_33 (sequence is synthesized)
gatggtggcctttctctttatggggagcctgagtatgctcagatcgcagctttccttccctagacattgtgtaattgggggtgggggcacacttgccccagttcctagctccagcctttc

SEQ ID NO: 354794 - DNA, 120 bp, Artificial Sequence
  ENSG00000139636_34 (sequence is synthesized)
ctggaatctgagaggagcctaagcactgtgctatcctggaggggctttggaccacctgaaagaccaaggggatagggaggaggaggcttcagccatcagcaataaagttgatcccagggt

SEQ ID NO: 354795 - DNA, 120 bp, Artificial Sequence
  ENSG00000139636_35 (sequence is synthesized)
aataaagaggctatttgcagaggtttagttaacggaagtttgaggctctagtgacagtaggaagtcattaccacccttaggcctgtagggacaaagggaggaaatggtttctagaaccca

SEQ ID NO: 354796 - DNA, 120 bp, Artificial Sequence
  ENSG00000139636_36 (sequence is synthesized)
ctaatagctgaagccagggatgtgaagctgcccagagaggagctgttgtcttagtgtcataatcactgccaaaaccatggtggcagacgtgggaggactcacaggaaacataccctcacc

SEQ ID NO: 354797 - DNA, 120 bp, Artificial Sequence
  ENSG00000139636_37 (sequence is synthesized)
ttttttctaccttccattctcctgttggatgcgaaaccagagggcaaagagcttgtgggatgcagacctcggaggtcagcctcccagagcacacaatgacaaggaataggtctggggaaa

SEQ ID NO: 354798 - DNA, 120 bp, Artificial Sequence
  ENSG00000139636_38 (sequence is synthesized)
ggagatgcaaatgaagaacacctggtatgtggggtgaccttagactggggagtgggaagacagagcaacttagcagaataagaggaaaaccctctctcttacctcctgaatccaaacctt

SEQ ID NO: 354799 - DNA, 120 bp, Artificial Sequence
  ENSG00000139636_39 (sequence is synthesized)
tctggttcctgcaggctgcctgccatctccaatgttcccacactgccctgatgttaaccttcttcactggttgcctcctcccgtagggtgtcctgggccgggtctatgagacagtggtga

SEQ ID NO: 354800 - DNA, 120 bp, Artificial Sequence
  ENSG00000139636_40 (sequence is synthesized)
ccctccctcctgctagagtccctgttgccatggaccagcctcaggggaatgggcctatggtacccactgggaaaggagcagtggctgtgtggggctgttctggagcctttgcctcttcag

SEQ ID NO: 354801 - DNA, 120 bp, Artificial Sequence
  ENSG00000139636_41 (sequence is synthesized)
cctccctttctgcaagataggggcaagggcggctagatggatgtgtctgctgggcaagtcatataacatttctgatcctcagtttcatcctacaaaatgggcgtaacaatgtctacctac

SEQ ID NO: 354802 - DNA, 120 bp, Artificial Sequence
  ENSG00000139636_42 (sequence is synthesized)
atccatgggtgtcctgggccgggtctatgagacagtggtgatgttgatgctcctcactctgctggtgctaggtatggtgtgggtggcatcagccattgtggacaagaacaaggccaacag

SEQ ID NO: 354803 - DNA, 120 bp, Artificial Sequence
  ENSG00000139636_43 (sequence is synthesized)
tgggagagagctctgttccctttgagatgagttattaattcttggagccagccagttcttccttaatgcagtggcagttacctaatggtgtcctcagttgtgggcttctatagctctcca

SEQ ID NO: 354804 - DNA, 120 bp, Artificial Sequence
  ENSG00000139636_44 (sequence is synthesized)
ctcttccggagcctgcggcccagatggcacgacactgccatgacgcaggtagctgggagggagtaagggaagctcccggggggtgtggatgggcactaggtgcctgcagctcttccaccc

SEQ ID NO: 354805 - DNA, 120 bp, Artificial Sequence
  ENSG00000139636_45 (sequence is synthesized)
gagctagtcttggaaactgaaaatgttggaccagagtctgcccattcctttagctctgggtccagctgtggtctggggtggaatgggagtctgaccttgcctcacacagggcctgtctgt

SEQ ID NO: 354806 - DNA, 120 bp, Artificial Sequence
  ENSG00000139636_46 (sequence is synthesized)
ctgttcagctctgccttctttgagggggcagggatggggcagggagcacattgtaatactaacggcctcagagctgccccctgatgtcctcctgcctgttccccgtgcctctgtctctta

SEQ ID NO: 354807 - DNA, 120 bp, Artificial Sequence
  ENSG00000139636_47 (sequence is synthesized)
gttgggggtctccggggtctgagagcctgcggagtctgccttagtctgataatcggggaaggatgggtttgcttctcaaactgggttgagggcaaactcagctgacgttggatgaagggg

SEQ ID NO: 354808 - DNA, 120 bp, Artificial Sequence
  ENSG00000139636_48 (sequence is synthesized)
agacgtcgtcacactgagcttgattccagaaaagaggggaggtgtagggatggcagacgggaggaacctggggacttgatatcaacacttctgtttgcaacactgtacatcctctgccac

SEQ ID NO: 354809 - DNA, 120 bp, Artificial Sequence
  ENSG00000139636_49 (sequence is synthesized)
gggctaccccctggctatgctgtgcttgctggtgctgacggtaggtataccagccctagaggtgaggagtggaccctcagtacttgaggccttctcagggagaggggaggcaatgcaggg

SEQ ID NO: 354810 - DNA, 120 bp, Artificial Sequence
  ENSG00000139636_50 (sequence is synthesized)
acctggttatcatcagtaatagtggttgcttctcactgagtgcctacttttatgtcctgcctgtggtgagcacaaatgttgagcacatcaatccccattttgtagacgaagagacagagt

SEQ ID NO: 354811 - DNA, 120 bp, Artificial Sequence
  ENSG00000139636_51 (sequence is synthesized)
ctggaaacccatcattgcctctgttcagcaaacctgtctcctgggactctagaccgagcacttcttggactttttacctaatggtgtcctcagttgtgggcttctatagctctccactct

SEQ ID NO: 354812 - DNA, 120 bp, Artificial Sequence
  ENSG00000139637_0 (sequence is synthesized)
ctcttccgggtcggcgctcctgcctccctgcagggagctgcttatgggacaccaattcctgcgcggcctcttaacgctgctgctgccgccgccacccctgtatacccggcaccgcatgct

SEQ ID NO: 354813 - DNA, 120 bp, Artificial Sequence
  ENSG00000139637_1 (sequence is synthesized)
cggtccagagtccgtcccgcccccaaaacgatcccgcagcaaactcatggcaccgccccgaatcgggacgcacaatggcaccttccactgcgacgaggcactggcatgcgcactgcttcg

SEQ ID NO: 354814 - DNA, 120 bp, Artificial Sequence
  ENSG00000139637_2 (sequence is synthesized)
cctcctgccggagtaccgggatgcagagattgtgcggacccgggatcccgaaaaactcgcttcctgtgacatcgtggtggacgtggggggcgagtacgaccctcggagacaccgatatga

SEQ ID NO: 354815 - DNA, 120 bp, Artificial Sequence
  ENSG00000139637_3 (sequence is synthesized)
ccatcaccagaggtctttcacagagaccatgagctccctgtcccctgggaagccgtggcagaccaagctgagcagtgcgggactcatctatctgcacttcgggcacaagctgctggccca

SEQ ID NO: 354816 - DNA, 120 bp, Artificial Sequence
  ENSG00000139637_4 (sequence is synthesized)
gttgctgggcactagtgaagaggacagcatggtgggcaccctctatgacaagatgtatgagaactttgtggaggaggtggatgctgtggacaatgggatctcccagtgggcagaggggga

SEQ ID NO: 354817 - DNA, 120 bp, Artificial Sequence
  ENSG00000139637_5 (sequence is synthesized)
ctcgatatgcactgaccactaccctgagtgcacgagttgctcgacttaatcctacctggaaccaccccgaccaagacactgaggcagggttcaagcgtgcaatggatctggttcaagagg

SEQ ID NO: 354818 - DNA, 120 bp, Artificial Sequence
  ENSG00000139637_6 (sequence is synthesized)
agtttctgcagagattagatttctaccaacacagctggctgccagcccgggccttggtggaagaggcccttgcccagcgattccaggtggacccaagtggagagattgtggaactggcga

SEQ ID NO: 354819 - DNA, 120 bp, Artificial Sequence
  ENSG00000139637_7 (sequence is synthesized)
aaggtgcatgtccctggaaggagcatctctaccacctggaatctgggctgtcccctccagtggccatcttctttgttatctacactgaccaggctggacagtggcgaatacagtgtgtgc

SEQ ID NO: 354820 - DNA, 120 bp, Artificial Sequence
  ENSG00000139637_8 (sequence is synthesized)
ccaaggagccccactcattccaaagccggctgcccctgccagagccatggcggggtcttcgggacgaggccctggaccaggtcagtgggatccctggctgcatcttcgtccatgcaagcg

SEQ ID NO: 354821 - DNA, 120 bp, Artificial Sequence
  ENSG00000139637_9 (sequence is synthesized)
gcttcactggcggtcaccacacccgagagggtgccttgagcatggcccgtgccaccttggcccagcgctcatacctcccacaaatctcctagtctaataaaaccttccatctcatactga

SEQ ID NO: 354822 - DNA, 120 bp, Artificial Sequence
  ENSG00000139637_10 (sequence is synthesized)
tagtctcaaattcctgggctcaactgatcctcccacctcagcctcccaaaatgttgtgactacaaacatgatcaccatgcccagcctaccttaaaccttctagctatgctctccctcttt

SEQ ID NO: 354823 - DNA, 120 bp, Artificial Sequence
  ENSG00000139637_11 (sequence is synthesized)
ggtccgcgaaaagtgaccctgggactgcgtgcatgcatgcctccggggtggatggcattccgccaacagggtcactccgatagcgcccggcagcccaagcacccttcctacccttcctgc

SEQ ID NO: 354824 - DNA, 120 bp, Artificial Sequence
  ENSG00000139637_12 (sequence is synthesized)
gagacctgtaagaaccttgggtggggggaaaatgggagcatttgctcctcctaagccctagcaaattccaagtttgggccagcatcatggttctaattctcatcattcccaggcagggtt

SEQ ID NO: 354825 - DNA, 120 bp, Artificial Sequence
  ENSG00000139637_13 (sequence is synthesized)
gagcagtgctcacacagcactcagcactgggcctcgggtcagggttcctggcctatagcaggcccaacactcatcctctccctcagtcaggctcatctcacaagggaatggtgatacctc

SEQ ID NO: 354826 - DNA, 120 bp, Artificial Sequence
  ENSG00000139637_14 (sequence is synthesized)
ccctgtctacatcctggggtggttgtgagaagtggatgctgtaatatatggggaagggctttgaaaaccataaagcagcatggccccgtctttttattgacacacacaaacagcaattgc

SEQ ID NO: 354827 - DNA, 120 bp, Artificial Sequence
  ENSG00000139637_15 (sequence is synthesized)
tcagcacctttgggtaaacagaggggaggctgcttatgtgtggaagcagatggctcagaggttctggctgccctgaaggttgaggggagtgtatgttaggcaccactgtagttcactagt

SEQ ID NO: 354828 - DNA, 120 bp, Artificial Sequence
  ENSG00000139637_16 (sequence is synthesized)
ggcacataaattgggaagctcagctgagaagagttttattatgaaactgtctttggattccaccagtgtcccctgcaagcagcttcctgctcttagggaaagaatatggctagtggccct

SEQ ID NO: 354829 - DNA, 120 bp, Artificial Sequence
  ENSG00000139637_17 (sequence is synthesized)
ggcatgcaagtcaggtcgcacagtactgaggacacttacttgtttacaagtcaaagcccaggttcagtcagctgtatttcttgcaggtaggctgttgaattcagttctcagtttttttgt

SEQ ID NO: 354830 - DNA, 120 bp, Artificial Sequence
  ENSG00000139637_18 (sequence is synthesized)
gaaatcaggtgatctgaattccagtcacagcacaacgagctgtctgagcttcagcgagctgctgaacttgccaattctcccttttctcatccagttaatgttgagagatcctcacagggc

SEQ ID NO: 354831 - DNA, 120 bp, Artificial Sequence
  ENSG00000139637_19 (sequence is synthesized)
tgaaagagtgtgtatgaacatactttgaatcatgtaagatttcacataagtagcaggtagcctcaagaaggtttcccctgctgctgccttagatgtatgagaactttgtggaggaggtgg

SEQ ID NO: 354832 - DNA, 120 bp, Artificial Sequence
  ENSG00000139641_0 (sequence is synthesized)
atcttggccttcgggcccaatcagggaggccctacctatccgaaacccggtccgttccccgcggaagaggggtggagtttcaaccttttaactccaccttggtctgtgcagcgcggacca

SEQ ID NO: 354833 - DNA, 120 bp, Artificial Sequence
  ENSG00000139641_1 (sequence is synthesized)
acccaaatcgccagaaaggaggggcgtggcttgaagtcccctcctccatcccggggatcacgttttgcctgggggagctgatcgcaagactaggcaacctccagccagtccctgggtcgg

SEQ ID NO: 354834 - DNA, 120 bp, Artificial Sequence
  ENSG00000139641_2 (sequence is synthesized)
gcggatcctcccagaggtggcacaatggagcgatctccaggagagggccccagccccagccccatggaccagccctctgctccctccgaccccactgaccagccccccgctgctcacgca

SEQ ID NO: 354835 - DNA, 120 bp, Artificial Sequence
  ENSG00000139641_3 (sequence is synthesized)
aagccagacccaggttctgggggccaacctgctggccctggcgcggcgggtgaggccctggcggtgctgacttcattcgggaggcggttgctggtgctgatacctgtgtatttggccggg

SEQ ID NO: 354836 - DNA, 120 bp, Artificial Sequence
  ENSG00000139641_4 (sequence is synthesized)
gcagtgggactcagcgtgggtttcgtgctcttcggcctcgccctctacctgggctggcgccgggtccgcgacgagaaagaacggagccttcgagcagcgaggcagctactggacgacgag

SEQ ID NO: 354837 - DNA, 120 bp, Artificial Sequence
  ENSG00000139641_5 (sequence is synthesized)
gagcagctcactgcgaaaactctctatatgagtcatcgagagctacctgcctgggtcagcttcccagacgtggaaaaggctgaatggctcaataagattgtggcccaggtctggcccttc

SEQ ID NO: 354838 - DNA, 120 bp, Artificial Sequence
  ENSG00000139641_6 (sequence is synthesized)
ctgggccagtatatggagaagcttctggctgaaactgtggctccggctgttaggggatctaacccccatctgcaaacatttacatttacacgagtggaactgggtgaaaagccattgcgc

SEQ ID NO: 354839 - DNA, 120 bp, Artificial Sequence
  ENSG00000139641_7 (sequence is synthesized)
atcattggagtcaaggttcacccaggtcagagaaaagagcagatcctgctggacttgaacatcagctatgtaggtgatgtgcagattgatgtggaagtgaagaaatatttttgcaaagca

SEQ ID NO: 354840 - DNA, 120 bp, Artificial Sequence
  ENSG00000139641_8 (sequence is synthesized)
ggagtcaagggcatgcagctacatggcgttttgcgggtgatactggagccactcattggggaccttcccttcgtgggggctgtgtcaatgttcttcatccgacgcccgaccctagacatc

SEQ ID NO: 354841 - DNA, 120 bp, Artificial Sequence
  ENSG00000139641_9 (sequence is synthesized)
aactggacagggatgaccaacctgctggatatcccaggacttagctcactctctgacaccatgatcatggactccattgctgccttcctcgtgttgcccaaccgattactggtgcccctt

SEQ ID NO: 354842 - DNA, 120 bp, Artificial Sequence
  ENSG00000139641_10 (sequence is synthesized)
gtgcctgaccttcaagatgtggctcagttgcgttcccctctgcccaggggcattattcgaattcacctgctggctgctcgagggctgagttccaaggacaaatatgtgaagggcctgatt

SEQ ID NO: 354843 - DNA, 120 bp, Artificial Sequence
  ENSG00000139641_11 (sequence is synthesized)
gagggcaagtcagacccatatgcacttgtgcgtttgggtacccagacattctgcagtcgtgtcattgatgaagaactcaacccacagtggggagagacttatgaggtgatggtacacgag

SEQ ID NO: 354844 - DNA, 120 bp, Artificial Sequence
  ENSG00000139641_12 (sequence is synthesized)
gtcccagggcaggagattgaagtggaggtgttcgacaaggatccagataaagatgactttctgggcagaatgaagctggatgtagggaaggtgttacaggctagcgttctggatgattgg

SEQ ID NO: 354845 - DNA, 120 bp, Artificial Sequence
  ENSG00000139641_13 (sequence is synthesized)
ttccctctacaaggtgggcaaggccaagttcacttgaggctagaatggctgtcacttttgtcagatgcagagaaactggagcaggttctacagtggaattggggagtctcctctcgacca

SEQ ID NO: 354846 - DNA, 120 bp, Artificial Sequence
  ENSG00000139641_14 (sequence is synthesized)
gatcccccgtcagctgccatcttagttgtctacctggatcgggcccaggatcttcctctgaagaaggggaacaaggaacccaaccctatggtacaactgtcaattcaggatgtgactcag

SEQ ID NO: 354847 - DNA, 120 bp, Artificial Sequence
  ENSG00000139641_15 (sequence is synthesized)
gagagcaaggctgtctacagtaccaactgcccagtgtgggaggaagcgttccggttcttcctacaagaccctcaaagccaggagctcgatgtgcaagtgaaggatgattccagggccctg

SEQ ID NO: 354848 - DNA, 120 bp, Artificial Sequence
  ENSG00000139641_16 (sequence is synthesized)
actttaggagcactgacgctgcctctggcccgcctgctgactgccccagaactcatcctggaccagtggttccagctcagcagctctggtccaaactccagactctatatgaaactagtc

SEQ ID NO: 354849 - DNA, 120 bp, Artificial Sequence
  ENSG00000139641_17 (sequence is synthesized)
atgaggatcctgtacttggattcatcagaaatatgcttccccacggtgcctggttgtcctggtgcttgggacgtggacagtgagaatccccagagaggcagcagtgtggatgccccacct

SEQ ID NO: 354850 - DNA, 120 bp, Artificial Sequence
  ENSG00000139641_18 (sequence is synthesized)
ggcccaggacctgattgccaaagaccgtttcttggggggactggtgaagggcaagtcagacccctatgtcaaactaaagttggcaggacgaagcttccggagccatgttgttcgggaaga

SEQ ID NO: 354851 - DNA, 120 bp, Artificial Sequence
  ENSG00000139641_19 (sequence is synthesized)
tctcaatccccgctggaatgaggtttttgaggtgatcgtcacatcagttccaggccaagagctagaggttgaagtctttgacaaggacttggacaaggatgattttctgggcaggtgtaa

SEQ ID NO: 354852 - DNA, 120 bp, Artificial Sequence
  ENSG00000139641_20 (sequence is synthesized)
agtgcgtctcaccacagtcttaaacagtggcttccttgatgagtggctgaccctggaggatgtcccatctggccgcctgcacttgcgcctggagcgtctcaccccccgtcccactgctgc

SEQ ID NO: 354853 - DNA, 120 bp, Artificial Sequence
  ENSG00000139641_21 (sequence is synthesized)
tgagttagaggaggtgctgcaggtgaatagtttgatccagactcagaagagtgcggagctggctgcggccctgctatccatctatatggagcgggcagaggacctcccgctgcgaaaagg

SEQ ID NO: 354854 - DNA, 120 bp, Artificial Sequence
  ENSG00000139641_22 (sequence is synthesized)
caccaagcacctcagcccttatgctactctcactgtgggagatagttctcataaaaccaagactatttcgcaaacttcagcccctgtctgggatgagagtgcctcctttctcatcaggaa

SEQ ID NO: 354855 - DNA, 120 bp, Artificial Sequence
  ENSG00000139641_23 (sequence is synthesized)
accacacactgagagcctagagttgcaggttcggggtgagggcactggcgtgctgggctcattatccctgcccctctcagagctcctcgtggctgaccagctctgcttggaccgctggtt

SEQ ID NO: 354856 - DNA, 120 bp, Artificial Sequence
  ENSG00000139641_24 (sequence is synthesized)
tacactcagcagtggtcaggggcaggtgctactgagagcacagctagggatcctggtgtcccagcactcgggagtggaagctcatagccacagctacagccacagctcctcatcgctgag

SEQ ID NO: 354857 - DNA, 120 bp, Artificial Sequence
  ENSG00000139641_25 (sequence is synthesized)
tgaagaaccagagctctcggggggaccccctcacatcacctcctcagccccagagctccggcagcgcctaacacatgttgacagtccccttgaggctccagccgggcctctgggccaggt

SEQ ID NO: 354858 - DNA, 120 bp, Artificial Sequence
  ENSG00000139641_26 (sequence is synthesized)
gaaactgactctgtggtactacagtgaagaacgaaagctggtcagcattgttcatggttgccggtcccttcgacagaatggacgtgatcctcctgatccctatgtgtcactgttgctact

SEQ ID NO: 354859 - DNA, 120 bp, Artificial Sequence
  ENSG00000139641_27 (sequence is synthesized)
gccagacaagaaccgaggcaccaagaggaggacctcacagaagaagaggaccctgagtcctgaatttaatgaacggtttgagtgggaactccccctggatgaggcccagagacgaaagct

SEQ ID NO: 354860 - DNA, 120 bp, Artificial Sequence
  ENSG00000139641_28 (sequence is synthesized)
ggatgtctctgtcaagtctaattcctccttcatgtcaagagagcgtgagctgctggggaaggtgcagctggacctagctgagacagacctttcccagggtgtagcccggtggtatgacct

SEQ ID NO: 354861 - DNA, 120 bp, Artificial Sequence
  ENSG00000139641_29 (sequence is synthesized)
gatggacaacaaggacaagggcagctcctaggagctggcgagtcccagcctgactgctctgtcttcctgccttcgtctcgctccatcaccgcctcaatgtgatgagcctaaagctagggt

SEQ ID NO: 354862 - DNA, 120 bp, Artificial Sequence
  ENSG00000139641_30 (sequence is synthesized)
ccaagggcagagcctgtgcccttcagccctttcacctaacaggcccatattcgggcctttgcctgaccaaagagaagaaccgtatgttccctttactgcacggcctttatccttctgggc

SEQ ID NO: 354863 - DNA, 120 bp, Artificial Sequence
  ENSG00000139641_31 (sequence is synthesized)
ccctggggcggggacctgagctggctgtttcctgctttgcctgcacattgttctcccttcctcccaactcctcagggccttctgtatctgtgcctggccagtggcagcactagcagtggt

SEQ ID NO: 354864 - DNA, 120 bp, Artificial Sequence
  ENSG00000139641_32 (sequence is synthesized)
attagcttatgccaaatacagctttggaaggatctttttttctttaactagatggtcaccttcttccctaccacacatgggtgggaaggtggacaggctaacctctccagctgtgagcct

SEQ ID NO: 354865 - DNA, 120 bp, Artificial Sequence
  ENSG00000139641_33 (sequence is synthesized)
cttagactactgcatgtagcaaatgttcagcagctcaggcccccatgtccagttctgtccccactgtcctcaaccctgtcctgaaaattctactgctttgatggctggggccagtctctt

SEQ ID NO: 354866 - DNA, 120 bp, Artificial Sequence
  ENSG00000139641_34 (sequence is synthesized)
gtcactttggaaactgaggacgcgtggattctactcaagcctccaagtagtggcatatcagtcttggagctcctagctggtgatacggagagggctttggaggacttgggacagcagggc

SEQ ID NO: 354867 - DNA, 120 bp, Artificial Sequence
  ENSG00000139641_35 (sequence is synthesized)
caatttttttgcccaagtgcctaggctgctaactcactgactagaacttaatctggtactttacagttttgcaccaactctgccaagccactggatcttacattaaacatcatactcaaa

SEQ ID NO: 354868 - DNA, 120 bp, Artificial Sequence
  ENSG00000139641_36 (sequence is synthesized)
caccacgtccctgagctatccacagggcaacagcgtgacctctaccttgtcagctccccttattagagagacatcagcccccaaactctgtgaggaatgaacctttggggcatcctcgcc

SEQ ID NO: 354869 - DNA, 120 bp, Artificial Sequence
  ENSG00000139641_37 (sequence is synthesized)
cctcgcccaccctgagtgtgaggagtcacacacactccctctcctctgtggcacaccaccagcatcttagtaggaaaccagaggcgagggtgtgctgcacgtcactgtctctgccttccc

SEQ ID NO: 354870 - DNA, 120 bp, Artificial Sequence
  ENSG00000139641_38 (sequence is synthesized)
catgccccataacttcctggcccttcttccaccttcctccggtttggatggtcctggagtatttagaataagaaaaatggcccctctctttctgagggtagtgcaggggtgggaaaagtt

SEQ ID NO: 354871 - DNA, 120 bp, Artificial Sequence
  ENSG00000139641_39 (sequence is synthesized)
gtctgttcaaggccacgggtagtggctgccaagtaataatggagacatggctgctggctgtggatataatttgtgagggggatctgcctaactaggtccaaatttaagactaacacagta

SEQ ID NO: 354872 - DNA, 120 bp, Artificial Sequence
  ENSG00000139641_40 (sequence is synthesized)
agatcctgctggacttgaacatcaggtaataccactcaccactcttactgcttccccttcaatgtgtcctgttcagtccaggctacttcactccccctccccgcaacttcagccaaggac

SEQ ID NO: 354873 - DNA, 120 bp, Artificial Sequence
  ENSG00000139641_41 (sequence is synthesized)
atggtctttggagatttcaaaacagcatcatcagaatgagatcctgtctcaaaaaataaaagaaataacatctttcccctatcatcttccaacacaggtgcagctggacctagctgagac

SEQ ID NO: 354874 - DNA, 120 bp, Artificial Sequence
  ENSG00000139641_42 (sequence is synthesized)
gggtaggcggctctttgtcgaagctagaggaccggcaggcggcagcagcaactacggcggcggcggcagaacccagcagtgatgtggaggtggagacccacaggagccccggacttcacc

SEQ ID NO: 354875 - DNA, 120 bp, Artificial Sequence
  ENSG00000139641_43 (sequence is synthesized)
aggatgagctcttctcttagcgttcaaggcacatgccagaacccaaggtgtcagttaccactccccagccccgtgtgcccctccacaggtgctgcaggtgaatagtttgatccagactca

SEQ ID NO: 354876 - DNA, 120 bp, Artificial Sequence
  ENSG00000139641_44 (sequence is synthesized)
agaacgaaagctggtcagcattgttcatggttgccggtgagaccccatccctcctgtcctccagatcgcctccatcccttccctcaggttaccatatcacctacatcctcctgttgtagg

SEQ ID NO: 354877 - DNA, 120 bp, Artificial Sequence
  ENSG00000139644_0 (sequence is synthesized)
agagcacatccggtgttagaagcgctggtaggccttggagaggcgggttaggaagagtggagactgctgcacggactctggaaccatgaacatatttgatcgaaagatcaactttgatgc

SEQ ID NO: 354878 - DNA, 120 bp, Artificial Sequence
  ENSG00000139644_1 (sequence is synthesized)
gcttttaaaattttctcatataaccccgtcaacgcagcagcacctgaagaaggtctatgcaagttttgccctttgtatgtttgtggcggctgcaggggcctatgtccatatggtcactca

SEQ ID NO: 354879 - DNA, 120 bp, Artificial Sequence
  ENSG00000139644_2 (sequence is synthesized)
tttcattcaggctggcctgctgtctgccttgggctccctgatattgatgatttggctgatggcaacacctcatagccatgaaactgaacagaaaagactgggacttcttgctggatttgc

SEQ ID NO: 354880 - DNA, 120 bp, Artificial Sequence
  ENSG00000139644_3 (sequence is synthesized)
attccttacaggagttggcctgggccctgccctggagttttgtattgctgtcaaccccagcatccttcccactgctttcatgggcacggcaatgatctttacctgcttcaccctcagtgc

SEQ ID NO: 354881 - DNA, 120 bp, Artificial Sequence
  ENSG00000139644_4 (sequence is synthesized)
actctatgccaggcgccgtagctacctctttctgggaggtatcttgatgtcagccctgagcttgttgcttttgtcttccctggggaatgttttctttggatccatttggcttttccaggc

SEQ ID NO: 354882 - DNA, 120 bp, Artificial Sequence
  ENSG00000139644_5 (sequence is synthesized)
aaacctgtatgtgggactggtggtcatgtgtggcttcgtcctttttgatactcaactcattattgaaaaggccgaacatggagatcaagattatatctggcactgcattgatctcttctt

SEQ ID NO: 354883 - DNA, 120 bp, Artificial Sequence
  ENSG00000139644_6 (sequence is synthesized)
agatttcattactgtcttcagaaaactcatgatgatcctggccatgaatgaaaaggataagaagaaagagaagaaatgaagtgaccatccagcctttcccaattagacttcctctccttc

SEQ ID NO: 354884 - DNA, 120 bp, Artificial Sequence
  ENSG00000139644_7 (sequence is synthesized)
cacccctcatttcctttttgcacacattacaggtggtgtgttctgtgataatgaaaagcatcagaaaagcttttgtactttgtggtttcctctattttgaattttttgatcaaaaaactg

SEQ ID NO: 354885 - DNA, 120 bp, Artificial Sequence
  ENSG00000139644_8 (sequence is synthesized)
attagcagaatatagtttggagtttggcttcatcttcctggggttcccctcactcccttttttgtcaaccccatctgtagcctcttcctctactcaggcagtcgacccgccacgatgaga

SEQ ID NO: 354886 - DNA, 120 bp, Artificial Sequence
  ENSG00000139644_9 (sequence is synthesized)
agtgggaccagcagagggcgccaacttcaggagtccgctttcccaccaggcttcattcacccagtggacctgaactgtttggtagagccacccggcccttccttcctcattgttgtttgg

SEQ ID NO: 354887 - DNA, 120 bp, Artificial Sequence
  ENSG00000139644_10 (sequence is synthesized)
tatgcgcacagttcctgtgggactgggccgtgagttttccattggaaagaagttcagtggtcccattgttaactcagcctcaaatctcaactgtcaggccctacaaagaaaatggagagc

SEQ ID NO: 354888 - DNA, 120 bp, Artificial Sequence
  ENSG00000139644_11 (sequence is synthesized)
aaaagtaatgtgttccctttcccaccccttgcctgaccctcagggagtcagcctgcttccatccatgggtgggaagacttcagcacaaaggaaagactaattcttgtcaggcatttttga

SEQ ID NO: 354889 - DNA, 120 bp, Artificial Sequence
  ENSG00000139644_12 (sequence is synthesized)
aaaggctgattatgtgtatcaaggtacagcatcgtagggttcccctaaacttgccctgtttttgtttttttagtttgttatccccttactgagcggcctctactaggtggctgtgattaa

SEQ ID NO: 354890 - DNA, 120 bp, Artificial Sequence
  ENSG00000139644_13 (sequence is synthesized)
atgtcccaagcaaggatagggaaggggaatggttgagcctctggagatcattgtaaccaatcctgccagacctgtttggggcagtggggagcaaacctagataaggacctgtttggggca

SEQ ID NO: 354891 - DNA, 120 bp, Artificial Sequence
  ENSG00000139644_14 (sequence is synthesized)
gcagggagcaaaatctcctttaacaaccaagcagttcctcattcacatcaacagagcgaggctgtgataacttaggaggcagcaatcctaatagtccttcagtgcattttagtctgtctc

SEQ ID NO: 354892 - DNA, 120 bp, Artificial Sequence
  ENSG00000139644_15 (sequence is synthesized)
caactggacaccagtaggtagtgtcaagccagagattcggggcagtagataaatgttcattttactgatgcactttagtttttggtctgttacctgttttccagaaatttgtggcctttt

SEQ ID NO: 354893 - DNA, 120 bp, Artificial Sequence
  ENSG00000139644_16 (sequence is synthesized)
aggcgggagttaggcgaccaaaccagtgagagccccaatccctgcagttttgtggcttcaagtgtgggtggacagtcctaatggggatctccagctccttcctgtgggctgccacagaca

SEQ ID NO: 354894 - DNA, 120 bp, Artificial Sequence
  ENSG00000139644_17 (sequence is synthesized)
gctacccccagaagggtcaatgttgggagtggttgtggctctgagctgctctacagagcttcagtgtgagaggatcgagccattgaaagctcattaccagtaggacataatttttggctc

SEQ ID NO: 354895 - DNA, 120 bp, Artificial Sequence
  ENSG00000139644_18 (sequence is synthesized)
tccctattcacaaccagtgcacagtttgacacagtggcctcaggttcacagtgcaccatgtcactgtgctatcctacgaaatcatttgtttctaagttgtgtttattcctggagtgacat

SEQ ID NO: 354896 - DNA, 120 bp, Artificial Sequence
  ENSG00000139644_19 (sequence is synthesized)
gccaccccgaatggctcactttcactgaggatgctgtcctctgatttagctgctgcctccagcctctggcttgagaacttactaaaggcacttccttcctgttaaacccctgttaactct

SEQ ID NO: 354897 - DNA, 120 bp, Artificial Sequence
  ENSG00000139644_20 (sequence is synthesized)
ccataaatttggtgattctctgctaggcctaagattttgagttaacatctcttgaagccaaactccaccttctgtgctttttgcttgggataatggagtttttctttagaaacagtgcca

SEQ ID NO: 354898 - DNA, 120 bp, Artificial Sequence
  ENSG00000139644_21 (sequence is synthesized)
aaaagaaagaaaaaaaaaaaaacacctacttttaaagaaaatacctaacagatttttaatatagttatctctaccactttcttttctagtttcttgattttcagctcaggctgcattcta

SEQ ID NO: 354899 - DNA, 120 bp, Artificial Sequence
  ENSG00000139644_22 (sequence is synthesized)
attttcagctcaggctgcattctaactcatactgtgaagacaaaggtgtttttgattcagaaatatatgaaatctgcatagtcttaatttgtaaaaaataaagaaaattccttaaccttt

SEQ ID NO: 354900 - DNA, 120 bp, Artificial Sequence
  ENSG00000139644_23 (sequence is synthesized)
agaagcgctggtaggccttggagaggcgggttaggaagacgcagggccccttggcctagcttcgatcgttcgaattcagagcacgtccttccgaggtgaaggaacgcgaaactccaccca

SEQ ID NO: 354901 - DNA, 120 bp, Artificial Sequence
  ENSG00000139644_24 (sequence is synthesized)
tccgattgctgttcggctgcgggcgggtcctttggtcgggctgaccctgggtgagcggcccggagccaagactcgagagtggagactgctgcacggactctggaaccatgaacatatttg

SEQ ID NO: 354902 - DNA, 120 bp, Artificial Sequence
  ENSG00000139644_25 (sequence is synthesized)
ctcagaggagagagcaacaaccttagtaggttctgcagcttctcactgtatctgtccttaagaacagaattaacaaaagttctgagagtggagactgctgcacggactctggaaccatga

SEQ ID NO: 354903 - DNA, 120 bp, Artificial Sequence
  ENSG00000139644_26 (sequence is synthesized)
acagtgctgaagcgggggtggggcggaggcgagtctgcgggggttttggggggtgtcgaggcctctattctgccccagagcgctggcgaaggccccttctcagcccgccttttcctttct

SEQ ID NO: 354904 - DNA, 120 bp, Artificial Sequence
  ENSG00000139644_27 (sequence is synthesized)
tcagttacttagccaacggcagaggcgggaagtgagaggagtctggggctggggctgccttccaggcccacggggcggccccgctcttttcggattggttacctttgggcagagtggaga

SEQ ID NO: 354905 - DNA, 87 bp, Artificial Sequence
  ENSG00000139644_28 (sequence is synthesized)
agagcacatccggtgttagaagcgctggtaggccttggagaggcgggttaggaagagacagggtttcggtcaaagtgatccacctgc

SEQ ID NO: 354906 - DNA, 120 bp, Artificial Sequence
  ENSG00000139644_29 (sequence is synthesized)
acaggcgtgagccactgtgcccaacctgtaagtcatttttgagtcaacgatatttttaatttacaatgggtgtatccagatgtaagccatcgcaaatcaaggagtgtaccgaatgagtat

SEQ ID NO: 354907 - DNA, 120 bp, Artificial Sequence
  ENSG00000139644_30 (sequence is synthesized)
ttctagcaacttgtgaatgtgtaacccagtagaagggctgactgtgcttgaaacagacaaggattttaaggtcaaagagtggagactgctgcacggactctggaaccatgaacatatttg

SEQ ID NO: 354908 - DNA, 120 bp, Artificial Sequence
  ENSG00000139644_31 (sequence is synthesized)
tcagccggcatcgaatcaccgcggttcccagagggcgtgaggggctggcgtggacacaccgggaatggaccgtaccctttttcaaaaggaactcatgatgtatacaaatagaatgctctt

SEQ ID NO: 354909 - DNA, 120 bp, Artificial Sequence
  ENSG00000139644_32 (sequence is synthesized)
atgacatctctaccaagtctgattgagaacatctctgtgagcacatagtattctaacatctctatcatcataccatgaaatcatcagagtggagactgctgcacggactctggaaccatg

SEQ ID NO: 354910 - DNA, 68 bp, Artificial Sequence
  ENSG00000139644_33 (sequence is synthesized)
tggagactgctgcacggactctggaaccatgaacatatttgatcgaaagatcaactttgatgcgcttt

SEQ ID NO: 354911 - DNA, 120 bp, Artificial Sequence
  ENSG00000139644_34 (sequence is synthesized)
cccattttcactttctccactagaggcagcagcgcaccgtgaccctggcttactacgagtggagactgctgcacggactctggaaccatgaacatatttgatcgaaagatcaactttgat

SEQ ID NO: 354912 - DNA, 120 bp, Artificial Sequence
  ENSG00000139644_35 (sequence is synthesized)
tctttctgggaggtaagtgtgaactgggaaacagggaatgggggctcctttttagccagaattctcactagtactccttccttacccctaactcctttgcgactattgagttgagattaa

SEQ ID NO: 354913 - DNA, 120 bp, Artificial Sequence
  ENSG00000139644_36 (sequence is synthesized)
ccttcattctgggggaagttaaggaatggctttaatgggattgctttactttgccttggcttctctcaagacagctttttgctgtgtcttataggtatcttgatgtcagccctgagcttg

SEQ ID NO: 354914 - DNA, 120 bp, Artificial Sequence
  ENSG00000139644_37 (sequence is synthesized)
cacttctttctttccttttttttttttttttgcacttctttctgtactactttgggcagtgctctctaagccttcccattatccttcataggatggagccttctgccacaagtgaaaaca

SEQ ID NO: 354915 - DNA, 120 bp, Artificial Sequence
  ENSG00000139644_38 (sequence is synthesized)
ggctgcacaaggttgggcattgctaagagaaaatggtttgctcagacaccatttgtgtaaggccagtctggcagtggctgattgttaaaatgattgaaactcttccagtgaccagtgcag

SEQ ID NO: 354916 - DNA, 120 bp, Artificial Sequence
  ENSG00000139644_39 (sequence is synthesized)
tattgtgcctagggaagtaaagtggtcttcaccctaggctgcagttctcgtgaatggtaatgttcatagggttcacatttgatgtactttcaagtgactatgagccagaaagtatggctg

SEQ ID NO: 354917 - DNA, 120 bp, Artificial Sequence
  ENSG00000139644_40 (sequence is synthesized)
aggttagttagcctacaacccaaagatgagacaataatggctcctgagcttggcatgtgtgtatacttcagatttgaaaacttgctcacacactgtgttaggtccagggtaactgtaagg

SEQ ID NO: 354918 - DNA, 120 bp, Artificial Sequence
  ENSG00000139644_41 (sequence is synthesized)
caggccactgagtaagaggtaagccagaagtcttcagttgttagaaaaaaagcagcaagtgaaaaaaaaatttttttaactaattcctgcgtttagtatgaaagggaaaaaagcttcagt

SEQ ID NO: 354919 - DNA, 120 bp, Artificial Sequence
  ENSG00000139644_42 (sequence is synthesized)
ggcagtaaacacaacctgctacatgaataatttaaaggctatatagttgtgactcagagaaaggtattgtggaggacgttgtaaatttcagaagtagactaattttatccatttgttaat

SEQ ID NO: 354920 - DNA, 120 bp, Artificial Sequence
  ENSG00000139644_43 (sequence is synthesized)
gaaggtacgtctgaacctagtactgggcgaactgggagtgagaaatggaaagggagttagcagttactgtctgagcaagagtggcagtagcttccttctgcggacagatggcaccctgaa

SEQ ID NO: 354921 - DNA, 120 bp, Artificial Sequence
  ENSG00000139644_44 (sequence is synthesized)
agagcacatccggtgttagaagcgctggtaggccttggagaggcgggttaggaagtagagacgggcttttgccaagttgtccagcctggtctcgaactccacacctcaagcgattcgccc

SEQ ID NO: 354922 - DNA, 120 bp, Artificial Sequence
  ENSG00000139644_45 (sequence is synthesized)
gccttgacctcccaaattgctaggattacaggtgtaatcctttcctaaagaaaaagagtcatctctcctgaagaataagaaaagagtggagactgctgcacggactctggaaccatgaac

SEQ ID NO: 354923 - DNA, 120 bp, Artificial Sequence
  ENSG00000139644_46 (sequence is synthesized)
catcaggtaatgtaaactccttcagggaaggtaggtattcctgatgtctagctatagacccactccatgtctgttacatgcttgttgaacaaatgaatgcctttccacagtcccattttt

SEQ ID NO: 354924 - DNA, 90 bp, Artificial Sequence
  ENSG00000139644_47 (sequence is synthesized)
cttgttgaacaaatgaatgcctttccacagtcccatttttcccacatgatagaagatggcttttttgagacagagtcactctgtggtgca

SEQ ID NO: 354925 - DNA, 120 bp, Artificial Sequence
  ENSG00000139644_48 (sequence is synthesized)
tgggcgagtcagagcacatccggtgttagaagcgctggtaggccttggagaggcgggttaggaagagtttctaaccaaactgcatgcagcccttcgtagtttttatacacattttgtttt

SEQ ID NO: 354926 - DNA, 120 bp, Artificial Sequence
  ENSG00000139644_49 (sequence is synthesized)
ccaaagatggtgttcgagaccaaggagagaaaggctgtctccttgacttaaaggttacctaagtgaccccttgagagtggagactgctgcacggactctggaaccatgaacatatttgat

SEQ ID NO: 354927 - DNA, 120 bp, Artificial Sequence
  ENSG00000139644_50 (sequence is synthesized)
cttgggcctacttgctggacctgtggtaacaagtaggctttggtatctttgtatatttactgagtgtagaattactacccggtgccagcccgggctgcttggggtcatcagcctttcatt

SEQ ID NO: 354928 - DNA, 120 bp, Artificial Sequence
  ENSG00000139645_0 (sequence is synthesized)
cctgggccgctccgtgtccccggtggagccgccgccgccgccgccgggagctcgatgcggacggagcccgggccgagccatggggatcctcagcatcacggaccagccgcccctggtcca

SEQ ID NO: 354929 - DNA, 120 bp, Artificial Sequence
  ENSG00000139645_1 (sequence is synthesized)
gatcctcagcatcacggaccagccgcccctggtccaggccatctttagccgagatgtggaggaagtgcgttccctactctcgcagaaggagaacatcaatgtgctggaccaagagaggcg

SEQ ID NO: 354930 - DNA, 120 bp, Artificial Sequence
  ENSG00000139645_2 (sequence is synthesized)
aactccattgcatgctgctgcctacgtaggcgatgtccccatcctccagttgctactgatgtcaggtgctaatgtcaatgctaaggacacactgtggctgacccctcttcatcgtgctgc

SEQ ID NO: 354931 - DNA, 120 bp, Artificial Sequence
  ENSG00000139645_3 (sequence is synthesized)
tgcctcccgaaacgagaaggtgctggggctgctgctggcacattcagcagatgtgaatgcccgggacaagctgtggcagacaccactgcatgtggctgctgccaaccgggccaccaagtg

SEQ ID NO: 354932 - DNA, 120 bp, Artificial Sequence
  ENSG00000139645_4 (sequence is synthesized)
tgctgaggctctggcacccctgttgagcagcctcaacgtggctgacaggagcgggcgcagtgctctgcaccatgcagtgcatagtgggcatcttgagacggtgaacctgctcctcaacaa

SEQ ID NO: 354933 - DNA, 120 bp, Artificial Sequence
  ENSG00000139645_5 (sequence is synthesized)
gggagccagcctgaatgtctgtgacaaaaaggagcggcagcctctgcattgggcagcttttctagggcacttggaggtcctaaaactgctggtggcacggggagcagacctcggctgcaa

SEQ ID NO: 354934 - DNA, 120 bp, Artificial Sequence
  ENSG00000139645_6 (sequence is synthesized)
ggaccgcaagggctatgggctgctccatacagctgctgccagtggccagattgaagtggtgaagtacctgcttcggatgggagcggagatcgatgaacccaatgcttttggaaacacagc

SEQ ID NO: 354935 - DNA, 120 bp, Artificial Sequence
  ENSG00000139645_7 (sequence is synthesized)
tttgcacatcgcctgctacctgggccaggatgctgtggctattgagctggtgaatgccggagccaatgtcaaccagccgaatgacaagggcttcacgccactgcatgtggctgcagtctc

SEQ ID NO: 354936 - DNA, 120 bp, Artificial Sequence
  ENSG00000139645_8 (sequence is synthesized)
caccaatggcgctctctgcttggagctactggttaataatggggctgacgtcaactaccagagcaaagaagggaaaagtcctctgcacatggctgcaatccatggccgtttcacacgctc

SEQ ID NO: 354937 - DNA, 120 bp, Artificial Sequence
  ENSG00000139645_9 (sequence is synthesized)
ccagatcctcatccagaatggcagcgagattgattgtgccgacaaatttgggaacacgccactgcatgtggctgctcgatatggacacgagctgctcatcagcaccctcatgaccaatgg

SEQ ID NO: 354938 - DNA, 120 bp, Artificial Sequence
  ENSG00000139645_10 (sequence is synthesized)
cgcagataccgcccggcgtggcatccatgacatgttccccctgcacttagctgttctctttggattctctgactgttgtcgtaagcttctttcctcaggtcagttgtacagcattgtgtc

SEQ ID NO: 354939 - DNA, 120 bp, Artificial Sequence
  ENSG00000139645_11 (sequence is synthesized)
ttcactcagcaatgagcatgtgctttcagctgggtttgacatcaatacacctgacaaccttggccgtacctgtcttcatgctgctgcttccggagggaatgttgaatgtcttaatttgct

SEQ ID NO: 354940 - DNA, 120 bp, Artificial Sequence
  ENSG00000139645_12 (sequence is synthesized)
gttgagcagtggagctgacttgaggaggagggacaaatttggcaggaccccactgcactatgcagctgctaacggtagctaccagtgtgcagtaacattggtgactgctggggcaggtgt

SEQ ID NO: 354941 - DNA, 120 bp, Artificial Sequence
  ENSG00000139645_13 (sequence is synthesized)
caacgaggccgactgtaaaggctgctctcccctccactacgctgccgcttctgacacttacaggagagcggaaccccatacaccttccagccatgatgccgaagaggacgagccactgaa

SEQ ID NO: 354942 - DNA, 120 bp, Artificial Sequence
  ENSG00000139645_14 (sequence is synthesized)
ggagtcccgcaggaaggaggccttcttctgtctggagttcttactggataacggtgcagacccctccctgcgggacaggcagggctacacagctgtgcactatgcagccgcctatggcaa

SEQ ID NO: 354943 - DNA, 120 bp, Artificial Sequence
  ENSG00000139645_15 (sequence is synthesized)
cagacagaacctcgaactgctcttagaaatgtcctttaactgcctggaggatgtggagagcaccattccagtcagccctttgcacttagctgcctacaacggtcactgtgaagccttgaa

SEQ ID NO: 354944 - DNA, 120 bp, Artificial Sequence
  ENSG00000139645_16 (sequence is synthesized)
gacgctggcggagacgctggtgaatctggacgtaagggaccacaagggccggaccgcactcttcctggccacggagcgcggctctactgagtgtgtggaggtgcttacagcccacggcgc

SEQ ID NO: 354945 - DNA, 120 bp, Artificial Sequence
  ENSG00000139645_17 (sequence is synthesized)
ctctgccctcatcaaggagcgcaagcgcaagtggacacccctgcacgctgctgctgcctctggccacactgactccctgcacttgctgatcgacagtggggaacgagctgacatcacaga

SEQ ID NO: 354946 - DNA, 120 bp, Artificial Sequence
  ENSG00000139645_18 (sequence is synthesized)
tgtcatggatgcctatggacagaccccactgatgctggccatcatgaatggccatgtggactgtgtacatctgctgctagagaaaggatccacagctgatgctgctgacctccggggccg

SEQ ID NO: 354947 - DNA, 120 bp, Artificial Sequence
  ENSG00000139645_19 (sequence is synthesized)
cactgccctccaccgcggggcagtgactggctgtgaggactgcctggctgccctgctggaccacgacgcatttgtgctgtgccgagactttaagggccgcacgcccattcacctggcctc

SEQ ID NO: 354948 - DNA, 120 bp, Artificial Sequence
  ENSG00000139645_20 (sequence is synthesized)
agcctgtggccacactgcagtactgcggaccctgctgcaggctgccctttccacagatcccctggatgccggggtggattacagcggatactcgcccatgcactgggcctcctacactgg

SEQ ID NO: 354949 - DNA, 120 bp, Artificial Sequence
  ENSG00000139645_21 (sequence is synthesized)
acatgaagattgtctggagttgttacttgaacacagcccgttttcgtacctggaaggaaaccccttcactcctttgcactgtgcagtgattaataaccaagacagcaccacagagatgct

SEQ ID NO: 354950 - DNA, 120 bp, Artificial Sequence
  ENSG00000139645_22 (sequence is synthesized)
actgggagctctgggtgccaagattgtgaacagccgagatgccaaaggacggaccccccttcacgccgctgccttcgcggacaatgtctctgggctccggatgctgctgcagcatcaagc

SEQ ID NO: 354951 - DNA, 120 bp, Artificial Sequence
  ENSG00000139645_23 (sequence is synthesized)
tgaggtgaacgccactgaccacactggccgcactgcgctcatgacggcggctgagaacgggcagaccgctgctgtggaatttctgctgtatcgagggaaggcagaccttactgtgttgga

SEQ ID NO: 354952 - DNA, 120 bp, Artificial Sequence
  ENSG00000139645_24 (sequence is synthesized)
tgagaacaagaacacggccctccacttggcttgtagcaagggccatgagaaatgtgccctcatgatcctggcagaaacccaagaccttggccttatcaatgctaccaacagtgcgctgca

SEQ ID NO: 354953 - DNA, 120 bp, Artificial Sequence
  ENSG00000139645_25 (sequence is synthesized)
gatgccactccacattgctgcccggaatggtctagcttctgtggtacaggccctgctgagtcatggggccacagtgctggctgtggatgaagaaggtcacaccccagcactggcctgtgc

SEQ ID NO: 354954 - DNA, 120 bp, Artificial Sequence
  ENSG00000139645_26 (sequence is synthesized)
ccccaacaaagatgtggcagactgcctggccttgatcctttccaccatgaagcctttcccacccaaggacgccgtcagtcctttcagcttcagcctgctcaagaactgcagcattgcagc

SEQ ID NO: 354955 - DNA, 120 bp, Artificial Sequence
  ENSG00000139645_27 (sequence is synthesized)
cgccaagacggtgggtggctgcggcgccctgccccatggggcctcctgcccctacagccaggagcggcccggcgccattgggttagatggctgctactctgagtagccccctccagtgtc

SEQ ID NO: 354956 - DNA, 120 bp, Artificial Sequence
  ENSG00000139645_28 (sequence is synthesized)
cctcccccgccggtggcttgatatctaattctatttatttagaaaaagtctaaacatttagggcactttaaaggagaacacgactgggtggagggggcggaggggaaggaagccctgggg

SEQ ID NO: 354957 - DNA, 120 bp, Artificial Sequence
  ENSG00000139645_29 (sequence is synthesized)
agcagctgctcacccctttgccacaccatcttggcctggcaggggtctgggactgacagggagcaccccaggcccttggtacccccagggcgaccccttctgccaagtgtcccaaaatga

SEQ ID NO: 354958 - DNA, 120 bp, Artificial Sequence
  ENSG00000139645_30 (sequence is synthesized)
ttgctaaatgcctggctcccccactctttgactccatctcttggttccctctttctgctgccagctcccccgactcttccctggggactcctctctgtgtcccccttctcccctgcccct

SEQ ID NO: 354959 - DNA, 120 bp, Artificial Sequence
  ENSG00000139645_31 (sequence is synthesized)
actgccaggcagatcccctcttcttccatacccatcactgcctccctgctcggccggtccctccatccccgcagcagtgagaagccttaatttctggtactgtgtgagcactctgggggt

SEQ ID NO: 354960 - DNA, 120 bp, Artificial Sequence
  ENSG00000139645_32 (sequence is synthesized)
gtccccctccccccttcaggggcagctagaggatgaggggggaggatatttagcactggggcctggagctttttccccacttctgtaccctatcacccctaaagttcaaatgcaaaacac

SEQ ID NO: 354961 - DNA, 120 bp, Artificial Sequence
  ENSG00000139645_33 (sequence is synthesized)
ttgaagcagcaactactgtacctgggccccaatcctgcactctcccctggctcctcatatgcaaatcaagggctggttctgcccccacagcctgccccctccccattccctcccactcct

SEQ ID NO: 354962 - DNA, 120 bp, Artificial Sequence
  ENSG00000139645_34 (sequence is synthesized)
agcctggcccctaaccacgcactttaaccttgcttctttcttttatcttcttttgggagggcagagcctgtggtcattcctgccctggctctccttcccttgaactttgaggcttgtcat

SEQ ID NO: 354963 - DNA, 120 bp, Artificial Sequence
  ENSG00000139645_35 (sequence is synthesized)
gaatttttaagtaagcgttttatcctttaggggaagaaacaaattaatttcctgcccatttcaaaaccacagccctagtatgtccactgtgtttcaggcatgtgtttgcatgtatatgga

SEQ ID NO: 354964 - DNA, 120 bp, Artificial Sequence
  ENSG00000139645_36 (sequence is synthesized)
gtttatctgtgctccctatctgcctccaccttccgttatgtccaagagtacccactgccccagtcactcctgatctgaagccaaagatggtaggaggggcagggccgacaagggaccgtg

SEQ ID NO: 354965 - DNA, 120 bp, Artificial Sequence
  ENSG00000139645_37 (sequence is synthesized)
gctactcgggacccaggcttcccctccagtgtgaggaagaagctctgacctagagagagatgaataggtactggggcttggtccctgccttcccagcagggaggaaagatgggattgagc

SEQ ID NO: 354966 - DNA, 120 bp, Artificial Sequence
  ENSG00000139645_38 (sequence is synthesized)
tgggggctgcactgataagatttctaaagtcgcaccccaaaagccaaactgggctggagtgaagagggggcagttttctctctaaatgtagcattgaatttggccctggtccctttaagt

SEQ ID NO: 354967 - DNA, 120 bp, Artificial Sequence
  ENSG00000139645_39 (sequence is synthesized)
gctctgtccacccatctcctagtgcagcctcctggacagttggacccactcctgcagcccagtgttcccttcctcacactcaatacctcagccaggggccaagacacagaacttgaatag

SEQ ID NO: 354968 - DNA, 120 bp, Artificial Sequence
  ENSG00000139645_40 (sequence is synthesized)
aggtcatgccccctccgcccccacactgcatccttgcccagtttggctgccatcagtattgtcccctgagaactggacaggcttcgtttacacagtacagggtctcccctgaggggggat

SEQ ID NO: 354969 - DNA, 120 bp, Artificial Sequence
  ENSG00000139645_41 (sequence is synthesized)
ccttcagcctccctcccctactcaagtttgctttattcacagtcttacccatcttttagttgtataccctgaatgtcttgccacccttgtcaagggtgggctgaggggaggggggcgtcc

SEQ ID NO: 354970 - DNA, 120 bp, Artificial Sequence
  ENSG00000139645_42 (sequence is synthesized)
cagggaccccctccctccccaacggatacctttaaccatacctcatgctggtttccagaagcctggggtgttgtccaagtccttatcttttcatggtcccttttgatcccctgtctctct

SEQ ID NO: 354971 - DNA, 120 bp, Artificial Sequence
  ENSG00000139645_43 (sequence is synthesized)
gtgttttgcttctcccaaccctcagttcctaaatcatttcaaggcttccaaatgaccattattgatgagaaggattgtgcagcttttagtttttatttttattttcaaagccaaagggcc

SEQ ID NO: 354972 - DNA, 120 bp, Artificial Sequence
  ENSG00000139645_44 (sequence is synthesized)
ttgtgacgcccctcttgcccacctccctccacaccgtgtcctcccctatatgacaatcaatgtgacctctcttaagggctgcagcccccatccccaaccctgctggctctgcaaagcttg

SEQ ID NO: 354973 - DNA, 120 bp, Artificial Sequence
  ENSG00000139645_45 (sequence is synthesized)
ccttcccttcaattctctctcctgaaatcttcccattccaccccctccctctcatcttggtgctgggaattaggtggtggggggcaaggggagtgagaagatgggtcctccagagagaac

SEQ ID NO: 354974 - DNA, 120 bp, Artificial Sequence
  ENSG00000139645_46 (sequence is synthesized)
ttgccgggtgtgagtcgtgttctcctttcgtgatgtttggtgatggcgggaagcgtctgagtgtcagagccccgttgtcttgctagatgagatttctgggggctgtctgcgccctgctgc

SEQ ID NO: 354975 - DNA, 120 bp, Artificial Sequence
  ENSG00000139645_47 (sequence is synthesized)
cctcagcgcactgtcagcagtgctgggaggtggtggggagtcctctgtccctccatatgtggctgtgaggaagcctgggggacaagcagcctcctctccttatgccaaaggaaaccccac

SEQ ID NO: 354976 - DNA, 120 bp, Artificial Sequence
  ENSG00000139645_48 (sequence is synthesized)
gccccaccctgggctccccagccctagtgttttttgaagcattttgaccattctcatggccactgcatatttattttaatgttaagattttttttaaacctctttgacttaaacgggtgt

SEQ ID NO: 354977 - DNA, 120 bp, Artificial Sequence
  ENSG00000139645_49 (sequence is synthesized)
ggagaagtaaaacaggcagaatgccccccagtcttcatgggggagggcggggagggaacagcgccttccctttgccctccccctcccccctctccccaccgcagccctaaagcacttgct

SEQ ID NO: 354978 - DNA, 120 bp, Artificial Sequence
  ENSG00000139645_50 (sequence is synthesized)
tcaagtaataagcacttttgtgaaaaggcctattttaagcgaggaccctgggagcagccccaggtcccagcaaaggaaacagagcgagggcgacataggagacagggaaacagacgtgtg

SEQ ID NO: 354979 - DNA, 120 bp, Artificial Sequence
  ENSG00000139645_51 (sequence is synthesized)
aatcagagggtgagatggaaagagccagtttttagtttctgattttgggggagctatttctgattgggcggtggctctggtagggtcatatactatccttcagaaaaacgaatggcacaa

SEQ ID NO: 354980 - DNA, 120 bp, Artificial Sequence
  ENSG00000139645_52 (sequence is synthesized)
accgtgggtcccaggaaggaccagcagacccgggtcactgccactgtccactgagactgacgggccacctcccctgccccgtggccccctgagccataggactgctgaaaaccactgaat

SEQ ID NO: 354981 - DNA, 120 bp, Artificial Sequence
  ENSG00000139645_53 (sequence is synthesized)
gtacagcccaggttggggtggggagcagcccctgggggagggggcttctccttttgtttggtgctgtggggcgtgggagagaaaagactgagggactgccaccccacgtagatgtgtttc

SEQ ID NO: 354982 - DNA, 120 bp, Artificial Sequence
  ENSG00000139645_54 (sequence is synthesized)
ttggggtggaggggctgaggagggcctacctccctctccaaccccagccatggcccctcttccttcctcacccctatccgttttgactgtaagtccagctcacctttgccttcaatatgt

SEQ ID NO: 354983 - DNA, 120 bp, Artificial Sequence
  ENSG00000139645_55 (sequence is synthesized)
aaccaaaggaaaactcaatactgtttccaccactgtctgcccacccgagcaccttcttactccctggacctagaaggggagaagaggctggaggtggggtggatggggccagagtgaacg

SEQ ID NO: 354984 - DNA, 120 bp, Artificial Sequence
  ENSG00000139645_56 (sequence is synthesized)
gttctacagctgtatccccagaacctcctccagggtcttggaaggagtcctgagaggtgggattggggccgggctggcagggctgagtttgcgcactgtgtatcttatgcacatgagtgt

SEQ ID NO: 354985 - DNA, 120 bp, Artificial Sequence
  ENSG00000139645_57 (sequence is synthesized)
ttttgtctaaatgactccagtgactgctccagcggggaggccccttcctccttccctctcagccatttctcacccacttcccatacccagtgttcatcccctacctccccttcccaccgc

SEQ ID NO: 354986 - DNA, 120 bp, Artificial Sequence
  ENSG00000139645_58 (sequence is synthesized)
aaaggaaaatagccttacagaccctagcccagaaaccctactcctggggcaaaccagtatgggcccccatcccgcctagtttgaaccctaccttttaagaaggagggataaggaacaaag

SEQ ID NO: 354987 - DNA, 120 bp, Artificial Sequence
  ENSG00000139645_59 (sequence is synthesized)
cagccccttcccctctaattgtggtggctccagccttctgcagccttgacccaggttgggcaagggcggaggtgaggaatctttgaggaccaagcccagtggtctgggaatcgggaggta

SEQ ID NO: 354988 - DNA, 120 bp, Artificial Sequence
  ENSG00000139645_60 (sequence is synthesized)
gagagggaagggtctgccttgggggctccctcctcccaacccaacccctagagaagcgaccaaatcccagagatggggtgaagctggggtggggagggtctgctctttgaattacttgaa

SEQ ID NO: 354989 - DNA, 120 bp, Artificial Sequence
  ENSG00000139645_61 (sequence is synthesized)
ggtactgactccaaggctgctgttgcccacttaggtgtgagggggacactgtcactgcatttgggagggcagagggtggcgggtaaccagaggatccaccttggccctcacccactcctg

SEQ ID NO: 354990 - DNA, 120 bp, Artificial Sequence
  ENSG00000139645_62 (sequence is synthesized)
ctaggccctttccctggggaatctggaagcctgactttgcccccagggaagttggggaccgccttccctcccttctccacctctcactctgggcaccctctccaattgcactaaagtagc

SEQ ID NO: 354991 - DNA, 120 bp, Artificial Sequence
  ENSG00000139645_63 (sequence is synthesized)
tgttgtgccagtctgccccccacaaggggggaggtctctgcttccagtcttcttcccccgctgcctccgctcccaccctggacaatctccttgtttcccttgtgttcctggatagctcag

SEQ ID NO: 354992 - DNA, 120 bp, Artificial Sequence
  ENSG00000139645_64 (sequence is synthesized)
ctttgtatgtgtgtttggggggtgggggtgggttctggcttgagtgggtttggcaggggtttgggaagggttaggggaggatggaggatgaagtctcctacccccttctccagctccagg

SEQ ID NO: 354993 - DNA, 120 bp, Artificial Sequence
  ENSG00000139645_65 (sequence is synthesized)
ccacagaagcctgggaagggagggtgcctactctcgctgctgtgtgtcttgcagatgtgccaaaatgggggtgggtgggaggggagggtgcctggcagagcagcccctggggtggctctc

SEQ ID NO: 354994 - DNA, 120 bp, Artificial Sequence
  ENSG00000139645_66 (sequence is synthesized)
tcaaagcaatatagttcccctgcgggggacagcaagacaggggagagggttggggtggggacctgggggttccccatgtacagctatgtatattcaggggtgttctccgtctggtacccg

SEQ ID NO: 354995 - DNA, 120 bp, Artificial Sequence
  ENSG00000139645_67 (sequence is synthesized)
ctgtgggcatctatgtgtgtgtgaacctccccttccccatgccctgcatgacctgtgatgctgcagacaccaccatcctgtgtgcaggtgtgtgttggggggcacggaggggcatgttcc

SEQ ID NO: 354996 - DNA, 120 bp, Artificial Sequence
  ENSG00000139645_68 (sequence is synthesized)
atgtcctgttgcaccctccaccctgtgacccatgtactcggttgtaggaagtaaagagaactgagcacaattcactggattctagtggaatctttctctaagcaattttcccattcctgc

SEQ ID NO: 354997 - DNA, 120 bp, Artificial Sequence
  ENSG00000139645_69 (sequence is synthesized)
ctctccctgccccggaaccacctgtggtgctagtgttgggatcgggggcgtttaacgctggtgggcagcaataaggggcagatgtgcccagatgcctgcatccccagggtgccgagggca

SEQ ID NO: 354998 - DNA, 120 bp, Artificial Sequence
  ENSG00000139645_70 (sequence is synthesized)
gcaggaaaaagtggggacctcggtgcatttgccccacccctcccctccctgggctaaagcacaatgttctccccgcagattaatgaccctgcaccctccaggcccctactcacatcctcc

SEQ ID NO: 354999 - DNA, 120 bp, Artificial Sequence
  ENSG00000139645_71 (sequence is synthesized)
cccaaccggcttcgggtcctcccaccacactctggttttctatgctgttttggtgcaagtacaactgtcgtagtcatggctttgggatgggttctgtttattaaaatcctattgctccta

SEQ ID NO: 355000 - DNA, 120 bp, Artificial Sequence
  ENSG00000139645_72 (sequence is synthesized)
ctccaggttgttttgctcatggaaaaaggcattaggctgcctcagccttttcaggagatgaggcctctgctcttaggtaggttgagggcacgaatctagctctgaacaggtgtctttcat

SEQ ID NO: 355001 - DNA, 120 bp, Artificial Sequence
  ENSG00000139648_0 (sequence is synthesized)
aaccagcagaaccttttgggattttgccttcctccctcctgcatctgagctttgtctccaccagcaacatgagccgccaattcacctgcaagtcgggagctgccgccaaggggggcttca

SEQ ID NO: 355002 - DNA, 120 bp, Artificial Sequence
  ENSG00000139648_1 (sequence is synthesized)
gtggctgctcagctgtgctctcagggggcagctcatcctccttccgggcagggagcaaagggctcagtgggggctttggcagccggagcctctacagcctggggggtgtccggagcctca

SEQ ID NO: 355003 - DNA, 120 bp, Artificial Sequence
  ENSG00000139648_2 (sequence is synthesized)
atgtggccagtggcagcgggaagagtggaggctatggatttggccggggccgggccagtggctttgctggaagcatgtttggcagtgtggccctggggcctgtgtgcccaactgtatgcc

SEQ ID NO: 355004 - DNA, 120 bp, Artificial Sequence
  ENSG00000139648_3 (sequence is synthesized)
cacctggaggcatccaccaggttaccgtcaatgagagcctcctggcccccctcaacgtggagctggaccccgagatccagaaagtgcgtgcccaggagcgagagcagatcaaggctctga

SEQ ID NO: 355005 - DNA, 120 bp, Artificial Sequence
  ENSG00000139648_4 (sequence is synthesized)
acaacaagttcgcctccttcatcgacaaggtgcggttcctggagcagcagaaccaggtactggagaccaagtgggagctgctgcagcagctggacctgaacaactgcaagaacaacctgg

SEQ ID NO: 355006 - DNA, 120 bp, Artificial Sequence
  ENSG00000139648_5 (sequence is synthesized)
agcccatcctcgagggctacatcagcaacctgcggaagcagctggagacgctgtctggggacagggtgaggctggactcggagctgaggaatgtgcgggacgtagtggaggactacaaga

SEQ ID NO: 355007 - DNA, 120 bp, Artificial Sequence
  ENSG00000139648_6 (sequence is synthesized)
agaggtatgaggaggaaatcaacaagcggacagcagcagagaacgagtttgtgctgctcaagaaggatgtggatgctgcttacgccaataaggtggaactgcaggccaaggtggaatcca

SEQ ID NO: 355008 - DNA, 120 bp, Artificial Sequence
  ENSG00000139648_7 (sequence is synthesized)
tggaccaggagatcaagttcttcaggtgtctctttgaagccgagatcactcagatccagtcccacatcagtgacatgtctgtcatcctgtccatggacaacaaccggaacctagacctgg

SEQ ID NO: 355009 - DNA, 120 bp, Artificial Sequence
  ENSG00000139648_8 (sequence is synthesized)
acagcatcattgacgaagtccgcacccagtatgaggagattgccttgaagagtaaggccgaggctgaggccctgtaccagaccaagttccaagagcttcagctggcagctggcaggcatg

SEQ ID NO: 355010 - DNA, 120 bp, Artificial Sequence
  ENSG00000139648_9 (sequence is synthesized)
ggagacagccatcgctgatgctgagcagcggggagacaacgccctgaaggatgcccgggccaagctggacgagctggagggcgccctgcaccaggccaaggaggagctggcgcggatgct

SEQ ID NO: 355011 - DNA, 120 bp, Artificial Sequence
  ENSG00000139648_10 (sequence is synthesized)
gcgcgagtaccaggagctcatgagcctgaagctggccctggacatggagatcgccacctatcgcaagctactggagagcgaggagtgcaggatgtcaggagaatttccctcccctgtcag

SEQ ID NO: 355012 - DNA, 120 bp, Artificial Sequence
  ENSG00000139648_11 (sequence is synthesized)
catctccatcatcagcagcaccagtggcggcagtgtctatggcttccggcccagcatggtcagcggtggctatgtggccaacagcagcaactgcatctctggagtgtgcagcgtgagagg

SEQ ID NO: 355013 - DNA, 120 bp, Artificial Sequence
  ENSG00000139648_12 (sequence is synthesized)
cggggagggcaggagccggggcagtgccaacgattacaaagacaccctagggaagggttccagcctgagtgcaccctccaagaaaaccagtcggtagagaagactgccccgggccccgcc

SEQ ID NO: 355014 - DNA, 120 bp, Artificial Sequence
  ENSG00000139648_13 (sequence is synthesized)
tcattccatgacccggctctggatcccacactgtacttcccacagcccactctcagctccatctccaccctgctggtcctgctcccatacacctggcactggccttggccacccacttct

SEQ ID NO: 355015 - DNA, 120 bp, Artificial Sequence
  ENSG00000139648_14 (sequence is synthesized)
cccagcctgtgtcttcctgatcctgggaaggcctggatgaccaagcttggtgaaattcctccctgtacacaccctattaactccttggctgtggtcccccagctacaccaccagcccagg

SEQ ID NO: 355016 - DNA, 120 bp, Artificial Sequence
  ENSG00000139648_15 (sequence is synthesized)
tcctggctgccagctttcctcctctgcccggcctctagcgcagtcgctaactactctgctgggctccctgggtctctgcccaaggccccgcacacactgggacctagcatagttcctgcc

SEQ ID NO: 355017 - DNA, 120 bp, Artificial Sequence
  ENSG00000139648_16 (sequence is synthesized)
tatgccaggagctggctctgtgtttaagaaaaggaggactgaaggacaaacaaccaagagtggcccagtccccacccccacatctagctcagtctcaaatctgagtgggaccaagtgcaa

SEQ ID NO: 355018 - DNA, 120 bp, Artificial Sequence
  ENSG00000139648_17 (sequence is synthesized)
ttcagggcctttttctccactcacctgcacccagaagcagagaaaagcaggcactgttcacttttcctttattcttaatggccttcctctgttgcaacctcaataaacagcacaatctca

SEQ ID NO: 355019 - DNA, 120 bp, Artificial Sequence
  ENSG00000139651_0 (sequence is synthesized)
gtaaacttgcctcggtcccggtgggggcagccgcggcggtggggttggcagggtgtgctggggcctggaggaggcgccgcgcggccagggagccagcgggaggccgcgcctggcaggttt

SEQ ID NO: 355020 - DNA, 120 bp, Artificial Sequence
  ENSG00000139651_1 (sequence is synthesized)
ctgaaacagatcgtgagcttcatcaagagaattcaactggaaaaccaagactggtagactctctttttcttcagacaataggcaggagccaggcagagtccagggattcttggaacacct

SEQ ID NO: 355021 - DNA, 120 bp, Artificial Sequence
  ENSG00000139651_2 (sequence is synthesized)
atcttttcttcggaggacactaagttctatttgaagacaaagttcaatatggcaacaggactgatgggacacgaaggagtcgctaccgtgatttggtgacagttcttcaaaacgacagtg

SEQ ID NO: 355022 - DNA, 120 bp, Artificial Sequence
  ENSG00000139651_3 (sequence is synthesized)
tctcaaggaaaggtggacctaggaactcctgaacttttgggttgccttaagtgagaaatcagcatggctcaggcaagtctcctggcttgtgaaggcctagcaggtgtgagtttggttccc

SEQ ID NO: 355023 - DNA, 120 bp, Artificial Sequence
  ENSG00000139651_4 (sequence is synthesized)
actgcagccagcaagaagatgatgctgagccagattgccagcaagcaggccgagaatggcgagcgggcaggtagccctgatgtgctgaggtgctcgagtcagggtcaccgaaaagacagt

SEQ ID NO: 355024 - DNA, 120 bp, Artificial Sequence
  ENSG00000139651_5 (sequence is synthesized)
gataagtcccggagccgcaaagatgatgacagcttgtctgaggcctctcattcaaaaaagactgttaaaaaggtggtggtagtggaacaaaatggttcttttcaagtaaagattcccaaa

SEQ ID NO: 355025 - DNA, 120 bp, Artificial Sequence
  ENSG00000139651_6 (sequence is synthesized)
aattttgtttgtgaacactgctttggagcctttcggagcagttaccacctaaagaggcacatccttattcacactggtgagaagccatttgaatgcgatatatgtgatatgcgtttcatc

SEQ ID NO: 355026 - DNA, 120 bp, Artificial Sequence
  ENSG00000139651_7 (sequence is synthesized)
cagaagtaccacctggaacgccacaagcgtgtgcacagtggtgaaaagccttaccagtgtgaacggtgtcatcagtgtttttctcggacagatcgattactcagacacaaacggatgtgc

SEQ ID NO: 355027 - DNA, 120 bp, Artificial Sequence
  ENSG00000139651_8 (sequence is synthesized)
caagggtgccagtccaagacttccgacgggcagttttctctataggcgcaaggggccccgggtggtgggagtgatcagaagaacctgccgaagagcacaccccctctggtctgatggtcc

SEQ ID NO: 355028 - DNA, 120 bp, Artificial Sequence
  ENSG00000139651_9 (sequence is synthesized)
caccaccgccccatgtgaacctgtcccactcctggaggagtggacccaggagaccagaagagtgcatcaggggacagtggccccagaacctcagctctgtaaataatctgagactatgag

SEQ ID NO: 355029 - DNA, 120 bp, Artificial Sequence
  ENSG00000139651_10 (sequence is synthesized)
tatctcggggaagttcttacagcattcctgggtaggggagctagtccctggacccttggctgaggtcataggtggggactcaaggtacaggaccaagactgaagtgtggctcccacaacc

SEQ ID NO: 355030 - DNA, 120 bp, Artificial Sequence
  ENSG00000139651_11 (sequence is synthesized)
ttggactccagctggcagctgaaatggaaaagattggggaaggggatttgtttgttctgttcttgtttttgtttatccaaaagcaacttcagcgggtaaactgtggatacaggtaatcca

SEQ ID NO: 355031 - DNA, 120 bp, Artificial Sequence
  ENSG00000139651_12 (sequence is synthesized)
gaggcataagagtcctggtccaaagtagggactatagctggtccagctctccccaaaaattgggtttttagttgcagtagctcctcagtgtttcacaatcctgcacttcgcctccttttt

SEQ ID NO: 355032 - DNA, 120 bp, Artificial Sequence
  ENSG00000139651_13 (sequence is synthesized)
gaggaagaataaggtcaggaatggcagctgagcttactttggcttccttatacactgtagggacaaaaggaaaaacggggtggagcagacaagggctggatccaaaaagtggatggcacc

SEQ ID NO: 355033 - DNA, 120 bp, Artificial Sequence
  ENSG00000139651_14 (sequence is synthesized)
tcttccttcctcaagggaaaaggaagagttgtgccagtgggtgttgtcatggcccatgtcacattggcacctgatggcatcagctcaaatgcctttaggaggaaacttgggtgagagtgg

SEQ ID NO: 355034 - DNA, 120 bp, Artificial Sequence
  ENSG00000139651_15 (sequence is synthesized)
cccatgaagcccttttcttctttttttggggagtcggtcttggagatggtatgtggctacctcgctgccattgactcctaaagtgagacagatgtgttgagcaaggagtcatggaagtca

SEQ ID NO: 355035 - DNA, 120 bp, Artificial Sequence
  ENSG00000139651_16 (sequence is synthesized)
aagtgggttctctctccttgtgccctcttaggaacaacccaagactggtcccaagttggctaacagctgctcaagaaacaaaggaatctggggtcttctgacatgcctgttgagcagtag

SEQ ID NO: 355036 - DNA, 120 bp, Artificial Sequence
  ENSG00000139651_17 (sequence is synthesized)
gagctgttctccctccccaagtcctatcactgtattcaggtagaggaggtagggaggggtctgtcctttggtcccaaaaaacaagatctcggcttgcttcctgatggccatccctaccca

SEQ ID NO: 355037 - DNA, 120 bp, Artificial Sequence
  ENSG00000139651_18 (sequence is synthesized)
acagagtgtgggggatgggggtgggggtgctgcagagaaaagactaaagaagaaacctaatgtaggttccattcttaaccatattctttgctcctctctgctccaataccaccaccttgt

SEQ ID NO: 355038 - DNA, 120 bp, Artificial Sequence
  ENSG00000139651_19 (sequence is synthesized)
ccactcccaaaaaagtaatcgggtgtgtgtgtgtgtgtgagagagagtgtgtgtgagatatgaatgcatgtatttgtatgcttgcaggagatggcatattattgagccaaacccttctct

SEQ ID NO: 355039 - DNA, 120 bp, Artificial Sequence
  ENSG00000139651_20 (sequence is synthesized)
ggccctcaccttcagggaggatgagtggaaaatagcctcctcttgcccaaacatgaagggtgcttgaggtctcagcaggagctgaagaacacaatttggggaacagaagggcttttgttt

SEQ ID NO: 355040 - DNA, 120 bp, Artificial Sequence
  ENSG00000139651_21 (sequence is synthesized)
tggagggtttttttttttaagatgaattcaacagcctggtggttaggatgtttctaacccaagccagggcttgtgaacatgaattttctaaggtgaaataaaccttttctttctgctaaa

SEQ ID NO: 355041 - DNA, 120 bp, Artificial Sequence
  ENSG00000139651_22 (sequence is synthesized)
gaaagaatccttatgggaagttttggggtttggttgacccccactgtaacctgacctgacctgtggcgggtacgggaactgtcttagtaatcatggagactggctgaacctgagtgccaa

SEQ ID NO: 355042 - DNA, 120 bp, Artificial Sequence
  ENSG00000139651_23 (sequence is synthesized)
gctgtcagtagggtctgagatgggaaactcctgaaagtatgatttcatttcccagaaaatgtaaagaatggataccagcaatgattcctggctgttacctattctggaggggtggggttg

SEQ ID NO: 355043 - DNA, 120 bp, Artificial Sequence
  ENSG00000139651_24 (sequence is synthesized)
gggagggggttgtccatacctctgtggtatgagtatttcagggaaaaagaaagcaggcatggcacccattcgattttccctgacagcatctgagatccttttggggagacgctgaggagt

SEQ ID NO: 355044 - DNA, 120 bp, Artificial Sequence
  ENSG00000139651_25 (sequence is synthesized)
gtttgctgccatgtactcttacagctctatgctgacactcccatttgatgtggtccagaacttagacctcagtccttggatcagccctgtggtccctgcaagcaggggcatctttctgca

SEQ ID NO: 355045 - DNA, 120 bp, Artificial Sequence
  ENSG00000139651_26 (sequence is synthesized)
tgtgagccagcccccttcctgttcaagggttctgctggatctgggcttttcctgtccttcacttctgggatgattcaccccacatcttccagtaccctgtaaaccattttaaaatattta

SEQ ID NO: 355046 - DNA, 120 bp, Artificial Sequence
  ENSG00000139651_27 (sequence is synthesized)
gaaaactatcctcccaaaaatgcttttgaaaatgagagccctctgtccctgccacttacagctagtctctttgggataggggtgtatgtggagagattcatgtaagtctcacatgagtga

SEQ ID NO: 355047 - DNA, 120 bp, Artificial Sequence
  ENSG00000139651_28 (sequence is synthesized)
cctgtgcccctatgtgtactaatgtgtgtactgggtcagaaggtgccctgggttcccacagaccttggtttcctgcctgggtgggtgggagggagggaacttcagagagtatgtgcgaac

SEQ ID NO: 355048 - DNA, 120 bp, Artificial Sequence
  ENSG00000139651_29 (sequence is synthesized)
agccatagcagagccacccctgccaaggacccagtgagggaaactcaggagcaggtggttggttcagttcccgcgctgatgtctggggcagtgcatgtgtgagaagagaggcgcaaagca

SEQ ID NO: 355049 - DNA, 120 bp, Artificial Sequence
  ENSG00000139651_30 (sequence is synthesized)
gtgaaaggagtgatttggcatccagagggcccgggagccccacggataccccagggaagccactgactcacaccgctgcagaggctcctgggcccaatgcccgacccctgctggccagca

SEQ ID NO: 355050 - DNA, 120 bp, Artificial Sequence
  ENSG00000139651_31 (sequence is synthesized)
tggggcctagcactggaagatgcctcaggtgtgtttggagtgggggaaacggaagtagggcacgctctcagagaccaggatagagagtcagggaacctgggaaagagtagtgccagttcc

SEQ ID NO: 355051 - DNA, 120 bp, Artificial Sequence
  ENSG00000139651_32 (sequence is synthesized)
gggtaggctgctgcaccaggccctaccagctcaggctataaacagtctgctttgccccaagtcttttccgtccacccccaacagccttgtcatcacttagctactgatcacgcccatggc

SEQ ID NO: 355052 - DNA, 120 bp, Artificial Sequence
  ENSG00000139651_33 (sequence is synthesized)
ttgacattggagggttacattagtggagtccgccacagcttcgaaccctctccccagatgccctttgcctctgctgtggccctggggttttatcaactgtccccttcctatcctcctctc

SEQ ID NO: 355053 - DNA, 120 bp, Artificial Sequence
  ENSG00000139651_34 (sequence is synthesized)
caccctgttttttgttttttttttttttaaataatattttgctatgggggaggggaatatcaaatggacaagatcacttttaaatggtagtttttataagatgttataaacttgtatctt

SEQ ID NO: 355054 - DNA, 120 bp, Artificial Sequence
  ENSG00000139651_35 (sequence is synthesized)
tatttaggatatttaaataaaaggaaaatggggcttttctacatactatctcctctttggggaagctttttcatactggttttagttgttttccttttttctccctacataatcacccca

SEQ ID NO: 355055 - DNA, 120 bp, Artificial Sequence
  ENSG00000139651_36 (sequence is synthesized)
caacttccagcaccctataagccattttaaaaccccttctccacagaggaacaagcaagtaggagcaaaaacagggcatcagttctgagcaagacgaaaaagcacacgcagcaggacgga

SEQ ID NO: 355056 - DNA, 120 bp, Artificial Sequence
  ENSG00000139651_37 (sequence is synthesized)
aggaggctagacaccaacagatgcagtgtctctgacctgggacccccctgcatccgcagcacttgagaattcataggccctttccagacctggcttcctgggtcccagggtgcaccccgg

SEQ ID NO: 355057 - DNA, 120 bp, Artificial Sequence
  ENSG00000139651_38 (sequence is synthesized)
gagtttcctgcacattcgcgcttgggcacctctccctgccctcaggtggcaagaggaggatggacaagagctttcccgaggcccaggctataaacagtctgctttggccttgatgaggta

SEQ ID NO: 355058 - DNA, 120 bp, Artificial Sequence
  ENSG00000139651_39 (sequence is synthesized)
aagcaaagtgacagctgtggtctgaggtaagactttattgtatacttgggtggggtagcccagatggatgcaaggttgcaggcatgggaagcagccctcttgggtgtcactctgaaaatg

SEQ ID NO: 355059 - DNA, 120 bp, Artificial Sequence
  ENSG00000139651_40 (sequence is synthesized)
aagtagggtggtggccgcacctcgccagtgaattagtcccctaccaaggtcttacagacccacccttcctctcaccctccagttcccactgtcctccaaggagaagagccttgggtaagt

SEQ ID NO: 355060 - DNA, 120 bp, Artificial Sequence
  ENSG00000139651_41 (sequence is synthesized)
gtccctccctccttcagagagtgggactgtctgcctcttgaaagcgaggattgatggtggtcgtgatggcacttttgtagagaggattactgtcctggagaaagatgttgcagattataa

SEQ ID NO: 355061 - DNA, 120 bp, Artificial Sequence
  ENSG00000139651_42 (sequence is synthesized)
gcaaaaatcccaggattcctcgtcccctttctagacctaagaggccagccttgagccgaatcctaggagctgatggaagttagcagaggggttggttacatgtgccaggggctgggggaa

SEQ ID NO: 355062 - DNA, 120 bp, Artificial Sequence
  ENSG00000139651_43 (sequence is synthesized)
cccagtgggaggaatcagggctggtcttgtggtgggggaacagctaaaaaggggcctaaccaggaagtctcctcacctgcttccagttgagttgttgctgctccttctcaaagcgactgt

SEQ ID NO: 355063 - DNA, 120 bp, Artificial Sequence
  ENSG00000139651_44 (sequence is synthesized)
attcccggcggtcatagatttccaccgagagccggtaagccaggaccagccccagccccactgccacgatgccccctacgcagcccagcacaatggcctgcgtgtggtctgctccctctg

SEQ ID NO: 355064 - DNA, 120 bp, Artificial Sequence
  ENSG00000139651_45 (sequence is synthesized)
tgaacaagaaaccagacacacttgtgggagctggagcatagggacagatcatcagttgctcacagtgtgtccagcctgtccaaccctgtctgtcactgaaagcaaagggaacccagggag

SEQ ID NO: 355065 - DNA, 120 bp, Artificial Sequence
  ENSG00000139651_46 (sequence is synthesized)
gtccaaggttatcctcaccgcccagggccttagcctcgtccacttgctcaattgcctctgcctttgtcctggattcacagttctgcttcagcccccagcctgtttcccattatcttcact

SEQ ID NO: 355066 - DNA, 120 bp, Artificial Sequence
  ENSG00000139651_47 (sequence is synthesized)
ctgcatccccagagttgagaccctgcccatcaaacttccagggtttgtggcatccctgcccacttactttcttggggtctcactctgagcacgaccgtgcctctggcgtcatcctccacc

SEQ ID NO: 355067 - DNA, 120 bp, Artificial Sequence
  ENSG00000139651_48 (sequence is synthesized)
aagaagaagaacagctggttgtccagggtccgctctttgcaccagccatcatccaagataggggccaaggccagggtcacattggtatgggcacaagctgtactgcagttggtggccagt

SEQ ID NO: 355068 - DNA, 120 bp, Artificial Sequence
  ENSG00000139651_49 (sequence is synthesized)
gggccagtcctgaaggccccacactctgcacagtccctgtgtagtagatgccaataggttaccagctgggcagttgtcacccaatgccccttgcccaactacaagcaggacggagagtag

SEQ ID NO: 355069 - DNA, 120 bp, Artificial Sequence
  ENSG00000139651_50 (sequence is synthesized)
gcagatgggagtagctcaacaagccccactgtgcccctgctcccaagatgcaagacctgaggcctcaccggtgtctctcgcatggtgtcttgcagcctgggcattggtcgcatagagcac

SEQ ID NO: 355070 - DNA, 120 bp, Artificial Sequence
  ENSG00000139651_51 (sequence is synthesized)
catagtagccgtccaagcactggcagcggttgcatttgcagcgtccatgcccactgcagagccctccctcgggactgatgcaactgtccatgtccccactgcattcgcatgctctgcccg

SEQ ID NO: 355071 - DNA, 120 bp, Artificial Sequence
  ENSG00000139651_52 (sequence is synthesized)
tgcggttggcatgacagtgacatactccacattggcagcgaccaaagcctggggtagagccatgcagagggtgacaaccatactccacacacacagttggccatcatgtggcacgacaag

SEQ ID NO: 355072 - DNA, 120 bp, Artificial Sequence
  ENSG00000139651_53 (sequence is synthesized)
cccacgcatccaatctttttgaagtatgccaaccacaccctctaacccatacaccggaatcttttgatatttgccttccatgccaggagattcccagagcctaagtgccttgggaaggcc

SEQ ID NO: 355073 - DNA, 120 bp, Artificial Sequence
  ENSG00000139651_54 (sequence is synthesized)
tctcagaccccgcccttctccccaaggctccaggtacctccgcagaggatgccctcatgtcgctcacagctggcatcgtcacactcgcacagatgcccagagctctgtccactgcagctg

SEQ ID NO: 355074 - DNA, 120 bp, Artificial Sequence
  ENSG00000139651_55 (sequence is synthesized)
cagcgtccacattgacagtgaccctttccactgcacaggggccctgtgccattgggagcccggcacccagattccaggtctggggaggacagctctgccacagagcactcacagagccga

SEQ ID NO: 355075 - DNA, 120 bp, Artificial Sequence
  ENSG00000139651_56 (sequence is synthesized)
cctaggcggccaggggcacagctggaaggggaaggcaaaggagagaagtaggtcagagggtttgatcacccctgacttgtctctcccaggaacctctaaacccaagttctcaaaagagtt

SEQ ID NO: 355076 - DNA, 120 bp, Artificial Sequence
  ENSG00000139651_57 (sequence is synthesized)
ggagacagacaaacagctgaaaggatgttaagtatagtgaaacactgaggggtgagagagtggagggagccccagtcagggggagggcctggacatacatgggaagcttcaagggatgaa

SEQ ID NO: 355077 - DNA, 120 bp, Artificial Sequence
  ENSG00000139651_58 (sequence is synthesized)
actgagtggggagtcgggatgtcgaggagactcctgtgggggggatggaaagcagcggaggaatacgggccagggttggttggttgttgggagccaggtggttgaagggaagaggaggcc

SEQ ID NO: 355078 - DNA, 120 bp, Artificial Sequence
  ENSG00000139651_59 (sequence is synthesized)
ctcacctgcatacaccacattgtaggtgtccctggccatcactgcagtggggagcctggggctgggtgtcactgcaattacagtcacacagcgtgtgcaactccacaatcagctcctctg

SEQ ID NO: 355079 - DNA, 120 bp, Artificial Sequence
  ENSG00000139651_60 (sequence is synthesized)
agaagccaagggcccggagcctcaggagatggggctctgggaggcagtgggtggcttggagagaaacccagaaagtcacctgagaagaggcaggaatcaggccatggttatacacatgca

SEQ ID NO: 355080 - DNA, 120 bp, Artificial Sequence
  ENSG00000139651_61 (sequence is synthesized)
cacacacataccccaaactcaccaatcatccagaacctcaccccttagtaaatgaagggatggggtcatgttaacacccaactcctagaaacatgcctgaggaagccactcagactgctc

SEQ ID NO: 355081 - DNA, 120 bp, Artificial Sequence
  ENSG00000139651_62 (sequence is synthesized)
caggaaggatggatggaggactacctcaggctctcatgtcactccctgtacctgccacccatcttttcctgcctgcttaatttcccactcccacctccccctgcccgccttctgcctgtg

SEQ ID NO: 355082 - DNA, 120 bp, Artificial Sequence
  ENSG00000139651_63 (sequence is synthesized)
cttgctggctctcaccgtctggttgattcggacgtggttgcactgtcctcgatcctcagccttaccctccctcttctcaggaccctcacactgggattcgtaagaaatgtggaccccagg

SEQ ID NO: 355083 - DNA, 120 bp, Artificial Sequence
  ENSG00000139651_64 (sequence is synthesized)
agggagtgaagagtgttcaagggtcacggtggaagacaggctctatgggaagagagcgagtggataaccacgtgaaggcagaaaaggactccaaccccaccttatgtcctctccaggtgt

SEQ ID NO: 355084 - DNA, 120 bp, Artificial Sequence
  ENSG00000139651_65 (sequence is synthesized)
tcccaattctgccagcaccctgccctctgccacctggggctccttccattctgcccagtcgaggcatttctggagggaggacccgtgagaaccttgcatagaacatacaggatccagagg

SEQ ID NO: 355085 - DNA, 120 bp, Artificial Sequence
  ENSG00000139651_66 (sequence is synthesized)
cctctaatacagcatttcagtgcagctgccagcaagggccactgagggtcacaggctggccaggtgctgtaaatgtacagagaccatgtttgtgaagccccacatcaggacacataacct

SEQ ID NO: 355086 - DNA, 120 bp, Artificial Sequence
  ENSG00000139651_67 (sequence is synthesized)
gggtgcatgccaggtctaaagggcagattcattacagagtttatcttgggaaatttgatactgtctcagattttcttgccataggtttaggagatgctccctgttatcaagaagcctaca

SEQ ID NO: 355087 - DNA, 120 bp, Artificial Sequence
  ENSG00000139651_68 (sequence is synthesized)
gcctagttgcagaggtaagacctaaaccactaagaatttttatggttccttctacctgtaaaattctatggttcttgtgaagaatagctctgaattatttataaacttagtgaaagcagg

SEQ ID NO: 355088 - DNA, 120 bp, Artificial Sequence
  ENSG00000139651_69 (sequence is synthesized)
ctccagatctcacattgtttatgtacagactgactggggacaaatgccagcccttctgtttgttatctttgtgaccttggacaagtcacttagcctccttgtgtgggtttcctcatctgt

SEQ ID NO: 355089 - DNA, 120 bp, Artificial Sequence
  ENSG00000139651_70 (sequence is synthesized)
aaaatagggatggtaacagttatgaagcaaggcttttggcagggttaaatgaagtagcaaacagtatgtacacctaggatggtgggcgcatgaaataaaagctcagtgattgaaactttc

SEQ ID NO: 355090 - DNA, 120 bp, Artificial Sequence
  ENSG00000139651_71 (sequence is synthesized)
cccaagaatcagggccaccctccactcctgcctgacaaaagagccaccagcgttactcgccataatagttaacacatcggggtgaagtgcatctgtctggccttatgcagctgatcatgg

SEQ ID NO: 355091 - DNA, 120 bp, Artificial Sequence
  ENSG00000139651_72 (sequence is synthesized)
ggagcagcaattagaacattgtaataataataataatagcattccatatcacttactctatgccaggcactgtgagagcatactttacatagatgattttatttaatcctcacattgact

SEQ ID NO: 355092 - DNA, 120 bp, Artificial Sequence
  ENSG00000139651_73 (sequence is synthesized)
gaagcctgtttgcagtttcactcttgaatgctgccttagtcaacatattgaccaaccccagtgatccaagctctgtattaagcaccagggggagatctagaggaaggaaaggagacaggc

SEQ ID NO: 355093 - DNA, 120 bp, Artificial Sequence
  ENSG00000139656_0 (sequence is synthesized)
gtgttcatgggcctcattaagctctgccttccttctgctttttggagcctggcctttggttggccttgaatgaagagtggggccccaaaagtaccactgtcagcactctccagcatcatc

SEQ ID NO: 355094 - DNA, 120 bp, Artificial Sequence
  ENSG00000139656_1 (sequence is synthesized)
tggctgtctggcaccatcaaagaattgcatttctgacccaagaagagcttatgggtggatgggggtgggatggaagctggggagaggattgatgccagccagctgcctcacagggtgctg

SEQ ID NO: 355095 - DNA, 120 bp, Artificial Sequence
  ENSG00000139656_2 (sequence is synthesized)
gaaacacgtggccatgccattagcatcctgttcggcttctggacgagtttcatctgtgacacctacatagtcctcgcttggatcagcaagataaaaggcagccctgatgttagtgcctcc

SEQ ID NO: 355096 - DNA, 120 bp, Artificial Sequence
  ENSG00000139656_3 (sequence is synthesized)
tctgatgagccatacgccagaatccagcagagcagaaggcaatgccacgcagaagaggaccaaagtcaggtgccagaagcaggctgacctggaaaggtggaggaaaagaaggcagaaggg

SEQ ID NO: 355097 - DNA, 120 bp, Artificial Sequence
  ENSG00000139656_4 (sequence is synthesized)
agagatgaagcccaagaacctgagtatttttctcaggcaagactcaggactgctctggacattcagaagctgagtgtgcaagtgtgctgtgtagttcaaggccaccaccactgaagaggc

SEQ ID NO: 355098 - DNA, 120 bp, Artificial Sequence
  ENSG00000139656_5 (sequence is synthesized)
aggaattctaacctggcttccagggagaggtgcttccaaattggccctgtaggcaaattcacttttttcaccctctaagcgagtaagtgcttgttcccaatttccatggtttagtcttca

SEQ ID NO: 355099 - DNA, 120 bp, Artificial Sequence
  ENSG00000139656_6 (sequence is synthesized)
gtttcagtctttggtctcctctggtctatcagctcccatctctctcccagtctttttctttattctgtgacacctgttgaatgaggcacatagggtttgtagtcactgtagtgttccttg

SEQ ID NO: 355100 - DNA, 120 bp, Artificial Sequence
  ENSG00000139656_7 (sequence is synthesized)
tggttgtgaggtaataggctaatattatcactttctcagaaagtcttcaaaattatcatgaggaggtgatgcattcatctgctgggaggtgtctgtgtggtcagataagatgatggctac

SEQ ID NO: 355101 - DNA, 120 bp, Artificial Sequence
  ENSG00000139656_8 (sequence is synthesized)
attccattcctatcctgtcattcaatcattcttcctccagggagccactgagggacgtgatagtccaaagcactcagctaaaacggaattgcaaacatggtacccacaactttggtttct

SEQ ID NO: 355102 - DNA, 120 bp, Artificial Sequence
  ENSG00000139656_9 (sequence is synthesized)
tatcatccatttgtatatctgcatgtagtctgtctctgatttagggtttaggttcctctgtatttttttttcttttcctgccctttgagagtttaataaaagccagaagcatcttgtaaa

SEQ ID NO: 355103 - DNA, 120 bp, Artificial Sequence
  ENSG00000139668_0 (sequence is synthesized)
gtagtggcgccggcttgcatcccaggtcgtggcggttttggtgcctgaagcagggagcgcggagtcgttcccgagagaggcggccaggctatgctcgccggtttccggcgttccgctccg

SEQ ID NO: 355104 - DNA, 120 bp, Artificial Sequence
  ENSG00000139668_1 (sequence is synthesized)
gccagccagagtctctgtctcaacctgtgtccgtgctccagcagtctcctcagcccggccccgcggcgcggttggcggcggcgccccaggcgcgccccctcctccgatggcggcggagat

SEQ ID NO: 355105 - DNA, 120 bp, Artificial Sequence
  ENSG00000139668_2 (sequence is synthesized)
ccagcccaagcctctgacccgcaagccgatcctgctgcagcggatggaggggtcccaggaggtggtgaatatggccgtgatcgtgcccaaagaggagggcgtcatcagcgtctccgagga

SEQ ID NO: 355106 - DNA, 120 bp, Artificial Sequence
  ENSG00000139668_3 (sequence is synthesized)
caggacagttcgtgtttggttaaagagagacagtggacagtattggccaagcgtataccatgcaatgccttctccatgttcatgcatgtcttttaacccggaaacaagaagactgtccat

SEQ ID NO: 355107 - DNA, 120 bp, Artificial Sequence
  ENSG00000139668_4 (sequence is synthesized)
aggtctagacaatggtacaatctcagagtttatattgtcagaagattataacaagatgactcctgtgaaaaactatcaagcgcatcagagcagagtgacgatgatcctgtttgtcctgga

SEQ ID NO: 355108 - DNA, 120 bp, Artificial Sequence
  ENSG00000139668_5 (sequence is synthesized)
gctggagtgggtgctgagcacaggacaggacaagcaatttgcctggcactgctctgagagtgggcagcgcctgggaggttatcggaccagtgctgtggcctcaggcctgcaatttgatgt

SEQ ID NO: 355109 - DNA, 120 bp, Artificial Sequence
  ENSG00000139668_6 (sequence is synthesized)
tgaaacccggcatgtgtttatcggtgaccactcaggccaagtaacaatcctcaaactggagcaagaaaactgcaccctggtcacaacattcagaggacacacaggtggggtgaccgctct

SEQ ID NO: 355110 - DNA, 120 bp, Artificial Sequence
  ENSG00000139668_7 (sequence is synthesized)
ctgttgggacccagtccagcgggtgttgttctcaggcagttcagatcactctgtcatcatgtgggacatcggtgggagaaaaggaacagccatcgagctccaaggacacaacgacagagt

SEQ ID NO: 355111 - DNA, 120 bp, Artificial Sequence
  ENSG00000139668_8 (sequence is synthesized)
ccaggccctctcctatgcacagcacacgcgacaattgatctcctgtggcggtgatggtgggattgtcgtctggaacatggacgtggagaggcaggagacccctgaatggttggacagtga

SEQ ID NO: 355112 - DNA, 120 bp, Artificial Sequence
  ENSG00000139668_9 (sequence is synthesized)
ttcctgccaaaagtgtgatcagcctttcttctggaacttcaagcaaatgtgggacagtaagaaaattggtctaagacagcaccactgccgcaagtgtgggaaggccgtctgtggcaagtg

SEQ ID NO: 355113 - DNA, 120 bp, Artificial Sequence
  ENSG00000139668_10 (sequence is synthesized)
cagctccaagcgctcctccatccccctgatgggcttcgagtttgaagtgagggtctgtgacagctgccacgaggccatcacagatgaagaacgtgcacccacagccaccttccatgacag

SEQ ID NO: 355114 - DNA, 120 bp, Artificial Sequence
  ENSG00000139668_11 (sequence is synthesized)
taaacataacattgtgcatgtgcatttcgatgcaaccagaggatggttactgacttctggaactgacaaggttattaagttgtgggatatgaccccagtcgtgtcttgatgactctccca

SEQ ID NO: 355115 - DNA, 120 bp, Artificial Sequence
  ENSG00000139668_12 (sequence is synthesized)
ggaatcagaaagatagtatttactaaagaaacggttgttttaacccaaatcattaccagagtggtaaagcagacatgtgagaagtaagaaagaaactaaagaccctgaatgaatttgcag

SEQ ID NO: 355116 - DNA, 120 bp, Artificial Sequence
  ENSG00000139668_13 (sequence is synthesized)
attacccatgtgcacagtggggacctggccagtgagcactcgcaaggggactcttccaacttgttcatacaatataaaagaagctatttttttaacaaatggtttatacagtctggctgt

SEQ ID NO: 355117 - DNA, 120 bp, Artificial Sequence
  ENSG00000139668_14 (sequence is synthesized)
gctgcattgttttgagtgtaccgaaaaatctgtgtggggtgtttaatttttatacttttcaacaccccattttacttgttgctttgtcagagaaataagggaggtatctactcagagtat

SEQ ID NO: 355118 - DNA, 120 bp, Artificial Sequence
  ENSG00000139668_15 (sequence is synthesized)
tttggtcattatactttctgtgtttacttcaacatgtgtcacgtggccagcggctttttcttctcttccctctgcacctacctgcaccttctctgcctttcctggaggggatgtatttat

SEQ ID NO: 355119 - DNA, 120 bp, Artificial Sequence
  ENSG00000139668_16 (sequence is synthesized)
gttatttattcccagtgtttctgctttcatgtcctcctcagtggagagatttggaaactcatcatgtggattcaccagccagctgctggaattgcctgaagagcgatttgtttgtaatgt

SEQ ID NO: 355120 - DNA, 120 bp, Artificial Sequence
  ENSG00000139668_17 (sequence is synthesized)
ctgcctcattcacgttcttatgaagtagaaaagactgtgtttctgcctcagttgcctctgtctttcccacattaaaaaaaaaaatgctgtgagaaagctgctcccaaccatggttatcac

SEQ ID NO: 355121 - DNA, 120 bp, Artificial Sequence
  ENSG00000139668_18 (sequence is synthesized)
agaagtagattattttaactcagagcttcaacgatcagtgcctggatcatttagaattcagttggagcctcctgagcctcttgttttagcttttttgacgcagctctccctcactcgtaa

SEQ ID NO: 355122 - DNA, 120 bp, Artificial Sequence
  ENSG00000139668_19 (sequence is synthesized)
caatgaaaacaaatgacacacacacaaaatcctacatcagcggccctcaaccttgttggcagcagggaccggtttcaaaatgaaactgttccacctcggatcagcaggcattagcttctc

SEQ ID NO: 355123 - DNA, 120 bp, Artificial Sequence
  ENSG00000139668_20 (sequence is synthesized)
ataaggagcacgcaacctaaatccctcgcatgcgcagttcacaatagagtttctgctcctgtgagaatctgacgccaccgctgatctgatgggaggcggagcccaggcagtaacacttgc

SEQ ID NO: 355124 - DNA, 120 bp, Artificial Sequence
  ENSG00000139668_21 (sequence is synthesized)
ttgcccactgctcacgtctgatgggtgcccccattcctcacaggctatggaccagtacccatctgcagcccagggttggggacccccaccatacatgctctgaaaataagtgtctttaag

SEQ ID NO: 355125 - DNA, 120 bp, Artificial Sequence
  ENSG00000139668_22 (sequence is synthesized)
ttgtgtttttctgtgtgacatcatctctgaacttgaacatgttcattacggcaagattgtaatcctgctgtattcctcgccctctgtattctatccctttaaaaactagatatttaaaca

SEQ ID NO: 355126 - DNA, 120 bp, Artificial Sequence
  ENSG00000139668_23 (sequence is synthesized)
ttttatcctaatgtgtttcatcagaacactttgcacactttcttactaaaacggtatgtgggtggtccgagacagaatggtacctacagtgcaggctatgtttctgtgggaatggaaaag

SEQ ID NO: 355127 - DNA, 120 bp, Artificial Sequence
  ENSG00000139668_24 (sequence is synthesized)
aggactttagaaagtgaacctgaagaactcttatttctaagggaatccagtcaagcttgagaaaatgaaatattcttgtgtgtagtgattcagctcaggatattgaagtcccttttaaaa

SEQ ID NO: 355128 - DNA, 120 bp, Artificial Sequence
  ENSG00000139668_25 (sequence is synthesized)
atcttattttcacctgtaaaaatagaataaaaattaatggcaagcctgcgccaggtgcctgcccctcctaagcactttacacgcacagctcattcaacctcacgtgtcgggagcatcagg

SEQ ID NO: 355129 - DNA, 120 bp, Artificial Sequence
  ENSG00000139668_26 (sequence is synthesized)
gagctcaccagtctcttgaggatcacaggccaattgcttgtccttcccgacccaagccccaccccacagtgtcttgctctcttctgattttacaggttttttggcagtaatacacatggg

SEQ ID NO: 355130 - DNA, 120 bp, Artificial Sequence
  ENSG00000139668_27 (sequence is synthesized)
agtgaaattgaaatcctccctattattttccctcttttcctggaaagccgttttttgccctcacaatcattcattacttctctaactagggggaagtactacaagctgtcctcaggtact

SEQ ID NO: 355131 - DNA, 120 bp, Artificial Sequence
  ENSG00000139668_28 (sequence is synthesized)
gcccctacgtgtgtttccctgggatggggccttgctagaggtgattctgctgccccagcattgggaagcaggaccagtgcatgtgccccatgcagccacggtacatggaagctgtcactt

SEQ ID NO: 355132 - DNA, 120 bp, Artificial Sequence
  ENSG00000139668_29 (sequence is synthesized)
gagccatcagaccggctcagcccatgtgaccggagctctgaagaggcacacacgcatgccccgcacaggctgttagcacttgtcgcctcgctgccctggtccagactacccttgcttgcg

SEQ ID NO: 355133 - DNA, 120 bp, Artificial Sequence
  ENSG00000139668_30 (sequence is synthesized)
tcagtcaaaactgttgtaactactttgagtcttttctgcatgattgctctttgagagaactttaacaagggaattaaatttaaaatattcaaatatctattttgtagtttattactagaa

SEQ ID NO: 355134 - DNA, 120 bp, Artificial Sequence
  ENSG00000139668_31 (sequence is synthesized)
gctgcagccacttactaagttgtatgtaatataggactgtgtgttggaaatgagtaatagagctgaatcactccattttcccttcctaaactttgagcttggcctgccggcagagagagg

SEQ ID NO: 355135 - DNA, 120 bp, Artificial Sequence
  ENSG00000139668_32 (sequence is synthesized)
aacacagtattagggcagcaaaggcccaggcgcccagcaagcctgtatgggttctgagatgggtctagatgcgttcagacctcattcgggaagcagagtgtccccgtcagatcacatatg

SEQ ID NO: 355136 - DNA, 120 bp, Artificial Sequence
  ENSG00000139668_33 (sequence is synthesized)
tcctctacagtcgctctggcctgtgaccttgcacgccactctaccttctccctcccagcccacagagccactcagaggctgaagccacttcacagcccactggtgttgagaatcatcatc

SEQ ID NO: 355137 - DNA, 120 bp, Artificial Sequence
  ENSG00000139668_34 (sequence is synthesized)
agaaaaccagatatgtcaaggtatccattgctctttccttttctctcatctgtgtgggtgcttgaatttggtgaaatgcgtttagcaaaccaactgtgtgtttgtaatactgtgaattct

SEQ ID NO: 355138 - DNA, 120 bp, Artificial Sequence
  ENSG00000139668_35 (sequence is synthesized)
tgcgttttgcattaagtgtctcccccatttttgtaatttgtagagaaatatgtgctggtgttgggtgtcttccaagcattttatggaaatggaggctccattccttaggagtaaaagctg

SEQ ID NO: 355139 - DNA, 120 bp, Artificial Sequence
  ENSG00000139668_36 (sequence is synthesized)
gcgccagcacttggctcttgttctgtctaggtgaactctcataattcttgttttaccctgttggatttgcactttacatatatttttgctctattacttaaacatatagcagcttttaca

SEQ ID NO: 355140 - DNA, 120 bp, Artificial Sequence
  ENSG00000139668_37 (sequence is synthesized)
aataatgcctaacatgcctgcgctgagaaagtggcagatctacacatatcatacgcagagttgttctctacctgatggggcaaaaccaaccacatgttcttggttcctccaaacgaatga

SEQ ID NO: 355141 - DNA, 120 bp, Artificial Sequence
  ENSG00000139668_38 (sequence is synthesized)
cattacttgacattactgcctgagtgtatcttcacaatagcaaaatggtttgagattaagcatttggaatcttatgtcattttgtatggggtcaatccaccataacgtgtttctcatttg

SEQ ID NO: 355142 - DNA, 120 bp, Artificial Sequence
  ENSG00000139668_39 (sequence is synthesized)
atttccagaaatcataaagtcacaaaactggaagggatcttcagagatctagagtgtttcaagcagaaaacacattagttatacagggcagttagatatggctgagatgtaaacaagaga

SEQ ID NO: 355143 - DNA, 120 bp, Artificial Sequence
  ENSG00000139668_40 (sequence is synthesized)
atctaaaagaatgttcaaggaatagctgtttttgaacattacttagtaatggcatgagtgggaggagagactttcagcaccttgagacagggcgctctctggaaccagctttgttcctct

SEQ ID NO: 355144 - DNA, 120 bp, Artificial Sequence
  ENSG00000139668_41 (sequence is synthesized)
tatcgaaagcatatatgacagtttttttggctccggccctgtggtgggggaggtaattattgccttcatccacataaattccttcctatacattcccctcagaccaccccagaggcaaaa

SEQ ID NO: 355145 - DNA, 120 bp, Artificial Sequence
  ENSG00000139668_42 (sequence is synthesized)
ctgaaatggaaatccagtggcacttaaaattcaccctgccccgtttggctgcgattcccaggcttacagcactgcccttatggaatatcacattttcattttctgagattcattttataa

SEQ ID NO: 355146 - DNA, 120 bp, Artificial Sequence
  ENSG00000139668_43 (sequence is synthesized)
cattttctgagattcattttataaaagtaaaggccaggtgccatggctcacacctataatctgaacactttgggaggacaaggtgggaggattgctgagcccaggagttcaagaccagcc

SEQ ID NO: 355147 - DNA, 90 bp, Artificial Sequence
  ENSG00000139668_44 (sequence is synthesized)
gagttcaagaccagcctgggccacacagcaagatcctgtcactaccaaaaattcaaaacttagttgggtgtggtggcacacacctgtatg

SEQ ID NO: 355148 - DNA, 120 bp, Artificial Sequence
  ENSG00000139668_45 (sequence is synthesized)
attgcactactgcagtccagcctgggcagcagagcaaggccctgaataaataaacaaaagtataatttatttttgcctgatattaatcacttcttaaggcccaaatttttgtttttaagc

SEQ ID NO: 355149 - DNA, 120 bp, Artificial Sequence
  ENSG00000139668_46 (sequence is synthesized)
aaaaggatagctctaagtgtgggttgcagttactggacataaatattcactaaatgagattcctttggttatggctgttcatagaattttaattctatgtcagtgttcttgttcactaag

SEQ ID NO: 355150 - DNA, 120 bp, Artificial Sequence
  ENSG00000139668_47 (sequence is synthesized)
atatttcgaagtgagagaaagcattttaccaatacattcttattttttctcctttaaaataatattgaatttttcctggtacgaagacagatatttattaacttgattggaaaacacaga

SEQ ID NO: 355151 - DNA, 120 bp, Artificial Sequence
  ENSG00000139668_48 (sequence is synthesized)
aattaagatcatgttgaacactgagttatctagatgatccctgagatttgaatgttcatgtcaaccgtgttgagcgctcaccagccaccaggctttaggcactggcagtgcaaggtgtct

SEQ ID NO: 355152 - DNA, 120 bp, Artificial Sequence
  ENSG00000139668_49 (sequence is synthesized)
gaggcccattctcaggctgggcagaggtcacacagtgagtaaatgggtcttttcagtgcaatgtggttatgatagaggcatgccagggtgccactaacccagcaggtgtggcaggagggg

SEQ ID NO: 355153 - DNA, 120 bp, Artificial Sequence
  ENSG00000139668_50 (sequence is synthesized)
cttcacagaggaaagggactttgagctcagtgttaaaggatgaggagtgagtcataagggggaaaaatggaaatgactttccaggcttcagaaacagcataaacaaacaaaggcctgaga

SEQ ID NO: 355154 - DNA, 120 bp, Artificial Sequence
  ENSG00000139668_51 (sequence is synthesized)
gctggagtcagtgtggtgtgtccagggatcacaagtgggctggagctgccggagaacagccaagtggctcagctgccatcccagaattgagctcgtcactatcagatgctgctgctccct

SEQ ID NO: 355155 - DNA, 120 bp, Artificial Sequence
  ENSG00000139668_52 (sequence is synthesized)
ggcctcagaggaaagcagcacacagctcaccacgaggggtttccccagaggctcctcctgcagccaatgctactattagtttatattataatagtatcagtttctttttctttggaaatc

SEQ ID NO: 355156 - DNA, 120 bp, Artificial Sequence
  ENSG00000139668_53 (sequence is synthesized)
cctagaactgttaactgaaggtgactcagggtaactaattctggatctttgggtgcacagcctctcactggagtctgagaggaggaggtggagactatcagtgcacggcccgcaaccagg

SEQ ID NO: 355157 - DNA, 120 bp, Artificial Sequence
  ENSG00000139668_54 (sequence is synthesized)
aaggactcccagactaacgccaaaggtgtgttgggctcagctgctccactgtggaaaaggaaagccctggccctgtggcaggagaggattgttctagtcaagtgtggcgttgcacggaca

SEQ ID NO: 355158 - DNA, 120 bp, Artificial Sequence
  ENSG00000139668_55 (sequence is synthesized)
ggcggtgccgagtgtttgggtgcagacacaggcagctgctgccctccacttcctgctcttgcaagtcacagatgattccagtacaatgtgggaggtcctccttacaggggcacttgcaac

SEQ ID NO: 355159 - DNA, 120 bp, Artificial Sequence
  ENSG00000139668_56 (sequence is synthesized)
aggaaggcagagagtttcgtcaattcaggtacaggtctgtctgggagacctggccctgtggaggcaggaacaccgtgcaggggcatggcagcgcctgtctttgctatcacatcatttgcc

SEQ ID NO: 355160 - DNA, 120 bp, Artificial Sequence
  ENSG00000139668_57 (sequence is synthesized)
ttttccttgtaggacccaaagatctatgtccaaaacttagtccagaaacatctgcattcctgtttaaacttcagctcagtttcttaaccaagaaccacgtcaaccctccagggttgtggt

SEQ ID NO: 355161 - DNA, 120 bp, Artificial Sequence
  ENSG00000139668_58 (sequence is synthesized)
ttgtatttttgcctttaagcattatctcctttccaccaagaagcctacttaggtttaacacatgaaagcagtgtctaaaaattagatcggtcctaaattggaatgggatgtcttccttgc

SEQ ID NO: 355162 - DNA, 120 bp, Artificial Sequence
  ENSG00000139668_59 (sequence is synthesized)
atgtcccataccagggaatttttttaacacacagtgtagagcctttgccagagatgttgaaagggagattaaaggcttgagggatgaatttgatcatcattcttaaagtcccttccaatc

SEQ ID NO: 355163 - DNA, 120 bp, Artificial Sequence
  ENSG00000139668_60 (sequence is synthesized)
ctgtgattctctgattccctgagtctcgtttattattggacatgcctagcccatcaccagtgacctgcccgcatattgctggcttcccttggataacggagagcctatcaccacatgcct

SEQ ID NO: 355164 - DNA, 120 bp, Artificial Sequence
  ENSG00000139668_61 (sequence is synthesized)
ttgttgtcttccatcatatcaagtgagttgctttctggactttttccatctagagcctgctaggtttggttttgagaaaagatggtgaagtttcttttcatgagtttgtagggcaaaaaa

SEQ ID NO: 355165 - DNA, 120 bp, Artificial Sequence
  ENSG00000139668_62 (sequence is synthesized)
aattctttttaaagatggtaagggtggaaattaatcatggtaccatctcattaaaaatagatacctcaaaatgtttacctttacaagtcaagaagagtatctgactttcttggaagtgtc

SEQ ID NO: 355166 - DNA, 120 bp, Artificial Sequence
  ENSG00000139668_63 (sequence is synthesized)
aagaattgcaggttggctgaaaagttagattgagaatctgaccttgttacttatgattcttttttcccttggttctcggggatgcatgagaaggtgagctgtcactcacaaaaaaaggga

SEQ ID NO: 355167 - DNA, 120 bp, Artificial Sequence
  ENSG00000139668_64 (sequence is synthesized)
aaatgatttgaaaaatgtttcacatatacactttttatcattttagtggatggcagccttacgtcagtagtatatgccactatgaagtatggccaaaaccctagcgtcacttgtaaccat

SEQ ID NO: 355168 - DNA, 120 bp, Artificial Sequence
  ENSG00000139668_65 (sequence is synthesized)
tgtactcttatggatttgtgtcttacaccatttgccttgctttttaaatgactttgtttttcaaggtgctgtcattttgcaaaaggaaatctttatatgaaatgtacaaaaaccgttact

SEQ ID NO: 355169 - DNA, 120 bp, Artificial Sequence
  ENSG00000139668_66 (sequence is synthesized)
aactggacaacagggaaggtgctggccccacattagtgcctgcccaccgctctacttctaaccagggacacggatcttccattctctacatccaccggactgcagcccaagtctggacct

SEQ ID NO: 355170 - DNA, 120 bp, Artificial Sequence
  ENSG00000139668_67 (sequence is synthesized)
ggctgcagtgggcatattaccgtatggatatctttttctttctttttttaaagtgaggagattcttcagggggtcaggctgagaatgtaataagcctgacattggaacagatttctcccg

SEQ ID NO: 355171 - DNA, 120 bp, Artificial Sequence
  ENSG00000139668_68 (sequence is synthesized)
tgtggtctagctggacccctccggcatttgccacactccctgccagtcctgacattgacttcctgaatgtgattaggtggtaatgagcaagaatttcctaggatattgaaacatctgtat

SEQ ID NO: 355172 - DNA, 120 bp, Artificial Sequence
  ENSG00000139668_69 (sequence is synthesized)
ccaggcccccaatcaaatgctgctgaatattgtgaatgtttttactccgctcactttcccactgtgctttcctctaaccaaaatatacgtgtagccattaccaatgtacaactctcaatg

SEQ ID NO: 355173 - DNA, 120 bp, Artificial Sequence
  ENSG00000139668_70 (sequence is synthesized)
cggagttgccgccacggtttaaaataaatctctgtgaaaacctttctgcagctatggtcccatcacggttacatgtggccacgcacacaccgacaaccttgctgtgctgtttagccctgt

SEQ ID NO: 355174 - DNA, 120 bp, Artificial Sequence
  ENSG00000139668_71 (sequence is synthesized)
gggttctgtccagttggtgggagggggaggttccagaccactccacctgctgtctagatgccagggagagctgctgtttggaggtgaagatgagccctgttcaccacagtctaagcacag

SEQ ID NO: 355175 - DNA, 120 bp, Artificial Sequence
  ENSG00000139668_72 (sequence is synthesized)
cacacgggctcaagccatggagcccttttccttcatcatgtaagtcagctttttcttgtgcttagtaaacttttccagtgaggagaaatgacttcggggcaaacactgccagggaaagcc

SEQ ID NO: 355176 - DNA, 120 bp, Artificial Sequence
  ENSG00000139668_73 (sequence is synthesized)
tcatttaaaacttgtgaggttcattttatggagaagaaaaataggtgcaaaggcaccaagtgacctgcatgctatggaatcaccgttgagggggtggctgggttgccccgtcctggtgct

SEQ ID NO: 355177 - DNA, 120 bp, Artificial Sequence
  ENSG00000139668_74 (sequence is synthesized)
gccagcacagcgtcgcccacacccagcattgctgaggcccatcatcctcctgcagaaaaggaggcatgcagttaaatggagctggtgcttgcttgatagcgcctccttttgtcagaaaga

SEQ ID NO: 355178 - DNA, 120 bp, Artificial Sequence
  ENSG00000139668_75 (sequence is synthesized)
cgctgatgtttcaggctggcacacccagaaaaatcccttccttgtggtccttggctgatgatgagccctggatcagagtgtctccaggaccactgagaagctgcagccgtctgggttttc

SEQ ID NO: 355179 - DNA, 120 bp, Artificial Sequence
  ENSG00000139668_76 (sequence is synthesized)
ctctgctatgggggatgagttacgtttattccaccatggacaccaagaatgtatgtagatgtattctaaatctgctcattggttttattacaacttttcctggagtcactaagaggtaaa

SEQ ID NO: 355180 - DNA, 120 bp, Artificial Sequence
  ENSG00000139668_77 (sequence is synthesized)
atggtgtaaattagaggttttatcaaagtgtagtaccagaatgccagatgcattactgaagccactcctaatcttaagcaaatgtaaactaggcctcattaaattgtttgtgtaaatatg

SEQ ID NO: 355181 - DNA, 120 bp, Artificial Sequence
  ENSG00000139668_78 (sequence is synthesized)
gttatgataagtgctgtgtgatgctcaccttgggaggtctgcgacatatattgaagtcatctctaacctgaagtactgacagactttctggaagaaaaggcttgtaggaggaaacttcag

SEQ ID NO: 355182 - DNA, 120 bp, Artificial Sequence
  ENSG00000139668_79 (sequence is synthesized)
aattctattaaatggtgtaaatgatgaaattatagttgatatatgctagagcatcagtgctgggtattttagaagggatggagtcatcattggctaatgttcccagtgaaggattgaggg

SEQ ID NO: 355183 - DNA, 120 bp, Artificial Sequence
  ENSG00000139668_80 (sequence is synthesized)
cagagaagccttatgagaaagtttgattttttccataaaggcaaaattttattaaaaagactgcttctggacctagaaattctttggcacagtattgtttttatgggatatattccataa

SEQ ID NO: 355184 - DNA, 120 bp, Artificial Sequence
  ENSG00000139668_81 (sequence is synthesized)
aatatattgaaggaatatattggtagatgtcactttcccagtctgtaactactggagatggaactgatcaatttctaactgctgtggaaaattcataagcaaattcatggaatcaagaaa

SEQ ID NO: 355185 - DNA, 120 bp, Artificial Sequence
  ENSG00000139668_82 (sequence is synthesized)
aggagaagggtagttaaacctaagctgctttaatattttatttatttttttaagactagttaagtacggtagtgagaaggggaagagagtagaacaaggagttcaatctgtaactgactg

SEQ ID NO: 355186 - DNA, 120 bp, Artificial Sequence
  ENSG00000139668_83 (sequence is synthesized)
tgaacaattgagataataaaactaccttcagaccatcctaagctcctttaatattaaggtgttattatagtattgaaacttctgattcccatttcaccacatttaccttgaaggaaacag

SEQ ID NO: 355187 - DNA, 120 bp, Artificial Sequence
  ENSG00000139668_84 (sequence is synthesized)
ctttactggggtatattttcaagtgtttggagacgctgaagtagtgtatattaatgaaactgaagaataaatttcatttgattataggatgaaagaaatgcaatgttcagctatgtctta

SEQ ID NO: 355188 - DNA, 120 bp, Artificial Sequence
  ENSG00000139668_85 (sequence is synthesized)
gcctaattttcactttcctagtgtacaatgtaaataatagaaattattttgtcatggagttactgttaaataaggttcacccataagtctggaattattattaatatactttttttcaag

SEQ ID NO: 355189 - DNA, 120 bp, Artificial Sequence
  ENSG00000139668_86 (sequence is synthesized)
ttgacaagtctgtgcttctttgggtcatatactcaaacatgaacataactttgttatttagagctcagttttggttatggttttcattaaaataattgatctatattcttgctttccaaa

SEQ ID NO: 355190 - DNA, 120 bp, Artificial Sequence
  ENSG00000139668_87 (sequence is synthesized)
attcaatgttaatgtcacttggtacaatgctaaatatatgaaaatgtaatattgattttcatcacaacctacaaagccattaccattcactgctttagctagaaactagtaatcttcatt

SEQ ID NO: 355191 - DNA, 120 bp, Artificial Sequence
  ENSG00000139668_88 (sequence is synthesized)
cctgaactctgaggttaaagccgcaagtaatgttccatacctgaatggcagtgttccataaattcttaatgaaaccctggtttatctttttgacctttgacttcttcattgcctttatgt

SEQ ID NO: 355192 - DNA, 120 bp, Artificial Sequence
  ENSG00000139668_89 (sequence is synthesized)
gtgcctttgaaaacacttaacattttccattttaaacggtgttatacagtatatacttcatgtccattttattttctcttctgtgagttccctatggagctttgtgtgtcttattcattg

SEQ ID NO: 355193 - DNA, 120 bp, Artificial Sequence
  ENSG00000139668_90 (sequence is synthesized)
tatcatcattagggcctaacatggtacctggcatgcaatacgtcctcaatacacgtttgttgtatcagtgactgatctgtttttttgctgttcctgaaagcacagcatcttaactactgt

SEQ ID NO: 355194 - DNA, 120 bp, Artificial Sequence
  ENSG00000139668_91 (sequence is synthesized)
agacttttagttgatatttgttgagtgaattatatgatgacctatgaaaggcttatgtggacaagtatacacttgtaggaaaagtactggactaggtggactttaaagtacttcaaaact

SEQ ID NO: 355195 - DNA, 120 bp, Artificial Sequence
  ENSG00000139668_92 (sequence is synthesized)
ctgaaagtccatgaattgcttcatttattccgtcaacaaacatttgagtacttactgtgttccagtcacatgcatacatggtaatgatgaaaatgataaggtcctttcaagatgctcaca

SEQ ID NO: 355196 - DNA, 120 bp, Artificial Sequence
  ENSG00000139668_93 (sequence is synthesized)
atttagtgcaggaattttagaagaatattgcttaataaaaacaaaactactacttccaagatttagtattggaaagagaatttcagatgaagaatggcaggattccacaatctgtattat

SEQ ID NO: 355197 - DNA, 120 bp, Artificial Sequence
  ENSG00000139668_94 (sequence is synthesized)
cccctaaattttacctcccgttggaggattctttgactcaaactgccctcaataatggcctgataatactcaaatcttcaagcccaagagtggataaaaattcttgccttcaggttcctt

SEQ ID NO: 355198 - DNA, 120 bp, Artificial Sequence
  ENSG00000139668_95 (sequence is synthesized)
ttagcagagttcaaacagccttgaactttactcagtattaatggaggaaatataaaggaatagaagaaatgtaaaaacaatctgatttacaaataaagatttctggtgctaccataatac

SEQ ID NO: 355199 - DNA, 120 bp, Artificial Sequence
  ENSG00000139668_96 (sequence is synthesized)
agagcctgtttcaggaactccccacccttgtctgattctgtctttgctttagttgtagttagattatatacccaaagggcataccaaactttgatattttggatacctcatttcccagct

SEQ ID NO: 355200 - DNA, 120 bp, Artificial Sequence
  ENSG00000139668_97 (sequence is synthesized)
tctttttggactgtcttttctgagtgaatgccattttagcattccctgcctaggagcttcctttcagacatctctgctctgttttggtcaagacttatgtttagtcagcagcttagcagg

SEQ ID NO: 355201 - DNA, 120 bp, Artificial Sequence
  ENSG00000139668_98 (sequence is synthesized)
ggctcctttgtttagtggcagcctcttcaagtgatgaaagccaggagggacctctctccaggtgggaccagtcccatgcagacctttgtatcttcataagttctttataagcatatcaac

SEQ ID NO: 355202 - DNA, 120 bp, Artificial Sequence
  ENSG00000139668_99 (sequence is synthesized)
acaagtcagtaatcttagcattcatacagagactttcagtaacttgatagtttcgtttaggcaattataggaaatcattcccttcctaggagttaacaacaggtacaaacattgtcctct

SEQ ID NO: 355203 - DNA, 120 bp, Artificial Sequence
  ENSG00000139668_100 (sequence is synthesized)
ggggttgccaatgaacctcctgcttgtggtggttagagaagaccaacaatctcttctacagatgggtcttgcagggtgagtaggagttcttgtgaaaaagcctttcctgtagaggaaagg

SEQ ID NO: 355204 - DNA, 120 bp, Artificial Sequence
  ENSG00000139668_101 (sequence is synthesized)
gcattttagatagaggaggcaagaaaactcccattcattaagaagcactagaatgtcctgattaagggtggacaacggagccaattggcttgagttcagaactcagcactcagtgtcctc

SEQ ID NO: 355205 - DNA, 120 bp, Artificial Sequence
  ENSG00000139668_102 (sequence is synthesized)
acattttgaggaatctggaaattagtgtctgcaggaggagtgactctgatagcaaaaattactgaaccctttggttgaaagatttcagggttctttttctggataaaaaggcctgtgttg

SEQ ID NO: 355206 - DNA, 120 bp, Artificial Sequence
  ENSG00000139668_103 (sequence is synthesized)
gtggtaaggtgtagagaaggaggctgtaggagagataactatagagaagaaagttactggggagggcgatatggggaactgcctttctatattctgactttattcaggaccaatttatac

SEQ ID NO: 355207 - DNA, 120 bp, Artificial Sequence
  ENSG00000139668_104 (sequence is synthesized)
agatctgatccccaatgcctagcacaaaggagatatgcattatatgttccttgaatgaattaagcaatgactggtgatcacctttttgaattgaaatggacctgaggattttgtgagttt

SEQ ID NO: 355208 - DNA, 120 bp, Artificial Sequence
  ENSG00000139668_105 (sequence is synthesized)
ctgtcagcaaaggtatttaagttgagcctgagagaagtttagcagcttgctttaggccagggtaatcaacaatacaatatgggatgggagtgggaaggggctgggatgagggggttggat

SEQ ID NO: 355209 - DNA, 120 bp, Artificial Sequence
  ENSG00000139668_106 (sequence is synthesized)
tttttttctgcttcgagggcctttttttcctgactctaaattactatgattcgaagtggccatgactacttgactgtttcctgaaaaaaatatgttaaaattttatttcatcttatgaat

SEQ ID NO: 355210 - DNA, 120 bp, Artificial Sequence
  ENSG00000139668_107 (sequence is synthesized)
cctcatagtattggttcatttaccattaattctttttattatgaaattacactatcccagttctctgcttcaaccattagtttgataattagaccttggtgcagttcagttgagctcctg

SEQ ID NO: 355211 - DNA, 120 bp, Artificial Sequence
  ENSG00000139668_108 (sequence is synthesized)
atagagttttatgtaccatgtattttataacatttgcacaattttcttaagaaatgcaaatcaaagttttatagtgccaagcacagttctgaaagttgaggacttttcagagtgagggag

SEQ ID NO: 355212 - DNA, 120 bp, Artificial Sequence
  ENSG00000139668_109 (sequence is synthesized)
tgagcgctctgaagtcagcaaaattagaacccatctaaactaatttttcagtgtgtgaagtctctaatagcataaaattaatacactttccactgcgcacttgagactcatcacttggtg

SEQ ID NO: 355213 - DNA, 120 bp, Artificial Sequence
  ENSG00000139668_110 (sequence is synthesized)
gtaataattgtggatttcaaggtcccaaagagggaacttgtcctgtatgattgtggaaaattagacctttactccgaattcaaaacatgaagcactcttcatgctagcaaatctttctgg

SEQ ID NO: 355214 - DNA, 120 bp, Artificial Sequence
  ENSG00000139668_111 (sequence is synthesized)
gaacaggctgcctctgtgtttccaaaggtcagaaatagactgactttttaaggaaagatcactatgggaaagcttatttgaggaggcttactagaggaggattagcttcaagtgatccca

SEQ ID NO: 355215 - DNA, 120 bp, Artificial Sequence
  ENSG00000139668_112 (sequence is synthesized)
gagctcctgacagttctgaatttcctgtttttatattattaaaccagagtctgtccaggacctcacagatcttaatcagtatatattcatccacatattgcaatgctatgggaaagttag

SEQ ID NO: 355216 - DNA, 120 bp, Artificial Sequence
  ENSG00000139668_113 (sequence is synthesized)
gatggcaattctgacactcttaaaatgagtaatttttaaatcttgaaatcctgaccagctgtcttacacctcaagtgctgctaaacttactttgaaaaaggaatataggtaaaaatcata

SEQ ID NO: 355217 - DNA, 120 bp, Artificial Sequence
  ENSG00000139668_114 (sequence is synthesized)
ggatttaagtagctagaataaactttagagagatggccttttccaaacaaacaaaaccaaaactttagaaaaggaaatgtgagtttttacttgcacagcatctttctctggctgtctgtt

SEQ ID NO: 355218 - DNA, 120 bp, Artificial Sequence
  ENSG00000139668_115 (sequence is synthesized)
ttcactttgcatttggctttgagaaagcatggagaatcatcttgatgtcattagaaataacagtgtggggaaaattaaaacactttgtggcatttagaaatcaataagtagattgtgatt

SEQ ID NO: 355219 - DNA, 120 bp, Artificial Sequence
  ENSG00000139668_116 (sequence is synthesized)
taagactactgcaggtggtgatttgttgatatctgtaacactaaactaaattgtgtacagtatatacttagaagagactgaccaccataccaagcttttcttctcaactattggcagaat

SEQ ID NO: 355220 - DNA, 120 bp, Artificial Sequence
  ENSG00000139668_117 (sequence is synthesized)
agaaagaatttaaaaagagatcacactcctttatttttatatgagtaggtctcccaaggagagtgttacaattaacctagaaattccctaacagagaaaaaaaaaacaaaaaaaactccc

SEQ ID NO: 355221 - DNA, 120 bp, Artificial Sequence
  ENSG00000139668_118 (sequence is synthesized)
cttgtgcaacttcagcaagcagtcttctctttaaaaaaattttttgtatttcggggcagggagcctcttcatccaaatattttatttagtccttagtaaaaattaattcagaagtatgag

SEQ ID NO: 355222 - DNA, 120 bp, Artificial Sequence
  ENSG00000139668_119 (sequence is synthesized)
aaactaaccagtaagaccaaaaaagaaaaggtcatctccttgtctcttggcagggagtgctactttatggtctcctgtgcctttaatttaaggattcttggaaaagaactgggagtctga

SEQ ID NO: 355223 - DNA, 120 bp, Artificial Sequence
  ENSG00000139668_120 (sequence is synthesized)
tctcagctctactctgcattgaccttggcatttcctggggcatttcatcactctaagcttcagtttgtccatctggcaaaggagggggttagatttcctagctatgactcttgtactgtg

SEQ ID NO: 355224 - DNA, 120 bp, Artificial Sequence
  ENSG00000139668_121 (sequence is synthesized)
atgtgcttctgtagtgactagataagtagtctctgcaaccatatcatcctaaaatctcaagtggaggaaagcacgcattagggaaaaagcagcatgcttgtgtgaaactgtcagcacctc

SEQ ID NO: 355225 - DNA, 120 bp, Artificial Sequence
  ENSG00000139668_122 (sequence is synthesized)
atgttgcaactgtaaaacgatgctttctagagcctttggatggcagcggttatttattcctggatgaaatattaagaagtatttgttttgtgttagtgcctaacacccagttgaactaga

SEQ ID NO: 355226 - DNA, 120 bp, Artificial Sequence
  ENSG00000139668_123 (sequence is synthesized)
ttcactacattcctacttctagatgagtcctttactttcaaactctgggtggtttgccagcaaccaagtcagggcctgggttatctagattaatgctttggaaactttttagaccataaa

SEQ ID NO: 355227 - DNA, 120 bp, Artificial Sequence
  ENSG00000139668_124 (sequence is synthesized)
tcatagtaaaaaatatagttagcattgctacgcaagactgacatactctctcacacatagacacacatatgacagaaacaaaggttttatgaaatggtatcctcttaatgtgacatgcac

SEQ ID NO: 355228 - DNA, 120 bp, Artificial Sequence
  ENSG00000139668_125 (sequence is synthesized)
actattttctgttctgttgcagcccttataagatcctagttgtgaccgtttcaattaatttcatgacccactaaaggattgtgaacaagagtttgaaatattacagagctttagaagaac

SEQ ID NO: 355229 - DNA, 120 bp, Artificial Sequence
  ENSG00000139668_126 (sequence is synthesized)
tggtaatgttttgtaccttctttttctcccgttatgtagtttcagttttctagaagatggaaatgtaattcaacttggggacctaaaccctgccagcctaccccacccctggcctggcct

SEQ ID NO: 355230 - DNA, 120 bp, Artificial Sequence
  ENSG00000139668_127 (sequence is synthesized)
gcttttctgaaattcccattgacattatagaattgacccagtctgactggaagccttcaagttaggagataactgttctaaagcctttcagcccagagccagagagggttcagaaaaaaa

SEQ ID NO: 355231 - DNA, 120 bp, Artificial Sequence
  ENSG00000139668_128 (sequence is synthesized)
aaaaagaaaaaaaaaaagaaaaaaattaggaatgtaccaaattgagcatttgctattgtttgagtggctgcattttaacttcctgtcctatgttaatttattactgagttaggactcaga

SEQ ID NO: 355232 - DNA, 120 bp, Artificial Sequence
  ENSG00000139668_129 (sequence is synthesized)
tgtttgagtggctgcattttaacttcctgtcctatgttaatttattactgagttaggactcagaaatgatgcatcacatctaaattatgaatgttgccaggtggggtggctcacgcctgt

SEQ ID NO: 355233 - DNA, 120 bp, Artificial Sequence
  ENSG00000139675_0 (sequence is synthesized)
ggtggactttttctgcccgtggacgccgctgaagaagcatcgttaaagtctctcttcaccttgccgtcatgtctaagtcagcgtctccaaaagagcccgaacagctgaggaagctcttca

SEQ ID NO: 355234 - DNA, 120 bp, Artificial Sequence
  ENSG00000139675_1 (sequence is synthesized)
ttggagggttgagctttgaaacaactgatgagagcctgaggagccattttgagcaatggggaacgctcacagactgtgtggtaatgagagatccaaacaccaagcgctccaggggctttg

SEQ ID NO: 355235 - DNA, 63 bp, Artificial Sequence
  ENSG00000139675_2 (sequence is synthesized)
gtaatgagagatccaaacaccaagatgaatacaacgccacacaaggtggatggaagagttgtg

SEQ ID NO: 355236 - DNA, 120 bp, Artificial Sequence
  ENSG00000139675_3 (sequence is synthesized)
ttgtaacctttgacgaccatgactccgtggataagattgtcattcagaaataccatactgtgaagggccacaactgtgaagttagaaaagccctgccaaagcaagagatggctagtgctt

SEQ ID NO: 355237 - DNA, 120 bp, Artificial Sequence
  ENSG00000139675_4 (sequence is synthesized)
tggaaactttggtggtggtcgtggagatggtttcggtgggaatgacaactttggtcgtggaggaaacttcagtggtcgtggtggctttggtggcagctgtggtggtggtggatatggtgg

SEQ ID NO: 355238 - DNA, 120 bp, Artificial Sequence
  ENSG00000139675_5 (sequence is synthesized)
catgaagggaggaaattttggaggcagaagctctggcccctatggcggtggaggccaatactttgcaaaaccacaaaaccaaggtggctatggcgtttccagcagcagcagtagctatgg

SEQ ID NO: 355239 - DNA, 69 bp, Artificial Sequence
  ENSG00000139675_6 (sequence is synthesized)
ggaaagtgtaaagcattccaacaaagtgttttaatgtaggtgacgctgaataaatgtctctaaaaaaaa

SEQ ID NO: 355240 - DNA, 120 bp, Artificial Sequence
  ENSG00000139679_0 (sequence is synthesized)
gaagctgaggagaagctgatgccatgcttcctgtacagcctgaagaaccacaaggtcttgatctgtcaccaggctgaagtgcagtggtacaatcaaagctcactgcagtctcaacctcct

SEQ ID NO: 355241 - DNA, 120 bp, Artificial Sequence
  ENSG00000139679_1 (sequence is synthesized)
tcaaagctcactgcagtctcaacctcctaggctcaaacaatcctcccacttcagcctcccaaccagctgggaccacaggttgacatcaccacacccaggtctgctggaatttgctggagg

SEQ ID NO: 355242 - DNA, 77 bp, Artificial Sequence
  ENSG00000139679_2 (sequence is synthesized)
cggcagctggagctctcctgttccctctgctatggctcttcctcagtagaaacaactggcaacaaaattcaagttta

SEQ ID NO: 355243 - DNA, 120 bp, Artificial Sequence
  ENSG00000139679_3 (sequence is synthesized)
cttcctcagtagaaacaactggcaacaaaattcaagtttatgattcattcatcagcaaacatgtgagaatcatctacaaagaaccaagaattgtgagaaagcgacctcaagatacaactg

SEQ ID NO: 355244 - DNA, 120 bp, Artificial Sequence
  ENSG00000139679_4 (sequence is synthesized)
gcaactgaggaaaaggcctcaattcaacaagagctaacaagcttgggagtttatttcggaatctttaaaagactcttctgcttacccacaatctgggatccactgcaggaaaacaaaaaa

SEQ ID NO: 355245 - DNA, 120 bp, Artificial Sequence
  ENSG00000139679_5 (sequence is synthesized)
ggaaaacttcatttaaaagaagcaagaagtaaaatgggacaaattgggaatgtttaagtctctgaaactctgcactgaaaagaaaataagattgataacttaagcttaacattctgaggc

SEQ ID NO: 355246 - DNA, 120 bp, Artificial Sequence
  ENSG00000139679_6 (sequence is synthesized)
ataaagaaacattaactttggagtattcatcttgactactgaaatacaagtttagaagacaagtggtttcattctggtcacagatcacagcttttctttaaatttataatcctatgggtt

SEQ ID NO: 355247 - DNA, 120 bp, Artificial Sequence
  ENSG00000139679_7 (sequence is synthesized)
ggactcgttgactgtattttttaaaggttgctcgtcagttaactgagccttggaattcatggattttctaaagactaacaaatgaaaatattttcctgttgaagaacccagcggaaattt

SEQ ID NO: 355248 - DNA, 120 bp, Artificial Sequence
  ENSG00000139679_8 (sequence is synthesized)
tacagcaacaaatttcatgtttcttttgggtatttctgagaaaaaggaaatatttataaaaccatccaaagatccagataatttgcaaataaattggaggttatagaggttataatctga

SEQ ID NO: 355249 - DNA, 120 bp, Artificial Sequence
  ENSG00000139679_9 (sequence is synthesized)
atcccaaaggagactgcagctgatgaaagtgcttccaaactgaaaattggacgtgcctttacgatggtaagcgttaacagctcccactgcttctataatgactcctttaagtacactttg

SEQ ID NO: 355250 - DNA, 120 bp, Artificial Sequence
  ENSG00000139679_10 (sequence is synthesized)
tgcttgggttaatatccaattgtgttgccatatacattttcatctgcgtcctcaaagtccgaaatgaaactacaacttacatgattaacttggcaatgtcagacttgctttttgttttta

SEQ ID NO: 355251 - DNA, 120 bp, Artificial Sequence
  ENSG00000139679_11 (sequence is synthesized)
ctttacccttcaggattttttacttcacaacacggaattggccatttggagatttactttgtaagatttctgtgatgctgttttataccaacatgtacggaagcattctgttcttaacct

SEQ ID NO: 355252 - DNA, 120 bp, Artificial Sequence
  ENSG00000139679_12 (sequence is synthesized)
gtattagtgtagatcgatttctggcaattgtctacccatttaagtcaaagactctaagaaccaaaagaaatgcaaagattgtttgcactggcgtgtggttaactgtgatcggaggaagtg

SEQ ID NO: 355253 - DNA, 120 bp, Artificial Sequence
  ENSG00000139679_13 (sequence is synthesized)
cacccgccgtttttgttcagtctacccactctcagggtaacaatgcctcagaagcctgctttgaaaattttccagaagccacatggaaaacatatctctcaaggattgtaattttcatcg

SEQ ID NO: 355254 - DNA, 120 bp, Artificial Sequence
  ENSG00000139679_14 (sequence is synthesized)
aaatagtgggattttttattcctctaattttaaatgtaacttgttctagtatggtgctaaaaactttaaccaaacctgttacattaagtagaagcaaaataaacaaaactaaggttttaa

SEQ ID NO: 355255 - DNA, 120 bp, Artificial Sequence
  ENSG00000139679_15 (sequence is synthesized)
aaatgatttttgtacatttgatcatattctgtttctgttttgttccttacaatatcaatcttattttatattctcttgtgagaacacaaacatttgttaattgctcagtagtggcagcag

SEQ ID NO: 355256 - DNA, 120 bp, Artificial Sequence
  ENSG00000139679_16 (sequence is synthesized)
taaggacaatgtacccaatcactctctgtattgctgtttccaactgttgttttgaccctatagtttactactttacatcggacacaattcagaattcaataaaaatgaaaaactggtctg

SEQ ID NO: 355257 - DNA, 120 bp, Artificial Sequence
  ENSG00000139679_17 (sequence is synthesized)
tcaggagaagtgacttcagattctctgaagttcatggtgcagagaattttattcagcataacctacagaccttaaaaagtaagatatttgacaatgaatctgctgcctgaaataaaacca

SEQ ID NO: 355258 - DNA, 120 bp, Artificial Sequence
  ENSG00000139679_18 (sequence is synthesized)
ttaggactcactgggacagaactttcaagttccttcaactgtgaaaagtgtctttttggacaaactatttttccacctccaaaagaaattaacacatggacattttaaagtctttagtat

SEQ ID NO: 355259 - DNA, 120 bp, Artificial Sequence
  ENSG00000139679_19 (sequence is synthesized)
aaagaaaatttgtattcaatgtgttaagcattaacatgtattttatttgtgtatccactccatctgatttttctgagccattttgatttgttccttcattaaaaaaaatctcttaaagtt

SEQ ID NO: 355260 - DNA, 120 bp, Artificial Sequence
  ENSG00000139679_20 (sequence is synthesized)
tggattaggagagcttctggatagctgaacacatggaggtttctggagggtgtggcccccagagggcatggaagctctgcacccctgctcccatacctcaccctacgcatctcctcatct

SEQ ID NO: 355261 - DNA, 120 bp, Artificial Sequence
  ENSG00000139679_21 (sequence is synthesized)
gtatcctttgcaatatcctttgtaataaaccgaaaattttatcataatgagcatcaaaagaatcccaaatgagaaaactgctttttgcataagtgtaaattaagagatggaagtcacatt

SEQ ID NO: 355262 - DNA, 120 bp, Artificial Sequence
  ENSG00000139679_22 (sequence is synthesized)
agttttgtgcttgaaacccagggcctgggtggtgtaggcacccgagggaattgcctggtctaagggttgtgaagatcacggaaaaggcatagagtctgggccggaatgcatcgttcctcg

SEQ ID NO: 355263 - DNA, 120 bp, Artificial Sequence
  ENSG00000139679_23 (sequence is synthesized)
gaaaaggcatagagtctgggccggaatgcatcgttcctcgtggcacattccctcatggcttcccttagctaggggaggaagttccctggccccttgcacttcccgttccctctgctatgg

SEQ ID NO: 355264 - DNA, 120 bp, Artificial Sequence
  ENSG00000139679_24 (sequence is synthesized)
ggtttctggagggtgtggcccccagagggcatggaagctctgcacccctgctcccatacctcaccctacgcatctcctcatctgtatcctttgcaatatcctttgtaataaaccggttca

SEQ ID NO: 355265 - DNA, 120 bp, Artificial Sequence
  ENSG00000139679_25 (sequence is synthesized)
aaaaggccttctttcaaaccttccccaaagcctattttctggaacactaaaaactcaggcaaatttgaggtctatcaaatgtaaaaagtacagactctactgtgaatctcagaaattctc

SEQ ID NO: 355266 - DNA, 120 bp, Artificial Sequence
  ENSG00000139679_26 (sequence is synthesized)
taaatcataacacattcaatagctgacagaagacttttgtttctctttttcccagcatttgggctaaagtgatgatacgcaatgcaagaacgaactagcacaacatcagtaagaaaaaaa

SEQ ID NO: 355267 - DNA, 120 bp, Artificial Sequence
  ENSG00000139679_27 (sequence is synthesized)
gggtgaaagctacctgttactacgagaacatttgactagaagtcaagaaactaggattcgagttcctgctccagcaataatcagctatggttttagtttcctaagttgtacttgagtgac

SEQ ID NO: 355268 - DNA, 120 bp, Artificial Sequence
  ENSG00000139679_28 (sequence is synthesized)
aagaaccaagaattgtggaagataaatgaatcaaaagttttgtaagattcttcataaagcaatacataacagataacaaacatggttttctcatctagaactatggaaaaaaagtgtacc

SEQ ID NO: 355269 - DNA, 120 bp, Artificial Sequence
  ENSG00000139679_29 (sequence is synthesized)
agaacaaaatttattttcctttgctagtgttgtactttgtggtctgttacagaagtctcggtttacttcaatttctgttctgcttctctctttggcaccatcaggaaaccctagccccgt

SEQ ID NO: 355270 - DNA, 120 bp, Artificial Sequence
  ENSG00000139679_30 (sequence is synthesized)
gtctaaattcagaagccacactaattaggatcgatttctcctatttctcttctttgtttcttgcatatccagaattctagagcccttcctcacaattccagttaagatttgactgtgaaa

SEQ ID NO: 355271 - DNA, 120 bp, Artificial Sequence
  ENSG00000139679_31 (sequence is synthesized)
actccaaagcttaacattctaaccactctagggagggaggatgggaggaagagagctgagtgtgcaccaaggagcggtaagatgccagacctgtgagtgaagaagcatcttggaagtgga

SEQ ID NO: 355272 - DNA, 120 bp, Artificial Sequence
  ENSG00000139679_32 (sequence is synthesized)
ccctatagctccaggcacctgctgacacatagtcggagacaaaccacccagtcaagttcaacccaaattcctgacccaaaaaatcataagcaaaataaaatatttgtttaaagccactaa

SEQ ID NO: 355273 - DNA, 120 bp, Artificial Sequence
  ENSG00000139679_33 (sequence is synthesized)
gcaaaggccctgtgggagagaatttggatactgaaagaattaaaacattcaaagtggctggagaaatagggctaacatcttacacgtacttatatgccatgttaagaccacgttaagtgc

SEQ ID NO: 355274 - DNA, 120 bp, Artificial Sequence
  ENSG00000139679_34 (sequence is synthesized)
cctcccgcctcagccccactaagtgttgggattacgggtatgagccactgcccctggccaaaaaaagttttacagtcagaaggaaaacaaaaggaatctggatctacacaaggaatgaag

SEQ ID NO: 355275 - DNA, 120 bp, Artificial Sequence
  ENSG00000139679_35 (sequence is synthesized)
cagtccctctgctatggctcttcctcagtagaaacaactggcaacaaaattcaagtttatgattcattcatcagcaaacatgtgagaatcatctacaaagaaccaagaattgtggtgaaa

SEQ ID NO: 355276 - DNA, 120 bp, Artificial Sequence
  ENSG00000139679_36 (sequence is synthesized)
aaacagtccctctgctatggctcttcctcagtagaaacaactggcaacaaaattcaagtttatgattcattcatcagcaaacatgtgagaatcatctacaaagaaccaagaattgtggtc

SEQ ID NO: 355277 - DNA, 120 bp, Artificial Sequence
  ENSG00000139684_0 (sequence is synthesized)
atcttgagccccgccttttacttcggcccgcttcttctggtcactccgccaccgtagaatcgcctaccatttggtgcaagcaaaaagcaatcagcaattggacaggaaaagaatggcatt

SEQ ID NO: 355278 - DNA, 120 bp, Artificial Sequence
  ENSG00000139684_1 (sequence is synthesized)
gaagcagatttccagcaacaagtgctttgggggattgcagaaagtttttgaacatgacagtgttgaactaaactgcaaaatgaaatttgctgtctacttaccaccaaaggcagaaacagg

SEQ ID NO: 355279 - DNA, 120 bp, Artificial Sequence
  ENSG00000139684_2 (sequence is synthesized)
aaagtgccctgcactgtattggctctcaggtttaacttgcacagagcaaaattttatatcaaaatctggttatcatcagtctgcttcagaacatggtcttgttgtcattgctccagatac

SEQ ID NO: 355280 - DNA, 120 bp, Artificial Sequence
  ENSG00000139684_3 (sequence is synthesized)
cagccctcgtggctgcaatattaaaggtgaagatgagagctgggactttggcactggtgctggattttatgttgatgccactgaagatccttggaaaaccaactacagaatgtactctta

SEQ ID NO: 355281 - DNA, 120 bp, Artificial Sequence
  ENSG00000139684_4 (sequence is synthesized)
cagtggatccccaaaggatgtctatttttggccactccatgggaggtcatggagctctgatctgtgctttgaaaaatcctggaaaatacaaatctgtgtcagcatttgctccaatttgca

SEQ ID NO: 355282 - DNA, 120 bp, Artificial Sequence
  ENSG00000139684_5 (sequence is synthesized)
accctgtactctgtccctggggcaaaaaagcctttagtggatatttgggaacagatcaaagtaaatggaaggcttatgatgctacccaccttgtgaaatcctatccaggatctcagctgg

SEQ ID NO: 355283 - DNA, 120 bp, Artificial Sequence
  ENSG00000139684_6 (sequence is synthesized)
acatactaattgatcaagggaaagatgaccagtttcttttagatggacagttactccctgataacttcatagctgcctgtacagaaaagaaaatccccgttgtttttcgattgcaagagg

SEQ ID NO: 355284 - DNA, 120 bp, Artificial Sequence
  ENSG00000139684_7 (sequence is synthesized)
gttatgatcatagctactacttcattgcaacctttattactgaccacatcagacatcatgctaaatacctgaatgcatgaaaaaactccaaataagagaatctcttcaggattataaaag

SEQ ID NO: 355285 - DNA, 120 bp, Artificial Sequence
  ENSG00000139684_8 (sequence is synthesized)
ttgtaaaatgcaactgtattgctgagcaaaaaaaaaaaaaattcaaaacattggattttatagtgctaaaagggctttattctatagttgaatcacctctgaataaagatataaaaccta

SEQ ID NO: 355286 - DNA, 120 bp, Artificial Sequence
  ENSG00000139684_9 (sequence is synthesized)
caactgaatgagcatgcctaagtagtggctccagagagtctgctttcagattttcttgccagctttgacccaagattaccctgggtctgcgagttttatcacctgctttatcatttgatt

SEQ ID NO: 355287 - DNA, 120 bp, Artificial Sequence
  ENSG00000139684_10 (sequence is synthesized)
acaagtatagtataactgtatttccttgtgggatagaagctgtaaaaaataagctgaaaataataggggatatatataaataaacgatctgagaaagaataaagaaaataattacaatca

SEQ ID NO: 355288 - DNA, 120 bp, Artificial Sequence
  ENSG00000139684_11 (sequence is synthesized)
gcttgatctagataatgtaactatgaaaaattaggattctgtgatattttcttaactttattttagaatataaaatgctacttctagtaagtttttaattatattcagacacttgaagtg

SEQ ID NO: 355289 - DNA, 120 bp, Artificial Sequence
  ENSG00000139684_12 (sequence is synthesized)
aaaacctgcctataaaattaattatatctaacactaaatttgatagaaataggaaagcttttggcagtgaaaaatattgttttccatcaaaccagtaaataacaagatttttaatgcttg

SEQ ID NO: 355290 - DNA, 120 bp, Artificial Sequence
  ENSG00000139684_13 (sequence is synthesized)
aatgatgattaatcttcagcattagcagatacttctttctttacacatggacctttgctgcagtagaataaaaaggacaaacttctacctaaattactccttattttatgtatatatttt

SEQ ID NO: 355291 - DNA, 120 bp, Artificial Sequence
  ENSG00000139684_14 (sequence is synthesized)
agcctcagaagttaagtattatttatcacacatgtgctttatattatttgactttcatattaatctattcattgtgctacttgatatttctagttgtttaagaataattactgaatccca

SEQ ID NO: 355292 - DNA, 120 bp, Artificial Sequence
  ENSG00000139684_15 (sequence is synthesized)
atgggcttgcaagttttttttaactaaaatatttttgaccgtccactactcacctaactctatatatgctaccatagtcctaattaaggaagttctgcttttatttttaagaaaaattca

SEQ ID NO: 355293 - DNA, 120 bp, Artificial Sequence
  ENSG00000139684_16 (sequence is synthesized)
taagcttcagaatataatttaaaatattttagagtgaaaaatgagcactgaaaattatacatggtcatgatttttaaataaatttttatccatgtttaaggataatgtgtcaggcacatt

SEQ ID NO: 355294 - DNA, 120 bp, Artificial Sequence
  ENSG00000139684_17 (sequence is synthesized)
gatctaaaatgtaattacgatggtaaatgttcaaatctagatcagtgtgtaatgtggtacattagtttgtaaaatgctttcacagcattaactcattgttaattcttataccgccaaatg

SEQ ID NO: 355295 - DNA, 120 bp, Artificial Sequence
  ENSG00000139684_18 (sequence is synthesized)
tctttcctatccatctgttttacaaatgaggagacaggctcagagaagtaacctacttatctaaggccacatagctagtaagtggtggaaccagaactggaactaaggccatttaactgc

SEQ ID NO: 355296 - DNA, 120 bp, Artificial Sequence
  ENSG00000139684_19 (sequence is synthesized)
aaatactgacctcctgtcatttatcaagccattttcagacggcatgatattctcctgaggagcaaaggaatggaattagagctagcacaaggagaaattgtgcatagcttgctgcctacg

SEQ ID NO: 355297 - DNA, 120 bp, Artificial Sequence
  ENSG00000139684_20 (sequence is synthesized)
taacttatgcagaagatctgagcagtcttcctgtttttagggatattttgcacatgtgaactatatagtgagaaaatgtcaaaaactaatacatgatatactgtttgtctcttagtgtcc

SEQ ID NO: 355298 - DNA, 120 bp, Artificial Sequence
  ENSG00000139684_21 (sequence is synthesized)
atccttgagtaatagaattttgttttagatttatttgaacatttaccatcacaattaaattttaggtcaacaaccagccttgagaaatccaaataccaatttgactataaatatagtaat

SEQ ID NO: 355299 - DNA, 120 bp, Artificial Sequence
  ENSG00000139684_22 (sequence is synthesized)
acgtttaactgcaataactatagctataagtgcgtaccaaaccatgttttttccaaatgaccttaatttcttggcactacccatgttggatacctcatttgcttccccaaagactgggcc

SEQ ID NO: 355300 - DNA, 120 bp, Artificial Sequence
  ENSG00000139684_23 (sequence is synthesized)
caaaatttctgttgtttctacaatgattctgcctgccaacaaagtctgaaaatctcaagtttgttataaaaacagcacagttagaacatgatgacattcctggagggaaaaataagtcca

SEQ ID NO: 355301 - DNA, 120 bp, Artificial Sequence
  ENSG00000139684_24 (sequence is synthesized)
cttatttgtttctaaaatgcctgtatcccaagcaactagaacacatagttggctatacttaatgaggagtcaagacaaaccattcaattcttctaaaaaagtaagaaagtattcaaagca

SEQ ID NO: 355302 - DNA, 120 bp, Artificial Sequence
  ENSG00000139684_25 (sequence is synthesized)
ccagagtcacaatgttgagctcaggtgcaattttctattcactttacttccagcatggtcgggttaagagtggactacatagcttgaagcggatttcgttgagattcgttgtaattgaat

SEQ ID NO: 355303 - DNA, 120 bp, Artificial Sequence
  ENSG00000139684_26 (sequence is synthesized)
gggggattgcagaaagtttttgaacatgacaggagatagatctgagagtgtcccagctttatggactgcctcttcctaactctgggaaagattggagtgttgaactaaactgcaaaatga

SEQ ID NO: 355304 - DNA, 120 bp, Artificial Sequence
  ENSG00000139687_0 (sequence is synthesized)
tttcccgcggttggacgcggcgctcagttgccgggcgggggagggcgcgtccggtttttctcaggggacgttgaaattatttttgtaacgggagtcgggagaggacggggcgtgccccga

SEQ ID NO: 355305 - DNA, 120 bp, Artificial Sequence
  ENSG00000139687_1 (sequence is synthesized)
cgtgcgcgcgcgtcgtcctccccggcgctcctccacagctcgctggctcccgccgcggaaaggcgtcatgccgcccaaaaccccccgaaaaacggccgccaccgccgccgctgccgccgc

SEQ ID NO: 355306 - DNA, 120 bp, Artificial Sequence
  ENSG00000139687_2 (sequence is synthesized)
ggaacccccggcaccgccgccgccgccccctcctgaggaggacccagagcaggacagcggcccggaggacctgcctctcgtcaggcttgagtttgaagaaacagaagaacctgattttac

SEQ ID NO: 355307 - DNA, 120 bp, Artificial Sequence
  ENSG00000139687_3 (sequence is synthesized)
tgcattatgtcagaaattaaagataccagatcatgtcagagagagagcttggttaacttgggagaaagtttcatctgtggatggagtattgggaggttatattcaaaagaaaaaggaact

SEQ ID NO: 355308 - DNA, 120 bp, Artificial Sequence
  ENSG00000139687_4 (sequence is synthesized)
gtggggaatctgtatctttattgcagcagttgacctagatgagatgtcgttcacttttactgagctacagaaaaacatagaaatcagtgtccataaattctttaacttactaaaagaaat

SEQ ID NO: 355309 - DNA, 120 bp, Artificial Sequence
  ENSG00000139687_5 (sequence is synthesized)
tgataccagtaccaaagttgataatgctatgtcaagactgttgaagaagtatgatgtattgtttgcactcttcagcaaattggaaaggacatgtgaacttatatatttgacacaacccag

SEQ ID NO: 355310 - DNA, 120 bp, Artificial Sequence
  ENSG00000139687_6 (sequence is synthesized)
cagttcgatatctactgaaataaattctgcattggtgctaaaagtttcttggatcacatttttattagctaaaggggaagtattacaaatggaagatgatctggtgatttcatttcagtt

SEQ ID NO: 355311 - DNA, 120 bp, Artificial Sequence
  ENSG00000139687_7 (sequence is synthesized)
aatgctatgtgtccttgactattttattaaactctcacctcccatgttgctcaaagaaccatataaaacagctgttatacccattaatggttcacctcgaacacccaggcgaggtcagaa

SEQ ID NO: 355312 - DNA, 120 bp, Artificial Sequence
  ENSG00000139687_8 (sequence is synthesized)
caggagtgcacggatagcaaaacaactagaaaatgatacaagaattattgaagttctctgtaaagaacatgaatgtaatatagatgaggtgaaaaatgtttatttcaaaaattttatacc

SEQ ID NO: 355313 - DNA, 120 bp, Artificial Sequence
  ENSG00000139687_9 (sequence is synthesized)
ttttatgaattctcttggacttgtaacatctaatggacttccagaggttgaaaatctttctaaacgatacgaagaaatttatcttaaaaataaagatctagatgcaagattatttttgga

SEQ ID NO: 355314 - DNA, 120 bp, Artificial Sequence
  ENSG00000139687_10 (sequence is synthesized)
tcatgataaaactcttcagactgattctatagacagttttgaaacacagagaacaccacgaaaaagtaaccttgatgaagaggtgaatgtaattcctccacacactccagttaggactgt

SEQ ID NO: 355315 - DNA, 120 bp, Artificial Sequence
  ENSG00000139687_11 (sequence is synthesized)
tatgaacactatccaacaattaatgatgattttaaattcagcaagtgatcaaccttcagaaaatctgatttcctattttaacaactgcacagtgaatccaaaagaaagtatactgaaaag

SEQ ID NO: 355316 - DNA, 120 bp, Artificial Sequence
  ENSG00000139687_12 (sequence is synthesized)
agtgaaggatataggatacatctttaaagagaaatttgctaaagctgtgggacagggttgtgtcgaaattggatcacagcgatacaaacttggagttcgcttgtattaccgagtaatgga

SEQ ID NO: 355317 - DNA, 120 bp, Artificial Sequence
  ENSG00000139687_13 (sequence is synthesized)
atccatgcttaaatcagaagaagaacgattatccattcaaaattttagcaaacttctgaatgacaacatttttcatatgtctttattggcgtgcgctcttgaggttgtaatggccacata

SEQ ID NO: 355318 - DNA, 120 bp, Artificial Sequence
  ENSG00000139687_14 (sequence is synthesized)
tagcagaagtacatctcagaatcttgattctggaacagatttgtctttcccatggattctgaatgtgcttaatttaaaagcctttgatttttacaaagtgatcgaaagttttatcaaagc

SEQ ID NO: 355319 - DNA, 120 bp, Artificial Sequence
  ENSG00000139687_15 (sequence is synthesized)
agaaggcaacttgacaagagaaatgataaaacatttagaacgatgtgaacatcgaatcatggaatcccttgcatggctctcagattcacctttatttgatcttattaaacaatcaaagga

SEQ ID NO: 355320 - DNA, 120 bp, Artificial Sequence
  ENSG00000139687_16 (sequence is synthesized)
ccgagaaggaccaactgatcaccttgaatctgcttgtcctcttaatcttcctctccagaataatcacactgcagcagatatgtatctttctcctgtaagatctccaaagaaaaaaggttc

SEQ ID NO: 355321 - DNA, 120 bp, Artificial Sequence
  ENSG00000139687_17 (sequence is synthesized)
aactacgcgtgtaaattctactgcaaatgcagagacacaagcaacctcagccttccagacccagaagccattgaaatctacctctctttcactgttttataaaaaagtgtatcggctagc

SEQ ID NO: 355322 - DNA, 120 bp, Artificial Sequence
  ENSG00000139687_18 (sequence is synthesized)
ctatctccggctaaatacactttgtgaacgccttctgtctgagcacccagaattagaacatatcatctggacccttttccagcacaccctgcagaatgagtatgaactcatgagagacag

SEQ ID NO: 355323 - DNA, 120 bp, Artificial Sequence
  ENSG00000139687_19 (sequence is synthesized)
aggagacattcaaacgtgttttgatcaaagaagaggagtatgattctattatagtattctataactcggtcttcatgcagagactgaaaacaaatattttgcagtatgcttccaccaggc

SEQ ID NO: 355324 - DNA, 120 bp, Artificial Sequence
  ENSG00000139687_20 (sequence is synthesized)
cccctaccttgtcaccaatacctcacattcctcgaagcccttacaagtttcctagttcacccttacggattcctggagggaacatctatatttcacccctgaagagtccatataaaattt

SEQ ID NO: 355325 - DNA, 120 bp, Artificial Sequence
  ENSG00000139687_21 (sequence is synthesized)
cagaaggtctgccaacaccaacaaaaatgactccaagatcaagaatcttagtatcaattggtgaatcattcgggacttctgagaagttccagaaaataaatcagatggtatgtaacagcg

SEQ ID NO: 355326 - DNA, 120 bp, Artificial Sequence
  ENSG00000139687_22 (sequence is synthesized)
accgtgtgctcaaaagaagtgctgaaggaagcaaccctcctaaaccactgaaaaaactacgctttgatattgaaggatcagatgaagcagatggaagtaaacatctcccaggagagtcca

SEQ ID NO: 355327 - DNA, 120 bp, Artificial Sequence
  ENSG00000139687_23 (sequence is synthesized)
aatttcagcagaaactggcagaaatgacttctactcgaacacgaatgcaaaagcagaaaatgaatgatagcatggatacctcaaacaaggaagagaaatgaggatctcaggaccttggtg

SEQ ID NO: 355328 - DNA, 120 bp, Artificial Sequence
  ENSG00000139687_24 (sequence is synthesized)
gacactgtgtacacctctggattcattgtctctcacagatgtgactgtataactttcccaggttctgtttatggccacatttaatatcttcagctctttttgtggatataaaatgtgcag

SEQ ID NO: 355329 - DNA, 120 bp, Artificial Sequence
  ENSG00000139687_25 (sequence is synthesized)
atgcaattgtttgggtgattcctaagccacttgaaatgttagtcattgttatttatacaagattgaaaatcttgtgtaaatcctgccatttaaaaagttgtagcagattgtttcctcttc

SEQ ID NO: 355330 - DNA, 120 bp, Artificial Sequence
  ENSG00000139687_26 (sequence is synthesized)
caaagtaaaattgctgtgctttatggatagtaagaatggccctagagtgggagtcctgataacccaggcctgtctgactactttgccttcttttgtagcatataggtgatgtttgctctt

SEQ ID NO: 355331 - DNA, 120 bp, Artificial Sequence
  ENSG00000139687_27 (sequence is synthesized)
gtttttattaatttatatgtatatttttttaatttaacatgaacacccttagaaaatgtgtcctatctatcttccaaatgcaatttgattgactgcccattcaccaaaattatcctgaac

SEQ ID NO: 355332 - DNA, 120 bp, Artificial Sequence
  ENSG00000139687_28 (sequence is synthesized)
tcttctgcaaaaatggatattattagaaattagaaaaaaattactaattttacacattagattttattttactattggaatctgatatactgtgtgcttgttttataaaattttgctttt

SEQ ID NO: 355333 - DNA, 120 bp, Artificial Sequence
  ENSG00000139687_29 (sequence is synthesized)
aattaaataaaagctggaagcaaagtataaccatatgatactatcatactactgaaacagatttcatacctcagaatgtaaaagaacttactgattattttcttcatccaacttatgttt

SEQ ID NO: 355334 - DNA, 120 bp, Artificial Sequence
  ENSG00000139687_30 (sequence is synthesized)
ttaaatgaggattattgatagtactcttggtttttataccattcagatcactgaatttataaagtacccatctagtacttgaaaaagtaaagtgttctgccagatcttaggtatagagga

SEQ ID NO: 355335 - DNA, 120 bp, Artificial Sequence
  ENSG00000139687_31 (sequence is synthesized)
ccctaacacagtatatcccaagtgcactttctaatgtttctgggtcctgaagaattaagatacaaattaattttactccataaacagactgttaattataggagccttaatttttttttc

SEQ ID NO: 355336 - DNA, 120 bp, Artificial Sequence
  ENSG00000139687_32 (sequence is synthesized)
atagagatttgtctaattgcatctcaaaattattctgccctccttaatttgggaaggtttgtgttttctctggaatggtacatgtcttccatgtatcttttgaactggcaattgtctatt

SEQ ID NO: 355337 - DNA, 120 bp, Artificial Sequence
  ENSG00000139687_33 (sequence is synthesized)
tatcttttatttttttaagtcagtatggtctaacactggcatgttcaaagccacattatttctagtccaaaattacaagtaatcaagggtcattatgggttaggcattaatgtttctatc

SEQ ID NO: 355338 - DNA, 120 bp, Artificial Sequence
  ENSG00000139687_34 (sequence is synthesized)
tgattttgtgcaaaagcttcaaattaaaacagctgcattagaaaaagaggcgcttctcccctcccctacacctaaaggtgtatttaaactatcttgtgtgattaacttatttagagatgc

SEQ ID NO: 355339 - DNA, 120 bp, Artificial Sequence
  ENSG00000139687_35 (sequence is synthesized)
tgtaacttaaaataggggatatttaaggtagcttcagctagcttttaggaaaatcactttgtctaactcagaattatttttaaaaagaaatctggtcttgttagaaaacaaaattttatt

SEQ ID NO: 355340 - DNA, 120 bp, Artificial Sequence
  ENSG00000139687_36 (sequence is synthesized)
ttgtgctcatttaagtttcaaacttactattttgacagttattttgataacaatgacactagaaaacttgactccatttcatcattgtttctgcatgaatatcatacaaatcagttagtt

SEQ ID NO: 355341 - DNA, 120 bp, Artificial Sequence
  ENSG00000139687_37 (sequence is synthesized)
tttaggtcaagggcttactatttctgggtcttttgctactaagttcacattagaattagtgccagaattttaggaacttcagagatcgtgtattgagatttcttaaataatgcttcagat

SEQ ID NO: 355342 - DNA, 120 bp, Artificial Sequence
  ENSG00000139687_38 (sequence is synthesized)
aatgcttcagatattattgctttattgcttttttgtattggttaaaactgtacatttaaaattgctatgttactattttctacaattaatagtttgtctattttaaaataaattagttgt

SEQ ID NO: 355343 - DNA, 120 bp, Artificial Sequence
  ENSG00000139687_39 (sequence is synthesized)
gactgatgtaatcacttcttattgtatagatgtatcaaaatatcacattgaacaccttaaatataaactttttcgtttgtcaattgtacctccataaagctggaaaaaaatgtgacctca

SEQ ID NO: 355344 - DNA, 120 bp, Artificial Sequence
  ENSG00000139687_40 (sequence is synthesized)
aatttatgccccttttactttctcattcagcagttgcttattgaatgtctagtgggtaccaaacatggttctaaggctgacaggatgataaaaaataaatcagacatggactttgcccat

SEQ ID NO: 355345 - DNA, 120 bp, Artificial Sequence
  ENSG00000139687_41 (sequence is synthesized)
aagtagtgtaagttatagaaggaaagataagacatggaaacaaatgattagagtatatggtagaaagtggtttgggtcaaaatacaacaaatggaggtttgggagacaagaaagtttttc

SEQ ID NO: 355346 - DNA, 120 bp, Artificial Sequence
  ENSG00000139687_42 (sequence is synthesized)
cagctgtggaagaccaaagaataccatataaaagaagtagtatttgaaattaacatggaagagtggttaggattggggaaaggcattctcagtaaagtgttgggggagggcattcccagt

SEQ ID NO: 355347 - DNA, 120 bp, Artificial Sequence
  ENSG00000139687_43 (sequence is synthesized)
gaagaaaagcaagaaacaagaaaaagatatgaatgaaattgcatggggaagagtggcctattctaagggaacagcttaactaagtttttattactattggatgttgtaataactatgtat

SEQ ID NO: 355348 - DNA, 120 bp, Artificial Sequence
  ENSG00000139687_44 (sequence is synthesized)
ttttttgtatataagctataactcatactatttcagtgggtgatgagtgatgagatgggaagtatatttaaataaaaataacttgctaatataattagatagcattaaggaagtatgagt

SEQ ID NO: 355349 - DNA, 120 bp, Artificial Sequence
  ENSG00000139687_45 (sequence is synthesized)
agagtcctgccttggaacaggttaaaggagggcaagagaaggtccgaggcctgcccctgaggcctaccacaccaaacgttataacaacacaacagtttttatatattttcagttttgcat

SEQ ID NO: 355350 - DNA, 120 bp, Artificial Sequence
  ENSG00000139687_46 (sequence is synthesized)
aatatgaagttaaagacttaagtaaattgagtaaatagtagtttttttttttttaatttcacagatcaatagagttaactcctgagttatatgcatacaaccccaaagttgtttgctgtc

SEQ ID NO: 355351 - DNA, 120 bp, Artificial Sequence
  ENSG00000139687_47 (sequence is synthesized)
ccgcctggcatattcttgagacattggagctaggaagttggaaattgatagaaaattttgtcacttgtaacagagctaaagcaatatggattatggtggaccctatcacttggaatactt

SEQ ID NO: 355352 - DNA, 120 bp, Artificial Sequence
  ENSG00000139687_48 (sequence is synthesized)
cctggagaaagaaatgttatgcaagaggccaagaagaagctaaacaaacaagccatgatggattcccatctcagcttattaccattgggacatgtcctttttgtccaatcacatttctac

SEQ ID NO: 355353 - DNA, 120 bp, Artificial Sequence
  ENSG00000139687_49 (sequence is synthesized)
gaggaagaatgtgagctgcatgggaaaagacaggaggatttacaaagagtgggtgtttaattggggatggaattaggtagttattctgatttttagatttttcatatcttttatttggtc

SEQ ID NO: 355354 - DNA, 120 bp, Artificial Sequence
  ENSG00000139687_50 (sequence is synthesized)
caatgaagcagaaaatttaaatgaagttattacctttgcctgatttttgacacacctcaaactataacttgaggttgctaactatgaaacactggcatttaatgatttaaagtaaagaat

SEQ ID NO: 355355 - DNA, 120 bp, Artificial Sequence
  ENSG00000139687_51 (sequence is synthesized)
gggttctgaaaatgaggaaccaggacttgcagagtaggcagttgctggaggaagaatgtgagctgcatgggaaaagacaggaggatttacaaagagtgggtgtttaattggggatggaat

SEQ ID NO: 355356 - DNA, 120 bp, Artificial Sequence
  ENSG00000139697_0 (sequence is synthesized)
gcgtcaagatggcggcggggaggtaggcagagcaggacgccgctgctgccgccgccaccgccgcctccgctccagtcgcctctggtccttcaaactcacacctcccgggaggagctgtgc

SEQ ID NO: 355357 - DNA, 120 bp, Artificial Sequence
  ENSG00000139697_1 (sequence is synthesized)
tggcgccgggtcccgcggggaaaatggtggagccagggcaagatttactgcttgctgctttgagtgagagtggaattagtccgaatgacctctttgatattgatggtggagatgcagggc

SEQ ID NO: 355358 - DNA, 120 bp, Artificial Sequence
  ENSG00000139697_2 (sequence is synthesized)
ttgcaactccaatgcctaccccgtcagttcagcagtcagtgccacttagtgcattagaactaggtttggagaccgaagcagcagttcctgttaaacaagaaccagagactgtacctactc

SEQ ID NO: 355359 - DNA, 120 bp, Artificial Sequence
  ENSG00000139697_3 (sequence is synthesized)
cagcactattaaatgtgaggcagcctccatctactacaacatttgtgctgaatcaaataaatcatcttccacccttgggatctacaattgtaatgactaaaacaccacctgtaacaacca

SEQ ID NO: 355360 - DNA, 120 bp, Artificial Sequence
  ENSG00000139697_4 (sequence is synthesized)
acaggcaaaccatcactttaactaagtttatccagactactgcaagcacacgcccgtcagtctcagcaccaacagtacgaaatgccatgacctctgcaccttcaaaagaccaagttcagc

SEQ ID NO: 355361 - DNA, 120 bp, Artificial Sequence
  ENSG00000139697_5 (sequence is synthesized)
ttaaagatctactgaaaaataatagtcttaatgaactgatgaaactaaagccacctgctaatattgctcagccagtagcaacagcagctactgatgtaagcaatggtacagtaaagaaag

SEQ ID NO: 355362 - DNA, 120 bp, Artificial Sequence
  ENSG00000139697_6 (sequence is synthesized)
agtcttctaataaagaaggagctagaatgtggataaacgacatgaagatgaggagtttttccccaaccatgaaggttcctgttgtaaaagaagatgatgaaccagaggaagaagatgaag

SEQ ID NO: 355363 - DNA, 120 bp, Artificial Sequence
  ENSG00000139697_7 (sequence is synthesized)
aagaaatgggtcatgcagaaacctatgcagaatacatgccaataaaattaaaaattggcctacgtcatccagatgctgtagtggaaaccagctctttatccagtgttactcctcctgatg

SEQ ID NO: 355364 - DNA, 120 bp, Artificial Sequence
  ENSG00000139697_8 (sequence is synthesized)
tttggtacaaaacatccatttctgaggaaaccattgataatggctggttatcagcattgcagcttgaggcaattacatatgcagcccagcaacatgaaactttcctacctaatggagatc

SEQ ID NO: 355365 - DNA, 120 bp, Artificial Sequence
  ENSG00000139697_9 (sequence is synthesized)
gtgctggcttcttaataggtgatggtgccggtgtaggaaaaggaaggacgatagcaggaatcatctatgaaaattatttgttgagtagaaaacgagcattgtggtttagtgtttcaaatg

SEQ ID NO: 355366 - DNA, 120 bp, Artificial Sequence
  ENSG00000139697_10 (sequence is synthesized)
acttaaagtatgatgctgaaagagatttaagggatattggagcaaaaaacattttggttcattcgttaaataagtttaaatacggaaaaatttcttccaaacataatgggagtgtgaaaa

SEQ ID NO: 355367 - DNA, 120 bp, Artificial Sequence
  ENSG00000139697_11 (sequence is synthesized)
agggtgttatttttgctacttactcttcacttattggtgaaagccagtctggcggcaagtataaaactaggttaaaacaacttctgcattggtgcggtgatgacttcgatggagtgatag

SEQ ID NO: 355368 - DNA, 120 bp, Artificial Sequence
  ENSG00000139697_12 (sequence is synthesized)
tgtttgatgagtgtcataaagccaaaaacttatgtcctgttggttcttcaaagccaaccaagacaggcttagcagttttagagcttcagaacaaattgccaaaagccagagttgtttatg

SEQ ID NO: 355369 - DNA, 120 bp, Artificial Sequence
  ENSG00000139697_13 (sequence is synthesized)
ctagtgcaactggtgcttctgaaccacgcaacatggcctatatgaaccgtcttggcatatggggtgagggtactccatttagagaattcagtgattttattcaagcagtagaacggagag

SEQ ID NO: 355370 - DNA, 120 bp, Artificial Sequence
  ENSG00000139697_14 (sequence is synthesized)
gagttggtgccatggaaatagttgctatggatatgaagcttagaggaatgtacattgctcgacaactgagctttactggagtgaccttcaaaattgaggaagttcttctttctcagagct

SEQ ID NO: 355371 - DNA, 120 bp, Artificial Sequence
  ENSG00000139697_15 (sequence is synthesized)
acgttaaaatgtataacaaagctgtcaagctgtgggtcatcgccagagagcggtttcagcaagctgcagatctgattgatgctgagcaacgaatgaagaagtccatgtggggtcagttct

SEQ ID NO: 355372 - DNA, 120 bp, Artificial Sequence
  ENSG00000139697_16 (sequence is synthesized)
ggtctgctcaccagaggttcttcaaatacttatgcatagcatccaaagttaaaagggttgtgcaactagctcgagaggaaatcaagaatggaaaatgtgttgtaattggtctgcagtcta

SEQ ID NO: 355373 - DNA, 120 bp, Artificial Sequence
  ENSG00000139697_17 (sequence is synthesized)
caggagaagctagaacattagaagctttggaagagggcgggggagaattgaatgattttgtttcaactgccaaaggtgtgttgcagtcactcattgaaaaacattttcctgctccagaca

SEQ ID NO: 355374 - DNA, 120 bp, Artificial Sequence
  ENSG00000139697_18 (sequence is synthesized)
ggaaaaaactttatagtttactaggaatcgatttgacagctccaagtaacaacagttcgccaagagatagtccttgtaaagaaaataaaataaagaagcggaaaggtgaagaaataactc

SEQ ID NO: 355375 - DNA, 120 bp, Artificial Sequence
  ENSG00000139697_19 (sequence is synthesized)
gagaagccaaaaaagcacgaaaagtaggtggccttactggtagcagttctgacgacagtggaagtgaatctgatgcctctgataatgaagaaagtgactatgagagctctaaaaacatga

SEQ ID NO: 355376 - DNA, 120 bp, Artificial Sequence
  ENSG00000139697_20 (sequence is synthesized)
gttctggagatgatgacgatttcaacccatttttagatgagtctaatgaggatgatgaaaatgatccctggttaattagaaaagaccacaagaaaaacaaagagaaaaaaaagaagaaaa

SEQ ID NO: 355377 - DNA, 120 bp, Artificial Sequence
  ENSG00000139697_21 (sequence is synthesized)
gtatagatccagattctattcaaagtgccttattagcatcaggtcttggatcaaaacgacctagtttttcatctacaccagttatctcacctgctcctaacagtacaccagctaacagta

SEQ ID NO: 355378 - DNA, 120 bp, Artificial Sequence
  ENSG00000139697_22 (sequence is synthesized)
acaccaacagtaacagtagccttataacaagtcaggatgctgtggaaagggctcagcagatgaagaaagacctgcttgataagctagaaaaattagctgaagacctcccccctaataccc

SEQ ID NO: 355379 - DNA, 120 bp, Artificial Sequence
  ENSG00000139697_23 (sequence is synthesized)
tggatgaacttatcgatgaacttggtggccctgagaacgttgctgagatgactggccgcaagggacgggttgtgagcaatgatgatggaagcatatcttatgagtcaagatctgaacttg

SEQ ID NO: 355380 - DNA, 120 bp, Artificial Sequence
  ENSG00000139697_24 (sequence is synthesized)
atgtgcctgtggaaatactaaacatcacagaaaaacaacgatttatggatggagataagaatattgctatcatctcagaagctgccagctcgggtatttcattacaagcagataggagag

SEQ ID NO: 355381 - DNA, 120 bp, Artificial Sequence
  ENSG00000139697_25 (sequence is synthesized)
ctaaaaatcaaaggcgaagagttcatatgactttagaattaccttggagcgctgatagagcaattcaacagttcggacgtactcatagatcaaaccaagttactgctcctgagtatgtct

SEQ ID NO: 355382 - DNA, 120 bp, Artificial Sequence
  ENSG00000139697_26 (sequence is synthesized)
ttctgatatctgaactggcaggagaacaaagatttgcatctattgttgctaaaagacttgagagtttgggggcacttacacatggtgatagaagggcaacagaatctagagatctgagca

SEQ ID NO: 355383 - DNA, 120 bp, Artificial Sequence
  ENSG00000139697_27 (sequence is synthesized)
ggttcaactttgataataagtatggaagaaatgctttagaaattgtcatgaaatccattgtaaacttggattctcctatggtatcaccacctccagactatcctggagaattttttaaag

SEQ ID NO: 355384 - DNA, 120 bp, Artificial Sequence
  ENSG00000139697_28 (sequence is synthesized)
atgttcgacaaggactgataggcgttggcctgataaatgtagaagatcgctcgggaattcttactctcgataaagattataacaacataggaaaattcttaaatagaattttaggcatgg

SEQ ID NO: 355385 - DNA, 120 bp, Artificial Sequence
  ENSG00000139697_29 (sequence is synthesized)
aggtgcatcagcagaatgcgttatttcagtattttgcggacacacttactgcagttgttcaaaatgccaaaaaaaatggaagatatgatatgggaatcttagatcttggttctggagatg

SEQ ID NO: 355386 - DNA, 120 bp, Artificial Sequence
  ENSG00000139697_30 (sequence is synthesized)
aaaaagtgcggaaaagtgatgttaaaaagtttctgactccaggatattcaacctctggccacgtagaattatacacaattagtgtagagaggggaatgtcatgggaggaagctaccaaga

SEQ ID NO: 355387 - DNA, 120 bp, Artificial Sequence
  ENSG00000139697_31 (sequence is synthesized)
tttgggctgagctgacaggaccagacgatggcttttacttgtcattgcaaataaggaacaacaagaaaactgccatcttagttaaagaagtgaatcctaaaaagaaacttttcttagttt

SEQ ID NO: 355388 - DNA, 120 bp, Artificial Sequence
  ENSG00000139697_32 (sequence is synthesized)
atcgaccaaatactgggaagcagctcaaattagaaatttatgctgatctaaaaaagaaatataagaaggtcgtctcagatgatgccctgatgcactggttagatcagtataattcatctg

SEQ ID NO: 355389 - DNA, 120 bp, Artificial Sequence
  ENSG00000139697_33 (sequence is synthesized)
cagatacttgtactcatgcttattggcgcggcaattgcaaaaaagcaagcttggggctagtttgtgaaataggtcttcgttgccgtacatattatgtattatgtggttcagtgctgagtg

SEQ ID NO: 355390 - DNA, 120 bp, Artificial Sequence
  ENSG00000139697_34 (sequence is synthesized)
tctggacaaaagttgagggtgttctagcatctgtcagtggcacaaacgtgaagatgcagatcgtgcggctaagaacggaagatgggcaacggattgtaggtttgatcattccggcaaatt

SEQ ID NO: 355391 - DNA, 120 bp, Artificial Sequence
  ENSG00000139697_35 (sequence is synthesized)
gtgtgtctcctcttgtaaatctcctatcaacttcagaccagtctcaacagcttgcggtccaacagaaacagctatggcaacagcatcaccctcagagcatcaccaacttgagcaacgcat

SEQ ID NO: 355392 - DNA, 120 bp, Artificial Sequence
  ENSG00000139697_36 (sequence is synthesized)
gaagaacagacaggtttcaacatggatggatctgaaatgctgttgaagcatatcatttgcataaaaatcagggacagtttccaaagaattatatatttttttcagttgtgctctctagtt

SEQ ID NO: 355393 - DNA, 120 bp, Artificial Sequence
  ENSG00000139697_37 (sequence is synthesized)
agtttttttgggagtaaggacaaacctggaatagatagcaaaactgaaaatcagcagtgctgatggtggtacatatgtctttcctttagcttctcccctgataattcccatctgctttta

SEQ ID NO: 355394 - DNA, 120 bp, Artificial Sequence
  ENSG00000139697_38 (sequence is synthesized)
cttcgggtgagcagagggggatgtgtgtgtgcgtgtgtgtcagtctgtttgtgagtgtgttaaaggctacagaccacagttggtttaaaatgcttggaacttcccaaactggctttactt

SEQ ID NO: 355395 - DNA, 120 bp, Artificial Sequence
  ENSG00000139697_39 (sequence is synthesized)
tatgtttatacagtgctcagggttaacgcagtacatccatgccattgctgtgggaggtatccccggatgcatgtgttttgagtctataaatatagaaaatatatattggtttctttttcc

SEQ ID NO: 355396 - DNA, 120 bp, Artificial Sequence
  ENSG00000139697_40 (sequence is synthesized)
aacttaataggtttattaaagcatgaaatgaaaggttgcatatcatgcattcaggttattttctaatttttgttctgacagtgcatgtctttggaagcatgctgaaacaagattaacaca

SEQ ID NO: 355397 - DNA, 120 bp, Artificial Sequence
  ENSG00000139697_41 (sequence is synthesized)
ggagtcgagtaacagagagaaacatttgttagatgtacagcattggttattgcatttttatagtgtttatacctgggtattgcttcaaaccctgcagacccctccttccccttctccctg

SEQ ID NO: 355398 - DNA, 120 bp, Artificial Sequence
  ENSG00000139697_42 (sequence is synthesized)
ccctgggtttctggtcaaggtaatgaatacatacatttttctgtgataaaactcttaaaagttaattttaatgtattaatagtattcctaatgtgtgctgcagaaatggctatgagcctc

SEQ ID NO: 355399 - DNA, 120 bp, Artificial Sequence
  ENSG00000139697_43 (sequence is synthesized)
ttaaatttacatttgcaacttaaaggtagttttagaaggaagtacaaattggctttcatcttgcaaacaatcgttttttacttcattatcttaatttgctttgtcactcataaaaaggaa

SEQ ID NO: 355400 - DNA, 120 bp, Artificial Sequence
  ENSG00000139697_44 (sequence is synthesized)
accatacctgagttgtagacaatgaggaaacacttgaggcttctgctgtgtgttcttttgttattgttgttattgttgttactcagtaacttgaatattgtttaatgtgttgtaagacgt

SEQ ID NO: 355401 - DNA, 120 bp, Artificial Sequence
  ENSG00000139697_45 (sequence is synthesized)
agagtttatctcaagctgttaaaaatggtaatgtacaaatgtgaatagacacttatctatataatatgggtaagttttgtttcgcctataatagatgtttataaaaacaagtgaggggac

SEQ ID NO: 355402 - DNA, 120 bp, Artificial Sequence
  ENSG00000139697_46 (sequence is synthesized)
acaggttgcactattgaaaaatcgagattgtataaacctggtaaaaagctgcaagatgccaaaatcttgtagatgtcaaataaaaagttattatactaacaagaagtggactcttgttta

SEQ ID NO: 355403 - DNA, 120 bp, Artificial Sequence
  ENSG00000139697_47 (sequence is synthesized)
ggccctcactggtgaccttcagaagtagtctgtgacggggactcagcagaatttgtgtgttgtctcagcattccaggtagccttatagtttggcttaaaacttatccctaaaatgtaaga

SEQ ID NO: 355404 - DNA, 120 bp, Artificial Sequence
  ENSG00000139697_48 (sequence is synthesized)
tggcattgagggaaagggtataatgatagtacttctgaatgttttttaagttgaattgtttgtaaacttcttgcagaattgggtgagatgtgtgttaaaactgacaaacctggctgaaag

SEQ ID NO: 355405 - DNA, 120 bp, Artificial Sequence
  ENSG00000139697_49 (sequence is synthesized)
cttagggcgttcatcctcttgtgtctcctttagcctgagtttggttatgtcaagcttaccgtaagttttcttaggatttatttattcttggtgcctaaaagaataaattgaaagtacttt

SEQ ID NO: 355406 - DNA, 120 bp, Artificial Sequence
  ENSG00000139697_50 (sequence is synthesized)
ctgttctttggcacattttgcccagcggatgcaacttctatcctcagtccagttcatatatctcaggcagtgatccattttgtatcagccagtttcccttgttagggccgctagacccgg

SEQ ID NO: 355407 - DNA, 120 bp, Artificial Sequence
  ENSG00000139697_51 (sequence is synthesized)
ctggcagccaagagcagcactctccccaccttcagcagaacttctcagctcatgtgtgtgtttttaaaagcagtaggcagcttccatcagcaatggaagtgtcccccactccagtggtgg

SEQ ID NO: 355408 - DNA, 120 bp, Artificial Sequence
  ENSG00000139697_52 (sequence is synthesized)
aggtgcagtcgctggacctgaggaagtggggaagcattacaaaccctcctgcagtaagaatggcagagttgggaaggatcttctctcgcaggctgttggcccaactcctcttttctgtgt

SEQ ID NO: 355409 - DNA, 120 bp, Artificial Sequence
  ENSG00000139697_53 (sequence is synthesized)
atgagggcatcttagttttttatggcgttttcaaagcagcatatgaggattcttagcatgcagctaagtgacaacccccatggcctatgatgtaatgtttgctctggactagccatcttg

SEQ ID NO: 355410 - DNA, 120 bp, Artificial Sequence
  ENSG00000139697_54 (sequence is synthesized)
ataaataggagtgtatgtatcttaggttctttgtagaacagctatttttttttctcattaaaaaggcctctgaaagccctctcaaaatggacctcacaaaggcaaccagtgtgaatggat

SEQ ID NO: 355411 - DNA, 120 bp, Artificial Sequence
  ENSG00000139697_55 (sequence is synthesized)
gggagctggggtgctgcatgcccaggctggtcatggtgtgtgcagcacccagagagttgcacccaccccttcttcaggtggacatccgacctttacactgtggtcttgcaaaaatcagcg

SEQ ID NO: 355412 - DNA, 120 bp, Artificial Sequence
  ENSG00000139697_56 (sequence is synthesized)
tggtcttgcaaaaatcagcgagttagtttggccgccctgtgaagcttcagcattcaaggtcctcttctgttaaaacccaactcgtagccgggcgtggtggctcactcctataatcccagc

SEQ ID NO: 355413 - DNA, 120 bp, Artificial Sequence
  ENSG00000139697_57 (sequence is synthesized)
aggccaggagttcgagaccagcctggtccacatggcaaaaccccatctgtaccaaaaaatacaaaaaatttgccgctgacttctgtaaaataggtccattcattgcaggatctaaatgcc

SEQ ID NO: 355414 - DNA, 120 bp, Artificial Sequence
  ENSG00000139697_58 (sequence is synthesized)
gatctaaatgccacacctgaattcagaggccttgtttaattaaccccatgtccactttgcctctgcaatgcctttttctttttagcaatatggctctgagcacaaagatttggttggaaa

SEQ ID NO: 355415 - DNA, 120 bp, Artificial Sequence
  ENSG00000139697_59 (sequence is synthesized)
tcatgttcgtgttttcagagtttacagcgtcaattgtactgaaaaccacttccagagtctaaagcagctcagatgttatctctgggggaattagtgttcccctcatttagcaacctccat

SEQ ID NO: 355416 - DNA, 120 bp, Artificial Sequence
  ENSG00000139697_60 (sequence is synthesized)
accacaaggtctctgtctgtagttactgggattatccagatacactatcaatgatacaaattcataggagtattaatgcatttctttaaacacaacttgattaagaagcaaatatgttaa

SEQ ID NO: 355417 - DNA, 120 bp, Artificial Sequence
  ENSG00000139697_61 (sequence is synthesized)
gcagttttctttttctgctgctaaattacagttagacacttcagtatcttctctttacatgtgtatataaattagtaagaacctgcatccaaagcaatgtagtgtgtgtatgtatctata

SEQ ID NO: 355418 - DNA, 120 bp, Artificial Sequence
  ENSG00000139697_62 (sequence is synthesized)
tatatttattctaactcagcacttcagaagcctttttgagttacaacaatattttagtttgcctcatctgtagaggtaaaatttctatattaccaagctccagaggaatatgatatttta

SEQ ID NO: 355419 - DNA, 120 bp, Artificial Sequence
  ENSG00000139697_63 (sequence is synthesized)
caggcacaattttctggctgtagtccctggggcattcatttgctggcctccatgggatgctgttagaacaattgttagccggcaagagaagaaaggctaccaggacagcatttataattg

SEQ ID NO: 355420 - DNA, 120 bp, Artificial Sequence
  ENSG00000139697_64 (sequence is synthesized)
tagaatgggagccttcttccctctcccctccactttcattttagcatgagataaaaaaatagattggaaatgattgttgcatctcacttcatggaagtaggggcagaagttccctctgga

SEQ ID NO: 355421 - DNA, 120 bp, Artificial Sequence
  ENSG00000139697_65 (sequence is synthesized)
tccttttcttgacaagcagtcaagaggaaggtccccatacacatgtacctgtgtgatacttggtagtttctaagaatggtgctacataagcgttgctgttaggctgggatcctattaatg

SEQ ID NO: 355422 - DNA, 120 bp, Artificial Sequence
  ENSG00000139697_66 (sequence is synthesized)
aacgtttgattagttcaggcctcccaatggcaaaggcagacaccgtggagatggacatttactgactccccttctgtgtggcttcggtctccctggctaacaccacacctgtgcgtactg

SEQ ID NO: 355423 - DNA, 120 bp, Artificial Sequence
  ENSG00000139697_67 (sequence is synthesized)
cgctcggcccactttgctgcagaaacgtagcaagcgtttcatgtcagggctacagctgagagcaaaaactgcaaaaaaaaaaaaaaatgtctcattgaatgccagttgtctgatacaaat

SEQ ID NO: 355424 - DNA, 120 bp, Artificial Sequence
  ENSG00000139697_68 (sequence is synthesized)
gcagtgtcttttaagtgacagaaacacacctaaatacctgcaactcaagctcgctagcattttttttttgagtacttgagataaaatccaaaacccaccctctaattttgtgctgtattt

SEQ ID NO: 355425 - DNA, 120 bp, Artificial Sequence
  ENSG00000139697_69 (sequence is synthesized)
atatatatgtacataaatgtatatatagagaaatgttgagttcttctggattctgaatgtaaataattcttgtaaattgggactctgcccacctgtttctcccttttccctcttcccttc

SEQ ID NO: 355426 - DNA, 120 bp, Artificial Sequence
  ENSG00000139697_70 (sequence is synthesized)
agctctatttattcttttcttgactttcccatatggggcatcttatgacttttttttttttttttttttaagaaaagtatggaaaacttttcatttagaaaagtatttgttcctgtattt

SEQ ID NO: 355427 - DNA, 120 bp, Artificial Sequence
  ENSG00000139697_71 (sequence is synthesized)
tagaattcagttttgcatctttgctgtagaattcctgttttgtgttaatgttttttactatgtcttattgtgttgtgtgcaatgcattgtactggggggatgcacttgagtgccatttct

SEQ ID NO: 355428 - DNA, 120 bp, Artificial Sequence
  ENSG00000139697_72 (sequence is synthesized)
gatactgtcattgtatgactgctgatgctcgtttatgttgttctttggaagctatagtgagcctgatgttttcacattttaaaaaatgcttcctgagacttctttaagctcctctaactt

SEQ ID NO: 355429 - DNA, 120 bp, Artificial Sequence
  ENSG00000139697_73 (sequence is synthesized)
cttcagtgcatttgggatcaaacttagctcttagatcagcaaacctgacttgcttctacttttgcaatttttcaggccttaccatatttcttatctctgtcttcccacctgataggaaaa

SEQ ID NO: 355430 - DNA, 120 bp, Artificial Sequence
  ENSG00000139697_74 (sequence is synthesized)
tcttgcagatttgaaacagtggtttctggcctgctgctgcagcaaattccctatgtttatttaagaagtcgggcctatgcttttaacctacaaatgatgagtaatttacttgcaatgaac

SEQ ID NO: 355431 - DNA, 120 bp, Artificial Sequence
  ENSG00000139697_75 (sequence is synthesized)
acaggtagcctgctgctgtttataacctgttgaggatatttatagcaggcaggaggcaggcctagtgtgttattgacaggtgactttagagaatgtacattggccgggtgcggtggctca

SEQ ID NO: 355432 - DNA, 120 bp, Artificial Sequence
  ENSG00000139697_76 (sequence is synthesized)
gcctgggcaacagaccgagactccgtctcgaaaaaaaaaaaagagagagaatgtacattaaggaacaattgtcctccaaaagagagccaagcaactgctctggagcctcctaggctgact

SEQ ID NO: 355433 - DNA, 120 bp, Artificial Sequence
  ENSG00000139697_77 (sequence is synthesized)
gactctgctggagggtgagacaagcagattcccattgcagcactggtccctggggtaccctgaacggctgtgctctccacccttgtatcggtgagtggatcttgtctacatcagccgtaa

SEQ ID NO: 355434 - DNA, 120 bp, Artificial Sequence
  ENSG00000139697_78 (sequence is synthesized)
gcctagaagcagagcgggatcgaggcgtttttaataattcgagttgggaagacccggatggttcatcaaaatgatggtgttgagcacccgggaggcagacattgggtatttgttcacaat

SEQ ID NO: 355435 - DNA, 120 bp, Artificial Sequence
  ENSG00000139697_79 (sequence is synthesized)
tttgcacctgtaagaaaatgttcctttataactttcaaggattgccgtgagcgtctttggggccttttcattcatgtacaagtttcattcattactattcaacttggtagacttggtgaa

SEQ ID NO: 355436 - DNA, 120 bp, Artificial Sequence
  ENSG00000139697_80 (sequence is synthesized)
aaatgtaaaagcattctgtatttggatcagtcttgggaactaaatttgtcgtgaattggggcctgtcacagattgcctccagtgtgcatcctccacgcagaccctccttgctcagtctcc

SEQ ID NO: 355437 - DNA, 120 bp, Artificial Sequence
  ENSG00000139697_81 (sequence is synthesized)
ctctggcgcccatggggaagccgtgctgtggttggcagtgcggccatctgggctgccgcaacgtggcagggcaccgtccagcaagactgccccttagtgcagggctaagcaaggaaaaga

SEQ ID NO: 355438 - DNA, 120 bp, Artificial Sequence
  ENSG00000139697_82 (sequence is synthesized)
agaagcccaaaaaggcgggttctttttgatacttgtaattcaggcgtcctccagagtgaaggccactctgcaggcccctggtgagaacctgtctggcttttccactgcgggcccctaacc

SEQ ID NO: 355439 - DNA, 120 bp, Artificial Sequence
  ENSG00000139697_83 (sequence is synthesized)
agtaccctgcccttgtggcccatttgtgcctgggcagatgtttctggccagcagacactgaaggcctttttgctgtgacagtatttatggcactgaagaggataaagaagcttgagccct

SEQ ID NO: 355440 - DNA, 120 bp, Artificial Sequence
  ENSG00000139697_84 (sequence is synthesized)
ctttctgactcccactttatggggcagagagagctttttttctacatagcacattgcagtctcaccgctatcagaaaaatatcctgttcatggtttatactgaatttgcaaactactgat

SEQ ID NO: 355441 - DNA, 120 bp, Artificial Sequence
  ENSG00000139697_85 (sequence is synthesized)
atgatttttcaataaccacttgtatcttccatcatccatgagaggtgggaagaggtacactgtatctctgcaataaaactttggccaggttctacctcctctgagcaaaggatacttttc

SEQ ID NO: 355442 - DNA, 120 bp, Artificial Sequence
  ENSG00000139697_86 (sequence is synthesized)
tatgtaggtgtagatggttctcctttactaatctgacatggtgcatctggagacaacatctgatgggatccaaagacaacttgaaacaaaggtggatgtcagctcttggtgtgttttcat

SEQ ID NO: 355443 - DNA, 120 bp, Artificial Sequence
  ENSG00000139697_87 (sequence is synthesized)
ttggttctcttttttaaatctcccttttgttatcgctcctgttgtagcgtgtccatcagtgtgtgaagggtgcgccctgttccaatgatactgcattgctgcatccagcctttcgtggga

SEQ ID NO: 355444 - DNA, 120 bp, Artificial Sequence
  ENSG00000139697_88 (sequence is synthesized)
gcacggtaccaagcgtccggaattgattatcccaatcatttttgatatgtaactgaaaaatttggtctcatgcaataaaaatgtactggctgcattttagcaaggtttatttactcttgc

SEQ ID NO: 355445 - DNA, 120 bp, Artificial Sequence
  ENSG00000139697_89 (sequence is synthesized)
aagtaaaaacgatcaaccgtgaagcgtaacaaattctgtatttagtttttttttctgttgtggtggtttttgttttgttttttgtttttgtaagattctaaataaattaaatacgagtca

SEQ ID NO: 355446 - DNA, 120 bp, Artificial Sequence
  ENSG00000139714_0 (sequence is synthesized)
agtccagcactaaaggatccccactaagggctgttcacctgccccagggactcagaacacacatgactctccccacttgagctcaggatcccggcattacacggggcgcgctgagcccca

SEQ ID NO: 355447 - DNA, 120 bp, Artificial Sequence
  ENSG00000139714_1 (sequence is synthesized)
gatgtccctaacccctttccagcaccctccagccttgcagaagcagccaccatgccagtctctaagtgcccaaaaaagtcggagtccctgtggaaggggtgggaccggaaggcccagagg

SEQ ID NO: 355448 - DNA, 120 bp, Artificial Sequence
  ENSG00000139714_2 (sequence is synthesized)
aacggcctgcggagccaggtatacgctgtgaatggcgactactatgtgggcgagtggaaggacaacgtgaaacacgggaaaggaacacaggtctggaagaagaaaggagccatctatgag

SEQ ID NO: 355449 - DNA, 120 bp, Artificial Sequence
  ENSG00000139714_3 (sequence is synthesized)
ggggactggaagtttgggaagcgagacggctacggcaccctcagccttcctgaccaacagacaggaaagtgcaggagagtctactcaggctggtggaaaggtgataagaaatcgggttat

SEQ ID NO: 355450 - DNA, 120 bp, Artificial Sequence
  ENSG00000139714_4 (sequence is synthesized)
gggatccagtttttcggacccaaggagtattatgagggtgactggtgtggcagccagcgcagcgggtggggccgcatgtattacagcaacggcgacatctacgagggacagtgggagaac

SEQ ID NO: 355451 - DNA, 120 bp, Artificial Sequence
  ENSG00000139714_5 (sequence is synthesized)
gacaagcccaacggggagggcatgctgcgcctgaagaacgggaaccgctacgagggctgctgggagagaggcatgaagaacggggcggggcgtttcttccatctggaccacggccagctg

SEQ ID NO: 355452 - DNA, 120 bp, Artificial Sequence
  ENSG00000139714_6 (sequence is synthesized)
tttgaaggcttctgggtggacaatatggccaaatgcgggacgatgatcgactttggccgtgacgaggcccctgagcccactcagttccccattcctgaggtcaaaatcctagaccctgat

SEQ ID NO: 355453 - DNA, 120 bp, Artificial Sequence
  ENSG00000139714_7 (sequence is synthesized)
ggtgtgctggcggaggccttggccatgttcaggaagacagaggaaggagattgatgccagagaacacaaacgcttcaggagaaattcaagcctgtgtcacccgatcgctcagaccagtgc

SEQ ID NO: 355454 - DNA, 120 bp, Artificial Sequence
  ENSG00000139714_8 (sequence is synthesized)
ggctctggctggaggagtcagcagcagctccaggcatgaccccggcaccctcatagggcccctcactacccccagcactgggtcatttcttgccaataggaaggctggtgcttctctccc

SEQ ID NO: 355455 - DNA, 120 bp, Artificial Sequence
  ENSG00000139714_9 (sequence is synthesized)
aggctgtcctcgggaccctcttcattctctgatctcatcctggaatgcatgagaataaagaataaccaagtggtataagcctgggcctatgggataaggatggggcactcgagggggctc

SEQ ID NO: 355456 - DNA, 120 bp, Artificial Sequence
  ENSG00000139714_10 (sequence is synthesized)
gctcagcagggctttcaggtttagaagagggaagacctgccttggctgggctgcctgggtttagcttgggggagtaagggcaggtcttaggccgggtgcagtggctcattcctgtaatcc

SEQ ID NO: 355457 - DNA, 120 bp, Artificial Sequence
  ENSG00000139714_11 (sequence is synthesized)
acttgggaggccaaggtaagaggactgcctgaggccaggagttcgagaccagcttaggcaacatagcaagaccctgactctacaaaaaaaaattttaaaatataaaagaaaggaaaagaa

SEQ ID NO: 355458 - DNA, 120 bp, Artificial Sequence
  ENSG00000139714_12 (sequence is synthesized)
aaagagaaagaaatggcaggtcccctgtgagataacccagatgacccagagagaaggcctgtatcctgccacactggctgccaagattggagatcataaaatttcctgaccacttctcag

SEQ ID NO: 355459 - DNA, 120 bp, Artificial Sequence
  ENSG00000139714_13 (sequence is synthesized)
cctaacacagggctctcaaccttgaaatcccatggaaactttgcaaagctgtggaagcccaggtcccatgcccagagattcacaggttcacatctaattcatctggggtgaggcctgagc

SEQ ID NO: 355460 - DNA, 120 bp, Artificial Sequence
  ENSG00000139714_14 (sequence is synthesized)
cacaggttcacatctaattcatctggggtgaggcctgagctttcagaaaattccccaggtgattttttttttttaagacgtagtctccctctattgcccaggctggaatgcagtggcgcg

SEQ ID NO: 355461 - DNA, 120 bp, Artificial Sequence
  ENSG00000139714_15 (sequence is synthesized)
caggtgtgagccactgctcccagccaagatcagatgttcttgcataatgggcaggtgagctctggagtcacagtgcctgggcgtgaatctcggagctgtgtgttctcaggaatgtcaccc

SEQ ID NO: 355462 - DNA, 120 bp, Artificial Sequence
  ENSG00000139714_16 (sequence is synthesized)
gagctgtgtgttctcaggaatgtcacccaaactctgttctgttggtctcctcacttgcaatatggggcattaacagtacttaccacctggggttactgtggttagttactgtgaggatga

SEQ ID NO: 355463 - DNA, 120 bp, Artificial Sequence
  ENSG00000139714_17 (sequence is synthesized)
gataaggcggtggttttaaactgtgggtaggattttgtcctccctcagccccactctttcttggggacatttggcaatgtatgacatttttgatgtcacaacaggcaggaagaaggctac

SEQ ID NO: 355464 - DNA, 120 bp, Artificial Sequence
  ENSG00000139714_18 (sequence is synthesized)
aaggctactggcattgagtgagtagagaccagggatgcggttaagcatagtgcaatatcaccatgctacaaaaaaaaaaaaaaaaaagaattcagcacctgtaatcccaactacttggga

SEQ ID NO: 355465 - DNA, 70 bp, Artificial Sequence
  ENSG00000139714_19 (sequence is synthesized)
atctccaaaaaaaaaaaaaaaaaaaatgttgagaaaccctgaaataccacgattctagctaagacctcag

SEQ ID NO: 355466 - DNA, 120 bp, Artificial Sequence
  ENSG00000139714_20 (sequence is synthesized)
gagaaaccctgaaataccacgattctagctaagacctcagcaagaggcacatagcacatagtaaagcctcaataaacaccactgaccttactgaggttctctctgccccctaagtcataa

SEQ ID NO: 355467 - DNA, 120 bp, Artificial Sequence
  ENSG00000139714_21 (sequence is synthesized)
gtagggtggcctcaccaagggtgtggttctcagtctgtacctctggcactgggaagccccgcctggccaccctaggatgcagaattaatcataacttccagatatggagcactcactcta

SEQ ID NO: 355468 - DNA, 120 bp, Artificial Sequence
  ENSG00000139714_22 (sequence is synthesized)
ttccaggccgtgtgctgacagcttcgcagcaagcattctctcctggcactccccgacaacagtgaggtgtcttgctattactgccattttagaggaggaaacaggttcagggaggatcac

SEQ ID NO: 355469 - DNA, 120 bp, Artificial Sequence
  ENSG00000139714_23 (sequence is synthesized)
aagtcatcaagctagtactgtgcttaaacttaggtctagctgttcttaatgtgcagaagagtgtaaagggttaccatttttaaagaaaaagtgggggcagggcatggtggctcatgcctg

SEQ ID NO: 355470 - DNA, 65 bp, Artificial Sequence
  ENSG00000139714_24 (sequence is synthesized)
tggtgagccaagatcacgccgagccgagatcgtgccgctgctctccagcctgggcaacagagcga

SEQ ID NO: 355471 - DNA, 120 bp, Artificial Sequence
  ENSG00000139714_25 (sequence is synthesized)
gactccatctcaaaaaaaaaaaaaatgttggaagagggtgtgcttgtttatgtacaaaatgtcgctagatttaaacacaataaactggcaaagatggttgtctctggggagaattgggga

SEQ ID NO: 355472 - DNA, 120 bp, Artificial Sequence
  ENSG00000139714_26 (sequence is synthesized)
tctctggggagaattggggacttgggaacaggagctgaagaacaacttttcagtgttgtgtttggaaccatgtgaatgtattatgtattcaaaatgtaaataaaaatgaagttaaagaga

SEQ ID NO: 355473 - DNA, 120 bp, Artificial Sequence
  ENSG00000139718_0 (sequence is synthesized)
gggggacaccatgtactggctggcggcgcagggaggccggcgcccggcggggatgttgggttaacggcatggagaacagtcaccccccccaccaccaccaccagcagcccccgccgcagc

SEQ ID NO: 355474 - DNA, 120 bp, Artificial Sequence
  ENSG00000139718_1 (sequence is synthesized)
ccggcccttcgggcgagaggaggaaccaccattggagaagttacaagttgatgattgacccggctctgaaaaaggggcatcataaactgtaccgctacgatgggcagcatttcagcctgg

SEQ ID NO: 355475 - DNA, 120 bp, Artificial Sequence
  ENSG00000139718_2 (sequence is synthesized)
cgatgtccagcaaccgcccggtggaaattgtcgaagatccccgggtcgtcgggatctggaccaaaaacaaggagctggagctgtcggtgcccaaattcaagatcgatgagttctacgtgg

SEQ ID NO: 355476 - DNA, 120 bp, Artificial Sequence
  ENSG00000139718_3 (sequence is synthesized)
gcccggtgcctccgaagcaggtgacatttgccaagctgaatgataacatccgtgaaaacttcctgagggacatgtgcaagaagtatggggaggtggaggaggtggagattttgtacaacc

SEQ ID NO: 355477 - DNA, 120 bp, Artificial Sequence
  ENSG00000139718_4 (sequence is synthesized)
ccaagaccaagaagcacctgggcatcgccaaggtggtctttgccacggtccggggagccaaggatgccgttcagcacttgcacagcacttccgtcatgggcaacattatccacgtggagc

SEQ ID NO: 355478 - DNA, 120 bp, Artificial Sequence
  ENSG00000139718_5 (sequence is synthesized)
tggacaccaaaggggaaacccgaatgcggttctatgaactgttggtcactggccgatacaccccccagaccctcccagtgggcgagctggacgctgtctctccaatcgtgaatgagaccc

SEQ ID NO: 355479 - DNA, 120 bp, Artificial Sequence
  ENSG00000139718_6 (sequence is synthesized)
tgcagctgtcagatgccctgaagcgcctcaaggatggaggcctgtctgcaggctgtggctccggctcctcctctgtcacccccaatagcggtgggacacccttctcccaggacacagctt

SEQ ID NO: 355480 - DNA, 120 bp, Artificial Sequence
  ENSG00000139718_7 (sequence is synthesized)
attccagctgccgcctggacacacccaactcctatggacagggcaccccgctcacaccgcgcctgggcacccctttctcacaggactccagctactccagccgccagcccacaccctcat

SEQ ID NO: 355481 - DNA, 120 bp, Artificial Sequence
  ENSG00000139718_8 (sequence is synthesized)
acctcttcagccaggaccctgcagtgaccttcaaggcccggcgccacgagagcaagttcacggacgcctacaaccgccgccacgaacatcattatgtacacaattctcccgcggtcactg

SEQ ID NO: 355482 - DNA, 120 bp, Artificial Sequence
  ENSG00000139718_9 (sequence is synthesized)
cggtggccggggccacagccgctttccggggttcctcggacctcccgttcggagcagtcggcggcactgggggcagcagcggtcccccgttcaaggctcaaccacaggattcagccacat

SEQ ID NO: 355483 - DNA, 120 bp, Artificial Sequence
  ENSG00000139718_10 (sequence is synthesized)
ttgcccacactccaccacccgcccaagcaacccctgctcctggattcaagtctgctttctctccgtatcagaccccagtggcccacttccctccacccccggaagagcccaccgccacag

SEQ ID NO: 355484 - DNA, 120 bp, Artificial Sequence
  ENSG00000139718_11 (sequence is synthesized)
ccgcttttggggcccgcgacagtggggagttccggagggcaccggcgcccccacccctgccacctgctgagcctctggccaaggagaagccaggcacgccacccggcccgccgccccccg

SEQ ID NO: 355485 - DNA, 120 bp, Artificial Sequence
  ENSG00000139718_12 (sequence is synthesized)
acaccaacagcatggagctgggcggccggcccaccttcggctggagtcctgagccctgtgacagccctggcacgcccacgctggagtcgtcccctgcagggccagagaaaccccacgaca

SEQ ID NO: 355486 - DNA, 120 bp, Artificial Sequence
  ENSG00000139718_13 (sequence is synthesized)
gcctggactcgcgcatcgagatgctgctgaaggagcagcgcaccaagctgctcttcctgagggagccggactcggacaccgagctgcagatggagggcagccccatctcctcctcctcct

SEQ ID NO: 355487 - DNA, 120 bp, Artificial Sequence
  ENSG00000139718_14 (sequence is synthesized)
cccagctctccccactggccccctttggcaccaactcccagccaggcttccggggccccacgcccccctcgtcacgcccctccagcaccggcctggaggatatcagcccaacacccctcc

SEQ ID NO: 355488 - DNA, 120 bp, Artificial Sequence
  ENSG00000139718_15 (sequence is synthesized)
cagactccgacgaggacgaggagctcgacctgggccttgggcctcggcctccacctgagccaggccccccggaccctgctgggcttctgagccagacagctgaggtggccttggacctgg

SEQ ID NO: 355489 - DNA, 120 bp, Artificial Sequence
  ENSG00000139718_16 (sequence is synthesized)
ttggagacagaaccccgacctcagagaagatggatgagggccagcagtcctcaggcgaggacatggagatctcggatgacgagatgccctcggcccccatcaccagcgctgactgcccca

SEQ ID NO: 355490 - DNA, 120 bp, Artificial Sequence
  ENSG00000139718_17 (sequence is synthesized)
agcccatggtggtgaccccaggagcggcagccgtggcagccccttctgtgctagccccaaccctgccgctgcccccgccacctggcttccccccgctgccccccccaccaccaccacccc

SEQ ID NO: 355491 - DNA, 120 bp, Artificial Sequence
  ENSG00000139718_18 (sequence is synthesized)
ccaccaccaccacccccaccgcagcctggcttccccatgcccccaccgctgcccccaccgccgcccccaccccctccagcccaccctgctgtgacagtgcccccaccacccttgccagcg

SEQ ID NO: 355492 - DNA, 120 bp, Artificial Sequence
  ENSG00000139718_19 (sequence is synthesized)
ccccacccatcctgccaccactgcccccctttccgccgggcctgttccctgtgatgcaggtggacatgagccacgtgctgggtggccagtggggcggcatgcccatgtccttccagatgc

SEQ ID NO: 355493 - DNA, 120 bp, Artificial Sequence
  ENSG00000139718_20 (sequence is synthesized)
aaacgcaggtgctcagccggctgatgacgggccagggcgcctgcccctacccgcccttcatggccgctgcggccgccgctgcctcagctgggctccagtttgtcaacctgccgccctacc

SEQ ID NO: 355494 - DNA, 120 bp, Artificial Sequence
  ENSG00000139718_21 (sequence is synthesized)
ggggccccttctccctgagcaactccggcccaggccgcgggcagcactggccaccactgcccaagtttgacccgtcagtgcctccaccaggctacatgccacgccaggaggacccacaca

SEQ ID NO: 355495 - DNA, 120 bp, Artificial Sequence
  ENSG00000139718_22 (sequence is synthesized)
aagccacggtggatggcgtcctgctggtggtcctcaaagaactcaaggccatcatgaagcgtgacctgaaccgcaagatggtggaagtggtggctttccgggcctttgacgagtggtggg

SEQ ID NO: 355496 - DNA, 120 bp, Artificial Sequence
  ENSG00000139718_23 (sequence is synthesized)
acaagaaggagcggatggccaaggcctcgctgaccccggtgaagtcgggcgagcacaaggacgaggacaggccgaagcccaaggaccgcatcgcctcgtgcctgctggagtcatggggca

SEQ ID NO: 355497 - DNA, 120 bp, Artificial Sequence
  ENSG00000139718_24 (sequence is synthesized)
gagccaccagacaccacctcatctggcgaccagaagcggctgcggccctcgacctctgtggatgaggaagatgaagagtccgagcgagagcgagaccgggatatggcagacaccccctgt

SEQ ID NO: 355498 - DNA, 120 bp, Artificial Sequence
  ENSG00000139718_25 (sequence is synthesized)
gagctcgccaagcgggaccccaagggcgtgggtgtgcggcggcggccggcgcggcctctggagctggacagtggtggggaggaggacgagaaggagtcattgtcggcgtcctcgtcctca

SEQ ID NO: 355499 - DNA, 120 bp, Artificial Sequence
  ENSG00000139718_26 (sequence is synthesized)
tccgcgtcatcatcctcggggtcctcaaccacctcaccctcgtcctcggcctccgacaaggaggaggaacaggagagcaccgaggaggaagaggaggcggaggaggaggaggaggaggaa

SEQ ID NO: 355500 - DNA, 120 bp, Artificial Sequence
  ENSG00000139718_27 (sequence is synthesized)
gtccccaggagccagctctcctcctcctcaacctcatccacatcagataaggatgacgacgatgacgacagtgatgaccgggacgagtctgagaacgatgacgaggacacagccctgtca

SEQ ID NO: 355501 - DNA, 120 bp, Artificial Sequence
  ENSG00000139718_28 (sequence is synthesized)
gaggcgagtgagaaggacgaaggggactcggatgaagaggagacagtgagcattgtaacctccaaggccgaagccacgtcgtccagtgagagttccgagtcttctgagtttgagtcaagc

SEQ ID NO: 355502 - DNA, 120 bp, Artificial Sequence
  ENSG00000139718_29 (sequence is synthesized)
tccgagtcctcgccctcatcctcggaggatgaggaggaggtagtggccagggaagaggaggaagaagaggaggaggaggagatggtggccgaggaaagcatggcttctgcaggccctgag

SEQ ID NO: 355503 - DNA, 120 bp, Artificial Sequence
  ENSG00000139718_30 (sequence is synthesized)
gactttgagcaggacggggaggaagcggctctggccccgggggcacctgcagtggactcgttgggcatggaagaggaggtggacatcgagactgaggctgtggcccctgaggagcggccc

SEQ ID NO: 355504 - DNA, 120 bp, Artificial Sequence
  ENSG00000139718_31 (sequence is synthesized)
tccatgctggacgagccccccttgcctgtgggtgttgaagagccagcggactccagggagccgcctgaggaaccaggcctgagccaggaaggggccatgttgctgtctccagagccccct

SEQ ID NO: 355505 - DNA, 120 bp, Artificial Sequence
  ENSG00000139718_32 (sequence is synthesized)
gccaaggaggtggaggctcgacccccattgtcccctgagcgagctccagaacatgacctggaagtggagccggagccccctatgatgctccccttgccgctgcaaccaccattgccgccc

SEQ ID NO: 355506 - DNA, 120 bp, Artificial Sequence
  ENSG00000139718_33 (sequence is synthesized)
ccacgaccaccccggccacccagcccaccgccggagcctgagaccacagatgcctcacacccatctgtccctccggagccccttgccgaggaccaccccccgcatactccaggcctctgt

SEQ ID NO: 355507 - DNA, 120 bp, Artificial Sequence
  ENSG00000139718_34 (sequence is synthesized)
ggcagcctggccaagtcgcagagcacagagacggtgccagccacaccaggcggggagcccccgctatcagggggcagcagtggcctgtccctgagctctccgcaagtgcccggcagcccc

SEQ ID NO: 355508 - DNA, 120 bp, Artificial Sequence
  ENSG00000139718_35 (sequence is synthesized)
ttctcctacccagccccgtcccctagcttgagcagtgggggcctccctcggacacctggccgggacttcagcttcacacccaccttctccgagcccagcgggcccttgctcctgcccgtc

SEQ ID NO: 355509 - DNA, 120 bp, Artificial Sequence
  ENSG00000139718_36 (sequence is synthesized)
tgcccactccccactggccgacgcgatgaacgctccgggcccctggcctccccggtgctcctggagacgggcctgcccctccctctgccccttcccctgcccttgcccttggcattgccc

SEQ ID NO: 355510 - DNA, 120 bp, Artificial Sequence
  ENSG00000139718_37 (sequence is synthesized)
tcttgcgggcccaggctcgtgcgcccaccccgctgccacccctgctgcccgcccccctggcctcttgccctcccccaatgaagaggaagccgggccggccccggcgatccccaccatcta

SEQ ID NO: 355511 - DNA, 120 bp, Artificial Sequence
  ENSG00000139718_38 (sequence is synthesized)
tctatgctctccttggatgggcccttggtccgaccaccagcaggggccgcccttggaagggaactcctgctcctgccgggccagccacagacccccgtcttccccagcacccatgacccc

SEQ ID NO: 355512 - DNA, 120 bp, Artificial Sequence
  ENSG00000139718_39 (sequence is synthesized)
cggacggtgaccctggacttccggaacgcggggatcccagcccctccaccaccccttcccccccagccacccccacccccacctcccccacctgtagagcccaccaagctgccctttaag

SEQ ID NO: 355513 - DNA, 120 bp, Artificial Sequence
  ENSG00000139718_40 (sequence is synthesized)
gagctagacaaccagtggccctccgaggccattcctccgggcccccgtgggcgcgatgaggtcactgaggaatacatggagttggccaagagccgggggccgtggcgccggccacctaag

SEQ ID NO: 355514 - DNA, 120 bp, Artificial Sequence
  ENSG00000139718_41 (sequence is synthesized)
aagcgccatgaggacctggtgccacctgcgggctcgcccgaactctcgccaccccagcccctcttccggccccgctcggagtttgaggagatgaccatcctgtatgacatctggaacggt

SEQ ID NO: 355515 - DNA, 120 bp, Artificial Sequence
  ENSG00000139718_42 (sequence is synthesized)
ggcatcgatgaggaggacatccgcttcctgtgtgtcacctacgagcgactgctacagcaggacaatggcatggactggcttaacgacacgctctgggtctaccatccctccaccagcctc

SEQ ID NO: 355516 - DNA, 120 bp, Artificial Sequence
  ENSG00000139718_43 (sequence is synthesized)
tcttcagctaagaagaagaaacgggacgatggcatccgcgagcacgtgacgggctgtgcccgcagtgagggcttctacaccatcgacaagaaggacaagctcagatacctcaacagcagc

SEQ ID NO: 355517 - DNA, 120 bp, Artificial Sequence
  ENSG00000139718_44 (sequence is synthesized)
cgtgccagcaccgatgagccccccgcagacacccagggcatgagcatcccagcacagccccacgcctccacccgggcaggctcggagcggcgttcggagcagcgccgcctgctgtcctcc

SEQ ID NO: 355518 - DNA, 120 bp, Artificial Sequence
  ENSG00000139718_45 (sequence is synthesized)
ttcactggcagctgtgacagtgacctgctcaagttcaaccagctcaagttccggaagaaaaagctcaagttctgcaagagccacattcacgactggggcttgttcgccatggagcccatc

SEQ ID NO: 355519 - DNA, 120 bp, Artificial Sequence
  ENSG00000139718_46 (sequence is synthesized)
gcggctgacgagatggtcatcgagtacgtgggccagaatatccgtcaggtgatcgcagacatgcgggagaagcgttatgaggacgagggcatcgggagcagctacatgttccgggtggac

SEQ ID NO: 355520 - DNA, 120 bp, Artificial Sequence
  ENSG00000139718_47 (sequence is synthesized)
catgacaccatcatcgacgccaccaagtgcggcaacttcgcgcgcttcatcaaccacagctgcaaccccaactgctatgccaaggtgatcacggtggagtcacagaagaagatagtcatc

SEQ ID NO: 355521 - DNA, 120 bp, Artificial Sequence
  ENSG00000139718_48 (sequence is synthesized)
tactcgaagcagcacattaacgtcaatgaggagattacctatgactataagttccccatcgaggacgtcaagatcccctgcctctgtggctccgagaactgccgggggaccctcaactag

SEQ ID NO: 355522 - DNA, 120 bp, Artificial Sequence
  ENSG00000139718_49 (sequence is synthesized)
ggggcccggccccccgcgcccgcccccatttcaggtgctgtcctctacccagcggccattcagggcctggcgccccacactaccccctggagcccctggctccggcccctccgcgggaaa

SEQ ID NO: 355523 - DNA, 120 bp, Artificial Sequence
  ENSG00000139718_50 (sequence is synthesized)
gaaagggcttctctgtcgttcagcccacgtctctctcattttaacaaacgcccctttcaggatttctgtttaactccagcatcagcttctctctctccgtctctcctcccctctctctct

SEQ ID NO: 355524 - DNA, 120 bp, Artificial Sequence
  ENSG00000139718_51 (sequence is synthesized)
tctctgtctcttctctctcccaccatcaccctcggcctcttcctgtgaatgctgctacgttgttttgtcttctctatttttttcctcgttgtgagaaaagacatttaaccgttgaaatgt

SEQ ID NO: 355525 - DNA, 120 bp, Artificial Sequence
  ENSG00000139718_52 (sequence is synthesized)
gaaggtggaatcagagaggggccccgcgggggtctgcagaggcctcagtgtggctgtgcgtggcccgtgtcctggaagccacccggacctggacgcagggccaggtgctgtgggaaggat

SEQ ID NO: 355526 - DNA, 120 bp, Artificial Sequence
  ENSG00000139718_53 (sequence is synthesized)
ggaggcccccacggccttgacctcagaacactacgccctgaaagcgcccctcactgcccgtgggcacagtgaggagaccccacacctttccccacccgagctgcagcctgttccttcccc

SEQ ID NO: 355527 - DNA, 120 bp, Artificial Sequence
  ENSG00000139718_54 (sequence is synthesized)
agaggcctggggcaccactgacccggtggaccctgatggagctaagctgtcccaggcaggggtctccgctctgggctttccctgccacctcacaccccagcaccccctaaaccttgggtt

SEQ ID NO: 355528 - DNA, 120 bp, Artificial Sequence
  ENSG00000139718_55 (sequence is synthesized)
caatgtttactttctcattcggatgccagcaacgcgggagcctctcggaggccccagtgcaggtgaggggcgctgagaacgcgggcagccactctcttctgcccttgccttcgccctggg

SEQ ID NO: 355529 - DNA, 120 bp, Artificial Sequence
  ENSG00000139718_56 (sequence is synthesized)
tgggacagggctcccaagggcaggcgggtcccccagtcccgccattacgggttgtcagaccgtctgcgtgtggcattttttggcttataagcttcacccactcacccccaacccacaccc

SEQ ID NO: 355530 - DNA, 120 bp, Artificial Sequence
  ENSG00000139718_57 (sequence is synthesized)
cacatccccctgccggcagcccctcaacctaagaaggccagagcatatttattttcggagggagcagattacttctcccagagaaaggaaaatcttggaaaagatttaaaaacacaaatc

SEQ ID NO: 355531 - DNA, 120 bp, Artificial Sequence
  ENSG00000139718_58 (sequence is synthesized)
taagccttgacggtttttttttcccttttgacccccttcccatctcttcagaatttattcccatggcttttttttttcttgtgcgtgtataaaatcaaaaggaaggggaaaaaggttttt

SEQ ID NO: 355532 - DNA, 120 bp, Artificial Sequence
  ENSG00000139718_59 (sequence is synthesized)
gaagttcagaaccaacttctgtatatagaggctgccgcaaaggactttctcttgggaacattgtttcttgtagaaacatgcgggaagacattttttgctcatttctttgtacttccaaaa

SEQ ID NO: 355533 - DNA, 120 bp, Artificial Sequence
  ENSG00000139718_60 (sequence is synthesized)
aaaaaggaaaaaaaagacaaaagcaagtccccccgtaccccagaaagcagaggaggcgtgtaaataatttctggaaagtgactgttgtgacccggagtcctcatcaagatgagcgcgctc

SEQ ID NO: 355534 - DNA, 120 bp, Artificial Sequence
  ENSG00000139718_61 (sequence is synthesized)
catgagggagctgctcccaccctgcggacgcaggcggccggagcctctggtatctcagcttgtgtcaagcttgttatcatgtaaattctgtacaaagaattgttatttttctcttttttg

SEQ ID NO: 355535 - DNA, 120 bp, Artificial Sequence
  ENSG00000139718_62 (sequence is synthesized)
ttgttggtggttttgttgtgtgttttttgttgttttttttttattcctttcccccaggccctctctatttgagactgtgcccgccggtttcaagatcaaggaaattggtggcaacaagac

SEQ ID NO: 355536 - DNA, 120 bp, Artificial Sequence
  ENSG00000139718_63 (sequence is synthesized)
acagatggggtacctgggcacagcggcgaacttctcttccgtttgcggttttctgcctaattgtgcaactgaggaaataatttatttttcacatgaggaaatgcgtagcttgtagagacg

SEQ ID NO: 355537 - DNA, 120 bp, Artificial Sequence
  ENSG00000139718_64 (sequence is synthesized)
gctgattcaagttacatgtacagcctccaaagggctgtctccattctgtccccttcccataaaagaagtgggggtgttcgagaagaccagggaagggacccttgcctcacccctccccct

SEQ ID NO: 355538 - DNA, 120 bp, Artificial Sequence
  ENSG00000139718_65 (sequence is synthesized)
ggcctcaccttgctcccagccatcgtgcccagtgttaacctcggctggccttcactaaggggactagacctccctctccccaggagccccagccccagagtggtttgcaataatcaagat

SEQ ID NO: 355539 - DNA, 120 bp, Artificial Sequence
  ENSG00000139718_66 (sequence is synthesized)
atgtgtcgagtcatttttctttcaactccctcatttttcattgaacaaatctctgcttttcaagagttgggggtttctgctattttttgctttctctccctccccctgcaaagatgagaa

SEQ ID NO: 355540 - DNA, 120 bp, Artificial Sequence
  ENSG00000139718_67 (sequence is synthesized)
ccaatgagttttagggatgtttgtgcgggtagactccatcatccatatgtaacttgttttgaagagaagtgtttccgttgtgtgtcttgatgtaaatatttgttcatatttttgtgaatt

SEQ ID NO: 355541 - DNA, 120 bp, Artificial Sequence
  ENSG00000139719_0 (sequence is synthesized)
gtttggtcacgtgactgcgtccgtggtcctcccgtaggaaccggcggactcggttggcgttgtggggcagggggtggtggagcaagatggcggctcatctgtcctacggccgagtgaacc

SEQ ID NO: 355542 - DNA, 120 bp, Artificial Sequence
  ENSG00000139719_1 (sequence is synthesized)
taaacgtgttgcgcgaggcggtgcgtcgcgagctgcgcgagttcctggacaagtgcgcaggaagcaaggcaatagtttgggatgaatacctaactggaccctttggcctgattgcacagt

SEQ ID NO: 355543 - DNA, 120 bp, Artificial Sequence
  ENSG00000139719_2 (sequence is synthesized)
attcactattgaaggaacatgaagtggaaaaaatgttcacacttaaaggaaatcgtttgccggcagctgatgtgaagaatataattttttttgtcagacccaggctagagttgatggata

SEQ ID NO: 355544 - DNA, 120 bp, Artificial Sequence
  ENSG00000139719_3 (sequence is synthesized)
taatcgctgaaaacgtgctcagtgaagatagacgaggcccaacgagagattttcatattctgtttgtgccacgccgtagcctgttgtgcgaacagcggttgaaggatctgggtgtcttgg

SEQ ID NO: 355545 - DNA, 120 bp, Artificial Sequence
  ENSG00000139719_4 (sequence is synthesized)
gatcctttattcacagggaggagtacagcttagatctcattccattcgatggggatctcttatccatggaatcagagggtgcattcaaagagtgctacctggagggtgaccagacgagcc

SEQ ID NO: 355546 - DNA, 120 bp, Artificial Sequence
  ENSG00000139719_5 (sequence is synthesized)
tgtaccacgcagccaaggggctgatgaccctgcaagctctgtatggaacgatcccccagatctttgggaaaggagaatgcgctcggcaagtggccaatatgatgatcaggatgaagagag

SEQ ID NO: 355547 - DNA, 120 bp, Artificial Sequence
  ENSG00000139719_6 (sequence is synthesized)
agtttacaggaagccagaattcaatatttcctgtttttgataatctcttgttgcttgatcggaatgtggatttattaacacctcttgccactcagctgacatatgaaggactcattgatg

SEQ ID NO: 355548 - DNA, 120 bp, Artificial Sequence
  ENSG00000139719_7 (sequence is synthesized)
aaatttatggcattcagaacagttatgtgaaattacctccagagaaatttgcacctaagaaacagggcgatggtggtaaggacctccccacggaagcaaagaagctgcagctgaattctg

SEQ ID NO: 355549 - DNA, 120 bp, Artificial Sequence
  ENSG00000139719_8 (sequence is synthesized)
cagaggagctctatgctgagatccgagataagaacttcaacgcagttggctctgtgctcagcaagaaagcaaagatcatctctgcagcattcgaggaaagacacaatgctaagaccgtgg

SEQ ID NO: 355550 - DNA, 120 bp, Artificial Sequence
  ENSG00000139719_9 (sequence is synthesized)
gggagatcaagcagtttgtttcccagttgccccacatgcaggcagcaaggggctcgcttgcaaaccatacctcaattgcagaattgatcaaagatgtcactacttctgaagacttttttg

SEQ ID NO: 355551 - DNA, 120 bp, Artificial Sequence
  ENSG00000139719_10 (sequence is synthesized)
ataaattaaccgtggaacaggagtttatgtctggaatagacactgataaggtcaacaattacattgaggattgtatcgcccaaaagcactcgttgatcaaggtgttaagactagtttgcc

SEQ ID NO: 355552 - DNA, 120 bp, Artificial Sequence
  ENSG00000139719_11 (sequence is synthesized)
tccaatccgtgtgtaatagtgggctcaaacaaaaagttttggattattacaaaagagagattctccagacatacggctatgagcacatattgaccttacacaacctggagaaggccggcc

SEQ ID NO: 355553 - DNA, 120 bp, Artificial Sequence
  ENSG00000139719_12 (sequence is synthesized)
tgctgaaaccgcagacggggggcagaaacaattacccaactatacggaaaacattacgcctctggatggatgatgttaatgagcaaaaccccacggacatatcgtatgtgtacagtgggt

SEQ ID NO: 355554 - DNA, 120 bp, Artificial Sequence
  ENSG00000139719_13 (sequence is synthesized)
atgccccgctcagtgtgcggctggcccagctgctttcccggcctggctggcggagcatcgaggaggtcctccgcatcctcccagggccccactttgaggagcggcagccactgcccacag

SEQ ID NO: 355555 - DNA, 120 bp, Artificial Sequence
  ENSG00000139719_14 (sequence is synthesized)
gactgcagaagaaacgtcaaccgggagaaaaccgagtgactctgatatttttccttgggggcgtaaccttcgctgaaattgctgccctgcgatttctctcccagttggaagatggaggta

SEQ ID NO: 355556 - DNA, 120 bp, Artificial Sequence
  ENSG00000139719_15 (sequence is synthesized)
cagaatatgtcattgccaccactaaactaatgaatggaaccagttggatagaggctctgatggaaaaacctttctaggatgttcagaggagacttaacaagtgtactgcagaataaacta

SEQ ID NO: 355557 - DNA, 120 bp, Artificial Sequence
  ENSG00000139719_16 (sequence is synthesized)
cctctttgaagaaattgctgaaaggaagtaaaaccccatagaagaaacatgggaatacagaatatattctggggtcagcttcttaaattatactactgtttactgctttctccgtctctt

SEQ ID NO: 355558 - DNA, 76 bp, Artificial Sequence
  ENSG00000139719_17 (sequence is synthesized)
tcttaaattatactactgtttactgctttctccgtctcttttgtattccctttttttttttccgcacggtctcacc

SEQ ID NO: 355559 - DNA, 120 bp, Artificial Sequence
  ENSG00000139719_18 (sequence is synthesized)
attacaggcctgagccaccgtgcctggcccctaatctgctgaagaaagaagaatagaagaaaatcaacctgagtaaaagcagcactggttttgagttttctaagctcagggtcttcatta

SEQ ID NO: 355560 - DNA, 120 bp, Artificial Sequence
  ENSG00000139719_19 (sequence is synthesized)
agcactggttttgagttttctaagctcagggtcttcattagagacctctggaaatacattaaggatggtgggggtagataatccattcagccagacaaacggggccagctcttaaaataa

SEQ ID NO: 355561 - DNA, 120 bp, Artificial Sequence
  ENSG00000139719_20 (sequence is synthesized)
gaaagctgagactgaggaggtgaaactgaaaataaaaagagaaagttcatcctctaatccccagtgctgtatttcttcaaggcgcatcaggcctaggacagtggttaagtgttgggagct

SEQ ID NO: 355562 - DNA, 120 bp, Artificial Sequence
  ENSG00000139719_21 (sequence is synthesized)
ggagatcattttatcactgagttgagatttctttttcctgcagagtgtgggagattatatttagggtcatcagtcactgtcgcaactgatcactaaggcaagtttgcttccttctacttc

SEQ ID NO: 355563 - DNA, 120 bp, Artificial Sequence
  ENSG00000139719_22 (sequence is synthesized)
ttacaaagcaagaggtttaggggagcttcttgcccagaaacaaagtttatgctctatgtgatcagctacatctccttaggttccatacttatcaggggcttttgacatggaagaatgtga

SEQ ID NO: 355564 - DNA, 120 bp, Artificial Sequence
  ENSG00000139719_23 (sequence is synthesized)
taattggggagcaaccttctgagaattcagcctttgaagtaattcaaagacagtttcttagcacacacgttaactccagacacagcagtggtgggtgcctccattgaggtttccgttttc

SEQ ID NO: 355565 - DNA, 120 bp, Artificial Sequence
  ENSG00000139719_24 (sequence is synthesized)
tcttctgtccatcaagggcccaacatccaactggtcccacagtgagcaggggcaactcttgcttcttcagcatctggccacttcgtttccatggtaactgccacgtgtacttttctagca

SEQ ID NO: 355566 - DNA, 120 bp, Artificial Sequence
  ENSG00000139719_25 (sequence is synthesized)
gtctgtggccactccgtactcagctgaaaacactgtttcagccccctctctggtgacctcagccttctccaggtgtatctcttgatgatcttggagaccagcagccacagctgctgctac

SEQ ID NO: 355567 - DNA, 120 bp, Artificial Sequence
  ENSG00000139719_26 (sequence is synthesized)
tcctgcaggagactgtcaggctgtggtggggggcaggggtgttggaggagaagttgaaaatccgtgtgttctctgcccctctgctcctccatcttagcttctggaggagttaaggcacca

SEQ ID NO: 355568 - DNA, 120 bp, Artificial Sequence
  ENSG00000139719_27 (sequence is synthesized)
agggcaccaagtcaggttggcagttttgctgcccttgcccaagcctccagcaaaactagctggtcccctgctttgctgggtcccagccaggtgtgattttggttgttgattagtaaccac

SEQ ID NO: 355569 - DNA, 120 bp, Artificial Sequence
  ENSG00000139719_28 (sequence is synthesized)
acattgtttttccccacctttttcattagtggaggtttttgttttgttttgtttttgtttgtttgagacagagtctcacgctcttttcagactggagtgcagtggtgcgatgtcagctca

SEQ ID NO: 355570 - DNA, 120 bp, Artificial Sequence
  ENSG00000139719_29 (sequence is synthesized)
gatgggcacggtaaatattattaatgaaagagaaattctgtatacttttttaaaaatctctttaatgaaagaatgaagagtggcagagataataattgaaagattagtttctcatggaat

SEQ ID NO: 355571 - DNA, 120 bp, Artificial Sequence
  ENSG00000139719_30 (sequence is synthesized)
taatttggccttgatattcagtatttggaaatgtcttaaagaaaaccattttcattgtagaaaatccttttttaaatacttgttatatcccagggagattagtttataccttccacctca

SEQ ID NO: 355572 - DNA, 120 bp, Artificial Sequence
  ENSG00000139719_31 (sequence is synthesized)
ggcagtcatcagctgctttagagaatggaatccaccctgcccctccattttttggttcctggggctcaattcaagtctggtcaagtctccctggctggggattctgtcctgggaacagat

SEQ ID NO: 355573 - DNA, 120 bp, Artificial Sequence
  ENSG00000139719_32 (sequence is synthesized)
actcagttgtagtctcatgtgtctgcactcacccaagactctatatacttgcttgctcagagcatagttagggcagctcctaaaaatgcattcagcagaagactgaaaaacttcaattgc

SEQ ID NO: 355574 - DNA, 120 bp, Artificial Sequence
  ENSG00000139719_33 (sequence is synthesized)
ttcatttgtatgcaaatagaaaatggtagataattatatattatacgcctttgtgtaagttcatttaatacttgaagcagtctttgtctcaaaagagtatgcccttactgagaaaggata

SEQ ID NO: 355575 - DNA, 120 bp, Artificial Sequence
  ENSG00000139719_34 (sequence is synthesized)
tgtgaacggtacatttattgttggggagagtggattgtttacatcatgtctggacttttgtctagttgggtagacagttctacaccagcagcccccttaataaagaagtctacacagaca

SEQ ID NO: 355576 - DNA, 120 bp, Artificial Sequence
  ENSG00000139719_35 (sequence is synthesized)
aatgcactcttccagtttttctccttttttacttttttgattgtctttctggttttagacaaattttaaaatctgcttgttcccaggggggccccacctcatccaatgttttgtttccag

SEQ ID NO: 355577 - DNA, 120 bp, Artificial Sequence
  ENSG00000139719_36 (sequence is synthesized)
gagttcctggacaagtgcgcaggaagcaaggacagtgattaactcctttctcaggaccaacagtagcatcgcttgccctggatgctatttttctttagactaaggatatgaatgtggtca

SEQ ID NO: 355578 - DNA, 88 bp, Artificial Sequence
  ENSG00000139719_37 (sequence is synthesized)
aatgtcttttgcccttgaacgttcatctgatctggagttttaagtggttttgccaaaaagcgtgtcttttgacatattctcgatggtc

SEQ ID NO: 355579 - DNA, 120 bp, Artificial Sequence
  ENSG00000139719_38 (sequence is synthesized)
tttgccaaaaagcgtgtcttttgacatattctcgatggtctgccatattcagggaaacgttaaaatataccacacttgaaagagtagtccggcgacactctcaataataaccaaacgctc

SEQ ID NO: 355580 - DNA, 120 bp, Artificial Sequence
  ENSG00000139719_39 (sequence is synthesized)
cccaccatgtctgccatccttcctccctggggcagagggcctgacaagtgacaaccccgctctctcttcctcaggccctggaccctcagggccccctcagttctggctgtggacagcagg

SEQ ID NO: 355581 - DNA, 120 bp, Artificial Sequence
  ENSG00000139719_40 (sequence is synthesized)
gacatgttgggttggtaggggtggagggaattgataaaatgtaccatattgacttatgagtggataatggttgtaaaaaaacctaaataattccaaataaaagctaactgttactgagca

SEQ ID NO: 355582 - DNA, 120 bp, Artificial Sequence
  ENSG00000139719_41 (sequence is synthesized)
cgcaggaagcaagggtttatcagtcaccctaagttactgacagtacaactgtgaaaagtcgaactggggagcctcagtcttgtagagaacagaaccccaagaggcaatagtttgggatga

SEQ ID NO: 355583 - DNA, 120 bp, Artificial Sequence
  ENSG00000139719_42 (sequence is synthesized)
agaatatcctttgtggaggctactgtttgtatattgcacacttaagcataatttaaagtcagagatccgattttaatgattcagagtgtagattaatacagacctttttgtaagcaattt

SEQ ID NO: 355584 - DNA, 120 bp, Artificial Sequence
  ENSG00000139719_43 (sequence is synthesized)
agcaacacataaaacttttctaacccttggccaaagaaaacccaaagcctaagaatgtgccttgaggaatcattccaaaaaagaggatcagtgaggtttgcataagaatttcgatttcca

SEQ ID NO: 355585 - DNA, 120 bp, Artificial Sequence
  ENSG00000139719_44 (sequence is synthesized)
ttttcttaccagaattttccaaacaatctcagtggttgagtacattatgaaatattatggaaccacctgggtgtggtggctcacacttgtaattccagctctttgggaagccaaggcggg

SEQ ID NO: 355586 - DNA, 120 bp, Artificial Sequence
  ENSG00000139719_45 (sequence is synthesized)
cgacagagtgagactgtctcaaaaaaaaagaaaatatttggaaccatcaaaataataaatgtggaacatgaaaaactgcgtagccatgcctatttcaattagaggttgttatatatgtgt

SEQ ID NO: 355587 - DNA, 120 bp, Artificial Sequence
  ENSG00000139719_46 (sequence is synthesized)
cctatttcaattagaggttgttatatatgtgtctgcatatgtatgtgtattccaaactatatttataatatatttataaaaaataactaagaataccgtaaaaactggaaataactggag

SEQ ID NO: 355588 - DNA, 120 bp, Artificial Sequence
  ENSG00000139719_47 (sequence is synthesized)
gtggaataatcagaccatgcctccaaagggtcagtttttagaaagctgcttcctttacatagaaatcagagaacccttgaaacaataaaaatactgacctctgactttcagacactagga

SEQ ID NO: 355589 - DNA, 120 bp, Artificial Sequence
  ENSG00000139719_48 (sequence is synthesized)
ttcagtgacatctgagcaaattgcagttgtcggtgacacaagagttggccagaattttagtgcccaggccggtccttgtcccctgtgagcagaggccaagggtctccctcagagggcact

SEQ ID NO: 355590 - DNA, 120 bp, Artificial Sequence
  ENSG00000139719_49 (sequence is synthesized)
ggcatttgcgacgcacacatccttgcagccggcagtagttgacgaaggcggcagaagcagtggcgtttgtgctggttggaaagacgtggagagtttagttggagatcctggggcaggggc

SEQ ID NO: 355591 - DNA, 120 bp, Artificial Sequence
  ENSG00000139719_50 (sequence is synthesized)
agtcggcatcatacacagagtcatgacgagccaagcaacgtggttgagtggagtgcatggctggagaaatattttagaaaaacggctggtacagaaggtcgaggccactctatggaagat

SEQ ID NO: 355592 - DNA, 120 bp, Artificial Sequence
  ENSG00000139719_51 (sequence is synthesized)
gtggatggctggttagtgcctggccttggtgggtgattaggtagatcacaagtatgtttggtttggctggttttggcccacatgatatttatttctgtcagctttagaatgtgatacatt

SEQ ID NO: 355593 - DNA, 120 bp, Artificial Sequence
  ENSG00000139719_52 (sequence is synthesized)
ttaagtaataatcctgaattaggccatgacgaaaaatattggaagcactggcaagaggccatgctcccactggtggccaggacccagagtgtctagagctccctgcctcaccacagaccc

SEQ ID NO: 355594 - DNA, 120 bp, Artificial Sequence
  ENSG00000139719_53 (sequence is synthesized)
ctacacctgtctcagcctggccttcttccctcgtctgcatagtccccggcctctattgccatcctgaatgaagtcacagggagccaagggaaggcctgaggagagggatgtgtaagaaag

SEQ ID NO: 355595 - DNA, 60 bp, Artificial Sequence
  ENSG00000139719_54 (sequence is synthesized)
gagccaagggaaggcctgaggagagggatgtgtaagaaagatgaggccaggcgatcagaa

SEQ ID NO: 355596 - DNA, 120 bp, Artificial Sequence
  ENSG00000139722_0 (sequence is synthesized)
gcttccggtcggcggagcctggtggccgcagcggcggtggcgacgacggccgagacgtggggatggcgggcgccgggagcgaagcccggttcgccgggctgtcgctggtgcagctcaacg

SEQ ID NO: 355597 - DNA, 120 bp, Artificial Sequence
  ENSG00000139722_1 (sequence is synthesized)
agctgctggaggacgagggccagctgacggagatggtgcagaagatggaggagacacagaatgttcagcttaacaaagaaatgacacttgccagcaaccggagcctggcagaaggaaacc

SEQ ID NO: 355598 - DNA, 120 bp, Artificial Sequence
  ENSG00000139722_2 (sequence is synthesized)
ttttgtaccagccccagctggacacgttgaaagcacgcttgacccagaaataccaggaactccaggttctctttgaagcctatcagataaagaagaccaaattagacagacagtctagca

SEQ ID NO: 355599 - DNA, 120 bp, Artificial Sequence
  ENSG00000139722_3 (sequence is synthesized)
gtgcttccttggagaccctgttagcacttcttcaggcagaaggggccaagattgaggaagacactgagaacatggcagagaagtttctggatggagaacttcctctggattccttcattg

SEQ ID NO: 355600 - DNA, 120 bp, Artificial Sequence
  ENSG00000139722_4 (sequence is synthesized)
atgtctatcagagcaaacggaaactggcccacatgcgacgggtgaaaatcgagaagctccaggagatggtcctaaaggggcagagactcccacaggccctggccccgctgccccccaggc

SEQ ID NO: 355601 - DNA, 120 bp, Artificial Sequence
  ENSG00000139722_5 (sequence is synthesized)
tgcccgaactggcacctaccgccccccttccctaccctgccccagaggccagtgggcctcctgccgttgcacctcggcgcatcccccccccaccacccccggtgcctgcgggacgcttag

SEQ ID NO: 355602 - DNA, 120 bp, Artificial Sequence
  ENSG00000139722_6 (sequence is synthesized)
ccaccccgtttactgcggccatgagttcgggacaggccgtgccgtacccaggattacagtgcccgcccctgcccccccgcgtgggcctccccactcagcaaggattctcttcgcagttcg

SEQ ID NO: 355603 - DNA, 120 bp, Artificial Sequence
  ENSG00000139722_7 (sequence is synthesized)
tgtccccatatccgccacctctccctcagagacccccgccccggctccctccacaccagccgggtttcatcctccagtgagcgccggcgcggtccttcccgggagacttcttccacctgg

SEQ ID NO: 355604 - DNA, 120 bp, Artificial Sequence
  ENSG00000139722_8 (sequence is synthesized)
cgtgttgtgctctgctcacgggaaggaggctggaggtccgctctgtgccaagggctctggggccctgggccagcgtgtctgtctgattttagaactgtaggtcagtggtgagtagtagga

SEQ ID NO: 355605 - DNA, 120 bp, Artificial Sequence
  ENSG00000139722_9 (sequence is synthesized)
gcccaggctttgggcatcaaggcagttgtgtgtgccgggttacagcctgacacctgtgcgttgcatcggtttgcattatccgtgtgatttctaagtatcttagcgttgatgaactcatgt

SEQ ID NO: 355606 - DNA, 120 bp, Artificial Sequence
  ENSG00000139722_10 (sequence is synthesized)
ttgggaagaaataggcctctcccccagtcccatttagaatcgtggtccttctgttgcagctttatttaatgagcatggttcatgatacttattttattttcgaaagacagtcctatgtgt

SEQ ID NO: 355607 - DNA, 120 bp, Artificial Sequence
  ENSG00000139722_11 (sequence is synthesized)
tggctgggccaccacctgtggctgcgttgttgctcactgaatctgttggggagaggtcaccatagtcaccgcctgacctggctgctgctcttgcttcagagccacaagcaaagtttgcac

SEQ ID NO: 355608 - DNA, 120 bp, Artificial Sequence
  ENSG00000139722_12 (sequence is synthesized)
tgggcccactgccgagtccagaggccggagaacggccactggtgtgggaggggagcgcacgagtgggactttgcacagcaaattgtgtccccagctcctcctctcccgcctgcctggagc

SEQ ID NO: 355609 - DNA, 120 bp, Artificial Sequence
  ENSG00000139722_13 (sequence is synthesized)
cggccctgaaggtttctatgaagaaataatcccccaatatttttactacgtgtgtgattttcctgttttatattgaaaaaacttttttgacactcccaagaccattcagggaaattttat

SEQ ID NO: 355610 - DNA, 120 bp, Artificial Sequence
  ENSG00000139722_14 (sequence is synthesized)
aaaaaatgcagatactgtcttgagcagatcgaaatgccgatgaagtggatgcaatttccttttgtgcaagcagtgcacggtgcccccccctcgggtgtccgtgctgtgccttagcttccc

SEQ ID NO: 355611 - DNA, 120 bp, Artificial Sequence
  ENSG00000139722_15 (sequence is synthesized)
caggtgccgggactcacacctgctaggggctgggcaaggccccggctctgctttctctgaagggcttgtccaagttcattgccctgttacaggtggtcaagacgtccggccgccttgacc

SEQ ID NO: 355612 - DNA, 120 bp, Artificial Sequence
  ENSG00000139722_16 (sequence is synthesized)
caggctacccttagccaatatcctctgcccctgggtggctggtggctgggcctcagggtgggcaacgttaggggtttggcgaaagcccgccccatgggattgagggacggggctgcactc

SEQ ID NO: 355613 - DNA, 120 bp, Artificial Sequence
  ENSG00000139722_17 (sequence is synthesized)
caaccgtctgcacctgctcttcccccacccctgtgggacctcatcttcacgtgccatgtgtgctgaaggcccagggcccagcagggggcagtggcacctgttgacggaaaaggccgaggt

SEQ ID NO: 355614 - DNA, 120 bp, Artificial Sequence
  ENSG00000139722_18 (sequence is synthesized)
gcttaccagtggaccttctggcccgcccctcccctgtcacttgtcgggcatccagggccccgacctgtgcctagccgccagggtgacagaaggcagaactgaagcggggtctgggccacg

SEQ ID NO: 355615 - DNA, 120 bp, Artificial Sequence
  ENSG00000139722_19 (sequence is synthesized)
ggccaggccactgccttttgtcctcagtgaccgtacattcctgctctcggacttgaactctactgtaactgttttcttaaaggaaatgaagctgtacaggacgattcactgccatgccag

SEQ ID NO: 355616 - DNA, 120 bp, Artificial Sequence
  ENSG00000139722_20 (sequence is synthesized)
tcaggcgggcttgccatgttctgtgaatctcgagtgagcggtgccacccgcccccatacctccgccaccggccgctgtcggggatgccacagcctgccacggtcgcagccagacgtgagc

SEQ ID NO: 355617 - DNA, 120 bp, Artificial Sequence
  ENSG00000139722_21 (sequence is synthesized)
ttggcattgaagttgcaaagcggcccctggccgggctcgccgtcgctgtccagggccgtgtccggtgctgtggctgtaaagctgtaggaccctttttaataaatagagaattattaataa

SEQ ID NO: 355618 - DNA, 120 bp, Artificial Sequence
  ENSG00000139722_22 (sequence is synthesized)
ccctcttcccccagcttttggtcggctttgctcacccaccaacagctaggagctggaaggctcagaagagctggggtgggcatgggagagacagaggaaccccggtggctggaaacacag

SEQ ID NO: 355619 - DNA, 120 bp, Artificial Sequence
  ENSG00000139722_23 (sequence is synthesized)
ttccttcccagggtctcttcagcttgctggttggacctcttagcctgcttatgaagcctgaattgacatcatgccaactggtctcctgctgataagtgattccttaacttcctcgggagc

SEQ ID NO: 355620 - DNA, 120 bp, Artificial Sequence
  ENSG00000139722_24 (sequence is synthesized)
agcagaaacttgttttgaaaaaaatcagattctaaatctttacagctgtttacttctgcaagcacaatggccgtagtaaggaattcaagtcacagcgcagccgtggcagggaaggctctg

SEQ ID NO: 355621 - DNA, 120 bp, Artificial Sequence
  ENSG00000139722_25 (sequence is synthesized)
catggagtcacaggacaaagcctgtcctggaaacgtgctggaaggaagtcggcctcattctttacgacgggcagcagctccaaatgagaaaccaaggggcttggctctggacacagaatg

SEQ ID NO: 355622 - DNA, 120 bp, Artificial Sequence
  ENSG00000139722_26 (sequence is synthesized)
atttcaggttaagatagcgactctactgcaatgaacaaatagcttatgtatattatttatttatttttagagacagggtcttgctctgtcagactggagtgcagtggcgcaaccatggct

SEQ ID NO: 355623 - DNA, 72 bp, Artificial Sequence
  ENSG00000139722_27 (sequence is synthesized)
aggttaccccaagcaggctagtttttcatttttttgcagagaggttgtcttgctatgttgcccaggctggtc

SEQ ID NO: 355624 - DNA, 120 bp, Artificial Sequence
  ENSG00000139722_28 (sequence is synthesized)
ctatgttgcccaggctggtcttgaactcaagccatcctcctgcctttgcctcacaaagtgctgctattacagacatgagccactgtattggactagtttatgtatggaatatggagggcc

SEQ ID NO: 355625 - DNA, 120 bp, Artificial Sequence
  ENSG00000139722_29 (sequence is synthesized)
cccagacctgcggcctctctgcacttgcggttcgagagggcagggtgtatagcaggactgccccctcctcccagtggccctgactggtggcggtgactgctgaggtcagcccaggtccac

SEQ ID NO: 355626 - DNA, 120 bp, Artificial Sequence
  ENSG00000139722_30 (sequence is synthesized)
acgcacctccagggtctgcagtgtgaagcaggttgcagaaacgtgggtacctcggggcagttaccagaaaaggggctggagattaggaggaagccagccagtttagcagtcaccagttta

SEQ ID NO: 355627 - DNA, 120 bp, Artificial Sequence
  ENSG00000139722_31 (sequence is synthesized)
gaagaggagacttaaccactttttaaattcaagaccccaccttctctaaacagcatagaaaaagctttctgaattatgatattaaacagatgtcttatgacgtttgcccgtttgtcttat

SEQ ID NO: 355628 - DNA, 120 bp, Artificial Sequence
  ENSG00000139722_32 (sequence is synthesized)
aataatatctaccagagggcacagagaataaggaactttgtctacctgctacccagccgaggaagtaaacactgccaaccggcggaaccccccgccttgtgctctgccctcagtgtgctc

SEQ ID NO: 355629 - DNA, 120 bp, Artificial Sequence
  ENSG00000139722_33 (sequence is synthesized)
ttccccatgtccactgttgtgaattatttatttctctaagtaggcttttgatggacaaaaatgggggctcaggaggaagtgacacaggcacagaggcaggaaagcagggatgggttgtcc

SEQ ID NO: 355630 - DNA, 120 bp, Artificial Sequence
  ENSG00000139722_34 (sequence is synthesized)
gacgagcgagttctcgtctactttggccagatggcatgtacttgtgtgtagagaaatgacaagaaatagggctggtgagggggagtgccagggtgtgcgccccatggtggttaatttagg

SEQ ID NO: 355631 - DNA, 120 bp, Artificial Sequence
  ENSG00000139722_35 (sequence is synthesized)
gtgccagggtgtgcgccccatggtggttaatttaggaggaaacaaggagcttcgtgatgattttggagcagagaagcagtcggatgaaactgctcttttttttttttttttttgagaccg

SEQ ID NO: 355632 - DNA, 120 bp, Artificial Sequence
  ENSG00000139722_36 (sequence is synthesized)
gaaactgctctttagggaggttaatctgtcagcaaagcgtgggctggcttggcgtggcaggaccaggttggcggcggaagtggaggttaggaagaaattaggatttgagctagggctctg

SEQ ID NO: 355633 - DNA, 120 bp, Artificial Sequence
  ENSG00000139722_37 (sequence is synthesized)
ggagaggtattcggaccagctggcccgactccctttctcacttcccctctcctgctgacctgaagtgctttccccacctctgtcacaggcacgtggtctcttagcttctttgtatacctc

SEQ ID NO: 355634 - DNA, 120 bp, Artificial Sequence
  ENSG00000139722_38 (sequence is synthesized)
cactggcttgggggctgcattttgtcatgtttgtctttttgtccttggcacccagcacagtgcctggcacccaggatgtgcctgggtagtgctgctgagtgagtggtgataaccgggctt

SEQ ID NO: 355635 - DNA, 120 bp, Artificial Sequence
  ENSG00000139722_39 (sequence is synthesized)
caagtggaagtgagtaggagacagggctctggtgagcggggaggggaggggcagtgggggtgcaggagggagggagtcattgaggccggattaggcagagcatgagggatgggcagggct

SEQ ID NO: 355636 - DNA, 120 bp, Artificial Sequence
  ENSG00000139722_40 (sequence is synthesized)
ttgtcccgcaggcagttggagtgtggttctggagctcagggtgaatgctctgcttggagacagaaattcaagccactctcctccaagtgcttgtggaaatcaaggagaatataaaagttt

SEQ ID NO: 355637 - DNA, 120 bp, Artificial Sequence
  ENSG00000139722_41 (sequence is synthesized)
gaaaggccactaggagctattagtgggttgggagaaggaaagagctgccatcgaagggaggggagaaacgagagaaacaagttggatgacctaacatcctgttagagactggctggaaga

SEQ ID NO: 355638 - DNA, 120 bp, Artificial Sequence
  ENSG00000139722_42 (sequence is synthesized)
ggaacccagaagtagactgcactgtttgaccctcaccggtcggtcgtatgcagagtggttgtgttcttgagctgaggaatgccggccttgttgcctgtttggctttgattacagtatttg

SEQ ID NO: 355639 - DNA, 120 bp, Artificial Sequence
  ENSG00000139725_0 (sequence is synthesized)
ctcttggctccgctagtgcccggcgcgccgccgccagtgctgcgggctccgggcaatggatgcccccggggccctggcccagaccgccgcccccggtccgggcaggaaggagctgaagat

SEQ ID NO: 355640 - DNA, 120 bp, Artificial Sequence
  ENSG00000139725_1 (sequence is synthesized)
cgtgatcgtgggcgacggcggctgcggcaagacctcgctgctcatggtgtacagccagggctccttccccgagcactacgccccatcggtgttcgagaagtacacggccagcgtgaccgt

SEQ ID NO: 355641 - DNA, 120 bp, Artificial Sequence
  ENSG00000139725_2 (sequence is synthesized)
tggcagcaaggaggtgaccctgaacctctacgacacggccgggcaagaagactatgaccggctgcggcccctgtcctaccagaacacccacctcgtgctcatctgctatgacgtcatgaa

SEQ ID NO: 355642 - DNA, 120 bp, Artificial Sequence
  ENSG00000139725_3 (sequence is synthesized)
tcccaccagctacgacaacgtcctcatcaagtggttccctgaggtcacgcatttctgccgcgggatccccatggtgctcatcggctgcaagacagacctgaggaaggacaaggagcagct

SEQ ID NO: 355643 - DNA, 120 bp, Artificial Sequence
  ENSG00000139725_4 (sequence is synthesized)
gcggaagctccgggccgcccagctggagcccatcacctacatgcagggcctgagcgcctgcgaacagatccgagctgctctctacctggaatgttccgccaagtttcgggagaatgtgga

SEQ ID NO: 355644 - DNA, 120 bp, Artificial Sequence
  ENSG00000139725_5 (sequence is synthesized)
ggacgtcttccgggaggccgccaaggtggctctcagcgctctgaagaaggcgcaacggcagaagaagcgccggctctgcctgctgctctgacccagggcagacagacctcacgacagcac

SEQ ID NO: 355645 - DNA, 120 bp, Artificial Sequence
  ENSG00000139725_6 (sequence is synthesized)
tgacagggcccgggggcccaggtgccgattgcaccagggaggctgccccatcccgaccctccagctcatggtgtctggggcctgcggctagactcttggaacattctggaactctctcct

SEQ ID NO: 355646 - DNA, 120 bp, Artificial Sequence
  ENSG00000139725_7 (sequence is synthesized)
ttcctggctggggctctgaccacaaactcccctccaggctgcccctgggacatggtggtgatgtgggtgcaggagccagtgtctgttgtcgggactcgcaagtgccctcatcacagccac

SEQ ID NO: 355647 - DNA, 120 bp, Artificial Sequence
  ENSG00000139725_8 (sequence is synthesized)
ccccaccacgagtgtctccccagtgcagactcaagttatgcttgaaatgaaaaagtctatctggtagtgggtaaacgtagacctggcactgttccacgcgggcgccccaagcctgccact

SEQ ID NO: 355648 - DNA, 120 bp, Artificial Sequence
  ENSG00000139725_9 (sequence is synthesized)
cctgtgtccctgcctccctgggctcccgagataggcaccactgtatcctccagctccttccttccttcccccaggaacacggaggccaccgagggggctgggcctatcaggaggacacag

SEQ ID NO: 355649 - DNA, 120 bp, Artificial Sequence
  ENSG00000139725_10 (sequence is synthesized)
ccacatggaagacttgtcttcaacttggccactgtctttgcagagctgggcacatgtgcccagggggcagaaaaaatggcttctcagttgttaaaagtataccctggaccacccatctga

SEQ ID NO: 355650 - DNA, 120 bp, Artificial Sequence
  ENSG00000139725_11 (sequence is synthesized)
ccatctccttaaggtttcacccaaagcccccagtgtcagagacttgggatgggaagaacagtcggctcccagtgtggtcatgagcaagttttctgtggactgttccccccactgtggtag

SEQ ID NO: 355651 - DNA, 120 bp, Artificial Sequence
  ENSG00000139725_12 (sequence is synthesized)
gacaggactggcccacttagtcctcaagctcccaacctgctgtccctcaagccccgcttctaccagcctgtggagttcaggaggcgagacatcctggcctcctttgagaactgatgggat

SEQ ID NO: 355652 - DNA, 120 bp, Artificial Sequence
  ENSG00000139725_13 (sequence is synthesized)
ctaccccctgtccacgcgggacagtttctcagaactggttcatagaccacctgtgtcaccaacagccagatacctaatccctgagcctcctttgggaaggtctggggccgagggtctggg

SEQ ID NO: 355653 - DNA, 120 bp, Artificial Sequence
  ENSG00000139725_14 (sequence is synthesized)
ggcgtgagccaccgtgcccggcccaggacttttaaaacaagcatcccaggggattccggtgcctaccagaagtcgcaagctgcttggctctggagggcgcctaggagtcggtgtcgccta

SEQ ID NO: 355654 - DNA, 120 bp, Artificial Sequence
  ENSG00000139725_15 (sequence is synthesized)
tgcttggctctggagggcgcctaggagtcggtgtcgcctaagatgggataatggcttcaggcaactcctagccttccccatatctcctgcctcagcccccctggcccagtgctggggcgt

SEQ ID NO: 355655 - DNA, 120 bp, Artificial Sequence
  ENSG00000139725_16 (sequence is synthesized)
cagctaaacctgagcttccaagaagtcaggttgccaaaggaaggagccttctgagaccctccccaacccacccaggttcccaaggccctgccgtaccctggggaatcaaccaaggagttc

SEQ ID NO: 355656 - DNA, 120 bp, Artificial Sequence
  ENSG00000139725_17 (sequence is synthesized)
gttcttgttctcgaagaaccccaggcctcatgatggtctacggtagaggtccaacaactacagcctgtgggccacatctggccacagcctgatttgtaaataaagttttattggaacaca

SEQ ID NO: 355657 - DNA, 120 bp, Artificial Sequence
  ENSG00000139725_18 (sequence is synthesized)
gggaggagcggcaggggtagggggctgggcgacccggcggcccacgcgggcaccaggaggcctcgccccggaccgcttccctctttcgtctttgtcctgcgcgggcgcccgcagccgagg

SEQ ID NO: 355658 - DNA, 120 bp, Artificial Sequence
  ENSG00000139725_19 (sequence is synthesized)
ctctttcgtctttgtcctgcgcgggcgcccgcagccgagggccacggggtcggcggggcttcgaggccgccccgggtcccaccggctcctccggaagccgcggaccggcctggccctgac

SEQ ID NO: 355659 - DNA, 120 bp, Artificial Sequence
  ENSG00000139725_20 (sequence is synthesized)
ccacccagctctgggcgcccaggtccgacctcccagtcgccctctgagagccgagtcagcgcggggcggggggtcgccccctttgtcctcactcagggcgggaggccctcggggtggccg

SEQ ID NO: 355660 - DNA, 120 bp, Artificial Sequence
  ENSG00000139725_21 (sequence is synthesized)
cagacgccccgttgggcagccctccagcccagctctccaggcaggaggtgggggaagcctgggaaagcggagggggggccccgggatcccccgaggcgcggggctcccggcgaagcctca

SEQ ID NO: 355661 - DNA, 120 bp, Artificial Sequence
  ENSG00000139725_22 (sequence is synthesized)
gatctccggcccttcccggggagggtgcgggcggggcgggcctttggaaatgcagatgagccgccgcccgggccggggttgaaccttctgactcagccacccccggccgcccgggccgct

SEQ ID NO: 355662 - DNA, 120 bp, Artificial Sequence
  ENSG00000139725_23 (sequence is synthesized)
gggtgctccctttcagccccggagcccgtctgctgtgtattcggccggtcacatctctctcccccaacgccctgatccgccctccaccttcctctcctccaggttctgggccggagaagg

SEQ ID NO: 355663 - DNA, 120 bp, Artificial Sequence
  ENSG00000139725_24 (sequence is synthesized)
ggcgacgttcgggcaccccccgaatggacaatctttccttctgtcaacggcaggggcaggcctagtttgactctgacagtcctcccactaagcactacgccccatcggtgttcgagaagt

SEQ ID NO: 355664 - DNA, 120 bp, Artificial Sequence
  ENSG00000139725_25 (sequence is synthesized)
tgggcgatagacgccttcttctgtttttatttttggaggggagcgccctgtaattgtcctgaacacatgcttcccccccttcctccagccacccgcggaggagagagtcccccttttttg

SEQ ID NO: 355665 - DNA, 120 bp, Artificial Sequence
  ENSG00000139725_26 (sequence is synthesized)
catttatcttttccttcccctttctttattaaaggtccgggagtggcggcggccaatcagcgcgcggcttccattttgtgagttcaactccgaggctcccgggcttcgcgaggacgcgtt

SEQ ID NO: 355666 - DNA, 120 bp, Artificial Sequence
  ENSG00000139725_27 (sequence is synthesized)
tgcagccccctctgccgctcctctctggcggccgaggcgcaggagccgcctcgccggggctcggagctggtgtagctcatattggggctcttttcggggtttgtaatttggccgtgggta

SEQ ID NO: 355667 - DNA, 120 bp, Artificial Sequence
  ENSG00000139725_28 (sequence is synthesized)
cgaaggagaggccaacagatgagggaagccatttttctgcaatggaattaaatggccaaagcagtaaacagtcctcagcgaagccgcctttttgcctacccaaccctggaaagtttgcag

SEQ ID NO: 355668 - DNA, 120 bp, Artificial Sequence
  ENSG00000139725_29 (sequence is synthesized)
gtgcacgctggcgtccctggcccaggcgaggtgggcagacatgactctcgcgtcagcatcttccctggtgccaccgccgctacctcctgtggggaagctgaggccagaggcggacatgtg

SEQ ID NO: 355669 - DNA, 120 bp, Artificial Sequence
  ENSG00000139725_30 (sequence is synthesized)
ccaagccacaccgctggggcagtgcaaagttgaggggctcttcccggagctggaggccgggggcttctcgaacccggtgcggaggcacagccagccaatccgggagaccctgtctggccg

SEQ ID NO: 355670 - DNA, 120 bp, Artificial Sequence
  ENSG00000139725_31 (sequence is synthesized)
cgccagccaatcagagggtccctgccgaaggcggagcctgctaatcaggggcacctggagtcgctgggcagccacgatcgggtctcgccggcgaggggcgcgacgtgacgcgcggagggt

SEQ ID NO: 355671 - DNA, 120 bp, Artificial Sequence
  ENSG00000139725_32 (sequence is synthesized)
ggcggtgggttgggggtgggagctttgctcgcagctgagccccgtttttccggtgctgcagtatccctgggactgagagctgaatacccacacccagggctgagaccttagcagaaagga

SEQ ID NO: 355672 - DNA, 120 bp, Artificial Sequence
  ENSG00000139725_33 (sequence is synthesized)
cacagccgtggctgtgaagcctcccggacctttggcctctgcaactggggtgccttagtggcctttcagggagctgagggaagcaagattctaagaataatttttaactattagtattga

SEQ ID NO: 355673 - DNA, 120 bp, Artificial Sequence
  ENSG00000139725_34 (sequence is synthesized)
tggcctgtggacctgagcactttacacgactactcccaatccttaggactcggaggcaggcgctgttcacatcccccagtttacagggggagaaactgaggcccagagaggttaagcagc

SEQ ID NO: 355674 - DNA, 120 bp, Artificial Sequence
  ENSG00000139725_35 (sequence is synthesized)
ttgcccagggccacacagctagcgagaagtggagccaggatctggtcccatccactgcaatccaaagtctgtgctatgagccgccgtcctgtcgtgtcctgtctgccttgtttgaaagta

SEQ ID NO: 355675 - DNA, 120 bp, Artificial Sequence
  ENSG00000139725_36 (sequence is synthesized)
gagcccagcggggtgagggggggctgatccgggacgagtgaggggggtggacagtggattcagctggaactttggcccccgccggccccactaaggaccaacccgaccccctctcccgca

SEQ ID NO: 355676 - DNA, 120 bp, Artificial Sequence
  ENSG00000139725_37 (sequence is synthesized)
ggcgattgcccggcagagggcgtcagacgtccaccctgcagcccagggtcggggtgcgggtaagcggagcccagtccctcaccccgaacccgcgtgcacgctggcgtccctggcccaggc

SEQ ID NO: 355677 - DNA, 120 bp, Artificial Sequence
  ENSG00000139725_38 (sequence is synthesized)
ggccaacagatgagggaagccatttttctgcaatggaattaaatggccaagcccaaggactcacagttggaagactggagaagactttttaaaaagatctggatttttccttatgacttg

SEQ ID NO: 355678 - DNA, 120 bp, Artificial Sequence
  ENSG00000139725_39 (sequence is synthesized)
gaatccatctttgtcttgtataactaggtcatagcacaccattcatgtcagcagttaacagttttgaattccaaaaaaacctaagtaaatgacatattttttttcctctttttgttctat

SEQ ID NO: 355679 - DNA, 120 bp, Artificial Sequence
  ENSG00000139725_40 (sequence is synthesized)
gggtgggtggggggagcttggagctgtcttaatctgtattctcttgactgaacaataaatttttaaatatatctagtttcctctattaaacacttaaacctggccatcttattaactcct

SEQ ID NO: 355680 - DNA, 120 bp, Artificial Sequence
  ENSG00000139725_41 (sequence is synthesized)
tctctctttttaacaaggtaatgttttaaatgtatatagctttaggactagcgaaatggcagcaacaaaaaattgtgagcagttgttactcttttagtttttaaaaaaccttttacattg

SEQ ID NO: 355681 - DNA, 120 bp, Artificial Sequence
  ENSG00000139725_42 (sequence is synthesized)
taagtacccaatccattctgtcctgacgcagtacagttttgatgttaatgttgctgagatgtccttaattttccgaaccttcatctgcatgtatgtctttgtctctcttgtctaatataa

SEQ ID NO: 355682 - DNA, 120 bp, Artificial Sequence
  ENSG00000139725_43 (sequence is synthesized)
gccagttaagatgcttgagacgatcttgctttataaagctaaggttctagctttatgcttttgaaaatgtttacagcactaaatgctagtcagctttcttccccgtagcttgtacacttt

SEQ ID NO: 355683 - DNA, 120 bp, Artificial Sequence
  ENSG00000139725_44 (sequence is synthesized)
ggggagctggtgggtgagggaaaggaagaccttttctttgtgtagagagactaaagccgtcacaggaaactagattaaaactggaaaacaagtcctagctggttccagcaaacaccaacg

SEQ ID NO: 355684 - DNA, 120 bp, Artificial Sequence
  ENSG00000139725_45 (sequence is synthesized)
ttaagtggggggtattttctatggtggttgggcggctggtgcgtcttgtgccttttgtttgatttgactgtattttcgccttttgtctcttaatgacgatcacaccattgctatatccag

SEQ ID NO: 355685 - DNA, 120 bp, Artificial Sequence
  ENSG00000139725_46 (sequence is synthesized)
agcagtaaacagtcctcagcgaagccgcctttttgcctacccaaccctggaaagtttgcagaagtggaaggagcagaacgtgagggtgtaacttacaaaaaggtaataagaacaaagaca

SEQ ID NO: 355686 - DNA, 120 bp, Artificial Sequence
  ENSG00000139725_47 (sequence is synthesized)
ccaccataacccccaaatttcccaactaaatcaaaaaatatatatgtttttacaataacgtctccaaaaccaccgcccagcttgatcttctagactccatggcaccgggctgagcgggtt

SEQ ID NO: 355687 - DNA, 120 bp, Artificial Sequence
  ENSG00000139726_0 (sequence is synthesized)
gtctcgcgggagcgctgctggcggtcgggcgctcgggcggccctggccggggagacgagttgcatgtgttggttcagctggcgatagcggcgggagcggagccggcggggcctgtgcgac

SEQ ID NO: 355688 - DNA, 120 bp, Artificial Sequence
  ENSG00000139726_1 (sequence is synthesized)
cgcctgggtttgtgaaatggctgctgacatttctgaatccagcggggctgactgcaaaggagacccaaggaacagtgccaagttagatgccgattacccacttcgagtcctttattgtgg

SEQ ID NO: 355689 - DNA, 120 bp, Artificial Sequence
  ENSG00000139726_2 (sequence is synthesized)
agtctgttcattaccaacagagtactgtgaatatatgcctgatgttgctaaatgtagacaatggttagagaagaattttccaaatgaatttgcaaaacttactgtagaaaattcacccaa

SEQ ID NO: 355690 - DNA, 120 bp, Artificial Sequence
  ENSG00000139726_3 (sequence is synthesized)
acaagaagctggaattagtgagggtcaaggaacagcaggggaagaagaggagaagaaaaaacagaagagaggtggaaggggtcaaataaaacaaaaaaagaagaccgtaccacaaaaggt

SEQ ID NO: 355691 - DNA, 120 bp, Artificial Sequence
  ENSG00000139726_4 (sequence is synthesized)
tactatagccaaaattcccagagcaaagaagaaatatgtgacaagagtatgtggccttgcaacttttgaaattgatcttaaagaagcacaaagattttttgctcaaaaattctcctgtgg

SEQ ID NO: 355692 - DNA, 120 bp, Artificial Sequence
  ENSG00000139726_5 (sequence is synthesized)
tgcctcagtaacaggggaggatgaaattatcattcagggagattttacagatgacataattgatgtcattcaggaaaaatggccagaggtagatgatgacagcatcgaagatcttggaga

SEQ ID NO: 355693 - DNA, 120 bp, Artificial Sequence
  ENSG00000139726_6 (sequence is synthesized)
agtaaagaagtgaatttgaaaatttgtctgtatttaatggcctgaactgagagttgatatggccaaagggagagaggccttttaaaatatatatatatatacacatatatatgtatatat

SEQ ID NO: 355694 - DNA, 120 bp, Artificial Sequence
  ENSG00000139726_7 (sequence is synthesized)
acacatatgtatacatatatatatattctacagtaaaactgtagactgtcctcgtccttggcattttcactgttctgtacaaggctgcttgtttttttattgccaaagtcaaataaacgg

SEQ ID NO: 355695 - DNA, 120 bp, Artificial Sequence
  ENSG00000139726_8 (sequence is synthesized)
gagactgtcatgctcatgcatgaatagaatttagtcaaataaaaaattttggtcatttggtactgactttctctctctctctctctctcttttttttttttgacagagtctcgcactgtt

SEQ ID NO: 355696 - DNA, 120 bp, Artificial Sequence
  ENSG00000139726_9 (sequence is synthesized)
aaagtgctggtattacagatgtgagccaccgcacccagcctgagtttctctttctctctttttaactttattttttgaaaaacccggtagactttttgtggggagcatttttgttgataa

SEQ ID NO: 355697 - DNA, 120 bp, Artificial Sequence
  ENSG00000139726_10 (sequence is synthesized)
gggagcatttttgttgataattttactgatctaaagctgagtgattttttaaaagaatttgaatttggcttcctcaccagtaatatgtctccttgcttctttgatgtgatagttttgaga

SEQ ID NO: 355698 - DNA, 120 bp, Artificial Sequence
  ENSG00000139726_11 (sequence is synthesized)
tgggtgagaatctaatagatctgtggttgaatttgctgtgttgttatgaagtccaccctgtgggcacaataacataactgttggtaggagttgtttgagctattctggagattatttggt

SEQ ID NO: 355699 - DNA, 120 bp, Artificial Sequence
  ENSG00000139726_12 (sequence is synthesized)
aaagtatactaaaagccttaaaaccatgtatgtgcgctgtttgaacccgtaagccacttctttgacattagaagacattagaagaaataatcagccttgcataaaacttatggatgaaag

SEQ ID NO: 355700 - DNA, 120 bp, Artificial Sequence
  ENSG00000139726_13 (sequence is synthesized)
tattcatcacaatattatttataataaaaaattgcaaatgttataaatgaacaattgggaaatggttaaagaagtgatggtgcattgtgtggtagaatattatgcatatgtttaaagaat

SEQ ID NO: 355701 - DNA, 120 bp, Artificial Sequence
  ENSG00000139726_14 (sequence is synthesized)
catattttctaagattatttggaagcatgtttggtaatgtcaagtggagtaccccagatacattttagacatttatcgtcatcatctgctctgagtggaaggccgttcagagaggctaga

SEQ ID NO: 355702 - DNA, 120 bp, Artificial Sequence
  ENSG00000139726_15 (sequence is synthesized)
ggttcttattctggctataaattatgtgagtaaaattgtgctaaccagttaaaagtactgtacacccatgctcaatatatagtcctggaaatagcaattgaaacatgtcttctcacaaga

SEQ ID NO: 355703 - DNA, 120 bp, Artificial Sequence
  ENSG00000139726_16 (sequence is synthesized)
gaaaatgacagttttaatgatgtatttgatgaatttaaactttaagtcaggtgctgcaaattggaaagaagacttgtggtgttttaagttgctgtggacacttttaagaaacttagaacc

SEQ ID NO: 355704 - DNA, 120 bp, Artificial Sequence
  ENSG00000139726_17 (sequence is synthesized)
catggaacccttgtttatcgccatgcaaattacaatcttgaatgagtgttttttaaaaataaagtattagaaaaatgtgtagtaaagatgtaaaattaaaaaatggaattctccattaac

SEQ ID NO: 355705 - DNA, 120 bp, Artificial Sequence
  ENSG00000139726_18 (sequence is synthesized)
tgtggattttactaaatagaattactggtgaagcagatttatccatcgagactatctggtatgcgttatgtatgtagtctgttgctgctgaaagatgtctgtgtgcctgtatcaacatgt

SEQ ID NO: 355706 - DNA, 120 bp, Artificial Sequence
  ENSG00000139726_19 (sequence is synthesized)
gacttcatgtaaagtttctttgtgttcacagttcttagcaaatgcagttacaatccatagatagccagcagtggatgttactccaggaaaatgcaggattaaaattgtccttgtgtataa

SEQ ID NO: 355707 - DNA, 120 bp, Artificial Sequence
  ENSG00000139726_20 (sequence is synthesized)
gagaggagtcctggggaggaggaggcatgaattaacagagtttccccacctgggtgatttgtgtctggctactctgcctgaagaagcttacagtccatttgtaacaggatgtgcaactag

SEQ ID NO: 355708 - DNA, 120 bp, Artificial Sequence
  ENSG00000139726_21 (sequence is synthesized)
gttatttcagcctgaaggtcctcaaggtgtatgctagtctagctgtcaaaggagggcttcttggaagattatgagttaaggatggcaaggactggatgagaaggtggggaacggcgtccc

SEQ ID NO: 355709 - DNA, 120 bp, Artificial Sequence
  ENSG00000139726_22 (sequence is synthesized)
agacaaagcgcacgactatgtaagaaaaagcttgatggctgtctgtgaagaagtgagcagctttgagtttgtctggtgtatcgtatagggagggtggcccgttaaggagtgggagaaggt

SEQ ID NO: 355710 - DNA, 120 bp, Artificial Sequence
  ENSG00000139726_23 (sequence is synthesized)
ttagtaggatattacagaattaacatttatctgttagctgtttaagttctctctgagataggataggtctgaatatcaactttcttacataaaaaagtaaatgggccgggcgcagtggct

SEQ ID NO: 355711 - DNA, 120 bp, Artificial Sequence
  ENSG00000139734_0 (sequence is synthesized)
agatgtgttggctgcggccccgacttcagcggttgggctaggctgtgctgactgtttgggtggcggaccccgggagtaaaacctgttgtcgatccctcagcttccagcttgcggcttgct

SEQ ID NO: 355712 - DNA, 120 bp, Artificial Sequence
  ENSG00000139734_1 (sequence is synthesized)
gagtggccaccttctttccggtccccggagctgcggggaaagatggaacggcaccagccgcggctgcaccacccggcccaaggctcagccgctgggactccctacccttcctcagcctct

SEQ ID NO: 355713 - DNA, 120 bp, Artificial Sequence
  ENSG00000139734_2 (sequence is synthesized)
ctccgcggctgccgggaaagcaagatgccgcgcaggaagggcccccaacaccctccgccgcccagtggccccgaggagcctggggagaagcgccccaagtttcatttaaatattaggaca

SEQ ID NO: 355714 - DNA, 120 bp, Artificial Sequence
  ENSG00000139734_3 (sequence is synthesized)
ctgacggatgatatgctggacaaatttgccagcataagaattccagggagcaagaaagagagacctccacttcccaacctgaagactgcatttgcaagcagtgattgctcagcagcacct

SEQ ID NO: 355715 - DNA, 120 bp, Artificial Sequence
  ENSG00000139734_4 (sequence is synthesized)
ttagagatgatggagaactttccaaagccactgtcagagaatgaactcttagaactttttgaaaaaatgatggaagatatgaatttaaatgaagataaaaaggcaccattgcgggaaaag

SEQ ID NO: 355716 - DNA, 120 bp, Artificial Sequence
  ENSG00000139734_5 (sequence is synthesized)
gacttcagtatcaaaaaagaaatggtgatgcagtacattaatactgcttctaagacaggaagtcttaagagaagccgacagatctcacctcaggaattcattcatgagctgaaaatgggg

SEQ ID NO: 355717 - DNA, 120 bp, Artificial Sequence
  ENSG00000139734_6 (sequence is synthesized)
tctgcagatgagagacttgtcacatgcctggagtctctccgagtgtctttgaccagcaatcctgtgagttgggtggaaagctttggacatgaagggcttggattattattagacattttg

SEQ ID NO: 355718 - DNA, 120 bp, Artificial Sequence
  ENSG00000139734_7 (sequence is synthesized)
gaaaaactgattagtggaaaaatccaagaaaaagttgtaaagaaaaatcaacataaagtcatacagtgtctaaaagccctgatgaatacgcagtatggcttggaaagaattatgagtgag

SEQ ID NO: 355719 - DNA, 120 bp, Artificial Sequence
  ENSG00000139734_8 (sequence is synthesized)
gagaggagcctttccttattggccaaagccgtggatcccagacaccccaatatgatgacagatgtggttaaacttctctctgcggtatgcattgtaggggaagaaagcatccttgaagaa

SEQ ID NO: 355720 - DNA, 120 bp, Artificial Sequence
  ENSG00000139734_9 (sequence is synthesized)
gttttagaagctttaacttcagctggtgaagaaaaaaaaattgacagatttttttgtattgtggaaggcctccggcacaattcagttcaactgcaagtagcttgtatgcagctcatcaat

SEQ ID NO: 355721 - DNA, 120 bp, Artificial Sequence
  ENSG00000139734_10 (sequence is synthesized)
gccctggttacatctcctgatgatttggatttcaggcttcacatcagaaatgaatttatgcgttgtggattgaaagagatattgccaaatttaaaatgcattaagaatgatggcctggat

SEQ ID NO: 355722 - DNA, 120 bp, Artificial Sequence
  ENSG00000139734_11 (sequence is synthesized)
atccaacttaaagtctttgatgagcataaagaagaagatttgtttgagttatcccatcgccttgaagatattagagctgaacttgatgaagcatatgatgtttacaacatggtgtggagc

SEQ ID NO: 355723 - DNA, 120 bp, Artificial Sequence
  ENSG00000139734_12 (sequence is synthesized)
acagttaaagaaactagagcagagggatattttatttctattcttcagcatcttttgctgattcgaaatgattattttataaggcaacaatacttcaaattaattgatgagtgtgtatcc

SEQ ID NO: 355724 - DNA, 120 bp, Artificial Sequence
  ENSG00000139734_13 (sequence is synthesized)
cagattgtattgcatagagatggaatggatccagacttcacatatcgaaaaagactagatttagatttaacccagtttgtagacatttgcatagatcaagcaaaactagaagagtttgaa

SEQ ID NO: 355725 - DNA, 120 bp, Artificial Sequence
  ENSG00000139734_14 (sequence is synthesized)
gagaaagcatcagaactttacaagaaatttgaaaaagagtttaccgaccaccaagaaactcaggctgaattgcagaaaaaagaggcaaagattaatgagcttcaagcagagctacaagct

SEQ ID NO: 355726 - DNA, 120 bp, Artificial Sequence
  ENSG00000139734_15 (sequence is synthesized)
tttaagtctcagtttggtgccttgccagctgattgtaatattcctttgcctccctctaaagaaggtggaactggccactcagcacttcctcctccgcctccactgccttctggtggaggg

SEQ ID NO: 355727 - DNA, 120 bp, Artificial Sequence
  ENSG00000139734_16 (sequence is synthesized)
gtgccgcctccacctcctcccccaccacctcctccacttccaggaatgcggatgccattcagtggtcctgtgcctccaccacctcccctgggattccttggaggacaaaattctcctcct

SEQ ID NO: 355728 - DNA, 120 bp, Artificial Sequence
  ENSG00000139734_17 (sequence is synthesized)
ctaccaatcctgccatttgggttgaaaccaaagaaagaatttaaacctgaaatcagcatgagaagattgaattggttaaagatcagacctcatgaaatgactgaaaactgtttctggata

SEQ ID NO: 355729 - DNA, 120 bp, Artificial Sequence
  ENSG00000139734_18 (sequence is synthesized)
aaagtaaatgaaaataagtatgaaaacgtggatttgctttgtaaacttgagaatacattttgttgccaacaaaaagagagaagagaagaggaagatattgaagagaagaaatcgattaag

SEQ ID NO: 355730 - DNA, 120 bp, Artificial Sequence
  ENSG00000139734_19 (sequence is synthesized)
ctcttttcgggtgccatatgaggaaatcagaatgatgatattggaagtagatgaaacacggttggcagagtctatgattcagaacttaataaagcatcttcctgatcaagagcaattaaa

SEQ ID NO: 355731 - DNA, 120 bp, Artificial Sequence
  ENSG00000139734_20 (sequence is synthesized)
ttcattgtctcagttcaagagtgaatatagcaacttatgtgaacctgagcagtttgtggttgtgatgagcaatgtgaagagactacggccacggctcagtgctattctctttaagcttca

SEQ ID NO: 355732 - DNA, 120 bp, Artificial Sequence
  ENSG00000139734_21 (sequence is synthesized)
gtttgaagagcaggtgaacaacatcaaacctgacatcatggctgtcagtactgcctgcgaagagataaagaagagcaaaagctttagcaagttgctggaacttgtattgctaatgggaaa

SEQ ID NO: 355733 - DNA, 120 bp, Artificial Sequence
  ENSG00000139734_22 (sequence is synthesized)
ctacatgaatgctggctcccggaatgctcaaaccttcggatttaaccttagctctctctgtaaactaaaggacacaaaatcagcagatcagaaaacaacgctacttcatttcctggtaga

SEQ ID NO: 355734 - DNA, 120 bp, Artificial Sequence
  ENSG00000139734_23 (sequence is synthesized)
aatatgtgaagagaagtaccctgatatactgaattttgtggatgatttggaacctttagacaaagctagtaaagtctctgtagaaacgctggaaaagaatttgaggcagatgggaaggca

SEQ ID NO: 355735 - DNA, 120 bp, Artificial Sequence
  ENSG00000139734_24 (sequence is synthesized)
gcttcaacagcttgagaaggaattggaaacctttccccctcctgaggacttgcatgacaagtttgtgacaaagatgtccagatttgttatcagtgcaaaagaacaatatgagacactttc

SEQ ID NO: 355736 - DNA, 120 bp, Artificial Sequence
  ENSG00000139734_25 (sequence is synthesized)
gaagttacacgaaaacatggaaaagttataccagagtataataggatactatgccattgatgtgaagaaggtgtctgtggaagactttcttactgacctgaataacttcagaaccacatt

SEQ ID NO: 355737 - DNA, 120 bp, Artificial Sequence
  ENSG00000139734_26 (sequence is synthesized)
catgcaagcaataaaggagaatatcaaaaaaagagaagcagaggaaaaagaaaaacgtgtcagaatagctaaagaattagcagagcgagaaagactcgaacgccaacaaaagaaaaagcg

SEQ ID NO: 355738 - DNA, 120 bp, Artificial Sequence
  ENSG00000139734_27 (sequence is synthesized)
tttattagaaatgaagactgagggtgatgagacaggagtgatggataatctgctggaggccttgcagtccggggctgccttccgcgacagaagaaaaaggacaccgatgccaaaagatgt

SEQ ID NO: 355739 - DNA, 120 bp, Artificial Sequence
  ENSG00000139734_28 (sequence is synthesized)
tcggcagagtctcagtccaatgtctcagaggcctgttctgaaagtttgtaaccatgaaaatcagaaagtgcagttgacagaagggtcacgttcacactacaatatcaattgcaactcaac

SEQ ID NO: 355740 - DNA, 120 bp, Artificial Sequence
  ENSG00000139734_29 (sequence is synthesized)
aaggactccagtcgccaaggagcttaattataatctagacactcatacgtctactgggaggatcaaggcagctgagaagaaggaagcgtgtaatgtagaaagcaacagaaaaaaggaaac

SEQ ID NO: 355741 - DNA, 120 bp, Artificial Sequence
  ENSG00000139734_30 (sequence is synthesized)
ggaacttcttggctctttttctaaaaatgaatcagttcccgaagttgaagccctgctggcaagattacgagctttataagttaaactggtttttaaaaaaaatgattaagccaaatataa

SEQ ID NO: 355742 - DNA, 120 bp, Artificial Sequence
  ENSG00000139734_31 (sequence is synthesized)
agccatgctctaaactataacacttgaaaaaattgcttttatgtaagtgactttatatagttttaaattatgatatatattagaaaaataaagctaaatatatgattgcaatgctttttc

SEQ ID NO: 355743 - DNA, 120 bp, Artificial Sequence
  ENSG00000139734_32 (sequence is synthesized)
tatgtactggaggttttggtttattcaagattgtaccgggctttaatccttttttttttttttttgtctcctggtattcctcagttctttatttggtggttaaattatacatattgcttt

SEQ ID NO: 355744 - DNA, 120 bp, Artificial Sequence
  ENSG00000139734_33 (sequence is synthesized)
agagagcaggtaggtggccatgtgttcagcagtgtgtccttaagaaaataccatctttctaagccactggaatttttactttactatttttaacattaatggatgtcaggtcatcaacct

SEQ ID NO: 355745 - DNA, 120 bp, Artificial Sequence
  ENSG00000139734_34 (sequence is synthesized)
caagtctttacatatccatgtatattccatatatattgtttatataggcccaagtttctccttaattgggatctatatactaccagcacaacatcaaaaacatgtaattgaatacatcag

SEQ ID NO: 355746 - DNA, 120 bp, Artificial Sequence
  ENSG00000139734_35 (sequence is synthesized)
agctatatatgtaaggaaatgactggtgaccccattatcatcattgttgaattcatgttaagtagaccctctaggggaccataaggcaattgagcacataacgaaaaatgatgcaataag

SEQ ID NO: 355747 - DNA, 120 bp, Artificial Sequence
  ENSG00000139734_36 (sequence is synthesized)
aatgtatgcactctctttgccaaatgcatgtgcttttgtgtaacgtggatgtaaacagaattgcagtgctgccgaaattcttgatcttggctaagagagtatttttccccttgtaattat

SEQ ID NO: 355748 - DNA, 120 bp, Artificial Sequence
  ENSG00000139734_37 (sequence is synthesized)
gactctgagataaaattgccattttgaaatttccaaagtaacaactttttttattttatgaataaacttgggattgcaatttctctgatctgacaatcaataactttaacaaagatctaa

SEQ ID NO: 355749 - DNA, 120 bp, Artificial Sequence
  ENSG00000139734_38 (sequence is synthesized)
ataagtgtttcaaggaaagttttcctaagcaaatgtaatattacctcatttgggcatcattactctgttaattctatatcaaaggaaataaacttgctacttgcactaaatgaaaaaaaa

SEQ ID NO: 355750 - DNA, 120 bp, Artificial Sequence
  ENSG00000139734_39 (sequence is synthesized)
gtatttataaattgcacattcttcttatctacttttatcctattgatctgtgattttagtagactgctgtgaaattctcaagttccaatataactaaaatagtaaaaatgtgtgcatgta

SEQ ID NO: 355751 - DNA, 120 bp, Artificial Sequence
  ENSG00000139734_40 (sequence is synthesized)
ggaacctggcattgatcctcagtttagaacaggccagttaccatattgtccggagtgggtccttgacattcaggaaagatacatccttagacctttcaaaatttgtcatgcctctctaac

SEQ ID NO: 355752 - DNA, 120 bp, Artificial Sequence
  ENSG00000139734_41 (sequence is synthesized)
tgctctgcttaaaaaatcatttgagcagccgacagtgctgacagtgccactatgtgggcagaagcacagcttgactcagaccctgacaactgttgatctgggagagggaaagagaagact

SEQ ID NO: 355753 - DNA, 120 bp, Artificial Sequence
  ENSG00000139734_42 (sequence is synthesized)
attatcttgatggatctctgcctaaaagcataagatcaacggaaccatgtcatctgaatagaagctagtgaatgggattgggtgcagtaaaatggaaatcctttttaatgaaagataaga

SEQ ID NO: 355754 - DNA, 120 bp, Artificial Sequence
  ENSG00000139734_43 (sequence is synthesized)
gagaatatagatttagtattattcctcctggcattcctcattctaacttttgccatcacctgagttccagcattggggaagacaaaagcaccagggtgcacatctttaaagacatttatg

SEQ ID NO: 355755 - DNA, 120 bp, Artificial Sequence
  ENSG00000139734_44 (sequence is synthesized)
ctgcttgccttcaaaaaatcagaaagtgcagttgacagaagggtcacgttcacactacaatatcaattgcaactcaacaaggactccagtcgccaaggagcttaattataatctagacac

SEQ ID NO: 355756 - DNA, 120 bp, Artificial Sequence
  ENSG00000139734_45 (sequence is synthesized)
cttgcatgacaagtttgtgacaaagatgtccatatccttttgatagctaaataacttaagtcactagtcaactagagatacaatttatttaatattttagatgtctttgtgtaaccagag

SEQ ID NO: 355757 - DNA, 120 bp, Artificial Sequence
  ENSG00000139734_46 (sequence is synthesized)
atcattctgtagtgccaaattacagaaagtttaacctttgccttcttgcagggaaatttatcaaagtgtctgtcaatcatgaataatacacaaatgtctgtctgtctgtctgtttgttta

SEQ ID NO: 355758 - DNA, 120 bp, Artificial Sequence
  ENSG00000139734_47 (sequence is synthesized)
gggattataggcgtgagccaccacgcccacccacaaatgtatgatcattaatttctatttttttcctttttatcagcttagataatagtatgttctctcatcttttccctgtcatatacc

SEQ ID NO: 355759 - DNA, 120 bp, Artificial Sequence
  ENSG00000139734_48 (sequence is synthesized)
ttccctgtcatataccttatttccttctgatgtacatgatgaattgaaaggatattaaaactcaggttgaggaagtttgactctaaactcatgatgtgatttagatacctttgaaatgtc

SEQ ID NO: 355760 - DNA, 120 bp, Artificial Sequence
  ENSG00000139734_49 (sequence is synthesized)
tgaggaagcagatacaagacttcataaacgtgtttaactagtcagcttaacttcaagaattggcatatattataaattagtttgtgctccataaaatttaatatttcctttagaaatact

SEQ ID NO: 355761 - DNA, 120 bp, Artificial Sequence
  ENSG00000139734_50 (sequence is synthesized)
tactagatggttataaaatcaaaatggagtttattatagtcactacttgtattgatattttcctaacccaaataaatcggtatgtatgtgtgtatatacatacacacacacacacacaca

SEQ ID NO: 355762 - DNA, 120 bp, Artificial Sequence
  ENSG00000139734_51 (sequence is synthesized)
tataattaatagcatgaggcttgtgtcctgtttaaggtttcttttgtattcaattatctttattatcactaactttgtagcttaatctctaatgagtaactgaagtaataaacttttatt

SEQ ID NO: 355763 - DNA, 120 bp, Artificial Sequence
  ENSG00000139734_52 (sequence is synthesized)
tcctgaaagtaatgttgagttgctttgcaaaccattttatgaaattacagactgatatcttttgtgttgtaataaaatattactacaatgcattattaaaatcccatatggacaaatgaa

SEQ ID NO: 355764 - DNA, 120 bp, Artificial Sequence
  ENSG00000139734_53 (sequence is synthesized)
ttctgtatgaaagataactcacttctaaaatgagctcttataaatagacactcctaatatcttaaactgaggtacttgaaataaaatgactatttttcctctttctacctcttctctcct

SEQ ID NO: 355765 - DNA, 120 bp, Artificial Sequence
  ENSG00000139734_54 (sequence is synthesized)
gagatttagtgaatcacaaaattaatatttggcttgtcatagattttattgtatatgctttcagcttaattgtgaactagttgagttttagcttccttcactgtctctgtcgggaaatat

SEQ ID NO: 355766 - DNA, 120 bp, Artificial Sequence
  ENSG00000139734_55 (sequence is synthesized)
cataaaaatatactccagcaacaatcaattcaggctaacgtgtttgtttccttttgtatcttgccacccatccagtttcttatttcattagggaggatgcctttatcaccctactgagta

SEQ ID NO: 355767 - DNA, 120 bp, Artificial Sequence
  ENSG00000139734_56 (sequence is synthesized)
aggctttttttttttttttctttttaagtaaaggtgaaatctgtattcatcaaaaatttttttgtactaccttctcatatgacaaagtgtgctttctaaaataaatatattattgcagtt

SEQ ID NO: 355768 - DNA, 120 bp, Artificial Sequence
  ENSG00000139734_57 (sequence is synthesized)
tgatcttcagtgctaaaagactgaaaattataccttttatttgtatgtactttccactttctcacagtgttttcatacccaatatctcattttaaaaataaagagagttgtaggatatta

SEQ ID NO: 355769 - DNA, 120 bp, Artificial Sequence
  ENSG00000139737_0 (sequence is synthesized)
attaatactcccagcttctctaaaacctcaaataaagcaatactaacacctgaaaaaacaggttacacttccaggggctccccactcagtccccagtcatctatcgacagtgagctgagt

SEQ ID NO: 355770 - DNA, 120 bp, Artificial Sequence
  ENSG00000139737_1 (sequence is synthesized)
acttcagaattggaggatgattctatctccatgggatataaattacaggacctcactgatgttcagatcatggctcgtctgcaagaagaaagtctcaggcaagattatgcttctacttca

SEQ ID NO: 355771 - DNA, 120 bp, Artificial Sequence
  ENSG00000139737_2 (sequence is synthesized)
gcatctgtatcaagacatagttccagtgtgtcattgagttcaggaaaaaaagggacatgtagtgatcaagaatatgaccaatacagtctggaggatgaagaggaatttgatcatttgcca

SEQ ID NO: 355772 - DNA, 120 bp, Artificial Sequence
  ENSG00000139737_3 (sequence is synthesized)
ccacctcagcctcgtcttccaagatgttcccctttccaaagaggaattccccattcacagactttctccagcattcgggagtgtaggaggagccccagttcccagtattttccttcaaat

SEQ ID NO: 355773 - DNA, 120 bp, Artificial Sequence
  ENSG00000139737_4 (sequence is synthesized)
aattaccagcagcaacagtattattcacctcaagcccaaactccagatcagcaaccaaataggaccaatggagataagctccgaagaagtatgcctaacctagcccggatgccaagtaca

SEQ ID NO: 355774 - DNA, 120 bp, Artificial Sequence
  ENSG00000139737_5 (sequence is synthesized)
actgccattagtagcaacattagttctccggtcaccgtgcgaaatagtcagagttttgactcaagcttgcatggagctggaaatggaatttcaagaatacaatcttgtattccatcaccg

SEQ ID NO: 355775 - DNA, 120 bp, Artificial Sequence
  ENSG00000139737_6 (sequence is synthesized)
ggacagcttcaacacagggtccacagcgtggggcatttcccagtgtctatccgacagcctcttaaagccacagcctatgtgagtccaaccgttcaaggcagcagtaacatgcctttatca

SEQ ID NO: 355776 - DNA, 120 bp, Artificial Sequence
  ENSG00000139737_7 (sequence is synthesized)
aacggcttacagctgtattccaacacaggaatccccacaccgaacaaagctgcagcttctgggataatgggtcgcagtgcactcccaagaccttcgttggcaataaatgggagtaacctg

SEQ ID NO: 355777 - DNA, 120 bp, Artificial Sequence
  ENSG00000139737_8 (sequence is synthesized)
tcttcagcctccaaagcctctgtcttcactcagcactctgagggatggaaattggagagatggttgctactaatgcagttttatgtacccttgaaaaatgggaaagaagtaaaaatgagg

SEQ ID NO: 355778 - DNA, 120 bp, Artificial Sequence
  ENSG00000139737_9 (sequence is synthesized)
gttgtgttacctagctggctgggtagcagtggatgttgggatattctttcccttttgtgttttaatatatttactgcattgtttctcaatggaccagtcaccagagactaattattgcac

SEQ ID NO: 355779 - DNA, 120 bp, Artificial Sequence
  ENSG00000139737_10 (sequence is synthesized)
ttaaatatttgcctgagatactgcaacattctcaaacccatggttgcagtattgtgacacttagatctaggaagtttttgtagaactgctctgtacctgaatactttttgagagaattaa

SEQ ID NO: 355780 - DNA, 120 bp, Artificial Sequence
  ENSG00000139737_11 (sequence is synthesized)
gatgtatcaataatgctttgccatatgagttttttaaagtaacttgttcaatttactcacgtgttctaaacatctttccattacatgttctgtattttaatacattgcatattgacaact

SEQ ID NO: 355781 - DNA, 120 bp, Artificial Sequence
  ENSG00000139737_12 (sequence is synthesized)
aggttctataatgtatgctttgaaatttacttttttatagtttacaggaattttattttttgtgcctatttctttttacacctatgtgaaccactatggaacaacttaaattttgtgcca

SEQ ID NO: 355782 - DNA, 120 bp, Artificial Sequence
  ENSG00000139737_13 (sequence is synthesized)
taaaaatatttttgtggtaaggtactatttttttagctctagggatatatcagcaaaaacacatcatgcaatttgagacacataattttgtgttgaatgagcacaacataatttgaagca

SEQ ID NO: 355783 - DNA, 120 bp, Artificial Sequence
  ENSG00000139737_14 (sequence is synthesized)
ttgcaaggagataaccagacagcagaattaaatggtcctgtctttttcatttttaatttattgtcatacatgggtttcatatttataacggcatcatgagctcattgcacttaatacctg

SEQ ID NO: 355784 - DNA, 120 bp, Artificial Sequence
  ENSG00000139737_15 (sequence is synthesized)
caatgtttgctactgtaccacaattgattttcaatactttattacgaaggatgaaactgtaatgttttattaacaatgcttctggaaatgaatgcattttaaagcaaataaatctttttg

SEQ ID NO: 355785 - DNA, 120 bp, Artificial Sequence
  ENSG00000139737_16 (sequence is synthesized)
atagaccttttacaaaatccatttgcactaatgaatgctttcttatggcatataacttaatatttgttactgtgtacactgctgttttggaatgttcagaaataaagactctatttcagc

SEQ ID NO: 355786 - DNA, 120 bp, Artificial Sequence
  ENSG00000139737_17 (sequence is synthesized)
tagacatgtcctagataacccaactcctgagatggaagcagcgagacgttccctgtgctttagactggagcaaggttacacttccaggggctccccactcagtccccagtcatctatcga

SEQ ID NO: 355787 - DNA, 120 bp, Artificial Sequence
  ENSG00000139737_18 (sequence is synthesized)
ggggactggagggacgcactgagcatgtgcagatcagctcggtggtggctgccgcggccggaggcgagggcccggtgctgatgcgaaccgccggctcggcctcagcccgcgcgtggtcgg

SEQ ID NO: 355788 - DNA, 120 bp, Artificial Sequence
  ENSG00000139737_19 (sequence is synthesized)
gacagggaaggagccgtagcctccccgtggcccgaggagccggcgcggcggcgcgcactccccggcggccgcggcgccctcggggcccacgatgatggcggagcaggtgaaatgcgcctc

SEQ ID NO: 355789 - DNA, 120 bp, Artificial Sequence
  ENSG00000139737_20 (sequence is synthesized)
aggtgaaatgcgcctcggcaggggtcagctctggagcgggctccgggccggtggtgaacgcggagctggaggtgaagaagctgcaggagctggtgcgcaagctggagaagcagaacgagc

SEQ ID NO: 355790 - DNA, 80 bp, Artificial Sequence
  ENSG00000139737_21 (sequence is synthesized)
agcagaacgagcagctgcggagtcgagcggccagcgcggccgccgccccgcacctgctgctgctgccgccgccgccgccc

SEQ ID NO: 355791 - DNA, 80 bp, Artificial Sequence
  ENSG00000139737_22 (sequence is synthesized)
cgctgggcgcggggggcggtggcggcagcggtagtggcagcggcggtggctccagccccgcgttcccgggcaccttctgc

SEQ ID NO: 355792 - DNA, 120 bp, Artificial Sequence
  ENSG00000139737_23 (sequence is synthesized)
ccttctgcctgcctagccccgcgccctccctgctttgcagcctggcgcagccacccgaggcgcccttcgtctacttcaagccggcagcaggcttcttcggcgcgggcggtggcgggccgg

SEQ ID NO: 355793 - DNA, 120 bp, Artificial Sequence
  ENSG00000139737_24 (sequence is synthesized)
agccggggggcgcggggacgccgccaggggcagctgcagcgccgccctcgccgccccccacgctgctggacgaggtggaattgctggatctggagagcgtagccgcctggcgggacgagg

SEQ ID NO: 355794 - DNA, 120 bp, Artificial Sequence
  ENSG00000139737_25 (sequence is synthesized)
agtgctgctcttttccccagtgttttcggagggatgacgggggatggtaggggttggcctctgtctgcgactgttactgttctttcgttttaaacgaacgctggacaggatttgcgtgct

SEQ ID NO: 355795 - DNA, 120 bp, Artificial Sequence
  ENSG00000139737_26 (sequence is synthesized)
cttcctcctcgggtggcatcggaagccgcgcagtgatggatctctctttatagagaggttatacattggctcttcaaagacgttcacctcatcagagaaatccctgactcctttgcagtg

SEQ ID NO: 355796 - DNA, 120 bp, Artificial Sequence
  ENSG00000139737_27 (sequence is synthesized)
gtaatttgcctggcaagtgatcagactggtataaaataacatcatctgttaggcaagatagcagtcacaaagaactattggtcttttaaaatatagaatttttaatgagaaactttgaat

SEQ ID NO: 355797 - DNA, 120 bp, Artificial Sequence
  ENSG00000139737_28 (sequence is synthesized)
aatagagattgaacatgtgagaacagctacctagtgtgtgttgcattattaacccctagtttgtagtgtattctggagtcaagttgacctacatagaagagaaggaactggaagtgcatg

SEQ ID NO: 355798 - DNA, 120 bp, Artificial Sequence
  ENSG00000139737_29 (sequence is synthesized)
tctgtgttctggctccgattgggaaaagctgcttaaccactctagccgatggcggagtctcttctcttcaactgcctcactggcttttccttatagtcctgttgcaagactcagccctta

SEQ ID NO: 355799 - DNA, 120 bp, Artificial Sequence
  ENSG00000139737_30 (sequence is synthesized)
gcttttccttatagtcctgttgcaagactcagcccttatagcaatggcattaatactcccagcttctctaaaacctcaaataaagcaatactaacacctgaaaaaacaggtaatatttta

SEQ ID NO: 355800 - DNA, 120 bp, Artificial Sequence
  ENSG00000139737_31 (sequence is synthesized)
acttcttgactagctgcttgctttgtaattcagttactaaacacggcttaaatattcatctttcatttgaaaagcttgagaataatcttaagagtggagagtttgtgctgcacacttact

SEQ ID NO: 355801 - DNA, 120 bp, Artificial Sequence
  ENSG00000139737_32 (sequence is synthesized)
tgctctcaattttatgtagcagacagtcttccctctttagcaaaagtatatgcatgcagttctgtatttccaaatgcttatgtgcttttaaaattaaatgtcaaacacaattaaggttac

SEQ ID NO: 355802 - DNA, 120 bp, Artificial Sequence
  ENSG00000139737_33 (sequence is synthesized)
attgcgaatgtggtttccttgcctagttcttccacatacttaaggaaaagatatttttaatgtaattgttagaatgtgttggttacacttccaggggctccccactcagtccccagtcat

SEQ ID NO: 355803 - DNA, 120 bp, Artificial Sequence
  ENSG00000139737_34 (sequence is synthesized)
ttcctcctcgggtggcatcggaagccgcgcagtgatggatctctctttatagagaggttcgttcttgctgtttgaattttgcagtcgtgtgcccttttgcgttgcattttcattgaaatc

SEQ ID NO: 355804 - DNA, 120 bp, Artificial Sequence
  ENSG00000139746_0 (sequence is synthesized)
tagggccgctgtggatggtttctaaaatgatcattgaaaacttcgaggcactcaagtcctggctcagcaagactctcgagcccatctgtgatgcagatccatccgccctagcaaaatatg

SEQ ID NO: 355805 - DNA, 120 bp, Artificial Sequence
  ENSG00000139746_1 (sequence is synthesized)
ttctggctttggtaaagaaagacaaaagtgaaaaagagttaaaggcattatgtattgatcagctggatgtatttcttcagaaagagacacagatatttgtggaaaaactttttgatgctg

SEQ ID NO: 355806 - DNA, 120 bp, Artificial Sequence
  ENSG00000139746_2 (sequence is synthesized)
tgaatacaaagagttacctacctcctccagagcagccatcatcaggaagcctgaaggtagaattttttccacaccaagaaaaagatataaagaaggaagagatcactaaggaggaagagc

SEQ ID NO: 355807 - DNA, 120 bp, Artificial Sequence
  ENSG00000139746_3 (sequence is synthesized)
gagagaagaagttttctagaaggctaaatcacagtcctccccagtcaagctcccgatacagggaaaatagaagccgtgatgagaggaaaaaagatgatcgttctcgcaaaagagattatg

SEQ ID NO: 355808 - DNA, 120 bp, Artificial Sequence
  ENSG00000139746_4 (sequence is synthesized)
atcgaaaccctcctcgaagagattcatacagagaccggtacaatagaagacgagggcggagtcgcagttatagcaggagtcgaagtcgaagttggagtaaagagaggcttcgtgagaggg

SEQ ID NO: 355809 - DNA, 120 bp, Artificial Sequence
  ENSG00000139746_5 (sequence is synthesized)
acagagatagaagcaggactagaagcagaagcagaacacgaagcagggaaagggatctggtaaaacctaaatatgacctggatagaacagatccattagaaaataattatactccagtct

SEQ ID NO: 355810 - DNA, 120 bp, Artificial Sequence
  ENSG00000139746_6 (sequence is synthesized)
cttcggtacctagtatttcatctggccactaccctgtacctactttgagcagcactattacagtaattgctcctactcatcatggaaacaacactaccgaaagttggtctgaatttcatg

SEQ ID NO: 355811 - DNA, 120 bp, Artificial Sequence
  ENSG00000139746_7 (sequence is synthesized)
aagaccaagtggaccataactcttacgtaagaccacccatgccaaagaaacggtgtagagactatgatgaaaagggtttttgtatgagaggagacatgtgtccttttgatcatggaagtg

SEQ ID NO: 355812 - DNA, 120 bp, Artificial Sequence
  ENSG00000139746_8 (sequence is synthesized)
atccagtagttgtagaagatgtgaatcttcctggtatgctgcctttcccagcacagcctcctgttgttgaaggaccacctcctcctggactccccccacctccaccaattcttacacccc

SEQ ID NO: 355813 - DNA, 120 bp, Artificial Sequence
  ENSG00000139746_9 (sequence is synthesized)
cacctgtgaatctcaggcccccagtaccaccgccaggtccattgccacccagtctcccacctgttacaggaccaccacctccacttcctcctttgcagccatctggcatggatgctcctc

SEQ ID NO: 355814 - DNA, 120 bp, Artificial Sequence
  ENSG00000139746_10 (sequence is synthesized)
caaactctgcaaccagttctgttcctactgtagtaacaactggcattcatcaccagcctcctcctgctccaccctctctttttactgcagatacatatgacacagatggctacaatcctg

SEQ ID NO: 355815 - DNA, 120 bp, Artificial Sequence
  ENSG00000139746_11 (sequence is synthesized)
aagccccaagcataacaaacacttccagacctatgtatagacacagagtgcatgcacaaaggcccaacttgataggactaacatcaggggatatggatttgccacccagagaaaagcctc

SEQ ID NO: 355816 - DNA, 120 bp, Artificial Sequence
  ENSG00000139746_12 (sequence is synthesized)
ccaataaaagcagtatgaggatagtagtggactcagaatcaaggaaaagaaccattggttctggagagcctggagttcctacaaagaagacttggtttgataaaccaaattttaatagaa

SEQ ID NO: 355817 - DNA, 120 bp, Artificial Sequence
  ENSG00000139746_13 (sequence is synthesized)
caaacagcccaggctttcagaagaaggttcaatttggaaatgaaaataccaagcttgaacttagaaaagttcctccagaattaaataatatcagcaaacttaatgaacattttagtcgat

SEQ ID NO: 355818 - DNA, 120 bp, Artificial Sequence
  ENSG00000139746_14 (sequence is synthesized)
ttggaaccttggttaacttacaggttgcttataatggtgatcctgaaggtgccctaatccaatttgcaacatacgaagaagcaaagaaagcaatatcaagtacggaagcagtattaaaca

SEQ ID NO: 355819 - DNA, 120 bp, Artificial Sequence
  ENSG00000139746_15 (sequence is synthesized)
acagagaaggaagcacccaacagttacaaactacttctccaaagcctttagtccagcagcccattttgcctgttgtgaagcagtcagtcaaagagcggctgggtccagtaccttcaagta

SEQ ID NO: 355820 - DNA, 120 bp, Artificial Sequence
  ENSG00000139746_16 (sequence is synthesized)
ctattgaacctgcagaagcccagagtgcctcttcagaccttcctcaggtgttgtctacatctactggcctaacaaaaacagtgtataatccagctgctttgaaggctgcacagaaaacct

SEQ ID NO: 355821 - DNA, 120 bp, Artificial Sequence
  ENSG00000139746_17 (sequence is synthesized)
tacttgtttccacctctgcagttgataataatgaagcacagaaaaaaaaacaggaggcattgaaacttcagcaggatgtaaggaaaaggaaacaagaaattttagaaaagcacattgaaa

SEQ ID NO: 355822 - DNA, 120 bp, Artificial Sequence
  ENSG00000139746_18 (sequence is synthesized)
cacagaagatgttaatttcaaaactggagaaaaacaaaacaatgaagtctgaagataaagcagaaataatgaaaactttagaggttttgacaaaaaatattaccaagttgaaagatgagg

SEQ ID NO: 355823 - DNA, 120 bp, Artificial Sequence
  ENSG00000139746_19 (sequence is synthesized)
tcaaagctgcttctcctggacgctgtcttccaaaaagtataaaaaccaagactcagatgcagaaggaattacttgacacagaactggatttatataagaagatgcaggctggagaagaag

SEQ ID NO: 355824 - DNA, 120 bp, Artificial Sequence
  ENSG00000139746_20 (sequence is synthesized)
tcactgaacttaggagaaagtatacagaattacagctggaagctgccaaacgagggattctttcatctggtcggggcagaggaattcattcaagaggtcgaggtgcagttcatggccgag

SEQ ID NO: 355825 - DNA, 120 bp, Artificial Sequence
  ENSG00000139746_21 (sequence is synthesized)
gcagggggcgagggcgagggcgaggtgtgcctggtcatgctgtggtggatcaccgtcccagggcattggagatttctgcatttacggagagcgatagagaagatcttcttcctcattttg

SEQ ID NO: 355826 - DNA, 120 bp, Artificial Sequence
  ENSG00000139746_22 (sequence is synthesized)
cgcaatatggtgaaattgaagattgtcagattgatgattcctcacttcatgcagtaattacattcaagacaagagcagaagctgaagcagctgcagttcatggagctcgtttcaaagggc

SEQ ID NO: 355827 - DNA, 120 bp, Artificial Sequence
  ENSG00000139746_23 (sequence is synthesized)
aagatctaaaactggcatggaataaaccagtaactaatatttcagctgttgaaacagaagaagttgagcctgatgaagaagaatttcaggaagagtctttggtggatgactcattacttc

SEQ ID NO: 355828 - DNA, 120 bp, Artificial Sequence
  ENSG00000139746_24 (sequence is synthesized)
aagatgatgatgaagaagaagaggacaatgaatctcgttcttggagaagatgatttgactgatcattgatctgcatatgctagaactctacctgtgtttcattagtattatctaatgtac

SEQ ID NO: 355829 - DNA, 120 bp, Artificial Sequence
  ENSG00000139746_25 (sequence is synthesized)
ttttacatatttgtaaaaacaatttttggtaaaatgtgatgaagatggatttcacaaatagacaaaaaagaagaaaactaccttctgatcttgtattttgaaagattgatgtttgcattt

SEQ ID NO: 355830 - DNA, 120 bp, Artificial Sequence
  ENSG00000139746_26 (sequence is synthesized)
tacttcagtaaacaattgctaaagacatcacactagaaacatatgcaatgtttttattacatacttctactggacatcacagaattctttgggttctttgtaatttaatgaataggtctg

SEQ ID NO: 355831 - DNA, 120 bp, Artificial Sequence
  ENSG00000139746_27 (sequence is synthesized)
aaaacttatgaccaatacttgttataacttagaggactttgttttattccaaataaggaatgaatttgcatttaaaatcttaatgaatgttttcaaaactgaatagataacatagtactc

SEQ ID NO: 355832 - DNA, 120 bp, Artificial Sequence
  ENSG00000139746_28 (sequence is synthesized)
taactaaagtctccaagttatgtattataatattacatagtagtatgcttaggctttactatgtattagccttttgttggactgtgtatgtattttaccatatgggttttaatgataatg

SEQ ID NO: 355833 - DNA, 120 bp, Artificial Sequence
  ENSG00000139746_29 (sequence is synthesized)
gtgtatgactgctttacatgagtccttatgcatccagatgttataataaagtggaatggtctctttaaaaaaaaaaaaggaaagaaaagagaaaagcaatgacaaaaaaaaaaaaaaaaa

SEQ ID NO: 355834 - DNA, 120 bp, Artificial Sequence
  ENSG00000139746_30 (sequence is synthesized)
gggggtgctgggagccgggaagaccccctgaatcgttcccattgagctgcccttcgccttcgctttctttacttttgccttttcgacgtagccaacaagcacctggtcccgaggctgaga

SEQ ID NO: 355835 - DNA, 120 bp, Artificial Sequence
  ENSG00000139746_31 (sequence is synthesized)
gaaggctcgggtctaagcgcgtgtcgcgcttccggtctgggtagatttgctggggaagagggaagggggagggcccgggcaaaccgttgctgtttcagcccgggctgggggccggggacg

SEQ ID NO: 355836 - DNA, 120 bp, Artificial Sequence
  ENSG00000139746_32 (sequence is synthesized)
gacggggagctcctggcaccccgtgcacttgtggcctgcggcggtccttgcagagctgttcgccgaccggggcccgcgggaacctgccaccggcgcctcccaccgcggcccacgcgggcg

SEQ ID NO: 355837 - DNA, 120 bp, Artificial Sequence
  ENSG00000139746_33 (sequence is synthesized)
agaaaaaagaaaagaaaaaaattaaaatagaccattccagatggtgatctacccttccccccaattatcacaaaaggagctataatcactaacttattcttaataataatggttactggt

SEQ ID NO: 355838 - DNA, 120 bp, Artificial Sequence
  ENSG00000139746_34 (sequence is synthesized)
atcactaacttattcttaataataatggttactggtacccttacaataatgtacaatccaatgtttaaaaattataccacttgagtttggtttgatcctataaattttcaacaaatgtct

SEQ ID NO: 355839 - DNA, 120 bp, Artificial Sequence
  ENSG00000139746_35 (sequence is synthesized)
taaaatttaaaagcaggctgattagtttggaaccagactgcaagtagagctaacatttggtgaataagaaaacatcacattacattttggatgtatgaaagaaaacttgaccatttgaag

SEQ ID NO: 355840 - DNA, 120 bp, Artificial Sequence
  ENSG00000139746_36 (sequence is synthesized)
atatatgaataaagaaatgtactatagatactactttaggaaaacactgtttggtaagtgttccagtctgatattttaagtgtgtacttcctatacttgtataaaaatctttgatgtttg

SEQ ID NO: 355841 - DNA, 120 bp, Artificial Sequence
  ENSG00000139746_37 (sequence is synthesized)
caacaatactgtgatttttttaagtggatttcttttgcaagtgaacatgatcattgaaagttgatatggcagtttccaggaaataaatgcattctttgtagaatgggggtgggagattac

SEQ ID NO: 355842 - DNA, 120 bp, Artificial Sequence
  ENSG00000139746_38 (sequence is synthesized)
atatttatattttcaaattcatcattttgattgcaagtgtttctgcctctcttgagattatagtgataatattaaaaaatcacatttaaaaaattactttcttccatattggggtcctca

SEQ ID NO: 355843 - DNA, 120 bp, Artificial Sequence
  ENSG00000139746_39 (sequence is synthesized)
caatcaaaagctgttgttccaccaccaccatagtcttctgccagtggagtaacttaaggatgctgttctttttcttcttccccatacacccctaattggggttgaagttgtgtgtatttt

SEQ ID NO: 355844 - DNA, 120 bp, Artificial Sequence
  ENSG00000139746_40 (sequence is synthesized)
cttgatggtaacactatttcatagaaatgctttgccttgcaattcgtgtctacgtttatatttaaaatttcaaaatcagatttcagttgtcaaaatagtgactttgctcaaaaagtcact

SEQ ID NO: 355845 - DNA, 120 bp, Artificial Sequence
  ENSG00000139746_41 (sequence is synthesized)
atttttacttatatatttaaatcaaagatctatttttatgtagtctcttgtatgttgactatgtgctattctgattcattaggtaagtttgttttcttttctttttagtagtcgtgaaag

SEQ ID NO: 355846 - DNA, 120 bp, Artificial Sequence
  ENSG00000139746_42 (sequence is synthesized)
cctgcagaagcccagagtgcctcttcagaccttcctcagaatgtaactaagttatctgtgaaggacaggttgggttttgtatcaaagccatctgtttcagcaactgaaaaggtgttgtct

SEQ ID NO: 355847 - DNA, 120 bp, Artificial Sequence
  ENSG00000139746_43 (sequence is synthesized)
cggggacgagctggggttcccgctgtttctgaagtcagcggtcttttcctccttgtaagaaataaggtctttatatcataaaggtaagcaaagaataaaaaggcacaaaggccgcaagca

SEQ ID NO: 355848 - DNA, 120 bp, Artificial Sequence
  ENSG00000139746_44 (sequence is synthesized)
acgcacacacgcaaaaatcgaactacagcactcgacccgcgcattctccgccgaccttacgtctctcccagcaggctccgggagccaccgcgagacttcatcaattctcgcgagatttac

SEQ ID NO: 355849 - DNA, 120 bp, Artificial Sequence
  ENSG00000139746_45 (sequence is synthesized)
tgtgttggagtcctcaggaccactcccagtttaaatgatttttctaggaggactcataggactctgcatataattgtgcttatggccctggcttatttcagcaaaaggatataaagcaaa

SEQ ID NO: 355850 - DNA, 120 bp, Artificial Sequence
  ENSG00000139746_46 (sequence is synthesized)
gtcagcaaatggaaaaggtgtatgaggccaagtccagtggaaaacaagcacaagcttacaaagtcctcagagttgcacaggatgtgcttaattcccctagcagtgaactgtaacaacaca

SEQ ID NO: 355851 - DNA, 120 bp, Artificial Sequence
  ENSG00000139746_47 (sequence is synthesized)
tgggaattaggcaagctccttagaaactctgccctgcgttcttatttggaactggtcacataggcaccgcctacctagtatgtaccaaaattccagactcctgggaggaaggcagatgtt

SEQ ID NO: 355852 - DNA, 120 bp, Artificial Sequence
  ENSG00000139746_48 (sequence is synthesized)
cagtgtagaccatattgtttcataactaattcaggcatagtgaaccattccttatcagggggtaatgggaaccctcgagaaatcaaagtgcccaggagccagccttacaagcatgctggc

SEQ ID NO: 355853 - DNA, 120 bp, Artificial Sequence
  ENSG00000139746_49 (sequence is synthesized)
tttctaaggttagtattgtcaggcctgcttttactctgcacaatatcttacagacatagagtcttaatatctgttctatgaaaataattaggttgacaattggtctgtttgcttttgtca

SEQ ID NO: 355854 - DNA, 120 bp, Artificial Sequence
  ENSG00000139746_50 (sequence is synthesized)
tacatgtatttagtaggggactgtttttaaggtagtaaaacacaaggaccttcacaagacagtggatatgacttcatacttcaagaggtcccaaaatttttgtgtgtattttacaacctt

SEQ ID NO: 355855 - DNA, 120 bp, Artificial Sequence
  ENSG00000139746_51 (sequence is synthesized)
ttttacaaccttctctcttcacccttagttactagtcatataataatttatatcttttcaatttgatgttaaaagattataatttggccagggtgagcgtggtggctcatgcctgtaatc

SEQ ID NO: 355856 - DNA, 120 bp, Artificial Sequence
  ENSG00000139746_52 (sequence is synthesized)
gagcccaggagtttgagaccagtctgggttatatagtgagacctcatctcttatgaaaaaaattttaaaattagccaggtgtgatggggtggtgcatgcttgtagtcccaactacttgag

SEQ ID NO: 355857 - DNA, 120 bp, Artificial Sequence
  ENSG00000139746_53 (sequence is synthesized)
tgcttgtagtcccaactacttgaggggctgaggtgggagaactgcttgagccccagagcctgagggtgcagatcaaagcattacactgcagcctaggcaactgagcaagaccctgtctgg

SEQ ID NO: 355858 - DNA, 120 bp, Artificial Sequence
  ENSG00000139746_54 (sequence is synthesized)
gatgaagaagaacagagagagatcatcattgcctgaatttagctttgtgactgcaagagcaagaccagttcctgtctggagacgactgttacaataatatcatcctattattttatgttc

SEQ ID NO: 355859 - DNA, 120 bp, Artificial Sequence
  ENSG00000139746_55 (sequence is synthesized)
actctttatcaatttgaacagatgtttacatgtactataattagcattttatctctacagttctctaagagtacatctgagtccaaagtgtatctgaatgtgtgctctgaccttattctt

SEQ ID NO: 355860 - DNA, 120 bp, Artificial Sequence
  ENSG00000139746_56 (sequence is synthesized)
aaatgttttctccccatactttatagccatttattttttaaacaccttaagaaggaacgaaaaagttctcttggatgacgtatattcaagtctgagccaaattgaggattgtgtctagga

SEQ ID NO: 355861 - DNA, 120 bp, Artificial Sequence
  ENSG00000139746_57 (sequence is synthesized)
aatctgtaaagccatactactgtgttcattagcatgagcaatttaaaatgaaaatgaattaaaaagttaaacatgagtttggttttaattttggggggatcttaagatatatttctggga

SEQ ID NO: 355862 - DNA, 120 bp, Artificial Sequence
  ENSG00000139746_58 (sequence is synthesized)
gtaggatagccactgaaaataattttgaatagatgataaagtacttttttatgtactgtaatagcttgtgcatttcttctgaatatactttctgatgttgccaaggtcatttacccaaat

SEQ ID NO: 355863 - DNA, 120 bp, Artificial Sequence
  ENSG00000139746_59 (sequence is synthesized)
atttttttaaaaattcttagcccttcaaaaccaacaaagaaaataattttcttccaagtgacaaatgatgatctgtggattataaatattttaaaaattatatgtcttaacataattttt

SEQ ID NO: 355864 - DNA, 120 bp, Artificial Sequence
  ENSG00000139746_60 (sequence is synthesized)
tcacatttttttgactttcaatcaagacatcgaagacgacctttaaagcaagaggaaatagtgttgtgtgcctaacattggtaaagactagtttttaaccattttaagaagtgtatgtcc

SEQ ID NO: 355865 - DNA, 120 bp, Artificial Sequence
  ENSG00000139746_61 (sequence is synthesized)
aaattatttataagcagtatgacttaatatggcttagaattacttataaagaatctgattaaatctcatcctaaatatgtagccacaatatcttttttataatgggactataagaaatgt

SEQ ID NO: 355866 - DNA, 120 bp, Artificial Sequence
  ENSG00000139746_62 (sequence is synthesized)
ttgcacttagtttctgagtattccttcatagattctcaggaggcatttaaaaagttggaagctatacttggtagtaactatattagaaaagtccaattgacactgatttttattcaccct

SEQ ID NO: 355867 - DNA, 120 bp, Artificial Sequence
  ENSG00000139746_63 (sequence is synthesized)
tgttttatttttatccagccatactacctttatcacttttttttttttttttggtgcaaagcttaacattctgcaaactttttttccccttgagtatgcattgcatttgtcatgaagagt

SEQ ID NO: 355868 - DNA, 120 bp, Artificial Sequence
  ENSG00000139746_64 (sequence is synthesized)
aaaaagaatgtaataaacacatcagtcataatgtaaattaactgttttgatccacattggttggatacagcatggttaattctaggcttggttaaaaatacataatttggaaagtcttct

SEQ ID NO: 355869 - DNA, 120 bp, Artificial Sequence
  ENSG00000139746_65 (sequence is synthesized)
tcacatttacaaactagccacagggtgttcataaatatttccccaaattagttgagtatttttaattgtaaacaaagaattttctgcccctactacactggtttactgctagggtaaaga

SEQ ID NO: 355870 - DNA, 120 bp, Artificial Sequence
  ENSG00000139746_66 (sequence is synthesized)
ccattgtctgaagacactaaacttggtgttaacagtgttgattgtttaatggatatggactacatgccactacctgcaactttgtcatcctggagtttttgtttggtttggtttgatttt

SEQ ID NO: 355871 - DNA, 120 bp, Artificial Sequence
  ENSG00000139746_67 (sequence is synthesized)
tcactttttgcttttaaaattaaaaacaaagcaaaacaaaattgaagataccattgagaatcagaattcaagatgacttgattctcactaagatcactgcgcttttttaaaattgctttg

SEQ ID NO: 355872 - DNA, 120 bp, Artificial Sequence
  ENSG00000139746_68 (sequence is synthesized)
agatctagtcagttacatatttaaaatccccgtgttgattagagataaggttttcattattttattttcctaaataggattctcatggagctattgtagataactgtacagaatcacttt

SEQ ID NO: 355873 - DNA, 120 bp, Artificial Sequence
  ENSG00000139746_69 (sequence is synthesized)
tgtgtaattgaatgaagcagtttcctctgcatgattgcataatgaaagccttttatatatctatatttttcaatacttagattttacactattaagctgctctagtcatgctatatttgt

SEQ ID NO: 355874 - DNA, 120 bp, Artificial Sequence
  ENSG00000139746_70 (sequence is synthesized)
ttttttaatagagtttataaatatttatgctcaaaatacagatcaactgaatatttttggtcttgtttacaagataaatcatactttaaaatgatacaggcccctcaagtgtcttaggaa

SEQ ID NO: 355875 - DNA, 120 bp, Artificial Sequence
  ENSG00000139746_71 (sequence is synthesized)
aaagtcattggtgctataaaacctttcagtatcatttttgaacccattgttcagactttgctaggttttaatctgattccttgtgatttattataatgtagcagcatacttataaaagtg

SEQ ID NO: 355876 - DNA, 120 bp, Artificial Sequence
  ENSG00000139746_72 (sequence is synthesized)
gtctgtgctgagtcagatagagagcccagcccattagaaacacatcataatttaagaatatgatgcagaatgcccttacacttatttgtgcccagcttcccaaaaagaaaattgttttgt

SEQ ID NO: 355877 - DNA, 120 bp, Artificial Sequence
  ENSG00000139746_73 (sequence is synthesized)
taagaggaaggcagttaatttggctagaatccaaaaactcattcagcatggctgttttcccttatttcaaatgaaaaacttttctaatactaaaatatgtaatcctgctttgctttaaat

SEQ ID NO: 355878 - DNA, 120 bp, Artificial Sequence
  ENSG00000139746_74 (sequence is synthesized)
tcccatgtctgtcactcaacaggaggcatagtgattcttaaatatttacggaacatttggtgagttgtaaagagaagtattattgcattgtaggtttttgcattgatgtgtcgatttttt

SEQ ID NO: 355879 - DNA, 120 bp, Artificial Sequence
  ENSG00000139746_75 (sequence is synthesized)
tgttttgtcccaagatttccttccagcaccttaatgaatgttcatatgatagaatgttttaagtatcagcaaagcattcatggatgcctgcttttcattctcagaaggctaaacctgttt

SEQ ID NO: 355880 - DNA, 120 bp, Artificial Sequence
  ENSG00000139746_76 (sequence is synthesized)
tgggtatgatgctacttcagaacatattgtctggcacaagatttcttctaataagtggtttatttaaactcaatttcggtggactgttgaattgaaaaacaccaaaggagtcttcttgtc

SEQ ID NO: 355881 - DNA, 120 bp, Artificial Sequence
  ENSG00000139746_77 (sequence is synthesized)
tggagactggattgttccagttttaaatacctgtgcccataagtatcccatttcatgaatgtgtgttggcatggggaaaaaatttccctgctctttgagtggagcgaaagcaattggtta

SEQ ID NO: 355882 - DNA, 120 bp, Artificial Sequence
  ENSG00000139746_78 (sequence is synthesized)
agctgtagcagcttttttgtttatttttttaaagtaataataaaacttgaactgaaaaaagataaaacttgaactagaatactactcttgtatgcttagaatgtttatagtgttaaatgt

SEQ ID NO: 355883 - DNA, 120 bp, Artificial Sequence
  ENSG00000139746_79 (sequence is synthesized)
actactcttgtatgcttagaatgtttatagtgttaaatgtttatgtggggttgtcaacatttttattatttatagttgaattatgttttgttaaatccatattgtttattatttttatat

SEQ ID NO: 355884 - DNA, 120 bp, Artificial Sequence
  ENSG00000139746_80 (sequence is synthesized)
tttaaaatgtctagagagaattgctctgtgaggactacttttctcactaaaattatgtagccgtggtgaatgaacattaaataagccctcagttttgaatgttttcaaaaaaacattttc

SEQ ID NO: 355885 - DNA, 120 bp, Artificial Sequence
  ENSG00000139767_0 (sequence is synthesized)
gcgcacgcacacacatccgaccccgtcgcctcttctctcctggtgctgcccagaaagccagccctcccttcccttcttggggcgcagaggctcagccagctcagagcgcagcctggagcc

SEQ ID NO: 355886 - DNA, 120 bp, Artificial Sequence
  ENSG00000139767_1 (sequence is synthesized)
gacccagaagggcgaagaaagcccagcggacgagcctcctttctctgctgcctgcccgggctggggcgtcccatcccccgccctgaactccgatctctcccaccccacccctctctgggt

SEQ ID NO: 355887 - DNA, 120 bp, Artificial Sequence
  ENSG00000139767_2 (sequence is synthesized)
ttcacccggacagagccgggagctgggtgtcgcccccgtttggaatccacgtttcagcactttggacagcgccccggacgccccggcccctttgggttggcgatggcgagcgttcagcaa

SEQ ID NO: 355888 - DNA, 120 bp, Artificial Sequence
  ENSG00000139767_3 (sequence is synthesized)
ggcgagaagcagctttttgagaagttctggcgaggaaccttcaaagcggtggccaccccccgtcccgagagcatcattgtcgccagtatcacggcccgcaagccgctgccaaggacagag

SEQ ID NO: 355889 - DNA, 120 bp, Artificial Sequence
  ENSG00000139767_4 (sequence is synthesized)
ccccagaataaccccgttgtcccagctcaggatggaccctcagaaaagctgggtcagcatctggccaccgagcccttgggcaccaacagttgggagagagacaagacctgtcgggaactg

SEQ ID NO: 355890 - DNA, 120 bp, Artificial Sequence
  ENSG00000139767_5 (sequence is synthesized)
ggtgccaccagaggacacagtgcctctcatgacaaagacttgacaccaccaccttcctccaggggaaagaagaaaaagaagaaatccactcggaagaagagaaggaggtcctcatcctat

SEQ ID NO: 355891 - DNA, 120 bp, Artificial Sequence
  ENSG00000139767_6 (sequence is synthesized)
agcccatcgcctgtcaagaaaaagaagaagaaaagttccaagaaacacaagcgacgcaggtcattctccaagaagagaaggcacagctcctctagcccaaaaagcaaaagaagagatgag

SEQ ID NO: 355892 - DNA, 120 bp, Artificial Sequence
  ENSG00000139767_7 (sequence is synthesized)
aagaggcacaagaaacaatctcgaagccggccccgaaagtctcaccgccaccgccatcaccgctgcccctcgcggtcccagagctcggagtcccgcccctcaagctgtgagagcaggcac

SEQ ID NO: 355893 - DNA, 120 bp, Artificial Sequence
  ENSG00000139767_8 (sequence is synthesized)
cgcggccggtcccctgaggaagggcagaagtcccgccgaaggcactcccgccgctgctccaagaccctctgcaaggacagccctgaggcccagtccagtcgcccgcccagtcaacccctc

SEQ ID NO: 355894 - DNA, 120 bp, Artificial Sequence
  ENSG00000139767_9 (sequence is synthesized)
cagatgcttggctacctgtcagccaggggtgtaatcactgggtcggggtctgctgctgacctctttaccaaaacagccagcccgctcaccacctcgcgaggacgttcccaggagtacgac

SEQ ID NO: 355895 - DNA, 120 bp, Artificial Sequence
  ENSG00000139767_10 (sequence is synthesized)
tcaggaaatgacacgtcctcgccaccctccacgcaaaccagctcagccaggtctcggggccaggagaaggggagccccagtgggggcttgagcaagagccgggagctcaacagtggcaac

SEQ ID NO: 355896 - DNA, 120 bp, Artificial Sequence
  ENSG00000139767_11 (sequence is synthesized)
acctctgattcagggaactccttcaccacctcctcaccccagaacaagggggccatgttggagaatctctcccccaccagcaggggcagagagtcaaggggatttcagtcaccgtgtctg

SEQ ID NO: 355897 - DNA, 120 bp, Artificial Sequence
  ENSG00000139767_12 (sequence is synthesized)
gaatgtgccgaagtgaagaagtccagtttggtcccatccacagcccggagctcacccatgaaagggtgttcccgcagctcctcctatgccagcacccgatcctccagtcactcgtcccga

SEQ ID NO: 355898 - DNA, 120 bp, Artificial Sequence
  ENSG00000139767_13 (sequence is synthesized)
tccccaaatcccagggcttcccccaggtacacccaaagccgatccacctcttctgaaaaaaggtcctactcccgctctcccagctattcctccaagtctggcaagaggagcccgcccagc

SEQ ID NO: 355899 - DNA, 120 bp, Artificial Sequence
  ENSG00000139767_14 (sequence is synthesized)
agaagctctaggtcccgccgcagccctagctactcccgctacagccccagcagggagcgggatcccaaatacagtgagaaggactcgcagcagcgggagcgcgagcgagcgcgtcggaga

SEQ ID NO: 355900 - DNA, 120 bp, Artificial Sequence
  ENSG00000139767_15 (sequence is synthesized)
cgtcggtcctactcgcctatgagaaagcgccggagagactccccgagccacctggaggcccggaggataaccagtgcccggaaacgccccatcccctactatcggcccagcccctcctca

SEQ ID NO: 355901 - DNA, 120 bp, Artificial Sequence
  ENSG00000139767_16 (sequence is synthesized)
tccggcagcctcagcagcacctcctcctggtacagcagcagcagtagccgctcggccagccgcagctactcccggagccggagtcggagccggagccggagacggagccggacccgcacg

SEQ ID NO: 355902 - DNA, 120 bp, Artificial Sequence
  ENSG00000139767_17 (sequence is synthesized)
agcagcagctctagctcccgcagccctagtccgggctcccgcagccggagccggagcaggagccggagccggagccggagcaggagccagagccggagctacagctcagcagacagctac

SEQ ID NO: 355903 - DNA, 120 bp, Artificial Sequence
  ENSG00000139767_18 (sequence is synthesized)
tccagcacgaggcgctaagtgcccctgagccagctgcccgtgggggccccttcgcgctgccagcctcccccaaccacctgccctccccgccttcttggtgacaaatagtgagggctccta

SEQ ID NO: 355904 - DNA, 120 bp, Artificial Sequence
  ENSG00000139767_19 (sequence is synthesized)
taccttgtccttcctgcttgcctaggggaagaggagaagagggtaagggggcttcactctctagatcagcctgctaggagcctctaccagcatcatcctggggcccagctcaggcctggg

SEQ ID NO: 355905 - DNA, 120 bp, Artificial Sequence
  ENSG00000139767_20 (sequence is synthesized)
catatggaaagaaccatcatcttgtggcacaaaaaaagaagaaagaaaagaaaacttcaaggttttgtgagaagcaatgggtctgtgactcaaaaattgagccctggccaggaaaatgtg

SEQ ID NO: 355906 - DNA, 120 bp, Artificial Sequence
  ENSG00000139767_21 (sequence is synthesized)
gagacagttcttctcctccactgctcacaggaggcccgtggtaattctccccacctccccggatgccccactagtccaacttcatggctgcacgtggatggacccccatgtctgagaggg

SEQ ID NO: 355907 - DNA, 120 bp, Artificial Sequence
  ENSG00000139767_22 (sequence is synthesized)
gtgaaagaggagaccaatggcagttcaggttcaagataacggggtcaggcctttaacttcctcaaacaggcccaagcaaaggctggaagacatttgggtcctagaagaagggatatcctt

SEQ ID NO: 355908 - DNA, 120 bp, Artificial Sequence
  ENSG00000139767_23 (sequence is synthesized)
gaataccagatggggacgtttgacttggtgggaggtgtcaggagataggagttggttaagatgatagatagaaaaacggaagggttcagctgctgctcccaatacctcagcatggtaagg

SEQ ID NO: 355909 - DNA, 120 bp, Artificial Sequence
  ENSG00000139767_24 (sequence is synthesized)
ggacagagcccagcagatcccagctgtgaagaggccactgcatggctgacacaaaacacctcttggccattcacaggggccctgcaacctcacgagaaaggagatagtggaagagtcagg

SEQ ID NO: 355910 - DNA, 120 bp, Artificial Sequence
  ENSG00000139767_25 (sequence is synthesized)
acaggttggtctccagccccacttcccaaatatgcctcagccccactagctggcaccaacttaattccacgggaccatctgctgaacattccccagtgccatggccagttgccaggcccc

SEQ ID NO: 355911 - DNA, 120 bp, Artificial Sequence
  ENSG00000139767_26 (sequence is synthesized)
agcgccagccagtctggccttaccctccggttggcgcctgccagccccctcccctctgcccaggctgccacgccctggatgccacccagtgcagcctggcacctacccacccacccttca

SEQ ID NO: 355912 - DNA, 120 bp, Artificial Sequence
  ENSG00000139767_27 (sequence is synthesized)
gcttaagccactccccttgcctctcaggaattttgccaggatggggcacagcagctcaggtttgggggaaaagacccgaatccagagtgcaggggagaggggcttggatatgccatgtct

SEQ ID NO: 355913 - DNA, 120 bp, Artificial Sequence
  ENSG00000139767_28 (sequence is synthesized)
tgggctcctgctggcttctgaggtttcttgtcagcttgggaaagacccacctttatttttgccctcaccccaagtcccccctggctggggctgggcagagagggtaagctgatctccgat

SEQ ID NO: 355914 - DNA, 120 bp, Artificial Sequence
  ENSG00000139767_29 (sequence is synthesized)
ccacaaataccaccagctgcttcatccacagaaggcgctaagaacggggaggtgaggaataagatccttaaaataaactcttgggcatccccctcaccagctgactggctttccggaggc

SEQ ID NO: 355915 - DNA, 120 bp, Artificial Sequence
  ENSG00000139767_30 (sequence is synthesized)
ttgtgggtgagtttcaagtttgtggtggcaacagcagcaggacagggcacggagggagcgagggagagaggaccggtcccagcttttggatattttgggttatggggaagcaagggccaa

SEQ ID NO: 355916 - DNA, 120 bp, Artificial Sequence
  ENSG00000139767_31 (sequence is synthesized)
acattctttatccctcccaccccagggaaaacatttggaaaatagtcctttttcttggaagcagtgacgtctccctacccaatctttcccatcctatcaacccatggggctagagactgc

SEQ ID NO: 355917 - DNA, 120 bp, Artificial Sequence
  ENSG00000139767_32 (sequence is synthesized)
catgcaaccaccaccacgacagcccttcctccatcagaagacaggagtgagggccccgggcagcagtggacgacccagcctccccataccgggcctctggcccagacctaagccctgccc

SEQ ID NO: 355918 - DNA, 120 bp, Artificial Sequence
  ENSG00000139767_33 (sequence is synthesized)
acaaagactaatggatgccagtgctgtcactgcagaaggccagatggcaggtgcctgggacaggggcaggtgccccggggagggcaagtacagccactgtaaataaccctcgtccctgcc

SEQ ID NO: 355919 - DNA, 120 bp, Artificial Sequence
  ENSG00000139767_34 (sequence is synthesized)
caggaacccagactggacttcagtctccctccatggagacaaaggcttcccagagccaccaaaaaccttcttagcaggacagctgtgagaggcatcagaacctcacgttcggactgcctt

SEQ ID NO: 355920 - DNA, 120 bp, Artificial Sequence
  ENSG00000139767_35 (sequence is synthesized)
tggggctcctagcaaacctttttatttattttatttatttatctatttatttatttgatgactgtctctctttctcgccattagcagtattgaattatttatttatacagaggttttgtg

SEQ ID NO: 355921 - DNA, 120 bp, Artificial Sequence
  ENSG00000139767_36 (sequence is synthesized)
tgtgtgtgtgtgtgtgtgttggggggatctcctaaattatttctgtgcatctcctttttttttctgctgttttttatggatgggatttgagaggccaaaggtgagtgggctattggcctt

SEQ ID NO: 355922 - DNA, 120 bp, Artificial Sequence
  ENSG00000139767_37 (sequence is synthesized)
ggccaaaggtgagtgggctattggccttctccctgaaggctctaagcctggaacaccctggggttggcccagaaggaggcacatcagtcccaaaattcatcacttaacccagcgtccagg

SEQ ID NO: 355923 - DNA, 120 bp, Artificial Sequence
  ENSG00000139767_38 (sequence is synthesized)
agggtcaggcctgtaccccagcctcctgtcccccaggaacctcacaggggtatcaaaaagatgtaaacagcccagaggcttatgagctacagtgatgaattgacacagtggagttgcaac

SEQ ID NO: 355924 - DNA, 120 bp, Artificial Sequence
  ENSG00000139767_39 (sequence is synthesized)
ttaggtgggggttggagtcgaaagttggcaaatggggccaaggctgcacaaagtcgaaatcccttgtgaatgtcccttagggaggcaccagattggagacagatgtgctatctcctaaca

SEQ ID NO: 355925 - DNA, 120 bp, Artificial Sequence
  ENSG00000139767_40 (sequence is synthesized)
gagtgatgaggcttcagttgagtacttgctgaagtagttgccttgtattttgagggccatggtggatgaaaatgatgtctggtttagtactggaattgcacttggggttgacaaggtgct

SEQ ID NO: 355926 - DNA, 120 bp, Artificial Sequence
  ENSG00000139767_41 (sequence is synthesized)
cacaccatgagaatggaggcaggaattgagctgactgagggaagatgcaccttgatctcaccctcactccaaggcacatagcaggatcactccctagcttctctgagcacacctagttgg

SEQ ID NO: 355927 - DNA, 120 bp, Artificial Sequence
  ENSG00000139767_42 (sequence is synthesized)
tttcatgtatgttacacatgcttccactccacagtacctaatttctctctgtcccctgagatctgaaggctaccttgggaagaggcatcagccatcttgcttgagaaccaccaagccaaa

SEQ ID NO: 355928 - DNA, 120 bp, Artificial Sequence
  ENSG00000139767_43 (sequence is synthesized)
agcaaaagcttttatctatgatctcttgctgtttcatcaggggaaagcacaaagctatttctgaaattaggaaaaaaaaaaaaaaggtggaaggagcagccagatgttccacaggacccc

SEQ ID NO: 355929 - DNA, 120 bp, Artificial Sequence
  ENSG00000139767_44 (sequence is synthesized)
accaagaaggtcatttccaaacccatcctggaagggcccaggatccaaaggtcatcagtcctgcttatctgaccaactggcagtgtcttctggctgctggccggagacagctcttgccct

SEQ ID NO: 355930 - DNA, 120 bp, Artificial Sequence
  ENSG00000139767_45 (sequence is synthesized)
ttccaaagtcactgtccactgccttgcaattgccagcttgtctggtccagctttgggtttggtgagacttttgcaacatccctggttgtttccctggcaatgtgactatccagccctaac

SEQ ID NO: 355931 - DNA, 120 bp, Artificial Sequence
  ENSG00000139767_46 (sequence is synthesized)
tccagccctaacccaaagcaagggagtgcccctttcctgggtgaagtttacaagaaggctgcttaaatgcctgcttcggggaaatctctgcctctctctctctctgtctctctctctgtc

SEQ ID NO: 355932 - DNA, 120 bp, Artificial Sequence
  ENSG00000139767_47 (sequence is synthesized)
tctctctctctctctctctctctctctcagtgtatttctctactttcttttacatttcctttttttctatccaaaaacaatgtgcttgttgaggcactggtaaccctgattaaccagaac

SEQ ID NO: 355933 - DNA, 120 bp, Artificial Sequence
  ENSG00000139767_48 (sequence is synthesized)
gaacctcccattcccagtatcgctgttcctacgcccatttcaccctcattaccttctgcttccaaggaatatgacagatcaccaggatgctgctcgtcgtgaggatttatctcaaaaacc

SEQ ID NO: 355934 - DNA, 120 bp, Artificial Sequence
  ENSG00000139767_49 (sequence is synthesized)
aacatccaaaatgggagggagatgtggcttgaggtcaagcgccatgcatcccaagcctttgaccttcccgctatggaagtgcactggatgacagaaactgaatacattgctccctttccc

SEQ ID NO: 355935 - DNA, 120 bp, Artificial Sequence
  ENSG00000139767_50 (sequence is synthesized)
tagggcaaagttcgacctctgttaagtggagggatttgtgagataaaaattcaaaatgttggcctgaggcctgagagtgtcaccaaagacagagggagcttcactgagactcagagggaa

SEQ ID NO: 355936 - DNA, 120 bp, Artificial Sequence
  ENSG00000139767_51 (sequence is synthesized)
aaggaaaagagcctcaaacatttttaggaggttgtccatcatgaaagtaaaaacgaaaagcaagatttgatctcccttcagttaattaggcaaggctaagtaactcaaagccccctatta

SEQ ID NO: 355937 - DNA, 120 bp, Artificial Sequence
  ENSG00000139767_52 (sequence is synthesized)
gtaacattctggttcactgaggtttgatcatattcctatctgcattccttcccttctttgaaggacagctgatctttcagaagcagaataaaattaagatgttagaacaaaggtctcagt

SEQ ID NO: 355938 - DNA, 120 bp, Artificial Sequence
  ENSG00000139767_53 (sequence is synthesized)
ctcagagaaccgcatcacttcatttgctcagacccatcctcttttgcaaaagggtctgcttggagaggccaaaattcagggtgctctcaaaggcaaagaaagcacattgttttccttctc

SEQ ID NO: 355939 - DNA, 120 bp, Artificial Sequence
  ENSG00000139767_54 (sequence is synthesized)
cagtccaactttcatcttttcttctgctgttttcttttcccctcttctttttcacaaatgttcaaaatggtctcatgcgcatgtgtcttgccccactttcccctttagctgaacagaaaa

SEQ ID NO: 355940 - DNA, 120 bp, Artificial Sequence
  ENSG00000139767_55 (sequence is synthesized)
ttttgtctcagtaaaacgaagtcaaaaaacaggattcctccaaacatgcctcctcccgcactggccagccgagtccagctgagaaacttatgctagattcaatgtcattgagcaatgctt

SEQ ID NO: 355941 - DNA, 120 bp, Artificial Sequence
  ENSG00000139767_56 (sequence is synthesized)
tattgaagtctcgttcttctcacttctgcaccagtgagccaatgatactgacagaaatgtcatctctcttctatctgtggttgctgtttttggagtaaaagtttctgtgtgtgttttttt

SEQ ID NO: 355942 - DNA, 120 bp, Artificial Sequence
  ENSG00000139767_57 (sequence is synthesized)
agttcttttgatggctgttgttttgcattgtaaataccatgatgggggacccccatcagaacatggcttatttaataatttatttcgtatttattgagtaatattgggaaaagagaagga

SEQ ID NO: 355943 - DNA, 120 bp, Artificial Sequence
  ENSG00000139767_58 (sequence is synthesized)
ccacctctttccctgaattgctattgagaattggtccatctcccagctccaggtgctgctgtctgcagcaagggcattactgcccaggtaaggagtgctagaatcaccaagcaaattgaa

SEQ ID NO: 355944 - DNA, 120 bp, Artificial Sequence
  ENSG00000139767_59 (sequence is synthesized)
attggcagaaatggaggcttcagtcacacaaattagactcaaatggaactaaaacactggttatctccaggaaaacctcatttagatggaaattaatggaagaataaaatgcctacacat

SEQ ID NO: 355945 - DNA, 120 bp, Artificial Sequence
  ENSG00000139767_60 (sequence is synthesized)
gaaccaacttctattaaaaagtcacaactccttgaaaaaaaaaataaagaaaaattgtaaactcttttttttttctggccaaggaaagctatgcctcatcttctaacgagccaagccaaa

SEQ ID NO: 355946 - DNA, 120 bp, Artificial Sequence
  ENSG00000139767_61 (sequence is synthesized)
aagactgcaatggtattcctatgtgtttctttggcctgtgtatcagtctgaatgaaatggaatgggtctctagcctcagtcttgtcatctgtaaaatggggcttgtcctatatattatct

SEQ ID NO: 355947 - DNA, 120 bp, Artificial Sequence
  ENSG00000139767_62 (sequence is synthesized)
gcaagacgtgggaaatgggggctcaagccctgatgctatggactccatactgttggatatattgtctcttgtgtcttctgctgactgcagattaaagggtgtcaaccaaggaaggaaaca

SEQ ID NO: 355948 - DNA, 120 bp, Artificial Sequence
  ENSG00000139767_63 (sequence is synthesized)
aaaaagtagggcctggacttcatttgcagaatgaggtcatagtcgttgagtcccacagtcatatatgggagacctcaagttgctgtcaccttgataactcttgtatcctgggttaaagcc

SEQ ID NO: 355949 - DNA, 120 bp, Artificial Sequence
  ENSG00000139767_64 (sequence is synthesized)
ctctgtatttagtttgaacttctctctaagccccgtggtccaaagtcatcacgggagagaccaagatgggcttaccttgccctgctctggatttaaccattgttcattgtcaggctatat

SEQ ID NO: 355950 - DNA, 120 bp, Artificial Sequence
  ENSG00000139767_65 (sequence is synthesized)
ttttgtacaatcattcaaataacccagtgacataggtcatattgccacttttcagaggagaaaactgaggctcaggagggggagttgacatgcccaagctcccttgagctcagatcagct

SEQ ID NO: 355951 - DNA, 120 bp, Artificial Sequence
  ENSG00000139767_66 (sequence is synthesized)
tgactcaatgtccaacattcccttggtagctttttctccggggtcctgtgctataagaacttctctctgcactgtatttttttttctcccaattcttagctatttcctcaagcaatgatt

SEQ ID NO: 355952 - DNA, 120 bp, Artificial Sequence
  ENSG00000139767_67 (sequence is synthesized)
ggccaaggacctagcataatccaccacattggccaaggggacgtggtgcaccccaaggccatttctctgcattggaggctgcgaatctcctctggaaaattcccaacccgaggacccacc

SEQ ID NO: 355953 - DNA, 120 bp, Artificial Sequence
  ENSG00000139767_68 (sequence is synthesized)
atgagcccagctcagcctgaccagacagcctctgcctggagcattcacatcagatggaaagaagctgctgtgtcctccagcatcctgggaccctgtcctctgcccagtgacacagcagcc

SEQ ID NO: 355954 - DNA, 120 bp, Artificial Sequence
  ENSG00000139767_69 (sequence is synthesized)
atggctagcttgatttctggtctccaaagctaagcataaccttcccggggtttctggtttttcagcctgtacgaaacatgtctctgttctaattaaagttcccatggtatggtgttctca

SEQ ID NO: 355955 - DNA, 120 bp, Artificial Sequence
  ENSG00000139767_70 (sequence is synthesized)
gttcaaaacaaatattaagatcctctggacgcaaatctttctcatccggagaatcctctggttgctggattcccaaagcttagatgccgctgtcggacagctttgctgagtacaaatacc

SEQ ID NO: 355956 - DNA, 120 bp, Artificial Sequence
  ENSG00000139767_71 (sequence is synthesized)
aacagatcactgttctctggcttcgttaaaagttaagcttaggcaactgagcaggaatttagaagacagttgccacttctgcagaaagagaggtgccatttgggcctgaagcgtgcatct

SEQ ID NO: 355957 - DNA, 120 bp, Artificial Sequence
  ENSG00000139767_72 (sequence is synthesized)
tcatggagaattgtttgaaccactggggatggggactatgcctgtctcattctttgcggtatcccagcacctagtacagtggctcaagcagaaagagacactgaagcctgcaaaaagaga

SEQ ID NO: 355958 - DNA, 120 bp, Artificial Sequence
  ENSG00000139767_73 (sequence is synthesized)
cctaaggtctgtagtctgcaggtgagctctgggttcagagaagtgatgtttgcccaacgtcagggctcttgtttgaacttctctgctgcaaccagtccttcctatgttggttgaaggaga

SEQ ID NO: 355959 - DNA, 120 bp, Artificial Sequence
  ENSG00000139767_74 (sequence is synthesized)
gctttgcttctcgtggcatacagggacccacccttatggcatgacttcaaagttatgtgacatggtggtgcagctggaagatgaggaaagtgaacaacgttggagaggccccacctactc

SEQ ID NO: 355960 - DNA, 120 bp, Artificial Sequence
  ENSG00000139767_75 (sequence is synthesized)
ttgactgtctctgctggaagtgattcaacactcctctttaaatttcattgataaggaaaacccccatgagagaaagtaacttgatcaacatcacacagctaggtgggagtggtggcttct

SEQ ID NO: 355961 - DNA, 120 bp, Artificial Sequence
  ENSG00000139767_76 (sequence is synthesized)
ctgtcagccaggggtgtactttctcacctgagaaatgggcatgattatcccgcttgtctcccaggaggattgtggcaaagaaggcagctgttgagcccagtacttgatacaggtgcaaaa

SEQ ID NO: 355962 - DNA, 120 bp, Artificial Sequence
  ENSG00000139767_77 (sequence is synthesized)
cttgacaaataatatgatgacaacattccagatcctggctctgcacttaccagctgtgactccttgagcaagtttctgtgtctcagtttcctcaaaaactgcaaaacaaggatagcaata

SEQ ID NO: 355963 - DNA, 120 bp, Artificial Sequence
  ENSG00000139767_78 (sequence is synthesized)
tttcattggtaaaagcttgtcacaaggtcccctgggtgctaagataactgggaagggcagtctcgtagcatgtctgagtgggaagtgaaggaagcttagtaccaacctctctcaaggtag

SEQ ID NO: 355964 - DNA, 120 bp, Artificial Sequence
  ENSG00000139767_79 (sequence is synthesized)
gaattgcccttcaggccaggaaacacatattaaggtgagcatttcaggcttctctgatcagttctttctctgtatgagtggaagagggcaggaaaaataacagttactatttattgaaca

SEQ ID NO: 355965 - DNA, 120 bp, Artificial Sequence
  ENSG00000139767_80 (sequence is synthesized)
attactatggaccacgcactatgttaaattttcccaagcctcactatgtttcatatatgaaccctgtcatgtatgtattgttatttctatattacagataaggaaaacccccatgagaga

SEQ ID NO: 355966 - DNA, 120 bp, Artificial Sequence
  ENSG00000139767_81 (sequence is synthesized)
gcaacatgaggaaaccttgcctctataaaataaacaaaaattaaccaggtgtgatggctcatgtctgtagtcccagctacttgggaggctaagataggaggatccctcgatcctgggagg

SEQ ID NO: 355967 - DNA, 120 bp, Artificial Sequence
  ENSG00000139767_82 (sequence is synthesized)
ggttgcagtgagctgtgatcacaccactccactccagcctgggtgacagagtgaaaacatgtctcaaaaaaaaaaaaaaaaaaatcacacaactagaaaatgctggagccatgatctatt

SEQ ID NO: 355968 - DNA, 120 bp, Artificial Sequence
  ENSG00000139767_83 (sequence is synthesized)
tattctgattttgattccaggtctgattctatagcctgtgttcttacccattagaccacactgcctatgtgaaatacagctttcaatgtggccctgaggggttaaacatgacgatagacg

SEQ ID NO: 355969 - DNA, 120 bp, Artificial Sequence
  ENSG00000139767_84 (sequence is synthesized)
aagtgcttagcccagttgcctgccatgccattagtcctcattagatgctgattgcgaaaagaaaagaagcaaaaaaaaaaaaattttttttcaagtttctctttgatctttgaggagtta

SEQ ID NO: 355970 - DNA, 120 bp, Artificial Sequence
  ENSG00000139767_85 (sequence is synthesized)
cctgctctgacggtttttttcccttgcaagctggtatcccatttattcatttgcacattgagttaatgtatctactgaacgtgttccatgggcttatcatagtgctaggcacttggtata

SEQ ID NO: 355971 - DNA, 120 bp, Artificial Sequence
  ENSG00000139767_86 (sequence is synthesized)
tgaagatgagccagatatggtccctccactcaaggaacagagtgagggtatgggatggattcattctctccaaattcttgaggattctgagaaatggcactggcgttgtcagaaacctgg

SEQ ID NO: 355972 - DNA, 120 bp, Artificial Sequence
  ENSG00000139767_87 (sequence is synthesized)
gtggggcaaacaagtaagaaggtagatataaggaactataatatttttatttagttatctccagaaagtttttcctgtctgatacagccttatctctattcaacctagggccacaatagg

SEQ ID NO: 355973 - DNA, 120 bp, Artificial Sequence
  ENSG00000139767_88 (sequence is synthesized)
caccattacagttctcggttaccctaggtaccgtgtttggtgcaggactagcatatgatactaggagagccaatctcagcccttccctggggctaagtatgaggagagtgactttcactg

SEQ ID NO: 355974 - DNA, 120 bp, Artificial Sequence
  ENSG00000139767_89 (sequence is synthesized)
ggctctggtggtgacaaaggccatgctggacaggagggatcacagtaacacccagcatctattaggcgtctacaccaaggccagtgtttacaccatgctgctgaacactgcatttgaatg

SEQ ID NO: 355975 - DNA, 120 bp, Artificial Sequence
  ENSG00000139767_90 (sequence is synthesized)
aaattgcttcaacctcgcaaccaccctttaaggcgggcacattttcattatccttattttacagttgagaaacctggagctcagaggggtgacaacactcattcaacgtcccacagctag

SEQ ID NO: 355976 - DNA, 120 bp, Artificial Sequence
  ENSG00000139767_91 (sequence is synthesized)
taagggatcaagcaggggtttgaatcccacaccatgtgctcacagtcaccataccacactgctaccagttatctctatgtagctacctctgggtcccagcaaggaagggcatatggaaag

SEQ ID NO: 355977 - DNA, 120 bp, Artificial Sequence
  ENSG00000139767_92 (sequence is synthesized)
aaggctaggcttgggctgcaacctatgttcgaagaccaggggcaagtagatttaacccagccatttggactgtgctctctctaccccctccccatcccccgccaccagcgtcatccaatc

SEQ ID NO: 355978 - DNA, 120 bp, Artificial Sequence
  ENSG00000139767_93 (sequence is synthesized)
taagacccaaactgaatagctgtgagccttcacagcttccggcatatcctgagcctcagcccccagggctctgtagcatccttgattttttatactctcagggacatgccataaaagatt

SEQ ID NO: 355979 - DNA, 120 bp, Artificial Sequence
  ENSG00000139767_94 (sequence is synthesized)
gaatcagcaactgcgtagattgctgtaaaaaatgagggcaattttatacatgttttcagttcctatttcccctccttgctttcctccaaggatctgagattgttaagcaggagagctggt

SEQ ID NO: 355980 - DNA, 120 bp, Artificial Sequence
  ENSG00000139767_95 (sequence is synthesized)
agaggttccgaggggaggtcaccaactggaaatgaggcatctgccagatagagataactacacatggctaagataccacacccagatcagcttcataaggaaaccctcccaatgggcagc

SEQ ID NO: 355981 - DNA, 120 bp, Artificial Sequence
  ENSG00000139767_96 (sequence is synthesized)
agaaagatcagagggacactggaaggtcttgtcacccccagctcccccaggggcttgctgcagtggcttgaggtcagtcctttccatgtatctcctccaccttcatatctcagtgaatgc

SEQ ID NO: 355982 - DNA, 120 bp, Artificial Sequence
  ENSG00000139767_97 (sequence is synthesized)
tttagacctcttatcttcatggcctcttttttcccaaagttctcttaagcaaaccatcatagagaaaacgctgaattattcttttcttctctctatagacgatattactaaattgtcata

SEQ ID NO: 355983 - DNA, 120 bp, Artificial Sequence
  ENSG00000139767_98 (sequence is synthesized)
tgaagagatgatcagaatatgcaggcaaaaagtacagggaatagagtatgatagagatgtttcaggctgttaattattaatgaattgttaattgatcagttatttaattaataaaaatta

SEQ ID NO: 355984 - DNA, 120 bp, Artificial Sequence
  ENSG00000139780_0 (sequence is synthesized)
ccggctatggacgtgtgtctgagctccgcgcagcagcctgggcgccggggggaaggactcagctccccgggtggctggttagaggctgagaagaagggggctccgcagaaagacagcacc

SEQ ID NO: 355985 - DNA, 120 bp, Artificial Sequence
  ENSG00000139780_1 (sequence is synthesized)
gggggagtcctagaagaatccaacaagatagaaccatctcttcatagcctccagaaatttgttcctacagattacgccagctacactcaggagcattatcggtttgcaggaaaggagatt

SEQ ID NO: 355986 - DNA, 120 bp, Artificial Sequence
  ENSG00000139780_2 (sequence is synthesized)
gtcatccaggaatccatagagagttacggagcggtggtgtggccaggggctatggctttgtgtcaatacttggaggaacatgccgaggaattgaatttccaagatgcaaaaatacttgaa

SEQ ID NO: 355987 - DNA, 120 bp, Artificial Sequence
  ENSG00000139780_3 (sequence is synthesized)
attggtgccggaccaggccttgtttccattgtggccagtattttaggagctcaagtcacagcaacagatttgcctgatgtcctgggaaaccttcaatacaatcttttaaaaaacacacta

SEQ ID NO: 355988 - DNA, 120 bp, Artificial Sequence
  ENSG00000139780_4 (sequence is synthesized)
agcacatctgcctgaagtgaaagaactggtatggggggaagacctggacaaaaactttcccaagtcagctttttactatgattacgtcctagcctcagatgtggtctaccatcactactt

SEQ ID NO: 355989 - DNA, 120 bp, Artificial Sequence
  ENSG00000139780_5 (sequence is synthesized)
cctggacaagctgctcaccaccatggtgtacctttcccagccagggacggtgctgctttgggcaaacaaattcaggttcagcaccgactatgaatttttagataaattcaagcaagtttt

SEQ ID NO: 355990 - DNA, 120 bp, Artificial Sequence
  ENSG00000139780_6 (sequence is synthesized)
tgacacaacactgttggctgaatatccagagtcatcagtcaaactttttaaggggatactaaaatgggactaaatccaacaaaatgcctttcacaacgttactgtgtcttttgagcaatg

SEQ ID NO: 355991 - DNA, 120 bp, Artificial Sequence
  ENSG00000139780_7 (sequence is synthesized)
tgttagaaattgctttggtaatagacttctttcacaggattgagaaggtagtgcatagaaacaacttgtatacttggaacaaatgtaacaatactgcagaaactttctaatttctaagat

SEQ ID NO: 355992 - DNA, 120 bp, Artificial Sequence
  ENSG00000139780_8 (sequence is synthesized)
aatttaagattatctggttaatctaaatatctaaaaagaacaacataaaaacatgaaagtagctttgttggttccaacgaagttacatgtttaataaatcttacatggataaagtaataa

SEQ ID NO: 355993 - DNA, 120 bp, Artificial Sequence
  ENSG00000139793_0 (sequence is synthesized)
tgaaggtaaaattttccagatacggcagacggctttcagagtacaataaacagggaatgagaactatttacatggaagtttctttctcatgatgcggtggagaagcctcggccacttggt

SEQ ID NO: 355994 - DNA, 120 bp, Artificial Sequence
  ENSG00000139793_1 (sequence is synthesized)
tctgccagatgttcctggggttactgtaaatgggaaggacaggcagagctaaacaaggtttatcatttaaaagtgcctgtgtgaagtcacttttgctggaaaactgcagcttgggagctt

SEQ ID NO: 355995 - DNA, 120 bp, Artificial Sequence
  ENSG00000139793_2 (sequence is synthesized)
tctttgtattcacatcccactcttctgtcaagtacactttaccctgaccttatgagtggatgaagatacctcagttgtctgactttgccaattgcttaatttcagaatttaaaaagggga

SEQ ID NO: 355996 - DNA, 120 bp, Artificial Sequence
  ENSG00000139793_3 (sequence is synthesized)
aagaaaaacatcctgctaaaatatgaacatctgagtgtcttattttccaacatcgtcaatagctgtgagcgtcagcattaaatattctcccaaggagtgccatgatattgaagtcacttt

SEQ ID NO: 355997 - DNA, 120 bp, Artificial Sequence
  ENSG00000139793_4 (sequence is synthesized)
attaataacagctgtatctgcaaaacagtcaagagactcggacgttgaaagccagagatgacactgagcatgcttttattgcggcctaccatctttaagtgggacatattgattgatgag

SEQ ID NO: 355998 - DNA, 120 bp, Artificial Sequence
  ENSG00000139793_5 (sequence is synthesized)
tgattgcctgtccatacactctctcatcatcctgttccttggattggacttcactaagcaatttatcactcaccttcagacttacatgtgggagttttcacaacagtagttttggaatca

SEQ ID NO: 355999 - DNA, 120 bp, Artificial Sequence
  ENSG00000139793_6 (sequence is synthesized)
ttagaacttggattgatttcatcatttaacagaaacaaacagcccaaattactttatcaccatggctttgaacgttgccccagtcagagatacaaaatggctgacattagaagtctgcag

SEQ ID NO: 356000 - DNA, 120 bp, Artificial Sequence
  ENSG00000139793_7 (sequence is synthesized)
acagtttcaaagaggaacatgctcacgctctgatgaagaatgcaaatttgctcatccccccaaaagttgtcaggttgaaaatggaagagtaattgcctgctttgattccctaaagggccg

SEQ ID NO: 356001 - DNA, 120 bp, Artificial Sequence
  ENSG00000139793_8 (sequence is synthesized)
ttgttcgagagagaactgcaagtatcttcaccctccgacacacttaaaaactcaactagaaattaatggaaggaacaatttgattcagcaaaaaactgcagcagcaatgcttgcccagca

SEQ ID NO: 356002 - DNA, 120 bp, Artificial Sequence
  ENSG00000139793_9 (sequence is synthesized)
gatgcaatttatgtttccaggaacaccacttcatccagtgcccactttccctgtaggtcccgcgatagggacaaatacggctattagctttgctccttacctagcacctgtaacccctgg

SEQ ID NO: 356003 - DNA, 120 bp, Artificial Sequence
  ENSG00000139793_10 (sequence is synthesized)
agttgggttggtcccaacggaaattctgcccaccacgcctgttattgttcccggaagtccaccggtcactgtcccgggctcaactgcaactcagaaacttctcaggactgacaaactgga

SEQ ID NO: 356004 - DNA, 120 bp, Artificial Sequence
  ENSG00000139793_11 (sequence is synthesized)
ggtatgcagggagttccagcgaggaaactgtgcccggggagagaccgactgccgctttgcacaccccgcagacagcaccatgatcgacacaagtgacaacaccgtaaccgtttgtatgga

SEQ ID NO: 356005 - DNA, 120 bp, Artificial Sequence
  ENSG00000139793_12 (sequence is synthesized)
ttacataaaggggcgttgcatgagggagaaatgcaaatattttcaccctcctgcacacttgcaggccaaaatcaaagctgcgcagcaccaagccaaccaagctgcggtggccgcccaggc

SEQ ID NO: 356006 - DNA, 120 bp, Artificial Sequence
  ENSG00000139793_13 (sequence is synthesized)
agccgcggccgcggccacagtcatggcctttccccctggtgctcttcatcctttaccaaagagacaagcacttgaaaaaagcaatggtaccagcgcggtctttaaccccagcgtcttgca

SEQ ID NO: 356007 - DNA, 120 bp, Artificial Sequence
  ENSG00000139793_14 (sequence is synthesized)
ctaccagcaggctctcaccagcgcacagttgcagcaacacgccgcgttcattccaacagggtcagttttgtgcatgacacccgctaccagtattgtacccatgatgcacagcgctacgtc

SEQ ID NO: 356008 - DNA, 120 bp, Artificial Sequence
  ENSG00000139793_15 (sequence is synthesized)
cgccactgtctctgcagcaacaactcctgcaacaagtgtccccttcgcagcaacagccacagccaatcagataattctgaaataatcagcagaaacggaatggaatgccaagaatctgca

SEQ ID NO: 356009 - DNA, 120 bp, Artificial Sequence
  ENSG00000139793_16 (sequence is synthesized)
ttgagaataactaaacattgttactgtacatactatcctgtttcctcctcaatagaattgccacaaactgcatgctaaataaagatgtagttcttctggacagaccacaactctaagaag

SEQ ID NO: 356010 - DNA, 120 bp, Artificial Sequence
  ENSG00000139793_17 (sequence is synthesized)
ctagtgctgctatctcatatatgagtattaaatatggtatgcttagtatattccaacctaagatagttaactacctgagaccagctgtgatgtttaaagacataaaggataaagtttact

SEQ ID NO: 356011 - DNA, 120 bp, Artificial Sequence
  ENSG00000139793_18 (sequence is synthesized)
tttaaagggtttctaaacatagtttctgtcctaggaatattgtcttatctccataactatagctgatgcagaaagtccagccagtttactcatttcgattcagaatatttcaaatttagc

SEQ ID NO: 356012 - DNA, 120 bp, Artificial Sequence
  ENSG00000139793_19 (sequence is synthesized)
cttcttgacaatataaatgctgcagcaaagatgagaggtgaagtaaaaccgatacctgtcctgcaggtctaaaatttgaatggaaattcaagcacaagtactggggacacatcaaagtgt

SEQ ID NO: 356013 - DNA, 120 bp, Artificial Sequence
  ENSG00000139793_20 (sequence is synthesized)
ggtgtttggtttgcctggagatgccacgttgaatcatgtgattctagattaacattaaatagattgaaaaagaaactttgcacggtatgagcttcataccccaccaaacaaagtcttgaa

SEQ ID NO: 356014 - DNA, 120 bp, Artificial Sequence
  ENSG00000139793_21 (sequence is synthesized)
ggtattattttacaagtatatttttaaagttgttttataagagagactttgtagaagtgcctagattttgccagacttcatccagcttgacaagattgagaggcccatgccaacagtcta

SEQ ID NO: 356015 - DNA, 120 bp, Artificial Sequence
  ENSG00000139793_22 (sequence is synthesized)
atctaagagattagtctttcaaactcaccatccagttgcctgttacagaataactcttcttaactaaaaacctagtcaaacaaggaagctgtaggtgaggagatctgtataatattctaa

SEQ ID NO: 356016 - DNA, 120 bp, Artificial Sequence
  ENSG00000139793_23 (sequence is synthesized)
tttaagtaagtttgagtttagtcactgcaaatttgactgtgactttaatctaaattactatgtaaacaaaaagtagatagtttcactttttaaaaaatccattactgttttgcatttcaa

SEQ ID NO: 356017 - DNA, 120 bp, Artificial Sequence
  ENSG00000139793_24 (sequence is synthesized)
aagttggattaaagggttgtaactgactacagcatggaaaaaaatagttcttttaattctttcaccttaaagcatattttatgtctcaaaagtataaaaaactttaatacaagtacatac

SEQ ID NO: 356018 - DNA, 120 bp, Artificial Sequence
  ENSG00000139793_25 (sequence is synthesized)
tatacacatacatatatatactatatatggatgaaacatattttaatgttgtttacttttttaaatacttggttgatcttcaaggtaatagcgatacaattaaattttgttcagaaagtt

SEQ ID NO: 356019 - DNA, 120 bp, Artificial Sequence
  ENSG00000139793_26 (sequence is synthesized)
agaaagtttgttttaaagtttattttaagcactatcgtaccaaatatttcatatttcacattttatatgttgcacatagcctatacagtacctacatagtttttaaattattgtttaaaa

SEQ ID NO: 356020 - DNA, 120 bp, Artificial Sequence
  ENSG00000139793_27 (sequence is synthesized)
aacaaaacagctgttataaatgaatattatgtgtaattgtttcaaacatccattttctttgtgaacatattagtgattgaagtattttgacttttgagattgaatgtaaaatattttaaa

SEQ ID NO: 356021 - DNA, 120 bp, Artificial Sequence
  ENSG00000139793_28 (sequence is synthesized)
tttgggatcatcgcctgttctgaaaactagatgcaccaaccgtatcattatttgtttgaggaaaaaaagaaatctgcattttaattcatgttggtcaaagtcgaattactatctatttat

SEQ ID NO: 356022 - DNA, 120 bp, Artificial Sequence
  ENSG00000139793_29 (sequence is synthesized)
cttatatcgtagatctgataaccctatctaaaagaaagtcacacgctaaatgtattcttacatagtgcttgtatcgttgcatttgttttaatttgtggaaaagtattgtatctaacttgt

SEQ ID NO: 356023 - DNA, 120 bp, Artificial Sequence
  ENSG00000139793_30 (sequence is synthesized)
attactttggtagtttcatctttatgtattattgatatttgtaattttctcaactataacaatgtagttacgctacaacttgcctaaaacattcaaacttgttttcttttttctgttttt

SEQ ID NO: 356024 - DNA, 120 bp, Artificial Sequence
  ENSG00000139793_31 (sequence is synthesized)
ttctttgttaattcatttaaactcattgaaaacatagtatacattactaaaaggtaaattatgggaatcactgaaatatttttgtagattaattgttgtaacattgtctttctttttttt

SEQ ID NO: 356025 - DNA, 120 bp, Artificial Sequence
  ENSG00000139793_32 (sequence is synthesized)
cttttgtttcatgattttgatttttaaaattattagcacacaactattttcagccctttaataatggagcatcaaaaacatcacctgtaaccccaagcaaatatagaagactgtattttt

SEQ ID NO: 356026 - DNA, 120 bp, Artificial Sequence
  ENSG00000139793_33 (sequence is synthesized)
tactatgatatccattttccagaattgtgattacaatatgcaaagagtcataaatatgccatttacaataaggaggaggcaaggcaaatgcatagatgtacaaatatatgtacaacagat

SEQ ID NO: 356027 - DNA, 120 bp, Artificial Sequence
  ENSG00000139793_34 (sequence is synthesized)
ttatttataatgtaattttatagaataattctgggatttgagaggatctaaaactatttttctgtataaatattatttgccaaaagtttgtttatattcagaagtctgactatgatgaat

SEQ ID NO: 356028 - DNA, 120 bp, Artificial Sequence
  ENSG00000139793_35 (sequence is synthesized)
actatgatgaataaatcttaaatgctttgtttaattaaaaaacaaaaatcaccaatatccaagacatgaagatatcagttcaacaaatactgtagttaagagactaactctccacttgta

SEQ ID NO: 356029 - DNA, 120 bp, Artificial Sequence
  ENSG00000139793_36 (sequence is synthesized)
tgggaactacatttcactcttggttttcaggatataacagcacttcaccgaaatattctttcagccataccactggtaacatttctactaaatctttctgtaacacttaaagaattccct

SEQ ID NO: 356030 - DNA, 120 bp, Artificial Sequence
  ENSG00000139793_37 (sequence is synthesized)
cattcattaccttacagtgtaaacaggagtctaatttgtatcaatactatgttttggttgtaatattcagttcactcacccaatgtacaaccaatgaaataaaagaagcatttaaaagga

SEQ ID NO: 356031 - DNA, 120 bp, Artificial Sequence
  ENSG00000139793_38 (sequence is synthesized)
caggaaactccagcacctcctagaacatcttttgtggaatggcacctcatgggggcccttggatcatgtaccccttgtattcaacagtaaacatcttcctataatcattgcttcattaac

SEQ ID NO: 356032 - DNA, 120 bp, Artificial Sequence
  ENSG00000139793_39 (sequence is synthesized)
acacttgcaggccaaaatcaaagctgcgcagccgcggccgcggccacagtcatgactcagtcgactgccaaagcaatgaagcgacctctcgaagcaactgtagacctggcctttccccct

SEQ ID NO: 356033 - DNA, 120 bp, Artificial Sequence
  ENSG00000139797_0 (sequence is synthesized)
acgccacggccgttgggagcctgagactcaaacatggcagcgccaccttctccaggaaggacggccgaccaagcagaccaggtatgcaccttcctcttcaaaaagcctggacggaaaggg

SEQ ID NO: 356034 - DNA, 120 bp, Artificial Sequence
  ENSG00000139797_1 (sequence is synthesized)
gctgcaggcctcagaaagcgcccggcctgcgaccccgagcacggagagagcagcagcagcggggacgagggcgacacagtggctcagcccccgcgggtggcaccgaggccccggggcctc

SEQ ID NO: 356035 - DNA, 120 bp, Artificial Sequence
  ENSG00000139797_2 (sequence is synthesized)
cacagctggcagaaggcggctcacggcgacaggaggggcgaggaggcggcgcctgagagcctcgacgtggtgtacaggtccacccgctcggcgaagcctgtggggccagaggacatgggg

SEQ ID NO: 356036 - DNA, 120 bp, Artificial Sequence
  ENSG00000139797_3 (sequence is synthesized)
gccaccgctgacttcgagcaggacaccgagaaggagcaccatacgccgaccatcctcaagtgcagccagcgggtccaggaggcactgcggggtcgggagcacgaccacatctaccgggga

SEQ ID NO: 356037 - DNA, 120 bp, Artificial Sequence
  ENSG00000139797_4 (sequence is synthesized)
atccacagctacctgaggtacctgaagcccaaggacacgtccatgggcaactcctcctcggggatggcgaggaagggccccatacgtgcgccagggcatctgcgcgccactgtgcgctgg

SEQ ID NO: 356038 - DNA, 120 bp, Artificial Sequence
  ENSG00000139797_5 (sequence is synthesized)
agctgcaaattcctccacgaccgttccgattacaagctcgggtgggagattgaacgggagcttgaagagggtcgctactgtatctgcgaggacgaaaaccatgaagtgggaagcgaggaa

SEQ ID NO: 356039 - DNA, 120 bp, Artificial Sequence
  ENSG00000139797_6 (sequence is synthesized)
gaggaaataccattcaggtgtttcatatgtcgccaggccttccaaaacccagtcgtcaccaagtgcaggcattatttctgcgagagctgcgcgctggagcacttccgggccaccccgcgc

SEQ ID NO: 356040 - DNA, 120 bp, Artificial Sequence
  ENSG00000139797_7 (sequence is synthesized)
tgctacatctgtgaccagccaaccggcggcatctttaaccccgccaaagaactgatggcgaaactgcaaaagcttcaggctgcagaaggaaaaaagagataagaaagactcaagtctgta

SEQ ID NO: 356041 - DNA, 120 bp, Artificial Sequence
  ENSG00000139797_8 (sequence is synthesized)
tgtacactggggagaagcagcctgttgagtaagatgagagagatgacagtcttcctgcaatcccatgcctgagtatgtaaccaaaagaattgaaatccggatctcaaagaggtatgtgca

SEQ ID NO: 356042 - DNA, 120 bp, Artificial Sequence
  ENSG00000139797_9 (sequence is synthesized)
ctcccatgttcactgcagaattatttgcaaaagccaagaggtgtaaacaacccaagtgtccatggatggatgaatggacaaacaaaatgcgatacacacacacaatggaatgctattaag

SEQ ID NO: 356043 - DNA, 120 bp, Artificial Sequence
  ENSG00000139797_10 (sequence is synthesized)
ccttaacgggaaggaaatccttttaaagatttaaactgatccttttaaggatcacatgctacaactagaatgaaccttgaagacgacactgctaagtgaaataaactagtcacaaaatga

SEQ ID NO: 356044 - DNA, 120 bp, Artificial Sequence
  ENSG00000139800_0 (sequence is synthesized)
ggggcgaatccccgctgggtcgagggcctgaacgggagccaatcgagcagccgaggctactgccaatcacgcggctccctccaatcccacccgtgccatttccaaaatctcggtcccact

SEQ ID NO: 356045 - DNA, 120 bp, Artificial Sequence
  ENSG00000139800_1 (sequence is synthesized)
gtgcagctcaaatgtggtgttcactctgccaatcgctggaggatagagtgggaacaggaataagcagagttaagaggccaggacaaaagaagttaaagagcgcccaatacatacatgttt

SEQ ID NO: 356046 - DNA, 120 bp, Artificial Sequence
  ENSG00000139800_2 (sequence is synthesized)
ttgaaggcgggcagagggaataaagtccccccagtgagggtctatgggcctgattgtgtagttctgatggagccccctttgagcaagaggaacccgccagcgctgagattagcggatttg

SEQ ID NO: 356047 - DNA, 120 bp, Artificial Sequence
  ENSG00000139800_3 (sequence is synthesized)
gcaacggctcaggtccagccgcttcagaatatgacaggcttcccggcgctggccggcccgcccgcccactcccaactccgggccgccgtcgcgcacctccgcctgcgggacctgggcgct

SEQ ID NO: 356048 - DNA, 120 bp, Artificial Sequence
  ENSG00000139800_4 (sequence is synthesized)
gaccccggcgtggccaccactccgctcggacccgagcacatggcccaggcgagcacgctgggcctcagccctccctcccaggcgttcccggcacacccggaggctccggcagccgccgcc

SEQ ID NO: 356049 - DNA, 80 bp, Artificial Sequence
  ENSG00000139800_5 (sequence is synthesized)
cgtgctgcagccttggtcgcgcaccccggcgcgggcagctacccctgcggcgggggcagcagtggcgcgcagccctccgc

SEQ ID NO: 356050 - DNA, 120 bp, Artificial Sequence
  ENSG00000139800_6 (sequence is synthesized)
ccccctccccctcccccgcctcctcctcctcctgccctctcgggctacaccaccaccaacagtggcggcggcggcagcagcggcaaaggccacagcagggacttcgtcctccggagggac

SEQ ID NO: 356051 - DNA, 120 bp, Artificial Sequence
  ENSG00000139800_7 (sequence is synthesized)
aaaggccacagcagggacttcgtcctccggagggacctttccgccacggcccccgcggcggccatgcacggggccccgctcggaggggagcagcggtccggcaccggctccccccagcac

SEQ ID NO: 356052 - DNA, 80 bp, Artificial Sequence
  ENSG00000139800_8 (sequence is synthesized)
gcccggcgctcttccccgcgctgcacgacacgccgggggccccaggcggccacccgcacccgctcaacggccagatgcgc

SEQ ID NO: 356053 - DNA, 120 bp, Artificial Sequence
  ENSG00000139800_9 (sequence is synthesized)
cggcggctgagctgtacggccgcgccgaaccgcccttcgcgccgcgctctggggacgcgcactacggggcggttgcggccgcagcggcggccgccctgcacggctacggagccgtgaact

SEQ ID NO: 356054 - DNA, 120 bp, Artificial Sequence
  ENSG00000139800_10 (sequence is synthesized)
gcggttgcggccgcagcggcggccgccctgcacggctacggagccgtgaacttaaacctgaacctggcggctgcggcggccgcagcagcggccgggcccgggccccacctgcagcaccac

SEQ ID NO: 356055 - DNA, 120 bp, Artificial Sequence
  ENSG00000139800_11 (sequence is synthesized)
ccgccggcgcccgcgcagcacccgcaccagcaccacccccacctcccaggggcggctggggccttcctgcgctacatgcggcagccaatcaagcaggagctcatctgcaagtggatcgac

SEQ ID NO: 356056 - DNA, 120 bp, Artificial Sequence
  ENSG00000139800_12 (sequence is synthesized)
cgccgccgccgccgccgccgccgccgccaccgcccccggccggcggcgccaagccctgctccaaaactttcggcaccatgcacgagctggtgaatcacgtcacggtggagcacgtgggag

SEQ ID NO: 356057 - DNA, 120 bp, Artificial Sequence
  ENSG00000139800_13 (sequence is synthesized)
aatcacgtcacggtggagcacgtgggaggccccgagcagagcagccacgtctgcttctgggaggactgtccgcgcgagggcaagcccttcaaggccaaatacaagctcatcaaccacatc

SEQ ID NO: 356058 - DNA, 120 bp, Artificial Sequence
  ENSG00000139800_14 (sequence is synthesized)
cgcgtgcacaccggcgagaagccctttccctgccctttccccggctgcggcaaggtcttcgcgcgctccgagaacctcaagatccacaagcgtactcatacaggggaaaagcctttcaaa

SEQ ID NO: 356059 - DNA, 120 bp, Artificial Sequence
  ENSG00000139800_15 (sequence is synthesized)
tgtgaatttgatggctgtgacaggaagtttgccaatagcagtgatcggaagaaacattcccatgtccacaccagtgacaagccctactactgcaagattcgaggctgtgacaaatcctac

SEQ ID NO: 356060 - DNA, 120 bp, Artificial Sequence
  ENSG00000139800_16 (sequence is synthesized)
actcacccaagctccctgaggaagcacatgaagattcactgcaagtccccgccaccttctccaggaccccttggttactcatcagtggggactccagtgggcgcccccttgtcccctgtg

SEQ ID NO: 356061 - DNA, 120 bp, Artificial Sequence
  ENSG00000139800_17 (sequence is synthesized)
ctggacccagccaggagtcactccagcactctgtcccctcaggtgaccaacctcaatgagtggtacgtttgccaggccagtggggcccccagccacctccacaccccttccagcaacgga

SEQ ID NO: 356062 - DNA, 120 bp, Artificial Sequence
  ENSG00000139800_18 (sequence is synthesized)
accacctctgagactgaagatgaggaaatttacgggaaccctgaagttgtgcggacgatacattagaatttattattaataataataagtgaaataataagtgggagtccttggaccaca

SEQ ID NO: 356063 - DNA, 120 bp, Artificial Sequence
  ENSG00000139800_19 (sequence is synthesized)
cagtatgaaaccctatggtgtttgtacatttaattaatttaattaagatatttgggcttttttttttttttttcttaaaaaacaaacaaaaaacaaccaagctggacttgtacattgcag

SEQ ID NO: 356064 - DNA, 120 bp, Artificial Sequence
  ENSG00000139800_20 (sequence is synthesized)
tgtacattgcaggaggatggggctgggggcaaattgtaccaaggaaaatgaatggagagattagttaatggcgatacacactgccgatgcaatatatatatatatatatatatacatata

SEQ ID NO: 356065 - DNA, 120 bp, Artificial Sequence
  ENSG00000139800_21 (sequence is synthesized)
tttttttaaaagggggagaaaaagagcattaagtcagaacttaacacagcaccaaggccctctgcatttcccagagtgcctctcaaatgcctttgacaccataccatgggctgcttttga

SEQ ID NO: 356066 - DNA, 120 bp, Artificial Sequence
  ENSG00000139800_22 (sequence is synthesized)
gcctccttgttggaccctaattctgccaaggcctcttgattgtaaaccacacacctgctgcattgccaacagatcctgttccgtacctgtgtccaaaaacatttgtaaaaaccctttgag

SEQ ID NO: 356067 - DNA, 120 bp, Artificial Sequence
  ENSG00000139800_23 (sequence is synthesized)
tttaatatttgtaatttttaatttccactcttttattactgatcttagcttaatacaatatttttatacaggattatttcttcagtatcctactgtgtgattttaaaaaaagatgcagca

SEQ ID NO: 356068 - DNA, 120 bp, Artificial Sequence
  ENSG00000139800_24 (sequence is synthesized)
accttaatatatctccatatcttgtgctactgtgattgttcaagcaaaagtggagagaagaaaagctgctgcaaaagacaactgtgaaactgtgatattttataaaatagaagaaattca

SEQ ID NO: 356069 - DNA, 120 bp, Artificial Sequence
  ENSG00000139800_25 (sequence is synthesized)
agtgctttctttttcctatatgtttttttttttttatctgaattctcagatactgcctcctaactgtgtccaaacttcttgtgtaataaagagattctgttttcgatcctaagttctttg

SEQ ID NO: 356070 - DNA, 120 bp, Artificial Sequence
  ENSG00000139800_26 (sequence is synthesized)
ggatgccaacattcacagtcaagtcttgaggaggtgtgatgatggcatcatgcctatttttttggaaagctgttgtttttaaaacaggccaacacctcttttatactgttgtatcagcct

SEQ ID NO: 356071 - DNA, 120 bp, Artificial Sequence
  ENSG00000139800_27 (sequence is synthesized)
tttaaaaagtctatttttcaatgcctgaaactgcattttaatgcattttcttccacctgagcactgagcacaccaaactggaatccatttgaaaatgacagtgtgtgaagtgtatgattt

SEQ ID NO: 356072 - DNA, 120 bp, Artificial Sequence
  ENSG00000139800_28 (sequence is synthesized)
acattaaaagaggggagggagttgccatacatattaaaaatttttaaaaggtttatagttaccaccaaacactgatgaatgtgtgacctttgccagagctgtcaagctaggataaaaaag

SEQ ID NO: 356073 - DNA, 120 bp, Artificial Sequence
  ENSG00000139800_29 (sequence is synthesized)
gtcaaggacctaggacaataactcttagtcgatttattttcggttggtacaacacatctcctgtgcaaaatgtagtccatcagaaacatcctacagatacactaaagagcactaatttat

SEQ ID NO: 356074 - DNA, 120 bp, Artificial Sequence
  ENSG00000139800_30 (sequence is synthesized)
ccttagagaccccgaagacaccccctccccagggtttgtagaaatttgttttgtgtgctgtgagtggttgatgtagtcttgtcattgttaataacttgtatgtgaacactattatttgta

SEQ ID NO: 356075 - DNA, 120 bp, Artificial Sequence
  ENSG00000139800_31 (sequence is synthesized)
cagttgaattaatttattttcagacatcatcctttttttttttctttcctggaagagttcaaagcacaccaaagaattatattatacattttggtgaaagattgtcatttatgatccatg

SEQ ID NO: 356076 - DNA, 120 bp, Artificial Sequence
  ENSG00000139800_32 (sequence is synthesized)
gtttatttaaaaaaaaaaggaaagaaaatggaaaaatatatttttaagcttacttgaatgaacaacgtaatgtgaaaaccaagactcttcctgcatgtcttttttgcattgtgttgataa

SEQ ID NO: 356077 - DNA, 120 bp, Artificial Sequence
  ENSG00000139800_33 (sequence is synthesized)
gattatatatagtttatagatatattatattactagtacagtgcatggtgctgtcacttggaaagcctttcaatgttgtcttcagattgttgtgatgaatatgaaacatgcagaccctcc

SEQ ID NO: 356078 - DNA, 120 bp, Artificial Sequence
  ENSG00000139800_34 (sequence is synthesized)
tttataaagaaaaagaccttaaaacttgaatatgagataattttacattttaaaagtttatttgattttcatattattcactttcaaagccctttcaaatagaaaaggtatgaacttttg

SEQ ID NO: 356079 - DNA, 120 bp, Artificial Sequence
  ENSG00000139800_35 (sequence is synthesized)
gggggataatttatgtatcgtaaacttattagaacaaaatattcctgatgtataatgagttgttttatttatacaactttttcaatggtagtttgcactattctttattatgctacaggt

SEQ ID NO: 356080 - DNA, 120 bp, Artificial Sequence
  ENSG00000139800_36 (sequence is synthesized)
ttatttattatgaaacaaaggaatatgtattttatgtattttaccatgcataggttaactctttgccacagatttattggttcttgatacacctaaaataaaaaaaaatgtgtacctcca

SEQ ID NO: 356081 - DNA, 120 bp, Artificial Sequence
  ENSG00000139800_37 (sequence is synthesized)
atagagagcaagcaagaatgattatgaagtaacaaatttaataaaggtattcttgttattattgcttatgttttacataatggcatatctctcatacaaatagaacaggttgctaatgga

SEQ ID NO: 356082 - DNA, 120 bp, Artificial Sequence
  ENSG00000139826_0 (sequence is synthesized)
agagcgggcagggttcccactccgggagcggagacggagaacaggttatgtgggagccggcgggggcatttgccggcgacacccgagcgggggccggaagtggggccacagctcgcagca

SEQ ID NO: 356083 - DNA, 120 bp, Artificial Sequence
  ENSG00000139826_1 (sequence is synthesized)
ggagctccgggctagaccgtggcgccggcagcggcccctgggctggaggaggatgatgaggagcgacggaagcgacgcgggggtacgctgctgcgcggcgcccggtttcgtgcccgcggc

SEQ ID NO: 356084 - DNA, 120 bp, Artificial Sequence
  ENSG00000139826_2 (sequence is synthesized)
cgactgcgcagcctgtccgcgagtctgagatacttacagagagctacaatggaaaagtcctggatgctgtggaactttgttgaaagatggctaatagccttggcttcatggtcttgggct

SEQ ID NO: 356085 - DNA, 120 bp, Artificial Sequence
  ENSG00000139826_3 (sequence is synthesized)
ctctgccgtatttctcttttacctttaatagtgacttttcatctgtatggaggcattatcttacttttgttaatattcatatcaatagcaggtattctgtataaattccaggatgtattg

SEQ ID NO: 356086 - DNA, 120 bp, Artificial Sequence
  ENSG00000139826_4 (sequence is synthesized)
ctttattttccagaacagccatcctcttcacgtctttatgttcccatgcccactggcattccacatgaaaacattttcatcagaaccaaagatggaatacgtctgaatcttattttgata

SEQ ID NO: 356087 - DNA, 120 bp, Artificial Sequence
  ENSG00000139826_5 (sequence is synthesized)
cgatacactggagacaattcaccctattccccaactataatttattttcatgggaatgcaggcaacataggtcacaggttgccaaatgcattacttatgttggttaacctcaaagttaac

SEQ ID NO: 356088 - DNA, 120 bp, Artificial Sequence
  ENSG00000139826_6 (sequence is synthesized)
cttttgctggttgattatcgaggatatggaaaaagtgaaggagaagcaagtgaagaaggactctacttagattctgaagctgtgttagactacgtgatgactagacctgaccttgataaa

SEQ ID NO: 356089 - DNA, 120 bp, Artificial Sequence
  ENSG00000139826_7 (sequence is synthesized)
acaaaaatttttctttttggccgttccttgggtggagcagtggctattcatttggcttctgaaaattcacataggatttcagccattatggtggagaacacatttttaagcataccacat

SEQ ID NO: 356090 - DNA, 120 bp, Artificial Sequence
  ENSG00000139826_8 (sequence is synthesized)
atggccagcactttattttcattctttccgatgcgttaccttcctttatggtgctacaaaaataaatttttgtcctacagaaaaatctctcagtgtagaatgccttcacttttcatctct

SEQ ID NO: 356091 - DNA, 120 bp, Artificial Sequence
  ENSG00000139826_9 (sequence is synthesized)
ggactctcagatcaattaattccaccagtaatgatgaaacaactttatgaactctccccatctcggactaagagattagccatttttccagatgggactcacaatgacacatggcagtgc

SEQ ID NO: 356092 - DNA, 120 bp, Artificial Sequence
  ENSG00000139826_10 (sequence is synthesized)
caaggctatttcactgcacttgaacagttcatcaaagaagtcgtaaagagccattctcctgaagaaatggcaaaaacttcatctaatgtaacaattatataatgtttccctttttgatta

SEQ ID NO: 356093 - DNA, 120 bp, Artificial Sequence
  ENSG00000139826_11 (sequence is synthesized)
ttgcattgtattttaatttgtgcagaatgataaagaatgttccttttagaagtgtgttatgtctgtacctgtctgaagagtgacattaaactttgaaaggacttcactgctcctttacga

SEQ ID NO: 356094 - DNA, 120 bp, Artificial Sequence
  ENSG00000139826_12 (sequence is synthesized)
tattccaaatagttttttacattggaaaaactaattcttgggattctttcatacattttcatcaaaactttcagtgtgattatgtattcatatcttcagtttaatatgtcagtataatag

SEQ ID NO: 356095 - DNA, 120 bp, Artificial Sequence
  ENSG00000139826_13 (sequence is synthesized)
atattgttcaaaagtttcttgttgctaaagtggtgtaatctgttacacagatgaatagctagatgtggaaagagatatgtaaacaagaaacctttgggtattgtttcttaagtaaatatt

SEQ ID NO: 356096 - DNA, 120 bp, Artificial Sequence
  ENSG00000139826_14 (sequence is synthesized)
gggacaatcatggtaagcaaacttagttctgtaactgcatttttcaccttaaaagttaaatgaaatgcatgatggtattttattccttgaattatgcaatgcaacattttacatgtaaat

SEQ ID NO: 356097 - DNA, 120 bp, Artificial Sequence
  ENSG00000139826_15 (sequence is synthesized)
agcactggtcatatactgatgtatatggttatctgggttatatctatttttatgtaaactctattttgtttttggcaagaagtgaaattgagacttatgtgcaggttgccattgaatttt

SEQ ID NO: 356098 - DNA, 120 bp, Artificial Sequence
  ENSG00000139826_16 (sequence is synthesized)
gctctggtgaatgctgagatccagctttttcttacaaataaatgggaccctgttttccaatacaaatgtaccgtgtttttgttaggtacagtctggatcatggcatgtagaaatagaaat

SEQ ID NO: 356099 - DNA, 120 bp, Artificial Sequence
  ENSG00000139826_17 (sequence is synthesized)
ttagaattttactgcagctttgatgtgcatatttgaactttttaacatttgtaactttggtggcaaagagaattttagcttctatcgattttgtaagtcttcagctgaaccactaatagc

SEQ ID NO: 356100 - DNA, 120 bp, Artificial Sequence
  ENSG00000139826_18 (sequence is synthesized)
agtcatagtgaagattagcactacttagaattaaattaggaagtcttttatcattgcaggattgtacatactactttataaaaattctcacctttgattttaaatcccagtacctagtta

SEQ ID NO: 356101 - DNA, 120 bp, Artificial Sequence
  ENSG00000139826_19 (sequence is synthesized)
tatctaacctatcaaaggcaagatatcatttattggacttcttgaaaataaaagttacaaaatccaacaacaacaacaacaaaacaatgttcttggttttaatgttccagttgctgtgaa

SEQ ID NO: 356102 - DNA, 120 bp, Artificial Sequence
  ENSG00000139826_20 (sequence is synthesized)
atagaactcctacaatcaaaagacagttttaggaagtcttatttattgattttaaaagttttacatgtaggagtgtgggaatgaaggaattctggagctttttgacacaaaacctattac

SEQ ID NO: 356103 - DNA, 120 bp, Artificial Sequence
  ENSG00000139826_21 (sequence is synthesized)
cacatttagcagttaaatggctataggtgggaagtaggatttagatgtatagaaaagtaagaaaatcttacttagaaaaaagccccttgaaacttgcaggatttacttaataaaaataca

SEQ ID NO: 356104 - DNA, 120 bp, Artificial Sequence
  ENSG00000139826_22 (sequence is synthesized)
tgcagtcctcaaaaattagatgtaattgagctttgtgtaatattatgtcagctttaacatataatattttgaatattttagctatatttagtggctttctgcaagcaactagaacagaga

SEQ ID NO: 356105 - DNA, 120 bp, Artificial Sequence
  ENSG00000139826_23 (sequence is synthesized)
agtaatgggtcaataatcttgaccttaatttaaaactttcaatggagatagggctagaaatacttttgccaaatagcattcttattcactttatgccggtatttagaaaaaataaattat

SEQ ID NO: 356106 - DNA, 120 bp, Artificial Sequence
  ENSG00000139826_24 (sequence is synthesized)
agcaagtatgatttctaagaatgtttttctataaattactaattgtaaaaagtcttgctttttaaaacaagttggtaatgcatatcatggaaggcatattttgtatgtataaattcacca

SEQ ID NO: 356107 - DNA, 120 bp, Artificial Sequence
  ENSG00000139826_25 (sequence is synthesized)
caattaaagattattcttgtcagtccttgctatgtagaatgactattctaaatattaatgtattaaaaagaaaatacaacaaaatgtatatttagacacgagcttacatggcatacctta

SEQ ID NO: 356108 - DNA, 120 bp, Artificial Sequence
  ENSG00000139826_26 (sequence is synthesized)
tatttgtatcattctttaaagtttacaaaaaaaaaccttatgtttttatgtaatcagtcattacactagggagaaatttatcagctttagttctaaatatgctcatgaggtataaaagct

SEQ ID NO: 356109 - DNA, 120 bp, Artificial Sequence
  ENSG00000139826_27 (sequence is synthesized)
atttcttcatcagtattttgcttttatgctgctttttctttttgatactccaggtttataaactatcttttaaaattttaagccaggacttcaaaaattgtagagtacttgtttggcgtt

SEQ ID NO: 356110 - DNA, 120 bp, Artificial Sequence
  ENSG00000139826_28 (sequence is synthesized)
ccctaccttcattctcttagggttaaggagcctttctttctgcagctaagggcagaggctgtgcctagggctataccaccactagcatctgtatttgagactgtttccttagatgggtaa

SEQ ID NO: 356111 - DNA, 120 bp, Artificial Sequence
  ENSG00000139826_29 (sequence is synthesized)
gaggtggaaaacaaacttagtatcaggggtccatgaagcccatggcatcatttttgaaaatatttctagttttgtagccaaagcaattggttttagtaaaatgagacttcttcaggagtc

SEQ ID NO: 356112 - DNA, 120 bp, Artificial Sequence
  ENSG00000139826_30 (sequence is synthesized)
actcctttactgtggacccattgcttagtgggaatggaagtatatgtatctatcttgtgtattaacttctgacttatttatacaagagcagctataggagtttacaaaagaactttaagt

SEQ ID NO: 356113 - DNA, 120 bp, Artificial Sequence
  ENSG00000139826_31 (sequence is synthesized)
tattaagttactataaatttggggatcctagagtgatcttaaatatggcaagatacagctcatttagaataaaatctcacatccattattttaaagggaatgattggggggaaaaactgg

SEQ ID NO: 356114 - DNA, 120 bp, Artificial Sequence
  ENSG00000139826_32 (sequence is synthesized)
tgaaaaagaaatataaaaaggaccctaaaaagaattctgcaaaataagagaagaaataatttgtgacaggtaatagaatactagtaggatagaaacaactagaaaggaaagtgtgacaca

SEQ ID NO: 356115 - DNA, 120 bp, Artificial Sequence
  ENSG00000139826_33 (sequence is synthesized)
gtttttaaatttagatgtagaaaataatgaattaatgagattggtgaaaggaaatcatgcaaaacatttgaatgcaaagcatttctaacaaaaagtgactggagcacttgccattgcaac

SEQ ID NO: 356116 - DNA, 120 bp, Artificial Sequence
  ENSG00000139826_34 (sequence is synthesized)
aaccctgtttttgcaattaggtttttgactgttaaaatggatattttcataaaaatggtgttctgaattttgctacagggctgcttaaatttatgattacctgtagacacttgatattta

SEQ ID NO: 356117 - DNA, 120 bp, Artificial Sequence
  ENSG00000139826_35 (sequence is synthesized)
catagattacagctttggtaatatgtcactggagtaattacgctgtaatacctgttgagaattcataccatctgatgcttatatattaatttcttatgtttgtaagtttggctttgtggg

SEQ ID NO: 356118 - DNA, 120 bp, Artificial Sequence
  ENSG00000139826_36 (sequence is synthesized)
aataggtgtggagaaattaaagagtgaaggccatatttcattttttataaattatctttcaagctcagatagcttaagagcagtttatattaaggagacccttttctccttgaggatagg

SEQ ID NO: 356119 - DNA, 120 bp, Artificial Sequence
  ENSG00000139826_37 (sequence is synthesized)
gataggtaaggtaaacttgtaaaaaggatgtcacagaagtcactttttaattaagtcatgattgagatactgaactcttccactcattcttctttcccattttcctattatgtttgataa

SEQ ID NO: 356120 - DNA, 120 bp, Artificial Sequence
  ENSG00000139826_38 (sequence is synthesized)
ttatatgtatttttaaaaactgtgagaggaaaaattagtcataacccttttgggttatccacttaaatttaggtattttcatattactcaggtaaagatggaaatgacagagcacagaca

SEQ ID NO: 356121 - DNA, 120 bp, Artificial Sequence
  ENSG00000139826_39 (sequence is synthesized)
attgatagggtagaaaatgaaatgtacttctgtttattcttaatactatatatatatatacacacatagttttagcaaattggaaataatatattcatttgtatggcaagataaatgcag

SEQ ID NO: 356122 - DNA, 120 bp, Artificial Sequence
  ENSG00000139826_40 (sequence is synthesized)
agataaatgcagtcatcttaatactagtctatacatttttgccaaatggcgcaaatatacctccatttatattttgtatcttaaaatgtagtttaaaaataggaccatgtatgagacact

SEQ ID NO: 356123 - DNA, 120 bp, Artificial Sequence
  ENSG00000139826_41 (sequence is synthesized)
tttttacaaaaagtgccgtatatacatatgtaacaggtgagtgtgtgtttaacataatttataattatttctgtcagtacagcgtatatggaaaattcaagttgtttttaacatattcaa

SEQ ID NO: 356124 - DNA, 120 bp, Artificial Sequence
  ENSG00000139826_42 (sequence is synthesized)
tcaagtatgttcagtataaaataagttaatcccatttcataatgtaaatcatatttttgttatttgccatattttatttgaagtgataaaattttataactcaaatttgaatgtcatagt

SEQ ID NO: 356125 - DNA, 120 bp, Artificial Sequence
  ENSG00000139826_43 (sequence is synthesized)
tgtgtgctaaccatggcaagcaaacatttacatttgttttttacaataaatttcttttaaaatatactttctatttttctgtactgacatatgcaataaattggtacattaaaaatttga

SEQ ID NO: 356126 - DNA, 120 bp, Artificial Sequence
  ENSG00000139832_0 (sequence is synthesized)
gctctgcacccagctccttcccgggcgcgcacacgcgcttcctctcttgagctcccgggcgtccggaggcgaaggtcccggagcgttcacgagaatccgggtcccggcgagtccggggtc

SEQ ID NO: 356127 - DNA, 120 bp, Artificial Sequence
  ENSG00000139832_1 (sequence is synthesized)
cgctcctccagctgcgcccagggcgcacgagccggccagcctcggggagagggcgcgggggcgctgggggttcttacgggaagatgaggaagcccgacagcaagatcgtgctcctggggg

SEQ ID NO: 356128 - DNA, 120 bp, Artificial Sequence
  ENSG00000139832_2 (sequence is synthesized)
acatgaacgtggggaagacgtcgctgctgcagcggtatatggagcggcgcttcccggacacggtcagcacggtgggcggcgccttctacctgaagcagtggcgctcctacaacatctcca

SEQ ID NO: 356129 - DNA, 120 bp, Artificial Sequence
  ENSG00000139832_3 (sequence is synthesized)
tctgggacaccgcagggcgggagcagttccacggcctgggctccatgtactgccggggggcggccgccatcatcctcacctatgatgtgaatcaccggcagagcctggtggagctggagg

SEQ ID NO: 356130 - DNA, 120 bp, Artificial Sequence
  ENSG00000139832_4 (sequence is synthesized)
accggttcctgggcctgacagacacagccagcaaagactgcctctttgccatcgtggggaacaaagtggacctcactgaggagggggccttggcgggccaggagaaggaagagtgcagtc

SEQ ID NO: 356131 - DNA, 120 bp, Artificial Sequence
  ENSG00000139832_5 (sequence is synthesized)
ccaatatggacgctggggaccgtgtctccccaagggcacctaagcaggtgcagctggaggatgcggtggccctttataaaaagatcctcaagtacaagatgctggatgagcaggatgtgc

SEQ ID NO: 356132 - DNA, 120 bp, Artificial Sequence
  ENSG00000139832_6 (sequence is synthesized)
gaccctctttgacctggtggtgccaatgatcttacagcagagagctgagaggccgtcacacacagtggatatatccagtcataagccacccaagaggaccagatctgggtgttgtgcctg

SEQ ID NO: 356133 - DNA, 120 bp, Artificial Sequence
  ENSG00000139832_7 (sequence is synthesized)
actttcgagggcctcctggactcagactgtgcatgttgggaaggggtctgaccaggcaagctgtgatctgaaaggagcaaggaacagcaaggaattattttccagaatgacacccgcagc

SEQ ID NO: 356134 - DNA, 120 bp, Artificial Sequence
  ENSG00000139832_8 (sequence is synthesized)
agaatgttggagtggaaatgatggctggctatgaagaggaggtcaacgtgtgtggtctcctcagtctctgtcagaggggtggggaggtgggaaacaggaatcctctgcaaagcccaatct

SEQ ID NO: 356135 - DNA, 120 bp, Artificial Sequence
  ENSG00000139832_9 (sequence is synthesized)
gcagagtcgagacccctggtgctctctgccccgctgcctggcactggtcctttgcagccagccaccaacggcccccttgcccttgcagaggcagaagcctgcgtctgcacctgcacctct

SEQ ID NO: 356136 - DNA, 120 bp, Artificial Sequence
  ENSG00000139832_10 (sequence is synthesized)
gaccgtttcagcaccctgggttgttaccacgtcctacaactctgacatttcttgttctcaagcgtttctcttcactgtgagttgtctttggtcctcccacttggtacttgtatcttgatg

SEQ ID NO: 356137 - DNA, 120 bp, Artificial Sequence
  ENSG00000139832_11 (sequence is synthesized)
ctttataatcctgactctcgacgtgttcatttatacaaaatcaggaataactttgtttttatactgattgcagcaatgttggctacatgtattattaaagaggatttttggaacaactta

SEQ ID NO: 356138 - DNA, 120 bp, Artificial Sequence
  ENSG00000139835_0 (sequence is synthesized)
ggaaggacttaagcgccccggagccgggaggcgaacttgggacccgctggcctcgctcggtgcgcgcctccctccccgcatgcagcccgccgagcgctcgcgggtccccaggatcgaccc

SEQ ID NO: 356139 - DNA, 120 bp, Artificial Sequence
  ENSG00000139835_1 (sequence is synthesized)
gtacggattcgagcggcctgaggacttcgacgacgccgcctacgagaagtttttctccagctacctggtcacgctcacccgcagggcgatcaaatggtcccggctgctgcagggcggggg

SEQ ID NO: 356140 - DNA, 120 bp, Artificial Sequence
  ENSG00000139835_2 (sequence is synthesized)
cgtccccaggagccggacagtgaagcgctatgtccggaaaggggtcccgctggagcaccgtgcccgcgtctggatggtgctgagtggggcccaggcgcagatggaccagaatcccggcta

SEQ ID NO: 356141 - DNA, 120 bp, Artificial Sequence
  ENSG00000139835_3 (sequence is synthesized)
ctaccaccagcttctccagggagagagaaaccccaggctggaggacgccatcaggacagacctgaaccggaccttccccgacaacgtgaagttccggaagaccacggacccctgcttaca

SEQ ID NO: 356142 - DNA, 120 bp, Artificial Sequence
  ENSG00000139835_4 (sequence is synthesized)
gaggaccctgtacaatgtgctgctggcatatgggcaccataaccagggagtgggctactgccagggaatgaattttatagcaggatatctgattcttataacaaataatgaagaagaatc

SEQ ID NO: 356143 - DNA, 120 bp, Artificial Sequence
  ENSG00000139835_5 (sequence is synthesized)
agctggtgcgggcgaagctgccggctgtgggggccctgatggagcgtctcggtgtgctgtggacgctgctggtgtcccgctggttcatctgcctgtttgtggacatcttgcccgtggaga

SEQ ID NO: 356144 - DNA, 120 bp, Artificial Sequence
  ENSG00000139835_6 (sequence is synthesized)
cagtgcttcggatctgggactgtttgtttaacgaaggctcgaagattatcttccgggtggccctgaccttaattaagcagcaccaggagttgattttggaagccaccagcgttccagaca

SEQ ID NO: 356145 - DNA, 120 bp, Artificial Sequence
  ENSG00000139835_7 (sequence is synthesized)
tttgcgataagtttaagcagataaccaaagggagtttcgtgatggagtgtcacacgtttatgcagaaaatattttcagaacctggaagcttatccatggccaccgtcgccaagctccgcg

SEQ ID NO: 356146 - DNA, 120 bp, Artificial Sequence
  ENSG00000139835_8 (sequence is synthesized)
agagctgcagggcccggctgctggcacaggggtgagcgtgcctgtcccctgcgttgctcgtctctacactgacgatgcccctttccagagttgacactggaccaactttcactgctttcc

SEQ ID NO: 356147 - DNA, 120 bp, Artificial Sequence
  ENSG00000139835_9 (sequence is synthesized)
tttttagtgttgtaaatacttgacatcactacactttagttgtgaattttttaaaagagcagtttaaaatcaggtcattctaccagcttttgatgattagctatgaagtcatacttttta

SEQ ID NO: 356148 - DNA, 120 bp, Artificial Sequence
  ENSG00000139835_10 (sequence is synthesized)
aagaaaacttatttttacctgagagatcaataatatataaaatgtgagtgtgggtttgtatctaataaagtatgccaacacctgtgtttgtgatcagtttctcagctgactggaaattaa

SEQ ID NO: 356149 - DNA, 120 bp, Artificial Sequence
  ENSG00000139835_11 (sequence is synthesized)
atggagtgtcacacgtttatgcaggtgtgtggggctgcacgtggctcagtcccctcccagggggccccgcctcacctgcagcccgggggctgctctgaccacccggagggtgcacaggac

SEQ ID NO: 356150 - DNA, 120 bp, Artificial Sequence
  ENSG00000139835_12 (sequence is synthesized)
gggcaccagtgggcatagggcacaggatgagcctccagctctgtcctgcatctgccccctgcgcctggcctccgagggctttcctgtctatggcggccctgtcttcttggccctggcact

SEQ ID NO: 356151 - DNA, 120 bp, Artificial Sequence
  ENSG00000139835_13 (sequence is synthesized)
gcggacgctgctcctggtcctaatggctgtactcatctgctgtgtgtggtgccagaagtgtggcttcccgaggcccggcctccccactgggtcctggacctggcgcaggccgtatagact

SEQ ID NO: 356152 - DNA, 120 bp, Artificial Sequence
  ENSG00000139835_14 (sequence is synthesized)
caggtcctgatgagggcgttgtgggagctgtacctgacaggccttctgaggaagccaagacgccaggagaggctcaggcctgggagtcagtagtttcctaagagggagtggaggctcggg

SEQ ID NO: 356153 - DNA, 120 bp, Artificial Sequence
  ENSG00000139835_15 (sequence is synthesized)
tggaggctcggggccactctgggtgcagcatggcaaacgtgggcggtatttcagcagctgggccttcatcaaagagaagaccatgttggccgggcgcggtggctcacgcctgcagtccca

SEQ ID NO: 356154 - DNA, 120 bp, Artificial Sequence
  ENSG00000139835_16 (sequence is synthesized)
gcttcctcttcctccctggaaagactaaattcaacaaacttagtcctgttggattcctatttcattctccatctcgagaatagacgtctgcagggaagcagcttcagggccgttggcttc

SEQ ID NO: 356155 - DNA, 120 bp, Artificial Sequence
  ENSG00000139835_17 (sequence is synthesized)
ccacctaagttaaatcgagaaaacatattttcaaagatacaccgaaaaactggggatttgcctaactttgtcagggtagacagatggacgtcagttctctggatgtagcttctttttaaa

SEQ ID NO: 356156 - DNA, 120 bp, Artificial Sequence
  ENSG00000139835_18 (sequence is synthesized)
aatttcccaactgttttgacttgatattttatacttctccaaacattagtgatgctctgtgcgttagccctgcccttgggaaagtgtcagtctgtgaggacaagtaaacaattttctttc

SEQ ID NO: 356157 - DNA, 120 bp, Artificial Sequence
  ENSG00000139835_19 (sequence is synthesized)
ttctataaagaaacagtgtaaatccagataacaaacttatcaaaaagtcgcagaattctttgttccgtgaagcttccgggtgttgctccaactgccagagctgctcgggggccttgggtg

SEQ ID NO: 356158 - DNA, 120 bp, Artificial Sequence
  ENSG00000139835_20 (sequence is synthesized)
caggctcggtgccttctgttcactttacgatgaggaaaccaaggcacgctcagggtctggagcctgcaagtcatagcggagcagagtgtctgactccagagctggtgcatttagccattt

SEQ ID NO: 356159 - DNA, 120 bp, Artificial Sequence
  ENSG00000139842_0 (sequence is synthesized)
gcggaagggcagcttctcggcgctcgtgggccgcaccaacggcctcaccaagcccgcggccctggccgccgcgcccgccaagccggggggcgcgggcggctccaagaagctggtcatcaa

SEQ ID NO: 356160 - DNA, 120 bp, Artificial Sequence
  ENSG00000139842_1 (sequence is synthesized)
ggcgcgggcggctccaagaagctggtcatcaagaacttccgagacagacctcggctgcccgacaactacacgcaggacacgtggcggaagctgcacgaggcggtgcgggccgtgcagagc

SEQ ID NO: 356161 - DNA, 120 bp, Artificial Sequence
  ENSG00000139842_2 (sequence is synthesized)
agcacctccatcaggtacaacctcgaggagctctaccaggctgtggaaaatctctgttctcacaaagtctccccaatgctctacaagcaactgcgtcaggcctgtgaagaccacgtccag

SEQ ID NO: 356162 - DNA, 120 bp, Artificial Sequence
  ENSG00000139842_3 (sequence is synthesized)
gcacagatccttccgtttagagaagactcactagatagtgttttatttttaaagaagattaacacgtgctggcaggaccactgcagacaaatgatcatgatcagaagcatcttcctgttc

SEQ ID NO: 356163 - DNA, 120 bp, Artificial Sequence
  ENSG00000139842_4 (sequence is synthesized)
ttggaccgcacctatgtgctgcagaactccacgctgccctccatctgggatatgggattagaactgtttagaacccatattattagtgataaaatggttcagagtaaaaccattgatgga

SEQ ID NO: 356164 - DNA, 120 bp, Artificial Sequence
  ENSG00000139842_5 (sequence is synthesized)
atcctactgctgatcgagcgcgagaggagcggcgaggccgtggaccggagcctgttgcggagcctcctgggcatgctgtctgacctgcaggtgtataaagattcatttgaactgaaattt

SEQ ID NO: 356165 - DNA, 120 bp, Artificial Sequence
  ENSG00000139842_6 (sequence is synthesized)
ttggaagagactaattgcttatatgctgccgaaggccaaaggttaatgcaggaaagagaggttccagaatatcttaaccatgtaagtaaacgcttagaggaagagggagacagagtaatc

SEQ ID NO: 356166 - DNA, 120 bp, Artificial Sequence
  ENSG00000139842_7 (sequence is synthesized)
acttacttggaccacagcacacagaaaccactgattgcttgtgtggagaaacagctattaggagaacatttaacagcaattctgcagaaagggctcgaccacttactggatgagaacaga

SEQ ID NO: 356167 - DNA, 120 bp, Artificial Sequence
  ENSG00000139842_8 (sequence is synthesized)
gtgccggacctcgcacagatgtaccagctgttcagccgggtgaggggcgggcagcaggcgctgctgcagcactggagcgagtacatcaagacttttggaacagcgatcgtaatcaatcct

SEQ ID NO: 356168 - DNA, 120 bp, Artificial Sequence
  ENSG00000139842_9 (sequence is synthesized)
gagaaagacaaagacatggtccaagacctgttggacttcaaggacaaggtggaccacgtgatcgaggtctgcttccagaagaatgagcggttcgtcaacctgatgaaggagtcctttgag

SEQ ID NO: 356169 - DNA, 120 bp, Artificial Sequence
  ENSG00000139842_10 (sequence is synthesized)
acgttcatcaacaagagacccaacaagcctgcagaactgatcgcaaagcatgtggattcaaagttaagagcaggcaacaaagaagccacagacgaggagctggagcggacgttggacaag

SEQ ID NO: 356170 - DNA, 120 bp, Artificial Sequence
  ENSG00000139842_11 (sequence is synthesized)
atcatgatcctgttcaggtttatccacggtaaagatgtctttgaagcattttataaaaaagatttggcaaaaagactccttgttgggaaaagtgcctcagtcgatgctgaaaagtctatg

SEQ ID NO: 356171 - DNA, 120 bp, Artificial Sequence
  ENSG00000139842_12 (sequence is synthesized)
ttgtcaaagctcaagcatgagtgcggtgcagccttcaccagcaagctggaaggcatgttcaaggacatggagctttcgaaggacatcatggttcatttcaagcagcatatgcagaatcag

SEQ ID NO: 356172 - DNA, 120 bp, Artificial Sequence
  ENSG00000139842_13 (sequence is synthesized)
agtgactcaggccctatagacctcacagtgaacatactcacaatgggctactggccaacatacacgcccatggaagtgcacttaaccccagaaatgattaaacttcaggaagtatttaag

SEQ ID NO: 356173 - DNA, 120 bp, Artificial Sequence
  ENSG00000139842_14 (sequence is synthesized)
gcattttatcttggaaagcacagtggtcgaaaacttcagtggcaaactactttgggacatgctgttttaaaagcggagtttaaagaagggaagaaggaattccaggtgtccctcttccag

SEQ ID NO: 356174 - DNA, 120 bp, Artificial Sequence
  ENSG00000139842_15 (sequence is synthesized)
acactggtgctcctcatgttcaacgagggagatggcttcagctttgaggagataaaaatggccacggggatagaggatagtgaattgcgcagaacgctgcagtccctggcctgtggcaaa

SEQ ID NO: 356175 - DNA, 120 bp, Artificial Sequence
  ENSG00000139842_16 (sequence is synthesized)
gcacgtgtgctgattaaaagtcccaaaggaaaggaagtggaagatggagacaagttcatttttaatggagagttcaagcacaagttgtttagaataaagatcaatcaaattcagatgaag

SEQ ID NO: 356176 - DNA, 120 bp, Artificial Sequence
  ENSG00000139842_17 (sequence is synthesized)
gaaactgttgaggaacaggttagcaccactgagagagtgtttcaggatagacaatatcagattgatgctgctatcgtcagaataatgaagatgagaaagactcttggtcataatcttcta

SEQ ID NO: 356177 - DNA, 120 bp, Artificial Sequence
  ENSG00000139842_18 (sequence is synthesized)
gtttctgaattatataatcagctgaaatttccagtaaagcctggagatttgaaaaagagaattgaatctctgatagacagagactatatggagagagacaaagacaatccgaatcagtac

SEQ ID NO: 356178 - DNA, 120 bp, Artificial Sequence
  ENSG00000139842_19 (sequence is synthesized)
cactacgtggcctgacgcatctgcagacggttccccttcatgaaacactagaatgtaccctcagagcaggaagcacacctgtgccatttctgggactctgattgatccagctgtggacat

SEQ ID NO: 356179 - DNA, 120 bp, Artificial Sequence
  ENSG00000139842_20 (sequence is synthesized)
tggaaggcgaaggaagggaggtggctcctgggtcatctttcacaaggctcaagacttcaacctgcagatgtatctttttccctccagtttttcctctagttcttttaggcatttaaattg

SEQ ID NO: 356180 - DNA, 120 bp, Artificial Sequence
  ENSG00000139842_21 (sequence is synthesized)
tttctgttactctgtgcaaaataactttgagattggacaagaagatgttactaaagagaagttcctttaaaaggtcttgttcttgtgtcaaaaagctgcaagtttggtttgttctcgtgt

SEQ ID NO: 356181 - DNA, 120 bp, Artificial Sequence
  ENSG00000139842_22 (sequence is synthesized)
gtgatcatgagtgcacaatgaagaagaccctagatgctgcattttttagctctgaagattccttaggtatccctgaagacagctcgctcagatgatcagcatttagagtgaaaacaaggg

SEQ ID NO: 356182 - DNA, 120 bp, Artificial Sequence
  ENSG00000139842_23 (sequence is synthesized)
cccttcatgggtgaacattagaaagagccagggttcaaagctggcgaatggatgacgcaccctagccactggcccctctctgtttcatgtatttccaaaagttgtaaactttgatggctg

SEQ ID NO: 356183 - DNA, 120 bp, Artificial Sequence
  ENSG00000139842_24 (sequence is synthesized)
ctgctgcgtctgttcgtcagctgagttccttgtgaatctctgttttagggtttggggctagtgtgtttgtgtttccattctaagattgagtctggcagtccctgtttttttgcattgggg

SEQ ID NO: 356184 - DNA, 120 bp, Artificial Sequence
  ENSG00000139842_25 (sequence is synthesized)
taactgctctttgattttttttaattgcagtatttgtgtgattgcaataataaagtttggtttggtttttacagtcatgcgcagggacgatccttgttctctgctgtaaactgtaaaaag

SEQ ID NO: 356185 - DNA, 120 bp, Artificial Sequence
  ENSG00000139842_26 (sequence is synthesized)
tttatggagacttaaagtcttgatgttgtgaagcagaggttattttgtggaaagattaaaaggattttgttggtacctggttttgtgttgtgtatatatacatgaggttgaacagtgaaa

SEQ ID NO: 356186 - DNA, 120 bp, Artificial Sequence
  ENSG00000139842_27 (sequence is synthesized)
ggaaagttcagtagtgatgttagaagggtaactatgacaaagatacttttgagataacatttaaaagtactttatattttacataatagcatgtttcattttgattaaaagctaccaaag

SEQ ID NO: 356187 - DNA, 120 bp, Artificial Sequence
  ENSG00000139842_28 (sequence is synthesized)
gaattttgatcatggcataagtgtttaaagcaatattttctggaatataccaagtttatataatttgattttgtgctaaattattaagagtctctttttgaaacatgcgggtttgaaata

SEQ ID NO: 356188 - DNA, 120 bp, Artificial Sequence
  ENSG00000139842_29 (sequence is synthesized)
tgacaccttgtgggtttccatattaaaatcctcactctttaattgtcatttctatctttgaaaattttcatttatgagttccatgatatgtggtctaagaaagaccaaacagatttctat

SEQ ID NO: 356189 - DNA, 120 bp, Artificial Sequence
  ENSG00000139842_30 (sequence is synthesized)
tttttttttcttataagttcgttgtgtctagagattgttaatattgtaatttaatgtagacttactttgaataaaattagtttaattggccttaaaattacattaataaaactttgtgat

SEQ ID NO: 356190 - DNA, 120 bp, Artificial Sequence
  ENSG00000139842_31 (sequence is synthesized)
atgcaaatgacacattcttcataactctttagcagctttgactactagtgcactagacagaagtcagagcagggagcacctgtcccctctcaagtgattattctttcctggccacctcta

SEQ ID NO: 356191 - DNA, 120 bp, Artificial Sequence
  ENSG00000139842_32 (sequence is synthesized)
ccacaaaataccagtggggccaggtagtgacaagtgggtcttttttacttggacgattcgttgtgctgtgcctttgtttcatttgagcacagtggctcacgcctgtagtcccagctatgg

SEQ ID NO: 356192 - DNA, 120 bp, Artificial Sequence
  ENSG00000139842_33 (sequence is synthesized)
gagggcaaggtgggaggatcgtttgagcctgagttccagaccatcctgagcaccatagggagatcctgtttccattttagtttatttatttttaattgaggtggagtcttgctctgttgc

SEQ ID NO: 356193 - DNA, 120 bp, Artificial Sequence
  ENSG00000139842_34 (sequence is synthesized)
gagccaccatgcccggcctgcctgtttctgttttataaaagaaaggaaaatctatttatatctattctcttatttagcaatatttaatgttttattgttaaaggtcagtgtggtaaaaca

SEQ ID NO: 356194 - DNA, 120 bp, Artificial Sequence
  ENSG00000139842_35 (sequence is synthesized)
aatagtatagaagaaatcattgaaaaagaaacagcacttagacagaaatgctgtaaaagtggaaaggagaaggtgaaattacttgcaggttagatggttgcatacccaggtcatctaagg

SEQ ID NO: 356195 - DNA, 120 bp, Artificial Sequence
  ENSG00000139842_36 (sequence is synthesized)
agcaaatgaaaatctgtgactgaagaaagaattcaccaagttaaccagacacaaaattaacaaaaacatcagtagctttcctataaatataggctataatggagggtcattttttatttt

SEQ ID NO: 356196 - DNA, 120 bp, Artificial Sequence
  ENSG00000139842_37 (sequence is synthesized)
tatttagagacagggtcttaactgtcacctggactggagtgcagtggcatgatcatgtttcacggcagcctctaccttctgggctcaagcgatcctctcttctcagccacctgagtagct

SEQ ID NO: 356197 - DNA, 120 bp, Artificial Sequence
  ENSG00000139842_38 (sequence is synthesized)
gggcctacaggtgtacatcaccacgcccagataatttttattgtattttttatagaggcagtgtcttgctatgttgccaaggctgttcttgtactcctggcctcaagcgaacctcctacc

SEQ ID NO: 356198 - DNA, 120 bp, Artificial Sequence
  ENSG00000139842_39 (sequence is synthesized)
gattacaggcatgagacactgcacctgaccagaagtcattttttcaatagcaacccccaaaaaagataaaatacctagtaacaaatagggaaacacctatgtgaaaggtattataacatt

SEQ ID NO: 356199 - DNA, 120 bp, Artificial Sequence
  ENSG00000139842_40 (sequence is synthesized)
gtgaaaggtattataacattactaaggaacacaggccctgaataagtgaaagttctgttgattctcacattttgctatacagtatcttaagatgtaaaaccttcctttaaaacacaagcg

SEQ ID NO: 356200 - DNA, 120 bp, Artificial Sequence
  ENSG00000139842_41 (sequence is synthesized)
gattctaaagttaaaacagaaaagcaaatatgccagactagtcaaattgttttaaattctgctgtttttagaacattgtaattgaaacagcatgatgctggccctttaaaaagattcctg

SEQ ID NO: 356201 - DNA, 120 bp, Artificial Sequence
  ENSG00000139842_42 (sequence is synthesized)
gaacaagaaagtccacaaataagccaaatacacaggaactcggcgtggcacaaaggggccgtgtgtgatcaggaactggaactttgcaacaactacccatgctcagaagtttgggccacc

SEQ ID NO: 356202 - DNA, 120 bp, Artificial Sequence
  ENSG00000139842_43 (sequence is synthesized)
ttgaaaagagaaaagttggattagactcctttttatactaagggaagttccaagtggtcaagtatttacgtgtaaaaaaatacatatatatgaaaccataatcataagatactttttttg

SEQ ID NO: 356203 - DNA, 120 bp, Artificial Sequence
  ENSG00000139842_44 (sequence is synthesized)
taaattgactattattgtataaatttatagagtataaagtgatcttataaattatgcatacattgtggactagtcaagctagttacatccatcacctcaaatacttaacatttttgtagt

SEQ ID NO: 356204 - DNA, 120 bp, Artificial Sequence
  ENSG00000139842_45 (sequence is synthesized)
gagaacatctgaaatttactcttagcaattttgaaatgtacaatactcaatttttgactgtattcaccatgctgtacaatagaactcagaaaaagaaaaatatagtcctcctttctaaga

SEQ ID NO: 356205 - DNA, 120 bp, Artificial Sequence
  ENSG00000139842_46 (sequence is synthesized)
attcatcccgcatcctgctgggaaacagcgtccatccgacacagcaccgcccacagcgggccctcggcgtggcccgcaggcccttcggaccgcctgggagcgcggccacacgtgccagca

SEQ ID NO: 356206 - DNA, 120 bp, Artificial Sequence
  ENSG00000139842_47 (sequence is synthesized)
agtgagggcagcgacctgggaccgccgcgtctacttacaccgcgacgactccgcgatccacggacaccgcccggcccccacggcggccctgcaggggagaactcgggccgccttcccgag

SEQ ID NO: 356207 - DNA, 120 bp, Artificial Sequence
  ENSG00000139842_48 (sequence is synthesized)
tcccggccgccgctgttcggctcgcgcggctgcccgccggggacccgaacggaagaagggtggcgaggcgggaaaggaaaaggcctgagggtccaaggcaggaggggacacacggaacac

SEQ ID NO: 356208 - DNA, 120 bp, Artificial Sequence
  ENSG00000139842_49 (sequence is synthesized)
aattttggcaagtatttactctcacttgacttgagaagtacttaccttagaaaatcagatatttgtttttttgtcatatagtcattttgggaaggttccagaatgttcctgtacaatgtt

SEQ ID NO: 356209 - DNA, 120 bp, Artificial Sequence
  ENSG00000139842_50 (sequence is synthesized)
ggggcgccggccgggtcgggggtggctacgcggggcgcttcgcggcgcgccctgagccgcccgctctccctccgccctgcagacagacctcggctgcccgacaactacacgcaggacacg

SEQ ID NO: 356210 - DNA, 120 bp, Artificial Sequence
  ENSG00000139842_51 (sequence is synthesized)
caggtgggtcttagccttgaaacaccaggtgtctagccagcagcaaggagtggagcaggaagctcggacaggcggctgactttggtcatgagggtgaagacagagggtcttggtttctct

SEQ ID NO: 356211 - DNA, 120 bp, Artificial Sequence
  ENSG00000139842_52 (sequence is synthesized)
ctgacgactggaggttgagcctggagcggctctttccagcgctgcagttgaaactcggagaaagactgcctgctgcccgtggggtcgcagccctgaggctgtgcgtcccctgtggaatgg

SEQ ID NO: 356212 - DNA, 120 bp, Artificial Sequence
  ENSG00000139842_53 (sequence is synthesized)
cttgctcagcctcccggcctcctgagcacatagcactcatcgtccgtcatctttcggggactgtatacaccaggggttctggggcctttcctcagcagcgttcgcggccacggaccccac

SEQ ID NO: 356213 - DNA, 120 bp, Artificial Sequence
  ENSG00000139842_54 (sequence is synthesized)
cctggggaccggctcggcgacgcgctcgggctgagggggcccggggtctttctgccggggccccgtcctctcagccgggacgccagcggctctgattacagacctcggctgcccgacaac

SEQ ID NO: 356214 - DNA, 120 bp, Artificial Sequence
  ENSG00000139842_55 (sequence is synthesized)
tcctgcaagccgactttggacaaaagctgtgtccggtctcaccgtctgatttgtcttgttctctgttaatgtagtgtttcattcttctcacattcatacataaaagtgatgtcgtgcctt

SEQ ID NO: 356215 - DNA, 120 bp, Artificial Sequence
  ENSG00000139842_56 (sequence is synthesized)
tgcattggctttctgtgataggcaacaaagtcccatcgacttggcgacttatggagacacccacttatcagcgcacagttgtgtctgtcaggaggccaggcaggattcagtggattctat

SEQ ID NO: 356216 - DNA, 120 bp, Artificial Sequence
  ENSG00000139842_57 (sequence is synthesized)
gctcagtctcacgggcagagtcaaggtgtcagccaggttggggcctcacctgaggtctttgctagcacgggcaggcagttggcggaagccagttcctgtggtagtgggactgagggccct

SEQ ID NO: 356217 - DNA, 120 bp, Artificial Sequence
  ENSG00000139842_58 (sequence is synthesized)
gccttctgtcccgtgttgcttggtgtcactctcagctccacatgcacaggtccttgcctctcctctcacagcacgactcttttctgcttctagaccagcaggagaatctgcctgtctgac

SEQ ID NO: 356218 - DNA, 120 bp, Artificial Sequence
  ENSG00000139842_59 (sequence is synthesized)
ctgctgagatagggccttatatgatgtaacccgtaacccagtcaaggaatgatgaccttcgtattcacagcctcgttcacagttgcgtgtgaggcatcctccacgtggggacagggcagg

SEQ ID NO: 356219 - DNA, 120 bp, Artificial Sequence
  ENSG00000139865_0 (sequence is synthesized)
atgtccacaatcccgagacactttggcctgaaatacaaagaggaatcgtatatgtttaaagagcttgagaaagttcggcaggaaactaaaaaggattttctccgattcaagcagaagttg

SEQ ID NO: 356220 - DNA, 120 bp, Artificial Sequence
  ENSG00000139865_1 (sequence is synthesized)
gcctccaagccggctgtagatgaaagcccagtccacagcctccatgcccccggcccggcccgccccgcgcgcgtttcctgcgccgcagcccggacgtcgagaagatacccttcgcttaaa

SEQ ID NO: 356221 - DNA, 120 bp, Artificial Sequence
  ENSG00000139865_2 (sequence is synthesized)
ggccctgcgatgtccgcggccgccctcctgcaggaggtgctcggaggcgcgccgcgtccctcgggcctgggtgaggcggcggctccaggcaagacccggtcgtttcgcccccgggacttt

SEQ ID NO: 356222 - DNA, 120 bp, Artificial Sequence
  ENSG00000139865_3 (sequence is synthesized)
tacttgcggagctccgcgttcctacggcaccaggccctgaaaaagcccccagtcatcgcctcggggttcggcacggccagacccgtggtcctgctgcctccgcccgagccacccgtgaag

SEQ ID NO: 356223 - DNA, 120 bp, Artificial Sequence
  ENSG00000139865_4 (sequence is synthesized)
cgcagagcgcgcggggtcttggagagctcgcggcacgcggctcccaggcgggtcttccacttgggaagggagcgcgaacagagccaggaggtagctcctctcgcagggccctgcatggcc

SEQ ID NO: 356224 - DNA, 120 bp, Artificial Sequence
  ENSG00000139865_5 (sequence is synthesized)
aaagagaggaaggccagctccgtctccgcagaggacggctacatggaggccagcagcgggcggaggaaagtgaggatccgcagcaacttcgtgagcgagagcggggcccgcgaggcgcgg

SEQ ID NO: 356225 - DNA, 120 bp, Artificial Sequence
  ENSG00000139865_6 (sequence is synthesized)
gaagcggcggggttaggagcccagggagaacaggagagctggccgcccagcgacgcgcgggaggccgcctggcaggcgctgctgccctcccgcgtgatccccacgtccatcgaagagatc

SEQ ID NO: 356226 - DNA, 120 bp, Artificial Sequence
  ENSG00000139865_7 (sequence is synthesized)
atcgcctctctgcagtccgaggcccagctggcctccgaccagaccatcaaagagctcatacggagcgtccttggccagaactacgacattacaatggaagatatttctttaatgggaaaa

SEQ ID NO: 356227 - DNA, 120 bp, Artificial Sequence
  ENSG00000139865_8 (sequence is synthesized)
atgtacctcaaaacatcacctatgcaagcagaaacacctgagatacaagcagagtataaattccagatgggtgctgaggaatcgcaaatgagcgtgcataaggaactttctgaaaccatg

SEQ ID NO: 356228 - DNA, 120 bp, Artificial Sequence
  ENSG00000139865_9 (sequence is synthesized)
tcaagtattctccagattgaacaagaggatatagaatggggaccctcagaagcagaaagcatagtatttaaacctcaggaaatttcgcaagttcagccagcagaggaattaagtaaacct

SEQ ID NO: 356229 - DNA, 120 bp, Artificial Sequence
  ENSG00000139865_10 (sequence is synthesized)
ttggaagatggacagcccacaagtgattcaaaagaagccaagtgggtgtctttaacggcaaaatcaccagaattcttgcaaatcgaaggaaaagaaattaagcgaatgcggaaacgtaaa

SEQ ID NO: 356230 - DNA, 120 bp, Artificial Sequence
  ENSG00000139865_11 (sequence is synthesized)
tcactgagaccaagaaagtcttcaaaacctctttgtgataaaaaactacataaaaaaattccacaagactactccatgccgcaccttcatgatctgtgcaccaccatcccagcccaggag

SEQ ID NO: 356231 - DNA, 120 bp, Artificial Sequence
  ENSG00000139865_12 (sequence is synthesized)
ctgcctgttgacttgcgcctggcttctcgagtgtatcacactgctaacaggaaaggccacgataccctgcttggaaaatttggaacctctttcttagatgatcgctttacagatgaagaa

SEQ ID NO: 356232 - DNA, 120 bp, Artificial Sequence
  ENSG00000139865_13 (sequence is synthesized)
caaacagatagaatattgtatggaattcctgttatggatgacaaccaagaatatgtccatattcctccgacaccgcaagggataccacctgaattggcacaaggaactagagagcgtgct

SEQ ID NO: 356233 - DNA, 120 bp, Artificial Sequence
  ENSG00000139865_14 (sequence is synthesized)
cacaaaccacacttggaagtcttgggagaggaaatgtatgcttatccagaattcacgaagttgttttggaatacagctgcacctaaattctctgttccagaatctgtcatgaaggaaact

SEQ ID NO: 356234 - DNA, 120 bp, Artificial Sequence
  ENSG00000139865_15 (sequence is synthesized)
ctatatccaaaatatgagagtgttcaagcaagcagacttttaactgataaattgtcatataaaagcagtgtcattactttacatcaacatagcagaacaaatttttggtgtttcttacca

SEQ ID NO: 356235 - DNA, 120 bp, Artificial Sequence
  ENSG00000139865_16 (sequence is synthesized)
agaaaatctgcatcatttgaaagtatccaaaaatggtttagtgcacaacctacacaactaaggcgagtaaaatcttctgtagacttgaggaaggagaagatcatagctcctttggaaatc

SEQ ID NO: 356236 - DNA, 120 bp, Artificial Sequence
  ENSG00000139865_17 (sequence is synthesized)
aagaatgatatgcaaagcagtataaaagaggttatgtttcagaaagcaaaggaattgaaacgtcagctccagctcactaagcaaaataaaactgaggagcccaactatgtgaaagaaagt

SEQ ID NO: 356237 - DNA, 120 bp, Artificial Sequence
  ENSG00000139865_18 (sequence is synthesized)
atagatgacatctttgataacatgtgcgaaaaacacagtttgagaaatctctctttgactctcattgaagcgtctaaaaaagctggcattagttacattgtttatcccaagaaaaagaag

SEQ ID NO: 356238 - DNA, 120 bp, Artificial Sequence
  ENSG00000139865_19 (sequence is synthesized)
atgagatggaagaaaagattgaaacaacaaaaacttatattcgtgcatgaagagttatccaagcctccaaaatctcttgaaagatcagcatctcatggaatacttccgggacagaagaaa

SEQ ID NO: 356239 - DNA, 120 bp, Artificial Sequence
  ENSG00000139865_20 (sequence is synthesized)
tatttgttcaaagttccattatatgaacgtcaaatacggtgtcccagtttacctttgtatttaaattttgaaaaattcgtccaagctaagggaggaattccagaaaatattgatcctcgg

SEQ ID NO: 356240 - DNA, 120 bp, Artificial Sequence
  ENSG00000139865_21 (sequence is synthesized)
acatgggctcttgataggctcattgagtacaaagatgcgagcatacctgtaaaagagaaagatgataaaatatcagttcctgaagacccacctgaaagagtgaaagaaccaccaaaacta

SEQ ID NO: 356241 - DNA, 120 bp, Artificial Sequence
  ENSG00000139865_22 (sequence is synthesized)
aaattaaatgattatgtggagtctgatcttccacaagaggtcattaaatattatgaatctgaagtgaagattttgactgaagaaataaatgataagacaaaatatcctgcatttgcatat

SEQ ID NO: 356242 - DNA, 120 bp, Artificial Sequence
  ENSG00000139865_23 (sequence is synthesized)
tgtaggcgtggagctatttataggaaactgggaaagttgcagagtgccatgaatgatctgcagagagtaatactcttggaaccattgtttctcaatgcctattggcatcgacatttaatt

SEQ ID NO: 356243 - DNA, 120 bp, Artificial Sequence
  ENSG00000139865_24 (sequence is synthesized)
cagaggcatatttgtcaaaagcagaaatttacaggggaaaaaaagacataactttggcaattctaaactatacccaggcaattaaatccacgcccacagatgctgatatctatttcagga

SEQ ID NO: 356244 - DNA, 120 bp, Artificial Sequence
  ENSG00000139865_25 (sequence is synthesized)
ggggtgagatgtatgaaataacaaacaaagtactggccattgatgacttttcgaaatgtattttttatgatcccaaaagaacagatgcattattgaaacgtgggctgttttattgtgaaa

SEQ ID NO: 356245 - DNA, 120 bp, Artificial Sequence
  ENSG00000139865_26 (sequence is synthesized)
atgaaaactggtttgcagccatagaggattttacagccttgttaaatatagatcaccaaaattctcaagcaaggacataccgagggattgcatatgttaaatggaaattttataaagaag

SEQ ID NO: 356246 - DNA, 120 bp, Artificial Sequence
  ENSG00000139865_27 (sequence is synthesized)
caactcaagatttttctgctgcaattcacttagatcctaataactggttagcgttgtattatcgaggttgcttattcagaaagagtaacccttttagagcgctacaggattatagtgttt

SEQ ID NO: 356247 - DNA, 120 bp, Artificial Sequence
  ENSG00000139865_28 (sequence is synthesized)
cagcactcataaatgatggctatgagaatcttggttgttttctacatcggggaatagtctatgcacatctaaaactttggctgctggcaatttgtgactttgaaactgtcatttctctag

SEQ ID NO: 356248 - DNA, 120 bp, Artificial Sequence
  ENSG00000139865_29 (sequence is synthesized)
aaagaactattactttggcttatgtaaatattggcctcatacatctgctacacctggataactacacggaagctatttggcaattttctgaggctattagaattgatcctttatgtattc

SEQ ID NO: 356249 - DNA, 120 bp, Artificial Sequence
  ENSG00000139865_30 (sequence is synthesized)
aaagctatctttgtcgggcggaaacctattttaagttgcataaattgaaaaaggcagtaaatgaattgtctcgtgctatccaccttcagccagatggaatccaattatacataagaagag

SEQ ID NO: 356250 - DNA, 120 bp, Artificial Sequence
  ENSG00000139865_31 (sequence is synthesized)
gacaatatcttcttatgatgaaatattatgatcttgcaaagtttactatttatcaaatagcagaaatggacaaaggtctcagtgagttgagtcctatgcagcaagcccttatttattcat

SEQ ID NO: 356251 - DNA, 120 bp, Artificial Sequence
  ENSG00000139865_32 (sequence is synthesized)
tttgtgaaaaccatgacaaggccattgaggtcttggacggaatcagctggaatagagctgagatgaccatgtgtgctctattagcaaaagttcaaatgaaggccaagagaaccaaggaag

SEQ ID NO: 356252 - DNA, 120 bp, Artificial Sequence
  ENSG00000139865_33 (sequence is synthesized)
ctgtggaagtgcttaagaaggctttggatgccatttctcattctgataaaggaccagatgccacagcaatttcagcagactgtctgtataacttgggtctttgttacatggaggaaggca

SEQ ID NO: 356253 - DNA, 120 bp, Artificial Sequence
  ENSG00000139865_34 (sequence is synthesized)
atttacaaatggcttttgattcttttacaaaagctgtgaaagcaaatccagattttgcagaaagcttttatcagcgagggctttgtaaagtgaaactccacaaggatagctcgattctgg

SEQ ID NO: 356254 - DNA, 120 bp, Artificial Sequence
  ENSG00000139865_35 (sequence is synthesized)
attttaatcgtgcaattaccctcaatccaaaacattaccaggcatatttaagccgagtagcattctatggtttaaaaggcaggtattccaaagcaatcttgaattgtaacaaggctatta

SEQ ID NO: 356255 - DNA, 120 bp, Artificial Sequence
  ENSG00000139865_36 (sequence is synthesized)
aaatttaccctgaaagcgtacgtgcctatctctacagaggagttctgaaatactacaacaagacttataagctagcaattacagatttaactacagctatcagcatggacaaaaatagtt

SEQ ID NO: 356256 - DNA, 120 bp, Artificial Sequence
  ENSG00000139865_37 (sequence is synthesized)
atacagcattttataacagagcattatgttacaccaagataagggaacttcaaatggcattaacagattatggaattgtgctgcttcttgatgctacagaaactgtaaaactaaatacct

SEQ ID NO: 356257 - DNA, 120 bp, Artificial Sequence
  ENSG00000139865_38 (sequence is synthesized)
tccttaatcgtggactcatctacgtagaactaggccagtatggctttgcactagaggattttaaacaagctgcactgataagccggactaacgggagcctttgtcacgccactgccatgt

SEQ ID NO: 356258 - DNA, 120 bp, Artificial Sequence
  ENSG00000139865_39 (sequence is synthesized)
gccatcacagaattaatgagtttgaagaagctgtcaatttctttacttgggctcttaaaattaacccatgttttctggatgcttatgttggacggggaaattcttacatggaatacggtc

SEQ ID NO: 356259 - DNA, 120 bp, Artificial Sequence
  ENSG00000139865_40 (sequence is synthesized)
atgatgaagccaccaagcaagcacagaaagactttctgaaagcactgcatattaatccagcatacataaaagccagaattagttttggctataatttgcaggcccaaggaaaattccaga

SEQ ID NO: 356260 - DNA, 120 bp, Artificial Sequence
  ENSG00000139865_41 (sequence is synthesized)
aagcttggaaccactttaccattgccatagatactgatccaaagaactacctagcctatgaaggaagagctgtggtctgtcttcagatgggtaataattttgctgcaatgcaggatatta

SEQ ID NO: 356261 - DNA, 120 bp, Artificial Sequence
  ENSG00000139865_42 (sequence is synthesized)
atgctgccatgaagatcagtactacagcagaattcttaacaaatcgtggggtgattcatgagtttatgggccacaaacagaatgcaatgaaagactaccaagatgcaattactctaaacc

SEQ ID NO: 356262 - DNA, 120 bp, Artificial Sequence
  ENSG00000139865_43 (sequence is synthesized)
ccaagtactcgctggcttactttaatgcaggaaatatctactttcaccacaggcagttttcccaggccagtgactacttctcaaaagctttaaaatttgatccagaaaatgaatatgttc

SEQ ID NO: 356263 - DNA, 120 bp, Artificial Sequence
  ENSG00000139865_44 (sequence is synthesized)
tcatgaatcgagctattacaaatacaatattaaagaaatatgaagaagcaaaagaagattttgcaaatgtaattgaaagctgtcccttttgggctgcagtatattttaatagagcacatt

SEQ ID NO: 356264 - DNA, 120 bp, Artificial Sequence
  ENSG00000139865_45 (sequence is synthesized)
tctactactgcttaaagcaatatgaactagctgaggaagaccttaataaagccctgtctttgaagcctaatgatgctctagtatataattttagagcaaaagttcgtggtaaaataggtc

SEQ ID NO: 356265 - DNA, 120 bp, Artificial Sequence
  ENSG00000139865_46 (sequence is synthesized)
tgattgaggaagctatggctgactataaccaagcacttgatcttgaagactatgcctcagttatatgattacatagactgtggttgctatagtagtttacacagctgttctctctgaaac

SEQ ID NO: 356266 - DNA, 120 bp, Artificial Sequence
  ENSG00000139865_47 (sequence is synthesized)
ggaaacatatttgttgtctaaaaggttctaccattttcattattgtattcgttatgcttagtcttccatataaccttctatgcattttaataaaatgtttgttatacattaattataaaa

SEQ ID NO: 356267 - DNA, 77 bp, Artificial Sequence
  ENSG00000139865_48 (sequence is synthesized)
aggaaaaagggtgcggggagacagagcattaggaaaaacagctaatgcgtgctgggcttaatacttaggtggtgggt

SEQ ID NO: 356268 - DNA, 120 bp, Artificial Sequence
  ENSG00000139865_49 (sequence is synthesized)
acagctaatgcgtgctgggcttaatacttaggtggtgggttggtaggtgcagcaaaccaccatggcacgtgtttacctttgtaacaaacctgtatatcctgcatatgtaccctggtactt

SEQ ID NO: 356269 - DNA, 120 bp, Artificial Sequence
  ENSG00000139865_50 (sequence is synthesized)
tttaaaatattttctttaattctttttgaaataatactatacattgtagaaaaagtgtcactgaccttttcatcaatccttgctgacaatgtattaaacagtatacagattaaaaaataa

SEQ ID NO: 356270 - DNA, 120 bp, Artificial Sequence
  ENSG00000139865_51 (sequence is synthesized)
gggggtgcaaccttctcttcaggagtgaatcctcttcaaactcttcacagaaggatgtcaattctgtcccccctccccccaacctgtcccagggatgagatggattttacatcttgaact

SEQ ID NO: 356271 - DNA, 120 bp, Artificial Sequence
  ENSG00000139865_52 (sequence is synthesized)
tgagagcttcagactagaaaagggaaaaagccccacttttgcttcgtcactagaaaccgggtcatctgagtcagccgagccaagtgacgttaggccgacccgggccccgggctagcagag

SEQ ID NO: 356272 - DNA, 120 bp, Artificial Sequence
  ENSG00000139865_53 (sequence is synthesized)
cggaggcgctgccacgaaactcgtacctgcggctaagagcaggaaaaccctttcctgtatgccatctgttttctgtggggccctgagtgatgaggagaggaacaaggattcatggaagtg

SEQ ID NO: 356273 - DNA, 120 bp, Artificial Sequence
  ENSG00000139865_54 (sequence is synthesized)
gctacaaaattgattcatattgtgaagaaatgggctctaccatgtttccttcatgagcagtgtgtattctatatgaatctactcccagtgcaaggaacactagtcaatttttggcatgag

SEQ ID NO: 356274 - DNA, 120 bp, Artificial Sequence
  ENSG00000139865_55 (sequence is synthesized)
gctaaggaaggcagctgaggaaggaagaaaaatcttgggttcctgttgacattgctctgtccctgaaatcttctacctctgaatttcttgttatgaggcaataaacactccaattcttta

SEQ ID NO: 356275 - DNA, 120 bp, Artificial Sequence
  ENSG00000139865_56 (sequence is synthesized)
agtcgagcccacccggcccctaggcacaggaaaggcctgttggacactcgccgagcggcggggccaagctcaccgccacctgaattggagcggaggcgccctcgatgccgggtcaaattt

SEQ ID NO: 356276 - DNA, 120 bp, Artificial Sequence
  ENSG00000139865_57 (sequence is synthesized)
caagcctccaaaatctcttgaaagattcctcgaggtctgaacaagaaccactgacgcagaacgtgaaaactagaagcgttcattagcgaccaccctttgtttgactgatgaggaaatcaa

SEQ ID NO: 356277 - DNA, 120 bp, Artificial Sequence
  ENSG00000139865_58 (sequence is synthesized)
ggctgatggatacaattggacaaactgattgtgcaactgactccacacaaatctcatttaatcagctttcctaatcacctatctctctatctacctatctatttcttgatcatccgcaaa

SEQ ID NO: 356278 - DNA, 120 bp, Artificial Sequence
  ENSG00000139865_59 (sequence is synthesized)
attgattggcgatagaagacactacctatctgtagtactgacttgaattgaaatgaaaaatcaggcaagtagtggattcaaatggaattttcactttaagccttctttggaagtaatata

SEQ ID NO: 356279 - DNA, 120 bp, Artificial Sequence
  ENSG00000139865_60 (sequence is synthesized)
tttttgtttttcaagtccggaacaaagaaagaacaaagatgatttgatgtagtgcagcagtttgaagataggtgactttctgagatgctatttctggcaattgtggtggtaaatccttca

SEQ ID NO: 356280 - DNA, 120 bp, Artificial Sequence
  ENSG00000139865_61 (sequence is synthesized)
acatttggatcactgagttcttcgattttcttccttctcttcagaaattgaagttgtaaaattgtttgagaagttttatcagttcctggatgcatttgaataacactaaccagaggacca

SEQ ID NO: 356281 - DNA, 120 bp, Artificial Sequence
  ENSG00000139865_62 (sequence is synthesized)
agctagtcacaacacaaagcgatggtcacttggagtcatggatccaatatgcacacagttgtggaagaaatgcagagacaatttaatgtgttttcaatgaagaattggcagttgtggaag

SEQ ID NO: 356282 - DNA, 120 bp, Artificial Sequence
  ENSG00000139865_63 (sequence is synthesized)
gaatactgcaggtcctcttctactctcaaaggcaaggaaacttggagctgatttaattattctgcagtgttctactgcaagttgaccagtaagaacatcttcgtttcactcatcaatgaa

SEQ ID NO: 356283 - DNA, 120 bp, Artificial Sequence
  ENSG00000139865_64 (sequence is synthesized)
gctctctactggataggaaggccgccgtccatctccagccataggtttaatgaagatgagaacctcagaattgctgcagccatcttgctaccaaggcagaacaaatgagaaagtcagtat

SEQ ID NO: 356284 - DNA, 120 bp, Artificial Sequence
  ENSG00000139874_0 (sequence is synthesized)
agctcacaaatcaagcctcagaaagagctgacatcctagctcttcccggaaaaactcgaatgtcgccctgccgttcctggggttggtgacaggtctggtcatcgcacggcggcagctcct

SEQ ID NO: 356285 - DNA, 120 bp, Artificial Sequence
  ENSG00000139874_1 (sequence is synthesized)
cacctggatttagaagagctggcgtccccgcccgcccaagcctttaaactctcgtctgccagaacccgccaactctccaggcttagggccagtttccgcgattctaagagtaattgcgtg

SEQ ID NO: 356286 - DNA, 120 bp, Artificial Sequence
  ENSG00000139874_2 (sequence is synthesized)
ggcacctgtgctggggccaggcgcaaagaagggagttggtctgcgcgaagatcgtcaacctgctaacagaccgcacatgcactttgcaccgaccatctacgtctcagtctggaggttgcg

SEQ ID NO: 356287 - DNA, 120 bp, Artificial Sequence
  ENSG00000139874_3 (sequence is synthesized)
cactttggctgctgacgcgctggtggtgcctattaatcatttaccagtccagagccgcgccagttaatggctgtgccgtgcggtgctcccacatcctggcctctcctctccacggtcgcc

SEQ ID NO: 356288 - DNA, 120 bp, Artificial Sequence
  ENSG00000139874_4 (sequence is synthesized)
tgtgcccgggcaccccggagctgcaaactgcagagcccaggcaaccgctgggctgtgcgccccgccggcgccggtaggagccgcgctccccgcagcggttgcgctctacccggaggcgct

SEQ ID NO: 356289 - DNA, 120 bp, Artificial Sequence
  ENSG00000139874_5 (sequence is synthesized)
gggcggctgtgggctgcaggcaagcggtcgggtggggagggagggcgcaggcggcgggtgcgcgaggagaaagccccagccctggcagccccactggcccccctcagctgggatgttccc

SEQ ID NO: 356290 - DNA, 120 bp, Artificial Sequence
  ENSG00000139874_6 (sequence is synthesized)
caatggcaccgcctcctctccttcctcctctcctagccccagcccgggcagctgcggcgaaggcggcggcagcaggggccccggggccggcgctgcggacggcatggaggagccagggcg

SEQ ID NO: 356291 - DNA, 120 bp, Artificial Sequence
  ENSG00000139874_7 (sequence is synthesized)
aaatgcgtcccagaacgggaccttgagcgagggccagggcagcgccatcctgatctctttcatctactccgtggtgtgcctggtggggctgtgtgggaactctatggtcatctacgtgat

SEQ ID NO: 356292 - DNA, 120 bp, Artificial Sequence
  ENSG00000139874_8 (sequence is synthesized)
cctgcgctatgccaagatgaagacggccaccaacatctacatcctaaatctggccattgctgatgagctgctcatgctcagcgtgcccttcctagtcacctccacgttgttgcgccactg

SEQ ID NO: 356293 - DNA, 120 bp, Artificial Sequence
  ENSG00000139874_9 (sequence is synthesized)
gcccttcggtgcgctgctctgccgcctcgtgctcagcgtggacgcggtcaacatgttcaccagcatctactgtctgactgtgctcagcgtggaccgctacgtggccgtggtgcatcccat

SEQ ID NO: 356294 - DNA, 120 bp, Artificial Sequence
  ENSG00000139874_10 (sequence is synthesized)
caaggcggcccgctaccgccggcccaccgtggccaaggtagtaaacctgggcgtgtgggtgctatcgctgctcgtcatcctgcccatcgtggtcttctctcgcaccgcggccaacagcga

SEQ ID NO: 356295 - DNA, 120 bp, Artificial Sequence
  ENSG00000139874_11 (sequence is synthesized)
cggcacggtggcttgcaacatgctcatgccagagcccgctcaacgctggctggtgggcttcgtgttgtacacatttctcatgggcttcctgctgcccgtgggggctatctgcctgtgcta

SEQ ID NO: 356296 - DNA, 120 bp, Artificial Sequence
  ENSG00000139874_12 (sequence is synthesized)
cgtgctcatcattgctaagatgcgcatggtggccctcaaggccggctggcagcagcgcaagcgctcggagcgcaagatcaccttaatggtgatgatggtggtgatggtgtttgtcatctg

SEQ ID NO: 356297 - DNA, 120 bp, Artificial Sequence
  ENSG00000139874_13 (sequence is synthesized)
ctggatgcctttctacgtggtgcagctggtcaacgtgtttgctgagcaggacgacgccacggtgagtcagctgtcggtcatcctcggctatgccaacagctgcgccaaccccatcctcta

SEQ ID NO: 356298 - DNA, 120 bp, Artificial Sequence
  ENSG00000139874_14 (sequence is synthesized)
tggctttctctcagacaacttcaagcgctctttccaacgcatcctatgcctcagctggatggacaacgccgcggaggagccggttgactattacgccaccgcgctcaagagccgtgccta

SEQ ID NO: 356299 - DNA, 120 bp, Artificial Sequence
  ENSG00000139874_15 (sequence is synthesized)
cagtgtggaagacttccaacctgagaacctggagtccggcggcgtcttccgtaatggcacctgcacgtcccggatcacgacgctctgagcccgggccacgcaggggctctgagcccgggc

SEQ ID NO: 356300 - DNA, 120 bp, Artificial Sequence
  ENSG00000139874_16 (sequence is synthesized)
cacgcaggggccctgagccaaaagagggggagaatgagaagggaaggccgggtgcgaaagggacggtatccagggcgccagggtgctgtcgggataacgtggggctaggacactgacagc

SEQ ID NO: 356301 - DNA, 120 bp, Artificial Sequence
  ENSG00000139874_17 (sequence is synthesized)
ctttgatggaggaacccaagaaaggcgcgcgacaatggtagaagtgagagctttgcttataaactgggaaggctttcaggctacctttttctgggtctcccactttctgttccttcctcc

SEQ ID NO: 356302 - DNA, 120 bp, Artificial Sequence
  ENSG00000139874_18 (sequence is synthesized)
tcccgccagtgcagatcacgaactcattaacaactcattctgatcctcagcccctccagtcgttatttctgtttgtttaagctgagccacggataccgccacgggtttccctcggcgtta

SEQ ID NO: 356303 - DNA, 120 bp, Artificial Sequence
  ENSG00000139874_19 (sequence is synthesized)
gtccctagccgcgcggggccgctgtccaggttctgtctggtgcccctactggagtcccgggaatgaccgctctccctttgcgcagccctaccttaaggaaagttggacttgagaaagatc

SEQ ID NO: 356304 - DNA, 120 bp, Artificial Sequence
  ENSG00000139874_20 (sequence is synthesized)
taagcagctggtcttttctcctactcttgggtgaaggtgcatctttccctgccctcccctgtccccctctcgccgcccgcccgccaccaccactctcactccacccagagtagagccagg

SEQ ID NO: 356305 - DNA, 120 bp, Artificial Sequence
  ENSG00000139874_21 (sequence is synthesized)
tgcttagtaaaataggtcccgcgcttcgaactccaggctttctggagttcccacccaagccctcctttggagcaaagaaggagctgagaacaagccgaatgaggagtttttataagattg

SEQ ID NO: 356306 - DNA, 120 bp, Artificial Sequence
  ENSG00000139874_22 (sequence is synthesized)
cggggtcggagtgtgggcgcgtaataggaatcaccctcctactgcgcgttttcaaagaccaagcgctgggcgctcccgggccgcgcgtctgcgttaggcagggcagggtagtgcagggca

SEQ ID NO: 356307 - DNA, 120 bp, Artificial Sequence
  ENSG00000139874_23 (sequence is synthesized)
caccttccccggggttcggggttcggggttcggttgcagggctgcagcccgccttggctttctccctcacccaagtttccggaggagccgacctaaaagtaacaatagataaggtttcct

SEQ ID NO: 356308 - DNA, 120 bp, Artificial Sequence
  ENSG00000139874_24 (sequence is synthesized)
gctccagtgtatctcaaaagaccgggcgccaggggcgggggacctagggcgacgtcttcagagtccgccagtgttggcggtgtcgccgcaacctgcaggctcccgagtggggcctgcctg

SEQ ID NO: 356309 - DNA, 120 bp, Artificial Sequence
  ENSG00000139874_25 (sequence is synthesized)
gtctctagagggttgctgcctttcaagcggtgcctaagaagttattttcttgtttaacatatatatttattaatttatttgtcgtgttggaaaatgtgtctctgctttccttttctctgc

SEQ ID NO: 356310 - DNA, 120 bp, Artificial Sequence
  ENSG00000139874_26 (sequence is synthesized)
ttgcctagccccaggtcttttctttgggaccctgggggcgggcatggaagtggaagtaggggcaagctcttgccccactccctggccatctcaacgcctctcctcaatgctgggccctct

SEQ ID NO: 356311 - DNA, 120 bp, Artificial Sequence
  ENSG00000139874_27 (sequence is synthesized)
tatctcatcctttcctctagcttttctatttttgattgtgttgagtgaagtttggagatttttcatacttttcttactatagtctcttgtttgtcttattaggataatacataaatgata

SEQ ID NO: 356312 - DNA, 120 bp, Artificial Sequence
  ENSG00000139874_28 (sequence is synthesized)
atgtgggttatcctcctctccatgcacagtggaaagtcctgaactcctggctttccaggagacatatataggggaacatcaccctatatataatttgagtgtatatatatttatatatat

SEQ ID NO: 356313 - DNA, 120 bp, Artificial Sequence
  ENSG00000139874_29 (sequence is synthesized)
gatgtggacatatgtatacttatcttgctccattgtcatgagtccatgagtctaagtatagccactgatggtgacaggtgtgagtctggctggaacactttcagtttcaggagtgcaagc

SEQ ID NO: 356314 - DNA, 120 bp, Artificial Sequence
  ENSG00000139874_30 (sequence is synthesized)
agcactcaaacctggagctgaggaatctaattcagacagagactttaatcactgctgaagatgcccctgctccctctgggttccagcagaggtgattcttacatatgatccagttaacat

SEQ ID NO: 356315 - DNA, 120 bp, Artificial Sequence
  ENSG00000139874_31 (sequence is synthesized)
catcactttttttgaggacattgaaagtgaaataatttgtgtctgtgtttaatattaccaactacattggaagcctgagcagggcgaggaccaataattttaattatttatatttcctgt

SEQ ID NO: 356316 - DNA, 120 bp, Artificial Sequence
  ENSG00000139874_32 (sequence is synthesized)
attgctttagtatgctggcttgtacatagtaggcactaaatacatgtttgttggttgattgtttaagccagagtgtattacaacaatctggagatactaaatctggggttctcaggttca

SEQ ID NO: 356317 - DNA, 120 bp, Artificial Sequence
  ENSG00000139874_33 (sequence is synthesized)
ctcattgacatgatatacaatggttaaaatcactattgaaaaatacgttttgtgtatatttgcttcaacaactttgtgctttcctgaaagcagtaaccaagagttaagatatccctaatg

SEQ ID NO: 356318 - DNA, 120 bp, Artificial Sequence
  ENSG00000139874_34 (sequence is synthesized)
ttttgcttaaactaatgaacaaatatgctttgggtcataaatcagaaagtttagatctgtcccttaataaaaatatatattactactcctttggaaaatagatttttaatggttaagaac

SEQ ID NO: 356319 - DNA, 120 bp, Artificial Sequence
  ENSG00000139874_35 (sequence is synthesized)
tgtgaaatttacaaatcaaaatcttaatcattatccttctaagaggatacaaatttagtgctcttaacttgttaccattgtaatattaactaaataaacagatgtattatgctgttgcaa

SEQ ID NO: 356320 - DNA, 80 bp, Artificial Sequence
  ENSG00000139880_0 (sequence is synthesized)
ttctcgccggggccgctcagacctgcagcggagccgcggcgcccgctccaatcggctcggggctgtgcccccgggacccg

SEQ ID NO: 356321 - DNA, 120 bp, Artificial Sequence
  ENSG00000139880_1 (sequence is synthesized)
ccctcggcagtgccaggtgtggatccatggggtagcctcaacgcatctgcccctccaccccagccagctcatgggccacgtggcctggcccagcctcagcacccagggccagtgaacaga

SEQ ID NO: 356322 - DNA, 120 bp, Artificial Sequence
  ENSG00000139880_2 (sequence is synthesized)
gccctggctggagtccaaacatgtggggcctggtgaggctcctgctggcctggctgggtggctggggctgcatggggcgtctggcagccccagcccgggcctgggcagggtcccgggaac

SEQ ID NO: 356323 - DNA, 120 bp, Artificial Sequence
  ENSG00000139880_3 (sequence is synthesized)
acccagggcctgctctgctgcggactcgaaggagctgggtctggaaccagttctttgtcattgaggaatatgctggtccagagcctgttctcattggcaagctgcactcggatgttgacc

SEQ ID NO: 356324 - DNA, 120 bp, Artificial Sequence
  ENSG00000139880_4 (sequence is synthesized)
ggggagagggccgcaccaagtacctgttgaccggggagggggcaggcaccgtatttgtgattgatgaggccacaggcaatattcatgttaccaagagccttgaccgggaggaaaaggcgc

SEQ ID NO: 356325 - DNA, 120 bp, Artificial Sequence
  ENSG00000139880_5 (sequence is synthesized)
aatatgtgctactggcccaagccgtggaccgagcctccaaccggcccctggagcccccatcagagttcatcatcaaagtgcaagacatcaacgacaatccacccatttttccccttgggc

SEQ ID NO: 356326 - DNA, 120 bp, Artificial Sequence
  ENSG00000139880_6 (sequence is synthesized)
cctaccatgccaccgtgcccgagatgtccaatgtcgggacatcagtgatccaggtgactgctcacgatgctgatgaccccagctatgggaacagtgccaagctggtgtacactgttctgg

SEQ ID NO: 356327 - DNA, 120 bp, Artificial Sequence
  ENSG00000139880_7 (sequence is synthesized)
atggactgcctttcttctctgtggacccccagactggagtggtgcgtacagccatccccaacatggaccgggagacacaggaggagttcttggtggtgatccaggccaaggacatgggcg

SEQ ID NO: 356328 - DNA, 120 bp, Artificial Sequence
  ENSG00000139880_8 (sequence is synthesized)
gccacatgggggggctgtcaggcagcactacggtgactgtcacgctcagcgatgtcaacgacaacccccccaagttcccacagagcctataccagttctccgtggtggagacagctggac

SEQ ID NO: 356329 - DNA, 120 bp, Artificial Sequence
  ENSG00000139880_9 (sequence is synthesized)
ctggcacactggtgggccggctccgggcccaggacccagacctgggggacaacgccctgatggcatacagcatcctggatggggaggggtctgaggccttcagcatcagcacagacttgc

SEQ ID NO: 356330 - DNA, 120 bp, Artificial Sequence
  ENSG00000139880_10 (sequence is synthesized)
agggtcgagacgggctcctcactgtccgcaagcccctagactttgagagccagcgctcctactccttccgtgtcgaggccaccaacacgctcattgacccagcctatctgcggcgagggc

SEQ ID NO: 356331 - DNA, 120 bp, Artificial Sequence
  ENSG00000139880_11 (sequence is synthesized)
ccttcaaggatgtggcctctgtgcgtgtggcagtgcaagatgccccagagccacctgccttcacccaggctgcctaccacctgacagtgcctgagaacaaggccccggggaccctggtag

SEQ ID NO: 356332 - DNA, 120 bp, Artificial Sequence
  ENSG00000139880_12 (sequence is synthesized)
gccagatctccgcggctgacctggactcccctgccagcccaatcagatactccatcctcccccactcagatccggagcgttgcttctctatccagcccgaggaaggcaccatccatacag

SEQ ID NO: 356333 - DNA, 120 bp, Artificial Sequence
  ENSG00000139880_13 (sequence is synthesized)
cagcacccctggatcgcgaggctcgcgcctggcacaacctcactgtgctggctacagagctcgacagttctgcacaggcctcgcgcgtgcaagtggccatccagaccctggatgagaatg

SEQ ID NO: 356334 - DNA, 120 bp, Artificial Sequence
  ENSG00000139880_14 (sequence is synthesized)
tccgggccctggacagagatgaagttggcaacagtagccatgtctcctttcaaggtcctctgggccctgatgccaactttactgtccaggacaaccgagatggctccgccagcctgctgc

SEQ ID NO: 356335 - DNA, 120 bp, Artificial Sequence
  ENSG00000139880_15 (sequence is synthesized)
tgccctcccgccctgctccaccccgccatgccccctacttggttcccatagaactgtgggactgggggcagccggcgctgagcagcactgccacagtgactgttagtgtgtgccgctgcc

SEQ ID NO: 356336 - DNA, 120 bp, Artificial Sequence
  ENSG00000139880_16 (sequence is synthesized)
agcctgacggctctgtggcatcctgctggcctgaggctcacctctcagctgctgggctcagcaccggcgccctgcttgccatcatcacctgtgtgggtgccctgcttgccctggtggtgc

SEQ ID NO: 356337 - DNA, 120 bp, Artificial Sequence
  ENSG00000139880_17 (sequence is synthesized)
tcttcgtggccctgcggcggcagaagcaagaagcactgatggtactggaggaggaggacgtccgagagaacatcatcacctacgacgacgagggcggcggcgaggaggacaccgaggcct

SEQ ID NO: 356338 - DNA, 120 bp, Artificial Sequence
  ENSG00000139880_18 (sequence is synthesized)
tacgacgacgagggcggcggcgaggaggacaccgaggccttcgacatcacggccttgcagaacccggacggggcggcccccccggcgcccggccctcccgcgcgccgagacgtgttgccc

SEQ ID NO: 356339 - DNA, 120 bp, Artificial Sequence
  ENSG00000139880_19 (sequence is synthesized)
ccgacgtggcgcagctcctggcgctgcggctccgcgaggcggacgaggaccccggcgtacccccgtacgactcggtgcaggtgtacggctacgagggccgcggctcctcttgcggctccc

SEQ ID NO: 356340 - DNA, 120 bp, Artificial Sequence
  ENSG00000139880_20 (sequence is synthesized)
tccctcagctccctgggctccggcagcgaagccggcggcgcccccggccccgcggagccgctggacgactggggtccgctcttccgcaccctggccgagctgtatggggccaaggagccc

SEQ ID NO: 356341 - DNA, 120 bp, Artificial Sequence
  ENSG00000139880_21 (sequence is synthesized)
caccgcggggggggggcagcgggcacaggccctctgagtgagccccacggggtccaggcgggcggcagcagcccaggggccccaggcctcctccctgtccttgtgtccctccttgcttcc

SEQ ID NO: 356342 - DNA, 120 bp, Artificial Sequence
  ENSG00000139880_22 (sequence is synthesized)
ccctgtccttgtgtccctccttgcttccccggggcaccctcgctctcacctccctcctcctgagtcggtgtgtgtgtctctctccaggaatctttgtctctatctgtgacacgctcctct

SEQ ID NO: 356343 - DNA, 120 bp, Artificial Sequence
  ENSG00000139880_23 (sequence is synthesized)
gtccgggcctgggtttcctgccctggccctggccctgcgatctctcactgtgattcctctccttcctccgtggcgttttgtctctgcagttctgaagctcacacatagtctccctgcgtc

SEQ ID NO: 356344 - DNA, 120 bp, Artificial Sequence
  ENSG00000139880_24 (sequence is synthesized)
ttccttgcccatacacatgctctgtgtctgtctcctgcccacatctcccttccttctctctgggtccctgtgactggctttttgtttttttctgttgtccatcccaaaatcaagagaaac

SEQ ID NO: 356345 - DNA, 120 bp, Artificial Sequence
  ENSG00000139880_25 (sequence is synthesized)
ttccagccactgctgcccaccctcctgcaggggatgttgtgccccagacctgcctgcatggttccatccattactcatggcctcagcctcatcctggctccactggcctccagctgagag

SEQ ID NO: 356346 - DNA, 120 bp, Artificial Sequence
  ENSG00000139880_26 (sequence is synthesized)
agggaaccagcctgcctcccagggcaagagctccagcctcccgtgtggccgcctccctggagctctgcccagctgtcagcttcccctgggcatcccagccctgggcattgtcttgtgtgc

SEQ ID NO: 356347 - DNA, 120 bp, Artificial Sequence
  ENSG00000139880_27 (sequence is synthesized)
ttcctgagggagtagggaaaggaaagggggaggcggctggggaaggggaaagagggaggaaggggaggggcctccatctctaatttcataataaacaaacactttattttgtaaagctgg

SEQ ID NO: 356348 - DNA, 120 bp, Artificial Sequence
  ENSG00000139880_28 (sequence is synthesized)
cactgtgctggctacagagctcggctggagctgggggccagaaaggggctgggtacctcttctggttgctgagtggagtgcaccagcagccccaccccagagaagccctgttggaagcgc

SEQ ID NO: 356349 - DNA, 120 bp, Artificial Sequence
  ENSG00000139880_29 (sequence is synthesized)
atgaatattgtatgcacttggtattgttccattcattctgcaacattgttttctacctgtacattacatgcatatttcatgtgtttcttgtgcatgctatatgcttcatgtggcatccat

SEQ ID NO: 356350 - DNA, 120 bp, Artificial Sequence
  ENSG00000139880_30 (sequence is synthesized)
gcccatgcaccacatatgttacgtgtaaactgtgtggtgtgtgtgtggcgtgtatgttttggtgttctgccttcagacagttctgcacaggcctcgcgcgtgcaagtggccatccagacc

SEQ ID NO: 356351 - DNA, 120 bp, Artificial Sequence
  ENSG00000139890_0 (sequence is synthesized)
gagtgagggagagggtgctgcgagctgctgggctgcacacgcacacgcacacgcacacgcacactgatgcacacggacctggacacagacatggacatggacacagaaaccacagcactc

SEQ ID NO: 356352 - DNA, 120 bp, Artificial Sequence
  ENSG00000139890_1 (sequence is synthesized)
tgcccctctggcagccgccgggcctcccctccagggacgcccacaccagaagcagatgccacgctactaaagaagtcagagaaactgttggcagagttggaccggagcgggttaccctct

SEQ ID NO: 356353 - DNA, 120 bp, Artificial Sequence
  ENSG00000139890_2 (sequence is synthesized)
gcccctggggcccccagacgaagaggcagtatgcctgtcccctacaagcaccagctccggcgggcccaggctgtagatgaacttgactggccacctcaggcctcatcctctggctcgtct

SEQ ID NO: 356354 - DNA, 120 bp, Artificial Sequence
  ENSG00000139890_3 (sequence is synthesized)
gactccttgggctcaggggaggcagcccctgctcaaaaggatggcatcttcaaggtcatgctagtgggggagagcggcgtgggcaagagcaccctagcaggcacttttggtggtctccag

SEQ ID NO: 356355 - DNA, 120 bp, Artificial Sequence
  ENSG00000139890_4 (sequence is synthesized)
ggagacagtgctcacgaaccggagaacccagaggatacctatgagagacgcatcatggtggataaggaggaagtgactctagtcgtttatgacatctgggaacagggggatgcaggaggg

SEQ ID NO: 356356 - DNA, 120 bp, Artificial Sequence
  ENSG00000139890_5 (sequence is synthesized)
tggctgcgggaccactgccttcagaccggggacgcctttctcatcgtcttctcagtcaccgaccgacggagtttctccaaagttccagagaccctacttcggctccgggctgggaggccg

SEQ ID NO: 356357 - DNA, 120 bp, Artificial Sequence
  ENSG00000139890_6 (sequence is synthesized)
caccacgacctacccgttatcctcgttggaaacaagagcgacttggcccgctcccgggaggtatcactggaggagggccgccacctggccgggacgctgagctgcaagcacatcgagacg

SEQ ID NO: 356358 - DNA, 120 bp, Artificial Sequence
  ENSG00000139890_7 (sequence is synthesized)
ggctgcggcggggccgaaaccacgccggaggccagaggcccgatccgggcagccccgagggccctgcgccacctgcacgccgcgagagcctcaccaagaaagccaagaggttcctcgcca

SEQ ID NO: 356359 - DNA, 120 bp, Artificial Sequence
  ENSG00000139890_8 (sequence is synthesized)
acctggtgccgcgcaacgccaagttcttcaagcagcgctccaggtcgtgtcacgacctctcggtgctctgagccgcggtcgccatggccactgcggtcgccatggtcaccgcgccctccg

SEQ ID NO: 356360 - DNA, 120 bp, Artificial Sequence
  ENSG00000139890_9 (sequence is synthesized)
ctcgccccccctcgccccgccccgcccccgtccggcttccttggtggaggccgtctaggaaaccaaaaactcccaggatgccccggtgtgaccgccgggggcggcccggggccgctcggc

SEQ ID NO: 356361 - DNA, 120 bp, Artificial Sequence
  ENSG00000139890_10 (sequence is synthesized)
ggcacctccacacccgccccaacgcgttctctggagctttgggcctcagggcgcctagaaggcgaggacgcagacctgaaggcggccggtgagcggggcgggttctgctgggtcgggaag

SEQ ID NO: 356362 - DNA, 120 bp, Artificial Sequence
  ENSG00000139890_11 (sequence is synthesized)
aaaaataattctgcaaggtattttgttttttattaattcgcgcttggccacctcatctgtaaagagattctaaaagcaagatctggaaaagtgcttcgtagactccttgacggagtttgc

SEQ ID NO: 356363 - DNA, 120 bp, Artificial Sequence
  ENSG00000139890_12 (sequence is synthesized)
ctcctttgtacgctgcgtgaacatgcctcacctttaagagagtcttaaaggtaaagacacgaaaacacttcctccagggaccttcccgaaaacgttctggctctcatctggtgcggcatg

SEQ ID NO: 356364 - DNA, 120 bp, Artificial Sequence
  ENSG00000139890_13 (sequence is synthesized)
tgtccactttgcctttaaggagttcttaaaggcaagggcctggaagtgctgttcctgagatggattctcttgacttaccagtccaccacggcacttcccctttaaggttattaaaggtaa

SEQ ID NO: 356365 - DNA, 120 bp, Artificial Sequence
  ENSG00000139890_14 (sequence is synthesized)
ggggtggacagactttctgcattcagataatgagcagtggcaaccccttttggccagggccaggggggcaccagcaaggggccaccctttcccttttcaataaataatttttgtactgcc

SEQ ID NO: 356366 - DNA, 120 bp, Artificial Sequence
  ENSG00000139890_15 (sequence is synthesized)
aacagattccatacttgcgatctcaggggaatgctctcccttccaagtcacctcttctccctaaggcctttttaccatcgcggacgcactcacttgcaatcagacccaggctagggggac

SEQ ID NO: 356367 - DNA, 120 bp, Artificial Sequence
  ENSG00000139890_16 (sequence is synthesized)
actcccaatgccccactcgaggatcctgagaatcccttcttgtcacttcccctcacctctctcctaggcctccttctccctctccttcgcacctccacagacccaccatatgagctcagc

SEQ ID NO: 356368 - DNA, 120 bp, Artificial Sequence
  ENSG00000139890_17 (sequence is synthesized)
catgttctctcggttgcaagattcactagtaccaatcccttgccaccgcacgcccaggccctccctagacccaccctcgccccgggtcccgtacagcccagcgggcgcctgagccggtgc

SEQ ID NO: 356369 - DNA, 120 bp, Artificial Sequence
  ENSG00000139899_0 (sequence is synthesized)
gtgactggcccactggtgctctaggcccaagcactttccaccaaagcaatcgtggcggagggggtaggcgggaggcgggaggcggagggtacccgtggtggagtacccctttcttccaac

SEQ ID NO: 356370 - DNA, 120 bp, Artificial Sequence
  ENSG00000139899_1 (sequence is synthesized)
aaacggaaagatgccacgaagaagggctgttgatttgtgggggattttgaagagaggaagagtaggaggaaggggttgaggggctgcctctggcatatgcacacactcacacattctgtc

SEQ ID NO: 356371 - DNA, 120 bp, Artificial Sequence
  ENSG00000139899_2 (sequence is synthesized)
acacccgtcacacacacataccatgttctccatccccccaggtccagccctcagtgctgtcccatccagcagggctgccctgaagctctggctgcagccctcccgtccagtgggcaggcg

SEQ ID NO: 356372 - DNA, 120 bp, Artificial Sequence
  ENSG00000139899_3 (sequence is synthesized)
gcttcatccctcctttctctcccaaagcccaactgctgtcactgcatgctctgccaaggaggagggaactgcagtgacagcaggagtaagagtgggaggcaggacagagctgggacacag

SEQ ID NO: 356373 - DNA, 120 bp, Artificial Sequence
  ENSG00000139899_4 (sequence is synthesized)
gtatggagagggggttcagcgagcctagagagggcagacgatcagggtgccggcggtgagaatccagggagaggagcggaaacagaagaggggcagaagaccggggcacttgtgggttgc

SEQ ID NO: 356374 - DNA, 120 bp, Artificial Sequence
  ENSG00000139899_5 (sequence is synthesized)
agagcccctcagccatgttgggagccaagccacactggctaccaggtcccctacacagtcccgggctgcccttggttctggtgcttctggccctgggggccgggtgggcccaggaggggt

SEQ ID NO: 356375 - DNA, 120 bp, Artificial Sequence
  ENSG00000139899_6 (sequence is synthesized)
cagagcccgtcctgctggagggggagtgcctggtggtctgtgagcctggccgagctgctgcaggggggcccgggggagcagccctgggagaggcaccccctgggcgagtggcatttgctg

SEQ ID NO: 356376 - DNA, 120 bp, Artificial Sequence
  ENSG00000139899_7 (sequence is synthesized)
cggtccgaagccaccaccatgagccagcaggggaaaccggcaatggcaccagtggggccatctacttcgaccaggtcctggtgaacgagggcggtggctttgaccgggcctctggctcct

SEQ ID NO: 356377 - DNA, 120 bp, Artificial Sequence
  ENSG00000139899_8 (sequence is synthesized)
tcgtagcccctgtccggggtgtctacagcttccggttccatgtggtgaaggtgtacaaccgccaaactgtccaggtgagcctgatgctgaacacgtggcctgtcatctcagcctttgcca

SEQ ID NO: 356378 - DNA, 120 bp, Artificial Sequence
  ENSG00000139899_9 (sequence is synthesized)
atgatcctgacgtgacccgggaggcagccaccagctctgtgctactgcccttggaccctggggaccgagtgtctctgcgcctgcgtcgggggaatctactgggtggttggaaatactcaa

SEQ ID NO: 356379 - DNA, 120 bp, Artificial Sequence
  ENSG00000139899_10 (sequence is synthesized)
tcttctgccctctcttgccccagaaacagcagaggcaggagagagactccctctggctcctatcccacctctttgcatgggaccctgtgccaaacacccaagtttaagagaagagtagag

SEQ ID NO: 356380 - DNA, 120 bp, Artificial Sequence
  ENSG00000139899_11 (sequence is synthesized)
ctgtggcatctccagaccaggcctttccacccacccacccccagttaccctcccagccacctgctgcatctgttcctgcctgcagccctaggatcagggcaaggtttggcaagaaggaag

SEQ ID NO: 356381 - DNA, 120 bp, Artificial Sequence
  ENSG00000139899_12 (sequence is synthesized)
atctgcactactttgcggcctctgctcctccggttcccccaccccagcttcctgctcaatgctgatcagggacaggtggcgcaggtgagcctgacaggcccccacaggagcccagatgga

SEQ ID NO: 356382 - DNA, 120 bp, Artificial Sequence
  ENSG00000139899_13 (sequence is synthesized)
caagcctcagcgtaccctgcaggcttcttcctgtgaggaaagccagcatcacggatctcagccagcaccgtcagaagctgaaccagcaccgtatgggctagggtgggaggctcagccaca

SEQ ID NO: 356383 - DNA, 120 bp, Artificial Sequence
  ENSG00000139899_14 (sequence is synthesized)
ggcagaagggtgggaagggcctggagtctgtggctggtgaggaaggaaggagggtgtattgtctagactgaacatggtacacattctgcatgtatagcagagcagccagcaggtagcaat

SEQ ID NO: 356384 - DNA, 120 bp, Artificial Sequence
  ENSG00000139899_15 (sequence is synthesized)
cctggctgtccttctatgctggatcccagatggactctggcccttacctccccacctgagattagggtgagtgtgtttgctctggctgagagcagagctgagagcaggtatacagagctg

SEQ ID NO: 356385 - DNA, 120 bp, Artificial Sequence
  ENSG00000139899_16 (sequence is synthesized)
gaagtggaccatggaaaacatcgataaccatgcatcctcttgcttggccacctcctgaaactgctccacctttgaagtttgaactttagtccctccacactctgactgctgcctccttcc

SEQ ID NO: 356386 - DNA, 120 bp, Artificial Sequence
  ENSG00000139899_17 (sequence is synthesized)
tcccagctctctcactgagttatcttcactgtacctgttccagcatatccccactatctctctttctcctgatctgtgctgtcttattctcctccttaggcttcctattacctgggattc

SEQ ID NO: 356387 - DNA, 120 bp, Artificial Sequence
  ENSG00000139899_18 (sequence is synthesized)
catgattcattccttcagaccctctcctgccagtatgctaaaccctccctctctctttcttatcccgctgtcccattggcccagcctggatgaatctatcaataaaacaactagagaatg

SEQ ID NO: 356388 - DNA, 120 bp, Artificial Sequence
  ENSG00000139899_19 (sequence is synthesized)
gtggtcagtgagacactatagaattactaaggagaagatgcctctggagtttggatcgggtgttacaggtacaagtaggtatgttgcagaggaaaataaatatcaaactgtatactaaaa

SEQ ID NO: 356389 - DNA, 120 bp, Artificial Sequence
  ENSG00000139899_20 (sequence is synthesized)
gatgggggagagaaggcgttcaccttggctctgctggcgttttccttggggccctccagctgcagccagatgtgggggttgtccggacagtccttcggaaggacgctcacccccacgctg

SEQ ID NO: 356390 - DNA, 120 bp, Artificial Sequence
  ENSG00000139899_21 (sequence is synthesized)
aagatgcgctccacatggggctgctgttcccgaaccttgttctcagcctccgcagacaccgcaaagcgatctggggacgcggggcgggccccccaggtcctggtgaacgagggcggtggc

SEQ ID NO: 356391 - DNA, 120 bp, Artificial Sequence
  ENSG00000139908_0 (sequence is synthesized)
tcctagtggagggctgagtccagcatcccagactcgtgtgactatataggcaagcatttggggacctacttcactttgataccctagccttcagcagctcaaggtgttggcctttggata

SEQ ID NO: 356392 - DNA, 120 bp, Artificial Sequence
  ENSG00000139908_1 (sequence is synthesized)
ggaggcttccaagtagtaaagctccctgctctcagcaagcccaacaccatggggaagggagatgtcttagaggcagcaccaaccaccacagcctaccattccctcatggatgaatatggt

SEQ ID NO: 356393 - DNA, 120 bp, Artificial Sequence
  ENSG00000139908_2 (sequence is synthesized)
tatgaggtgggcaaggccattggccatggctcctatgggtcggtatatgaggctttctacacaaagcagaaggttatggtggcagtcaagatcatctcaaagaagaaggcctctgatgac

SEQ ID NO: 356394 - DNA, 120 bp, Artificial Sequence
  ENSG00000139908_3 (sequence is synthesized)
tatcttaacaagttcctgccccgtgaaatacaggtaatgaaagtcttgcggcacaagtacctcatcaacttctatcgggccattgagagcacatctcgagtatacatcattctggaactg

SEQ ID NO: 356395 - DNA, 120 bp, Artificial Sequence
  ENSG00000139908_4 (sequence is synthesized)
gctcagggtggtgatgtccttgaatggatccagcgctacggggcctgctctgagccccttgctggcaagtggttctcccagctgaccctgggcattgcctacctgcacagcaagagcatc

SEQ ID NO: 356396 - DNA, 120 bp, Artificial Sequence
  ENSG00000139908_5 (sequence is synthesized)
atatcagactttggctttgccaagatggtgccttctaaccagcctgtgggttgtagcccttcttaccgccaagtgaactgcttttcccacctcagccagacttactgtggcagctttgct

SEQ ID NO: 356397 - DNA, 120 bp, Artificial Sequence
  ENSG00000139908_6 (sequence is synthesized)
tacgcttgcccagagatcttacgaggcttgccctacaaccctttcctgtctgacacctggagcatgggcgtcatcctttacactctagtggtcgcccatctgccctttgatgacaccaat

SEQ ID NO: 356398 - DNA, 120 bp, Artificial Sequence
  ENSG00000139908_7 (sequence is synthesized)
ctcaaaaagctgctaagagagactcagaaggaggtcactttcccagctaaccataccatctcccaggagtgcaagaacctgatcctccagatgctacgccaagccactaagcgtgccacc

SEQ ID NO: 356399 - DNA, 120 bp, Artificial Sequence
  ENSG00000139908_8 (sequence is synthesized)
attctggacatcatcaaggattcctgggtgctcaagttccagcctgagcaacccacccatgagatcaggctgcttgaggccatgtgccagctccacaacaccactaaacagcaccaatcc

SEQ ID NO: 356400 - DNA, 120 bp, Artificial Sequence
  ENSG00000139908_9 (sequence is synthesized)
ttgcaaattacgacctgaaaatggctgagggagggggctaagagaggagcaaagcaggaggtcttgggctaaaaatcttttttaccaaaaataaatctaagtctgatttagtttcatcaa

SEQ ID NO: 356401 - DNA, 120 bp, Artificial Sequence
  ENSG00000139908_10 (sequence is synthesized)
cccaggagtgcaaggtccaactgctcattgcctgtgtggcacaatggagaaaaactcaggcaagacctctctctcccctgctctagaacctgatcctccagatgctacgccaagccacta

SEQ ID NO: 356402 - DNA, 120 bp, Artificial Sequence
  ENSG00000139908_11 (sequence is synthesized)
aagtaacaacagccagtggagacaaaaagaactgcttctctttctttccccctccaagttcctagtggagggctgagtccagcatcccagactcgtgtgactatataggtaatgaaagtc

SEQ ID NO: 356403 - DNA, 120 bp, Artificial Sequence
  ENSG00000139908_12 (sequence is synthesized)
caagggggttttatgcacatctcccatttcctgtccttttttcctctttcgaactccctcctcaatatctagcctattcatgcactctattttaatcatatggtcaaggatactgataaa

SEQ ID NO: 356404 - DNA, 120 bp, Artificial Sequence
  ENSG00000139908_13 (sequence is synthesized)
gtactcactgtatgcaaagcattttatgaaatacaatggtgagctcccggtggtcctcagataccatcctctgtctctctccctactttgggctctgctcacaactccatggctttcctt

SEQ ID NO: 356405 - DNA, 120 bp, Artificial Sequence
  ENSG00000139908_14 (sequence is synthesized)
ggcccttcagctcccagtctaaaactaagccctctccccagcctgatgcccagcctttctgctgctggtagggacttaaagttggagaacctgttgctggacaagtgggagaatgtgaag

SEQ ID NO: 356406 - DNA, 120 bp, Artificial Sequence
  ENSG00000139910_0 (sequence is synthesized)
gcagcggcggcggcggcagcaccagcagcgggagcgagcgcaacgctagcgcggcgcggggaccgccgcgctccttcccggctcctgccctcctctgccgctcgctcctctctcggcatc

SEQ ID NO: 356407 - DNA, 120 bp, Artificial Sequence
  ENSG00000139910_1 (sequence is synthesized)
tctctcggcatccacctccttcccctcctcctgctcattcactctttccctcactctcccctcctcctcggcttctccccgcgccccgccagccctcgcgctctcccactccctctgcct

SEQ ID NO: 356408 - DNA, 120 bp, Artificial Sequence
  ENSG00000139910_2 (sequence is synthesized)
gtcctccccggtcccctcctcccgctcattcactcgcccctctcccttctccactctctccccctgtctcctttcttcttcttctttcaccctccgtctctcacaccccctccattcccc

SEQ ID NO: 356409 - DNA, 120 bp, Artificial Sequence
  ENSG00000139910_3 (sequence is synthesized)
tgtctcctttctgacactgcactgcagctgctcctcagccctgccccctccccagtgagaacaaaccagcaacattgctttttttcctaaagagatttatattgatccgattaaaaaaaa

SEQ ID NO: 356410 - DNA, 120 bp, Artificial Sequence
  ENSG00000139910_4 (sequence is synthesized)
aaaaaagaaaaaagaaaagaaaaagccaaaacaaaagggagaaccttctcccggtagcagcggcaggaactgcaaacatgatggcggcagctcccatccagcagaacgggacccacactg

SEQ ID NO: 356411 - DNA, 120 bp, Artificial Sequence
  ENSG00000139910_5 (sequence is synthesized)
atggcggcagctcccatccagcagaacgggacccacactggggttcccatagacctggacccgccggactcgcggaaaaggccgctggaagccccccctgaagccggcagcaccaagagg

SEQ ID NO: 356412 - DNA, 120 bp, Artificial Sequence
  ENSG00000139910_6 (sequence is synthesized)
accaatacgggcgaagacggccagtattttctaaaggttctcatacctagttatgctgctggatctataattgggaagggaggacagacaattgttcagttgcaaaaagaaactggagcc

SEQ ID NO: 356413 - DNA, 120 bp, Artificial Sequence
  ENSG00000139910_7 (sequence is synthesized)
accatcaagctgtctaagtccaaagatttttacccaggtactactgagcgagtgtgcttgatccagggaacggttgaagcactgaatgcagttcatggattcattgcagaaaaaattcga

SEQ ID NO: 356414 - DNA, 120 bp, Artificial Sequence
  ENSG00000139910_8 (sequence is synthesized)
gaaatgccccaaaatgtggccaagacagaaccagtcagcattctacaaccccagaccaccgttaatccagatcgcatcaaacaaacattgccatcttccccaactaccaccaagtcctct

SEQ ID NO: 356415 - DNA, 120 bp, Artificial Sequence
  ENSG00000139910_9 (sequence is synthesized)
ccatctgatcccatgaccacctccagagctaatcaggtaaagattatagttcccaacagcacagcaggtctgataatagggaagggaggtgctactgtgaaggctgtaatggagcagtca

SEQ ID NO: 356416 - DNA, 120 bp, Artificial Sequence
  ENSG00000139910_10 (sequence is synthesized)
ggggcttgggtgcagctttcccagaaacctgatgggatcaacttgcaagagagggttgtcactgtgagtggagaacctgaacaaaaccgaaaagctgttgaacttatcatccagaagata

SEQ ID NO: 356417 - DNA, 120 bp, Artificial Sequence
  ENSG00000139910_11 (sequence is synthesized)
caagaggatccacaaagtggcagctgtctcaatatcagttatgccaatgtgacaggtccagtggcaaattccaatccaaccggatctccttatgcaaacactgctgaagtgttaccaact

SEQ ID NO: 356418 - DNA, 120 bp, Artificial Sequence
  ENSG00000139910_12 (sequence is synthesized)
gctgcagcagctgcagggctattaggacatgctaaccttgctggcgttgcagcctttccagcagttttatctggcttcacaggcaatgacctggtggccatcacctctgcacttaataca

SEQ ID NO: 356419 - DNA, 120 bp, Artificial Sequence
  ENSG00000139910_13 (sequence is synthesized)
ttagccagctatggatataatctcaacactttaggtttaggtctcagtcaagcagcagcaacaggggctttggctgcagcagctgccagtgccaacccagcagcagcagcagccaattta

SEQ ID NO: 356420 - DNA, 120 bp, Artificial Sequence
  ENSG00000139910_14 (sequence is synthesized)
ttggccacctatgccagtgaagcctcagccagtggcagcacagctggtggtacggcggggacatttgcattaggtagcctggctgctgctactgctgcaaccaatggatattttggagct

SEQ ID NO: 356421 - DNA, 120 bp, Artificial Sequence
  ENSG00000139910_15 (sequence is synthesized)
gcttctcccctagctgccagtgccattctaggaacagaaaagtccacagatggatccaaggatgtagttgaaatagcagtgccagaaaacttagttggtgcaatacttggcaaaggaggg

SEQ ID NO: 356422 - DNA, 120 bp, Artificial Sequence
  ENSG00000139910_16 (sequence is synthesized)
aaaacattagtggaataccaggagttgactggtgcaaggatacagatctccaaaaaaggagaattcgtacctggcacaaggaatcggaaggtaaccattactggaacaccagctgcaaca

SEQ ID NO: 356423 - DNA, 120 bp, Artificial Sequence
  ENSG00000139910_17 (sequence is synthesized)
caggctgctcaatatttaattacacaaaggatcacatatgagcaaggagttcgggctgccaatcctcagaaagtgggttgagtgccccagttacacatcagattgttttaacccctcctt

SEQ ID NO: 356424 - DNA, 120 bp, Artificial Sequence
  ENSG00000139910_18 (sequence is synthesized)
taccccattttcaagaaggatgtactgtactttgcagaagtgaagtttttctgttattaatatataattatgcaaatgaatgcgactatgttgacaatgtgtatatgtaaataatatgtg

SEQ ID NO: 356425 - DNA, 120 bp, Artificial Sequence
  ENSG00000139910_19 (sequence is synthesized)
ttttaccagatgtttcatagaaagaattttttcttgatctgttttgttctctatactttgcttgtgtatatttgtcagaggtgtttctagtgtaagatttaagcctgccattttaccagc

SEQ ID NO: 356426 - DNA, 120 bp, Artificial Sequence
  ENSG00000139910_20 (sequence is synthesized)
attattgtagtttaatgattgaatgtagacagggatatgcgtatagttttcagtattagttctagataacactaaattaactactgttaggttgagtatggtggggtcagtgacctaaaa

SEQ ID NO: 356427 - DNA, 120 bp, Artificial Sequence
  ENSG00000139910_21 (sequence is synthesized)
tggagtgaggccaaagcactgtcctgtaagtcttacttcctgcttagggcacagtgaagtaggaaacaatattttgaaaataagttttaaatttaaaatgatcaaaaagcaatatagttg

SEQ ID NO: 356428 - DNA, 120 bp, Artificial Sequence
  ENSG00000139910_22 (sequence is synthesized)
cataaaagcactgtaaaatatttaaaaggttaaaactgtggaaaattatattggtaagtttacagatcaataaaagcacctgttctccatctgaactagacaatggaaataatgctgcat

SEQ ID NO: 356429 - DNA, 120 bp, Artificial Sequence
  ENSG00000139910_23 (sequence is synthesized)
gctggccatggcccattcttcatcatttgtaagttcaacaaaagttctcacatggagtcccacctcttcagaggtttgtacatttgtttttaagcactgaattcactactgatcccatcg

SEQ ID NO: 356430 - DNA, 120 bp, Artificial Sequence
  ENSG00000139910_24 (sequence is synthesized)
cctggccagtagaacagtcattactccattaacatcctcactgtttagacacataactgtggtacagtgtattggaaattttataaacaaaagtgaaagtgccaacaaattattgatagc

SEQ ID NO: 356431 - DNA, 120 bp, Artificial Sequence
  ENSG00000139910_25 (sequence is synthesized)
tgataatgtttcattatctgcaactgcttgataagtatgttgcattttaagagcttataattgtgtataatttgttaacactagaaacctattagtattgtgaatgtagattttactgtg

SEQ ID NO: 356432 - DNA, 120 bp, Artificial Sequence
  ENSG00000139910_26 (sequence is synthesized)
aagctatctgtgatttagctgtttgctcccatgatggagtctttgcagcatggcgctagcagccaatgcagtttctaatactcggtaatttgcatgttttgtggagcatttttatgtcac

SEQ ID NO: 356433 - DNA, 120 bp, Artificial Sequence
  ENSG00000139910_27 (sequence is synthesized)
caaccagacagtatttcctgcatgcttatttagaagaggcagcttatcttgagaggtagtgttatctacctttgtcaggctttttgacaggtcatttcagagtaagcctttgttcccaag

SEQ ID NO: 356434 - DNA, 120 bp, Artificial Sequence
  ENSG00000139910_28 (sequence is synthesized)
acccaacaactgtcaccctcttctgtacctctcctgagtgccaactgtccaggccatttgacacaccatctgttaacctctgagtttgcccactcaaggccactcataggggcatccatc

SEQ ID NO: 356435 - DNA, 120 bp, Artificial Sequence
  ENSG00000139910_29 (sequence is synthesized)
tcttaaattcaatggacaaaaataaaatgctggctacctctggatcatctggctgagcaactgaattacaaaagagaattacttccatctcaacttcaacccattgattacgtccatcct

SEQ ID NO: 356436 - DNA, 120 bp, Artificial Sequence
  ENSG00000139910_30 (sequence is synthesized)
agcaagctaaatggcatcccagctgctcctttctgtgcaaccaattaaagaacaatgagtgtgatgctccatgtctgaatttcgtccagcctctctctgaactgtgatctttgtcctcat

SEQ ID NO: 356437 - DNA, 120 bp, Artificial Sequence
  ENSG00000139910_31 (sequence is synthesized)
gaactttcccttttgttcattgaactatatggactcttcatttcatattgatttactgtgcaatttacttttggacattgagaacttgaaattatttcctgatcccttccccttccacta

SEQ ID NO: 356438 - DNA, 120 bp, Artificial Sequence
  ENSG00000139910_32 (sequence is synthesized)
ttaataattcatttctgtcaaactgtaagagtagactcatttttttttttttagtttttaacattggactgttatttcatttagagttctctatctctaaatatttatttagagaatgat

SEQ ID NO: 356439 - DNA, 120 bp, Artificial Sequence
  ENSG00000139910_33 (sequence is synthesized)
tttaaaagggaatgatatgcttgtttaaatgaaagagaaaagctgtagtaaactgtgttaattggtaatgactatttatcgtcgatactctgtagctgtgtaagttttgacaaatagtgt

SEQ ID NO: 356440 - DNA, 120 bp, Artificial Sequence
  ENSG00000139910_34 (sequence is synthesized)
atctcgtggaatcagtggttagcattgccgctattatatttactcattttatcattataaatgtgcttagttcatcatgtagcatcacttgtctcccgtctcattttttccttgcatgtc

SEQ ID NO: 356441 - DNA, 120 bp, Artificial Sequence
  ENSG00000139910_35 (sequence is synthesized)
acaagtctcagatcatttataatacattaacagtaaataatatctatgtaaatttctttcaccatgctgtctcagagtcagcagtgaacaaaggcaaagattggggccccacttagtttg

SEQ ID NO: 356442 - DNA, 120 bp, Artificial Sequence
  ENSG00000139910_36 (sequence is synthesized)
aaaaagggaaaggaagtgatctaggatgtgtactagaagcatttcaaatgttgggtctttaaaatgttttgttcagtcttagcaaatcttcgatcttttatttcaaaattccagtagtcc

SEQ ID NO: 356443 - DNA, 120 bp, Artificial Sequence
  ENSG00000139910_37 (sequence is synthesized)
actgtggagcccatgcatttcatctggaatttaatgttactttgaagccaaaccatttaaacaattatgtgtgttttattagctagtgttgctgaaaatgcacttagttcaattttaatt

SEQ ID NO: 356444 - DNA, 120 bp, Artificial Sequence
  ENSG00000139910_38 (sequence is synthesized)
gtaaatgggaattttaaacttttcctagttagcatggttatatgttagttaaaactgaaagctaaattgaagatattacattttaatttatggtgacagataagggtttgtatgcattat

SEQ ID NO: 356445 - DNA, 120 bp, Artificial Sequence
  ENSG00000139910_39 (sequence is synthesized)
gtgtaaatcagcttcatgctgtttaaaaatttattctctgaaatttatagaccatgtagaattgatttgtgatgtgatgctttaatttattgcaagaaaattagtatggcttcaaactgc

SEQ ID NO: 356446 - DNA, 120 bp, Artificial Sequence
  ENSG00000139910_40 (sequence is synthesized)
cacaggtaggcatgtaacaatggctgttcagctgtactgatccaaaatggagaaaactgatgatacaagggccaaacatcttatgaaatgcaactatttatagacttgttttgctatagg

SEQ ID NO: 356447 - DNA, 120 bp, Artificial Sequence
  ENSG00000139910_41 (sequence is synthesized)
gaggctggtgaacacgctgaatacgaattacctcagttctgcagctttctatgtctttttaatgcattctgtttcagggtcactttcaatcaatatttcatttacttactgagattgaat

SEQ ID NO: 356448 - DNA, 120 bp, Artificial Sequence
  ENSG00000139910_42 (sequence is synthesized)
gggcgctctgagacacagtgtgctgtttatcatacagattggacacctcattctagatccaagatcttttcctcaacactgggagctgtcctttcagcaccacaaaattactgcttgaag

SEQ ID NO: 356449 - DNA, 120 bp, Artificial Sequence
  ENSG00000139910_43 (sequence is synthesized)
tgtttgtttgtttttttgtttttttctttatcactgggagcttttctttcagcaccacaacattgcacctagactttttaaacggctgccttcctctttgcactgaagaccaatttcgtc

SEQ ID NO: 356450 - DNA, 120 bp, Artificial Sequence
  ENSG00000139910_44 (sequence is synthesized)
gctgccttcctctttgcactgaagaccaatttcgtctgcacttccagttattgctattacctgtaggactttcaatcctacttcacttcacccaccccactcctgaaacagttaaatgta

SEQ ID NO: 356451 - DNA, 120 bp, Artificial Sequence
  ENSG00000139910_45 (sequence is synthesized)
tctatttctgtggaagtcattttctcattgaatgattagaaacaaagataaattctaacctgtaacggctcatttcgactcattgcttacaatagatctaagctcttttttctgcttatt

SEQ ID NO: 356452 - DNA, 120 bp, Artificial Sequence
  ENSG00000139910_46 (sequence is synthesized)
cgactccttccagcttcccatcacatctgtaacaaacttttaaaatgatattgccacaccaccatgcacaagcctacctgcacagtagagatagattattccatcgcattcagatggtta

SEQ ID NO: 356453 - DNA, 120 bp, Artificial Sequence
  ENSG00000139910_47 (sequence is synthesized)
acagaggttagcaagtcctgtattatatatttatatcgctttctaagaaagtgcatattaatgtttactttaagaatgtgtaaatggtgctatcaagaatctgataaattttatccccgt

SEQ ID NO: 356454 - DNA, 120 bp, Artificial Sequence
  ENSG00000139910_48 (sequence is synthesized)
tttttgtgtaccacttctaatgtatgagatttatttttttattggaaaaaaataaacagtatgaaagcattaaattggtagattttagtaatttaacaatgaatggaatccctacgttac

SEQ ID NO: 356455 - DNA, 120 bp, Artificial Sequence
  ENSG00000139910_49 (sequence is synthesized)
aggccctatgtttccttggaaattttaatggtggtaatagatttcaacaaaggtactgataatcatattccttttaatccattcttatatttcagtcttgatttatatgctgattcctca

SEQ ID NO: 356456 - DNA, 120 bp, Artificial Sequence
  ENSG00000139910_50 (sequence is synthesized)
ctgagtccttaagtaaagtttatttacttaataattttatttactgtaagtcttctccaagaagggaattcttgctttcgaaggcagcaattgagagatgaaaatataatttaatacccc

SEQ ID NO: 356457 - DNA, 120 bp, Artificial Sequence
  ENSG00000139910_51 (sequence is synthesized)
ttacatcacaggcactatttgagactagttactctgttagtaggagaaatattcatcactcattaaatacagggcaagcatggctatacacaataattttgagtgcaatacagtcataaa

SEQ ID NO: 356458 - DNA, 120 bp, Artificial Sequence
  ENSG00000139910_52 (sequence is synthesized)
tttaatgtacacacgttacttaactgaggcaaacagccatacaaaattgcacatgattagaaaacaggatgaactcattttgccttctgcttggtttctcataaacatgaatacataata

SEQ ID NO: 356459 - DNA, 120 bp, Artificial Sequence
  ENSG00000139910_53 (sequence is synthesized)
ttgttatgcactgttgttcatagatgtctttttacataaagggtaagtatcatattactttaacagattatatttggaaatctgcatgttattttttgtttcatcagatatgtgccccaa

SEQ ID NO: 356460 - DNA, 120 bp, Artificial Sequence
  ENSG00000139910_54 (sequence is synthesized)
ataaataacttttctttcaaaaaatgaaagtattagagaacttgtcatgttaattttgaaaaatattgaggtatagtactagacaggatgtcattccactggtctatataaacaaaaaaa

SEQ ID NO: 356461 - DNA, 120 bp, Artificial Sequence
  ENSG00000139910_55 (sequence is synthesized)
cactggtctatataaacaaaaaaaactgttcttgaaaattgaagcattaccttgtataataaagtacatcaaatcagatttgtaaataaaatattgtttaattctaaagtattcaatatt

SEQ ID NO: 356462 - DNA, 120 bp, Artificial Sequence
  ENSG00000139910_56 (sequence is synthesized)
aaaatatttaacgtgtatgtgccgaattttttttaaatagttttttataattgcaatggaaaggcaattgtctcattacaaagtggtacagaagccaatacttgggttaccatagatata

SEQ ID NO: 356463 - DNA, 120 bp, Artificial Sequence
  ENSG00000139910_57 (sequence is synthesized)
taaacaagcaaaaactgtggaacacgttttaagctcattttggaaaattaaaacagttctgtagaaatgcatatttgtatttgtttctctaataaatctgcaaatagctttaaacacaaa

SEQ ID NO: 356464 - DNA, 120 bp, Artificial Sequence
  ENSG00000139910_58 (sequence is synthesized)
attcatcaaaatggcgaccagtttttcggaatagacctatctttccatttaatcggtccagaggttgaccatgtaaatatcctagacctgggcaagaaggtccattcaggaggaggagga

SEQ ID NO: 356465 - DNA, 120 bp, Artificial Sequence
  ENSG00000139910_59 (sequence is synthesized)
ggatgaccccggagtgaggtgatggccgcccgaagatgcgcgctgcgtttaacagtctgataaaataaataaataaatggcacttgggtagcggattgcgaatgactggggcgccggaga

SEQ ID NO: 356466 - DNA, 120 bp, Artificial Sequence
  ENSG00000139910_60 (sequence is synthesized)
gtttttcctctctccatcctcttgctttgggccacaagtagtatgcaaaatcttgatgagtgcatgcccttaccgcacttagattgtcggtgcaaatatttcattgatttgtcttcaggg

SEQ ID NO: 356467 - DNA, 120 bp, Artificial Sequence
  ENSG00000139910_61 (sequence is synthesized)
gggtgcatacgagggtgggggtgtctggaacggtgacttgttagttaacatcctgcgcttccttggaagatgagttttaacgggaccgatatcgcttcttcatttgcactggaatcatct

SEQ ID NO: 356468 - DNA, 120 bp, Artificial Sequence
  ENSG00000139910_62 (sequence is synthesized)
caggtgctgacagctgcagaagaaattgtacatggtgctgtacagaaggtatttctccactgtgccatctgcagagtgaaactgactaggagtactacatagactgtactactgagcgag

SEQ ID NO: 356469 - DNA, 120 bp, Artificial Sequence
  ENSG00000139910_63 (sequence is synthesized)
catcctgtcatctacaccatacttttcacgggtgattgcctgcaaactggagaaaaagataatggtgggttaaggatttattcgttcattcacatatatgcaccatagtcagattccaaa

SEQ ID NO: 356470 - DNA, 120 bp, Artificial Sequence
  ENSG00000139910_64 (sequence is synthesized)
ttcgttcattcacatatatgcaccatagtcagattccaaataacctaagaaagaaatatcaattatttctaaaattttatatgcatttttaattttagataacaaatactatattcagat

SEQ ID NO: 356471 - DNA, 120 bp, Artificial Sequence
  ENSG00000139910_65 (sequence is synthesized)
tgactacctaatggagcactgaagcctatttattgaattggtatttttaatctcccttattgtatcttcctagaatttttcatatgtaagttaaggatatcatatatgtaaaaaaaaaaa

SEQ ID NO: 356472 - DNA, 120 bp, Artificial Sequence
  ENSG00000139910_66 (sequence is synthesized)
aaagaaactggagccaccatcaagctgtctaagtccaaagatttttacccagggcctgtcatagcattgttgacaggaagagatgaaaaatgaaattaatgtcttgaggtttttaacagc

SEQ ID NO: 356473 - DNA, 120 bp, Artificial Sequence
  ENSG00000139910_67 (sequence is synthesized)
aaaatgattaaggtgttaacagtctaattctacgaaaacaaatttacatggcatcactaacctaagaaccactacatcaaatccggaatcctttttatgaatttcaaagccctttataat

SEQ ID NO: 356474 - DNA, 120 bp, Artificial Sequence
  ENSG00000139910_68 (sequence is synthesized)
actctacctattcttagtttgtgctgttgattctctaatgcatatcttgccattacagtgattatacccttactgtgtatcctcacttgctctgtacatactcacctttcccattgctca

SEQ ID NO: 356475 - DNA, 120 bp, Artificial Sequence
  ENSG00000139910_69 (sequence is synthesized)
cagtgcctcccaataactttaataatctaactcagtttagttcacaggttgtactgtgattgtttcatttgtgagtgtaacttaatacattattgtcagatcattattaaaggcattgac

SEQ ID NO: 356476 - DNA, 120 bp, Artificial Sequence
  ENSG00000139910_70 (sequence is synthesized)
taattgggaagggaggacagacaattgttcagttgcaaaaagaaactggagccaccatcaagctgtctaagtccaaagatttttacccagctaccctggaaatatatacgtctattataa

SEQ ID NO: 356477 - DNA, 120 bp, Artificial Sequence
  ENSG00000139910_71 (sequence is synthesized)
cctggatatcatgaagcaagatataagagaagaacaaaacaaaatccgtaattcattgaaagaattgtaatcatcaatctttcatattattaatactttgtaattattttctccccaaca

SEQ ID NO: 356478 - DNA, 120 bp, Artificial Sequence
  ENSG00000139910_72 (sequence is synthesized)
gtattttccagtagattctaatcatgtggtagggcagaaggaaatgtgttttttgttgttcatttgtttcttgtcaatagtcctgattaatttagctttgctatactgacttatatctgg

SEQ ID NO: 356479 - DNA, 120 bp, Artificial Sequence
  ENSG00000139910_73 (sequence is synthesized)
aagtatataaccaagataagaaaataggttttaatatgatcatcttaagctaattgtaatgaaaagaactaatggactgtcaatattcagaaaaccaaaaataaaaaatacagaaaacta

SEQ ID NO: 356480 - DNA, 120 bp, Artificial Sequence
  ENSG00000139910_74 (sequence is synthesized)
tagttgagaaatcaaagagaaatatccacagcatagtataagttccttacaaaagaagccttaaagtgttagcataaaacttttattttaagcacacataaaacataccagagttgtcat

SEQ ID NO: 356481 - DNA, 120 bp, Artificial Sequence
  ENSG00000139910_75 (sequence is synthesized)
gcacttatgtgactcttagtgattgccctttttaaatttatagacacaaatttaatttataggaattgaatctgtttaaaattatatcactttttaaataaagtataagtatttcaatga

SEQ ID NO: 356482 - DNA, 120 bp, Artificial Sequence
  ENSG00000139910_76 (sequence is synthesized)
aataccctatttttagtgatatttgtagttttcaggatagttattatgcatagaggctcctgttttgttaattttgttgtcatgttctcattttttatcaaaaaaatgtatagtaaattt

SEQ ID NO: 356483 - DNA, 120 bp, Artificial Sequence
  ENSG00000139910_77 (sequence is synthesized)
atgtacctaccatacagtcctttgttacaaatcagttactgtgttttgtgtaacttatgtagtatttaaacatatgtcataaagggccaatgttcatttttaatgtacgagattttttgt

SEQ ID NO: 356484 - DNA, 120 bp, Artificial Sequence
  ENSG00000139910_78 (sequence is synthesized)
aaaaaattttacttgggaaaaactgatgtgagtttttaagattgaataatgggtgacatgatgtagggggaaaatgacattatttcatgttaaataaggtggattcttccaccgtaaact

SEQ ID NO: 356485 - DNA, 120 bp, Artificial Sequence
  ENSG00000139910_79 (sequence is synthesized)
cttttacgtctataaatttattatgttcataattattgtttctgcctttgcctttttataattagcgtcttaatttgtgacgtaattttactatcacagactatggcttcaaaagaaatg

SEQ ID NO: 356486 - DNA, 120 bp, Artificial Sequence
  ENSG00000139910_80 (sequence is synthesized)
aatgtattattcttcagtaattcacagaatatttaatttacagaatactcatgttcattgtaataaatttgaaatgtagctcaaagtcttattaatttcatgtttctgaatttaaaaagt

SEQ ID NO: 356487 - DNA, 120 bp, Artificial Sequence
  ENSG00000139910_81 (sequence is synthesized)
aatggttgttttgcggactttaagtaggatataggcaatggctaattgtagtccttatgtgtctgctaatgacaaataaatatagctcatcactatttacagtcctgggcttttcttctt

SEQ ID NO: 356488 - DNA, 120 bp, Artificial Sequence
  ENSG00000139910_82 (sequence is synthesized)
ggtcagttaaacttagtgctgctctccctggctctaaattttattttaaggtcttctgattggtacaaaattaaataacaaatagatggatgcactcctttttattctaaaagcaaatga

SEQ ID NO: 356489 - DNA, 120 bp, Artificial Sequence
  ENSG00000139910_83 (sequence is synthesized)
aactaaaatgcttttatcaatattcttcactttgaatggaacttaatcatattgtttttaaatatttttaagtaaccaaatcaatattataagatttcagagccatgttcttaaaatagc

SEQ ID NO: 356490 - DNA, 120 bp, Artificial Sequence
  ENSG00000139914_0 (sequence is synthesized)
ggaactggaacatggtcggagccaaggacacaggactaacaggaaaggacacagactgctgtcaggacacatactaccacacacccgaggccaggaccctgctgacgtggcagacctcca

SEQ ID NO: 356491 - DNA, 120 bp, Artificial Sequence
  ENSG00000139914_1 (sequence is synthesized)
ccctggccccttactgccccccgcccctctcccccacctgccagctgccaacagggctctgccttgtgtctgccacacctgtcactgcctatccttgtccagggggggccccatcagccc

SEQ ID NO: 356492 - DNA, 120 bp, Artificial Sequence
  ENSG00000139914_2 (sequence is synthesized)
ctcctcagctgcccagcaaagcaagcagttagtggggaggggagggaacatggagcgggggccggtggtgggggcaggactgggggccggggcccgaatccaggcactgctgggctgcct

SEQ ID NO: 356493 - DNA, 120 bp, Artificial Sequence
  ENSG00000139914_3 (sequence is synthesized)
gctcaaggtgctgctctgggtggcctctgccttgctgtactttggaagcgaacaggccgcccgccttctgggcagcccctgcttacggcgcctctaccatgcctggctggcagcagtggt

SEQ ID NO: 356494 - DNA, 120 bp, Artificial Sequence
  ENSG00000139914_4 (sequence is synthesized)
cttagggggctttgtgttgctggtggtgttcctggctacacggcgcgtggcagtaactgccagacacctgagccgactggtagtaggggcagccgtgtggcggggagccggccgggcctt

SEQ ID NO: 356495 - DNA, 120 bp, Artificial Sequence
  ENSG00000139914_5 (sequence is synthesized)
cctgctcatcgaggacctgactggctcctgcttcgagccactgccccagggtctgctgctccacgagctgcctgaccgccgcagctgcctggcagccggccaccagtggcgaggctacac

SEQ ID NO: 356496 - DNA, 120 bp, Artificial Sequence
  ENSG00000139914_6 (sequence is synthesized)
cgtctcctcccacaccttcctgctcaccttttgctgcctgctcatggcagaggaagcagctgtgttcgccaagtacctggcccatgggcttcctgccggcgccccactgcgccttgtctt

SEQ ID NO: 356497 - DNA, 120 bp, Artificial Sequence
  ENSG00000139914_7 (sequence is synthesized)
cctgctgaacgtgctgctgctgggcctctggaacttcttgctgctctgtaccgtcatctatttccaccagtacactcacaaggtggtgggcgccgcagtgggcacctttgcctggtacct

SEQ ID NO: 356498 - DNA, 120 bp, Artificial Sequence
  ENSG00000139914_8 (sequence is synthesized)
cacctatggcagctggtatcatcagccctggtctccagggagcccaggccatgggctcttcccccgtccccactccagccgcaagcataactgaaagaaataaaaaccatcgggcctggc

SEQ ID NO: 356499 - DNA, 120 bp, Artificial Sequence
  ENSG00000139914_9 (sequence is synthesized)
caaggagatagcaaaggttaaatgactgggggctgtaaagggcacggcaaggagagaacgagtgatgatgtgtagggttggggagagtgcagtgatgggagcacagaccagggtgggaga

SEQ ID NO: 356500 - DNA, 120 bp, Artificial Sequence
  ENSG00000139915_0 (sequence is synthesized)
atggatttactgtacggtctcgtgtggctgctgacagtcctcctggaggggatctctggccaaggagtgtacgctcctcccacggttcgtattgtgcactcaggcttggcctgtaacatt

SEQ ID NO: 356501 - DNA, 120 bp, Artificial Sequence
  ENSG00000139915_1 (sequence is synthesized)
gaagaggagcgctactccgaaagggtctacactatccgggaaggagaaacccttgagttgacttgtctagtcacaggacatccacgtccacagatcaggtggaccaaaacagcaggaagt

SEQ ID NO: 356502 - DNA, 120 bp, Artificial Sequence
  ENSG00000139915_2 (sequence is synthesized)
gcctctgacagattccaagactcaagtgtcttcaatgagactttgaggattacaaatattcagcgacaccaaggaggccggtattactgtaaagcagagaatggcttggggtctccagcg

SEQ ID NO: 356503 - DNA, 120 bp, Artificial Sequence
  ENSG00000139915_3 (sequence is synthesized)
ataaagtcaatcagagtggatgtatactatttggatgatccagtagtaactgttcatcaaagtataggtgaagctaaagaacaattttactatgagagaacagtgttcctccggtgtgtt

SEQ ID NO: 356504 - DNA, 120 bp, Artificial Sequence
  ENSG00000139915_4 (sequence is synthesized)
gccaattccaatcctcctgttcggtatagctggagacgtggccaggaggtcttgctgcaaggatctgataaaggagttgagatttatgaaccattctttacccagggtgaaacaaagatc

SEQ ID NO: 356505 - DNA, 120 bp, Artificial Sequence
  ENSG00000139915_5 (sequence is synthesized)
ttaaaactaaagaatcttcgacctcaggactatgctaattatagctgcattgcttcagtgaggaatgtatgtaatattcctgataagatggtgtcgtttagactgtccaataaaacagca

SEQ ID NO: 356506 - DNA, 120 bp, Artificial Sequence
  ENSG00000139915_6 (sequence is synthesized)
tcaccgtcaattaaactcttggtggatgatcctatagttgtaaatcctggagaggccataacattagtatgtgttacaacaggaggagagcctgcaccttctctcacctgggtcaggtcc

SEQ ID NO: 356507 - DNA, 120 bp, Artificial Sequence
  ENSG00000139915_7 (sequence is synthesized)
tttgggactctgcctgaaaagactgttttgaatggaggaactttgaccatacctgccatcacctcagatgatgctggtacttacagctgcattgccaataataatgtgggaaaccctgca

SEQ ID NO: 356508 - DNA, 120 bp, Artificial Sequence
  ENSG00000139915_8 (sequence is synthesized)
aaaaagtccaccaacatcattgtgagagcattaaaaaaaggacgattttggatcacaccagatccttatcacaaagatgacaacatccagattggccgtgaggtgaaaatatcttgccaa

SEQ ID NO: 356509 - DNA, 120 bp, Artificial Sequence
  ENSG00000139915_9 (sequence is synthesized)
gtagaagctgttccttctgaggagctaacatttagttggtttaaaaatggtcgtccattaagaagttctgagcggatggtcattacacagactgatcctgatgtctctccgggaacaaca

SEQ ID NO: 356510 - DNA, 120 bp, Artificial Sequence
  ENSG00000139915_10 (sequence is synthesized)
aacttggacatcattgatttaaaattcacggattttgggacgtacacatgtgtagcatctctgaagggaggaggaatatctgatatcagtatcgatgttaatatatccagcagcacagtt

SEQ ID NO: 356511 - DNA, 120 bp, Artificial Sequence
  ENSG00000139915_11 (sequence is synthesized)
tctagagcggataaagaagttgcaatgcctgatggatcaatgcaaatggagagttatgatggaacactgaggattgtgaatgtatctagggaaatgtcaggaatgtacagatgtcagacc

SEQ ID NO: 356512 - DNA, 120 bp, Artificial Sequence
  ENSG00000139915_12 (sequence is synthesized)
agccaatacaatggatttaacgtgaaaccaagggaagccttggtgcagctcatcgttcagtatccccctgcagtggaaccagcattcttggaaatccggcaaggacaggatcgaagtgtc

SEQ ID NO: 356513 - DNA, 120 bp, Artificial Sequence
  ENSG00000139915_13 (sequence is synthesized)
actatgagttgcagagtactgagagcctatccaatacgggtgctgacctatgagtggcgcttgggcaataaattattacggacgggtcaatttgactctcaggaatacacagagtacgct

SEQ ID NO: 356514 - DNA, 120 bp, Artificial Sequence
  ENSG00000139915_14 (sequence is synthesized)
gtgaagagtctttccaatgaaaactatggggtttataactgtagcatcataaatgaagctggagctgggagatgcagctttcttgttacaggaaaggcctatgctccagaattctattat

SEQ ID NO: 356515 - DNA, 120 bp, Artificial Sequence
  ENSG00000139915_15 (sequence is synthesized)
gatacctacaatccagtatggcagaacagacaccgtgtttattcttacagtctacagtggacacagatgaatcctgatgcagtggatcggattgttgcataccggttgggcatcaggcag

SEQ ID NO: 356516 - DNA, 120 bp, Artificial Sequence
  ENSG00000139915_16 (sequence is synthesized)
gctggacagcagcgctggtgggagcaggagattaaaataaatgggaatattcaaaagggagaattaattacatataacttgacagagctaattaaaccagaagcttatgaagtccgactg

SEQ ID NO: 356517 - DNA, 120 bp, Artificial Sequence
  ENSG00000139915_17 (sequence is synthesized)
actcctctcaccaaatttggtgaaggagattcaacaattcgtgtgatcaaatatagtgctcctgtaaatcctcatttgagagaatttcattgtggatttgaagatggtaatatttgtttg

SEQ ID NO: 356518 - DNA, 120 bp, Artificial Sequence
  ENSG00000139915_18 (sequence is synthesized)
ttcactcaagatgatacagataattttgactggacaaagcaaagtacagcaacaagaaatacaaaatatactcctaatacaggacctaatgctgaccgtagtggctccaaagaaggtttt

SEQ ID NO: 356519 - DNA, 120 bp, Artificial Sequence
  ENSG00000139915_19 (sequence is synthesized)
tatatgtacattgagacatcacgacccagattggaaggcgaaaaggctcgacttctcagccctgttttcagcatagctcccaaaaacccttatggacccacaaacactgcatattgtttc

SEQ ID NO: 356520 - DNA, 120 bp, Artificial Sequence
  ENSG00000139915_20 (sequence is synthesized)
agcttcttttatcacatgtatggacaacatataggtgtcttaaatgtttatctacgtttgaaagggcaaacaacaatagagaatccactgtggtcttcaagtgggaataaaggacaaaga

SEQ ID NO: 356521 - DNA, 120 bp, Artificial Sequence
  ENSG00000139915_21 (sequence is synthesized)
tggaatgaggctcatgttaatatatacccaattacttcatttcagctcatttttgaaggtatccgaggtcctggaatagaaggtgacattgctattgatgatgtatcaattgcagaagga

SEQ ID NO: 356522 - DNA, 120 bp, Artificial Sequence
  ENSG00000139915_22 (sequence is synthesized)
gaatgtgcaaaacaagacctagcaactaagaattccgttgatggtgctgttgggattttggttcatatatggctttttcccattatcgtcctcatctctatcttaagtcctcgaaggtga

SEQ ID NO: 356523 - DNA, 120 bp, Artificial Sequence
  ENSG00000139915_23 (sequence is synthesized)
attctccctctcttgcaagtggcggtgcctggactctgctttcggctccgggaattggtgcggccggccagagcacctctacgctggccgggcgctaaaggctattttggagagcggtgg

SEQ ID NO: 356524 - DNA, 120 bp, Artificial Sequence
  ENSG00000139915_24 (sequence is synthesized)
cggtggcggctgggctggtgtgcccaagcgagctccagacgcacactccgctccctgttggaccctttcctcctccttcttccccctcctcccttccctcttccccacccccgttcccct

SEQ ID NO: 356525 - DNA, 120 bp, Artificial Sequence
  ENSG00000139915_25 (sequence is synthesized)
ctcttcctcctcctcctcttcctcctctccccgttcggcgatgcgagtctgtatcgtgtaacaggattggcgttgcaatggcaactgatggaatgggggaaggcaagacagcagggctgg

SEQ ID NO: 356526 - DNA, 120 bp, Artificial Sequence
  ENSG00000139915_26 (sequence is synthesized)
atgggggaaggcaagacagcagggctgggggcttcggactgcgggcgggcgggccgctgtcgccgcttgacgcccctccggggaccttcgcgagttactttgtaaaggcgaatccaggca

SEQ ID NO: 356527 - DNA, 120 bp, Artificial Sequence
  ENSG00000139915_27 (sequence is synthesized)
agagagccctgctcggtgtcctgggtcagaggccacttcctgctcctcggctgtccaagccaggctcctaccgcgcggcacccccggccccctgcccgcgcccgccgccggcccagcgcg

SEQ ID NO: 356528 - DNA, 120 bp, Artificial Sequence
  ENSG00000139915_28 (sequence is synthesized)
ccgccgccgccgccgcagctgcggagactcgagcccgcttccctgaagaacacttcgcctcgcagctccccttcccatcaccgccccctgctcctccccggcgtctgcgattttcccagg

SEQ ID NO: 356529 - DNA, 120 bp, Artificial Sequence
  ENSG00000139915_29 (sequence is synthesized)
cacccggtgtgagtgcggcgtgcgtgtgagtgtgtgtcagggtattgtgttgtgggagagtgtgtgagtgtgtgtgagtgtgtgtgtgcatgagtgtgtggagtgcggggctcctgcgct

SEQ ID NO: 356530 - DNA, 120 bp, Artificial Sequence
  ENSG00000139915_30 (sequence is synthesized)
cctgcgctccgctcgccgccgccgccggggaaggacagacggacggcgcttcctccttcggcgagcggttcccgggcacctcggcttggcccgggcgcgagtggagcgcgcctggctggc

SEQ ID NO: 356531 - DNA, 120 bp, Artificial Sequence
  ENSG00000139915_31 (sequence is synthesized)
tggcatgaagaaagagtctttgtaaatggacattgaacaaacaaactaccaaagattcctccactgactactgactcaaaaataaaataataaaaacaaatttttttaagcactggggat

SEQ ID NO: 356532 - DNA, 120 bp, Artificial Sequence
  ENSG00000139915_32 (sequence is synthesized)
aaaaagacatcatggaagtataacttattccagactaaacataaaagataatcttgacctgagtagagaagagaccttcaggtgcttttgtggctaaaaagattacagcgtcatctggtt

SEQ ID NO: 356533 - DNA, 120 bp, Artificial Sequence
  ENSG00000139915_33 (sequence is synthesized)
aaaatgaaaaaaagaaaaaaaaaagagctatagaaatccttgtcaaagcacaaagtcatggctggttttgtttcaaatgaatagtttgcttgttaccatggaaacctaatggcctgccaa

SEQ ID NO: 356534 - DNA, 120 bp, Artificial Sequence
  ENSG00000139915_34 (sequence is synthesized)
gaaacctaatggcctgccaacaaaaacctcactgtaaacagggtacgtgaagagctggcatttattttccttacgagaaggttttcgtagagaattaaataaatgtaggcccttttacct

SEQ ID NO: 356535 - DNA, 120 bp, Artificial Sequence
  ENSG00000139915_35 (sequence is synthesized)
ttggctgttacccttccttgaaaataacccgaactcagaattatttaaagcattcatgtttctccccaccttatccccatcccacctttattattattatttttctcccatggctaagct

SEQ ID NO: 356536 - DNA, 120 bp, Artificial Sequence
  ENSG00000139915_36 (sequence is synthesized)
agataactgtatgctgtctctttttgcatgcactactatccaggatggtaaacctgggcttacatgttacacaggcttatcggagtttgcttgcggccacttgaacacccaaactacgtc

SEQ ID NO: 356537 - DNA, 120 bp, Artificial Sequence
  ENSG00000139915_37 (sequence is synthesized)
atctgttccaatgaagaaaccaaaccaccatcttttataaattgccatggaaaccaagtgccttcaatgaaacaagcctgaataattttcaactcagaagcttgcactgctaagagtggt

SEQ ID NO: 356538 - DNA, 120 bp, Artificial Sequence
  ENSG00000139915_38 (sequence is synthesized)
ttgtgtaaaactattttataaacaaactacagagcctaaatgtgcaaattacaggcaagacaacaaagccgcttctgaagaagaaaggaccgaagctgctgcgtaagcccatgcagacaa

SEQ ID NO: 356539 - DNA, 120 bp, Artificial Sequence
  ENSG00000139915_39 (sequence is synthesized)
gatatttgttgtttaacctcctagacagccatggcctttcggcttattgtccattagaaaatcacttccattgagaccagacatggagcaacactttttttcttccaggttattaaatgg

SEQ ID NO: 356540 - DNA, 120 bp, Artificial Sequence
  ENSG00000139915_40 (sequence is synthesized)
gtcaaccagagcaaaaggttattaagaatacttagtgcagaaggtggtaaaacacaaaagtgatttttttactctaacctccatttgaaatgaaattggccctagctttagagggaacaa

SEQ ID NO: 356541 - DNA, 120 bp, Artificial Sequence
  ENSG00000139915_41 (sequence is synthesized)
gaaaatgtttgggattgcagtgcatactaactctacagtggaactgggcctgaaaaatctggctttattctaaactctgagggtaatatgcctctgccctttagtcagactctgtgcaaa

SEQ ID NO: 356542 - DNA, 120 bp, Artificial Sequence
  ENSG00000139915_42 (sequence is synthesized)
ttgtgaaatattattttattattttaccaagattataaaaacacttttacaaaaaaacaaaaacctgtaaaaataattttgagctacctgacgacaaatcatatctttaaccagccagtt

SEQ ID NO: 356543 - DNA, 120 bp, Artificial Sequence
  ENSG00000139915_43 (sequence is synthesized)
ttccaatgcattgtaaatttcacttaaacctgttggttatgaaaatttgaagatcattttccttaaattatctcagcttttaacttcatttaaaaagacttttgtctaagaagaatatta

SEQ ID NO: 356544 - DNA, 120 bp, Artificial Sequence
  ENSG00000139915_44 (sequence is synthesized)
ttattatatgttctttcaacaccccaggattaaaaaaactgattatgcaagcaattggaatataagtattaaattatagcatttgcaaatattaatataaaagcacaacaaaatgtagtg

SEQ ID NO: 356545 - DNA, 120 bp, Artificial Sequence
  ENSG00000139915_45 (sequence is synthesized)
gaaaatgacaaagcttgttttttaaaacaattctgtagaaatgtttgtgcaaattcagtaattcaacttaaaatataattttacagctatgttcaataaagcctctttccaggtaaggta

SEQ ID NO: 356546 - DNA, 120 bp, Artificial Sequence
  ENSG00000139915_46 (sequence is synthesized)
gagcatctggttattcaaggcctctccagtgtctctcctatgtctgagacatagtggcaagctgataaggctgtacagtggcaagggcaaaggagatcttaacccttagtccaatttaag

SEQ ID NO: 356547 - DNA, 120 bp, Artificial Sequence
  ENSG00000139915_47 (sequence is synthesized)
tgaagagctttatgagaggcagtttatggcaagagaagactcattgaggttcccattagtcccacaaagagtgtactaaatttacaccttctgaactccaaattatattttaaaatgcaa

SEQ ID NO: 356548 - DNA, 79 bp, Artificial Sequence
  ENSG00000139915_48 (sequence is synthesized)
agtgccaaagccgaggaggcgccgagagcgaaggagggctgtgagggctgccagctggctgtcacctcacagtgtagcg

SEQ ID NO: 356549 - DNA, 120 bp, Artificial Sequence
  ENSG00000139915_49 (sequence is synthesized)
gggattacaggcatgagtcattgtgcccagccagaaagcttttgagaagttaaactactataaacttgaagtcaggagacctgggcaggaacttggctgtagcacttcatcactgtaata

SEQ ID NO: 356550 - DNA, 120 bp, Artificial Sequence
  ENSG00000139915_50 (sequence is synthesized)
cttcagagaaatcacttaaaatgtctgaaccttggtttccttatctgtaaaatgagaataataactcttatttcagaaagctgtagtttaagttaaattaggcaacatacatagtatctt

SEQ ID NO: 356551 - DNA, 120 bp, Artificial Sequence
  ENSG00000139915_51 (sequence is synthesized)
caaccagatggcagacactcataatcttaggttactttgaatctgaaatagcaataataatagcaataataaaataatagttgacatttatggagtactcatcatgggctaggatacttt

SEQ ID NO: 356552 - DNA, 120 bp, Artificial Sequence
  ENSG00000139915_52 (sequence is synthesized)
gtggattatttctcttaattttcacgatcaacatttgtgcttattaaaatcattatcctgtttcatagataacaaaattgaaatacaaaggactttagttaccatgcccatcacctggct

SEQ ID NO: 356553 - DNA, 120 bp, Artificial Sequence
  ENSG00000139915_53 (sequence is synthesized)
aagtagtgaagccataacacaaacatgggaagctggacagagtctgcctgttttattactgtgcaggaacacttgttggaagattttgcaagcctagctaagtatgtgacagttacttag

SEQ ID NO: 356554 - DNA, 120 bp, Artificial Sequence
  ENSG00000139915_54 (sequence is synthesized)
tagtggtgtgagttattagattttctgcaatcaaaaagcataatgagatatttgatttaggaaaataaacataaaaataggtaaaatcattcagaaacagaatctagactgggaatcact

SEQ ID NO: 356555 - DNA, 120 bp, Artificial Sequence
  ENSG00000139915_55 (sequence is synthesized)
taaagaaccaatgaaaggaaacaaatcgcataattgccaagccattttatttattgtgggattactatattattactaatgtaggattagctcaactctaattcttcctttttgttaata

SEQ ID NO: 356556 - DNA, 120 bp, Artificial Sequence
  ENSG00000139915_56 (sequence is synthesized)
atgtatactctgtttcctctttgttttgaatatgtgtcatgtactttctttctcctcttccaatttacattggatcacatattttaattgatttttaaataaatatttccaagaccaata

SEQ ID NO: 356557 - DNA, 120 bp, Artificial Sequence
  ENSG00000139915_57 (sequence is synthesized)
acatgtatggacaacatataggtgagatagcaataattactgattcttacaaaattaatgataactaagaagaaaaaggttcataaacacacagcattaaaacaatttttggtcaaagaa

SEQ ID NO: 356558 - DNA, 120 bp, Artificial Sequence
  ENSG00000139915_58 (sequence is synthesized)
gcttgagcctgtaccagaatgataagtggaaattagtcctcaaagtaacctcagctgtttcattattgtgtgcctcgagcatctggttattcaagctcctcccacggttcgtattgtgca

SEQ ID NO: 356559 - DNA, 120 bp, Artificial Sequence
  ENSG00000139915_59 (sequence is synthesized)
gaagctctacaaagtctgagactttgtctgcatcactcattgctataatctcaatagccgaaacaatacatggcacatagaagacaggagcagctcctcaatttgtggtgtccagtgaaa

SEQ ID NO: 356560 - DNA, 120 bp, Artificial Sequence
  ENSG00000139915_60 (sequence is synthesized)
ataaaaatgcatgccccttgttcaaaaattaataaactcactatggcaacatcaaagcattaaagcaaatttggggctgttctaagtgtggctacacggatggcaggctcttgaggctag

SEQ ID NO: 356561 - DNA, 120 bp, Artificial Sequence
  ENSG00000139915_61 (sequence is synthesized)
atggcctaggagattttattgtgatagaaggcctacagaagatgatgcctaacctaaagaatgagttactgaagatgattacatattctgtcttcaagccaaaactgacctttgatgttc

SEQ ID NO: 356562 - DNA, 120 bp, Artificial Sequence
  ENSG00000139915_62 (sequence is synthesized)
caatttgcttacaatagagtggaatactagaatgcagtataaagttctataaatctgagattgtatgattcaactgacatcattaaaatgatatttatcccaatactattgaagactaaa

SEQ ID NO: 356563 - DNA, 120 bp, Artificial Sequence
  ENSG00000139915_63 (sequence is synthesized)
aaaaaaacaaacaaacaaaaaaaatcaccattccttttaatagcttgagcctgtaccagaatgataagtggaaattagtcctcaaagtaacctcagctgtttcattattgtgtgcctcga

SEQ ID NO: 356564 - DNA, 120 bp, Artificial Sequence
  ENSG00000139915_64 (sequence is synthesized)
gcatctggttattcaaggtgaggcttccatgttcaagtatgaatcccttgggatctgccgcaggactcacggtagtgctgcctgcttctcccactctgtggctgactcccctgaggtagc

SEQ ID NO: 356565 - DNA, 120 bp, Artificial Sequence
  ENSG00000139915_65 (sequence is synthesized)
gggtatgaccttttgtgttcatagcaatcagagacttttaaaaactgctataaatatgaaatactaatatttagccatatatttgaagattatggaataaaatattaaattttctgtaca

SEQ ID NO: 356566 - DNA, 120 bp, Artificial Sequence
  ENSG00000139921_0 (sequence is synthesized)
agtgggagctgcgaccgcgctccctgtgaggtgggcaagcggcgaaatggcgccctccgggagtcttgcagttcccctggcagtcctggtgctgttgctttggggtgctccctggacgca

SEQ ID NO: 356567 - DNA, 120 bp, Artificial Sequence
  ENSG00000139921_1 (sequence is synthesized)
cgggcggcggagcaacgttcgcgtcatcacggacgagaactggagagaactgctggaaggagactggatgatagaattttatgccccgtggtgccctgcttgtcaaaatcttcaaccgga

SEQ ID NO: 356568 - DNA, 120 bp, Artificial Sequence
  ENSG00000139921_2 (sequence is synthesized)
atgggaaagttttgctgaatggggagaagatcttgaggttaatattgcgaaagtagatgtcacagagcagccaggactgagtggacggtttatcataactgctcttcctactatttatca

SEQ ID NO: 356569 - DNA, 120 bp, Artificial Sequence
  ENSG00000139921_3 (sequence is synthesized)
ttgtaaagatggtgaatttaggcgctatcagggtccaaggactaagaaggacttcataaactttataagtgataaagagtggaagagtattgagcccgtttcatcatggtttggtccagg

SEQ ID NO: 356570 - DNA, 120 bp, Artificial Sequence
  ENSG00000139921_4 (sequence is synthesized)
ttctgttctgatgagtagtatgtcagcactctttcagctatctatgtggatcaggacttgccataactactttattgaagaccttggattgccagtgtggggatcatatactgtttttgc

SEQ ID NO: 356571 - DNA, 120 bp, Artificial Sequence
  ENSG00000139921_5 (sequence is synthesized)
tttagcaactctgttttccggactgttattaggactctgtatgatatttgtggcagattgcctttgtccttcaaaaaggcgcagaccacagccgtacccatacccttcaaaaaaattatt

SEQ ID NO: 356572 - DNA, 120 bp, Artificial Sequence
  ENSG00000139921_6 (sequence is synthesized)
atcagaatctgcacaacctttgaaaaaagtggaggaggaacaagaggcggatgaagaagatgtttcagaagaagaagctgaaagtaaagaaggaacaaacaaagactttccacagaatgc

SEQ ID NO: 356573 - DNA, 120 bp, Artificial Sequence
  ENSG00000139921_7 (sequence is synthesized)
cataagacaacgctctctgggtccatcattggccacagataaatcctagttaaattttatagttatcttaatattatgattttgataaaaacagaagattgatcattttgtttggtttga

SEQ ID NO: 356574 - DNA, 120 bp, Artificial Sequence
  ENSG00000139921_8 (sequence is synthesized)
agtgaactgtgacttttttgaatattgcagggttcagtctagattgtcattaaattgaagagtctacattcagaacataaaagcactaggtatacaagtttgaaatatgatttaagcaca

SEQ ID NO: 356575 - DNA, 120 bp, Artificial Sequence
  ENSG00000139921_9 (sequence is synthesized)
gtatgatggtttaaatagttctctaatttttgaaaaatcgtgccaagcaataagatttatgtatatttgtttaataataacctatttcaagtctgagttttgaaaatttacatttcccaa

SEQ ID NO: 356576 - DNA, 120 bp, Artificial Sequence
  ENSG00000139921_10 (sequence is synthesized)
gtattgcattattgaggtatttaagaagattattttagagaaaaatatttctcatttgatataatttttctctgtttcactgtgtgaaaaaaagaagatatttcccataaatgggaagtt

SEQ ID NO: 356577 - DNA, 120 bp, Artificial Sequence
  ENSG00000139921_11 (sequence is synthesized)
tgcccattgtctcaagaaatgtgtatttcagtgacaatttcgtggtctttttagaggtatattccaaaatttccttgtatttttaggttatgcaactaataaaaactaccttacattaat

SEQ ID NO: 356578 - DNA, 120 bp, Artificial Sequence
  ENSG00000139921_12 (sequence is synthesized)
taattacagttttctacacatggtaatacaggatatgctactgatttaggaagtttttaagttcatggtattctcttgattccaacaaagtttgattttctcttgtatttttcttactta

SEQ ID NO: 356579 - DNA, 120 bp, Artificial Sequence
  ENSG00000139921_13 (sequence is synthesized)
ctatgggttacattttttatttttcaaattggatgataatttcttggaaacattttttatgttttagtaaacagtatttttttgttgtttcaaactgaagtttactgagagatccatcaa

SEQ ID NO: 356580 - DNA, 120 bp, Artificial Sequence
  ENSG00000139921_14 (sequence is synthesized)
attgaacaatctgttgtaatttaaaattttggccacttttttcagattttacatcattcttgctgaacttcaacttgaaattgtttttttttttttttctttttggatgtgaaggtgaac

SEQ ID NO: 356581 - DNA, 120 bp, Artificial Sequence
  ENSG00000139921_15 (sequence is synthesized)
attcctgatttttgtctgatgtgaaaaagccttggtattttacattttgaaaattcaaagaagcttaatataaaagtttgcattctactcaggaaaaagcatcttcttgtatatgtctta

SEQ ID NO: 356582 - DNA, 120 bp, Artificial Sequence
  ENSG00000139921_16 (sequence is synthesized)
tttaaaataataacatttttatattttttaaaagacaaacttcatattatcctgtgttctttcctgactggtaatattgtgtgggatttcacaggtaaaagtcagtaggatggaacattt

SEQ ID NO: 356583 - DNA, 120 bp, Artificial Sequence
  ENSG00000139921_17 (sequence is synthesized)
tagtgtatttttactccttaaagagctagaatacatagttttcaccttaaaagaagggggaaaatcataaatacaatgaatcaactgaccattacgtagtagacaatttctgtaatgtcc

SEQ ID NO: 356584 - DNA, 120 bp, Artificial Sequence
  ENSG00000139921_18 (sequence is synthesized)
ccttctttctaggctctgttgctgtgtgaatccattagatttacagtatcgtaatatacaagttttctttaaagccctctcctttagaatttaaaatattgtaccattgaagagtttgga

SEQ ID NO: 356585 - DNA, 120 bp, Artificial Sequence
  ENSG00000139921_19 (sequence is synthesized)
tgtgtaacttgtgatgccttagaaaaatatcctaagcacaaaataaacctttctaaccacttcattaaagctgaagaccagtatgatttctggttgctttttgaaggtatgctttattac

SEQ ID NO: 356586 - DNA, 120 bp, Artificial Sequence
  ENSG00000139921_20 (sequence is synthesized)
tttgtatttaacgatgttcagatgagtagttgtgtgttcctatatatgtacttgatatgtgtaatcaaaagactgccttctttttctattgagatgtttaaggacagtaatgctcattaa

SEQ ID NO: 356587 - DNA, 120 bp, Artificial Sequence
  ENSG00000139921_21 (sequence is synthesized)
tcaagcattttttttttttagtgttctagtatatgtgacatggccaatttttttattagaaaatatgtgaccagaaagattctatagagtaaaaaatcaaagcaaaacaaaaaccacaaa

SEQ ID NO: 356588 - DNA, 120 bp, Artificial Sequence
  ENSG00000139921_22 (sequence is synthesized)
aagacccctgtactatagaaaatgtaaagttggctgaacagatagggtcttgaaatttcaggaaacatataatctcacggttcttaaagattgtcactgtagacatctgagtaattaatt

SEQ ID NO: 356589 - DNA, 120 bp, Artificial Sequence
  ENSG00000139921_23 (sequence is synthesized)
ttcagttagtaacaggcttatagaaactttgggattatttacaaatggtttaggaaagaataaggtatagtaaaagtaatatcctggagaattctgggccacctacccaccataatcaat

SEQ ID NO: 356590 - DNA, 120 bp, Artificial Sequence
  ENSG00000139921_24 (sequence is synthesized)
tcagctgtactactgaagtattgtaaaatctgatctctagaggaaaatacagtattctaccttacgttgtgtaaatacttaatgattatcagaaagactgaaaaaagttttaatgaagaa

SEQ ID NO: 356591 - DNA, 120 bp, Artificial Sequence
  ENSG00000139921_25 (sequence is synthesized)
ttctggctacatctaacagctgccatttaccaagtacctactggagctttgttgttttcttgtatttattaatttagtcctaatgacaactgcaagacaggtaagcattgcacatctttc

SEQ ID NO: 356592 - DNA, 120 bp, Artificial Sequence
  ENSG00000139921_26 (sequence is synthesized)
caagacaggtaagcattgcacatctttcaggtgagtcagcccagaggtgtggtacaaataggtaaaatttgaatctaattcttgttccaaatctttttttgtttgtttttgtttttgttt

SEQ ID NO: 356593 - DNA, 120 bp, Artificial Sequence
  ENSG00000139921_27 (sequence is synthesized)
tacaggcatgtgccaccatgcccggctattattttggtcttaaaatttcactcctgtcagaatgtaggagtgaataaatgctattcataaataaccataattattcagtatttgcagtct

SEQ ID NO: 356594 - DNA, 120 bp, Artificial Sequence
  ENSG00000139921_28 (sequence is synthesized)
tcataaataaccataattattcagtatttgcagtctcgtgatgttggttattgcataaagtaagttattgcagtaaatgatgctttagaaagcaattttctctcatcagtttcgtcctta

SEQ ID NO: 356595 - DNA, 120 bp, Artificial Sequence
  ENSG00000139921_29 (sequence is synthesized)
ttcagccttacacaaaaaaaggcatagttctgggcttaattgtgatgtaattaaaattattgagtgaacattttggctcatattttatgacattgtagttcatccccatggtcaatttaa

SEQ ID NO: 356596 - DNA, 120 bp, Artificial Sequence
  ENSG00000139921_30 (sequence is synthesized)
ggtagagttcttacaatatattactttcaatataggtattttattaataagaatttatttcagttggacttattaaatgagtggttttgctgagtgtatgagtctataaataaaatttta

SEQ ID NO: 356597 - DNA, 120 bp, Artificial Sequence
  ENSG00000139921_31 (sequence is synthesized)
attgaacatcattggagatttagatatgttggtactgcttatctagcaacttttgtatttgtgaaaccattaaaactagagtaacaataaatttaagttggaattttggtaatatgtaaa

SEQ ID NO: 356598 - DNA, 120 bp, Artificial Sequence
  ENSG00000139921_32 (sequence is synthesized)
gattctaaattatggagaaggatgcattatagtgtaatcagaagtagtaggcctctggcttggatcatgctggaagagctgaggtaatctcattatattcagcaggtattttagagggct

SEQ ID NO: 356599 - DNA, 120 bp, Artificial Sequence
  ENSG00000139921_33 (sequence is synthesized)
tgttttgcttagtgttatcctaggtgcctttaggtagttgagtgatgtgtgaaacagtctctgttctcaaagatttacagttgttttggaaagtgatgttcttgtgaaatggtgtgatcc

SEQ ID NO: 356600 - DNA, 120 bp, Artificial Sequence
  ENSG00000139921_34 (sequence is synthesized)
tgttcagcgtgttaagtcattatgcatccaaagtagtggtgagtcctgtaggtaattggataaaggagaaatcacagttacctggattggttcccagagaatatggggtttaaatgaaac

SEQ ID NO: 356601 - DNA, 120 bp, Artificial Sequence
  ENSG00000139921_35 (sequence is synthesized)
cttggaagtagaattttaagagtggagcgtaagcattttattgtgaggacaatctcataaacagtcattaacaggaacatgttatgtccaaaaagtagctaagaaagtgctgttgtacag

SEQ ID NO: 356602 - DNA, 120 bp, Artificial Sequence
  ENSG00000139926_0 (sequence is synthesized)
cttgaaggaagggtgttgggtgaactaacactattttctcctgccctttcccccaatctcaatccctttctctccaaacattcttccttgagcaccccactctggcactcaaaaagccat

SEQ ID NO: 356603 - DNA, 120 bp, Artificial Sequence
  ENSG00000139926_1 (sequence is synthesized)
gggaatgggaaagaagtggctggaagtaaacagcctgcttactcacagcaactgaaaattttgtttcgacgattctggttccaggggcaggagctgaagattaatgcctggagtctgccc

SEQ ID NO: 356604 - DNA, 120 bp, Artificial Sequence
  ENSG00000139926_2 (sequence is synthesized)
cattctgagagcagcagcctggctcctggtggctccagcagcagccttcatatctgtttttttcttatgaagcttcttctggttggaaacttgtcaaatttcatcagctatgaaacccac

SEQ ID NO: 356605 - DNA, 120 bp, Artificial Sequence
  ENSG00000139926_3 (sequence is synthesized)
gtagtcgaacaccgtgatgcttctcctgcagggcgtgtgatgaggaggcgagcttggctttggagtgctgggaacctgaggaattgccaaggacccagagcccagccctgaccaccagag

SEQ ID NO: 356606 - DNA, 120 bp, Artificial Sequence
  ENSG00000139926_4 (sequence is synthesized)
tgcccaaaacacaatgaacaaattgaattttcataacaacagagtcatgcaagaccgccgcagtgtgtgcattttccttcccaacgatgaatctctgaacatcatcataaatgttaagat

SEQ ID NO: 356607 - DNA, 120 bp, Artificial Sequence
  ENSG00000139926_5 (sequence is synthesized)
tctgtgtcaccagttgctggtccaggtttgtgacctgctcaggctaaaggactgccacctctttggactcagtgttatacaaaataatgaacatgtgtatatggagttgtcacaaaagct

SEQ ID NO: 356608 - DNA, 120 bp, Artificial Sequence
  ENSG00000139926_6 (sequence is synthesized)
ttacaaatattgtccaaaagaatggaagaaagaggccagcaagggtatcgaccaatttgggcctcctatgatcatccacttccgtgtgcagtactatgtggaaaatggcagattgatcag

SEQ ID NO: 356609 - DNA, 120 bp, Artificial Sequence
  ENSG00000139926_7 (sequence is synthesized)
tgacagagcagcaagatactattattactggcacctgagaaaacaagttcttcattctcagtgtgtgctccgagaggaggcctacttcctgctggcagcctttgccctgcaggctgatct

SEQ ID NO: 356610 - DNA, 120 bp, Artificial Sequence
  ENSG00000139926_8 (sequence is synthesized)
tgggaacttcaaaaggaataagcactatggaaaatacttcgagccagaggcttacttcccatcttgggttgtttccaagagggggaaggactacatcctgaagcacattccaaacatgca

SEQ ID NO: 356611 - DNA, 120 bp, Artificial Sequence
  ENSG00000139926_9 (sequence is synthesized)
caaagatcagtttgcactaacagcttccgaagctcatcttaaatatatcaaagaggctgtccgactggatgacgtcgctgttcattactacagattgtataaggataaaagggaaattga

SEQ ID NO: 356612 - DNA, 120 bp, Artificial Sequence
  ENSG00000139926_10 (sequence is synthesized)
agcatcgctgactcttggattgaccatgaggggaatacagatttttcagaatttagatgaagagaaacaattactttatgatttcccctggacaaatgttggaaaattggtgtttgtggg

SEQ ID NO: 356613 - DNA, 120 bp, Artificial Sequence
  ENSG00000139926_11 (sequence is synthesized)
taagaaatttgagattttgccagatggcttgccttctgcccggaagctcatatactacacggggtgccccatgcgctccagacacctcctgcaacttctgagcaacagccaccgcctcta

SEQ ID NO: 356614 - DNA, 120 bp, Artificial Sequence
  ENSG00000139926_12 (sequence is synthesized)
tatgaatctgcagcctgtcctgcgccatatccggaagctggaggaaaacgaagagaagaagcagtaccgggaatcttacatcagtgacaacctggacctcgacatggaccagctggaaaa

SEQ ID NO: 356615 - DNA, 120 bp, Artificial Sequence
  ENSG00000139926_13 (sequence is synthesized)
acggtcgcgggccagcgggagcagtgcgggcagcatgaaacacaagcgcctgtcccgtcattccaccgccagccacagcagttcccacacctcgggcattgaggcagacaccaagccccg

SEQ ID NO: 356616 - DNA, 120 bp, Artificial Sequence
  ENSG00000139926_14 (sequence is synthesized)
ggacacggggccagaagacagctactccagcagtgccatccaccgcaagctgaaaacctgcagctcaatgaccagtcatggcagctcccacacctcaggggtggagagtggcggcaaaga

SEQ ID NO: 356617 - DNA, 120 bp, Artificial Sequence
  ENSG00000139926_15 (sequence is synthesized)
ccggctggaagaggacttacaggacgatgaaatagagatgttggttgatgacccccgggatctggagcagatgaatgaagagtctctggaagtcagcccagacatgtgcatctacatcac

SEQ ID NO: 356618 - DNA, 120 bp, Artificial Sequence
  ENSG00000139926_16 (sequence is synthesized)
agaggacatgctcatgtcgcggaagctgaatggacactctgggttgattgtgaaagaaattgggtcttccacctcgagctcttcagaaacagttgttaagcttcgtggccagagtactga

SEQ ID NO: 356619 - DNA, 120 bp, Artificial Sequence
  ENSG00000139926_17 (sequence is synthesized)
ttctcttccacagactatatgtcggaaaccaaagacctccactgatcgacacagcttgagcctcgatgacatcagactttaccagaaagacttcctgcgcattgcaggtctgtgtcagga

SEQ ID NO: 356620 - DNA, 120 bp, Artificial Sequence
  ENSG00000139926_18 (sequence is synthesized)
cactgctcagagttacacctttggatgtggccatgaactggatgaggaaggcctctattgcaacagttgcttggcccagcagtgcatcaacatccaagatgcttttccagtcaaaagaac

SEQ ID NO: 356621 - DNA, 120 bp, Artificial Sequence
  ENSG00000139926_19 (sequence is synthesized)
ttactgtttgctagaggatgcgaaagtcataagttctttacatattacttgtgccatatcttcttcaccctaaacatagctctttctttataatatttgtgatgatggaaacaaaagcct

SEQ ID NO: 356622 - DNA, 120 bp, Artificial Sequence
  ENSG00000139926_20 (sequence is synthesized)
tggaacaattgcactttaagtattacacagaagtaaaagaactacagaaaatgtacagcaagacaagtgcccggaagttcactgatccttcagaaggaaatgcgctttactgattgcaaa

SEQ ID NO: 356623 - DNA, 120 bp, Artificial Sequence
  ENSG00000139926_21 (sequence is synthesized)
gccttcagaatattggagtgtggtgtgtttgctcatctgatgctttttagttcagttacatgtaacatcacatttttttatcacgtgaaagatgttagatttgtttgcttataaattttt

SEQ ID NO: 356624 - DNA, 120 bp, Artificial Sequence
  ENSG00000139926_22 (sequence is synthesized)
taccactcccacataaaatgctcatagtttgggagaggaaagagggaagattctctcttcttttaacagagagatgattgctctgtatacccattgcttcctccctgaggctgtcccaaa

SEQ ID NO: 356625 - DNA, 120 bp, Artificial Sequence
  ENSG00000139926_23 (sequence is synthesized)
gtgaacactgatggagtggtcaaaatcataaggttgtagcaagccaaagatacgtatgtgacagaagcacataagcaataagcagaaaaccagaagtgcatgctgtgatgcctgtgactc

SEQ ID NO: 356626 - DNA, 120 bp, Artificial Sequence
  ENSG00000139926_24 (sequence is synthesized)
cttcatcccgctcagtgccatgtcctcttttgtgatcttccagaaagctccaggattcatttgagttccacatccaagtaacagatgaattatattcatgttgtaatgcattttgtggag

SEQ ID NO: 356627 - DNA, 120 bp, Artificial Sequence
  ENSG00000139926_25 (sequence is synthesized)
tttacaaaaccagtgtctgttaaaactttggaaaatgtcttagaaaacgttggtgcttggtgatgctttatttgtttaattatcaagaacaaattatggcaatgctagtttctgcttaac

SEQ ID NO: 356628 - DNA, 120 bp, Artificial Sequence
  ENSG00000139926_26 (sequence is synthesized)
caaaatactctgtgtatatattatacatatataaatacatgggattgtgtatgtctatatgtgtttaaagcttactatgtcttcattttggcttccatgactatcttttatacatggaat

SEQ ID NO: 356629 - DNA, 120 bp, Artificial Sequence
  ENSG00000139926_27 (sequence is synthesized)
tccttaagattgagaatatgtcactgagtgaatgatacctgcagacagtcagttgatatatgtagagttcagaatgactgttttctcatgtgcctttggccatgattctcaacactgatt

SEQ ID NO: 356630 - DNA, 120 bp, Artificial Sequence
  ENSG00000139926_28 (sequence is synthesized)
gtataacagaattttggggggagcttttaaaaaataatgactgagtctcccaccagaccgattacatcattctcttgtggcgggacccaagtagaattgccttttcttttaaagttctcc

SEQ ID NO: 356631 - DNA, 120 bp, Artificial Sequence
  ENSG00000139926_29 (sequence is synthesized)
agatggagctaatatgcaacaaagttgaaaaccactgatcctgggggtgtcttgttaattttgaagtaaaagtgtacagaagacgtagtgtatgagaaagggccatttttaagacagtta

SEQ ID NO: 356632 - DNA, 120 bp, Artificial Sequence
  ENSG00000139926_30 (sequence is synthesized)
cctgttgtgctgctgttacaatatataatgaaaccaagtcaggggagtgaatttatcaatcttttgatgtaaagtaaaaacgtagttcacacttcaggagagaacttcatagcacaatgt

SEQ ID NO: 356633 - DNA, 120 bp, Artificial Sequence
  ENSG00000139926_31 (sequence is synthesized)
cttcatagcacaatgtctttctataagatatttttaatgatttagtattttacaacatttgtttaccatattttgatataccatttttttctatctgcccagttttattaaaaaaactat

SEQ ID NO: 356634 - DNA, 120 bp, Artificial Sequence
  ENSG00000139926_32 (sequence is synthesized)
aaacaatcatatttttatacaaaattatgttttcaggtaacgaaatagatgtagggtacagtggaacataagcagtgttacccctggctgggagtcagtattatacaacaaatggtgagc

SEQ ID NO: 356635 - DNA, 120 bp, Artificial Sequence
  ENSG00000139926_33 (sequence is synthesized)
tggaacatgccctgtctgtgctgtccctcctgtgctgggtcgcggatgtgtaggcaacattgccttatcacgctaggttcacctgacactttaaaaggaaaaaaagttccatagagttct

SEQ ID NO: 356636 - DNA, 120 bp, Artificial Sequence
  ENSG00000139926_34 (sequence is synthesized)
gtggtcacaaaattgttttgcttttatcaaatactttaatagaaccaaagttgcagatattggaatgtatggaagtatctcagtctctgcataagaggattaaagtatgaaaggatcatt

SEQ ID NO: 356637 - DNA, 120 bp, Artificial Sequence
  ENSG00000139926_35 (sequence is synthesized)
taatgactgttttacttataagtcattaagtaatccaccatttcttatggatgatgcttaagcctggtgaggtttgtactctaaggagcccagatcataatgcagtgcatttccttagcc

SEQ ID NO: 356638 - DNA, 120 bp, Artificial Sequence
  ENSG00000139926_36 (sequence is synthesized)
cttagagtttcttgcaaacatttaaaaaaagacatatttaagaaagaaagataaagaaaaaacatatttaattactgtaaacaggtactgctttatgtttattttctctctacttcaacc

SEQ ID NO: 356639 - DNA, 120 bp, Artificial Sequence
  ENSG00000139926_37 (sequence is synthesized)
aaaatcagatctttgaggttttgctgacattgttggtggttttgcacatgttctttctaattggatttatgaatagttctatgggttttcaaagatgaatcatgctaagaacacttctgc

SEQ ID NO: 356640 - DNA, 120 bp, Artificial Sequence
  ENSG00000139926_38 (sequence is synthesized)
tttttgatccactgtttgcagcagaattatatatatgtataggaaaaatccactttgaataatccatgttttgtatttggaaattgtttttaaaaataaaaaggaaaggaaatatataaa

SEQ ID NO: 356641 - DNA, 120 bp, Artificial Sequence
  ENSG00000139926_39 (sequence is synthesized)
ggggcggggcggacgcggagcgcccctctggctggcggggccaaggggctgagaggagtggggcaggctcggcgccggtaggaagagtcagaggggtgaccagagagcccaacgcctggt

SEQ ID NO: 356642 - DNA, 120 bp, Artificial Sequence
  ENSG00000139926_40 (sequence is synthesized)
atctatcgcttgtcagtatacccgttttggtatatattgcctctgcacatctacatttgtatatgcaacagtgagctttatatctacataaactgtaaataatcctttctgtgaaaggat

SEQ ID NO: 356643 - DNA, 120 bp, Artificial Sequence
  ENSG00000139926_41 (sequence is synthesized)
catcatatcaagatgataccaaaagtatgtaaaaagaaacctgcattattttgtaattatttcttatagatatttcatggtaagattagcagtcaataaagttacttttttgcctttaaa

SEQ ID NO: 356644 - DNA, 120 bp, Artificial Sequence
  ENSG00000139926_42 (sequence is synthesized)
tgggcattgactccatgctgccctgtaagtcaaaagatgtgtttctgacttcacattactttaattacttgggcacgattcaatctgatttcactttacttatacattacatggggccta

SEQ ID NO: 356645 - DNA, 120 bp, Artificial Sequence
  ENSG00000139926_43 (sequence is synthesized)
acctgtctcctcctaactggctcttttttgtttcaagctatttgtgaaaggatctgagctgtttgaaaatgagcaaattatgacgcacttgcccctttcatgccccaaattaagttataa

SEQ ID NO: 356646 - DNA, 120 bp, Artificial Sequence
  ENSG00000139926_44 (sequence is synthesized)
taaagtacatttatgaaattgagggttttttagggtcctggacttgttgcttgctgaatctgtttgtgtattgcccttatctgaggagtcttctttaaagatacatatttttgggcctca

SEQ ID NO: 356647 - DNA, 120 bp, Artificial Sequence
  ENSG00000139926_45 (sequence is synthesized)
tgctcctcctccaggagatttttgactcagtgggtctggagtagagatgaggaatctattttgacaagtttctcagatgatgcttcttgaagccaactcagctctgcctagctgtatgac

SEQ ID NO: 356648 - DNA, 120 bp, Artificial Sequence
  ENSG00000139926_46 (sequence is synthesized)
cttgagcaagttacataaactctgtgccttggtttcattctaaaatgtagataattaactccctccctagacttgctttgaggattaaatgagtggatacatgcttagtgctcaataaat

SEQ ID NO: 356649 - DNA, 120 bp, Artificial Sequence
  ENSG00000139926_47 (sequence is synthesized)
gtcagttgttactatttcagtattggggtccactggtagttcctttaaaatgagggaaatctcagagatttaaaaaaaaaacacctccaccttatccctgcctgggctatacaagcccat

SEQ ID NO: 356650 - DNA, 120 bp, Artificial Sequence
  ENSG00000139926_48 (sequence is synthesized)
actgctccatacagaccttaaggtgtgtagttagaatatgtctccgttcttgctttacctccactctctggctgagaatcattatatctgaaatactcctttttgtatttcggctgccct

SEQ ID NO: 356651 - DNA, 120 bp, Artificial Sequence
  ENSG00000139926_49 (sequence is synthesized)
attcattattaggaaagttaaaagagttcataatatcccataactgtaagaaactttgtcaaagccttgccctcaacttaggactttatcttagtgatcagatttgaagaatgagactcc

SEQ ID NO: 356652 - DNA, 120 bp, Artificial Sequence
  ENSG00000139926_50 (sequence is synthesized)
ttatatgtctactgatagctgttcttgttctttcccatctcatacctccaactaccagctctctctatgtttagctagggaagttttccatttcttctaaaccccaaatagatatcctgt

SEQ ID NO: 356653 - DNA, 120 bp, Artificial Sequence
  ENSG00000139926_51 (sequence is synthesized)
attgttcactatataactccttatttatttccaataatttatcataaacttattattttgtgtgtttctttgccatttctcctgctgggatatatagctccatgagggtaggaaccttgt

SEQ ID NO: 356654 - DNA, 120 bp, Artificial Sequence
  ENSG00000139926_52 (sequence is synthesized)
ctgtcgtattcactgcctatttttttttcagtgcctagcaaggtgtttggtacattttaagtgttcaataaatattttagaattggtaaataatttagaatcttttagaattggttgcct

SEQ ID NO: 356655 - DNA, 120 bp, Artificial Sequence
  ENSG00000139926_53 (sequence is synthesized)
tgttgctgagttagggtgttgggattatatttgatggttcttttatgatggacccttctcttctgcattatacaaataacctgaccagccagagaaaccaaagatattcctcagctgttt

SEQ ID NO: 356656 - DNA, 120 bp, Artificial Sequence
  ENSG00000139926_54 (sequence is synthesized)
tggatagtcagtgtttactgacagacccttgtggctagatgctttcctgaatttctggtcatcccctgtcctgtgacatttttgaaaggaaaaacaataatttatcccacaaggaatttt

SEQ ID NO: 356657 - DNA, 120 bp, Artificial Sequence
  ENSG00000139926_55 (sequence is synthesized)
aaatgaaactttatacatttcagaatctataattttccttactaaataggaaacaaaggggactttggcaaatcagagatttttcttcctgaatttgattcatggtttccttccaaaggg

SEQ ID NO: 356658 - DNA, 120 bp, Artificial Sequence
  ENSG00000139926_56 (sequence is synthesized)
agtgaggtgggagggaggagcagaaacagaagggttcctgtcaccagatggagagaaggatttgggttctgtttacatgtcattggattattccatcaaaatgtgagttctgttttcttt

SEQ ID NO: 356659 - DNA, 120 bp, Artificial Sequence
  ENSG00000139926_57 (sequence is synthesized)
cctcacatctcctagttctggtgaaatatgctgccatgggggaaatgacaaagcagaggaagaaatcagcagcaatatcagtaacagcacccagaatttgctgagcgccagctatgtgcc

SEQ ID NO: 356660 - DNA, 120 bp, Artificial Sequence
  ENSG00000139926_58 (sequence is synthesized)
gactgttcaggtcactgaaagcaaggaaagcctgataaactgccacggccacgaggagtctaaggacacatccaatttccattcgcatccaaaatggaatccgagacagaaagaggacct

SEQ ID NO: 356661 - DNA, 120 bp, Artificial Sequence
  ENSG00000139926_59 (sequence is synthesized)
tagccttcatatctgtttttttcttatgaagcttcttctggttggaaacttgtcaaatttcatcagatggctggaactctccgtgtctccttttctttctgtcatggctggcaagagctc

SEQ ID NO: 356662 - DNA, 120 bp, Artificial Sequence
  ENSG00000139926_60 (sequence is synthesized)
gaacagattagcaggtattcccaaatgggacaaatgctaccttattgcagacagtttctagtatagtcccacattctttgagaaagtaggtggagaccccatcagcaccaggccactggc

SEQ ID NO: 356663 - DNA, 120 bp, Artificial Sequence
  ENSG00000139926_61 (sequence is synthesized)
agcaaatggttgtagccaggagccagaatagagcaagtccagcctgagcctgtggtcggcagtggagaagagagggtcgcagacctgaggcaaagggcagcctgaacaatcaagaaccag

SEQ ID NO: 356664 - DNA, 120 bp, Artificial Sequence
  ENSG00000139926_62 (sequence is synthesized)
agaaacagaagggttcctgtcaccagatggagagaaggatttgggttctgtttacatgtcattggattattccatcaaaatgttgtttccaagagggggaaggactacatcctgaagcac

SEQ ID NO: 356665 - DNA, 120 bp, Artificial Sequence
  ENSG00000139926_63 (sequence is synthesized)
cctcactggctctctgtttagtctcccagttttttcaagcattggttctatagaactggtgtctggagagcaactttaggcagtagtaataaagtggaagaggtgtcttgttgtcttccc

SEQ ID NO: 356666 - DNA, 120 bp, Artificial Sequence
  ENSG00000139926_64 (sequence is synthesized)
agaggctgggaagtccgggattgaggggccagcatctaccaagggccttcttgttacttcatcccatgatggaaggtggaagggtaaagagaggagaagaagcagtaccgggaatcttac

SEQ ID NO: 356667 - DNA, 120 bp, Artificial Sequence
  ENSG00000139926_65 (sequence is synthesized)
tcaagactttctccgaggtatgaacaagaaccaggcgtctgggccctttccgctcgccccatcgctcagccgccgcgccccggacgcccgctgtgccccctgccggcggggcggcggcgg

SEQ ID NO: 356668 - DNA, 120 bp, Artificial Sequence
  ENSG00000139926_66 (sequence is synthesized)
gactgggtttcgggagggtttctggaagtcgcgagtcccagcgaaggcagtgcaccgctctccgcctctttcttcgccttcttctcgctcccttagctctgggtgtcgggcaccggtgct

SEQ ID NO: 356669 - DNA, 120 bp, Artificial Sequence
  ENSG00000139926_67 (sequence is synthesized)
tgcctacgctgcagtgctttcagctgtatttgagaatgcactgtgtttctgccttgttttacgtttgcagatggctggaactctccgtgtctccttttctttctgtcatggctggcaaga

SEQ ID NO: 356670 - DNA, 120 bp, Artificial Sequence
  ENSG00000139926_68 (sequence is synthesized)
ccctggcacccgacacccaggagagtgggctacaggaagaggatctgagaccagagcccacagagtctgcagaaactagaggcacaaggcacgaggaatcacaaagcaaacttaagtgcc

SEQ ID NO: 356671 - DNA, 120 bp, Artificial Sequence
  ENSG00000139926_69 (sequence is synthesized)
aggttaaagtgatttggataaagcagcagttgttttctactgtcagcttgtcctttcaaggaatatatttacgatgcattaaattgcctgattgtggctccctgggtggacttagttgaa

SEQ ID NO: 356672 - DNA, 120 bp, Artificial Sequence
  ENSG00000139926_70 (sequence is synthesized)
agaacaatgcaaattgaatggccaaattagacaatttttcccaaactgaaatgacttcttcacagaaacttgtaacacttggcttacacgtgccgaatactagtgtaacccacttggggg

SEQ ID NO: 356673 - DNA, 120 bp, Artificial Sequence
  ENSG00000139926_71 (sequence is synthesized)
cagctgtagttgagctctattaagcttcaaggtgctgctagaacaatactggattagcccactggattcaaataccaagaactgatggtatgagccttcatatctgtttttttcttatga

SEQ ID NO: 356674 - DNA, 120 bp, Artificial Sequence
  ENSG00000139926_72 (sequence is synthesized)
gttgacctgaattttgggattgttaagaaagctggattagaaggtcaaagggattgggacacgagaccactcagcgattaaactgaaaaggaaagaagtcaagccaaaaaacggctaata

SEQ ID NO: 356675 - DNA, 120 bp, Artificial Sequence
  ENSG00000139926_73 (sequence is synthesized)
aactgaaagaacagggaggggtttggggactgaaagtctagggggagatggtgacagtggcagatgtggtggacagagtagtttccagtccaaaggttcagagatggagcagctccagga

SEQ ID NO: 356676 - DNA, 120 bp, Artificial Sequence
  ENSG00000139926_74 (sequence is synthesized)
ttgtataaggtatgaaacggcaactaagtcttcagcttctgagaaaaaaacatcttctcaataggattgagaaggaaaaccgaaggatttcatttccattaaaacttatttcatttttta

SEQ ID NO: 356677 - DNA, 120 bp, Artificial Sequence
  ENSG00000139926_75 (sequence is synthesized)
tatcacttccctttggagagtgccctgccacaggcagggacaatctttcatctctcatagaggaaaacataagggaggaggcgccttccagtaaatatcctcagttgagttttcatatta

SEQ ID NO: 356678 - DNA, 120 bp, Artificial Sequence
  ENSG00000139926_76 (sequence is synthesized)
tatataatatattcaaggagacaaccacccaatttccctccctggattccaagccttgagatataactaatatttaagttttgcattgcagagtgccctgataataaagaacaaattcct

SEQ ID NO: 356679 - DNA, 80 bp, Artificial Sequence
  ENSG00000139946_0 (sequence is synthesized)
cccatttgttgccggctctgactcggggcggccgcggcgcgcggagctccggggagtcaggcggagcagccgcgcagcca

SEQ ID NO: 356680 - DNA, 120 bp, Artificial Sequence
  ENSG00000139946_1 (sequence is synthesized)
gcgcgctcaccccgttctcgggatgggattgtagcggcggcgcggactcggcggggatcgcggcggaggcggcggcgtcggcggcggcgtcggcggccgagcggggctccatgttttccc

SEQ ID NO: 356681 - DNA, 120 bp, Artificial Sequence
  ENSG00000139946_2 (sequence is synthesized)
gcggggctccatgttttcccctggccaggaggaacactgcgcccccaataaggagccagtgaaatacggggagctggtggtgctcgggtacaatggtgctttacccaatggagatagagg

SEQ ID NO: 356682 - DNA, 120 bp, Artificial Sequence
  ENSG00000139946_3 (sequence is synthesized)
acggaggaaaagtagatttgccctctacaagcggcccaaggcaaatggtgtcaaacccagcaccgtccatgtgatatccacgccccaggcatccaaggctatcagctgcaaaggtcaaca

SEQ ID NO: 356683 - DNA, 120 bp, Artificial Sequence
  ENSG00000139946_4 (sequence is synthesized)
cagtatatcctacactttgtcaaggaatcagactgtggtggtggagtacacacatgataaggatacggatatgtttcaggtgggcagatcaacagaaagccctatcgacttcgttgtcac

SEQ ID NO: 356684 - DNA, 120 bp, Artificial Sequence
  ENSG00000139946_5 (sequence is synthesized)
agacacgatttctggcagccagaacacggacgaagcccagatcacacagagcaccatatccaggttcgcctgcaggatcgtgtgcgacaggaatgaaccttacacagcacggatattcgc

SEQ ID NO: 356685 - DNA, 120 bp, Artificial Sequence
  ENSG00000139946_6 (sequence is synthesized)
cgccggatttgactcttccaaaaacatatttcttggagaaaaggcagcaaagtggaaaaaccccgacggccacatggatgggctcactactaatggcgtcctggtgatgcatccacgagg

SEQ ID NO: 356686 - DNA, 120 bp, Artificial Sequence
  ENSG00000139946_7 (sequence is synthesized)
gggcttcaccgaggagtcccagcccggggtctggcgcgagatctctgtctgtggagatgtgtacaccttgcgagaaaccaggtcggcccagcaacgaggaaagctggtggaaagtgagac

SEQ ID NO: 356687 - DNA, 120 bp, Artificial Sequence
  ENSG00000139946_8 (sequence is synthesized)
caacgtcctgcaggacggctccctcattgacctgtgtggggccactctcctctggagaacagcagatgggctttttcatactccaactcagaagcacatagaagccctccggcaggagat

SEQ ID NO: 356688 - DNA, 120 bp, Artificial Sequence
  ENSG00000139946_9 (sequence is synthesized)
taacgccgcccggcctcagtgtcctgtggggctcaacaccctggccttccccagcatcaacaggaaagaggtggtggaggagaagcagccctgggcatatctcagttgtggccacgtgca

SEQ ID NO: 356689 - DNA, 120 bp, Artificial Sequence
  ENSG00000139946_10 (sequence is synthesized)
cgggtaccacaactggggccatcggagtgacacggaggccaacgagagggagtgtcccatgtgcaggactgtgggcccctatgtgcctctctggcttggctgtgaggcaggattttatgt

SEQ ID NO: 356690 - DNA, 120 bp, Artificial Sequence
  ENSG00000139946_11 (sequence is synthesized)
agacgcaggaccgccaactcatgctttcactccctgtggacacgtgtgctcggagaagtctgcaaaatactggtctcagatcccgttgcctcatggaactcatgcatttcacgctgcttg

SEQ ID NO: 356691 - DNA, 120 bp, Artificial Sequence
  ENSG00000139946_12 (sequence is synthesized)
ccctttctgtgctacacagctggttggggagcaaaactgcatcaaattaattttccaaggtccaattgactgacgcccttgacagccatctacgactttattaacaggttactgtgaaga

SEQ ID NO: 356692 - DNA, 120 bp, Artificial Sequence
  ENSG00000139946_13 (sequence is synthesized)
ttttgccactaactctagattttacctttttgtaatgctgtttatcagaggagggtgacaggggctggaaataaagagaggggacatggtgatgaaacatggcaggagtgtaacagatac

SEQ ID NO: 356693 - DNA, 120 bp, Artificial Sequence
  ENSG00000139946_14 (sequence is synthesized)
cagtggtgtgttgcatgctcaaaacagcagcgtcgtcattgaagtctgcttgattaaaccataatatctttgtaataattggatttaaaatgctatgcttctatttttaaccttgggttt

SEQ ID NO: 356694 - DNA, 120 bp, Artificial Sequence
  ENSG00000139946_15 (sequence is synthesized)
ttaaccaagtttttttttttttgtaatcttggacaagactttaaatcatattttacagatgtagaagaaatttattcaaaagtgtgggctcatgaagttcacttcagtgcagtgtggtgt

SEQ ID NO: 356695 - DNA, 120 bp, Artificial Sequence
  ENSG00000139946_16 (sequence is synthesized)
aggtgttacgcgaagggcgcacagtgtctagaaatacttgatcgtggctcaaacctgaccagacagcagaggggcggctctgtacagtgtgactggtggacagatggccttaggcacagg

SEQ ID NO: 356696 - DNA, 120 bp, Artificial Sequence
  ENSG00000139946_17 (sequence is synthesized)
tggttttgaaatctggggctttttctgatttatttttctgacttgttgggggagagaatattcataacttgtgggctttttttttttttaacttcagtggaatttactttagatattcat

SEQ ID NO: 356697 - DNA, 120 bp, Artificial Sequence
  ENSG00000139946_18 (sequence is synthesized)
tcatcaaatacatgggacttcacaaacaattttccataactttttagcctgtcttttgttatttctgcctaatatgatttgccccgatactcatcttgcacggccagaactgtttggttg

SEQ ID NO: 356698 - DNA, 120 bp, Artificial Sequence
  ENSG00000139946_19 (sequence is synthesized)
attaaaatacatcagctcttaaaaactcattaactgagggtaattacagtagtagacatggtctgggtactatactaccatgtttatttgctgactgaattaagatttaagaatgattaa

SEQ ID NO: 356699 - DNA, 120 bp, Artificial Sequence
  ENSG00000139946_20 (sequence is synthesized)
aaataagcttttactttttaaaaccacttgaggtttcataaagcttggggtttttttttttcctttgttaagaaagccaaccaatcacaatgatatagtcattgttgtgcactccctttt

SEQ ID NO: 356700 - DNA, 120 bp, Artificial Sequence
  ENSG00000139946_21 (sequence is synthesized)
caccatctgtcaccttcccttgcagcttaaggagcccagtaagttttgaaaatgtttgcgaatcaaactaaatttaagtgggatgattagatatacacaacaccaagtggtacatctgca

SEQ ID NO: 356701 - DNA, 120 bp, Artificial Sequence
  ENSG00000139946_22 (sequence is synthesized)
gagataattcaaaattcctgcttttgagagagcaaatgagtgttgctgaggaataattaaatgagaatttcataggagctccaccattcctgttactttcatttcattttgattaataat

SEQ ID NO: 356702 - DNA, 120 bp, Artificial Sequence
  ENSG00000139946_23 (sequence is synthesized)
tcttggatgcttggcatcgatcgtatcactgctcctagaaggtaaagatcctttaggacatgagactggtagaagctggctgagataaaataagtatttatttaaactaatgttctctta

SEQ ID NO: 356703 - DNA, 120 bp, Artificial Sequence
  ENSG00000139946_24 (sequence is synthesized)
ctactggcaaatattttgcctattttcagtcgttctaacctatttgaatacgcttttccttaaagtgatacgataatattactcttgattgctgctgcttaatttgatgtaatatgttta

SEQ ID NO: 356704 - DNA, 120 bp, Artificial Sequence
  ENSG00000139946_25 (sequence is synthesized)
aagttcagcctctcagttttaatatagctttatttttcagtggagatcattgtttaggatgagacatttttggttttggttttgtttgggtaaattttaaatggtgtgaaaatcgatgac

SEQ ID NO: 356705 - DNA, 120 bp, Artificial Sequence
  ENSG00000139946_26 (sequence is synthesized)
aacagtcctcttacagatagcttgctgtattctgtatagcttactctacctgcagacagaaaatgaaagaaaaaaatggacttgcctagaataatatattgaatgccttttgatttagcc

SEQ ID NO: 356706 - DNA, 120 bp, Artificial Sequence
  ENSG00000139946_27 (sequence is synthesized)
agagtctctgatgattagctttcactgatagagtatgtcttttcagcctgtaattctttgggccccaaagaatgacaaaggaggcactcgttctcttttcttgctgtatgcctagaaagt

SEQ ID NO: 356707 - DNA, 120 bp, Artificial Sequence
  ENSG00000139946_28 (sequence is synthesized)
ggttgaaggattcttgatgccctaaaaccatcttgtaagctaaatggtcttgcatccagaaaggccagattttacctaccaagaaaaaaagatatttttccagagagttaggtatatcat

SEQ ID NO: 356708 - DNA, 120 bp, Artificial Sequence
  ENSG00000139946_29 (sequence is synthesized)
aattttccatttcaagtcctgtttataagtctagtcattctgcaacgtgacatatcccccaaaatgaagttaccttccaagttggacacgtcccgtagttgggcatatgtctaactaaaa

SEQ ID NO: 356709 - DNA, 120 bp, Artificial Sequence
  ENSG00000139946_30 (sequence is synthesized)
gtttctgacttttagtaaattcagcttaaatataagttgaaatttgggaaataatttccaagctcttggaaggggtaacagtgaaccgccctccatgggctccacatcttttcctttggc

SEQ ID NO: 356710 - DNA, 120 bp, Artificial Sequence
  ENSG00000139946_31 (sequence is synthesized)
ttccaaagtcaggtcccgcccaccctgcctaaggaactgcagagaggtggcaaatcagcaaaaaggacaccaggctcttcttggccacttgtaggaagatccctttacaattttgactaa

SEQ ID NO: 356711 - DNA, 120 bp, Artificial Sequence
  ENSG00000139946_32 (sequence is synthesized)
ggagattttttttttcacagttgagttagtttgtgaaaataaagaactctgtagctcaccaaggtggagaaacgcaattcagaaaagtaatttctccaaggtcacttctttttttatgtc

SEQ ID NO: 356712 - DNA, 120 bp, Artificial Sequence
  ENSG00000139946_33 (sequence is synthesized)
ttgccatcactttaaaggactagccccactcccccatgtgtatacacaaggaaattgcagaccaattagttgtcttggcctgactctaatgccttttgcaagtagctttccagaagtaaa

SEQ ID NO: 356713 - DNA, 120 bp, Artificial Sequence
  ENSG00000139946_34 (sequence is synthesized)
agtcccagtgatgtattcccatagaaatatttttcagttgtttatgtcgtttactacaaaaaaaaagattcagagtggatggagtacaactctgagtatttttctagtccggaatttttt

SEQ ID NO: 356714 - DNA, 120 bp, Artificial Sequence
  ENSG00000139946_35 (sequence is synthesized)
attaataatcggtgctgccgggtcatgcatgctgcaactctcaacatttcccttatttggttcagcttttagcaaaaagggctacagttcaccctgcagagtattaaggtttctggattt

SEQ ID NO: 356715 - DNA, 120 bp, Artificial Sequence
  ENSG00000139946_36 (sequence is synthesized)
ttttctcccaactgtggcccaaaagaattaaaatctgttaatataaatagagaacatatttatcattcctcgatagttaattatagactttggtacctttgtgcctcagggaagccacgt

SEQ ID NO: 356716 - DNA, 120 bp, Artificial Sequence
  ENSG00000139946_37 (sequence is synthesized)
gatataactggttatagaatttcagggttagggtttaaagaaaggagaaagccattggaaaaatgatgggctccattaaggagactaatgaatctggatgcagaaatatgtcagaaactg

SEQ ID NO: 356717 - DNA, 120 bp, Artificial Sequence
  ENSG00000139946_38 (sequence is synthesized)
gcataaacatgattgtagtagaatttattttccagtaccaatagggaaattattttaagttattacatttactgtattgggaaacttgaggagaactctttagttcataaagcttcaatg

SEQ ID NO: 356718 - DNA, 120 bp, Artificial Sequence
  ENSG00000139946_39 (sequence is synthesized)
tcttttttttttttttcatggaaaaactcaaacctctgttatttgggagctcagtattgtgtggacacttacgagagttttctgcttaattgaagtgtaatataggttgtagaattgtta

SEQ ID NO: 356719 - DNA, 120 bp, Artificial Sequence
  ENSG00000139946_40 (sequence is synthesized)
cctgcagttctatggttttgtttcacttcttttcttttttaaagccattctgttctttggatgtgcttgaaagggtgtgtgattacaccattgttaatgctgggtaaaaactatcttctt

SEQ ID NO: 356720 - DNA, 120 bp, Artificial Sequence
  ENSG00000139946_41 (sequence is synthesized)
gcagccttgcctcataacagtggaatttctgatagacaaaccacaggactttgattttaagccaaatccatctccatccctttactgtcaatcttctgtcccagtagtttagcctttgtg

SEQ ID NO: 356721 - DNA, 120 bp, Artificial Sequence
  ENSG00000139946_42 (sequence is synthesized)
gcttaggttatgatgcgcctccttctgtgcgaccaatgagacgacttcagcatctttttaaaataatctaagcatcattgaagcagtaacacaaaaaaaaggttcagtattttcttttta

SEQ ID NO: 356722 - DNA, 120 bp, Artificial Sequence
  ENSG00000139946_43 (sequence is synthesized)
gtataacttacatcctttcaaataagtctttgccctcatgaagaatccctagaggaagataaggaaaataagtattttccagttttgcttgacagtttctaaacaaacaaaaataaactc

SEQ ID NO: 356723 - DNA, 120 bp, Artificial Sequence
  ENSG00000139946_44 (sequence is synthesized)
aatgaaaggaaagatgtttctttttagctgagatgacagattgcttctctgtattaaatagtctagaagttaaggggatggtcacatttaccatgtattgtgttattagcagttaaattt

SEQ ID NO: 356724 - DNA, 120 bp, Artificial Sequence
  ENSG00000139946_45 (sequence is synthesized)
tatgaatatgtttgtaaaattgttgttttatatttcatgtcaaattgaaaagtttatttcttcactattgtacctgtggaaatacaagccattttacaggaaaaaatcttcaaaaactat

SEQ ID NO: 356725 - DNA, 120 bp, Artificial Sequence
  ENSG00000139946_46 (sequence is synthesized)
taaatggatatcagcctgtttgtgagccattgtcttcagattctgtggttgtcactgagttcattaggacatttagtaggttgatacgagtagaactgatttttttcacttctctaactt

SEQ ID NO: 356726 - DNA, 120 bp, Artificial Sequence
  ENSG00000139946_47 (sequence is synthesized)
ccaagttaatctccagctgttgagtttattaattgttttatattctgcacaatacatatttaaaccttgattctgaaaatcccctacattttttaattaaagaaatttccttggtgccta

SEQ ID NO: 356727 - DNA, 120 bp, Artificial Sequence
  ENSG00000139946_48 (sequence is synthesized)
atgtgaggcgccgcggtcgcgggcgcttcgcggggtcgcttcccgaagctgagaggccggccggcgcggagccccgtcttcccacctccctcgcggaccgtggtacaatggtgctttacc

SEQ ID NO: 356728 - DNA, 120 bp, Artificial Sequence
  ENSG00000139946_49 (sequence is synthesized)
aattttctagacgcctttctgcttggttttggaaggggaggcacccaagtgggtgtgtgcgacacctctagttgtaagccgggacacagtgacgtcgagagagcgctattctactcggag

SEQ ID NO: 356729 - DNA, 120 bp, Artificial Sequence
  ENSG00000139946_50 (sequence is synthesized)
aggaagttaatcccatcgaactccagccaggaaaacgtgggcttgggaaccgcggccgctcgtttccaggatctcccgcgggccttcgcggctgaagaaccaggcggcgagggctgagga

SEQ ID NO: 356730 - DNA, 120 bp, Artificial Sequence
  ENSG00000139970_0 (sequence is synthesized)
agaaccgctttacccgtctccagggtagcacccttgggcagcccagccaacgctgtcgcgtggagcggcgcccgcatccccatgcgcgcaggcggctccggggccgcgccgcgctgattc

SEQ ID NO: 356731 - DNA, 120 bp, Artificial Sequence
  ENSG00000139970_1 (sequence is synthesized)
gctgattcgctgccggccgcgcagactgcggcgccagcgacgctcccgcccctcaccgcgcgccgcctggtgcagcctcagtctctccgcagccgcgcggccactgcgagcccagccgca

SEQ ID NO: 356732 - DNA, 120 bp, Artificial Sequence
  ENSG00000139970_2 (sequence is synthesized)
gcaccaacgcttgagtgcacgctcggcgcccccgaggagagccacggcgagcccccaaagcccgcacgatgcaggccactgccgattccaccaagatggactgtgtgtggagcaactgga

SEQ ID NO: 356733 - DNA, 120 bp, Artificial Sequence
  ENSG00000139970_3 (sequence is synthesized)
aaagtcaggctattgacctgttgtattggcgggacatcaagcagacgggcatcgtgtttgggagtttcctgctgctgctcttctccctgacccagttcagcgtggtgagcgtcgtggcct

SEQ ID NO: 356734 - DNA, 120 bp, Artificial Sequence
  ENSG00000139970_4 (sequence is synthesized)
acctggccctggccgcactctcagccaccatcagtttccgcatctacaagtctgttttacaagcagtgcagaaaaccgacgaaggccaccctttcaaggcctacttggagcttgagatca

SEQ ID NO: 356735 - DNA, 120 bp, Artificial Sequence
  ENSG00000139970_5 (sequence is synthesized)
ccctttctcaggagcagattcagaagtacacggactgcctgcagttctacgtgaacagcacacttaaggaactgaggaggctcttccttgtccaggacctggtggattccttaaaatttg

SEQ ID NO: 356736 - DNA, 120 bp, Artificial Sequence
  ENSG00000139970_6 (sequence is synthesized)
cagtcctgatgtggctcctgacctacgttggcgctctcttcaatggcctgaccctgctgctcatggctgtggtttcaatgtttactctacctgtagtgtatgttaagcaccaggcacaga

SEQ ID NO: 356737 - DNA, 120 bp, Artificial Sequence
  ENSG00000139970_7 (sequence is synthesized)
aggactcacataaatgctgttgtggcaaagattcaggctaaaatcccaggcgctaagaggcatgctgagtaaactgatttcccaccggggactggacacaaacaggaatgtctggagtgg

SEQ ID NO: 356738 - DNA, 120 bp, Artificial Sequence
  ENSG00000139970_8 (sequence is synthesized)
taacagctctcttcttactcattactgcaaattgattgtctttcccccctccctccagtaccataatcttagagacaaaccttaaaacagctgtttttaggctgttccttgtactcttag

SEQ ID NO: 356739 - DNA, 120 bp, Artificial Sequence
  ENSG00000139970_9 (sequence is synthesized)
gatatttgagtcacttgtgtcaaccactaaagtatagagaaaagtgtattagatgtggtttttaattttgtgttgctaaaaaaagtgcatgatggtgagagcccaagttatctttccctc

SEQ ID NO: 356740 - DNA, 120 bp, Artificial Sequence
  ENSG00000139970_10 (sequence is synthesized)
ttcggtgttcttcttctcttctctgcaatgcttctgtagcttctaatgttccccgtggctaggcctttcctgccgagtgctctgatgcaatagtggaaatcgcttatatgtccttgggtt

SEQ ID NO: 356741 - DNA, 120 bp, Artificial Sequence
  ENSG00000139970_11 (sequence is synthesized)
gctggttggattaatctttaataacaatatatagaattgtagactgatgttttagcatttttccaacacacacaacgtaaaaataaaagcagtcgaccgcacttatggtaatcagttttg

SEQ ID NO: 356742 - DNA, 120 bp, Artificial Sequence
  ENSG00000139970_12 (sequence is synthesized)
tataacttaaaataattaaataaatgaataaatccaaaacaaacatgcagtacttttgttgtatgggattggtgggctgatttacatgtatggttactaaaaagtaccagcatgttaact

SEQ ID NO: 356743 - DNA, 120 bp, Artificial Sequence
  ENSG00000139970_13 (sequence is synthesized)
ttattacaatttgtattactttctctgtagttcctaatggattcaattacggactctggatatttgcacttatgtacttgatactgaatgcataaataaatgttactaaatgtagaatgt

SEQ ID NO: 356744 - DNA, 120 bp, Artificial Sequence
  ENSG00000139970_14 (sequence is synthesized)
ctgagacaccgcagcttccctgagcgccgagtccctccggggacagcagcagggagcgcccgcgcagccaccgagcctctgcccagccaagccgccgtcgccgcgccggtcgcccgttgc

SEQ ID NO: 356745 - DNA, 120 bp, Artificial Sequence
  ENSG00000139970_15 (sequence is synthesized)
catggaaactgcatccacaggtgtggcaggtgtttccagtgccatggaccacaccttctcaacaacatcaaaagatggggaaggatcgtgttacacatctctcatttctgacatctgcta

SEQ ID NO: 356746 - DNA, 120 bp, Artificial Sequence
  ENSG00000139970_16 (sequence is synthesized)
tccacctcaggaggattctacatattttactggaattcttcagaaggaaaatggccacgtcaccatttcagagagccctgaggagctgggtacacccggcccctccttaccagatgtgcc

SEQ ID NO: 356747 - DNA, 120 bp, Artificial Sequence
  ENSG00000139970_17 (sequence is synthesized)
tgggatagagtctcgtggcttatttagttctgattctggaatagagatgactcctgcagagtccacggaagtgaacaagatcttagcagaccctctggaccagatgaaagcagaggccta

SEQ ID NO: 356748 - DNA, 120 bp, Artificial Sequence
  ENSG00000139970_18 (sequence is synthesized)
taaatacattgacataaccagacccgaggaggtgaagcaccaagaacaacatcaccccgagctggaagataaagacttggactttaagaataaagacactgacatctcaattaaacctga

SEQ ID NO: 356749 - DNA, 120 bp, Artificial Sequence
  ENSG00000139970_19 (sequence is synthesized)
aggagtccgtgaacctgacaaaccagctcctgtggagggaaaaatcatcaaggaccatttattggaagaatccacatttgctccatacatagatgatctctctgaagaacagcgcagggc

SEQ ID NO: 356750 - DNA, 120 bp, Artificial Sequence
  ENSG00000139970_20 (sequence is synthesized)
tcctcagatcaccacccctgtcaaaatcacactgacggaaatagaaccttctgttgaaaccactacccaagagaagacccctgagaagcaagatatatgtctaaagccaagtcctgacac

SEQ ID NO: 356751 - DNA, 120 bp, Artificial Sequence
  ENSG00000139970_21 (sequence is synthesized)
agtccccactgtcactgtctcggagcctgaagacgacagcccaggatctatcacccctccatcttctggaacagaaccatctgctgcagaatcccaggggaaaggcagcatctccgagga

SEQ ID NO: 356752 - DNA, 120 bp, Artificial Sequence
  ENSG00000139970_22 (sequence is synthesized)
tgagctgatcaccgccatcaaagaagcaaagggattatcgtatgaaaccgccgagaacccacggccggtgggccagctggccgacaggcccgaggtcaaggccaggtccggaccgccaac

SEQ ID NO: 356753 - DNA, 120 bp, Artificial Sequence
  ENSG00000139970_23 (sequence is synthesized)
catccccagccccctggaccacgaggccagcagcgcggagtcgggggactcagagatcgagctggtgtccgaggaccccatggccgcggaggacgcgctgccctcaggctatgtgagctt

SEQ ID NO: 356754 - DNA, 120 bp, Artificial Sequence
  ENSG00000139970_24 (sequence is synthesized)
tggccacgtgggcggcccgccgccctcgcccgcctcgccatccatccagtacagcatcctgagggaggagcgcgaggccgagctggacagcgagctcatcatcgagtcgtgcgacgcctc

SEQ ID NO: 356755 - DNA, 120 bp, Artificial Sequence
  ENSG00000139970_25 (sequence is synthesized)
tcggaggagagccccaagcgggagcaggactcacccccgatgaagcccagcgccctggatgccatccgggaggagactggcgtccgggccgaggagcgtgcgccaagccggcggggcctg

SEQ ID NO: 356756 - DNA, 120 bp, Artificial Sequence
  ENSG00000139970_26 (sequence is synthesized)
gccgagccgggttccttcctcgactacccctcaactgagccccagcctggccccgagctgccccctggagacggagccctggagcctgagacgcccatgttgccacggaagcctgaagaa

SEQ ID NO: 356757 - DNA, 120 bp, Artificial Sequence
  ENSG00000139970_27 (sequence is synthesized)
atgtttttcccacccaagaattaaatttaaccatttgaactaatgaaaaatgtcattattaaaaataccactcagtagaacccataagtattttaatatggcccaggtcacttgagtttt

SEQ ID NO: 356758 - DNA, 120 bp, Artificial Sequence
  ENSG00000139970_28 (sequence is synthesized)
caatgctctttctataaacctggaagtaaattctagaatttaaacatgaattcttagagatctgatgaggaacagttggcagctaggattttgagctatctcaactacttaaaaaaagat

SEQ ID NO: 356759 - DNA, 120 bp, Artificial Sequence
  ENSG00000139970_29 (sequence is synthesized)
aatttatctccatgaagtcatgtgtggagaattcagcaaatgagctgatttggcactaattttttttctctggtcccagctggtttctctgaattttcagcccacccatgctgtgtctta

SEQ ID NO: 356760 - DNA, 120 bp, Artificial Sequence
  ENSG00000139970_30 (sequence is synthesized)
ggtagccagaaacagtcacaatgctccactgagaaccatgctttctgtgttctcagtgcatggaagcaggtgtgtacggtgccctgtggccctcactggctggcataaccccccagagat

SEQ ID NO: 356761 - DNA, 120 bp, Artificial Sequence
  ENSG00000139970_31 (sequence is synthesized)
gactcctgctctcaccctcagagtgagagtaggaacgcttagctgttactggggttcggcagcctgtctcatgattccctctgacggaattttctgtgggaatggtttgttgacagggcc

SEQ ID NO: 356762 - DNA, 120 bp, Artificial Sequence
  ENSG00000139970_32 (sequence is synthesized)
tatattctagagtcagaagacctccagttgtatggcaccatgaaccagtctaatcccttcattgtaccaatgatgaaaatgtggctgagacatttgtccagggttgcccagtgagtcact

SEQ ID NO: 356763 - DNA, 120 bp, Artificial Sequence
  ENSG00000139970_33 (sequence is synthesized)
ggcagagctggaatcaaacccaggtcacatagcttctagctctatagtctttacaacacaccagattgtctccttaaaccatttttagttcctccgacaatttcccaaaattaatattaa

SEQ ID NO: 356764 - DNA, 120 bp, Artificial Sequence
  ENSG00000139970_34 (sequence is synthesized)
gataaaaaatctagatagggaatgtgaaaaccatatatacttttgcattgaaggaaactctagattctactaatattaatagtaagccctccaagtgtgcttatgtagttacagctctga

SEQ ID NO: 356765 - DNA, 120 bp, Artificial Sequence
  ENSG00000139970_35 (sequence is synthesized)
ggctagaggtatgcccagcctctcacttgatgaggatcaggggcacctggggctctcactgaatttgctgggttcctttgaataagttgctttggcctcctggtgacttacacgtggaat

SEQ ID NO: 356766 - DNA, 120 bp, Artificial Sequence
  ENSG00000139970_36 (sequence is synthesized)
caaagttagtcaatcgtgattcggcatggtcataagcagagctggggaagcccagacaaggtagttgtgaagtttctgtgctctcacagcactttatacacaccctggcaggggcttgta

SEQ ID NO: 356767 - DNA, 120 bp, Artificial Sequence
  ENSG00000139970_37 (sequence is synthesized)
ctgggagctgtctggtaactgttcaaagaagggcagaaggaaaagtgaaaaatgtggtcttgaccctcaaaatgctttactggaataatgacttgccatataatgactgaagagagatac

SEQ ID NO: 356768 - DNA, 120 bp, Artificial Sequence
  ENSG00000139970_38 (sequence is synthesized)
tttgtaatgtaaaaattgtgggccagaacaggggtcagcaaaccttgtccgtaaagagacagatggtagatactttaggctttgcaagccacaccatctgtggcaccttttcaactttgc

SEQ ID NO: 356769 - DNA, 120 bp, Artificial Sequence
  ENSG00000139970_39 (sequence is synthesized)
cattgtagcacaaaagcagaaaaagacagtacaaaaaggaagggcttgactgtgtgcccataagacttctgaacactaaaaatttgattcaatatcatttcatatattagaaaatattaa

SEQ ID NO: 356770 - DNA, 120 bp, Artificial Sequence
  ENSG00000139970_40 (sequence is synthesized)
tcttgttttgattttatttgaacatttaaaaatgtaaaaacctttattaactcgtgggcctatgcaaaaaccggtcaagggccacagcttcgtagattattatttccttgagtccctcaa

SEQ ID NO: 356771 - DNA, 120 bp, Artificial Sequence
  ENSG00000139970_41 (sequence is synthesized)
accttataacaaagtgatccaaatagttccaagagaactaaggactggatcctctttcattgattctgtgatgagctttcaacgcctttcattgactatcgaaatcatgatgtattctga

SEQ ID NO: 356772 - DNA, 120 bp, Artificial Sequence
  ENSG00000139970_42 (sequence is synthesized)
cttcaatggcctgaccctgctgctcatgggtaagagcagataagactgtatacgtcttccttcaccccctctgtgaaaacgctgcttcctaggctgtaagctttttgtttgtttaaagag

SEQ ID NO: 356773 - DNA, 120 bp, Artificial Sequence
  ENSG00000139970_43 (sequence is synthesized)
gaatccagatgccaggtgagaacccacagcaaccacagcttggtggagtgagccacagcggctcatgtggcggcactgcgggagctcagctgggtgtgtttggtgtctcctgcagctatt

SEQ ID NO: 356774 - DNA, 120 bp, Artificial Sequence
  ENSG00000139970_44 (sequence is synthesized)
gttgcagcagaggcggcggcgacgctgagacaccgcagcttccctgagcgccgagtccctccggggacagcagcagggagcgcccgcgcagccaccgagcctctgcccagccaagccgcc

SEQ ID NO: 356775 - DNA, 120 bp, Artificial Sequence
  ENSG00000139970_45 (sequence is synthesized)
accgccagccatggccgcgccgggggatccgcaggacgagctgctgccgctggccggccccgggtcccagtggctcaggcaccggggggagggggagaacgaagcggtgacgccgaaagg

SEQ ID NO: 356776 - DNA, 120 bp, Artificial Sequence
  ENSG00000139970_46 (sequence is synthesized)
caggctggggagcccagcccggggttgggcgccagggcccgggaagcggcgtcgcgggaagccggctcgggccccgcccggcagtcgcccgttgccatggaaactgcatccacaggtgtg

SEQ ID NO: 356777 - DNA, 120 bp, Artificial Sequence
  ENSG00000139971_0 (sequence is synthesized)
gagggagtcgccgccgctaccgccgccgccgccgcagggcccgccgctgggatgccgagcgcccgcgccgccgctgcctctgtcctccgcgcgctgctcagctgaaggcgcacaggattc

SEQ ID NO: 356778 - DNA, 120 bp, Artificial Sequence
  ENSG00000139971_1 (sequence is synthesized)
ctcagctgaaggcgcacaggattcaattactggacttgtcaactctgccagtgtacgtgccatttctcttccactatgagaggaccgattgtattgcacatttgtctggctttctgtagc

SEQ ID NO: 356779 - DNA, 120 bp, Artificial Sequence
  ENSG00000139971_2 (sequence is synthesized)
cttctgcttttcagcgttgccacacaatgtctggccttccccaaaatagaaaggaggagggagatagcacatgttcatgcggaaaaagggcagtccgataagatgaacaccgatgaccta

SEQ ID NO: 356780 - DNA, 120 bp, Artificial Sequence
  ENSG00000139971_3 (sequence is synthesized)
gaaaatagctctgttacctcaaagcagactccccaactggtggtctctgaagatccaatgatgatgtcagcagtaccatcggcaacatcattaaataaagcattctcgattaacaaagaa

SEQ ID NO: 356781 - DNA, 120 bp, Artificial Sequence
  ENSG00000139971_4 (sequence is synthesized)
acccagcctggacaagctgggctcatgcaaacagaacgccctggtgtttccacacctactgagtcaggtgtcccctcagctgaagaagtatttggttccagccagccagagagaatatct

SEQ ID NO: 356782 - DNA, 120 bp, Artificial Sequence
  ENSG00000139971_5 (sequence is synthesized)
cctgaaagtggacttgccaaggccatgttaaccattgctatcactgcgactccttctctgactgttgatgaaaaggaggaactccttacaagcactaactttcagcccattgtagaagag

SEQ ID NO: 356783 - DNA, 120 bp, Artificial Sequence
  ENSG00000139971_6 (sequence is synthesized)
atcacagaaaccacaaaaggttttctgaagtatatggataatcaatcatttgcaactgaaagtcaggaaggagttggtttgggacattcaccttcatcctatgtgaatactaaggaaatg

SEQ ID NO: 356784 - DNA, 120 bp, Artificial Sequence
  ENSG00000139971_7 (sequence is synthesized)
ctaaccaccaatccaaagactgagaaatttgaagcagacacagaccacaggacaacttcttttcctggtgctgagtccacagcaggcagtgagcctggaagcctcacccctgataaggag

SEQ ID NO: 356785 - DNA, 120 bp, Artificial Sequence
  ENSG00000139971_8 (sequence is synthesized)
aagccttcgcagatgacagctgataacacccaggctgctgccaccaagcaaccactcgaaacttccgagtacaccctgagtgttgagccagaaactgatagtctgctgggagccccagaa

SEQ ID NO: 356786 - DNA, 120 bp, Artificial Sequence
  ENSG00000139971_9 (sequence is synthesized)
gtcacagtgagtgtcagcacagctgttccagctgcctctgccttaagtgatgagtgggatgacaccaaattagagagtgtaagccggataaggacccccaagcttggagacaatgaagag

SEQ ID NO: 356787 - DNA, 120 bp, Artificial Sequence
  ENSG00000139971_10 (sequence is synthesized)
actcaggtgagaacggagatgtctcagacagcacaagtaagccatgagggtatggaaggaggccagccttggacagaggctgcacaggtggctctggggctgcctgaaggggaaacacac

SEQ ID NO: 356788 - DNA, 120 bp, Artificial Sequence
  ENSG00000139971_11 (sequence is synthesized)
acgggcacagccctgctaatagcgcatgggaatgagagatcacctgctttcactgatcaaagttcctttacccccacaagtctgatggaagacatgaaagtttccattgtgaacttgctc

SEQ ID NO: 356789 - DNA, 120 bp, Artificial Sequence
  ENSG00000139971_12 (sequence is synthesized)
caaagtacgggagacttcacggaatccaccaaggaaaacgatgccctgtttttcttagaaaccactgtttctgtctctgtatatgagtctgaggcagaccaactgttgggaaatacaatg

SEQ ID NO: 356790 - DNA, 120 bp, Artificial Sequence
  ENSG00000139971_13 (sequence is synthesized)
aaagacatcatcactcaagagatgacaacagctgttcaagagccagatgccactttatccatggtgacacaagagcaggttgctaccctcgagcttatcagagacagtggcaagactgag

SEQ ID NO: 356791 - DNA, 120 bp, Artificial Sequence
  ENSG00000139971_14 (sequence is synthesized)
gaagaaaaggaggacccctctcctgtgtctgacgttcctggtgttactcagctgtcaagaagatgggagcctctggccactacaatttcaactacagtcgtccctttgtcttttgaagtt

SEQ ID NO: 356792 - DNA, 120 bp, Artificial Sequence
  ENSG00000139971_15 (sequence is synthesized)
actcccactgtggaagaacaaatggacacagtcacagggccaaatgaggagttcacaccagttctgggatctccagtgacacctcctggaataatggtgggggaacccagcatttcccct

SEQ ID NO: 356793 - DNA, 120 bp, Artificial Sequence
  ENSG00000139971_16 (sequence is synthesized)
gcacttcctgctttggaggcatcctctgagagaagaactgttgttccatctattactcgtgttaatacagctgcctcatatggcctggaccaacttgaatctgaagagggacaagaagat

SEQ ID NO: 356794 - DNA, 120 bp, Artificial Sequence
  ENSG00000139971_17 (sequence is synthesized)
gaggatgaagaggatgaagaagatgaagatgaagaagaggaagatgaggaagaagatgaggaagataaagatgcagactcgctggatgagggcttggatggtgacactgagctgccaggt

SEQ ID NO: 356795 - DNA, 120 bp, Artificial Sequence
  ENSG00000139971_18 (sequence is synthesized)
tttaccctccctggtatcacatcccaggaaccaggcttagaggagggaaacatggacctgttggagggagctacctaccaggtgccagatgccctcgagtgggaacagcagaatcaaggc

SEQ ID NO: 356796 - DNA, 120 bp, Artificial Sequence
  ENSG00000139971_19 (sequence is synthesized)
ctggtgagaagctggatggaaaaattaaaagacaaggctggttacatgtctgggatgctggtgcctgtaggggttgggatagctggagccttgttcatcttgggagccctctacagcatt

SEQ ID NO: 356797 - DNA, 120 bp, Artificial Sequence
  ENSG00000139971_20 (sequence is synthesized)
aaggttatgaatcgccgaaggagaaatggcttcaaaaggcataaaagaaagcagagagaattcaacagcatgcaagatcgagtaatgctcttagccgacagctctgaagatgaattttga

SEQ ID NO: 356798 - DNA, 120 bp, Artificial Sequence
  ENSG00000139971_21 (sequence is synthesized)
attggactgggttttaattgggatattcaacgatgctactattctaatttttattttggagcagaaaaaaaaaaagaacaacctgccacattgctgctatcaggccgttagtcctagtgt

SEQ ID NO: 356799 - DNA, 120 bp, Artificial Sequence
  ENSG00000139971_22 (sequence is synthesized)
ctgctgggtgctgggtagtagatttttcttgtactgagcagaaatggcatgttgtatactaaacgtatcatgcagtatttggttttattctgtagtgaattttccacaaccgtgggctac

SEQ ID NO: 356800 - DNA, 120 bp, Artificial Sequence
  ENSG00000139971_23 (sequence is synthesized)
aactcataaatatgcaacatatatgtttttcagtaggagttgctacattaggcagagtaaatattttgtagttttccacagtgtcttttccttggtttgaattacctgcattgagaataa

SEQ ID NO: 356801 - DNA, 120 bp, Artificial Sequence
  ENSG00000139971_24 (sequence is synthesized)
tgattgttgccaccaaggcatgcttgactctgagatataaatcttaacaaagaataacttctcaagatatactctacctacttgaaaccacagggttgtgggccatggtacatactgcat

SEQ ID NO: 356802 - DNA, 120 bp, Artificial Sequence
  ENSG00000139971_25 (sequence is synthesized)
ttgcatcaaactagcagtaactcagaatgaaatcattttcattaagaagctctctcagcatattaggattatatgtagatttgtatgtattttgcattatgtacttcagtctcctagttt

SEQ ID NO: 356803 - DNA, 120 bp, Artificial Sequence
  ENSG00000139971_26 (sequence is synthesized)
tattattctcaccttccgttttattcttggcgaggaaaaaaatgcactagaaataatacattaaactgactcttagtcttaatgtacgtttgctgtcttaaatagtgtgattgagtccaa

SEQ ID NO: 356804 - DNA, 120 bp, Artificial Sequence
  ENSG00000139971_27 (sequence is synthesized)
atgtcatacatgtttatgattaagagatattctttttgtgtgctagttgattttgccgagaaaaaatgaagaagaattcaagaatgagatgagggtaggtaagctctcagagcatttctg

SEQ ID NO: 356805 - DNA, 120 bp, Artificial Sequence
  ENSG00000139971_28 (sequence is synthesized)
tctgccatttggttctatgcttatgtggctgctaatgtgactaattcagagtgttgtatttccacatctgtggactccaccatggaaaaggtgggctaccattggtccttatatggcttt

SEQ ID NO: 356806 - DNA, 120 bp, Artificial Sequence
  ENSG00000139971_29 (sequence is synthesized)
attagaaaaatagacattctatcgtttgtctgcccagtggccagagtcctggtgaacaacagagctcatgggaaaccagcctctctcagggcaccccgctatgaggatattgaaatatgt

SEQ ID NO: 356807 - DNA, 120 bp, Artificial Sequence
  ENSG00000139971_30 (sequence is synthesized)
tcaatcatttctcatctcccttggaatgtaattccctgccctatacaaaataggatattccaatgcgctatttgaatctagggattgaggatttgtagttgagttttggggtaaaggctt

SEQ ID NO: 356808 - DNA, 120 bp, Artificial Sequence
  ENSG00000139971_31 (sequence is synthesized)
ggctcattgccatggaagaataaaagttatttattaatagtgctgtcactgtggagtacttgttggtgtttattagaagttgtctactatgttcaagaaaagttgcacagttattcctca

SEQ ID NO: 356809 - DNA, 120 bp, Artificial Sequence
  ENSG00000139971_32 (sequence is synthesized)
gagctactatgtgaggtaggacatatgtttttattctcccatttgactgaagatggaactgaagcagagaagtgaaatgattttccaaagttgtacccagagagaatcagcgtgagaacc

SEQ ID NO: 356810 - DNA, 120 bp, Artificial Sequence
  ENSG00000139971_33 (sequence is synthesized)
cacttggacccagccatgcacccttatcttcagttcagtaaccttttcatagactttggtggaagcagtgacatttcagggtccttctttaaaacaaaggttctaagggaatagcaggga

SEQ ID NO: 356811 - DNA, 120 bp, Artificial Sequence
  ENSG00000139971_34 (sequence is synthesized)
atagctgcctggtcaaggaacgtttgatgtgaatttccatctttgttaaatgaatgatgcctttctaatttctctcttactcacacacaagttctttccttccccatctcagttatcagt

SEQ ID NO: 356812 - DNA, 120 bp, Artificial Sequence
  ENSG00000139971_35 (sequence is synthesized)
tatttcctttacagtcatacatttgagtatcacctctatggaactaataaaccttcctagaatccgtttttgaataatgtctggctcacaagaacattttcatcaaataattttaactct

SEQ ID NO: 356813 - DNA, 120 bp, Artificial Sequence
  ENSG00000139971_36 (sequence is synthesized)
ttttgccaagagatgtaagcaaatatgtgaaactgatcaagagaagtgaaaagctctgtacagtcaaatagaagttagcaactggcaaattagctcaaggtcagattttaaaaatagaat

SEQ ID NO: 356814 - DNA, 120 bp, Artificial Sequence
  ENSG00000139971_37 (sequence is synthesized)
tcagaatcatgacactcagaagtgatttgtaatttcacgagtagagacatcctgatattgcataagggatgttttccttttctaagagcagccctttgctgtaagtgtttctaaggttgg

SEQ ID NO: 356815 - DNA, 120 bp, Artificial Sequence
  ENSG00000139971_38 (sequence is synthesized)
gagtaagtgagcatggtgtggcattactgtctttgtattcttgacaaactatttgttgagaatacgtcgtaggccacttaactgagtagcacatgggtgatactagtggccattattgcc

SEQ ID NO: 356816 - DNA, 120 bp, Artificial Sequence
  ENSG00000139971_39 (sequence is synthesized)
ttgggctactcaatctatagtcttaactaaaccatggctaataggttgaatcttcaaactgtagtgtaataaattcccaaataacagacccatattttcatttctcagaggtccgtgagg

SEQ ID NO: 356817 - DNA, 120 bp, Artificial Sequence
  ENSG00000139971_40 (sequence is synthesized)
atgacatgtatgtgaattttggcttaacacagtatctctgtggtcctttttgggacacatgatttcttaaaggaaaagattatacttagagtacatttctgtacaaacccatttaaacat

SEQ ID NO: 356818 - DNA, 120 bp, Artificial Sequence
  ENSG00000139971_41 (sequence is synthesized)
ctggattgagtggaaggtcggtggatggtacaaatgacatgtttattttggccattttccttgctgctggtggctgtggaataatgattttcagtggttggcttagattattaagaggat

SEQ ID NO: 356819 - DNA, 120 bp, Artificial Sequence
  ENSG00000139971_42 (sequence is synthesized)
cagaaaaggttgtcatattttaaacaaaacctgggattagagatgctgctacgagatggaagtgctggccagtggttatatagtggtccagttgagaagtagtaaatcaggcacttgtag

SEQ ID NO: 356820 - DNA, 120 bp, Artificial Sequence
  ENSG00000139971_43 (sequence is synthesized)
gtttacccaaaataagtgacaagtatgcttatatttgcacaattaaaatagaaagtcaactttttattcaaacaactaggcttaaaacatttaacagtgaaacaaataaagctgtctgga

SEQ ID NO: 356821 - DNA, 120 bp, Artificial Sequence
  ENSG00000139971_44 (sequence is synthesized)
aaggagggctgattcctgcagcttcagttgtgaacaccatccccactggactgagtttacccagccagaactgccagcatcccaccgcaggggcaggaactaggtcttcttctcggaggg

SEQ ID NO: 356822 - DNA, 120 bp, Artificial Sequence
  ENSG00000139971_45 (sequence is synthesized)
agaggcagtgtttccagaatttgcaggctcataaaaatcacctgggacacttgtgaaacatacagatctcaaggccttgccccagacctgatgagttagaatctccagggaaggagcttg

SEQ ID NO: 356823 - DNA, 120 bp, Artificial Sequence
  ENSG00000139971_46 (sequence is synthesized)
gggtattcatgccccagcaagcttgggaacacagctaggagggatctatctagagaaccacttccttatgatagagacaaggtcatttaaagtcacaatgagataccacctcacacctat

SEQ ID NO: 356824 - DNA, 120 bp, Artificial Sequence
  ENSG00000139971_47 (sequence is synthesized)
tgggatggctattattcaataaaacaaaatataacaattgtttctgaggatgtggagaaattggaatccttgtatactgtgggtgggaatgtaaaatggatagccactgtggaaaacagt

SEQ ID NO: 356825 - DNA, 120 bp, Artificial Sequence
  ENSG00000139971_48 (sequence is synthesized)
atgaagattcctcaaaaaattaagatagaactactatataatccaactatcccacttctgggcatatatccaaaagaatagaaatcaggatcttgaagaagtatctgtacgcctgtgttc

SEQ ID NO: 356826 - DNA, 120 bp, Artificial Sequence
  ENSG00000139971_49 (sequence is synthesized)
attgcttatgcttataagcatattattcacaataagcttataagtattattcacaatagccaagatatggaaattgcattgatagatatgcaaatatctatcaatagatgaatggataaa

SEQ ID NO: 356827 - DNA, 120 bp, Artificial Sequence
  ENSG00000139971_50 (sequence is synthesized)
gaaaatgtggtatatacatacagtagaatattattcagccataggaaataaggaaattctgtcattgtgacaatatggatatacatggagaacattatgctaagtgaaataaactagtga

SEQ ID NO: 356828 - DNA, 120 bp, Artificial Sequence
  ENSG00000139971_51 (sequence is synthesized)
cagaaggacaaatgcatgattgcacttctttgaggtatccaaaataatcaaactcataagggcagaggcaaaatggtgcttgccacgggctgggcaaagttaaaggtggggagatgttga

SEQ ID NO: 356829 - DNA, 120 bp, Artificial Sequence
  ENSG00000139971_52 (sequence is synthesized)
ttaattatgtttcagttatgcaagatgaataagttctagagctctgctgtataacatagtgcctatagttaacaatatcgtactgtgcagttaaaaatttgttaagagggccgggtgtgg

SEQ ID NO: 356830 - DNA, 120 bp, Artificial Sequence
  ENSG00000139971_53 (sequence is synthesized)
ctcggcctcccaaagtgttggaattacaagtgtgaactcctgcacccagccaagaaaatatttaaacagctgcctgaaatggaaattgaatccaaaacattttgccactggtgtttgaag

SEQ ID NO: 356831 - DNA, 120 bp, Artificial Sequence
  ENSG00000139971_54 (sequence is synthesized)
aatccaaaacattttgccactggtgtttgaagtggactatcttgtctcaagcctttttattttctcatgaatgtaccttctaaatattgttaaggctacaatggaggaaattttaaatta

SEQ ID NO: 356832 - DNA, 120 bp, Artificial Sequence
  ENSG00000139971_55 (sequence is synthesized)
ttatatttactattttacagtgagtggaaaatttgaaatttagtaaaaagttttcaagaaatttttatagattaataatggagtttaaaaagtcatggcgatgaggcatttaacaaggag

SEQ ID NO: 356833 - DNA, 120 bp, Artificial Sequence
  ENSG00000139971_56 (sequence is synthesized)
aaaccagcttgtcggcgccattttgtctcggcagcggtggccgtagctccatcgcattttatgtttctggcgagaagggaacggagttttcatcaggtagattggtttttgtgcggccgt

SEQ ID NO: 356834 - DNA, 120 bp, Artificial Sequence
  ENSG00000139971_57 (sequence is synthesized)
cctccaccgtttcctccaggacagcacctagtcgtggccggaggagtctcagagctgtcagaaagaataagactgattttatgggaaaattaagcagatgctccagtttgagaaacctgg

SEQ ID NO: 356835 - DNA, 120 bp, Artificial Sequence
  ENSG00000139971_58 (sequence is synthesized)
gaaaaagaattaagtaggagtatattcaatctgcagtatagatcagaggacagtaaactacagctgggccaaatctggcctgccacttgtttttgaatggtttgtaagctaagaatggtt

SEQ ID NO: 356836 - DNA, 120 bp, Artificial Sequence
  ENSG00000139971_59 (sequence is synthesized)
tttacattttgaaatgattgaaaaaaaaagtcaaaagaagaataatattttgtgacatagaaaagttataaaaattcaaattccagtgttcataaataaagctatattggaacacagcca

SEQ ID NO: 356837 - DNA, 120 bp, Artificial Sequence
  ENSG00000139971_60 (sequence is synthesized)
tgagggtgtcttcttcctgtagaagtccaaatgaaacaccttatttccaatcacagccacaacctgggggagaagaatcaaatcctccacagggattgtgatttctgcagatatgaataa

SEQ ID NO: 356838 - DNA, 120 bp, Artificial Sequence
  ENSG00000139973_0 (sequence is synthesized)
gggtctgaggttgtaactttaacaggtgtaagtatttctttcctctgtttcagctggaagttttgagagtgaaatattcacagccattaagagacctccaaattaatttctcaacatgct

SEQ ID NO: 356839 - DNA, 120 bp, Artificial Sequence
  ENSG00000139973_1 (sequence is synthesized)
tattctatagttcacattcaatccagagcactgaaggaactgaacaactggacactgtagacatcagatagctggccatggtgttggccatggcgtctcaggatgttcagaacttcttcc

SEQ ID NO: 356840 - DNA, 120 bp, Artificial Sequence
  ENSG00000139973_2 (sequence is synthesized)
agcctttctcttcctggatatctcgggtttatgaagctctccagcaagcaggagatatgttatctgcttcgctggttaacataagcaaacaagactctaaattgagtgacaaactagatc

SEQ ID NO: 356841 - DNA, 120 bp, Artificial Sequence
  ENSG00000139973_3 (sequence is synthesized)
aggacttagataatattcagattcaggaaacgtactttgaagatgaagaacaagacaatgattggagtcaagaggatgcaaattccttgtttcttgaagtggatcatttctcatgttgta

SEQ ID NO: 356842 - DNA, 120 bp, Artificial Sequence
  ENSG00000139973_4 (sequence is synthesized)
atagtgatttgcaggactctgcccaaaattcaagcccaagccttagccaacatgcaaaggactcatgttccacaatgtcccagtggcccaattgggccagtgatgaccgcaagttaccac

SEQ ID NO: 356843 - DNA, 120 bp, Artificial Sequence
  ENSG00000139973_5 (sequence is synthesized)
atgtgctttcttctattgcggaggaagagcatcaccttgaaaagcaaagaagtggccttcaacatggctttgacagccagctccctggtactttagaaactgttaatggaaaaaagcaag

SEQ ID NO: 356844 - DNA, 120 bp, Artificial Sequence
  ENSG00000139973_6 (sequence is synthesized)
tcaacagctttggggatgacgaagagctgtccacatcttctgacagtgacgaggaggtgatcaaacaatttgagatttccgtgtcccggtcccagagtttccgttcagtgacatctgaga

SEQ ID NO: 356845 - DNA, 120 bp, Artificial Sequence
  ENSG00000139973_7 (sequence is synthesized)
aaggaaagcagacaggattggagcagaaaccaaaattcagccgttcgttgttgacacacggagaagatggcacagaagtatctgcctgcgaagatttggatggagccagccaacggcgtt

SEQ ID NO: 356846 - DNA, 120 bp, Artificial Sequence
  ENSG00000139973_8 (sequence is synthesized)
attctgagaatctctcctacggtgaagatgaccacatccctgctcactcacagtccccatgtgaaagaggggatgccaaacaccacggcacatctcaccaagagtccagtgtggtccaaa

SEQ ID NO: 356847 - DNA, 120 bp, Artificial Sequence
  ENSG00000139973_9 (sequence is synthesized)
gcctcaggcgccaatccacagagggcagcttggagatggagacagcttttaatagccggggatttgaagattcctatgccactgacagctcctccatgtggagtccagaggaacaggaca

SEQ ID NO: 356848 - DNA, 120 bp, Artificial Sequence
  ENSG00000139973_10 (sequence is synthesized)
ggaccaatttgcaggtgccatccggggtctcagagcccatctcaaagtgtggtgacctagatgtcatctttgaatatagagccgccagccagaagctcacagtgaccattgtgagggcac

SEQ ID NO: 356849 - DNA, 120 bp, Artificial Sequence
  ENSG00000139973_11 (sequence is synthesized)
agggcctcccagataaggaccgaagtggtgtcaactcctggcaagttcatgtagtgctgctgcctggtaagaaacacaggggcaggacgaacatacagagagggcccaaccccgtcttca

SEQ ID NO: 356850 - DNA, 120 bp, Artificial Sequence
  ENSG00000139973_12 (sequence is synthesized)
gggagaaggtcacctttgccaagctggagcccagagatgtggctgcctgtgctgtccgcttccgcctgtacgctgcccggaagatgacccgagagagaatgatgggagagaaactattct

SEQ ID NO: 356851 - DNA, 120 bp, Artificial Sequence
  ENSG00000139973_13 (sequence is synthesized)
atctcagccacctgcacccagaaggggaaatgaaagtgactctggttctggagccaagaagtaatataagcagtggagggtctccgctcagcccatctgcggtttctcacagtgatagta

SEQ ID NO: 356852 - DNA, 120 bp, Artificial Sequence
  ENSG00000139973_14 (sequence is synthesized)
cttcatccacgcagtcgctgtctcatggaggggcgccagagctgttggtggggctctcgtacaatgccacaacggggcgattatctgtggaaatgatcaaaggcagccatttccgaaacc

SEQ ID NO: 356853 - DNA, 120 bp, Artificial Sequence
  ENSG00000139973_15 (sequence is synthesized)
tcgctgttaaccgagcacctgatacatatggaaaactctttctcctcaattctgtgggtcaagagatgtcccgttgcaagacgtccattcggcgtggtcagcccaatcctgtctataagg

SEQ ID NO: 356854 - DNA, 120 bp, Artificial Sequence
  ENSG00000139973_16 (sequence is synthesized)
agacctttgttttccaggtggccctctttcagctgtctgatgtcacgttgatgatttccgtttataacaggcgtactatgaagcgtaaagagatgattggctggattgccctgggccaga

SEQ ID NO: 356855 - DNA, 120 bp, Artificial Sequence
  ENSG00000139973_17 (sequence is synthesized)
acagcagtggagaggaggaacaagatcactgggaggagatgaaggaaaccaaaggccagcagatctgcagatggcacactttgctggaatcctaggtttgctaacctgcatttgtgtgct

SEQ ID NO: 356856 - DNA, 120 bp, Artificial Sequence
  ENSG00000139973_18 (sequence is synthesized)
gtgtccaccttggttacctgtgttgctgtctactgacactaagtgtcctggcaagggtttcagggtttcaaaaacagattccactaacccctaggacattgtgagtgggagttttgggtt

SEQ ID NO: 356857 - DNA, 120 bp, Artificial Sequence
  ENSG00000139973_19 (sequence is synthesized)
tctcaatggtctgatttggatttaaatattgtaattttaaaaacacacatacacagtgaagtgtccgtatggaaaatattataccacaattaagaccactgatgagttaatttgtgccaa

SEQ ID NO: 356858 - DNA, 120 bp, Artificial Sequence
  ENSG00000139973_20 (sequence is synthesized)
tagatcattgagttttagttcagggtatggggtgaagcttcttctgctgtctctgtttgcttgaagagtaacctgagattgcaagggagctgttaattgttactatttgcaaccatttag

SEQ ID NO: 356859 - DNA, 120 bp, Artificial Sequence
  ENSG00000139973_21 (sequence is synthesized)
gtggatgaatcagaattttcttaatatggtacaaaaaactccaaaatatagatatgaatcagatgctgagcctcataaaagaatcaaactctaatccataaactcttatttcacattttt

SEQ ID NO: 356860 - DNA, 120 bp, Artificial Sequence
  ENSG00000139973_22 (sequence is synthesized)
ttatcaaagaaacctatttacctaacgagtaaatattataaacttgcacttttaaaataaatttgtattaattaaatacctcttttatcttatattttgtggtttctatgagatttggtt

SEQ ID NO: 356861 - DNA, 120 bp, Artificial Sequence
  ENSG00000139973_23 (sequence is synthesized)
ggttagatgaatcattttgaagcaagaaaagagttcagaaactactgttttaagacaacttgtctccttttgaatatgtaagatttcaaacttgtgactttcaaggtttttatgctgtct

SEQ ID NO: 356862 - DNA, 120 bp, Artificial Sequence
  ENSG00000139973_24 (sequence is synthesized)
ttctcacccaataagttcttacagaataagaaaacaaaaaacaagactactgcagtcatagatttattgattttttctgcttctggtgttcttttggattatcctttttctatgttcaat

SEQ ID NO: 356863 - DNA, 120 bp, Artificial Sequence
  ENSG00000139973_25 (sequence is synthesized)
tatatatactcatatatgaatattttgaatgtactgcatgtaaaccatgctctttttaaactgagtattttccatcactagagcatagtaaattgtacacagtgagtccttaataaatat

SEQ ID NO: 356864 - DNA, 120 bp, Artificial Sequence
  ENSG00000139973_26 (sequence is synthesized)
tgatttgattgactcttcaaagtgaacatgttataacacctgtgaatggagaaatattttcagcttgtgtggaatgacattaagtttttctttgagcatttgaagtgcctataactgtca

SEQ ID NO: 356865 - DNA, 120 bp, Artificial Sequence
  ENSG00000139973_27 (sequence is synthesized)
tttttttatggcatttgcagcaacatatattagtcactacttgcaatctgggcatgtgccattcagaatactgatcttgtatggttatgagcatgggattttacttatgacttaatttta

SEQ ID NO: 356866 - DNA, 120 bp, Artificial Sequence
  ENSG00000139973_28 (sequence is synthesized)
catatttatgcagtgcatgtttactttccttattcataggtctgggcccttaatttcaattactttaaattggcattaataaaaaaatagggaaagaatgtatgtacatttaatccctgc

SEQ ID NO: 356867 - DNA, 120 bp, Artificial Sequence
  ENSG00000139973_29 (sequence is synthesized)
gctcaatgtgcagctcttctgagcaattgctcagtcacctatttttagtttctatgtttcattgtggactttttcctgtctgtgggaagagtgatagctagtgatggctgtatacagtta

SEQ ID NO: 356868 - DNA, 120 bp, Artificial Sequence
  ENSG00000139973_30 (sequence is synthesized)
aaaacacataactcctcctcagctccacgttttgacagattgtaagcgtaggctgtaacacttgaagaacatatttattccttacagtgtgtaatggttatcctgacaagaccagactag

SEQ ID NO: 356869 - DNA, 120 bp, Artificial Sequence
  ENSG00000139973_31 (sequence is synthesized)
ggcacaggataactctactatgctttcagggttcagtctttgaatgaaatgatttcatatggaagaatgagaatttgccaaataaattaataccttaattacttttcaggtcatgggagt

SEQ ID NO: 356870 - DNA, 120 bp, Artificial Sequence
  ENSG00000139973_32 (sequence is synthesized)
ttcatatatatggctgctcagttattaggaatatgtaataaaaccatgttcctctgggtttttaccctacctttctttgggagatctcagagtgcttttccagcattatatccattaact

SEQ ID NO: 356871 - DNA, 120 bp, Artificial Sequence
  ENSG00000139973_33 (sequence is synthesized)
gctgagtggtctttgcagcgtggctaagtcattgagtagaactgagtgcgattgattaagtagcagcacaaagaagtggcttttcacatctcttactctttatgccttgtgtttaaaggg

SEQ ID NO: 356872 - DNA, 120 bp, Artificial Sequence
  ENSG00000139973_34 (sequence is synthesized)
aagtagaacagcctcgctatgctttcctttatgcagtaacataatagcagcattcattttaaaatttacatttgaaaaaaatctgtatatattgtacagacagccctgaatttttccctc

SEQ ID NO: 356873 - DNA, 120 bp, Artificial Sequence
  ENSG00000139973_35 (sequence is synthesized)
tcatattttcctgctgctgcatccttgtttcttggtacccaataatcacctatacttcattttctgttcccaagacccacccatttttaaggttttcggctggtgtagtgaagatatttg

SEQ ID NO: 356874 - DNA, 120 bp, Artificial Sequence
  ENSG00000139973_36 (sequence is synthesized)
tgtgcttgatctgccttccaatggtctgtttatgatacagtttacaggaatgcgcaccattttaagggaaggaatgcctgaaaacattttttatttttataattttactatgttggtgct

SEQ ID NO: 356875 - DNA, 120 bp, Artificial Sequence
  ENSG00000139973_37 (sequence is synthesized)
actcaccaaataggatgcatgtacatcttgaatatacagcaacattcaccctcagctgattgtatacatttaagtgctgaagacaagatatataacaatatgtggctgattttttttacc

SEQ ID NO: 356876 - DNA, 120 bp, Artificial Sequence
  ENSG00000139973_38 (sequence is synthesized)
tttatttgaaattctagtttagtaagatcttttgattttgtgcacttaaactcccttattttcttggcaaagtctagacacaaatgcatttaacatgtttttcacttgagcttttacatt

SEQ ID NO: 356877 - DNA, 120 bp, Artificial Sequence
  ENSG00000139973_39 (sequence is synthesized)
tggttttcaaaagagttatgaaagataattagttggttctgcagtaaaaaactgcttttgcctatttcttccagctaatgattaatatctcatagggagatttgacattgaagcagcact

SEQ ID NO: 356878 - DNA, 120 bp, Artificial Sequence
  ENSG00000139973_40 (sequence is synthesized)
ggtttttgttgcttgagtaggtctttcagcgattttgcctgaagagcatgcttttaaaataatatcgttaagagtaaatgatgcgctgggtttatggaaatctgctttatagtgtgcctt

SEQ ID NO: 356879 - DNA, 120 bp, Artificial Sequence
  ENSG00000139973_41 (sequence is synthesized)
cttttagggtgtgagtttacactgaattgagaaatcctgatttcaccaattacggtggtggctgttgtactctctactcccctctgactattgttgaatttttaaatggaccattcacca

SEQ ID NO: 356880 - DNA, 120 bp, Artificial Sequence
  ENSG00000139973_42 (sequence is synthesized)
ggcagccgaacacctgctctccgttccctctccttcactggctcccagtgtgatgcacagttgttttggactctgtttttgctgatgctgcataactgttggaggtgggggtgtcttgcc

SEQ ID NO: 356881 - DNA, 120 bp, Artificial Sequence
  ENSG00000139973_43 (sequence is synthesized)
ttccctaacataagaagaatttgtaatgtctttggatgtggcattccacctgcatgaaatcaggaaaagaatcatcaccatgtttgtgagagggaaaagagtatggcattgcatagtcat

SEQ ID NO: 356882 - DNA, 120 bp, Artificial Sequence
  ENSG00000139973_44 (sequence is synthesized)
tcgctttaggcactattaattctgacatccttcattgaaaattaactgacatcaaatgtcaatattctccatagtcctaggtgccagtgagcctgaaacacagcttctgccttttcaatg

SEQ ID NO: 356883 - DNA, 120 bp, Artificial Sequence
  ENSG00000139973_45 (sequence is synthesized)
tgtagatttcatgatattttacaaattattgttacctcttgtgcagttactgtgctttagatgaccttatctgagaaccaaaattcttttctttccagatgaagtactatttaagtagaa

SEQ ID NO: 356884 - DNA, 120 bp, Artificial Sequence
  ENSG00000139973_46 (sequence is synthesized)
actagcattaggttaaatcaaagtgcttctctgatagccaccaatttgatttaattgatgattcggtgtggacaccactgtgggtttccaaaaaaactggttatccttttgcagcagagg

SEQ ID NO: 356885 - DNA, 120 bp, Artificial Sequence
  ENSG00000139973_47 (sequence is synthesized)
acttagtattttaaaaacagaaaagtaagtaggaaagtattatttgtaaatgtcataaaaccagatggaggcatattctttactgataaagaaacaggactagaacacgcatgtggtatc

SEQ ID NO: 356886 - DNA, 120 bp, Artificial Sequence
  ENSG00000139973_48 (sequence is synthesized)
tccttttacttttgaggaaactgtggttaaagaacattctattctatttgatctaagagcaaagcaaatgatggataatcctgaaatggtaaaagtatttttgtcttaaaaattattcat

SEQ ID NO: 356887 - DNA, 120 bp, Artificial Sequence
  ENSG00000139973_49 (sequence is synthesized)
ttgggcaaagtcatttacaacaaaataaaaagtcatacagcacacctatggaagaattaaagaatacataaatgtgctggatacatttagcatcctccagtgagttgtatgtaaggagag

SEQ ID NO: 356888 - DNA, 120 bp, Artificial Sequence
  ENSG00000139973_50 (sequence is synthesized)
taaactaataaaccaaaatacatatcagatcaactagctatcacttttctaaaacttgtagaattctgaaaaatatttaaagatgggagaaacgaaactgtgctaagacaatgagattgg

SEQ ID NO: 356889 - DNA, 120 bp, Artificial Sequence
  ENSG00000139973_51 (sequence is synthesized)
catagcacagtgaagttggcacaaactgtgatcctggcctgggtttacatgaaactctgctgtgtggccttaagaaaattacttagccagcctgtatcctggtttcttcaactggaaaat

SEQ ID NO: 356890 - DNA, 120 bp, Artificial Sequence
  ENSG00000139973_52 (sequence is synthesized)
ggaaataatacctacctcattaggtgtcttaaaagatatcagtgaaatcacagatgtaatgtgcctagcatagagccgggcatgtagttagcattccgtagttcctccttacagtcatgc

SEQ ID NO: 356891 - DNA, 120 bp, Artificial Sequence
  ENSG00000139973_53 (sequence is synthesized)
ctgaaaaagaaaatatttaagatgtgtcttctttttctagcaaatgttattataacactagagaaaaacaaaaaccaacgttcagatactgtaacaaggataggctcatgaagccaggct

SEQ ID NO: 356892 - DNA, 120 bp, Artificial Sequence
  ENSG00000139973_54 (sequence is synthesized)
ggattcgtaaataaaggaggcttcatcaggacagcctaatcagagataagcctggtatgtggaggaaattgagccttaatagagtccaactgtggtagaaccaagtctttgcatttatcc

SEQ ID NO: 356893 - DNA, 120 bp, Artificial Sequence
  ENSG00000139973_55 (sequence is synthesized)
ccttagtttggagggagtacaaatccttgatggtttgtgtgtacctcttgatcgatcacaaacaaggcctctccttgtctccagttctcttattcataaatggacaaggcatcttgtcgc

SEQ ID NO: 356894 - DNA, 120 bp, Artificial Sequence
  ENSG00000139973_56 (sequence is synthesized)
ctttatcaaaagagttggtgacaatggcagtttgactacatatttcaactgtgatccaaaaaagtaaaataaatgatgtgatactatactgagactgttttaaaaatggataacactttc

SEQ ID NO: 356895 - DNA, 120 bp, Artificial Sequence
  ENSG00000139973_57 (sequence is synthesized)
tttaaaacctgcattatatatccattttatatcctgatagccaaacattttaaaatactctaataacacagctctcaaaacgtatctgtttgactggaatgtcctgctcagaacaaatta

SEQ ID NO: 356896 - DNA, 120 bp, Artificial Sequence
  ENSG00000139973_58 (sequence is synthesized)
atgggttttaagagtggcttgttgatataatagcgcatccacttgttctcaagtgattcaaaccttgagtaaaaaggagagtttctggagaatttagaagaatctttgttgacatttaat

SEQ ID NO: 356897 - DNA, 120 bp, Artificial Sequence
  ENSG00000139973_59 (sequence is synthesized)
ctagagaagtcttcaggagcaaaccacttcaagttcagtgtaaccaggtgccatgagtcagtcatgtgctacttgtggttttaaacgaaacatgattctgggatgagaagtgcgaggcta

SEQ ID NO: 356898 - DNA, 120 bp, Artificial Sequence
  ENSG00000139973_60 (sequence is synthesized)
cactcctaatataatcaaattgccaaagcactgttttgagtcctcggtatcccaattaaggagaaacatgaagacattggagaatcacttagcttagggcttttagtagggaataattaa

SEQ ID NO: 356899 - DNA, 120 bp, Artificial Sequence
  ENSG00000139973_61 (sequence is synthesized)
acatgtagggaaggtgaaggagttagatgggaggtaagaaggctgaggagatttctagtaacaatgatccaaaagttctaaccagggggatggtgcacactttctcttcttgaccacatg

SEQ ID NO: 356900 - DNA, 120 bp, Artificial Sequence
  ENSG00000139973_62 (sequence is synthesized)
gatagatttcagagcatccctctaaatcaagtctggagaattatgtgaaggttgtttctcattaattcaaaatgtattcattgtctagtactatgctatctgggctggcacagaacttaa

SEQ ID NO: 356901 - DNA, 120 bp, Artificial Sequence
  ENSG00000139973_63 (sequence is synthesized)
aatctctttggagtgctatgagtgcacattgaagcagttggtcatcattatacaatgatgcttaccaatatacaactgttaagttagtctaactatgtgccataaacagtagagttcctt

SEQ ID NO: 356902 - DNA, 120 bp, Artificial Sequence
  ENSG00000139973_64 (sequence is synthesized)
gttactagtattggaaggtgaaacattggctgaatttattggggcaagtgtctaggaagccttggactggcagtgagtcttggttgcattatatgggaaattggtggggatgggggtgtc

SEQ ID NO: 356903 - DNA, 120 bp, Artificial Sequence
  ENSG00000139973_65 (sequence is synthesized)
atagaatcatcatctttggaagttttttaaaatagaaaaatgtacttgaagtcttggttctgctaaagaagaatgagaggacacccatgaatataccctttataaagttccttctaatat

SEQ ID NO: 356904 - DNA, 120 bp, Artificial Sequence
  ENSG00000139973_66 (sequence is synthesized)
ttaggtgtaacgttaaaaaagaatcaacaataacactccaggcctgtcttcttccactttggacattttttccacattgatttttctctgcatcatagaaagttttctctgaagagttcc

SEQ ID NO: 356905 - DNA, 120 bp, Artificial Sequence
  ENSG00000139973_67 (sequence is synthesized)
tatttgggttttgtttagggctttggggatgcctgcaggctcagggggagtttcctctcctatggtgctttgactgtttttgtttcccttgggtcacaaaaccatatcctagacacacag

SEQ ID NO: 356906 - DNA, 120 bp, Artificial Sequence
  ENSG00000139973_68 (sequence is synthesized)
acaataatcaccttatttatatccactgtggaacctgtgaaacagctcgaggctttacagaacaagctcataggcagtcatggagatctgaggcctttcttggaatgaagccgctaactt

SEQ ID NO: 356907 - DNA, 120 bp, Artificial Sequence
  ENSG00000139973_69 (sequence is synthesized)
gctaactgctttccattgctcactaatgctgccttaaggtttcttcatgggaatttttacttcatgcctttgagtgacagtgttaccagttttaccttgaggatgatgagaaggctgact

SEQ ID NO: 356908 - DNA, 120 bp, Artificial Sequence
  ENSG00000139973_70 (sequence is synthesized)
tcctattgtattgccatatttatgcattatttttgtttacgtcatttcccccttgaagtatctagttgctggggttttgtttgttttatacaaaatttattcattcaaaaagatctttat

SEQ ID NO: 356909 - DNA, 81 bp, Artificial Sequence
  ENSG00000139973_71 (sequence is synthesized)
cagaactttgggaggccgaggtgggagaacagcttgcgtccaggatttctagttaccaaacattcgctgggtatggtggtg

SEQ ID NO: 356910 - DNA, 89 bp, Artificial Sequence
  ENSG00000139973_72 (sequence is synthesized)
tagtcccagctcacctgtgaggtcaaggctgcagtgagccgggatcatgccactgcattcagcctgggtagcagagtgagactctgtct

SEQ ID NO: 356911 - DNA, 120 bp, Artificial Sequence
  ENSG00000139973_73 (sequence is synthesized)
ccactgcattcagcctgggtagcagagtgagactctgtctcaaaaaaaccaaaaaacaagacctttttaagtgtaaatgttccagactcagggttaggggttggagaatggcagatggat

SEQ ID NO: 356912 - DNA, 120 bp, Artificial Sequence
  ENSG00000139973_74 (sequence is synthesized)
aaaatagtttaagttcaacaatatttttttgttgtttctaaatattctttttaaaaactagagtctgataagaaatctaggtaaataataagatcttttattaaccttgaatttttggct

SEQ ID NO: 356913 - DNA, 120 bp, Artificial Sequence
  ENSG00000139973_75 (sequence is synthesized)
taatgtatttctgtaattgtctctttccccctttgaaaggcagaagatttagggaaggtgaaagttattaccctgtatctaattaagaaataggtacacttgtttgtcagtctatgcttt

SEQ ID NO: 356914 - DNA, 120 bp, Artificial Sequence
  ENSG00000139973_76 (sequence is synthesized)
cattcaaaataaatggatatgttttgtatctgggggaggaaatgcatcattccattccagcagtgaaaagaattatagcatcaaataggatatttagtattcttgacttttataattaaa

SEQ ID NO: 356915 - DNA, 120 bp, Artificial Sequence
  ENSG00000139973_77 (sequence is synthesized)
tactgaatgccctttgcaagacagtaagttagatcctggaatgctaggtctgtacaaacttgacacatttcttacaagctctgtgttttaatagtcaaaggcattgctaccctttgcttt

SEQ ID NO: 356916 - DNA, 120 bp, Artificial Sequence
  ENSG00000139973_78 (sequence is synthesized)
ttgaaagagtgaactggtaacagtagccgccagagaaagaggtgacaatctaaacaaagagccctgcttacctttctgtgactaaaactagtcttaaaaactgaatacatttggggcatc

SEQ ID NO: 356917 - DNA, 120 bp, Artificial Sequence
  ENSG00000139973_79 (sequence is synthesized)
cttatgaaataggtaaaggtcaacattgggagtgtccctaccttggcagatagaccaatacttttttcctagactcaacccatttttaaagcaggagtttttccaatggatttattgttt

SEQ ID NO: 356918 - DNA, 120 bp, Artificial Sequence
  ENSG00000139973_80 (sequence is synthesized)
ataattctactaaacatgtcttagtccacgcaaattaactcaaaatctttggtggcctgaaaattctgactgaaagcaagtttttcgtgttgcccagttgatagtccataataaaaaatg

SEQ ID NO: 356919 - DNA, 120 bp, Artificial Sequence
  ENSG00000139973_81 (sequence is synthesized)
tacatatcttgtttaaaaaagaccttgatgtttgagaagaaatatcggaagtctgccagtaaaaactctgattaagtgaggaacatgtacattaaaagatattttcatgtaagttatttt

SEQ ID NO: 356920 - DNA, 120 bp, Artificial Sequence
  ENSG00000139973_82 (sequence is synthesized)
aagatagttgcattctaggaccatgtttcttttttgagagtgtttctttgtcaagttccttatagccaatgccttgaccaaagcttactaattttgccacatttccttgtgggttatgat

SEQ ID NO: 356921 - DNA, 120 bp, Artificial Sequence
  ENSG00000139973_83 (sequence is synthesized)
aatctttattaattcacaactctaccaaattataatacagtcttttattatgccaccatatgaatgcagctgcaaattcaattttgtgaaatacaaagtcctttccagaattttaaaact

SEQ ID NO: 356922 - DNA, 120 bp, Artificial Sequence
  ENSG00000139973_84 (sequence is synthesized)
taatttcagtatagattttaagtttgtgaataagaaattagtatttgtataccttattatgacagaggtttctgttacaatattttctcttatagtgttgggataggatttgacctgtat

SEQ ID NO: 356923 - DNA, 120 bp, Artificial Sequence
  ENSG00000139973_85 (sequence is synthesized)
tttcaggttaaagctggtctttgagatctactttttaagaaattaataaattttattttttagagttttaggttcacagcaaaattgatcctaaaatatagagttctcatatactccaaa

SEQ ID NO: 356924 - DNA, 120 bp, Artificial Sequence
  ENSG00000139973_86 (sequence is synthesized)
cacaaccttcttccccgtgaacattttgaacaccacagtgctatatttgttacaactgatgaaccttcattgacataacattatcacccaaagtgcatagttcatattaaggttcactct

SEQ ID NO: 356925 - DNA, 120 bp, Artificial Sequence
  ENSG00000139973_87 (sequence is synthesized)
ttcatattaaggttcactcttggtgttgtgtattttatgggttttgaccaatgcacaatgacgtgtgtccactattgtagtatcatacagaagattttcactgccctaaaaatcctctgt

SEQ ID NO: 356926 - DNA, 120 bp, Artificial Sequence
  ENSG00000139973_88 (sequence is synthesized)
cctcccacctaagccctggcatccactggtccttgtactgtccccagagttttgccttttccagaatgtcatacagtatgtagccttttcagattggcttttttttttttcacttaggga

SEQ ID NO: 356927 - DNA, 120 bp, Artificial Sequence
  ENSG00000139973_89 (sequence is synthesized)
tagtcatgtaagttttcatgtctttttatggcttgatagttcatttattttaagtgctgaataatatttcattgtctggttgtatcaccatttatgacctatttgctcttatttctagtt

SEQ ID NO: 356928 - DNA, 120 bp, Artificial Sequence
  ENSG00000139973_90 (sequence is synthesized)
ccagttgctatggcaaattttattaaagtgcgtgctctcaggaaaagctgcatatattttatatgatccatcaaataaaatgtagcaacttccagtctagaataaatttcacctatatga

SEQ ID NO: 356929 - DNA, 120 bp, Artificial Sequence
  ENSG00000139973_91 (sequence is synthesized)
tattgagcttgttttacattgggggaggagatttatgaaaaaatataataatttcataatttatattaccctatctatgagtttttccctccattggaatctaaacagaaagttctgaag

SEQ ID NO: 356930 - DNA, 120 bp, Artificial Sequence
  ENSG00000139973_92 (sequence is synthesized)
gttatgaagacgtgatcccaaatttagtgactctgtagtgtcttttgttgagcaatgagttaaatacctgtcgataaaaagtgttaattatgttattactgattcatgatagaaaatcac

SEQ ID NO: 356931 - DNA, 120 bp, Artificial Sequence
  ENSG00000139973_93 (sequence is synthesized)
cttctgtcgctagtttatatgactttacatttaccactcctgccaagagaaaggaagctttgtgattgtgccccgtcatagttaattgtacaaatcaattaaaaatggtatgtaagcatc

SEQ ID NO: 356932 - DNA, 120 bp, Artificial Sequence
  ENSG00000139973_94 (sequence is synthesized)
tggctcacacagcagctctgaattctgaatgaaaagataacccatgctaatgtatatgttgcatgaacaagtagatgggtgttggaaagaaaacactgatagtcactctgggtgaagggg

SEQ ID NO: 356933 - DNA, 120 bp, Artificial Sequence
  ENSG00000139973_95 (sequence is synthesized)
gaggcctggccaatgatttgtatctgagaaacattttgagattatttatatgtcttctgactgccctttgctttgtagctacagcaacttgcagaacctggcattattgcagagatgaag

SEQ ID NO: 356934 - DNA, 120 bp, Artificial Sequence
  ENSG00000139973_96 (sequence is synthesized)
gtatagttgtataaagaatattggattaaagttgatgaggcctgtgttctgatatcaaatcttccactaatgagctctaaaatgaatatcaagtcacaattttttcaagccttcattgtt

SEQ ID NO: 356935 - DNA, 120 bp, Artificial Sequence
  ENSG00000139973_97 (sequence is synthesized)
gcatctatcagatgggaatagtaatactcattttacctatttttaccaggtggttgtaggaacaggattcattcattccttcattaatataatgaacactttgagaccccactatataac

SEQ ID NO: 356936 - DNA, 120 bp, Artificial Sequence
  ENSG00000139973_98 (sequence is synthesized)
agggccatacatatgacaaggtgatagatggaaagacgttttgcagaatttttgaagacttgcaatgtttttgaagactacaggatagtttgtgatttttatattaaggtcgtatcaact

SEQ ID NO: 356937 - DNA, 120 bp, Artificial Sequence
  ENSG00000139973_99 (sequence is synthesized)
ctttatgtcaatatatcaaagtaattgacacttttagagctctgccaatcagtgggccatattcatagaatgtcagtaatctgtctgaatacaagttatagttggtctttagctgttctg

SEQ ID NO: 356938 - DNA, 120 bp, Artificial Sequence
  ENSG00000139973_100 (sequence is synthesized)
tctctgaggagctagaaataaaatattaggttctaatttttttttgttcaaacactgatcatgtaacaaactgcaaatccatgttttcagcaggttcgccaacctttgagttgaatgcag

SEQ ID NO: 356939 - DNA, 120 bp, Artificial Sequence
  ENSG00000139973_101 (sequence is synthesized)
acctttctttagaacaacctaactttgagtacaggcaaagtattaaatggaatagcttttcctcccctacaaagtggatttgaatacagtccttagaaaaattcttcccctgccaaaaaa

SEQ ID NO: 356940 - DNA, 120 bp, Artificial Sequence
  ENSG00000139973_102 (sequence is synthesized)
ggtccttcaatctcctttattatttttcttttgaagaatcaaacttgtccatctctcccctcccaagtgactttcctcactcatgtaatcattttcttcataaatgcccttttactatcc

SEQ ID NO: 356941 - DNA, 120 bp, Artificial Sequence
  ENSG00000139973_103 (sequence is synthesized)
cacagaaaaagtaaagatttaaaaaatcatttttaaggtacatccaagatttcatagcaatattttatttgtgttcacagtgcaagataaatctgactttctcaatatttttggtcttca

SEQ ID NO: 356942 - DNA, 120 bp, Artificial Sequence
  ENSG00000139973_104 (sequence is synthesized)
tatggcatctgaaacagttgttcacattcacacatttatgtttcaccatatgcatactgtgtacagctctgttgttctaaaatattttattggttttcctttatatctcaacttttgatg

SEQ ID NO: 356943 - DNA, 120 bp, Artificial Sequence
  ENSG00000139973_105 (sequence is synthesized)
ggtgtccttgaagaactttcatgaaaaaaatgtaaatgtgaatgattcattcattttgaacatatgtaactattttaggagattttcaggagattttaccctacatggagtacactgttc

SEQ ID NO: 356944 - DNA, 120 bp, Artificial Sequence
  ENSG00000139973_106 (sequence is synthesized)
ttagcagggaatgtgctttatattactattctactcacagctggatgctgcagatgtattaacattgtaaacatgtactttttctattctatgcttactttaatacattatttatatgtg

SEQ ID NO: 356945 - DNA, 120 bp, Artificial Sequence
  ENSG00000139973_107 (sequence is synthesized)
ctagactgtgctgagttttggtggttgtcaaaggcagtcagtaattttataaatttcacttttgtggatagttaagtataacatggtttagtataaaatctggtcttcctctagatttct

SEQ ID NO: 356946 - DNA, 120 bp, Artificial Sequence
  ENSG00000139973_108 (sequence is synthesized)
aagtcactagaagaatttcttggcaaattgattgttcaaggccagttttgttagttgtaaggtggaagccaccccaatcctctcccagtgtttcataggcattttcagacctggatgcta

SEQ ID NO: 356947 - DNA, 120 bp, Artificial Sequence
  ENSG00000139973_109 (sequence is synthesized)
ttatagttcctcctctagttttccagtagagaattcgtatgtggtccagaggttcaagagagagagagaaaaaatttctcctcaaaagaattgaacccttactttagaaacttctgacaa

SEQ ID NO: 356948 - DNA, 120 bp, Artificial Sequence
  ENSG00000139973_110 (sequence is synthesized)
tcttcagaacattccatgtgggtgtccttgtgtttctcatagtatgacttattgattcatggtgtctcttattaaagaagcatgaatgtatcactagctgttaccagaacaaacagctgt

SEQ ID NO: 356949 - DNA, 120 bp, Artificial Sequence
  ENSG00000139973_111 (sequence is synthesized)
agaatgtaatgacccatcctatttctaaatttacttctatcagtggataatttgtgtataggaaaaggtgtggaaattttttaattgttaaaaactggaatacctttctaccttttgtag

SEQ ID NO: 356950 - DNA, 120 bp, Artificial Sequence
  ENSG00000139973_112 (sequence is synthesized)
tctttaagatttcataatgatggttttaatgtattactatcttactattatgtattgtgtttaaacaagaccaatcagtgaaatattgaatgtcaatactttttgttagaaatgccctct

SEQ ID NO: 356951 - DNA, 120 bp, Artificial Sequence
  ENSG00000139973_113 (sequence is synthesized)
gaaaatgttagaaaatgtaaaactttacctgtgacaaggaataaattcatgattagaagaattatactgtttttcttgtgcaaataatacttaaggcagatgttcagtctcacagtgatg

SEQ ID NO: 356952 - DNA, 120 bp, Artificial Sequence
  ENSG00000139973_114 (sequence is synthesized)
ttggaaagcatattttatgcagtctaaacactatttctgtattagatatttaaatgcatgaggataaattctaattgctttttgtttaaaacagaaacatagaagaagcattagccccag

SEQ ID NO: 356953 - DNA, 120 bp, Artificial Sequence
  ENSG00000139973_115 (sequence is synthesized)
tttgtataaaatgtctgctgcaactgaattcatgatagttcatgaaaactgaaaatcattccaattttgtaaaactgctgctactggttttatcaataaagttttagcagatggcttata

SEQ ID NO: 356954 - DNA, 120 bp, Artificial Sequence
  ENSG00000139973_116 (sequence is synthesized)
agtgaccaactgcgcggatggcgggatgctccgtgtcttaaccggggtcctgggctgcctgcaggccttgaaagtgctgaaaattgctgcgagtctgggcccctcttacagtggcagcct

SEQ ID NO: 356955 - DNA, 120 bp, Artificial Sequence
  ENSG00000139973_117 (sequence is synthesized)
gttgctctttgatgccctgagagggcatttctgctgtattcggctgcggagctgcaggctcgactgtgcagcttgcgggaaatggcccactgtgactcatctgctggactatgaagcctt

SEQ ID NO: 356956 - DNA, 120 bp, Artificial Sequence
  ENSG00000139973_118 (sequence is synthesized)
tctgtcactgactataagcgacttctggattctggggcaccccatctgttgctggacatcaggcctaagatggagaaaaatttgctgacccctggtctagaacgtggaagcagcatgaaa

SEQ ID NO: 356957 - DNA, 120 bp, Artificial Sequence
  ENSG00000139973_119 (sequence is synthesized)
tgaagaggaatttaaggagacagcattgtttttagaattttctttacgttgtctacagtcactcctgaagccattggcttcttgtctgctgttggggtctttattgttcttctggccgtc

SEQ ID NO: 356958 - DNA, 120 bp, Artificial Sequence
  ENSG00000139973_120 (sequence is synthesized)
ctcttcctcttcatcaacaagaagctgtgttttgaaacgataggaggccttcctttcctggagcatcgagggaaaagaaagcattctaaagacaagactgggattcacaaggggctgggt

SEQ ID NO: 356959 - DNA, 120 bp, Artificial Sequence
  ENSG00000139973_121 (sequence is synthesized)
gatcatgtatcagttgctcatccagtggacgtccaatcagttagttggccattcattcattcattcatgcaggcatccagttataaagacatccattcacccactcaacagaaatctgct

SEQ ID NO: 356960 - DNA, 120 bp, Artificial Sequence
  ENSG00000139973_122 (sequence is synthesized)
gagagcctactacgtgctgggaactattttcacatcggagacaaaacagagggtgacatgaagagcacggcccacttggagcctacggagatggcgttgagcggtttcgcaggagagctc

SEQ ID NO: 356961 - DNA, 120 bp, Artificial Sequence
  ENSG00000139973_123 (sequence is synthesized)
gaggagcgcgcgcccggccgggctcggcgccggtttcccgaacctgggcggccgtcgggcagccccctcgtccgaccatggcgactgacatcactcctgaagccattggcttcttgtctg

SEQ ID NO: 356962 - DNA, 120 bp, Artificial Sequence
  ENSG00000139974_0 (sequence is synthesized)
gtacggaatgccggaagggccgggctcaaagctccgcctctggcgcgaccgacgactggagcgcagggcaggggtagaggctcgtagatggaactggtagtcagctggagagcagcatgg

SEQ ID NO: 356963 - DNA, 120 bp, Artificial Sequence
  ENSG00000139974_1 (sequence is synthesized)
aggcgtcctgggggagcttcaacgctgagcggggctggtatgtctctgtccagcagcctgaagaagcggaggccgaagagttgagtccgttgctaagcaacgaacttcacagacagcgat

SEQ ID NO: 356964 - DNA, 120 bp, Artificial Sequence
  ENSG00000139974_2 (sequence is synthesized)
ccccaggtgtttcatttggtttatcagtgtttaatttgatgaatgccatcatgggaagtggcatccttggcttagcttatgttttggctaataccggtgtctttggatttagcttcttgc

SEQ ID NO: 356965 - DNA, 120 bp, Artificial Sequence
  ENSG00000139974_3 (sequence is synthesized)
tgctgacagttgctctcctggcttcttactcagtccatcttctgcttagtatgtgtattcagacagctgtaacatcttatgaagatcttggactctttgcatttggattacctggaaagt

SEQ ID NO: 356966 - DNA, 120 bp, Artificial Sequence
  ENSG00000139974_4 (sequence is synthesized)
tggtggtggcaggcaccataataattcagaatattggagctatgtcatcttatcttttaattattaaaacagagcttcctgctgctattgcagaatttttgactggagactatagtagat

SEQ ID NO: 356967 - DNA, 120 bp, Artificial Sequence
  ENSG00000139974_5 (sequence is synthesized)
attggtatcttgatggacaaacactactaataatcatatgtgttggcattgtgttccctcttgcacttcttcccaaaataggctttcttggctacacaagtagtttatcatttttcttta

SEQ ID NO: 356968 - DNA, 120 bp, Artificial Sequence
  ENSG00000139974_6 (sequence is synthesized)
tgatgttctttgctcttgtggtaataattaaaaaatggtccatcccttgtcctctgacattaaattatgtagagaaaggtttccagatttcaaatgttacagatgattgtaagccaaagc

SEQ ID NO: 356969 - DNA, 120 bp, Artificial Sequence
  ENSG00000139974_7 (sequence is synthesized)
ttctccaaagagagtgcttatgccttaccaaccatggctttttcatttctctgccatacctcaatattgcccatatactgtgaacttcaaagtccttcaaagaaaagaatgcagaatgtt

SEQ ID NO: 356970 - DNA, 120 bp, Artificial Sequence
  ENSG00000139974_8 (sequence is synthesized)
accaatacagcaattgctttaagttttctcatttattttatatctgcactctttgggtacctcactttttatgacaaagtggagtcagaattactaaaaggttatagtaaatacttatca

SEQ ID NO: 356971 - DNA, 120 bp, Artificial Sequence
  ENSG00000139974_9 (sequence is synthesized)
catgatgttgttgtcatgactgtgaagttatgcatactatttgctgtgcttttgacagtccctctaatccacttccctgccagaaaagctgtaacaatgatgtttttctccaattttcca

SEQ ID NO: 356972 - DNA, 120 bp, Artificial Sequence
  ENSG00000139974_10 (sequence is synthesized)
ttctcatggattcgccattttttgatcactctagcactcaatattatcatcgttttacttgcaatatatgttcctgacattagaaatgtatttggtgtagttggtgccagtacatcaaca

SEQ ID NO: 356973 - DNA, 120 bp, Artificial Sequence
  ENSG00000139974_11 (sequence is synthesized)
tgtttgatttttatattcccaggactattttatcttaaacttagcagagaggattttctgtcatggaaaaagcttggggcattcgttttgctcatctttggaattttggttgggaatttt

SEQ ID NO: 356974 - DNA, 120 bp, Artificial Sequence
  ENSG00000139974_12 (sequence is synthesized)
agtttagcactcatcatttttgattggattaataaataaaagaaatattttcctacttcttacaagaataatatacccctagttgcaagaatgaattattccggaagacaccctggatga

SEQ ID NO: 356975 - DNA, 120 bp, Artificial Sequence
  ENSG00000139974_13 (sequence is synthesized)
aaaataacattttaataaaaattattaacagaaaagcagaacaaaatggcagtgggtatggggaagtaagagtgtggcagttttaatcaaaaaaagaaacaaactcgaaatgctcttaaa

SEQ ID NO: 356976 - DNA, 120 bp, Artificial Sequence
  ENSG00000139974_14 (sequence is synthesized)
attgctttaagttttctcatttattttatatctgcactctttgggtacctcactttttatggataacaggagctttgtgtcataggaagaaattgctggttgaacctgagatcttataag

SEQ ID NO: 356977 - DNA, 120 bp, Artificial Sequence
  ENSG00000139974_15 (sequence is synthesized)
ggctagcctcaacttaaggcttccaattcattttacagatgaacaactaaagcccagagaggtgaagtgacctgtcacagaattaaagacaaagtggagtcagaattactaaaaggttat

SEQ ID NO: 356978 - DNA, 84 bp, Artificial Sequence
  ENSG00000139974_16 (sequence is synthesized)
aaaaggaagagataccatggagatgtgcacccagaggaaaggccacgcaaggacacagcaagaaggcaactgtttacaagccaa

SEQ ID NO: 356979 - DNA, 120 bp, Artificial Sequence
  ENSG00000139974_17 (sequence is synthesized)
tctccaattttccattctcatggattcgccattttttgatcactctagcactcaatattatcatcgttttacttgcaatatatgttcctgacattagaaatgtatttggtgtagttgcaa

SEQ ID NO: 356980 - DNA, 120 bp, Artificial Sequence
  ENSG00000139974_18 (sequence is synthesized)
ttaaaatatagaatacattattgcagagagtagagatttaacaaataatccaattgtatttttttatcttttttcttttatctttcttatcttttatcttttttcttatttccacaggca

SEQ ID NO: 356981 - DNA, 120 bp, Artificial Sequence
  ENSG00000139974_19 (sequence is synthesized)
tttccacaggcattcgttttgctcatctttggaattttggttgggaattttagtttagcactcatcatttttgattggattaataaataaaagaaatattttcctacttcttacaagaat

SEQ ID NO: 356982 - DNA, 120 bp, Artificial Sequence
  ENSG00000139974_20 (sequence is synthesized)
tgtattcagacagcctacttgggcccatgaactaactacttcatggttctgcctgcacattgactcacctgtcttccgttgattgaattccttcaatctttgtaaaattctctgtggagc

SEQ ID NO: 356983 - DNA, 120 bp, Artificial Sequence
  ENSG00000139974_21 (sequence is synthesized)
gcctgccaaataagacccagaaaaggaggaccgcaccgggacaggggagatgctggagcctgaaccctgggggatggggtctgaaggcagccgccgagattcagatgagattggcgcagt

SEQ ID NO: 356984 - DNA, 120 bp, Artificial Sequence
  ENSG00000139974_22 (sequence is synthesized)
tatgaacgtgatagcagcctagcatactctagaaagaaaagatgaaaagcgtcgggtggaagagatgcagcgttgagtggaagctgcgaacatgatgggatgagcggccctaggattatg

SEQ ID NO: 356985 - DNA, 120 bp, Artificial Sequence
  ENSG00000139974_23 (sequence is synthesized)
gcagaaatactgaacagaaagtacagagttcacatataccgttttaccccaacatacagtttcccctattattaactcttgcgttcatgtggtacatttgttacatttgatgagccaata

SEQ ID NO: 356986 - DNA, 120 bp, Artificial Sequence
  ENSG00000139974_24 (sequence is synthesized)
ttaactattattattaactaaagttcatagtttaccttaggtttcattcttggcagccactagcaaccactgatttttttttaacttttattttaggttcaagggtacatgtgaaagctt

SEQ ID NO: 356987 - DNA, 120 bp, Artificial Sequence
  ENSG00000139974_25 (sequence is synthesized)
gaaagcttgttacataggtaaactcgtgtcacgggaatttgttatacagattatttcatctcccagggtctcattctgtcgcacaggttggcgtgcagtggtgtgatctcagctcattgc

SEQ ID NO: 356988 - DNA, 120 bp, Artificial Sequence
  ENSG00000139974_26 (sequence is synthesized)
agtgttggttaagcaacgagtgtgtcatacaaaccctggtggtttgcagcttttttccataatctttcatttatggaatttctttacgaaattttaacttcaccgtccaaacatttaaca

SEQ ID NO: 356989 - DNA, 120 bp, Artificial Sequence
  ENSG00000139974_27 (sequence is synthesized)
cagttgctctcctggcttcttactcagtccatcttctgcttagtatgtgtattcagacagatttttggaaggaaagctttcttaagaaagaacggaaaagagagaagaaccaaatagacg

SEQ ID NO: 356990 - DNA, 120 bp, Artificial Sequence
  ENSG00000139974_28 (sequence is synthesized)
ccatcttctgcttagtatgtgtattcagacaggttgaagccaaaagttgaaaactattaccatttataggatataactgtaaatattgttcactgaagagctaagtagtatactgagatc

SEQ ID NO: 356991 - DNA, 120 bp, Artificial Sequence
  ENSG00000139974_29 (sequence is synthesized)
ccagaatcatctctatatatgcaatatcacatcctctgtgccatgagaaagaatgttcctagtattctagcattctgttttctgtgttgagtgttttaaaatcatgccacattcagttgg

SEQ ID NO: 356992 - DNA, 120 bp, Artificial Sequence
  ENSG00000139974_30 (sequence is synthesized)
tagaaactactcagccaatgtttgattacccatatgaaagcgctgttctgtgaaccatatgaagcaccagatataatccttgcattccttgggggtgtgagataggctaagacaggtctg

SEQ ID NO: 356993 - DNA, 120 bp, Artificial Sequence
  ENSG00000139974_31 (sequence is synthesized)
agattgagatgctcttaaggaggaataaagggtaaatttctggggatatgcaagacacaggttggggatgggagaaggttgaatatactgacagtacgggtcttaaacaaaggaggggag

SEQ ID NO: 356994 - DNA, 120 bp, Artificial Sequence
  ENSG00000139974_32 (sequence is synthesized)
tgaatgatattgctgtcatttctcagcaaatcatagtgataaaaaatgtggcagttacaactatacctgtttgaaattcctattatataccatggcaaaaaaataaattatttgcaagga

SEQ ID NO: 356995 - DNA, 120 bp, Artificial Sequence
  ENSG00000139974_33 (sequence is synthesized)
aacccctcccctgccttcttctcagcctcctcaacatgaagacaatgagaatgaagacctttatgatgatccagtttcacttaatagttggcgtgcagtggtgtgatctcagctcattgc

SEQ ID NO: 356996 - DNA, 120 bp, Artificial Sequence
  ENSG00000139974_34 (sequence is synthesized)
aactctctcccaacagtttgttggactgtcataaaggattattatgctcagattgaattcattggtaagagaaagagctatcatgagtttttatgaaataacttcttcatttatttgctg

SEQ ID NO: 356997 - DNA, 120 bp, Artificial Sequence
  ENSG00000139974_35 (sequence is synthesized)
gtggtaaagggtaaagagaaattttcatctttataaaagtaaaggatttcttcacatgaaattctactttagattttatggagcgtttggggtctatcaggacttttcatgggagctgag

SEQ ID NO: 356998 - DNA, 120 bp, Artificial Sequence
  ENSG00000139974_36 (sequence is synthesized)
gtggaatgtaaagaaccttattctctctagccttcgtttgtcatctgtaaaatggcaatgataacacttccttcttggaattgttctgagagtgaaataaaataatgtatatgaaatgtc

SEQ ID NO: 356999 - DNA, 120 bp, Artificial Sequence
  ENSG00000139974_37 (sequence is synthesized)
ctcttccagctctaacattccataactgtgattctgagttactgctgggaggaggtaaagttatcttcagtcccacagttcagtgctttggtcagttatatgacttttatggacataaat

SEQ ID NO: 357000 - DNA, 120 bp, Artificial Sequence
  ENSG00000139974_38 (sequence is synthesized)
gaattgtgatctgaaatagtataaagtaactggtgtacagaatttcaaaaagtgttcctttattcctgtgcaagagaaaagagtcctggtcctggggattaaatgctcccttttgtacaa

SEQ ID NO: 357001 - DNA, 120 bp, Artificial Sequence
  ENSG00000139977_0 (sequence is synthesized)
acggcgacggcggctgagtgagaaccttggcggctgtggaggctgccgcggctgcgaaggaggcggcggcggtggcggaggaagaggagtggcggcagcggcggcggggacccgtgcggg

SEQ ID NO: 357002 - DNA, 120 bp, Artificial Sequence
  ENSG00000139977_1 (sequence is synthesized)
aggtaccgcctgggcctagcagcctcctcccaccaccagcacctccggccccggcggcggtcgagccccgctgtcccttcccggcgggggccgccctcgcctgctgcagcgaggacgagg

SEQ ID NO: 357003 - DNA, 120 bp, Artificial Sequence
  ENSG00000139977_2 (sequence is synthesized)
ggacgaggaggacgacgaagagcacgaaggcggcggcagcaggagcccggcgggcggagagtcggcgacggtggcggccaaggggcatccgtgcctccgctgccctcagccgccgcagga

SEQ ID NO: 357004 - DNA, 120 bp, Artificial Sequence
  ENSG00000139977_3 (sequence is synthesized)
gcagcagcagctcaacggattgattagccccgaactgcggcacctccgggcggccgcctccctcaagagcaaggtcctgagcgtagcagaggtggccgcgaccacagccacccctgacgg

SEQ ID NO: 357005 - DNA, 120 bp, Artificial Sequence
  ENSG00000139977_4 (sequence is synthesized)
aggccccagagcgactgcaacaaaaggagccggggtacactcgggcgagaggccccctcactccctctctagtaatgcaagaactgcggtccccagcccggtggaggcagcggcggcgag

SEQ ID NO: 357006 - DNA, 120 bp, Artificial Sequence
  ENSG00000139977_5 (sequence is synthesized)
cgatcccgcggcggcccgcaatggactggccgagggcaccgagcaggaggaggaggaggaagacgagcaggtgcggctgctgtcttcgtccctgaccgccgactgcagcttaagaagccc

SEQ ID NO: 357007 - DNA, 120 bp, Artificial Sequence
  ENSG00000139977_6 (sequence is synthesized)
ttcgggcagggaggttgagcctggggaggatcggacgatacgatatgtccgatatgaatccgagctacaaatgcccgatatcatgagactgatcaccaaagatctgtccgaaccctactc

SEQ ID NO: 357008 - DNA, 120 bp, Artificial Sequence
  ENSG00000139977_7 (sequence is synthesized)
catttatacctatagatattttatccacaactggccacagctgtgcttcttggccatggtaggggaggagtgtgtaggtgccatcgtttgcaagttggatatgcacaaaaagatgttccg

SEQ ID NO: 357009 - DNA, 120 bp, Artificial Sequence
  ENSG00000139977_8 (sequence is synthesized)
cagaggttatatagccatgttagccgtggattccaaatacaggagaaatggcattggtactaacttggttaagaaagctatatatgccatggttgagggagactgtgatgaggttgtttt

SEQ ID NO: 357010 - DNA, 120 bp, Artificial Sequence
  ENSG00000139977_9 (sequence is synthesized)
ggaaaccgaaataacaaataagtccgctttgaaactttatgaaaatcttggttttgttcgagataagaggctgttcagatactatttaaatggagttgatgcactgcgacttaaactgtg

SEQ ID NO: 357011 - DNA, 120 bp, Artificial Sequence
  ENSG00000139977_10 (sequence is synthesized)
gctgcgttgagaaactgacatcaaggaacaactatcatccgcacagaatcgacctttgcatgcaatgcaatttgtacagaattgctttgcaggtggatttagtaatttccatgcagctct

SEQ ID NO: 357012 - DNA, 120 bp, Artificial Sequence
  ENSG00000139977_11 (sequence is synthesized)
tacctgtcagtgtctcattgagtgtcgcacaatatttgttgcactttggcatggcacatttgttctgaattaaaagattgttttaaacttcaggagttcttttggtaccaacaagatgtg

SEQ ID NO: 357013 - DNA, 120 bp, Artificial Sequence
  ENSG00000139977_12 (sequence is synthesized)
ccagttgatagccaagatttatgtgttcatttgcaaagtctgctgacaatgttatttacacagtgatcattttatcacagaaccagtaagtggaacataatttttgttccttaaaaaagc

SEQ ID NO: 357014 - DNA, 120 bp, Artificial Sequence
  ENSG00000139977_13 (sequence is synthesized)
caatgtggattgtaaaagtctttaagtatactaacatttcacacaaaacctgccctagttttctgaagtgggtgagggagacgcttcagttttaggttttattttttcaatattaaattt

SEQ ID NO: 357015 - DNA, 120 bp, Artificial Sequence
  ENSG00000139977_14 (sequence is synthesized)
tccattcttgaatattggtacctcagtgattagtgaatgaaaaaaatgtagggtgggtatgtcttacaatgagtaaaggtaacaattaaattttgtctgccagtgcctgtgtagataagt

SEQ ID NO: 357016 - DNA, 120 bp, Artificial Sequence
  ENSG00000139977_15 (sequence is synthesized)
atatttgtcttcatctctagtttttgaatgcatgctatcttttccttttctttaaggcctttgcaagcaaacttttgtttttatttaaattctaaatttgataaattatttcagattttt

SEQ ID NO: 357017 - DNA, 120 bp, Artificial Sequence
  ENSG00000139977_16 (sequence is synthesized)
ataatttggatacttttttcaggtgaatgaaagaatggtttactttagaagtccctttttccttacagtaacaagttgaatctacttggaaaattgagaaatggctcaaaagagataaga

SEQ ID NO: 357018 - DNA, 120 bp, Artificial Sequence
  ENSG00000139977_17 (sequence is synthesized)
aaagttgatggagccgggaattgctggggtttagatgcactttttcttttgagagtaagggaagttttggaaaagaatagaaaattagtgtaagttgatatgattttatttaatcaaaat

SEQ ID NO: 357019 - DNA, 120 bp, Artificial Sequence
  ENSG00000139977_18 (sequence is synthesized)
tactgctacgctgcgaagaacagcttttacaaagtagctgaatttgtttttcccacttgatttggattcacattgctttcatttcttaaaatgcttcacttcaggttcttggtcttggaa

SEQ ID NO: 357020 - DNA, 120 bp, Artificial Sequence
  ENSG00000139977_19 (sequence is synthesized)
ataaatttcaaggtgcattgtatccattttaagctgctttattttattttcacttgtatgagcaaattcttgggggagctttgcttttcttctgccagaaaaacaaaagggggaaatgaa

SEQ ID NO: 357021 - DNA, 120 bp, Artificial Sequence
  ENSG00000139977_20 (sequence is synthesized)
aatcttttttggaatgagttctgtgggttttcttaacagccaccatgtttattagttacattgtgttttggccaatcagtgcaatgtaacaaattttacagttaattgctttcaattgag

SEQ ID NO: 357022 - DNA, 120 bp, Artificial Sequence
  ENSG00000139977_21 (sequence is synthesized)
tcagtaaacctgtgatagataatttatttaactggaaaacctaggtacccataagaaaaaagattcattctctgtgaaaactgtaggaatctgttgttgttttcatttgaatatgctcta

SEQ ID NO: 357023 - DNA, 120 bp, Artificial Sequence
  ENSG00000139977_22 (sequence is synthesized)
cttctgctctagtatttggtttggaatatattttgtggctctaattactgtatttttaaaaaccctacctccattaacagttggtaaaggccccttttcaggaaagtttgttgctttttt

SEQ ID NO: 357024 - DNA, 120 bp, Artificial Sequence
  ENSG00000139977_23 (sequence is synthesized)
tttttttttaaaggaaagctgctctttgctcagtatagtgttttgaaagtgaacatagtaacaaatactttaaaaataaagatacacaatttatatttgaaaataaaaactttctgctgg

SEQ ID NO: 357025 - DNA, 120 bp, Artificial Sequence
  ENSG00000139977_24 (sequence is synthesized)
tgggattatttatagttctttatttttaaagaaaatgttttcctttttatattgctcttgaaagtttaatgagcagaatacaatactggttataataaaaatatggtaaccacacagtac

SEQ ID NO: 357026 - DNA, 120 bp, Artificial Sequence
  ENSG00000139977_25 (sequence is synthesized)
tcagcctttcaatatgtttttggtcaaacttcatttaggcactagcatttagaagaataccaatcacagtgatgcttttgttatttaatatgaaggaaatggaactaaaacatttatgtc

SEQ ID NO: 357027 - DNA, 120 bp, Artificial Sequence
  ENSG00000139977_26 (sequence is synthesized)
atcaaattttatttcacttctttatatttgacttgctggttgatacataatggttgatgaacatatatttgcttaaatcactaatagggatggttgtaaagtagatagatcattggttca

SEQ ID NO: 357028 - DNA, 120 bp, Artificial Sequence
  ENSG00000139977_27 (sequence is synthesized)
accattttagtgtttttgccagattgtcaatgaaaccatcatactgaccttttcctccaaaattgccaaattgactgaactggttgggtgtttgtaaagatgacgttaactgtgtgacta

SEQ ID NO: 357029 - DNA, 120 bp, Artificial Sequence
  ENSG00000139977_28 (sequence is synthesized)
aaaagtcagatggttgccatattgtttggaatatgttgaatgtcagtgtatgccttatgtctttaattgggtatgcaaaaaaatttttacttaagtagattaaaattttaacctctagca

SEQ ID NO: 357030 - DNA, 120 bp, Artificial Sequence
  ENSG00000139977_29 (sequence is synthesized)
tgaaaacccagcaccaacactgaaagactccattcaggttgaagtagcctcaaacagtaatttactttttgataataggctgttgtttttcttaaataagcttaaaacaattctatctga

SEQ ID NO: 357031 - DNA, 120 bp, Artificial Sequence
  ENSG00000139977_30 (sequence is synthesized)
aattggtagcatgggttcacttggctacaactgagcaaaatagatgcaactttcttttaatggggtgctgcctctttaggactgactgtactatccactgacactggtttggcagttggt

SEQ ID NO: 357032 - DNA, 120 bp, Artificial Sequence
  ENSG00000139977_31 (sequence is synthesized)
atgttagtattgaagaagctaacgggtatactatcatttttgatgtgtgggctgattataatttcctgtatttcctgtacattgggatgaaactactttagcaaagtccacagatcagaa

SEQ ID NO: 357033 - DNA, 120 bp, Artificial Sequence
  ENSG00000139977_32 (sequence is synthesized)
accagacggtagtttttgaagttgaaaccagcaaaataagaaaaaataaaaaatcgattttaatattttctgcctctttcccaaattacccttcccacttgctcgacaaatctatgtaaa

SEQ ID NO: 357034 - DNA, 120 bp, Artificial Sequence
  ENSG00000139977_33 (sequence is synthesized)
gcagtttgttttttcatgttttaactttaccttgccctgtgttatggtactggctgacatgtctaagactggatgtgtatatttattatggtgtctaaaaatcatgaagttcatcacttt

SEQ ID NO: 357035 - DNA, 120 bp, Artificial Sequence
  ENSG00000139977_34 (sequence is synthesized)
tcaggagtatagataaaatcaaattggtagtacatcagagttacttttcagtgcaccatgacatcactaaaatgagtgctgtaatgttacagggctttcaggtttgtaaaaacataacca

SEQ ID NO: 357036 - DNA, 120 bp, Artificial Sequence
  ENSG00000139977_35 (sequence is synthesized)
taaattatattgacgtcagatatgagttgagtatctataaaatatcacgtgtatctcaaaatattggactgctgtttgactggatattgctgcataattttcttctattgtcccatatcc

SEQ ID NO: 357037 - DNA, 120 bp, Artificial Sequence
  ENSG00000139977_36 (sequence is synthesized)
ttttggagagagatttaatgggatttgaaatgtgcaagctgtctaaataagatgcagtcaaataaagtatggttaagttgtgtttgcatttttcttttagatacagctgtgtgcatttta

SEQ ID NO: 357038 - DNA, 120 bp, Artificial Sequence
  ENSG00000139977_37 (sequence is synthesized)
tgattgggttgttttgcttttacctactaagtaaaacagcaacaaacaatatattgtttcccgcttcctgcctttcatctaagagttacggggaagaagtattacataattgtcatcact

SEQ ID NO: 357039 - DNA, 120 bp, Artificial Sequence
  ENSG00000139977_38 (sequence is synthesized)
gttgtgtgttctgacaaagtaaatttgaaaataacatgaacttgatttttctaaaagtactcagtcaactcatatgtcagttatcggtacattttccatgtgttcagtcaaaagtttatc

SEQ ID NO: 357040 - DNA, 120 bp, Artificial Sequence
  ENSG00000139977_39 (sequence is synthesized)
tttttagtctgtttcatagcagtttatttctaagacagtttttattttaatttacttttttgtctgtacactgccactctgtaatgttccccccaccccatcccacccttggtaagacac

SEQ ID NO: 357041 - DNA, 120 bp, Artificial Sequence
  ENSG00000139977_40 (sequence is synthesized)
caaagtaaaatagagcaatatccaaagagctttttgcccctgtcttgtgaggagctttaaatagctgtgaatacttctgtatgtcaagattttcggattttagtggaaggatgaaatgat

SEQ ID NO: 357042 - DNA, 120 bp, Artificial Sequence
  ENSG00000139977_41 (sequence is synthesized)
ctgttttaatcatttaactgctaaattacttttatcatgcatgccaaatctttacattattctttagagtaatactgtaaaagtatctgagtttgttttatttgggccttatgtggaact

SEQ ID NO: 357043 - DNA, 120 bp, Artificial Sequence
  ENSG00000139977_42 (sequence is synthesized)
cgaaatacttcataaattcactctaaggtctaaataagaaccagaaggttgataccattttttcacaccagtaaacacagatcagtattaacctgtagcccagaggtgttagatttattt

SEQ ID NO: 357044 - DNA, 120 bp, Artificial Sequence
  ENSG00000139977_43 (sequence is synthesized)
ggcgtgagccaccacgcccagcctatgatattctttttataagcaacttttaaaaagttttttaaaagatctcataagcatatagcactgctacactttagatcactactgtccagtcac

SEQ ID NO: 357045 - DNA, 120 bp, Artificial Sequence
  ENSG00000139977_44 (sequence is synthesized)
tttagatcactactgtccagtcacactttatataaggatagatgtgtccttttcactccccagtatggtagttactagtcacatgtgtagctactgagcccctgaagtgtgggtgggatg

SEQ ID NO: 357046 - DNA, 120 bp, Artificial Sequence
  ENSG00000139977_45 (sequence is synthesized)
attgagctgaatttgtaattttaatcaaagttagccacatgtggcttgtggctactgtattggacagcagagctttagataagcagtaataacaggaagggagtgtttgtataggttgaa

SEQ ID NO: 357047 - DNA, 120 bp, Artificial Sequence
  ENSG00000139977_46 (sequence is synthesized)
agataaaatggaaggatcacaattaggccagatgtggtggctcacgcctattatcccagcgttttgggaggctgagatggtagtttgcaaccagccaggacagcatagcaagactgtttc

SEQ ID NO: 357048 - DNA, 120 bp, Artificial Sequence
  ENSG00000139977_47 (sequence is synthesized)
tgaaaaatcttttaaaataacacaactaaaaattacctctgagcaagagtatagctgaactgtttatactgacaatatatttcattaatacagtgtttgaccactttccaccccaccaac

SEQ ID NO: 357049 - DNA, 120 bp, Artificial Sequence
  ENSG00000139977_48 (sequence is synthesized)
cactgcccttgttatgtagcctttctgagaaaagcagccctttcagattttattgttggaagttccttgggttgcagagatgcagattcaagtgccaaaagttgtttctgatgagactta

SEQ ID NO: 357050 - DNA, 120 bp, Artificial Sequence
  ENSG00000139977_49 (sequence is synthesized)
cctttttagccttaaaatatttgtatagttggctctaataatttctcatttttgatgaatttgaaatcatttcacttctaaatgagattggtcatctcatgagtggtcaagttggaacat

SEQ ID NO: 357051 - DNA, 120 bp, Artificial Sequence
  ENSG00000139977_50 (sequence is synthesized)
ggaggtctatcatgtttttaacctccaagatccacttatggggatgaggccaaaggccaatgttacttctagaagaaccagattaatttttctgccttccatcaccgcagtgtattacct

SEQ ID NO: 357052 - DNA, 120 bp, Artificial Sequence
  ENSG00000139977_51 (sequence is synthesized)
ttgaccctcgctggtcatctggtaagtgtagttcatcaaaagagcagaaataggcatagtaaacacctggacacaaagacagtgccaggcttggtacaacctgttaacactgttgaggaa

SEQ ID NO: 357053 - DNA, 120 bp, Artificial Sequence
  ENSG00000139977_52 (sequence is synthesized)
agagctcaaaacatgcattactttggggattaagtcagtgtttaatctcaatatgaaacagacctagaaataacaaagaccactgaagtgccaaatttatcttctaatactactatttaa

SEQ ID NO: 357054 - DNA, 120 bp, Artificial Sequence
  ENSG00000139977_53 (sequence is synthesized)
actatgcaatatgggggttataatgaaatagttttagtctatgtaaggtttttataatgctaagaaataagcttatttttagatatggattttttatgactacctctttgctgtatgaat

SEQ ID NO: 357055 - DNA, 120 bp, Artificial Sequence
  ENSG00000139977_54 (sequence is synthesized)
atcttaattttctaatacctcagtttcatgagaactgtatgtacatttttgtaaataaaataatttaccatatactaggagaaggacctgcttttaaagaaattgtgtaaagacatttgt

SEQ ID NO: 357056 - DNA, 120 bp, Artificial Sequence
  ENSG00000139977_55 (sequence is synthesized)
tattggatgtgttacatagtaaatcaatttgaaatttcttaaaaacgtttataagacttttctggtctccttgaccgagggattttagtataagtatttagtgagatttgtattctagga

SEQ ID NO: 357057 - DNA, 120 bp, Artificial Sequence
  ENSG00000139977_56 (sequence is synthesized)
agtgtgtgccgtcacttgttcatttacaactgcaaagattgtatgtctcctatgttttcctttcatgccaaagaaactcaccctttttaaaagccagcaggttgcacaaaccaaaaacaa

SEQ ID NO: 357058 - DNA, 120 bp, Artificial Sequence
  ENSG00000139977_57 (sequence is synthesized)
aatattttgccccttaaataggcattttaagaagttttatttcctggtacttaaatattgtgtagagggaaagctagttgtaataatttgtaaaaatgcgtgtatttttaggaatgcgct

SEQ ID NO: 357059 - DNA, 120 bp, Artificial Sequence
  ENSG00000139977_58 (sequence is synthesized)
atttccagtaagggaagtattgacatttttaaggaactgtgctgcattaaaatccacagttgcatgaaacttttaaaagtttaagatataaagtaattgctaaaatttgtgaactactca

SEQ ID NO: 357060 - DNA, 120 bp, Artificial Sequence
  ENSG00000139977_59 (sequence is synthesized)
gaggactcaatgccctaacatgtaggggattgatcattgcgatgtttaggccaggatttctcatgattgtatatggttattgatcatttttaaggggctgaacctgctgcctttatactt

SEQ ID NO: 357061 - DNA, 120 bp, Artificial Sequence
  ENSG00000139977_60 (sequence is synthesized)
ttgacacctccctccctccctccctccaaactgtggctgtaaacagtgactctgcatagtcagcgttatacttgatttctttgtgaatgcaaataaaataaaatttgtaagtccaccaaa

SEQ ID NO: 357062 - DNA, 120 bp, Artificial Sequence
  ENSG00000139985_0 (sequence is synthesized)
gttctgtggcctcagctacaaaccattgataaagcatggtataaaccatctagacagaaatggccatggaaactactgtttcttctgatgcactgcagttctgatctaactctgccagga

SEQ ID NO: 357063 - DNA, 120 bp, Artificial Sequence
  ENSG00000139985_1 (sequence is synthesized)
cacagatccacagggtcagccctgcatcctgagcagcttagagggagaagccagaccagcagtgcctcacaccttgtcctcttctgctctggacagatggctccataacgacagcttcat

SEQ ID NO: 357064 - DNA, 120 bp, Artificial Sequence
  ENSG00000139985_2 (sequence is synthesized)
aatggcagtggatgggaccctcgtgtacatcagagtcactcttctgctgctctggcttggggtatttttgtctatttccggctactgtcaggctgggccctcccagcatttcacttcccc

SEQ ID NO: 357065 - DNA, 120 bp, Artificial Sequence
  ENSG00000139985_3 (sequence is synthesized)
ggaagtggtgatccccttgaaggtgatcagcaggggcagaagtgcaaaggctcctggatggctctcctatagtctgcggtttgggggccagaaacacgttgttcatatgagggtcaagaa

SEQ ID NO: 357066 - DNA, 120 bp, Artificial Sequence
  ENSG00000139985_4 (sequence is synthesized)
gctcttagtttctagacacctcccagtgttcacctacacagatgaccgtgcactcctggaggatcagctcttcatcccagatgactgttactatcatggttacgtggaggcagcccctga

SEQ ID NO: 357067 - DNA, 120 bp, Artificial Sequence
  ENSG00000139985_5 (sequence is synthesized)
gtctctggttgtgttcagtgcttgttttgggggctttcgaggagtattaaaaataagtggcctcacttatgaaattgaacccatcaggcactctgccacatttgaacacctggtttataa

SEQ ID NO: 357068 - DNA, 120 bp, Artificial Sequence
  ENSG00000139985_6 (sequence is synthesized)
gataaacagtaatgagacacaattcccagctatgagatgtggcttaacagagaaggaagtagcacgccaacagttggaatttgaagaggctgagaactcagctctggaaccaaaatctgc

SEQ ID NO: 357069 - DNA, 120 bp, Artificial Sequence
  ENSG00000139985_7 (sequence is synthesized)
tggtgactggtggactcatgcatggtttctggagctagttgttgtggtgaaccatgatttcttcatttactctcaaagcaacatctcaaaggtgcaagaggatgtatttcttgttgtcaa

SEQ ID NO: 357070 - DNA, 120 bp, Artificial Sequence
  ENSG00000139985_8 (sequence is synthesized)
catagtggattccatgtataagcagttaggtacttacataattttgattggaattgaaatttggaatcaaggaaatgttttcccaatgacaagcatagaacaggtcctgaacgatttctc

SEQ ID NO: 357071 - DNA, 120 bp, Artificial Sequence
  ENSG00000139985_9 (sequence is synthesized)
tcaatggaaacaaatcagtctttcccagctacagcatgatgctgcacatatgttcataaaaaattcacttataagtatacttggcctagcctatgttgcaggaatatgtcgtccacctat

SEQ ID NO: 357072 - DNA, 120 bp, Artificial Sequence
  ENSG00000139985_10 (sequence is synthesized)
tgattgtggagttgataattttcaaggagatacctggtctctttttgccaacactgtggcccatgagttaggtcatacgttaggtatgcagcatgatgaagaattctgtttttgtgggga

SEQ ID NO: 357073 - DNA, 120 bp, Artificial Sequence
  ENSG00000139985_11 (sequence is synthesized)
tgcatcatgaatacttttagagtgccagcagagaaattcaccaattgcagttacgctgattttatgaagaccaccttaaaccagggatcatgtctgcataatcctccaagattgggggaa

SEQ ID NO: 357074 - DNA, 120 bp, Artificial Sequence
  ENSG00000139985_12 (sequence is synthesized)
atctttatgctaaagcgctgtgggaatggtgtggttgaaagagaagagcagtgtgactgtggatccgtacagcagtgtgaacaagacgcctgttgtctgttgaactgcactctaaggcct

SEQ ID NO: 357075 - DNA, 120 bp, Artificial Sequence
  ENSG00000139985_13 (sequence is synthesized)
ggggctgcctgtgcttttgggctttgttgcaaagactgcaagttcatgccatcaggggaactctgtagacaagaggtcaatgaatgtgaccttccagaatggtgcaatggaacatctcat

SEQ ID NO: 357076 - DNA, 120 bp, Artificial Sequence
  ENSG00000139985_14 (sequence is synthesized)
cagtgtccagaagatagatatgtgcaggacgggatcccctgtagtgacagtgcctactgctatcaaaagaggtgtaataaccatgaccagcattgcagggagatttttggtaaagatgca

SEQ ID NO: 357077 - DNA, 120 bp, Artificial Sequence
  ENSG00000139985_15 (sequence is synthesized)
aaaagtgcatctcagaattgctataaagaaatcaattctcagggaaaccgttttggtcactgtggtataaatggcacaacatacctaaaatgtcatatctctgatgtcttttgtgggaga

SEQ ID NO: 357078 - DNA, 120 bp, Artificial Sequence
  ENSG00000139985_16 (sequence is synthesized)
gttcaatgtgagaatgtgagagacattcctcttctccaagatcattttactttgcagcacactcatatcaatggtgtcacctgctggggtattgactatcatttaaggatgaacatatct

SEQ ID NO: 357079 - DNA, 120 bp, Artificial Sequence
  ENSG00000139985_17 (sequence is synthesized)
gacattggtgaagtgaaagatggtactgtgtgtggcccaggaaagatctgcatccataagaagtgtgtcagtctgtctgtcttgtcacatgtctgccttcctgagacctgcaatatgaag

SEQ ID NO: 357080 - DNA, 120 bp, Artificial Sequence
  ENSG00000139985_18 (sequence is synthesized)
gggatctgcaataacaaacatcactgccactgtggctatgggtggtccccaccctactgccagcacagaggctatgggggcagtattgacagtggcccagcatctgcaaagagaggagtt

SEQ ID NO: 357081 - DNA, 120 bp, Artificial Sequence
  ENSG00000139985_19 (sequence is synthesized)
tttttgccgctgattgtgattccttctttgtctgttttgactttcctgtttactgtcgggcttcttatgtatctacgacaatgttctggtcccaaagaaactaaggctcattcatcaggt

SEQ ID NO: 357082 - DNA, 120 bp, Artificial Sequence
  ENSG00000139985_20 (sequence is synthesized)
taagaaaatgtctctaacttaatattccatgcattagtacactttagtctcttggcagtagaaacattagtacatccctgaaactgagcacatttctgaccatttccagaaagctgcaaa

SEQ ID NO: 357083 - DNA, 120 bp, Artificial Sequence
  ENSG00000139985_21 (sequence is synthesized)
gatcttcccttacattagtaccacaaacattgtcattaagttcaagttattcttaacatgtttctatctattgtttattgttttaagcagcaaataaagctacatccttccctcccttta

SEQ ID NO: 357084 - DNA, 120 bp, Artificial Sequence
  ENSG00000139988_0 (sequence is synthesized)
ctccagaggactgtatgctgttcttaaggactctctgcttcctggacaagctcaagctaaggactacatctcccagcaggctgtgctctgacagctcttggatttaaataggattctggg

SEQ ID NO: 357085 - DNA, 120 bp, Artificial Sequence
  ENSG00000139988_1 (sequence is synthesized)
ctctgctcagagtcaggctgctgctcagcacccaggacggagaggagcagagaagcagcagaagcagccaagagctggagccagaccaggaacctgagccagagctggggttgaagctgg

SEQ ID NO: 357086 - DNA, 120 bp, Artificial Sequence
  ENSG00000139988_2 (sequence is synthesized)
agcagcagcaaaagcaacagcagctacagaagttggaacgatgctggtcaccttgggactgctcacctccttcttctcgttcctgtatatggtagctccatccatcaggaagttctttgc

SEQ ID NO: 357087 - DNA, 120 bp, Artificial Sequence
  ENSG00000139988_3 (sequence is synthesized)
tggtggagtgtgtagaacaaatgtgcagcttcctggcaaggtagtggtgatcactggcgccaacacgggcattggcaaggagacggccagagagctcgctagccgaggagcccgagtcta

SEQ ID NO: 357088 - DNA, 120 bp, Artificial Sequence
  ENSG00000139988_4 (sequence is synthesized)
tattgcctgcagagatgtactgaagggggagtctgctgccagtgaaatccgagtggatacaaagaactcccaggtgctggtgcggaaattggacctatccgacaccaaatctatccgagc

SEQ ID NO: 357089 - DNA, 120 bp, Artificial Sequence
  ENSG00000139988_5 (sequence is synthesized)
ctttgctgagggctttctggcagaggaaaagcagctccatattctgatcaacaatgcgggagtaatgatgtgtccatattccaagacagctgatggctttgaaacccacctgggagtcaa

SEQ ID NO: 357090 - DNA, 120 bp, Artificial Sequence
  ENSG00000139988_6 (sequence is synthesized)
ccacctgggccacttcctcctcacctacctgctcctggagcggctaaaggtgtctgcccctgcacgggtggttaatgtgtcctcggtggctcaccacattggcaagattcccttccacga

SEQ ID NO: 357091 - DNA, 120 bp, Artificial Sequence
  ENSG00000139988_7 (sequence is synthesized)
tgcctattgccacagcaagctggccaatgtgctttttactcgtgagctggccaagaggctccaaggcaccggggtcaccacctacgcagtgcacccaggcgtcgtccgctctgagctggt

SEQ ID NO: 357092 - DNA, 120 bp, Artificial Sequence
  ENSG00000139988_8 (sequence is synthesized)
ccggcactcctccctgctctgcctgctctggcggctcttctccccctttgtcaagacggcacgggagggggcgcagaccagcctgcactgcgccctggctgagggcctggagcccctgag

SEQ ID NO: 357093 - DNA, 120 bp, Artificial Sequence
  ENSG00000139988_9 (sequence is synthesized)
tggcaagtacttcagtgactgcaagaggacctgggtgtctccaagggcccgaaataacaaaacagctgagcgcctatggaatgtcagctgtgagcttctaggaatccggtgggagtagct

SEQ ID NO: 357094 - DNA, 120 bp, Artificial Sequence
  ENSG00000139988_10 (sequence is synthesized)
ggtggaagagctgcagctttatcaggcccaatccatgccataatgaacagggaccaaggagaaggccaaccctaaaggattgtcctcttggccagctggtgctgcgaatcctgcctgctc

SEQ ID NO: 357095 - DNA, 120 bp, Artificial Sequence
  ENSG00000139988_11 (sequence is synthesized)
tgatcctcttgacccttctgggaatgtttgcacacctgacactcttgtgagactggcttatggcatgagttgtggacacctatagagtgttcttctctaagacctggaaagtcagcaacc

SEQ ID NO: 357096 - DNA, 120 bp, Artificial Sequence
  ENSG00000139988_12 (sequence is synthesized)
ctctgggggcagcaggactgggcagatcccaggctgggcatgggggtggcagaagagcccgagaaattgggtcagttccctcatcagcaccagaggctcagctgaggcaagaagagcacc

SEQ ID NO: 357097 - DNA, 120 bp, Artificial Sequence
  ENSG00000139988_13 (sequence is synthesized)
atcactgcctatttctaggggctatacactccaactcttggttgatctctttctttttaaaaatatttgccaccaccctggagtctagaccaacacacaaagatcctggctaaccctggc

SEQ ID NO: 357098 - DNA, 120 bp, Artificial Sequence
  ENSG00000139988_14 (sequence is synthesized)
ctatttagattccttcctctcacctggaccttcccatttcaatcatgcagatggtttctttttgtaaagagttccgtttgcctttcaatttttagagaaaataaagactgcattcatctc

SEQ ID NO: 357099 - DNA, 120 bp, Artificial Sequence
  ENSG00000139988_15 (sequence is synthesized)
caaacagaatgccgttgctttgttaaggaaacttacagtacaaacttatgtgttgggaagagttgcttttctggctttattttatactcgtgtgccgcttttccatgaaaactttgcagc

SEQ ID NO: 357100 - DNA, 120 bp, Artificial Sequence
  ENSG00000139988_16 (sequence is synthesized)
tttctgaaagcttttaaagaagactgtcgctgttggttatgccatggagatctggatcgtttttctccttctttaagcttttggctcacttgattcatgaatttttaaataccaattagc

SEQ ID NO: 357101 - DNA, 120 bp, Artificial Sequence
  ENSG00000139988_17 (sequence is synthesized)
agcctaggaattcacgaccagcatgggcaacacaatgccttatggtccttctaatatcttctctccagaggactgtatgctgttcttaaggactctctgcttcctggacaagctcaagct

SEQ ID NO: 357102 - DNA, 120 bp, Artificial Sequence
  ENSG00000139990_0 (sequence is synthesized)
acacctcgctctgcctgccatggctggttaaagaaccatccggatcgcagcgcggggggagggccgggtggggggagcagcggccgcgcgtgaggccgagggaggggcggcggcgcgagc

SEQ ID NO: 357103 - DNA, 120 bp, Artificial Sequence
  ENSG00000139990_1 (sequence is synthesized)
ggcggcggcggcggttccagcatgaagaggagagctggcctggggggcagcatgaggtcagtggtgggcttcttgtcccagcggggcttgcatggggaccccctgctcactcaggacttt

SEQ ID NO: 357104 - DNA, 120 bp, Artificial Sequence
  ENSG00000139990_2 (sequence is synthesized)
cagaggagacgcctgcggggctgcagaaacctctacaagaaggacctcctcggccacttcggctgtgtcaatgccattgaattctccaacaatggaggccagtggctggtctcaggagga

SEQ ID NO: 357105 - DNA, 120 bp, Artificial Sequence
  ENSG00000139990_3 (sequence is synthesized)
gatgaccgccgggttctgctatggcacatggaacaagccatccactccagggtcaagcccatacagctgaaaggagagcaccattccaacattttttgcctggctttcaacagtgggaac

SEQ ID NO: 357106 - DNA, 120 bp, Artificial Sequence
  ENSG00000139990_4 (sequence is synthesized)
actaaagtgttctctggaggcaatgatgagcaagttatcctccatgatgttgaaagcagtgagacattggacgtgtttgctcatgaagatgcagtatatggcttgtctgtgagcccagtg

SEQ ID NO: 357107 - DNA, 120 bp, Artificial Sequence
  ENSG00000139990_5 (sequence is synthesized)
aatgacaacatttttgccagttcctcagatgatggccgggttctcatttgggacattcgggaatccccccatggagagcccttctgcctggcaaactatccatcagcctttcatagtgtc

SEQ ID NO: 357108 - DNA, 120 bp, Artificial Sequence
  ENSG00000139990_6 (sequence is synthesized)
atgtttaaccctgtggagcccaggttgttggccacagccaattcaaaggaaggagtgggactctgggacattcgaaaacctcagagttctctcctgcgctatggtggaaacctgtccctc

SEQ ID NO: 357109 - DNA, 120 bp, Artificial Sequence
  ENSG00000139990_7 (sequence is synthesized)
caaagtgccatgagtgtacgattcaacagcaacgggacccagctcctggccctgaggcgacgcctgccccctgtgctctatgacatccattcccgcctgcctgtgtttcagtttgacaat

SEQ ID NO: 357110 - DNA, 120 bp, Artificial Sequence
  ENSG00000139990_8 (sequence is synthesized)
cagggttacttcaactcatgcaccatgaaaagctgctgttttgcaggagatcgtgaccagtatatcctttcgggctctgatgacttcaacctgtacatgtggagaattcctgcagatcca

SEQ ID NO: 357111 - DNA, 120 bp, Artificial Sequence
  ENSG00000139990_9 (sequence is synthesized)
gaagcaggtggcattggtagggtggtcaacggagccttcatggtgctgaaagggcatcgatctattgttaaccaagtccgatttaatccccacacctacatgatctgctcttctggtgta

SEQ ID NO: 357112 - DNA, 120 bp, Artificial Sequence
  ENSG00000139990_10 (sequence is synthesized)
gaaaagattatcaagatctggagcccatacaagcagccaggatgtactggagacctcgacggtcggattgaggacgattcccgctgcctctatacccatgaagagtacatcagccttgtg

SEQ ID NO: 357113 - DNA, 120 bp, Artificial Sequence
  ENSG00000139990_11 (sequence is synthesized)
ctgaacagtgggagtggcctgtcgcatgactacgccaaccagtcggtccaggaagacccccggatgatggccttctttgactcactggtacgccgagagatcgagggctggagctctgac

SEQ ID NO: 357114 - DNA, 120 bp, Artificial Sequence
  ENSG00000139990_12 (sequence is synthesized)
tcagacagtgacctcagtgagagtactatcctccaactgcacgctggggtcagcgagcgctcaggctacactgactcagagtcttcggcctcattgcctcgctccccgcctcccacagta

SEQ ID NO: 357115 - DNA, 120 bp, Artificial Sequence
  ENSG00000139990_13 (sequence is synthesized)
gatgagtctgccgacaacgccttccacctggggcccctgcgggtcaccaccacaaacacagtagcctcaactccaccaacacccacgtgtgaggatgcagcctctcgccagcagcgtctg

SEQ ID NO: 357116 - DNA, 120 bp, Artificial Sequence
  ENSG00000139990_14 (sequence is synthesized)
tctgctctgcggcgctaccaagacaaacgcctcctggccctttccaatgagtccgattctgaggagaatgtctgtgaggtggaactagacacagatctctttccccggccacggtcaccc

SEQ ID NO: 357117 - DNA, 120 bp, Artificial Sequence
  ENSG00000139990_15 (sequence is synthesized)
agccccgaagatgaatccagcagttccagcagctctagcagctctgaggatgaggaggagctgaatgaacgccgagcctctacctggcagcggaatgccatgcggcgccgacagaagaca

SEQ ID NO: 357118 - DNA, 120 bp, Artificial Sequence
  ENSG00000139990_16 (sequence is synthesized)
acccgagaagacaagcccagtgccccaatcaagcccaccaacacttacattggagaagacaactatgattacccccagatcaaagtggatgacctctcctcctccccaacctcgtcccct

SEQ ID NO: 357119 - DNA, 120 bp, Artificial Sequence
  ENSG00000139990_17 (sequence is synthesized)
gagcggagcacttccacgctagagattcaaccaagccgggcatcaccaacttctgacatagaatcagttgagcgaaaaatttataaagcttacaagtggctccgctactcttatatctcc

SEQ ID NO: 357120 - DNA, 120 bp, Artificial Sequence
  ENSG00000139990_18 (sequence is synthesized)
tactcaaataacaaagatggagagacctccttggtgaccggggaggcagatgaagggagagcaggaaccagccacaaagacaacccagccccttcttccagtaaggaagcctgtctaaac

SEQ ID NO: 357121 - DNA, 120 bp, Artificial Sequence
  ENSG00000139990_19 (sequence is synthesized)
atagcaatggcccagaggaaccaggacctgccacctgaaggctgcagcaaggacacttttaaagaagagactcctagaactcccagcaatggcccaggccatgagcacagcagccatgct

SEQ ID NO: 357122 - DNA, 120 bp, Artificial Sequence
  ENSG00000139990_20 (sequence is synthesized)
tgggcagaggtgccagagggtacctctcaggacactggcaatagcggctctgtagagcacccttttgaaaccaagaagctcaatggaaaggccctgagcagtcgggctgaggagccgcct

SEQ ID NO: 357123 - DNA, 120 bp, Artificial Sequence
  ENSG00000139990_21 (sequence is synthesized)
tctcctcctgtccccaaggcatctggctccactctcaacagcgggtctggcaactgtcccaggacccagtctgatgacagtgaggagaggagcctcgaaaccatctgtgccaaccacaac

SEQ ID NO: 357124 - DNA, 120 bp, Artificial Sequence
  ENSG00000139990_22 (sequence is synthesized)
aatggacgcttacaccctcgtccccctcaccctcacaataacgggcagaacttgggggagctggaggtggtggcctactcttccccaggacactcagacactgaccgtgataactcgtcc

SEQ ID NO: 357125 - DNA, 120 bp, Artificial Sequence
  ENSG00000139990_23 (sequence is synthesized)
ctgacagggacactcctacacaaagattgttgcgggtctgaaatggcctgtgagacccccaatgctggaacaagagaggaccccactgacaccccagccacagatagtagcagggctgtt

SEQ ID NO: 357126 - DNA, 120 bp, Artificial Sequence
  ENSG00000139990_24 (sequence is synthesized)
tcagagaagaaattaaaaacatgataaatacaaagggaaaacaaaaagctacaaaagtagccttacaaaaaaaaaaaaattgtttagtgaatacagaggaaaggaaaaacaagtattaaa

SEQ ID NO: 357127 - DNA, 120 bp, Artificial Sequence
  ENSG00000139990_25 (sequence is synthesized)
ggcacatgaaaccagggcctgaaattttgtgtctgatgctgctcccttctatccaacattcaacaacgggtctgaatgtctagctggccattggcttgtgctgtgttaagaaaggggaaa

SEQ ID NO: 357128 - DNA, 120 bp, Artificial Sequence
  ENSG00000139990_26 (sequence is synthesized)
aaaaaataacccaagtgactcctttctagtgagacgtgagcgtagtgtgccgcgcaaggctctgtggaagtaaatctttgttgagacgttcgacttgttcttgtgtacgcacaatggcac

SEQ ID NO: 357129 - DNA, 120 bp, Artificial Sequence
  ENSG00000139990_27 (sequence is synthesized)
gtgtgcgcttattgtctcataagaccttccttttagttctccatcagaaaggacctatgaatttgtactttttgccatctcaccctgtttacatgccataggtgttctggtctggatgat

SEQ ID NO: 357130 - DNA, 120 bp, Artificial Sequence
  ENSG00000139990_28 (sequence is synthesized)
gggtgcctgttaaatcaggttgtgctgccagtgagttgtagatttatgctggaagaatggagaatggaaacaggccttcagcccattggctgcgctggagaggaaagcatggttcctttc

SEQ ID NO: 357131 - DNA, 120 bp, Artificial Sequence
  ENSG00000139990_29 (sequence is synthesized)
ttaaagaaatcttccatgttttctctaagtaacacttctttattgagcatttaatgtggacatactataaaaaagaatttttaatgctaatgagaggtttagcacttaagatcagattca

SEQ ID NO: 357132 - DNA, 120 bp, Artificial Sequence
  ENSG00000139990_30 (sequence is synthesized)
agagaatatagattcctgataaatttcactgtttgcaaattgagcagtgctgcaacatgtactgtatgaaggccataaaatagagctagtcatggataacagactttaaccagttaggtg

SEQ ID NO: 357133 - DNA, 120 bp, Artificial Sequence
  ENSG00000139990_31 (sequence is synthesized)
ctagatcctaagaggcactcacaaggccagcaggtgcttccttggctcccatgatcgatcgaggcatagtgaaagaagggcaaagacagctttccagagctttgtgctcaggctactaaa

SEQ ID NO: 357134 - DNA, 120 bp, Artificial Sequence
  ENSG00000139990_32 (sequence is synthesized)
gtagttgttataggtgtgttaacgaagaagcttagtgaggagcagaatgtggtactatattcatttaactcaacccagaaccattggtcagaattggtgggactggcatcttccctcaga

SEQ ID NO: 357135 - DNA, 120 bp, Artificial Sequence
  ENSG00000139990_33 (sequence is synthesized)
cttgcagttgatagaggctgtggtgttctcactagactttgcagagcagtaggcatctcaaggtaacagattcttattgagtaggtctattaggagtcagaaggtgttggggaggagtct

SEQ ID NO: 357136 - DNA, 120 bp, Artificial Sequence
  ENSG00000139990_34 (sequence is synthesized)
ctggcttatgactcctggttcccattagtcttaagtcttctggttcccataaaagactcagttttattgaggtagatacaggtttagaagagaaaagagcaacagattttcagcgttgca

SEQ ID NO: 357137 - DNA, 120 bp, Artificial Sequence
  ENSG00000139990_35 (sequence is synthesized)
gtcactcggttatctatgaagggttgtgcaaaacaggaaggtctgggaatgaccagatatcttgttggcataaatgttatgaaaaggcagaatactggcaagaaatgaggaagagagaga

SEQ ID NO: 357138 - DNA, 120 bp, Artificial Sequence
  ENSG00000139990_36 (sequence is synthesized)
aaaacaatataactttcttgagtgcaaaggtgctagacaactaggagcccagctgggattggtgtagggagggccgaacgctgactagtgtggcctcactgccccaggcttcctttcaga

SEQ ID NO: 357139 - DNA, 120 bp, Artificial Sequence
  ENSG00000139990_37 (sequence is synthesized)
ggaaggcctgtcctgctggaactggagccaaggggaggctgcctatgaaggcagaagatgtggatgaattcaggcactgggggtgggggggttatttataaacacaaggtggttggttta

SEQ ID NO: 357140 - DNA, 120 bp, Artificial Sequence
  ENSG00000139990_38 (sequence is synthesized)
agccaaaaggagataccatcctgataagctctgtgaaagagaagatgtgcctggtgtgtgtaatgcggctggggtatgaaaacactgagaaggagatgaaggagtgtgtgtagcatgggg

SEQ ID NO: 357141 - DNA, 120 bp, Artificial Sequence
  ENSG00000139990_39 (sequence is synthesized)
gtgtgtacaacttaacacctggacttttactgggggagtgggaaagtgattctgtaaccaacattagaattactttggatttgtaatcagattggttctatgatttgtctttgactattc

SEQ ID NO: 357142 - DNA, 120 bp, Artificial Sequence
  ENSG00000139990_40 (sequence is synthesized)
acagataattgtaaatgctggttttataagcccaagtcattttacatttgcttttccaaaatgtattaaattggaattttttaatcctttatatacaaaaaaaatacgatcactcagtgt

SEQ ID NO: 357143 - DNA, 120 bp, Artificial Sequence
  ENSG00000139990_41 (sequence is synthesized)
gtgtttctcttccccttcttagtcagcacacccagtcctttattttattctattctatttattttattttaataagtacttagcctcttctgacttctcaaaggacaatcggatacatat

SEQ ID NO: 357144 - DNA, 120 bp, Artificial Sequence
  ENSG00000139990_42 (sequence is synthesized)
cttcctgaaaagaagtagttaaagttcccttgggaactagctacttggtagttacaattcccaaatgcagaacttggtcttttcatgttaaaagccttaatctcatttgggtactcaaaa

SEQ ID NO: 357145 - DNA, 120 bp, Artificial Sequence
  ENSG00000139990_43 (sequence is synthesized)
gagaaatcagagtttattctggttaacttgagaagccaagaaagatcatttttagcaagtatgccttccatccttggcagaggcttcccagcatcctaggctcagcttaccgggtgatag

SEQ ID NO: 357146 - DNA, 120 bp, Artificial Sequence
  ENSG00000139990_44 (sequence is synthesized)
gccccataagacacacacatgagcagggtgagaaatgcttgctttatagctgctccaccctcatctccagagattttgtgtctatggttgtgggtctggaaacctggcaggaaccacttc

SEQ ID NO: 357147 - DNA, 120 bp, Artificial Sequence
  ENSG00000139990_45 (sequence is synthesized)
tagagtacctttgcctaaactcttttagaattgaggccccaactttgatggcacatttaatacccaatttcttccataatagatatttttaatagcaggacagatggcactgattagatc

SEQ ID NO: 357148 - DNA, 120 bp, Artificial Sequence
  ENSG00000139990_46 (sequence is synthesized)
aagaactatttggaagtgcctcttatgtttttttcctgcattctgtacataaagttttaagtggcaggtccagatatgtaaaatcatttctctctattttccagctggttttgttaatga

SEQ ID NO: 357149 - DNA, 120 bp, Artificial Sequence
  ENSG00000139990_47 (sequence is synthesized)
ttctctaggacagcaggtaaatgagttaagttgttggcttggggcaagtgaagtttgtgactatgcttgatttaataagctgagagtctcttgtttgtctgtcaaggtgccttcctctgc

SEQ ID NO: 357150 - DNA, 120 bp, Artificial Sequence
  ENSG00000139990_48 (sequence is synthesized)
tgaagccttacctccttctcacccagtaacggttaactcttctcttgtgtatatgcaaataaacctattattcacttctcacgtcttcctcttctcttccagggaagacttggttgctta

SEQ ID NO: 357151 - DNA, 120 bp, Artificial Sequence
  ENSG00000139990_49 (sequence is synthesized)
agttatcctccatgatgttgaaaggtaaatagattggtggtgtgtgaaggtgattgactttgtttttcatatatgaagaggcaaatatctctttagactaaaatagtttttgttttttga

SEQ ID NO: 357152 - DNA, 120 bp, Artificial Sequence
  ENSG00000139990_50 (sequence is synthesized)
catgcaccatgaaaagctgctgttttgcaggagatcgtgaccagcatcacaactggaaatggagagcccaagctgtgagtttccagccttttctgagtctcaccaggaatggagatgctg

SEQ ID NO: 357153 - DNA, 120 bp, Artificial Sequence
  ENSG00000139990_51 (sequence is synthesized)
atgttgacttaaagctggcagtttaagaatatacttggccttcttgcacctttctgtcttaaccatagaagttctgaagtgtcagtgaccagttgggctaatctgggtcaccaagccgag

SEQ ID NO: 357154 - DNA, 120 bp, Artificial Sequence
  ENSG00000139990_52 (sequence is synthesized)
gaaagacaaatgggaagaaagacaaatctaaggaaagactgatcaaataaacaaatagaattttttattctcaagcacaacaaatcttattgctatttcacatatagattgggaaaaaga

SEQ ID NO: 357155 - DNA, 120 bp, Artificial Sequence
  ENSG00000139990_53 (sequence is synthesized)
aaaaccttagtctctcgctaatgtttagtgttcttatctttgggtcaactatgtcaaattttgacttaaaattcttatatgctgtaccccacctctttagagttatttttggcataaaag

SEQ ID NO: 357156 - DNA, 120 bp, Artificial Sequence
  ENSG00000139990_54 (sequence is synthesized)
ttttctccttagatgggggttgctagaggcttcctaatgtcatagtttaaggattagtagatgtaataggagccgaataaatgcctgttgaattgtcttgcgtgtagatagatgagaatg

SEQ ID NO: 357157 - DNA, 120 bp, Artificial Sequence
  ENSG00000139990_55 (sequence is synthesized)
ttcttttaagttttctgaactagagatttcctctcttataaatagagactatatatccaaattcagaatttatactcatgttggagtcttagggcctacttagctgagatccatactgga

SEQ ID NO: 357158 - DNA, 120 bp, Artificial Sequence
  ENSG00000139990_56 (sequence is synthesized)
gaccactaggtggcctcagtgatgtctccttggggtgcccacagtacctgaatgacttaatttgtatatacctgtatggcactgcagggaatttgtttcttgggtgggaagaaacagttt

SEQ ID NO: 357159 - DNA, 120 bp, Artificial Sequence
  ENSG00000139990_57 (sequence is synthesized)
ctataggcgatcagactctcaatagaacagatatacagaatggttgatttagctttgtctggctgtggaaatgacaatcaagtctctccctctcttccttttttccttctttctttgctt

SEQ ID NO: 357160 - DNA, 120 bp, Artificial Sequence
  ENSG00000139990_58 (sequence is synthesized)
ttgttgatttcctatcctttgtcaacttcttatgcatgtaattcttgttttgttgaataatagagcatgcagtgaaggtgatattaatagtttactaggctttatttccagaaaccagag

SEQ ID NO: 357161 - DNA, 120 bp, Artificial Sequence
  ENSG00000139990_59 (sequence is synthesized)
gctgagggaaaggtgattttcttcaggttgtgtttagcaacaaagcctatcttcatggaccttagaagacccagaacaaagacctctagccaacatgtaagcacctagaccatggtttcc

SEQ ID NO: 357162 - DNA, 120 bp, Artificial Sequence
  ENSG00000139990_60 (sequence is synthesized)
catccttatcattgttaacattttggctagatagttctttgttgtgtggagctgtcctatgcattataagatggttagcagtatccctagcctcttcctactagaagccggtaatatcat

SEQ ID NO: 357163 - DNA, 120 bp, Artificial Sequence
  ENSG00000139990_61 (sequence is synthesized)
cctaagttatcctccaggcaaccaaaaatgtctccagacattgtcccctggggggaaaattgcccctggttgagaacctgtgatccggattataattacccattttgctcagatgcattg

SEQ ID NO: 357164 - DNA, 120 bp, Artificial Sequence
  ENSG00000139990_62 (sequence is synthesized)
gggcaggtattgtcataggcagagccacagaaggtattttgtgatagtcctaggtatatacatcaaagatatcattgtttctgtctttcagtttatatataattataaaagtattgaatg

SEQ ID NO: 357165 - DNA, 120 bp, Artificial Sequence
  ENSG00000139990_63 (sequence is synthesized)
gcttttgatttttctctatttagatttgactaatttattatttgtgacttgtcctatgggaagagttttatgggtattttattctctctgacagacaagacttctttttggctggggtaa

SEQ ID NO: 357166 - DNA, 120 bp, Artificial Sequence
  ENSG00000139990_64 (sequence is synthesized)
gtggttttccttgaaagaagatgcaaagtcattgaatctaactttgggtcagttaacagagttaaagtcttaaaagtctgttcatattcctgaaatagttagaggtatataaaatacaga

SEQ ID NO: 357167 - DNA, 120 bp, Artificial Sequence
  ENSG00000139990_65 (sequence is synthesized)
gatttatatttggcttttttgttgactccttagggactaagaaatgtagctaattcatcattgtcttgtctccaaatcctggcacacagtgagaacacaataaaaatttgttgaagtaaa

SEQ ID NO: 357168 - DNA, 120 bp, Artificial Sequence
  ENSG00000139990_66 (sequence is synthesized)
attgcagggggaggggaaggagaggatgtcttctataaaaaagacctaaaatggttgacagctccttaattcgctttatcccaagtgcaaagtgatctctcctgatgcctgccctgaaag

SEQ ID NO: 357169 - DNA, 120 bp, Artificial Sequence
  ENSG00000139990_67 (sequence is synthesized)
gaggggaaggagaggatgtcttctataaaaaagacctaaaatggttgacagctccttaattcgctttatcccaagtgcaaagtgatctctcctgatgcctgccctgaaagtgtaggtcgg

SEQ ID NO: 357170 - DNA, 80 bp, Artificial Sequence
  ENSG00000139998_0 (sequence is synthesized)
gcgcaggggaaggggcgggcaggggccgccgccggtttctcctcccaccgcctcgcgccagcccagccgagccgagccga

SEQ ID NO: 357171 - DNA, 120 bp, Artificial Sequence
  ENSG00000139998_1 (sequence is synthesized)
agcgtccccgggcgggcgcgggccgcgatggcagcggcggagcagggctgagcccgctgcccgcccgcagttcccggccccgctggccccagtcatggcgaagcagtacgatgtgctgtt

SEQ ID NO: 357172 - DNA, 120 bp, Artificial Sequence
  ENSG00000139998_2 (sequence is synthesized)
tgttccggctgctgctgatcggggactccggggtgggcaagacctgcctgctgtgccgcttcaccgacaacgagttccactcctcgcacatctccaccatcggtgttgactttaagatga

SEQ ID NO: 357173 - DNA, 120 bp, Artificial Sequence
  ENSG00000139998_3 (sequence is synthesized)
agaccatagaggtagacggcatcaaagtgcggatacagatctgggacactgcagggcaggagagataccagaccatcacaaagcagtactatcggcgggcccaggggatatttttggtct

SEQ ID NO: 357174 - DNA, 120 bp, Artificial Sequence
  ENSG00000139998_4 (sequence is synthesized)
atgacattagcagcgagcgctcttaccagcacatcatgaagtgggtcagtgacgtggatgagtacgcaccagaaggcgtccagaagatccttattgggaataaggctgatgaggagcaga

SEQ ID NO: 357175 - DNA, 120 bp, Artificial Sequence
  ENSG00000139998_5 (sequence is synthesized)
aacggcaggtgggaagagagcaagggcagcagctggcgaaggagtatggcatggacttctatgaaacaagtgcctgcaccaacctcaacattaaagagtcattcacgcgtctgacagagc

SEQ ID NO: 357176 - DNA, 120 bp, Artificial Sequence
  ENSG00000139998_6 (sequence is synthesized)
tggtgctgcaggcccataggaaggagctggaaggcctccggatgcgtgccagcaatgagttggcactggcagagctggaggaggaggagggcaaacccgagggcccagcgaactcttcga

SEQ ID NO: 357177 - DNA, 120 bp, Artificial Sequence
  ENSG00000139998_7 (sequence is synthesized)
aaacctgctggtgctgagtcctgtgtggggcaccccacacgacacccctcttccctcaggaggcccgtgggcagacaggggagccggggctttgccctgctgctgtcctctcgtgtgatg

SEQ ID NO: 357178 - DNA, 120 bp, Artificial Sequence
  ENSG00000139998_8 (sequence is synthesized)
accctattgagtatcagtagccactactccccctgcctggccctgagagcggctctgctgtcatctcaagcagcccctgtccccagcccgtccaccctggagtggtcttcttcagcctgt

SEQ ID NO: 357179 - DNA, 120 bp, Artificial Sequence
  ENSG00000139998_9 (sequence is synthesized)
ttccccagccacaggcctgctacgacccccacgatgtgccgcaagcactgtctcaccatcccgcacccaccagacaacagccagggctggagtccaggccactttcagctgctcctttct

SEQ ID NO: 357180 - DNA, 120 bp, Artificial Sequence
  ENSG00000139998_10 (sequence is synthesized)
ccgtgcatcgtgtctcttctctgctttttctctcttcccccacttctctttctctgacccctcccctccggtgcgtttcgtatcaaagctcctcaaaccccgtcccccgtgtgtcctgct

SEQ ID NO: 357181 - DNA, 120 bp, Artificial Sequence
  ENSG00000139998_11 (sequence is synthesized)
gtgtgcagctcgctctttccttccttcctaagctatccaaggggatggacccaggctcgtggggaggttccacccttggatccaggaagaaccctccaccctgcctcgtgggtgggccaa

SEQ ID NO: 357182 - DNA, 120 bp, Artificial Sequence
  ENSG00000139998_12 (sequence is synthesized)
aggctacagggtgcttcttcctcttcccccacccccactgtccctcatgtgccatgggcctgcctccccagtgacctgcgaaagtggagcatcgaggtaggagggaaacggcaaccaggg

SEQ ID NO: 357183 - DNA, 120 bp, Artificial Sequence
  ENSG00000139998_13 (sequence is synthesized)
ttccccgaccagagctttgcccttgcttggctgcccgcctgcctctttggggaactgagctcagaggcaggtgcttcagagaaggaaacaaaatgaggggtggcagggataaaaagtcac

SEQ ID NO: 357184 - DNA, 120 bp, Artificial Sequence
  ENSG00000139998_14 (sequence is synthesized)
ctccattctctacctcccatgcagcatgaacacaatttctctccacctggctcccaaatttaaagatgtggaccaaggcctgtgggtactccaggggcaaggagagccctggggtcagtg

SEQ ID NO: 357185 - DNA, 120 bp, Artificial Sequence
  ENSG00000139998_15 (sequence is synthesized)
acactgtcaggccaaccatgcactccacaaaggggagcatttggaaatgaaggactagctcctatgtatcaggttaagagcaagggagagctggccagggacagcagtttgcacagcaga

SEQ ID NO: 357186 - DNA, 120 bp, Artificial Sequence
  ENSG00000139998_16 (sequence is synthesized)
ggggaatgtagcaacagcagggcctcctaggccccatcttccatttcttaggtaagaagagcatttcctcagactcccaggcggaggactgagcctagccttcagcaaccaaggttctcc

SEQ ID NO: 357187 - DNA, 120 bp, Artificial Sequence
  ENSG00000139998_17 (sequence is synthesized)
tgggacccaaagtttatgggagaagggcaaagacttcatgggaagagagaaggaaggccctgggtagaaacgcttggtgctgttctctttggcctttaagacaaagcgctcatcttgccc

SEQ ID NO: 357188 - DNA, 120 bp, Artificial Sequence
  ENSG00000139998_18 (sequence is synthesized)
tctacctcctgataggcttgagggtttgccaaccacactgtggctacaggtggagggaagaggactccttcctccagagtgctatgttcaggaagtttctttaaccccatatggcccaag

SEQ ID NO: 357189 - DNA, 120 bp, Artificial Sequence
  ENSG00000139998_19 (sequence is synthesized)
agtagctcgtaggaggccctttaaagacggaacaagtaatttaccagttctactggggttcctgcccaccgtcccaaggtgggcgaggcctaggaagagggtcattcttaagccacacat

SEQ ID NO: 357190 - DNA, 120 bp, Artificial Sequence
  ENSG00000139998_20 (sequence is synthesized)
tagctgcactgcgtggctgcagccaaaacaaagaactgggtgttgagtattcatcaactaagaaccaaaatccagggcactcatatgtgaaggataagaacctcacttccttactcctcc

SEQ ID NO: 357191 - DNA, 120 bp, Artificial Sequence
  ENSG00000139998_21 (sequence is synthesized)
aaaaagaagtggggaaagaaccatcaaacctttcctcctgacttaccaaaccaggaaaacagcaggagagggtggctcaggacttagggacagggtatagcttagatggtggaaagcaaa

SEQ ID NO: 357192 - DNA, 120 bp, Artificial Sequence
  ENSG00000139998_22 (sequence is synthesized)
ggagagcaggaagttgtaaatcactggctaatgagaaaaggagacagctaactctaggatgaagctgtgactaggctggagttgcttccttgaagatgggactccttgggtatcaagacc

SEQ ID NO: 357193 - DNA, 120 bp, Artificial Sequence
  ENSG00000139998_23 (sequence is synthesized)
tatgccacatcacactggggctagggaagtaggtgatgccagccctcaagtctgtcttcagccagggacttgagaagttatattgggcagtggctccaatctgtggaccagtatttcagc

SEQ ID NO: 357194 - DNA, 120 bp, Artificial Sequence
  ENSG00000139998_24 (sequence is synthesized)
tttccctgaagatcaggcagggtgccattcattgtctttctctcctagccccctcaggaaagaaggactatatttgtactgtaccctaggggttctggaagggaaaacatggaatcagga

SEQ ID NO: 357195 - DNA, 120 bp, Artificial Sequence
  ENSG00000139998_25 (sequence is synthesized)
ttctatagactgataggccctatccacaagggccatgactgggaaaaggtatgggagcagaaggagaattgggattttagggtgcagctacgctcaccctaaacttttggtggcctgggg

SEQ ID NO: 357196 - DNA, 120 bp, Artificial Sequence
  ENSG00000139998_26 (sequence is synthesized)
catgtcttgaggcccagactgttaaccaggctctgctggcctgtttactcgtcaccacctctgcacctgctgtcttgagactccatccagccccaggcacgccacctgctcctgagcctc

SEQ ID NO: 357197 - DNA, 120 bp, Artificial Sequence
  ENSG00000139998_27 (sequence is synthesized)
cactatctccctgtgacgggtgaacttcgtgtactgtgtctcgggtccatatatgaattgtgagcagggttcatctattttaaacacagatgtttacaaaataaagattatttcaaacca

SEQ ID NO: 357198 - DNA, 120 bp, Artificial Sequence
  ENSG00000139998_28 (sequence is synthesized)
ttcattgctttttaaagacctaataggctagactttgctctccctcaatactcgttggtagggataggcaattttctcaactccggagagcattcatttgcctctctccggtgctaacac

SEQ ID NO: 357199 - DNA, 120 bp, Artificial Sequence
  ENSG00000139998_29 (sequence is synthesized)
attcagtggtaggaaactggatcttgaacaagggccattcattctttggtgccactggctataccacagagaaatttaggggtctgaaacaatacattggtcacctgggcacctatccta

SEQ ID NO: 357200 - DNA, 120 bp, Artificial Sequence
  ENSG00000139998_30 (sequence is synthesized)
agcaccttagagggaaaacggagacttgcccgcacacctctaaaggattttgcacttggagatgttcttatggccatctatcttttcaccctggtggaggccgtgaataggcattttccc

SEQ ID NO: 357201 - DNA, 120 bp, Artificial Sequence
  ENSG00000139998_31 (sequence is synthesized)
catttaaagaaaaaatggggacgggggagggccgtgacacagtcacacaggtaaggggcagccagatggcagggagggggaattccacccacactctcggggactcatggagacgggtgt

SEQ ID NO: 357202 - DNA, 120 bp, Artificial Sequence
  ENSG00000139998_32 (sequence is synthesized)
ttaccagcacatcatgaagtgggtcagtgacgtggatgaggtaggagatgccacctcactgccggggtgtggagagggtgcctcaccggggaaggcaaggcgagggccagatgggaaggc

SEQ ID NO: 357203 - DNA, 120 bp, Artificial Sequence
  ENSG00000139998_33 (sequence is synthesized)
aaatgcttccaggaagctttgccttccacagccctggatgaagacctctgggtgagtaagacatggggaagaaaccgaagctgccatgccctcactctctataccctgccaggcctccac

SEQ ID NO: 357204 - DNA, 120 bp, Artificial Sequence
  ENSG00000139998_34 (sequence is synthesized)
ggctgtgtctttcccggaaatgaattagttccaagtcttccctgtgagcagcttctttcctgaaatcttgggaccaggtggagttgcaagattgggatctagtcctggctctgcacaata

SEQ ID NO: 357205 - DNA, 120 bp, Artificial Sequence
  ENSG00000139998_35 (sequence is synthesized)
gctgtggagccttgggaagccatttgaatcctctgggtccccagttcctgtagaatgagggctggacttacatccaatgtcctttccagctctgataccagtggtctaacccaaggaagc

SEQ ID NO: 357206 - DNA, 120 bp, Artificial Sequence
  ENSG00000139998_36 (sequence is synthesized)
accagtcttagccagagtgtcttctaccctaagctctccccgtgatacccttgaggtcagccatggcacttgggggagcctggcacctgcatccagtcggcccaccctgtccctagggct

SEQ ID NO: 357207 - DNA, 120 bp, Artificial Sequence
  ENSG00000139998_37 (sequence is synthesized)
ctggaattggtggtgggctggaggcagtgcagactctgtagggaaaattgggggggcaggcagcactcactggctgttctgcccatcctttgtccctagtacgcaccagaaggcgtccag

SEQ ID NO: 357208 - DNA, 120 bp, Artificial Sequence
  ENSG00000139998_38 (sequence is synthesized)
gcacttggagatgttcttatggccatctatcttttcaccctggtggaggccgtgaataggcattttccccatttaaagaaaaaatggggacgggggagggccgtgacacagtcacacaga

SEQ ID NO: 357209 - DNA, 79 bp, Artificial Sequence
  ENSG00000139998_39 (sequence is synthesized)
aagaaaaaagagaaaaggcatcaggtgttgactttaagatgaagaccatagaggtagacggcatcaaagtgcggataca

SEQ ID NO: 357210 - DNA, 120 bp, Artificial Sequence
  ENSG00000140006_0 (sequence is synthesized)
gccagaaagcagattttcacttgggaagagacgacccgtagtatgggatgtggtatgataccagcaactggtctattatatcatttaaaccacatggctatctaaagaggtatttggcta

SEQ ID NO: 357211 - DNA, 120 bp, Artificial Sequence
  ENSG00000140006_1 (sequence is synthesized)
ttataaataaaatagtgatgaacacgtgtacaggtgtttgtacggacataagttgtcatttctcttgagtaaatacctaaaagtgggcttgctggagttttactacccttggatgctgct

SEQ ID NO: 357212 - DNA, 120 bp, Artificial Sequence
  ENSG00000140006_2 (sequence is synthesized)
gttgacatggaaaagattgaggaacaatttgctaatctgcacattgttaaatgttccttaggaaccaaagagcccacttaccttcttggtatagacacatcaaagactgtccaagcagga

SEQ ID NO: 357213 - DNA, 120 bp, Artificial Sequence
  ENSG00000140006_3 (sequence is synthesized)
aaggaaaacttggttgctgttttatgttctaatggatcaatcagaatatatgataaagaaaggttaaatgtactacgagaatttagtggatatcctggacttcttaatggagtcagattt

SEQ ID NO: 357214 - DNA, 120 bp, Artificial Sequence
  ENSG00000140006_4 (sequence is synthesized)
gcaaattcctgtgacagtgtatattcagcatgtactgatggcactgtgaaatgctgggatgctcgagtagccagagaaaaacctgttcagctcttcaagggttacccttccaatattttt

SEQ ID NO: 357215 - DNA, 120 bp, Artificial Sequence
  ENSG00000140006_5 (sequence is synthesized)
atcagttttgatattaattgtaatgatcatattatttgtgctggtacagaaaaagttgatgatgatgcattgttggtgttttgggatgcaaggatgaattctcagaatttatctacaact

SEQ ID NO: 357216 - DNA, 120 bp, Artificial Sequence
  ENSG00000140006_6 (sequence is synthesized)
aaagactcacttggtgcatattcagagacacatagtgatgatgtcactcaagtacgtttccatcccagcaatcccaacatggtagtctcaggttcatctgatggcctggtaaatgtattt

SEQ ID NO: 357217 - DNA, 120 bp, Artificial Sequence
  ENSG00000140006_7 (sequence is synthesized)
atattgataatgaggaggatgcactggttacaacctgtaactcaatttcatcagtaagctgtattggttggtctgggaaaggttataaacagatttactgcatgacacatgatgaaggat

SEQ ID NO: 357218 - DNA, 120 bp, Artificial Sequence
  ENSG00000140006_8 (sequence is synthesized)
tttattggtgggatcttaatcatctggacactgatgaaccagttacacgtttgaacatccaggatgtcagagaagtagttaacatgaaagaagatgctttggactatttgattggtggcc

SEQ ID NO: 357219 - DNA, 120 bp, Artificial Sequence
  ENSG00000140006_9 (sequence is synthesized)
tatatcatgaaaagacagacacattgcatgttattggaggaacaaacaaaggaaggattcatttgatgaactgcagcatgtcaggactgacccatgtgactagccttcagggagggcatg

SEQ ID NO: 357220 - DNA, 120 bp, Artificial Sequence
  ENSG00000140006_10 (sequence is synthesized)
ctgctacagtccgttctttctgttggaatgtgcaagatgattctttgttgactggaggagaagatgcacagttgttactttggaaacctggagctatagagaagacctttacaaagaaag

SEQ ID NO: 357221 - DNA, 120 bp, Artificial Sequence
  ENSG00000140006_11 (sequence is synthesized)
agagtatgaaaatagcatcctctgtgcaccaacgagtacgagttcatagtaatgattcttataaaagaaggaaaaagcagtgataatgcatttggcactttgtttggtaggttttatagt

SEQ ID NO: 357222 - DNA, 120 bp, Artificial Sequence
  ENSG00000140006_12 (sequence is synthesized)
ttcaaatagtccttcttgtttactacccatggtagacatgtttaaagctttatgtaaaaacaagccagttagcaaacagtcctggaaaaatatggtgagaatggtttaattccggtcttc

SEQ ID NO: 357223 - DNA, 120 bp, Artificial Sequence
  ENSG00000140006_13 (sequence is synthesized)
acatattctaaaaaattttaaagcctctaagtataaaatcagtgagttgaaagtaaaatttcttatttaaagaacccatctgttaatgtagtaaatgttggctttaaagaaatagctccg

SEQ ID NO: 357224 - DNA, 120 bp, Artificial Sequence
  ENSG00000140006_14 (sequence is synthesized)
acttggtaaaacttaataaaacaggtggttggctgcattttttaagcccagttttttacattttaaattgtctttattgtgtataaaaccagattagactatattcttcatctgaggagc

SEQ ID NO: 357225 - DNA, 120 bp, Artificial Sequence
  ENSG00000140006_15 (sequence is synthesized)
atctatatgtttaatacacctaatgtattatgctggagtatttaaatgtaagtattttaatgagtaaatagaattaaccttttttacaaatgaaatgataggcatctatgtaaagtgaga

SEQ ID NO: 357226 - DNA, 120 bp, Artificial Sequence
  ENSG00000140006_16 (sequence is synthesized)
aaaatatgtttcgtaaatatttgcatctttaatattgttagtaagtagtaaacaggtgttttgctgattgaaaggaagttatcttggtaaattgagactcaaagtgaaatacaaaaatga

SEQ ID NO: 357227 - DNA, 120 bp, Artificial Sequence
  ENSG00000140006_17 (sequence is synthesized)
aaatatttataataggactcgacttggagaaattgctattcttcctgttgtccaaaccataaatctgaggataacctgggcttttctctttcctcttctcctaaccagtttttcaccaag

SEQ ID NO: 357228 - DNA, 120 bp, Artificial Sequence
  ENSG00000140006_18 (sequence is synthesized)
tcctgtgccatttcacctcctaacgtctgtcagctatccttttgcctttacctcaccactattaccctagagaagactttcattatttctcatctggattaccagctcgatctctaatct

SEQ ID NO: 357229 - DNA, 120 bp, Artificial Sequence
  ENSG00000140006_19 (sequence is synthesized)
gcttcagttcatccttcttgctacttctaggctaaacatcaaaaacagatctggtaggggcggggaaatgagggggaagaaacaaaaacgtgatggtgcctcatgctgcttaaaatcttc

SEQ ID NO: 357230 - DNA, 120 bp, Artificial Sequence
  ENSG00000140006_20 (sequence is synthesized)
agtacattgatgttttgatggcggactacataagcgttaaaaattgtgtttttcagaatctttaaaatataagacagtgctatctagtgaataaaaaaattagtttgaaagatatctgga

SEQ ID NO: 357231 - DNA, 120 bp, Artificial Sequence
  ENSG00000140006_21 (sequence is synthesized)
gaaatcgcattcataaaacaattggaagtgaaactattaaaacaatagggctttttaaaattaaaaatatttaaaattcaaaagtaattaatagtgttggaagatgtaggtgagaaaata

SEQ ID NO: 357232 - DNA, 120 bp, Artificial Sequence
  ENSG00000140006_22 (sequence is synthesized)
ttcctgaaagtagaactgaaagagacaaagagaaaagatgaaagccacagaagataaatacaggggtcaaaaccagactaacagttttagaaagtgaaaaaagttaaaaaagaaatgggg

SEQ ID NO: 357233 - DNA, 120 bp, Artificial Sequence
  ENSG00000140006_23 (sequence is synthesized)
gcagtgggttattagaaataacataaatggctggtatggtttgtctgtgtcctcacccaaatttcatctcgaattgtaatccccataatccccatgtgtctagggagagacctggtggga

SEQ ID NO: 357234 - DNA, 88 bp, Artificial Sequence
  ENSG00000140006_24 (sequence is synthesized)
cctgatagtggagggctctgcccctttaactcctcactctttctcctgaagccttgtgaagaaggtgctttgcttcccctttgcgttc

SEQ ID NO: 357235 - DNA, 120 bp, Artificial Sequence
  ENSG00000140006_25 (sequence is synthesized)
aagccttgtgaagaaggtgctttgcttcccctttgcgttcccccatgattgtaagtttcttgaggcctccctggccatgctgaactcttcagtcaattaaacactttcctttataaatta

SEQ ID NO: 357236 - DNA, 120 bp, Artificial Sequence
  ENSG00000140009_0 (sequence is synthesized)
tttcagtttctccagctgctggctttttggacacccactcccccgccaggaggcagttgcaagcgcggaggctgcgagaaataactgcctcttgaaacttgcagggcgaagagcaggcgg

SEQ ID NO: 357237 - DNA, 120 bp, Artificial Sequence
  ENSG00000140009_1 (sequence is synthesized)
cgagcgctgggccggggagggaccacccgagctgcgacgggctctggggctgcggggcagggctggcgcccggagcctgagctgcaggaggtgcgctcgctttcctcaacaggtggcggc

SEQ ID NO: 357238 - DNA, 120 bp, Artificial Sequence
  ENSG00000140009_2 (sequence is synthesized)
ggggcgcgcgccgggagaccccccctaatgcgggaaaagcacgtgtccgcattttagagaaggcaaggccggtgtgtttatctgcaagccattatacttgcccacgaatctttgagaaca

SEQ ID NO: 357239 - DNA, 120 bp, Artificial Sequence
  ENSG00000140009_3 (sequence is synthesized)
ttataatgacctttgtgcctcttcttgcaaggtgttttctcagctgttatctcaagacatggatataaaaaactcaccatctagccttaattctccttcctcctacaactgcagtcaatc

SEQ ID NO: 357240 - DNA, 120 bp, Artificial Sequence
  ENSG00000140009_4 (sequence is synthesized)
catcttacccctggagcacggctccatatacataccttcctcctatgtagacagccaccatgaatatccagccatgacattctatagccctgctgtgatgaattacagcattcccagcaa

SEQ ID NO: 357241 - DNA, 120 bp, Artificial Sequence
  ENSG00000140009_5 (sequence is synthesized)
tgtcactaacttggaaggtgggcctggtcggcagaccacaagcccaaatgtgttgtggccaacacctgggcacctttctcctttagtggtccatcgccagttatcacatctgtatgcgga

SEQ ID NO: 357242 - DNA, 120 bp, Artificial Sequence
  ENSG00000140009_6 (sequence is synthesized)
acctcaaaagagtccctggtgtgaagcaagatcgctagaacacaccttacctgtaaacagagagacactgaaaaggaaggttagtgggaaccgttgcgccagccctgttactggtccagg

SEQ ID NO: 357243 - DNA, 120 bp, Artificial Sequence
  ENSG00000140009_7 (sequence is synthesized)
ttcaaagagggatgctcacttctgcgctgtctgcagcgattacgcatcgggatatcactatggagtctggtcgtgtgaaggatgtaaggccttttttaaaagaagcattcaaggacataa

SEQ ID NO: 357244 - DNA, 120 bp, Artificial Sequence
  ENSG00000140009_8 (sequence is synthesized)
caaatcagtgtacaatcgataaaaaccggcgcaagagctgccaggcctgccgacttcggaagtgttacgaagtgggaatggtgaagtgtggctcccggagagagagatgtgggtaccgcc

SEQ ID NO: 357245 - DNA, 120 bp, Artificial Sequence
  ENSG00000140009_9 (sequence is synthesized)
ttgtgcggagacagagaagtgccgacgagcagctgcactgtgccggcaaggccaagagaagtggcggccacgcgccccgagtgcgggagctgctgctggacgccctgagccccgagcagc

SEQ ID NO: 357246 - DNA, 120 bp, Artificial Sequence
  ENSG00000140009_10 (sequence is synthesized)
tagtgctcaccctcctggaggctgagccgccccatgtgctgatcagccgccccagtgcgcccttcaccgaggcctccatgatgatgtccctgaccaagttggccgacaaggagttggtac

SEQ ID NO: 357247 - DNA, 120 bp, Artificial Sequence
  ENSG00000140009_11 (sequence is synthesized)
acatgatcagctgggccaagaagattcccggctttgtggagctcagcctgttcgaccaagtgcggctcttggagagctgttggatggaggtgttaatgatggggctgatgtggcgctcaa

SEQ ID NO: 357248 - DNA, 120 bp, Artificial Sequence
  ENSG00000140009_12 (sequence is synthesized)
ttgaccaccccggcaagctcatctttgctccagatcttgttctggacagggatgaggggaaatgcgtagaaggaattctggaaatctttgacatgctcctggcaactacttcaaggtttc

SEQ ID NO: 357249 - DNA, 120 bp, Artificial Sequence
  ENSG00000140009_13 (sequence is synthesized)
gagagttaaaactccaacacaaagaatatctctgtgtcaaggccatgatcctgctcaattccagtatgtaccctctggtcacagcgacccaggatgctgacagcagccggaagctggctc

SEQ ID NO: 357250 - DNA, 120 bp, Artificial Sequence
  ENSG00000140009_14 (sequence is synthesized)
acttgctgaacgccgtgaccgatgctttggtttgggtgattgccaagagcggcatctcctcccagcagcaatccatgcgcctggctaacctcctgatgctcctgtcccacgtcaggcatg

SEQ ID NO: 357251 - DNA, 120 bp, Artificial Sequence
  ENSG00000140009_15 (sequence is synthesized)
cgagtaacaagggcatggaacatctgctcaacatgaagtgcaaaaatgtggtcccagtgtatgacctgctgctggagatgctgaatgcccacgtgcttcgcgggtgcaagtcctccatca

SEQ ID NO: 357252 - DNA, 120 bp, Artificial Sequence
  ENSG00000140009_16 (sequence is synthesized)
cggggtccgagtgcagcccggcagaggacagtaaaagcaaagagggctcccagaacccacagtctcagtgacgcctggccctgaggtgaactggcccacagaggtcacaggctgaagcgt

SEQ ID NO: 357253 - DNA, 120 bp, Artificial Sequence
  ENSG00000140009_17 (sequence is synthesized)
ggcctaaagaaaaatcttgggtaacattttcacttcagtttccctctgggatcattgtaatccatgaaaaaaataattttaaagaaagagttaaaatactttgaagttagttatgtggtt

SEQ ID NO: 357254 - DNA, 120 bp, Artificial Sequence
  ENSG00000140009_18 (sequence is synthesized)
aaaaaccaccttcctttctattatcaatccaacaatttgataactgtaaacgctaaagtgaagacggattctcttcagatggtctccttaactgcccagggcttgcagatgtctcaccca

SEQ ID NO: 357255 - DNA, 120 bp, Artificial Sequence
  ENSG00000140009_19 (sequence is synthesized)
tgaggggcaccaatgtagaaagctgaggcttcatctactgatgagcttcactggtttcccctgaggtttgtgctttggcagagaaggggaggaggggactgggattgtgtggtcagctgt

SEQ ID NO: 357256 - DNA, 120 bp, Artificial Sequence
  ENSG00000140009_20 (sequence is synthesized)
gcctgccaacagatgcaggttaggaactgtgttcagtatcttccaataagaaaggggaaatgccgatgcctatcctctttgtttaggtagaaagtaaaatgctactggacttaaatgggc

SEQ ID NO: 357257 - DNA, 120 bp, Artificial Sequence
  ENSG00000140009_21 (sequence is synthesized)
gatgccagttaactgtcgagaggggacgctccctcctcgtaggcgtccacactggagaaggaataagatgggcgattgcctgggaagcctgacagggcggcggcagctgggatgctggag

SEQ ID NO: 357258 - DNA, 120 bp, Artificial Sequence
  ENSG00000140009_22 (sequence is synthesized)
aggactggccccttgagttactgagtccgatgaatgtgcttgctctgctggaggaaccgcgctcaggttacagtcatcccaatatggttctgaagccattatacttgcccacgaatcttt

SEQ ID NO: 357259 - DNA, 120 bp, Artificial Sequence
  ENSG00000140009_23 (sequence is synthesized)
atgagatcccaccaaaggaacaggtttaggtggagacaaccaaataccgatgcctaggacactgcagtgtttagaattcaaggagatgagaaggaaacaggagggaagattgaaaagaag

SEQ ID NO: 357260 - DNA, 120 bp, Artificial Sequence
  ENSG00000140009_24 (sequence is synthesized)
agtccagtgtgttatgaggaaaaccccaagagcatgctgccttacaagacaggtgaaaaatgtgttctgtgaaagaaagagtaattaactgttaaatgttacagactgatcaaataaaat

SEQ ID NO: 357261 - DNA, 120 bp, Artificial Sequence
  ENSG00000140009_25 (sequence is synthesized)
gaagactgagaatggcctgtttgtaagagggagacatcaacctgttgtggaaaagaatgatcacttaaagtctttagaaattctgaaccaactctctagcaggtgatccttgttagaatt

SEQ ID NO: 357262 - DNA, 120 bp, Artificial Sequence
  ENSG00000140009_26 (sequence is synthesized)
tgagcccttaacgctatccaggactggaggttgaagggacgatagagggagcaggaggagaatgcacatggattaaggagcgagaacacagaaatcctgggctctcttctcccagccaca

SEQ ID NO: 357263 - DNA, 120 bp, Artificial Sequence
  ENSG00000140009_27 (sequence is synthesized)
aggttaggttgaaaaacagagcagatggaggtagtttgtagcctacaggtgccctgaatgaagcttccacagtgctaaagtggaagaacgagggactccaagggaaggattcaaggctgg

SEQ ID NO: 357264 - DNA, 120 bp, Artificial Sequence
  ENSG00000140009_28 (sequence is synthesized)
gcccatgcacctgtgtaattcagaagagaccccagaggagatcagcgccctctaattagccctgtatctgggctctacaggacagacatgcctccatttatgcaacaaataagaacagca

SEQ ID NO: 357265 - DNA, 120 bp, Artificial Sequence
  ENSG00000140009_29 (sequence is synthesized)
tctcatgacagtggagaaaacatgggatgtgcaggtagggttttgttttgcctcttggtagtttctttcctacggaaaattctccctctgatctttccaagtcaaaggcttcagcaaaca

SEQ ID NO: 357266 - DNA, 120 bp, Artificial Sequence
  ENSG00000140009_30 (sequence is synthesized)
tttgttgaacgcgtggattgtgctaggtgggtgttatggaccatggagaatgctagagatgtaagacatgcgctgtccaatcgcagcgcaggttgtgttgacagccattatacttgccca

SEQ ID NO: 357267 - DNA, 75 bp, Artificial Sequence
  ENSG00000140009_31 (sequence is synthesized)
aaggcaaaggttgcagtgagccgagattgggccaccgcactccagcctgggtgactgacagagtgagactctgtc

SEQ ID NO: 357268 - DNA, 120 bp, Artificial Sequence
  ENSG00000140009_32 (sequence is synthesized)
gagatggggagaaaagcaattcattcatttgaagttatcttagtgccaagagtcatgtgaaaatgtcccttgcatgtgggcaatgaaagatttgcagacgatataaaacccagactacct

SEQ ID NO: 357269 - DNA, 120 bp, Artificial Sequence
  ENSG00000140009_33 (sequence is synthesized)
cataaaagagttttgggaatacactgagctttgagtgaaagaagctgcagtggcctccctggagatggggagcaaaccagcttaaaggcccttatcctgaggaagagacaaaaattgaca

SEQ ID NO: 357270 - DNA, 120 bp, Artificial Sequence
  ENSG00000140009_34 (sequence is synthesized)
tgcacaatattaagctttgaaatgcagaccacacttcctttcactgcaactttgacttgtcccgcatctctacttaagggcagaaaaggcctctcaaacactcacctcatttggaatgaa

SEQ ID NO: 357271 - DNA, 120 bp, Artificial Sequence
  ENSG00000140009_35 (sequence is synthesized)
gatcttttgaggcctgtcaacagccacgggaatgagcttggaagcagatcccacctcctccctcacacaagtcgagccttcagatgagcctgcagcctttgtcgacaccttgaccgcatt

SEQ ID NO: 357272 - DNA, 120 bp, Artificial Sequence
  ENSG00000140009_36 (sequence is synthesized)
ctcatgagagaccttgagccagagatacttagctaagccatgcccatggactcctgacccacagaaactgtgataataagtttgttgtttcaagctgctaacttatggagtaatatgtta

SEQ ID NO: 357273 - DNA, 120 bp, Artificial Sequence
  ENSG00000140009_37 (sequence is synthesized)
cacaaaaatagctaatatatagctcaaaactggaagcaacccaaatatctattaactggtagataaacaaactactcatttccaaacttatttccaaaactggaacactacttggcaatc

SEQ ID NO: 357274 - DNA, 120 bp, Artificial Sequence
  ENSG00000140009_38 (sequence is synthesized)
aaataattaactatgcattaagtgtaacaacctggatgaatctcaaaggcattatgttaagtgaaacaagtgagccacgtaagactacatactgtttgattccctctatatgatattcta

SEQ ID NO: 357275 - DNA, 120 bp, Artificial Sequence
  ENSG00000140009_39 (sequence is synthesized)
gaaaaggcaaaactatagtaataggaaacagtgagtgatcacctagggttgaagacaggtgaaaggggattgactgcaaagaggcaggaggaaacgtcttgggagatggagatgttcctt

SEQ ID NO: 357276 - DNA, 120 bp, Artificial Sequence
  ENSG00000140009_40 (sequence is synthesized)
atattgatggcggtggtggttacacaactgcacttttatcaaaacttacctaactgctacttaaaataggtgtattaatatttttactgtatgtaaattatacctcaataaatttgattt

SEQ ID NO: 357277 - DNA, 120 bp, Artificial Sequence
  ENSG00000140009_41 (sequence is synthesized)
ctttacagatggggagaaaagcaattcattcatttgaagttatcttagtgccaagagtcatgtgaaaatgtcccttgcatgtgggcaatgaaagatttgcagacgatataaaacccagac

SEQ ID NO: 357278 - DNA, 120 bp, Artificial Sequence
  ENSG00000140009_42 (sequence is synthesized)
gggatgggattatgtgctccacggagggtgaagtgatttgggaaaagtgtctgcaagttaaggaaaatgaatgcctgaaagggaatggggaatttgtcagttcacacacctgtaagcaaa

SEQ ID NO: 357279 - DNA, 120 bp, Artificial Sequence
  ENSG00000140009_43 (sequence is synthesized)
gatgggcacagagtgggcatggaaggaatgtcatgtggtatcttacaggctctgcatggcagccagtggtggctcatgggtttttcaattgctggggtttatagcctgtttatggagtcc

SEQ ID NO: 357280 - DNA, 120 bp, Artificial Sequence
  ENSG00000140009_44 (sequence is synthesized)
taaaaggggcagttcctcccctaacacgaactgccacccctgtttacaccacccagggctgaggccctgaggccactttttgtggagaggctaagacccgctcccctagatggcccctcg

SEQ ID NO: 357281 - DNA, 120 bp, Artificial Sequence
  ENSG00000140009_45 (sequence is synthesized)
agctggtgatgcgaagaagtgcacaaatgcttccctaagagttgttctttcggtggcatcaggaaattaaggataagacttaagagaagtggtggacccagcagatttaggaaggcaggg

SEQ ID NO: 357282 - DNA, 120 bp, Artificial Sequence
  ENSG00000140009_46 (sequence is synthesized)
ctgtaggtagggcatgtttctgatcaggaaacgtaattgtgtgtgctgatgaagagggtgtgcagtggtggctactgttggtacaatgatgctcagtgcttggtgtcacccacgatgagg

SEQ ID NO: 357283 - DNA, 120 bp, Artificial Sequence
  ENSG00000140009_47 (sequence is synthesized)
gtagccttgccctggagctggaggaggggaggggagggtggaaggtaattaactggtcactgaggaggcaagtctagaggctgtggagaaggacaatatacacctcgagaatcttaagtg

SEQ ID NO: 357284 - DNA, 120 bp, Artificial Sequence
  ENSG00000140009_48 (sequence is synthesized)
agatgaagacctctgcctttcccctttaatgattgctcagcacatagccatttgcagaacagatcctgtgtttgtagattccttcattgtgaatttatctgcttgctaaaatttatttgt

SEQ ID NO: 357285 - DNA, 120 bp, Artificial Sequence
  ENSG00000140009_49 (sequence is synthesized)
aaccccaaaatcaatatttgtggtgtttttgaggtcatgaacagagtggcagaaattttgagttgccctttatgtacagtcccagctgagatggaacaagcagctgctctcatactgtca

SEQ ID NO: 357286 - DNA, 120 bp, Artificial Sequence
  ENSG00000140009_50 (sequence is synthesized)
acaagtgtcctttacttggtctacttagtgccatggttttacatttttgtgcttttggtgacttcactgtttaaaatgcccccctggtgtggtgctgaagacctgtctagtgttcctcgg

SEQ ID NO: 357287 - DNA, 120 bp, Artificial Sequence
  ENSG00000140009_51 (sequence is synthesized)
tgtgaaaaagctgtgatgtgccttatggagaaagtatgtgttaagctttgctcgggtgtgagttatagtgctgctggccatgagttcaatgttaatgagtcaatggtatttatcacataa

SEQ ID NO: 357288 - DNA, 120 bp, Artificial Sequence
  ENSG00000140009_52 (sequence is synthesized)
atgtggccagaggcttgcaggaacctaaccctgtatttcccctatgagtgaggattcagtgttcacagtgactttacggaacataattaccgcaaacaatgaggattgattgtcctatgt

SEQ ID NO: 357289 - DNA, 120 bp, Artificial Sequence
  ENSG00000140009_53 (sequence is synthesized)
gtcaggccattgtaggtgtgtggtgggacacagaggctgacaagacatcgtccttgcccttgagcctaaattatcagggggagctggatgcacgagccatggataaatgggctgggggaa

SEQ ID NO: 357290 - DNA, 120 bp, Artificial Sequence
  ENSG00000140009_54 (sequence is synthesized)
gtgtcaggagcctgggcttcatctttctgctgtgtggtccctcatttggtgatggcaggcttggtcatgtaccatccttccctccaccttcccaactctcaggagtcggtgtgaggaagc

SEQ ID NO: 357291 - DNA, 120 bp, Artificial Sequence
  ENSG00000140009_55 (sequence is synthesized)
catagtttcccttgttagcagagggcacatttgaatgcagcgtttccacactcaatggcctcataggatctcagtgtggtctttcttactttccttcttccttcctcccctttgtgaaac

SEQ ID NO: 357292 - DNA, 120 bp, Artificial Sequence
  ENSG00000140009_56 (sequence is synthesized)
atcttaaaggttttggaatgaatggtggaaatctgacttggaagggctgcgaatcagaaaggggagaggaagtgacacgcttacagaagtgggctaacccttcttgtgtggcacacacta

SEQ ID NO: 357293 - DNA, 120 bp, Artificial Sequence
  ENSG00000140009_57 (sequence is synthesized)
cccttccctctgagagttgacctttgctgttttccggaccactccattgtaagattgaaaacccctgtggcaattgcgtacttacctcccaggcctgtggggactgatcatatcatatga

SEQ ID NO: 357294 - DNA, 120 bp, Artificial Sequence
  ENSG00000140009_58 (sequence is synthesized)
tgcttattctgtcaaaggccagagggactgtggttaagctgggatgtgagtcatgttctctccctgaccttgctgccagctgcacacagatttgtccctctcgatttgtattcacagagc

SEQ ID NO: 357295 - DNA, 120 bp, Artificial Sequence
  ENSG00000140009_59 (sequence is synthesized)
ctgccaataatttggggtatgtgtgtatgagcgtgtgatcattttcatgcaggactgtgggagatacaaatctcgctgcttctggagctgctcttccttaaacctgttgtcccatggggc

SEQ ID NO: 357296 - DNA, 120 bp, Artificial Sequence
  ENSG00000140009_60 (sequence is synthesized)
cagcgtgggtgctggagaaaggccgtgtttgcaggaatggggttctctcctgtgggtgtgggtgacagccacagtgtttccctggggcaatgtggatgcagtttccatcttgtacaacct

SEQ ID NO: 357297 - DNA, 120 bp, Artificial Sequence
  ENSG00000140009_61 (sequence is synthesized)
cataagtagcagccacaattgccccatcagtcaccacaagtagtcagggatactttgggctgtggatgtgtgcagtgtgctgttttatggatggatgagtagctatgcaccccagtgtgt

SEQ ID NO: 357298 - DNA, 120 bp, Artificial Sequence
  ENSG00000140009_62 (sequence is synthesized)
cagctctggggccacactgtatagccttgatgagtacgccccttgaacaagacccagtttgtgaactctccttaaagagaaatatttagggataattatttatagcaagaaagaattctt

SEQ ID NO: 357299 - DNA, 120 bp, Artificial Sequence
  ENSG00000140009_63 (sequence is synthesized)
ttacacttgagagctcttttaaaaatattttcttattggaaaatttatatggtgggcagggtgaaaaagaaacagtaaaaatattagttcttattccaagtggaacataaataggacatg

SEQ ID NO: 357300 - DNA, 120 bp, Artificial Sequence
  ENSG00000140009_64 (sequence is synthesized)
aagaagggcacctctgaaatgacaactttaactcaccttttaaaagatgtgaaatttccagttttggatacacggtgaatatgtaaaatgagtaacagcatactatggaagccagcaatt

SEQ ID NO: 357301 - DNA, 120 bp, Artificial Sequence
  ENSG00000140009_65 (sequence is synthesized)
aaataatcatgtttcattattgcagtaacgttttaaacaattaccttgtgatatgatattaaatatattttctttttgaaaatatgttcactttgggtagcacatcctgtatttactaag

SEQ ID NO: 357302 - DNA, 120 bp, Artificial Sequence
  ENSG00000140009_66 (sequence is synthesized)
tcattaggaagactgcattcagtgttaccaagactggtttttgctagtaagacctcgaataatccataattttgatattggtgcaattttactataagttgagcttagctgtttcagaaa

SEQ ID NO: 357303 - DNA, 120 bp, Artificial Sequence
  ENSG00000140009_67 (sequence is synthesized)
tgcttggacaagtacctagagaacacactgatgtctgtgttctgaggcagtctgaagttattcttagagactcagttacagctttagtaagatttagtacaggcaggataagcttggttt

SEQ ID NO: 357304 - DNA, 120 bp, Artificial Sequence
  ENSG00000140009_68 (sequence is synthesized)
cataggaaccagggaaccagtgttagtgtcagcttctttcctcctggtcagcctagaatcccccactcccaatagaggggtttggaagctggagagtaggaagtaagaggcaaagaaggc

SEQ ID NO: 357305 - DNA, 120 bp, Artificial Sequence
  ENSG00000140009_69 (sequence is synthesized)
agccttcagcaactcattatctgccagtgaaattctattaaatgtatttttaaaagagattaccaggtaacaaaaacataaaaaaccaaaacaaggccagatgtggtggctcacgcctgt

SEQ ID NO: 357306 - DNA, 86 bp, Artificial Sequence
  ENSG00000140009_70 (sequence is synthesized)
ccacttgagcccatgagtttgactccaggctgggcaacatggaaaccctgtcctacaaaagatacaaaaattagccaggcgtggtg

SEQ ID NO: 357307 - DNA, 66 bp, Artificial Sequence
  ENSG00000140009_71 (sequence is synthesized)
ttagccaggcgtggtggtgcaggcctatcaaggctgcagtccattgcactccagcctgggtgacag

SEQ ID NO: 357308 - DNA, 120 bp, Artificial Sequence
  ENSG00000140009_72 (sequence is synthesized)
ctcatctttgctccagatcttgttctggacaggtatgtaccctctggtcacagcgacccaggatgctgacagcagccggaagctggctcacttgctgaacgccgtgaccgatgctttggt

SEQ ID NO: 357309 - DNA, 120 bp, Artificial Sequence
  ENSG00000140015_0 (sequence is synthesized)
gcagttcccgagccccgtgtgcggcaccgccacagtctgggcagcggcggccgggggagcgctactaccatgaactgcctggtcctcctccccagagctgctcatccgggtcgggctgga

SEQ ID NO: 357310 - DNA, 120 bp, Artificial Sequence
  ENSG00000140015_1 (sequence is synthesized)
gacacagtcaggggaccccgtcgccgccgccgcgccccctcttctttcggctcaatcttctcttccaccttttcctcctcttcctccaccttctttgcctgcatccccccctcccccgcc

SEQ ID NO: 357311 - DNA, 120 bp, Artificial Sequence
  ENSG00000140015_2 (sequence is synthesized)
gcggatcctggccgctgctctccagacccaggatgccggggggcaagagagggctggtggcaccgcagaacacatttttggagaacatcgtcaggcgctccagtgaatcaagtttcttac

SEQ ID NO: 357312 - DNA, 120 bp, Artificial Sequence
  ENSG00000140015_3 (sequence is synthesized)
tgggaaatgcccagattgtggattggcctgtagtttatagtaatgacggtttttgtaaactctctggatatcatcgagctgacgtcatgcagaaaagcagcacttgcagttttatgtatg

SEQ ID NO: 357313 - DNA, 120 bp, Artificial Sequence
  ENSG00000140015_4 (sequence is synthesized)
gggaattgactgacaagaagaccattgagaaagtcaggcaaacttttgacaactacgaatcaaactgctttgaagttcttctgtacaagaaaaacagaacccctgtttggttttatatgc

SEQ ID NO: 357314 - DNA, 120 bp, Artificial Sequence
  ENSG00000140015_5 (sequence is synthesized)
aaattgcaccaataagaaatgaacatgaaaaggtggtcttgttcctgtgtactttcaaggatattacgttgttcaaacagccaatagaggatgattcaacaaaaggttggacgaaatttg

SEQ ID NO: 357315 - DNA, 120 bp, Artificial Sequence
  ENSG00000140015_6 (sequence is synthesized)
cccgattgacacgggctttgacaaatagccgaagtgttttgcagcagctcacgccaatgaataaaacagaggtggtccataaacattcaagactagctgaagttcttcagctgggatcag

SEQ ID NO: 357316 - DNA, 120 bp, Artificial Sequence
  ENSG00000140015_7 (sequence is synthesized)
atatccttcctcagtataaacaagaagcgccaaagacgccaccacacattattttacattattgtgcttttaaaactacttgggattgggtgattttaattcttaccttctacaccgcca

SEQ ID NO: 357317 - DNA, 120 bp, Artificial Sequence
  ENSG00000140015_8 (sequence is synthesized)
ttatggttccttataatgtttccttcaaaacaaagcagaacaacatagcctggctggtactggatagtgtggtggacgttatttttctggttgacatcgttttaaattttcacacgactt

SEQ ID NO: 357318 - DNA, 120 bp, Artificial Sequence
  ENSG00000140015_9 (sequence is synthesized)
tcgtggggcccggtggagaggtcatttctgaccctaagctcataaggatgaactatctgaaaacttggtttgtgatcgatctgctgtcttgtttaccttatgacatcatcaatgcctttg

SEQ ID NO: 357319 - DNA, 120 bp, Artificial Sequence
  ENSG00000140015_10 (sequence is synthesized)
aaaatgtggatgagggaatcagcagtctcttcagttctttaaaagtggtgcgtctcttacgactgggccgtgtggctaggaaactggaccattacctagaatatggagcagcagtcctcg

SEQ ID NO: 357320 - DNA, 120 bp, Artificial Sequence
  ENSG00000140015_11 (sequence is synthesized)
tgctcctggtgtgtgtgtttggactggtggcccactggctggcctgcatatggtatagcatcggagactacgaggtcattgatgaagtcactaacaccatccaaatagacagttggctct

SEQ ID NO: 357321 - DNA, 120 bp, Artificial Sequence
  ENSG00000140015_12 (sequence is synthesized)
accagctggctttgagcattgggactccatatcgctacaataccagtgctgggatatgggaaggaggacccagcaaggattcattgtacgtgtcctctctctactttaccatgacaagcc

SEQ ID NO: 357322 - DNA, 120 bp, Artificial Sequence
  ENSG00000140015_13 (sequence is synthesized)
ttacaaccataggatttggaaacatagctcctaccacagatgtggagaagatgttttcggtggctatgatgatggttggctctcttctttatgcaactatttttggaaatgttacaacaa

SEQ ID NO: 357323 - DNA, 120 bp, Artificial Sequence
  ENSG00000140015_14 (sequence is synthesized)
ttttccagcaaatgtatgccaacaccaaccgataccatgagatgctgaataatgtacgggacttcctaaaactctatcaggtcccaaaaggccttagtgagcgagtcatggattatattg

SEQ ID NO: 357324 - DNA, 120 bp, Artificial Sequence
  ENSG00000140015_15 (sequence is synthesized)
tctcaacatggtccatgtcaaaaggcattgatacagaaaaggtcctctccatctgtcccaaggacatgagagctgatatctgtgttcatctaaaccggaaggtttttaatgaacatcctg

SEQ ID NO: 357325 - DNA, 120 bp, Artificial Sequence
  ENSG00000140015_16 (sequence is synthesized)
cttttcgattggccagcgatgggtgtctgcgcgccttggcggtagagttccaaaccattcactgtgctcccggggacctcatttaccatgctggagaaagtgtggatgccctctgctttg

SEQ ID NO: 357326 - DNA, 120 bp, Artificial Sequence
  ENSG00000140015_17 (sequence is synthesized)
tggtgtcaggatccttggaagtcatccaggatgatgaggtggtggctattttagggaagggtgatgtatttggagacatcttctggaaggaaaccacccttgcccatgcatgtgcgaacg

SEQ ID NO: 357327 - DNA, 120 bp, Artificial Sequence
  ENSG00000140015_18 (sequence is synthesized)
tccgggcactgacgtactgtgacctacacatcatcaagcgggaagccttgctcaaagtcctggacttttatacagcttttgcaaactccttctcaaggaatctcactcttacttgcaatc

SEQ ID NO: 357328 - DNA, 120 bp, Artificial Sequence
  ENSG00000140015_19 (sequence is synthesized)
tgaggaaacggatcatctttcgtaagatcagtgatgtgaagaaagaggaggaggagcgcctccggcagaagaatgaggtgaccctcagcattcccgtggaccacccagtcagaaagctct

SEQ ID NO: 357329 - DNA, 120 bp, Artificial Sequence
  ENSG00000140015_20 (sequence is synthesized)
tccagaagttcaagcagcagaaggagctgcggaatcagggctcaacacagggtgaccctgagaggaaccaactccaggtagagagccgctccttacagaatggagcctccatcaccggaa

SEQ ID NO: 357330 - DNA, 120 bp, Artificial Sequence
  ENSG00000140015_21 (sequence is synthesized)
ccagcgtggtgactgtgtcacagattactcccattcagacgtctctggcctatgtgaaaaccagtgaatcccttaagcagaacaaccgtgatgccatggaactcaagcccaacggcggtg

SEQ ID NO: 357331 - DNA, 120 bp, Artificial Sequence
  ENSG00000140015_22 (sequence is synthesized)
ctgaccaaaaatgtctcaaagtcaacagcccaataagaatgaagaatggaaatggaaaagggtggctgcgactcaagaataatatgggagcccatgaggagaaaaaggaagactggaata

SEQ ID NO: 357332 - DNA, 120 bp, Artificial Sequence
  ENSG00000140015_23 (sequence is synthesized)
atgtcactaaagctgagtcaatggggctattgtctgaggaccccaagagcagtgattcagagaacagtgtgaccaaaaacccactaagaaaaacagattcttgtgacagtggaattacaa

SEQ ID NO: 357333 - DNA, 120 bp, Artificial Sequence
  ENSG00000140015_24 (sequence is synthesized)
aaagtgaccttcgtttggataaggctggggaggcccgaagtccgctagagcacagtcccatccaggctgatgccaagcaccccttttatcccatccccgagcaggccttacagaccacac

SEQ ID NO: 357334 - DNA, 120 bp, Artificial Sequence
  ENSG00000140015_25 (sequence is synthesized)
tgcaggaagtcaaacacgaactcaaagaggacatccagctgctcagctgcagaatgactgccctagaaaagcaggtggcagaaattttaaaaatactgtcggaaaaaagcgtaccccagg

SEQ ID NO: 357335 - DNA, 120 bp, Artificial Sequence
  ENSG00000140015_26 (sequence is synthesized)
cctcatctcccaaatcccaaatgccactccaagtacccccccagataccatgtcaggatatttttagtgtctcaaggcctgaatcacctgaatctgacaaagatgaaatccacttttaat

SEQ ID NO: 357336 - DNA, 120 bp, Artificial Sequence
  ENSG00000140015_27 (sequence is synthesized)
ttgttaatatattaaaacagtatatacatatgtgtgtatatacagtatatacatatatatattttcacttgctttcaagatgatgaccacacatggattttgatatgtaaatattgcatg

SEQ ID NO: 357337 - DNA, 120 bp, Artificial Sequence
  ENSG00000140015_28 (sequence is synthesized)
atgtaaatattgcatgtccagctggattctggcctgccaaagaagatgatgattaaaaacatagatattgcttgtatattatgcagttgactgcatgcacactttacatttatttataat

SEQ ID NO: 357338 - DNA, 120 bp, Artificial Sequence
  ENSG00000140015_29 (sequence is synthesized)
ctctattctataataaaagagtatgatttttgttacccaaggcaatgtaatatttgaagaatcagggtccaacctgccaatgttgccatgacaaatttgatctcaggctgagtatgtata

SEQ ID NO: 357339 - DNA, 120 bp, Artificial Sequence
  ENSG00000140015_30 (sequence is synthesized)
tcgagctatcattttctcactgttctgttaagttaaaagtatagattaatgccaaggaagagttcagtcttttaaactattagtaccatgttatgatctctttccataggatatttttct

SEQ ID NO: 357340 - DNA, 120 bp, Artificial Sequence
  ENSG00000140015_31 (sequence is synthesized)
gtaacttagtgttaggttcttttcccctacaggcagtgtttgctccatttaaatgactgtttagttgcctaagtcagataagagtgtgggatattgaaaacttattgctatgggttttgt

SEQ ID NO: 357341 - DNA, 120 bp, Artificial Sequence
  ENSG00000140015_32 (sequence is synthesized)
gcatgaattacatttttgatcaactatacctctcgttttttaacattatacttagatagtaatcattagctcttatgtaaggaaatccctactccctccttcttggagaacagctgccat

SEQ ID NO: 357342 - DNA, 120 bp, Artificial Sequence
  ENSG00000140015_33 (sequence is synthesized)
cttgtaagctgacattatcaacatcataaatactaaactattaatatagagtatgttattatagaaacactgcaccacagggtataagggccttttgacaattcatgtaagagatgctga

SEQ ID NO: 357343 - DNA, 120 bp, Artificial Sequence
  ENSG00000140015_34 (sequence is synthesized)
atttccaaagctgataaatgctctaaatttgtatttccaaaacatgttcaagagtgacattgaaaggcttgttagcaaagaaacatacaaaaaataaagcatttaagtaatcatatcaaa

SEQ ID NO: 357344 - DNA, 120 bp, Artificial Sequence
  ENSG00000140015_35 (sequence is synthesized)
atgctaactattatggtataaaataaaaaagaatgtaaacagatagataaatttttgtggcatgtatataacttagaaagaatgaaacactggtacggattgttgacacatgaatcctag

SEQ ID NO: 357345 - DNA, 120 bp, Artificial Sequence
  ENSG00000140015_36 (sequence is synthesized)
tgtttgtagtgataacacatgaaatgtggtaaaacaaacaaaccaaccaaccaagaagtagacattaagttgctcgactcagataactgcttttctatcattttattgtggttatagttt

SEQ ID NO: 357346 - DNA, 120 bp, Artificial Sequence
  ENSG00000140015_37 (sequence is synthesized)
tttaaagctttttgcacacagttctactgctggacttctgctgagttgattcaataagctattgtggctcaggcaggtccatttgtgaaagggggatactaaagactgaattttagtctt

SEQ ID NO: 357347 - DNA, 120 bp, Artificial Sequence
  ENSG00000140015_38 (sequence is synthesized)
ttgaattcaaatcctctttgtagaaagtgcctattatcaagtttttaaaaaaagtcacaaagagttgtcctgtatatagctagtcccttaaatgataaggattgagaataaaatacacat

SEQ ID NO: 357348 - DNA, 120 bp, Artificial Sequence
  ENSG00000140015_39 (sequence is synthesized)
tcacttgtaagaacccaggagaacttatttcttttgactaaactgtattttaggaagtcgttcagggaagcatacttttcagtcagtgcatgcacagcatttaatatggggagcagggga

SEQ ID NO: 357349 - DNA, 120 bp, Artificial Sequence
  ENSG00000140015_40 (sequence is synthesized)
gttagtgtttgcatgaagttgaaaaaaatgtgtgagtaatttatatattacgggaccatctgtacatatatgttaacaatatgcaaaagatgatggcaaaatcgaaggagatatcttgat

SEQ ID NO: 357350 - DNA, 120 bp, Artificial Sequence
  ENSG00000140015_41 (sequence is synthesized)
ctattatacccatttgtatgagcttttctatctcccagtattcccaaccaaagccactagaactgaaagacatgttatcacattcagacttgagaagtgcaaaacagtgatttataaaaa

SEQ ID NO: 357351 - DNA, 120 bp, Artificial Sequence
  ENSG00000140015_42 (sequence is synthesized)
cagttgctattttagaatttctattgaacttcacatgcccacaagatgtgcctctttaatctaggagtctcaaaacatatgagccatgggctccattttcctttctttatgcgtataact

SEQ ID NO: 357352 - DNA, 120 bp, Artificial Sequence
  ENSG00000140015_43 (sequence is synthesized)
tccattaaccataatggaagttttcaggggaacacgtctccatgtaatgctacaatatctacctaccacaaacacaagaaaatgaaataattatggagtaaagaatcagccttgaaattg

SEQ ID NO: 357353 - DNA, 120 bp, Artificial Sequence
  ENSG00000140015_44 (sequence is synthesized)
gaattttgttgctttcatggtgaggatgatatctttttcgtgacctctgacatttattgaatttcagggtatttttctatttgtttaagtcaagtttggcttaagcttttaaaggtgaat

SEQ ID NO: 357354 - DNA, 120 bp, Artificial Sequence
  ENSG00000140015_45 (sequence is synthesized)
gtgtggttaaaataagaatctgattatagaagttgttagtttaactttagccagtgcttcaaaactaactattggtgtaaagctataaaagaatgactgtgaacaacatgatgatttgaa

SEQ ID NO: 357355 - DNA, 120 bp, Artificial Sequence
  ENSG00000140015_46 (sequence is synthesized)
gttctaattcatggctttgcatattagtggtgcaaatatttactgtgttctgacattgacgtagagtttcacctaatcgacctacaatgttattgttcatatatgtgagaaacataatgg

SEQ ID NO: 357356 - DNA, 120 bp, Artificial Sequence
  ENSG00000140015_47 (sequence is synthesized)
tgaattactccagattgttaggaaggagggaaagtatcaattgtttaattatggtgcagttatcatagtgtcttttcagccatctctgttctctgtgtgcatgatatgaagaggtgctga

SEQ ID NO: 357357 - DNA, 120 bp, Artificial Sequence
  ENSG00000140015_48 (sequence is synthesized)
atgcaccctgctgttttcagcaggaatgcatgttttcagcaaacattgtatatagagtagtcttttaggttcccagattccacaaatcttagcagttgaatttactcagatttgaatgaa

SEQ ID NO: 357358 - DNA, 120 bp, Artificial Sequence
  ENSG00000140015_49 (sequence is synthesized)
gggagaatatttgctttaatacatgcaataatgataaaatcatgttctatgttgcctcaactagcacatagacagtagatgctcttttgaggaccagataactgcatgttttattcctac

SEQ ID NO: 357359 - DNA, 120 bp, Artificial Sequence
  ENSG00000140015_50 (sequence is synthesized)
actgtatagatgctcttggtgcatccagaataaaaattttaatattatatttctaaataatatattaataggagtaaatggatatgtattagaaatccaaacattttccaaagcaattta

SEQ ID NO: 357360 - DNA, 120 bp, Artificial Sequence
  ENSG00000140015_51 (sequence is synthesized)
cacaccttcaatatttttctatgatgttattaataggtaagatcagatgctgtatcctcgacaggtggttgtaacaaaatagcaaaagtcaaattagaatggaaatgtgagtgatgtatc

SEQ ID NO: 357361 - DNA, 120 bp, Artificial Sequence
  ENSG00000140015_52 (sequence is synthesized)
ataatggcaggttttatcagtctgtatcaggatattgttgcactaaatgtgatctagcagatggaagagattatgataaaaagcaaataggcacacaaaagccagatgacaataccaaag

SEQ ID NO: 357362 - DNA, 120 bp, Artificial Sequence
  ENSG00000140015_53 (sequence is synthesized)
ctatatgaatggtactgaaaatggttcaggcacagtggttgaattgaatgacgtggttgaatacaggcccatgcttcattgttaaaatggaaaatttttatgacactagttgcatcttgc

SEQ ID NO: 357363 - DNA, 120 bp, Artificial Sequence
  ENSG00000140015_54 (sequence is synthesized)
attaagtataggactaaaaatgtcctaagtattttttacaaacaactttatgtatatcagagaaaaaaatggaaaatctggggtttgaaattgctctagaaaaaatgtgtacttctgttg

SEQ ID NO: 357364 - DNA, 120 bp, Artificial Sequence
  ENSG00000140015_55 (sequence is synthesized)
tactcaacactttaataggaaaattagttgtgaccgctaactaaagtaccattatcaaaattaaccttattggagcccaaatgaaaatcacattttcccttctgtttaaggagattttgt

SEQ ID NO: 357365 - DNA, 120 bp, Artificial Sequence
  ENSG00000140015_56 (sequence is synthesized)
tcaccctgtgatatctggtccatttgatatcttattttaaatagctaaagtcatttggaattttttttaatattagccttcagagcagtgactgttttgaagtgtgcagtggcagatatt

SEQ ID NO: 357366 - DNA, 120 bp, Artificial Sequence
  ENSG00000140015_57 (sequence is synthesized)
tgtgaaattattcatcatatttctaatgaattccactatcttgtataatttttatcttttaagcaattttctatgagtttgttttccaaaattccatgtaggtaatgagaacatttatct

SEQ ID NO: 357367 - DNA, 120 bp, Artificial Sequence
  ENSG00000140015_58 (sequence is synthesized)
agaatgtgcatatcatacatggataactttcaaatatgaatattttataatcatgtgaatgttgtgctataattttttctattaggtgtaaaagtatttctcttctcatcttaatggaaa

SEQ ID NO: 357368 - DNA, 120 bp, Artificial Sequence
  ENSG00000140015_59 (sequence is synthesized)
gggggaaaagacaaaaacagtcttttggaaaacaccttaagtcttagtatctgagctttgtcttgtgttctgaatttagctttaccacaaactagaagtgtaattatgggcaagttaacc

SEQ ID NO: 357369 - DNA, 120 bp, Artificial Sequence
  ENSG00000140015_60 (sequence is synthesized)
tttcctagtgtaccaaatggtaccatttccccgccaataaataagaaaacaaagataacagctgttgcttccttatatcaacatgctattggtcaatgaaaaaattatctttcttgcagg

SEQ ID NO: 357370 - DNA, 120 bp, Artificial Sequence
  ENSG00000140015_61 (sequence is synthesized)
tgaaaatcacattatgacaagtgatcactttttcattctttcatagaagagtatccacgatgtactctctatcaaaatattcttctagattttagaagagatttcagggattgacggtga

SEQ ID NO: 357371 - DNA, 120 bp, Artificial Sequence
  ENSG00000140015_62 (sequence is synthesized)
tgtgatttttatctaaatattcttttaggttttagaagagatttatctggtcagaggttaatggagagaggcatagtttgctagtggcaggtaagcataaaacttcatacttatgtggga

SEQ ID NO: 357372 - DNA, 120 bp, Artificial Sequence
  ENSG00000140015_63 (sequence is synthesized)
atttagaactacaaatcaaataaacgtggaaagaatgaagctcctttgacagaagagagagagaagagaaagataggtaaattttgtgatttttcttatttctacttaatcatactgctt

SEQ ID NO: 357373 - DNA, 120 bp, Artificial Sequence
  ENSG00000140015_64 (sequence is synthesized)
ggcagaaattctcaattttgtgaaaaaattggtaagtggccaaggtatagagtagttcaccaatgtatctatgtaacaaaactgaatgtgtaccccttaaatttatacaaataaaaacta

SEQ ID NO: 357374 - DNA, 120 bp, Artificial Sequence
  ENSG00000140015_65 (sequence is synthesized)
gagtagttcatccttcaactttttatattaaaataatcatgacctgttcaagatatatgattccacatgggcagacactcttataacaaaattcttaactatgtgctatgtgttgtaagt

SEQ ID NO: 357375 - DNA, 120 bp, Artificial Sequence
  ENSG00000140015_66 (sequence is synthesized)
tttggcctatattctgacttgagattttctatcacttcatttgtaggataagacccctgtgtttgcattctttatgagggtcaggaccactgaggatttggactgggaactagaaagatg

SEQ ID NO: 357376 - DNA, 120 bp, Artificial Sequence
  ENSG00000140015_67 (sequence is synthesized)
atgaaggcaagggttgagaaaagactgattagaatctatctgcttctttactcttaggcttagaagttaaataagttaactaagcttatatttaccaaggtctcactatgataagcattt

SEQ ID NO: 357377 - DNA, 120 bp, Artificial Sequence
  ENSG00000140015_68 (sequence is synthesized)
tatttaggttatcaaatttaattcttgcagcaaccccatgaaggtataggttaaggaacttgtccaggatggcatacttgttacatggtaaagttgagtttctaacacaggcagtcagac

SEQ ID NO: 357378 - DNA, 120 bp, Artificial Sequence
  ENSG00000140015_69 (sequence is synthesized)
cttagggagaaacctttattttgtagaatactgacattacaagaactatctagttcaaccatctagtctaggtttttccagacacatacttttaaagatttcttaaaataattcttaaaa

SEQ ID NO: 357379 - DNA, 120 bp, Artificial Sequence
  ENSG00000140015_70 (sequence is synthesized)
attgcactcgataatgtgaatgtaaatgtttggtttttcttgataggtcagagtcaatgacagagtttgaaatcatactgtcttaagcaaaaggtgccctgtcccaacagtggaattttc

SEQ ID NO: 357380 - DNA, 120 bp, Artificial Sequence
  ENSG00000140015_71 (sequence is synthesized)
ctttacttctcctaacagttgaaagacatcggccaaagtaaactgtcaaatgtggtatgtttgatatatggtcactggtatcaacattttcttttccagttgaattttaacctaaagagg

SEQ ID NO: 357381 - DNA, 120 bp, Artificial Sequence
  ENSG00000140015_72 (sequence is synthesized)
taatgcctaatggttaaggaaagcaagagtcattcaggattttttttctataatttctttttctttttaatagtgggatttggatgagactccagaatttatttttaaaatttatttttt

SEQ ID NO: 357382 - DNA, 120 bp, Artificial Sequence
  ENSG00000140015_73 (sequence is synthesized)
gactcattgggttttaagtagattattcagatatttttattgattgcactgatgttggcttcttggccaaaccactattaaatacattatccaaatgaactatttctgtttagaatggca

SEQ ID NO: 357383 - DNA, 120 bp, Artificial Sequence
  ENSG00000140015_74 (sequence is synthesized)
acttgtatccttatttccaaaattaatgagctcacagtatgtatatttacttcagagagtttcaataattttctctaatgaaaaaatgttaattttctgaatgtgatttatttgttctac

SEQ ID NO: 357384 - DNA, 120 bp, Artificial Sequence
  ENSG00000140015_75 (sequence is synthesized)
cctttgagatttctaaagcaagtgtcttgagataaggagaaaaaaacaagatattacaacactacatgctggaatcttcagcccaaaccatcttgttttcacttggctaataactgagcc

SEQ ID NO: 357385 - DNA, 120 bp, Artificial Sequence
  ENSG00000140015_76 (sequence is synthesized)
agaggtaatcatagaaaggaagaatcctacttttaaaataatgactgtgaaggaccccactgacaccatccaaagctttttatagtcagctcacttccatcctggcttttacattaccac

SEQ ID NO: 357386 - DNA, 120 bp, Artificial Sequence
  ENSG00000140015_77 (sequence is synthesized)
tgcatgattatttaaatgaggtcatgtcttgtactacttgtaaaggcacttggtcaaagaagagtaaaccaaaaagtgcagcttatgaccagagttataactgaggaaaaaggagtgtgg

SEQ ID NO: 357387 - DNA, 120 bp, Artificial Sequence
  ENSG00000140015_78 (sequence is synthesized)
agaagggacagcagttgcttccttttaatgagttttctgtatgtggtgccttttaaatagcttttgtttatttgtttttaagatgacacattgtcattaaggttttaacaaaaacctttg

SEQ ID NO: 357388 - DNA, 120 bp, Artificial Sequence
  ENSG00000140015_79 (sequence is synthesized)
gaagcagtttgaaagcttgtcaaatgctggggccttctttagaaataagtgttctcccaccaaccaatgagtttagaacctctggttctgacctacaaacccaatcccctaagcacttgg

SEQ ID NO: 357389 - DNA, 120 bp, Artificial Sequence
  ENSG00000140015_80 (sequence is synthesized)
ctggttgggctgcattttgatgggaggaaacaaaaagatctgatcactctctctcattcatgcggaatcactgactgttgaatgaccaaagcagtcaaagccaaaatattcaccttgaag

SEQ ID NO: 357390 - DNA, 120 bp, Artificial Sequence
  ENSG00000140015_81 (sequence is synthesized)
cttcaataaaccagattgagtatccataataactaatttaagtaattttatccccattctctgctaaatcatatttcataatataaaatgtaaccacttccctctatccaaagcttttgg

SEQ ID NO: 357391 - DNA, 120 bp, Artificial Sequence
  ENSG00000140015_82 (sequence is synthesized)
tcagactctccattgagttagagaaattggactttggcaaaaagcaacataaagattattgttgttcctagaaccattgttgccatggacccctcatttgctcctcaactttttcaacca

SEQ ID NO: 357392 - DNA, 120 bp, Artificial Sequence
  ENSG00000140015_83 (sequence is synthesized)
aattatagcgggaaagattcctgatgaagccaagactgcaaacaggaagaatacctagctagtaaactatgcaaaatcacaacaaagattcatttataattccatgttacagtgtttgat

SEQ ID NO: 357393 - DNA, 120 bp, Artificial Sequence
  ENSG00000140015_84 (sequence is synthesized)
agtcctaagtatttaatattggtatattatgtcacagccatgaactgtcaacttacacaaaatccaaacgcactttcatttaaaatcaagattagcctatttcattttcaggaaaaaaca

SEQ ID NO: 357394 - DNA, 120 bp, Artificial Sequence
  ENSG00000140015_85 (sequence is synthesized)
gttgtcagaattgcttttttgacctctgcagggatgttttcacattgctattcttatgaccctttatcagagagggaataagtgtagtgttcactttcatctccttagggttgactgcac

SEQ ID NO: 357395 - DNA, 120 bp, Artificial Sequence
  ENSG00000140015_86 (sequence is synthesized)
cagcatcttccatcaagcagtcgccttccaccttagaacctgttcacagttaataaagcaagggggaatatgcatttcatattaggaacagatttcttaagtgattgttatgaaaagtgg

SEQ ID NO: 357396 - DNA, 120 bp, Artificial Sequence
  ENSG00000140015_87 (sequence is synthesized)
aaaccagtttagaaccatttttttaccctaaaacatccattgtagtttgttgaaagagcaatgacttttagaagtgcttggtactcaaacaacacaaaatgtgcagattcacgatatatt

SEQ ID NO: 357397 - DNA, 120 bp, Artificial Sequence
  ENSG00000140015_88 (sequence is synthesized)
gaaaattatagagttctttttagtctatgttctagtgactttgtttacactagttgtggcattttgtatactacaatgtaaattctactataacactaatgttactatgggaattaattt

SEQ ID NO: 357398 - DNA, 120 bp, Artificial Sequence
  ENSG00000140015_89 (sequence is synthesized)
tgcaacttcttaaatgtttttgtcactgcaaccatattggtgagatattgggggtattaaaaatgcctctgcctttaagggttaattcaccagaaataattgattcatgcattgacaaag

SEQ ID NO: 357399 - DNA, 120 bp, Artificial Sequence
  ENSG00000140015_90 (sequence is synthesized)
gaaacaatgcaaaaatttcatgtgggatgtttttaataccattatgctaagcagtacttgttggcttttttcaaaatctgattcatgctaagcagatccttttttctacttaaacaaaga

SEQ ID NO: 357400 - DNA, 120 bp, Artificial Sequence
  ENSG00000140015_91 (sequence is synthesized)
tactgcaatgtataatatagaaattttgtatgtactgttgacctatcacctgactgctgacaggatgtgtgaaaatattttaactttgtgactttagggtcaattatgaaacaattgtga

SEQ ID NO: 357401 - DNA, 120 bp, Artificial Sequence
  ENSG00000140015_92 (sequence is synthesized)
tcaaaattcagttgcttctgggaagtttgtggtgattatcactttatttaacgtttgttctcaaaaaatggtcattttgaaaagtgaattggcaggtggaagcttttagcccaaaagaaa

SEQ ID NO: 357402 - DNA, 120 bp, Artificial Sequence
  ENSG00000140015_93 (sequence is synthesized)
tctgggtttcagcacaataaactgtatttcatcagggaggactaactttgctttttttcacactttatttaaatgtggatattttttcatgatacagaataaaatgtgcattttatggaa

SEQ ID NO: 357403 - DNA, 120 bp, Artificial Sequence
  ENSG00000140015_94 (sequence is synthesized)
cggggatggttctccatggcaaacgctctgtgaagggtgacctgctgggtgtgaaactgctgcacgacttcctacttcacccattcatctatccgagttttcacggagtccaggagaaag

SEQ ID NO: 357404 - DNA, 120 bp, Artificial Sequence
  ENSG00000140015_95 (sequence is synthesized)
tataaaagttaccttgaggagcaggagagtggaatggttaagactgtttggaatctgaccccttggatttgcatcctggacacacagttgtgtgacctaagggaaaccacttaaactctt

SEQ ID NO: 357405 - DNA, 120 bp, Artificial Sequence
  ENSG00000140015_96 (sequence is synthesized)
tatgcctcaatttgcttctctgtgataaaagaataatatgacctgtgtcctacagtagagaataataggtcctagctcgtaaaatgttctcattccatgacacttaaatgagaaaatacg

SEQ ID NO: 357406 - DNA, 120 bp, Artificial Sequence
  ENSG00000140015_97 (sequence is synthesized)
tgtgtggaagtgaccactttgctatatacagatattttattatcattttacaatgccattattttgttccatagtcaaaagtaaaataaaacaaatgtcaatttgtcttattctaatcct

SEQ ID NO: 357407 - DNA, 120 bp, Artificial Sequence
  ENSG00000140015_98 (sequence is synthesized)
cgtgagccaccgcgcccggccgaagactgaatttttgagcaaatgaaagacaccaacaaaatccaacacataaagattcacacttgaaacagattaatcaggaatcaagtttcttactgg

SEQ ID NO: 357408 - DNA, 120 bp, Artificial Sequence
  ENSG00000140015_99 (sequence is synthesized)
aacgaactactttgtttacagaaaggtatttaatccatcttatttgcaattgttttttttaatctaccttagaaaatagaaatgcaaaataatatattttactcttcaggacataataat

SEQ ID NO: 357409 - DNA, 120 bp, Artificial Sequence
  ENSG00000140015_100 (sequence is synthesized)
gtgtgaaaaacatattaatgtgtgtacccagcagtgctctcttgaaggaaccaggaccagcatccagagaggtggcgtttcgcacattccatagattttgttggtaatgtgttaaattcc

SEQ ID NO: 357410 - DNA, 120 bp, Artificial Sequence
  ENSG00000140022_0 (sequence is synthesized)
cttggctggtcacagcacagtgctcctgggcccaggggctgtgatctcctgtcatttggttgccattttcctgtgaagagggtagagaatatgcacccagtcaggaaaacaactcacgag

SEQ ID NO: 357411 - DNA, 120 bp, Artificial Sequence
  ENSG00000140022_1 (sequence is synthesized)
gcaaaaaagtacatctcgtggatggagcagggcgaagtggttacaagtacagactctggagccagactgcctgggtttgaattgtgcggtttcagatttctgcctggcagattaaccaac

SEQ ID NO: 357412 - DNA, 120 bp, Artificial Sequence
  ENSG00000140022_2 (sequence is synthesized)
ggcaagagaggctgatctgtctacattctgagtactgcccttggcaagacacctagaacagaccctggacccaagtctaccgtactaccatacccctactccagcccaccccagacagta

SEQ ID NO: 357413 - DNA, 120 bp, Artificial Sequence
  ENSG00000140022_3 (sequence is synthesized)
ttctggggttcacctgaggtcagcagtgtgaagatgaccagtgcctttttagcatgacgactttggaccatgtgattgccacccaccagtcagaatgggtctccttcaatgaagagccac

SEQ ID NO: 357414 - DNA, 120 bp, Artificial Sequence
  ENSG00000140022_4 (sequence is synthesized)
cctttcctgcccactcgcaggggggcacggaagagcacctcccaggactgtcatcttccccagaccagtccgagagctcctccggggagaaccatgtggtggatggaggctctcaagacc

SEQ ID NO: 357415 - DNA, 120 bp, Artificial Sequence
  ENSG00000140022_5 (sequence is synthesized)
attcccactcggagcaggatgactcctctgaaaagatgggcctcatctctgaagcagcttccccacctgggagccctgagcagcccccacctgacctggcctcggccatcagcaactggg

SEQ ID NO: 357416 - DNA, 120 bp, Artificial Sequence
  ENSG00000140022_6 (sequence is synthesized)
ttcagtttgaagatgacacaccctgggccagcacatctccacctcatcaggaaacagctgagacagccctaccattgaccatgccctgctggacatgcccttcctttgactccctgggga

SEQ ID NO: 357417 - DNA, 120 bp, Artificial Sequence
  ENSG00000140022_7 (sequence is synthesized)
gatgccctctgacttctgagagcagctggaccacccattctgaagacaccagcagtcctagctttggatgttcgtatacagatctgcagctcatcaatgctgaggagcagacgagtggcc

SEQ ID NO: 357418 - DNA, 120 bp, Artificial Sequence
  ENSG00000140022_8 (sequence is synthesized)
aggcttctggggctgactcaactgacaattcctcctcgcttcaagaagatgaagaagtagagatggaggccatcagctggcaggccagcagtccagccatgaatgggcaccctgcccctc

SEQ ID NO: 357419 - DNA, 120 bp, Artificial Sequence
  ENSG00000140022_9 (sequence is synthesized)
cagtgacctctgctcgttttcccagctgggtcacctttgatgacaatgaagtcagctgccctttaccaccagtcacctctcctctgaagccaaatacaccaccaagtgcatctgtgatcc

SEQ ID NO: 357420 - DNA, 120 bp, Artificial Sequence
  ENSG00000140022_10 (sequence is synthesized)
cagatgtaccttataattcaatgggatcatttaagaagagggaccgtcccaagagcactttgatgaacttctccaaagttcagaagctggatatttcctctttaaaccgcacgccttctg

SEQ ID NO: 357421 - DNA, 120 bp, Artificial Sequence
  ENSG00000140022_11 (sequence is synthesized)
taactgaggcttcaccttggagggcaaccaaccctttcctgaatgagactctgcaggatgtacagccctcccctatcaaccctttcagtgctttctttgaggagcaggagaggcgctccc

SEQ ID NO: 357422 - DNA, 120 bp, Artificial Sequence
  ENSG00000140022_12 (sequence is synthesized)
aaaacagttccatttccagtaccacgggcaaaagccaaagagattccctcattgtcatctaccaggatgccatcagttttgatgattcaagcaaaacccagtcacactctgatgctgttg

SEQ ID NO: 357423 - DNA, 120 bp, Artificial Sequence
  ENSG00000140022_13 (sequence is synthesized)
aaaaactcaaacaactccaaattgatgaccctgatcactttggcagtgcaactctacctgatgatgacccagtagcctggattgaactagatgctcacccgcctggatcagcacggtccc

SEQ ID NO: 357424 - DNA, 120 bp, Artificial Sequence
  ENSG00000140022_14 (sequence is synthesized)
agcctcgtgacgggtggccaatgatgttgaggatccctgagaagaaaaacatcatgtcctccaggcactggggaccgatcttcgtcaaactgacagacactggttacctgcagctgtatt

SEQ ID NO: 357425 - DNA, 120 bp, Artificial Sequence
  ENSG00000140022_15 (sequence is synthesized)
atgagcagggcctagaaaaaccattccgtgagttcaagctggagatctgtcatgagatttcagaaccccggcttcaaaactatgatgagaatggcagaatccacagcttgcggatagacc

SEQ ID NO: 357426 - DNA, 120 bp, Artificial Sequence
  ENSG00000140022_16 (sequence is synthesized)
gtgtcacctataaagagaagaagaaataccagcccaaacctgctgtggcccacacagcagagagggaacaggtgattaagctgggcaccaccaattacgatgacttcctgagtttcatcc

SEQ ID NO: 357427 - DNA, 120 bp, Artificial Sequence
  ENSG00000140022_17 (sequence is synthesized)
atgaattctctggcattgtgagcaaaggagacaaccagattctccagcaccatgtcttgacacggatccacatcctgagtttcctgtctgggctcgcagagtgccgcctgggcctcaatg

SEQ ID NO: 357428 - DNA, 120 bp, Artificial Sequence
  ENSG00000140022_18 (sequence is synthesized)
acatcctcgtcaaagggaatgaaatagttttgaggcaggacatcatgcccaccaccaccacaaagtggatcaagctccatgagtgccgtttccatgggtgtgtggatgaggatgttttcc

SEQ ID NO: 357429 - DNA, 120 bp, Artificial Sequence
  ENSG00000140022_19 (sequence is synthesized)
acaactcacgggtcattctgttcaaccctttggatgcgtgccggtttgagctaatgcggttcaggacagtgtttgctgagaagaccttgcctttcacactcaggacggccacaagtgtca

SEQ ID NO: 357430 - DNA, 120 bp, Artificial Sequence
  ENSG00000140022_20 (sequence is synthesized)
atggggcagaggtggaggtgcagagctggctgaggatgtcaactggcttctccgccaatcgtgaccccctcactcaggttccctgtgagaatgtgatgatccgttaccctgtgcccagtg

SEQ ID NO: 357431 - DNA, 120 bp, Artificial Sequence
  ENSG00000140022_21 (sequence is synthesized)
agtgggtgaaaaacttccgcagggaaagtgtcctgggggaaaagtctttgaaagccaaagtgaaccggggggcaagttttggctccactagtgtttctggctctgagcctgtcatgagag

SEQ ID NO: 357432 - DNA, 120 bp, Artificial Sequence
  ENSG00000140022_22 (sequence is synthesized)
taactctgggaactgccaagtacgagcatgccttcaactccattgtgtggaggataaaccgactgccggacaaaaactcagcttccggtcacccacactgtttcttttgccaccttgaac

SEQ ID NO: 357433 - DNA, 120 bp, Artificial Sequence
  ENSG00000140022_23 (sequence is synthesized)
tcggctctgaccgggaagtgccttccagatttgccaatcacgtgaatgtcgagttcagcatgcccacaacttctgcctccaaagccagcgtgagatctatctctgtagaagacaagactg

SEQ ID NO: 357434 - DNA, 120 bp, Artificial Sequence
  ENSG00000140022_24 (sequence is synthesized)
acgtcaggaagtgggtcaattattctgcacactacagctaccagacaacagaaacagacaaccttccaaatcctctatattgcagttgccttccacacacagatttaaaaagaggatcaa

SEQ ID NO: 357435 - DNA, 120 bp, Artificial Sequence
  ENSG00000140022_25 (sequence is synthesized)
agagggtggtgaagatcaggtggaatgcttctttggaagttccactggcatcatctatcagaacaatggtgtgagcatgaagaggcacagacaggtctccaaaatagatgttaggatttg

SEQ ID NO: 357436 - DNA, 120 bp, Artificial Sequence
  ENSG00000140022_26 (sequence is synthesized)
ggtgctacctgacacagaagtaggtctaaccctccaagtactggggatgataggataatcaatgaggtatatatatatttgtcattttgtataaaatattgtgaaaattgaaggaggaca

SEQ ID NO: 357437 - DNA, 120 bp, Artificial Sequence
  ENSG00000140022_27 (sequence is synthesized)
ctcagtaaacatcctgggactatttgtaagttatggcaaaaccagatgagagaaaagggacagtcccctctgtatcctcgttgtctcttagtaacatcaaattgtagttaaaaaaatttt

SEQ ID NO: 357438 - DNA, 120 bp, Artificial Sequence
  ENSG00000140022_28 (sequence is synthesized)
aaactatgtacaagctacaaaatagcatctctttcatggtatgtttgagtgtgtaattttagtttcttttctggttgtatttgtggtagtcagatgtgttggattgattccaactggaca

SEQ ID NO: 357439 - DNA, 120 bp, Artificial Sequence
  ENSG00000140022_29 (sequence is synthesized)
gagtaaggaattccagcatcctcttcctgcttgctcgtgttaccccacagatcaaaccctcaattctagttggggatgctgtctagccccacaccatgactgaagccttaagcactgttg

SEQ ID NO: 357440 - DNA, 120 bp, Artificial Sequence
  ENSG00000140022_30 (sequence is synthesized)
cgcctccatgtgctttggatcagcaaccccagtggtattctaccagagcattgtgggaaagcagatgtatagtcaggtcccaacagcaaattgttgggtgtgagagttctaaagtatagg

SEQ ID NO: 357441 - DNA, 120 bp, Artificial Sequence
  ENSG00000140022_31 (sequence is synthesized)
ggtgagggaagagaaggatatgaactcctctgaccttaagccagcattcatttaacttttatgtctacttaacaagagaacctggagaaaactaccgtattcaagagattaatcaaaatc

SEQ ID NO: 357442 - DNA, 120 bp, Artificial Sequence
  ENSG00000140022_32 (sequence is synthesized)
agtgttttagccaggcgatgacagagaagcaccattcctcaccctccattcttgtaatgtctgtaataaatttcagtgcgtcaggatggatgaacccaagatccagtgaatgattcagct

SEQ ID NO: 357443 - DNA, 120 bp, Artificial Sequence
  ENSG00000140022_33 (sequence is synthesized)
gttccaagccttacattttccatcattcatcatccattctcattcagtgtaacctcttgcactattgtggttaattttatgtaaaaccagtttatgtttttttttttttaatatgtgcct

SEQ ID NO: 357444 - DNA, 120 bp, Artificial Sequence
  ENSG00000140022_34 (sequence is synthesized)
atgtaataaagtctacacactggctatctctgtagaggtgaggttttgtttttagttgttctactgattatatccttttctgagctatgaaaatgaattattaataaaaaatttttgaac

SEQ ID NO: 357445 - DNA, 120 bp, Artificial Sequence
  ENSG00000140022_35 (sequence is synthesized)
ggagccggcgtcggcgctgcggccgggagggatcgtggcgagagcagtgcggccgggtgggtatcccgcggccagagaagccggctttgccgcggcgacctttcggcggacgccggggac

SEQ ID NO: 357446 - DNA, 120 bp, Artificial Sequence
  ENSG00000140022_36 (sequence is synthesized)
ggagcatacctccacccgcacccaccgcctggacccctcgccaccctcaccccagcccaagaggagccagaaccccggcgagggtccggagggggcctctgctcccaatgacaattcctc

SEQ ID NO: 357447 - DNA, 120 bp, Artificial Sequence
  ENSG00000140022_37 (sequence is synthesized)
tcccaaggagtgtggagtgcagtgacaaagccttgcggcaaggaatcctgatcccagagtcatgatagggtgtcttcctgagtcatgatagggtgtcttcctgagtagctgaagttgcag

SEQ ID NO: 357448 - DNA, 120 bp, Artificial Sequence
  ENSG00000140022_38 (sequence is synthesized)
tcaatacctgctgtggccactgcatgttgggaacagtataccagatcttcctgtttgcagttacttgtattttaccaggaaaccctgagaatggtggcttttggagaggctctttgattc

SEQ ID NO: 357449 - DNA, 120 bp, Artificial Sequence
  ENSG00000140022_39 (sequence is synthesized)
tggtcatgcctaaagcacgaggttcacctgactgttggagcttactgtataattaagcctccttgtcttgtctctgcttatctcacagcactggtatgtggtttgttgtgactgttacag

SEQ ID NO: 357450 - DNA, 120 bp, Artificial Sequence
  ENSG00000140022_40 (sequence is synthesized)
tcaggaaaagaacctcccacatcagtgttagcacgattgccttctgatgttcatctgtcactcgcataactttctggcaaaggcagtcttgagaagttaattaagaatccatctctttca

SEQ ID NO: 357451 - DNA, 120 bp, Artificial Sequence
  ENSG00000140022_41 (sequence is synthesized)
atttcctctttgggtcttactagacctttttgaggtgtctccattctttaactgttaagctttcaagacatttccctcctggctctagatcgtttagattggaacactttttccatctct

SEQ ID NO: 357452 - DNA, 120 bp, Artificial Sequence
  ENSG00000140022_42 (sequence is synthesized)
ctaaggtttcagtcacaggatttgctatcctgagtcacaatagacaatggaaaaaggcacaataggagactttttaattttgtgaatggacccacattctgcaaaatgggtgttgagggg

SEQ ID NO: 357453 - DNA, 120 bp, Artificial Sequence
  ENSG00000140022_43 (sequence is synthesized)
aaggcaaaattaatcttagttttcttcattttggagaaaagagacattaaatataagatgatgttcagttcaagaggtagattcaatctcagtgaattcccaaattcacactgaaaaata

SEQ ID NO: 357454 - DNA, 120 bp, Artificial Sequence
  ENSG00000140022_44 (sequence is synthesized)
cagtccacttctgattcctgaaacaaatatacataatacctgaggcatttgtaaggggcatttgggagttctttttatacctcatgaccaatagacagttgcatgtccctttaacccaac

SEQ ID NO: 357455 - DNA, 120 bp, Artificial Sequence
  ENSG00000140022_45 (sequence is synthesized)
tttataggaaatttaagctgcaaagataatttttaaagctgttttaaaattaagcttgaatgagctttcccccaaaattcagagtttgataatcacagtattggattggattgaaaaggc

SEQ ID NO: 357456 - DNA, 120 bp, Artificial Sequence
  ENSG00000140022_46 (sequence is synthesized)
atctctagggtagagacgtggaaaagccatatttttctaatgttgggaacattatattctgattccaagagtcagaacgctcactccatcttctttttcttcatctgtttctgggacaat

SEQ ID NO: 357457 - DNA, 120 bp, Artificial Sequence
  ENSG00000140022_47 (sequence is synthesized)
taatcttcttttccttcatccgttcctactcacctctgcttcttatttgtatcttagtgttttctcccatgaagaatacaagtcgggggacagaaagcacacttcattggatttgtagat

SEQ ID NO: 357458 - DNA, 120 bp, Artificial Sequence
  ENSG00000140022_48 (sequence is synthesized)
gtggacattttaatagataggcacctctgactaattgaaatgtagcttaagtgtcaagatagctttgtaatagaccaaggtgatgttttgtctcaaaacaaacaaaaagagaccctttat

SEQ ID NO: 357459 - DNA, 120 bp, Artificial Sequence
  ENSG00000140022_49 (sequence is synthesized)
ttaaaggagttcagtgtggaacggaagatgcaaggtggggtttgaggaaaagagttacaagagccaatgagatgaaaatgccattgtttttcctaatgtggtgtcaaggcagaaccatct

SEQ ID NO: 357460 - DNA, 120 bp, Artificial Sequence
  ENSG00000140022_50 (sequence is synthesized)
tagccttgggaagcatctggctaatgcttccaactccatttgttcaccccactaccctccccctcttattccttttagccatgcttactatgttcgcctggtaacctcttactgccttag

SEQ ID NO: 357461 - DNA, 120 bp, Artificial Sequence
  ENSG00000140022_51 (sequence is synthesized)
aggaagttcaccatacatagctgtgggtgcgtctgctctgatttaaatgcataatctggctagtggatgagagaaaggttggaaaaaaataaagaggctcatcaaagaggagaatataat

SEQ ID NO: 357462 - DNA, 120 bp, Artificial Sequence
  ENSG00000140022_52 (sequence is synthesized)
ctagcgccgctgtgccccctggcgcccccgagcctgcctggtcgagccacgcggaggcgcggcgtttccaccagccgcgggcgtcccggggtgggggaggacgaggggactctgcttaag

SEQ ID NO: 357463 - DNA, 120 bp, Artificial Sequence
  ENSG00000140022_53 (sequence is synthesized)
cctgaagcactggtcgcataggggagagcagacggagttctcatctggtttaattctgtaacttgtttttgttgacataagcatacaaaagaatgtatgtgttctaggacatttctagtc

SEQ ID NO: 357464 - DNA, 120 bp, Artificial Sequence
  ENSG00000140022_54 (sequence is synthesized)
ctttactcttgtccctggctgttgacttgtctttaaaataatgcatatatatttttctattagggattggaattatatttactcagcccctaaactgtaagcaccttacatacagaaatg

SEQ ID NO: 357465 - DNA, 120 bp, Artificial Sequence
  ENSG00000140022_55 (sequence is synthesized)
aatgtttctgctgggtgcggtggctcatgcctataatttcatcactttgagaggccgagaagggtggctcacttgaggtcaggagtttgagacccacctggctaacacggagaaaccccg

SEQ ID NO: 357466 - DNA, 86 bp, Artificial Sequence
  ENSG00000140022_56 (sequence is synthesized)
ggcgtggtcgtgcactttgaattgctgaacctgggagcggaggttgcagtaagctgaggtcgcgccactgcactccaggctgggtg

SEQ ID NO: 357467 - DNA, 120 bp, Artificial Sequence
  ENSG00000140022_57 (sequence is synthesized)
actgcactccaggctgggtgacagagctagactctgtctccaaaaaataaaaacagaaatgaatgtgtgttaaagtgtggaccactgaccatgtctaaccaagtcaccaataggatttgt

SEQ ID NO: 357468 - DNA, 120 bp, Artificial Sequence
  ENSG00000140022_58 (sequence is synthesized)
ggatttgttaaacatggatattctcacacttcagaactcttgaatccaaatcctcatgggtagggatggttgttcatgagaaatctcttattttgtggcatttcaatggccagaagctgc

SEQ ID NO: 357469 - DNA, 120 bp, Artificial Sequence
  ENSG00000140022_59 (sequence is synthesized)
actggggagcttagtaaagctgtaggacttgttagtccccatcctggtgacctggctacttctttattgtgcactgaagtatgccacaggtgattggataagctttgggactgtattagt

SEQ ID NO: 357470 - DNA, 120 bp, Artificial Sequence
  ENSG00000140025_0 (sequence is synthesized)
aggctgccagccaggctgggaaagcggtggtagctggttgggttgctggggctcggttgttgtagtcgcgatgttcttctccgaggccagagccaggtcgcggacgtgggaagccagtcc

SEQ ID NO: 357471 - DNA, 120 bp, Artificial Sequence
  ENSG00000140025_1 (sequence is synthesized)
ctcggaacacaggaagtgggtggaagtatttaaagcatgtgatgaagatcacaaaggatatctcagcagagaggactttaaaactgctgttgtaatgctgtttgggtacaagccctccaa

SEQ ID NO: 357472 - DNA, 120 bp, Artificial Sequence
  ENSG00000140025_2 (sequence is synthesized)
gatagaagtggattctgtgatgtcttcaataaatccaaatacttctggtatattactcgaggggtttttaaatattgtcaggaaaaagaaggaagctcaacgatatcggaacgaagtaag

SEQ ID NO: 357473 - DNA, 120 bp, Artificial Sequence
  ENSG00000140025_3 (sequence is synthesized)
acacatcttcacagcctttgacacctactatcgtggatttttaactttggaagatttcaaaaaagcatttaggcaggtggctcccaaattaccggaaaggactgttcttgaggtattcag

SEQ ID NO: 357474 - DNA, 120 bp, Artificial Sequence
  ENSG00000140025_4 (sequence is synthesized)
ggaagtagatcgagattcagatggtcacgtcagctttagagactttgaatatgccctgaactatggacagaaggaagcctaactattgtgaactacttttggtaactctggggagatcaa

SEQ ID NO: 357475 - DNA, 120 bp, Artificial Sequence
  ENSG00000140025_5 (sequence is synthesized)
tagattgtaatgtcagcagactcgactctactaatgatgtcatgctacagacttgtgattaaacatttaaaaatttttaatttttgtgggtacatagtaggtgcatatgtatacatacac

SEQ ID NO: 357476 - DNA, 120 bp, Artificial Sequence
  ENSG00000140025_6 (sequence is synthesized)
acacatatatgggttacgggagatattttggcacaggcatgcaataagtaattgactaaatttttaatcataatttttggatgctgatgatagacttgcatctcagaatcctagagatgg

SEQ ID NO: 357477 - DNA, 120 bp, Artificial Sequence
  ENSG00000140025_7 (sequence is synthesized)
ttgctgccgggggtctccttctgtgtggccagcagccctgagtcaggccgccattgctagagctggggctagggatggcactggtggtcctcctcctcctcactcttcttgccccctacc

SEQ ID NO: 357478 - DNA, 120 bp, Artificial Sequence
  ENSG00000140025_8 (sequence is synthesized)
ctctccacactgcaggccacggtgctctactcactcacttcattgtcctcaccatcccaccctgaatctcatcatctcctaatatctgcagaggggcagacttttcctgccaatggtgcc

SEQ ID NO: 357479 - DNA, 120 bp, Artificial Sequence
  ENSG00000140025_9 (sequence is synthesized)
agtttccttcatttgctcaacattggttgaacaaataatagcacctacacatacagaatacttactatgttccaagcaatcagccaggccttgggaagcataggcttaagacttctctaa

SEQ ID NO: 357480 - DNA, 120 bp, Artificial Sequence
  ENSG00000140025_10 (sequence is synthesized)
gccaaagcaggaggatcacttgagcctaggaattggagactagcctgggcaacataccgagaccccatccctaccaaaaaattaataataaaaaattatctggatttagtggtgtgtacc

SEQ ID NO: 357481 - DNA, 84 bp, Artificial Sequence
  ENSG00000140025_11 (sequence is synthesized)
tttgagcccaggggtttgaagcttcagtgagccatgattgcactgtcgcactccagcctggatgatagagcaagaccctgtctc

SEQ ID NO: 357482 - DNA, 120 bp, Artificial Sequence
  ENSG00000140025_12 (sequence is synthesized)
gtcgcactccagcctggatgatagagcaagaccctgtctctaaaaaaacactttcaattaaaaaaaaacatataaagacttctctaagataatgtccctgagtccaaatcatcactgtaa

SEQ ID NO: 357483 - DNA, 120 bp, Artificial Sequence
  ENSG00000140025_13 (sequence is synthesized)
tgtctgtgcaagacaaagaaatcggcttgggctaacatgagcaagccctctcgggctatatacagaggaagaacagggtgatgagggtactgggggcaagagacatgtttgcagaaccct

SEQ ID NO: 357484 - DNA, 120 bp, Artificial Sequence
  ENSG00000140025_14 (sequence is synthesized)
ttaggatggtctaggcttgggagtctcactgtggagaagcaagccttgagctgctcagctgccctctgctccataccccctggtttctagcagtcacgtcctgcacccagacacttagcc

SEQ ID NO: 357485 - DNA, 120 bp, Artificial Sequence
  ENSG00000140025_15 (sequence is synthesized)
atgtgtgttcacgttccccatgccttgcctgtcctgctgggctccagtaactgctatactggagcaagaacagcaatgctggacactcagcatttagtgaaggtaattccaaaatactgg

SEQ ID NO: 357486 - DNA, 120 bp, Artificial Sequence
  ENSG00000140025_16 (sequence is synthesized)
tatcagtactcttatttataagtgtacggaatgcataacatgaacattagtcaaagaacttttaatataattcactttttaagtgttaaaatttaaaggtcaagtaaaattgtaaatttg

SEQ ID NO: 357487 - DNA, 120 bp, Artificial Sequence
  ENSG00000140025_17 (sequence is synthesized)
taaaattgtaaatttgtaatatggaaacattaagcgtcattatcatacaaattattagcagataaccttaataaaaataaacgtttgcgggttttttttgagacagagtctcactttgtc

SEQ ID NO: 357488 - DNA, 73 bp, Artificial Sequence
  ENSG00000140025_18 (sequence is synthesized)
tcactgcaacttctgggtttacaggtgtgtaccgccacacccggctaatttttagtagagaaggggtttcacc

SEQ ID NO: 357489 - DNA, 120 bp, Artificial Sequence
  ENSG00000140025_19 (sequence is synthesized)
aaaataaagttttaaactgtcaaataagaggagcctaacaagatgtgacaactaaatgtcatttggtatcctggatgagatcacggaataaaaaataaacattggccggacacagtgact

SEQ ID NO: 357490 - DNA, 120 bp, Artificial Sequence
  ENSG00000140025_20 (sequence is synthesized)
aaaaaaaaaaaaaaaaaaaagacattaagtagaaacaaatcaagcatggactttagctaataataatgtatcactattggttcattaattgtaacaaatgtatcctactcatatataatg

SEQ ID NO: 357491 - DNA, 120 bp, Artificial Sequence
  ENSG00000140025_21 (sequence is synthesized)
ttcattaattgtaacaaatgtatcctactcatatataatgttaatagtaggggaaactgggtgaggtatatgggaaccctctactattttcacaatttttctataaatctaaaactattc

SEQ ID NO: 357492 - DNA, 120 bp, Artificial Sequence
  ENSG00000140025_22 (sequence is synthesized)
gttcagagtggctcagctatgaggggctgcctagttactgagaagcttattatggagctcagagaagtagtcagggctgactcttagaaatggcagctctcctgtttacctgtaatcatt

SEQ ID NO: 357493 - DNA, 120 bp, Artificial Sequence
  ENSG00000140025_23 (sequence is synthesized)
ttctgtacaccaccttttgatttaccatttgcttttacatgtttttgactttatggaaagaacttatttattctgatttttgagtctggaacatttttctcttgcagcatagtgtcatgg

SEQ ID NO: 357494 - DNA, 120 bp, Artificial Sequence
  ENSG00000140025_24 (sequence is synthesized)
tccaggagggaaatctatagttagctatgggtccttccatgcccctgacagtgaactgtaaagttgggggagcgcttgcacaccaggcaggtgcatacaagcacttatgagtaggggcag

SEQ ID NO: 357495 - DNA, 120 bp, Artificial Sequence
  ENSG00000140025_25 (sequence is synthesized)
gagaggaacaggaagaaagaacttcttcagatacttacgtgtgaaccaagggaaaatggagctttagtaatatttagcatggatgctggtgtcctcacatggtctgtatttcagacaaac

SEQ ID NO: 357496 - DNA, 120 bp, Artificial Sequence
  ENSG00000140025_26 (sequence is synthesized)
acaggttacatgtggttcttgagttgtctggagagaacagctggagttgcctgatggtagcccccttgttcccttgctttcaaagctactgacacatgttgctgttcacacatacctgat

SEQ ID NO: 357497 - DNA, 120 bp, Artificial Sequence
  ENSG00000140025_27 (sequence is synthesized)
tcccgtgtctgggtctcactctgccgggtgtgcagataagacctgggctgcctgtccaaagggtcgtggttaatgactgatcctggagctgcagggctcctggctccccgtccaggacta

SEQ ID NO: 357498 - DNA, 120 bp, Artificial Sequence
  ENSG00000140025_28 (sequence is synthesized)
tctggctggcatttttctctgcatggatatgtttacttctccatgcctaggaaccttctccatctcattgtaagcactgctatttgtacattcccaccacctgtcagttggcaaaaagct

SEQ ID NO: 357499 - DNA, 120 bp, Artificial Sequence
  ENSG00000140025_29 (sequence is synthesized)
ctgggaagctgcttttgcttcccagtcatgagatgaaatgtgaatgtgcataaggtccatgccctgacccagcgtccaagatcctgagtgcacaggcagattgccacatgatgatgtaaa

SEQ ID NO: 357500 - DNA, 120 bp, Artificial Sequence
  ENSG00000140025_30 (sequence is synthesized)
atcctgatatttttggtgtaagaatccctttcttcatattacacaagggaaggtcaaaggacataggacatctaactctccttttttgaatattagaaattgggtgaaaatgagaatgtc

SEQ ID NO: 357501 - DNA, 120 bp, Artificial Sequence
  ENSG00000140025_31 (sequence is synthesized)
attgcttgttgaataagatattttcaaaatcagagtattagtgggggctgggtcttaggaatgcaattgtaaaagggagtgatggatattcccttggcagaaaaattatatagatgttat

SEQ ID NO: 357502 - DNA, 120 bp, Artificial Sequence
  ENSG00000140025_32 (sequence is synthesized)
atcacagccattataggggtaaggactgtcaccagcttgggtaaaacaaataggctcttctgttatgctgattggaagagtcttacagagctgagggcctaaaggaaagtgatttcagag

SEQ ID NO: 357503 - DNA, 120 bp, Artificial Sequence
  ENSG00000140025_33 (sequence is synthesized)
aacatttactttttcaagtcatttgcgtctcttttgaaatgttatttctcactgtaatttttagcttcccataattcctttctgccagcagccaacttgtggagtatcattttcctggtc

SEQ ID NO: 357504 - DNA, 120 bp, Artificial Sequence
  ENSG00000140025_34 (sequence is synthesized)
catctctaacaagagaaaatttccagtcattattttgtgcttcagaatgattctgtgtatgatcatgcaacttcagtaagatcacagttattaaaatgagtacctaatttagtgactatg

SEQ ID NO: 357505 - DNA, 120 bp, Artificial Sequence
  ENSG00000140025_35 (sequence is synthesized)
actattggtctttgagtatctgcctgcttccaggtatagaaacatccataaaaacacctacaaatcatatttcattctttgtagccatacatagataacagtcatcagctataccttctg

SEQ ID NO: 357506 - DNA, 120 bp, Artificial Sequence
  ENSG00000140025_36 (sequence is synthesized)
tgtgaatggcatgaccgaagaagtagacttcttgaggtcccaacttttatttcatgaaattttgtgtcttctctggaatggaaatgctttagtttttatttcaatggttttgtttcaaaa

SEQ ID NO: 357507 - DNA, 120 bp, Artificial Sequence
  ENSG00000140025_37 (sequence is synthesized)
ttatattgtcagagattcccttttctgattgtcctgttgcacatgcttataagatggggagtatgaatgtgtgtaagcttttcaagctgacctcagaatttcctctctgagggacttcta

SEQ ID NO: 357508 - DNA, 120 bp, Artificial Sequence
  ENSG00000140025_38 (sequence is synthesized)
tcttaccctccacatccaagctgtcaacaaatctcgactctgaccacctctcagcacctccactgtgtcacccagtgcaaacctccaccaccatctcagcctcttacccagctccaggat

SEQ ID NO: 357509 - DNA, 120 bp, Artificial Sequence
  ENSG00000140025_39 (sequence is synthesized)
taaagttctttcttgactttgcctgccatcaacaccctgtggtatttctggctggcatttttctctgcatggatatgtttacttctccatgcctaggaaccttctccatctcattccagt

SEQ ID NO: 357510 - DNA, 120 bp, Artificial Sequence
  ENSG00000140025_40 (sequence is synthesized)
gcaatgaaaaacagtatttgttagcttttaaaatgatagctctgaacttgaatttcctctgcactctccgtgagatgaccagacctgcttgtatatatgcgatgacgacgaaaagtcaga

SEQ ID NO: 357511 - DNA, 120 bp, Artificial Sequence
  ENSG00000140025_41 (sequence is synthesized)
agacattaagtatttcagcatgtctcatttgaaatatgaatttaaaatgatgatgccctgccattcattatgtgaataaaatgccaccccacacgttatgaataaactttccagttttaa

SEQ ID NO: 357512 - DNA, 120 bp, Artificial Sequence
  ENSG00000140025_42 (sequence is synthesized)
ctaaggattttcagcaagtgtttactctgccatattgaccagaagtctaaaaacccctcctctggcctcttagcagctgactccatcattcaggcacacccctcacctgtgcagattctc

SEQ ID NO: 357513 - DNA, 120 bp, Artificial Sequence
  ENSG00000140025_43 (sequence is synthesized)
agatgtacattaataatgagctagaagggagaggttttatttgggattcatcaatttcctggaggttcatgtggaacatctatggcacaggggagtactgacgtctggtccctagccctg

SEQ ID NO: 357514 - DNA, 120 bp, Artificial Sequence
  ENSG00000140025_44 (sequence is synthesized)
ctccccatggtgaagagccttacacactgtgtggacacaccgcccccaacatccatgcttaatccacatccccttcaaacaaccactctgggcagaccctcaggaagaggcctgcaaagg

SEQ ID NO: 357515 - DNA, 120 bp, Artificial Sequence
  ENSG00000140025_45 (sequence is synthesized)
gaaaactcttgtcggtccagagaagaaagaattgccaaaattaaataaaaagtcaagattccattacctgatgatttgtgtatttcacgttgtttgcaacaaacctggaagtcatcccaa

SEQ ID NO: 357516 - DNA, 120 bp, Artificial Sequence
  ENSG00000140025_46 (sequence is synthesized)
tcttctccacccaataaataagtccagcaatgatccttgtaaaatgtacatcaggaggggccttctcatctcacctatgataggtatggagttttttcttttttccatttcacctgtgat

SEQ ID NO: 357517 - DNA, 120 bp, Artificial Sequence
  ENSG00000140025_47 (sequence is synthesized)
gtatgtttgtgacctccaatatgtaaccacttactatgttgcttttaaaatgatttttaaaggtttgtttacaaccatagccactatttgcaattatgagtgtatagcactaagcatgag

SEQ ID NO: 357518 - DNA, 120 bp, Artificial Sequence
  ENSG00000140025_48 (sequence is synthesized)
aactagatctgtgaaattttttgccagtttcattaggtgacctctgtaagcatcaaaacctggcattgattgaggttgtttcaggctcaactagtactgttcaaaataaagtaactgaaa

SEQ ID NO: 357519 - DNA, 120 bp, Artificial Sequence
  ENSG00000140025_49 (sequence is synthesized)
gcaagtctggtggtagaaggtactttataagctaactaatgcttttcaaagggatatatattgaaggaaaggctcgttttatattacatcctataaggcagtgcttcttaaactctctgt

SEQ ID NO: 357520 - DNA, 120 bp, Artificial Sequence
  ENSG00000140025_50 (sequence is synthesized)
ggaaaagaaccactttttataaatttccagtctgttgcaaaccgatactttgtaaaaattaataaaagtgaattactagaaaaatgaaatttttgaaaaagacatataaaataaaagttg

SEQ ID NO: 357521 - DNA, 120 bp, Artificial Sequence
  ENSG00000140025_51 (sequence is synthesized)
taatttttagcaaacaggaagttatattgcaaaaattactggggtataggaaaaaagatacaaaaattgttcgtgtttgttcattgaaagtatgcgtgtaagcaattaataggctattgc

SEQ ID NO: 357522 - DNA, 120 bp, Artificial Sequence
  ENSG00000140025_52 (sequence is synthesized)
acttgtaagttttcttcattttaagggaaaatggaattcccatattaaatgtctatttgtacactttgaacacaatgtggataaatatttaaagtttttaatgtgacaaatgggattgct

SEQ ID NO: 357523 - DNA, 120 bp, Artificial Sequence
  ENSG00000140025_53 (sequence is synthesized)
tcctacttgatactttacctaatctaggtaaaattgccaataaggctacttgtagggaataaggtatatctaaataatttctacgctttattttaataatgatacaaaagaaaccagtct

SEQ ID NO: 357524 - DNA, 120 bp, Artificial Sequence
  ENSG00000140025_54 (sequence is synthesized)
cacaatggaatggagggagagattttagagcaattttcagtgagctcagtttattcattttaaaattttatctaagatggagccagagccactatgctttcaaagtcttccaatccctca

SEQ ID NO: 357525 - DNA, 120 bp, Artificial Sequence
  ENSG00000140025_55 (sequence is synthesized)
acagacctgagtgccagcaatatatcctgtaaattataattaaatataattatcttttggtgaaataaatggatcctagatccatggattttttagacatagatcttcttttgatggaaa

SEQ ID NO: 357526 - DNA, 63 bp, Artificial Sequence
  ENSG00000140025_56 (sequence is synthesized)
gcatcagcctcctgagtagttaggactacaggtgcttgccaccacgcctggataatttttgta

SEQ ID NO: 357527 - DNA, 120 bp, Artificial Sequence
  ENSG00000140025_57 (sequence is synthesized)
ttacaggcatgagccactgtgcccggactcaaccagattgttttaacacagtgttgctttcaccaacttgattcggactaagttggttttggcaaatggctttcaaccaaatgatctata

SEQ ID NO: 357528 - DNA, 120 bp, Artificial Sequence
  ENSG00000140025_58 (sequence is synthesized)
cccaaattaagaggatttgggggcttactggatccagtgccgtgctggagctgacttatgcaggctctcaagacatttctgcccatcttttcagtaatgtcaccttcatagcttgaaatc

SEQ ID NO: 357529 - DNA, 120 bp, Artificial Sequence
  ENSG00000140025_59 (sequence is synthesized)
atgctagactccttcattttcaagaggatttctctgtgtgcactgaccctgaagcttagaactgtgaaccacaaaaaactatacttaatggaactttcaagtaaaaaatttatatagttt

SEQ ID NO: 357530 - DNA, 120 bp, Artificial Sequence
  ENSG00000140030_0 (sequence is synthesized)
agcagtgttggtttctcttcttgacttgatgcaggcacagatttatcaagctcctcagtcaacaaacacatcaccggaagaaatatggaaggaaaggaattttaaaaggaaataccaatc

SEQ ID NO: 357531 - DNA, 120 bp, Artificial Sequence
  ENSG00000140030_1 (sequence is synthesized)
tctgtgcaaacaaagccttgtatattcatgtttgcaccaatctactgtgagatttatgaagaaaaacaaattgcggacaactctctatgtacacttacaaatgcctcagttgatgcttgt

SEQ ID NO: 357532 - DNA, 120 bp, Artificial Sequence
  ENSG00000140030_2 (sequence is synthesized)
gggctgtttgtcagcgttctgtgataatgaacacatggacttctgtttattaaattcagttgacccctttagccaattgccaggagcctggatttttacttccaactgctgatatctgtg

SEQ ID NO: 357533 - DNA, 120 bp, Artificial Sequence
  ENSG00000140030_3 (sequence is synthesized)
taaaaattgatctacatccaccctttaaaagcattgatgaattaattagaactttagacaacaaagaaaaattgaaaaagaattctcagtaaaagcgaattcgatgttcaaaacaaacta

SEQ ID NO: 357534 - DNA, 120 bp, Artificial Sequence
  ENSG00000140030_4 (sequence is synthesized)
caaagagacaagacttctctgtttactttctaagaactaatataattgctaccttaaaaaggaaaaaatgaacagcacatgtattgaagaacagcatgacctggatcactatttgtttcc

SEQ ID NO: 357535 - DNA, 120 bp, Artificial Sequence
  ENSG00000140030_5 (sequence is synthesized)
cattgtttacatctttgtgattatagtcagcattccagccaatattggatctctgtgtgtgtctttcctgcaagcaaagaaggaaagtgaactaggaatttacctcttcagtttgtcact

SEQ ID NO: 357536 - DNA, 120 bp, Artificial Sequence
  ENSG00000140030_6 (sequence is synthesized)
atcagatttactctatgcattaactctccctttatggattgattatacctggaataaagacaactggactttctctcctgccttgtgcaaagggagtgcttttctcatgtacatgaattt

SEQ ID NO: 357537 - DNA, 120 bp, Artificial Sequence
  ENSG00000140030_7 (sequence is synthesized)
ttacagcagcacagcattcctcacctgcattgccgttgatcggtatttggctgttgtctaccctttgaagttttttttcctaaggacaagaagatttgcactcatggtcagcctgtccat

SEQ ID NO: 357538 - DNA, 120 bp, Artificial Sequence
  ENSG00000140030_8 (sequence is synthesized)
ctggatattggaaaccatcttcaatgctgtcatgttgtgggaagatgaaacagttgttgaatattgcgatgccgaaaagtctaattttactttatgctatgacaaataccctttagagaa

SEQ ID NO: 357539 - DNA, 120 bp, Artificial Sequence
  ENSG00000140030_9 (sequence is synthesized)
atggcaaatcaacctcaacttgttcaggacgtgtacaggctatgcaatacctttggtcaccatcctgatctgcaaccggaaagtctaccaagctgtgcggcacaataaagccacggaaaa

SEQ ID NO: 357540 - DNA, 120 bp, Artificial Sequence
  ENSG00000140030_10 (sequence is synthesized)
caaggaaaagaagagaatcataaaactacttgtcagcatcacagttacttttgtcttatgctttactccctttcatgtgatgttgctgattcgctgcattttagagcatgctgtgaactt

SEQ ID NO: 357541 - DNA, 120 bp, Artificial Sequence
  ENSG00000140030_11 (sequence is synthesized)
cgaagaccacagcaattctgggaagcgaacttacacaatgtatagaatcacggttgcattaacaagtttaaattgtgttgctgatccaattctgtactgttttgtaaccgaaacaggaag

SEQ ID NO: 357542 - DNA, 120 bp, Artificial Sequence
  ENSG00000140030_12 (sequence is synthesized)
atatgatatgtggaatatattaaaattctgcactgggaggtgtaatacatcacaaagacaaagaaaacgcatactttctgtgtctacaaaagatactatggaattagaggtccttgagta

SEQ ID NO: 357543 - DNA, 120 bp, Artificial Sequence
  ENSG00000140030_13 (sequence is synthesized)
gaaccaaggatgttttgaagggaagggaagtttaagttatgcattattatatcatcaagattacattttgaaaaggaaatctagcatgtgaggggactaagtgttctcagagtgatgttt

SEQ ID NO: 357544 - DNA, 120 bp, Artificial Sequence
  ENSG00000140030_14 (sequence is synthesized)
taatccagtccaataaaaatatcttaaaactgcattgtacagctccctccctgcgttttattaaatgatgtatattaaacaaagatcaatattttcttaatgactcagggtctttattgt

SEQ ID NO: 357545 - DNA, 120 bp, Artificial Sequence
  ENSG00000140030_15 (sequence is synthesized)
taatgccaattgtttttgtatctgtgctataatcccttagagtcagtaaagtatgtaggggactgtttcttcctttgtgtctgggtttatgatttttctcactctttctttggactccag

SEQ ID NO: 357546 - DNA, 120 bp, Artificial Sequence
  ENSG00000140030_16 (sequence is synthesized)
ggtgtcagccatcaggtctcctaattttgtgtaccggtctccaacaaccccagctactgaatactgcttctaatctcctcattcattaacaaatctttatttttttatcttgtataaaat

SEQ ID NO: 357547 - DNA, 120 bp, Artificial Sequence
  ENSG00000140030_17 (sequence is synthesized)
aactgctttattgacacaaaatttacataacttaaaattcaactttgtattgtgtacaattcagtgattttttgtatattcacagagctgtgcaaccatcaccacactcaaaaaattttc

SEQ ID NO: 357548 - DNA, 120 bp, Artificial Sequence
  ENSG00000140030_18 (sequence is synthesized)
tactttctgtctctaaggattttcattactctgaacatttcatataaatagaattatacaatatgtggcctactgtgacgtatttcacttagtataatggtttcaagttttatccatgtg

SEQ ID NO: 357549 - DNA, 120 bp, Artificial Sequence
  ENSG00000140030_19 (sequence is synthesized)
tagaatgtatcagcacttcatttctttttatggcctgatagtattctgttgcatggttatactccattttgtttatctaatcacttggcttcattaacaaatatttattgaatccattcc

SEQ ID NO: 357550 - DNA, 120 bp, Artificial Sequence
  ENSG00000140030_20 (sequence is synthesized)
ataaactaggttttgagttaagtactggggctatgaaagaaatggtctcatgaagcctcacgaagtttacattagttcaaaagcctagtcaccgagcttgaaagatttctatataaagga

SEQ ID NO: 357551 - DNA, 120 bp, Artificial Sequence
  ENSG00000140030_21 (sequence is synthesized)
aaaggaaataggctctgagttttattttgatctctttttaatttataactgggtataacatagctgaaattaccagaagtttaatgcatagacaaataaatagttctattatatctttct

SEQ ID NO: 357552 - DNA, 83 bp, Artificial Sequence
  ENSG00000140030_22 (sequence is synthesized)
tgcatagacaaataaatagttctattatatctttctttttggacttagaatgttagaatattttgagagttcaatccaggcta

SEQ ID NO: 357553 - DNA, 85 bp, Artificial Sequence
  ENSG00000140030_23 (sequence is synthesized)
gtagagacggggtttcaccatgttgcacaggctggtctcaatcgaactcctgacctcaagtgatcatcccacctaggtatgcctg

SEQ ID NO: 357554 - DNA, 120 bp, Artificial Sequence
  ENSG00000140030_24 (sequence is synthesized)
attcttttgaatcctcattgtgtaaattgcctcgttgtaaatagacactcagtaaacattttcctcaccaaaatatttttaaggatttttctacccttctccttttctctttgctttcct

SEQ ID NO: 357555 - DNA, 120 bp, Artificial Sequence
  ENSG00000140030_25 (sequence is synthesized)
tttcttgcctgttctttccactccccccaaaatgatcagatagcaaatgtcttgataacatgaggtgccctcacattaaaaaacaaaatattgagccgggcgcggtggctcatgcctgta

SEQ ID NO: 357556 - DNA, 120 bp, Artificial Sequence
  ENSG00000140030_26 (sequence is synthesized)
tgggaggctgaggtgggcagatcgccttaggtcaggagttggagaccaggctgaccaatatgatgaaactctgtctctactaaaaattcaaaaatgtgccagacctggcctggtggcatg

SEQ ID NO: 357557 - DNA, 120 bp, Artificial Sequence
  ENSG00000140030_27 (sequence is synthesized)
atcccagctacttgggaggctgagtcataagcctgcaatgggaaaatggatcgaatctggggtgagggggaagtgatgtgggggttatggtacctcttttctcttccaaagatgctgttc

SEQ ID NO: 357558 - DNA, 120 bp, Artificial Sequence
  ENSG00000140030_28 (sequence is synthesized)
ctcttccaaagatgctgttcttactgcatcacttgtggctggccaggaaaagccatgcaggagttttgtttgtggccactaggtgacgatcgtgttctgtacgggacctcttattaatag

SEQ ID NO: 357559 - DNA, 120 bp, Artificial Sequence
  ENSG00000140030_29 (sequence is synthesized)
ttcaccactagccgccactccagaagagcggaggaacccaggataatattttgtcaaccaagaaacaagaagtccctcccaggaactggaaatgaatggggaaaatgctgaaatctcatt

SEQ ID NO: 357560 - DNA, 120 bp, Artificial Sequence
  ENSG00000140030_30 (sequence is synthesized)
tgcactattcatttctcttctctctggaaagctcggcaatcatcaggtcatttcatttggcttaaattccatgtgtctttccaaacttttaaaagctggtgaaaattgttccacccatat

SEQ ID NO: 357561 - DNA, 120 bp, Artificial Sequence
  ENSG00000140030_31 (sequence is synthesized)
gtaaaagaacataggttaagttgtctaattcttgcaggaatgtggatatagcattaaaaatatgtctttgtatacttatcttacccatgtaagaaaagagtggccaactttcatataaat

SEQ ID NO: 357562 - DNA, 120 bp, Artificial Sequence
  ENSG00000140030_32 (sequence is synthesized)
agaaagagaacatttaagctatatgcagtttgcatttttgtctactattatgaaattattatctatgaaattcaagctgtaactcaacatatgtataattttaatttctaatttattgtt

SEQ ID NO: 357563 - DNA, 120 bp, Artificial Sequence
  ENSG00000140030_33 (sequence is synthesized)
agatctcagcacttaaaaaattacatcttgtatttgaattgttaaatctgttccctgcaaagaacagtaatacaatcatgttctaatttactagcatttgcatattttagaaatataatg

SEQ ID NO: 357564 - DNA, 120 bp, Artificial Sequence
  ENSG00000140030_34 (sequence is synthesized)
gcctgtaatttacttttcttttgcctataattttctgaagctctttatgatgcaccggtgcatttttatttaaaaaatagattgtgactcctcaaataatgttacaattcgatgttcaaa

SEQ ID NO: 357565 - DNA, 120 bp, Artificial Sequence
  ENSG00000140030_35 (sequence is synthesized)
aagcaatccaggtacatagccataaagggatgagctagagaggtctccatattatcattcaatgtgagaataaaaattctatattttattctagaataaaattataaatttctttatcta

SEQ ID NO: 357566 - DNA, 120 bp, Artificial Sequence
  ENSG00000140043_0 (sequence is synthesized)
agtgacgcgcgagcggctcccgcgactgtggctcccgaagctgcttcgggccccagcggtgaggaagaagactctcaaccagggtgacttctaggcgtcctcccggagctaccggggaca

SEQ ID NO: 357567 - DNA, 120 bp, Artificial Sequence
  ENSG00000140043_1 (sequence is synthesized)
ctggcgttattgcccgcaacactgagatagggaatgctcgagaaacagaagcaggagtattttatacagaaatcttgtgaaaccactgcccaaccagagcaatgattgttcaaagagtgg

SEQ ID NO: 357568 - DNA, 120 bp, Artificial Sequence
  ENSG00000140043_2 (sequence is synthesized)
tattgaattctcgacctggaaaaaatggtaatccagtggcagagaatttccgaatggaagaagtctatttaccagataatattaatgaaggacaagtacaagttagaactctttatcttt

SEQ ID NO: 357569 - DNA, 120 bp, Artificial Sequence
  ENSG00000140043_3 (sequence is synthesized)
ctgtggatccttacatgcgttgtagaatgaatgaagacactggcactgattatataacaccttggcagctatctcaagtcgttgatggaggaggtattggaattatagaagaaagcaaac

SEQ ID NO: 357570 - DNA, 120 bp, Artificial Sequence
  ENSG00000140043_4 (sequence is synthesized)
acacaaatttgactaaaggcgattttgtgacttctttctattggccctggcaaaccaaggttattctggatggaaatagccttgaaaaggtagacccacaacttgtggatggacaccttt

SEQ ID NO: 357571 - DNA, 120 bp, Artificial Sequence
  ENSG00000140043_5 (sequence is synthesized)
catattttcttggagctataggtatgcctggtttgacttccttgattgggatacaggaaaaaggtcatataactgctggatctaataagacaatggttgtcagtggggccgcaggtgcct

SEQ ID NO: 357572 - DNA, 120 bp, Artificial Sequence
  ENSG00000140043_6 (sequence is synthesized)
gtggatctgtggctgggcagattggccatttcttaggttgttccagagtggtgggaatttgtggaacacatgagaaatgcatcctcttgacctcagaactgggctttgatgctgcaatta

SEQ ID NO: 357573 - DNA, 120 bp, Artificial Sequence
  ENSG00000140043_7 (sequence is synthesized)
attataaaaaagacaatgtggcagaacagctccgtgaatcatgcccagctggagtggatgtttattttgacaatgttggtggtaacatcagtgatacagtgataagtcagatgaatgaga

SEQ ID NO: 357574 - DNA, 120 bp, Artificial Sequence
  ENSG00000140043_8 (sequence is synthesized)
acagccacatcatcctgtgtggtcaaatttctcagtacaacaaagatgtgccttatcctcccccgctatcccctgctatagaggcaatccagaaagaaagaaacatcacaagggaaagat

SEQ ID NO: 357575 - DNA, 120 bp, Artificial Sequence
  ENSG00000140043_9 (sequence is synthesized)
ttctggtattaaattataaagacaaatttgagcctggcattctacagctgagtcagtggtttaaagaaggaaagctaaagattaaagagacggtaataaatgggttggaaaacatgggag

SEQ ID NO: 357576 - DNA, 120 bp, Artificial Sequence
  ENSG00000140043_10 (sequence is synthesized)
agcagatagtttgcatttcagaagaaatctctttgtaattgctgtaaatgtcatcaaggcaatcatagatttcttttccattttgcatattttcaaagatatgttaaaaaatccttagac

SEQ ID NO: 357577 - DNA, 120 bp, Artificial Sequence
  ENSG00000140043_11 (sequence is synthesized)
tatacatagctcttgatttaaatgtgatcataggtgttatttttagttgcatagggtatttgatacaatcattaatggatcatacacaataggtttttaaaaattaataacttttagtaa

SEQ ID NO: 357578 - DNA, 120 bp, Artificial Sequence
  ENSG00000140043_12 (sequence is synthesized)
ttacttttattaatttaaaatagaacgcttgagaggcactttgtaaagatttgttaaactggaaacgttttacatgatctgatacaaccattaatgaatcatacacaataggttttttaa

SEQ ID NO: 357579 - DNA, 120 bp, Artificial Sequence
  ENSG00000140043_13 (sequence is synthesized)
aattaatattaataacttttattaatttaaaatagaatgcttaaaataaaatagaatgcttgagaggcactgagtaaagatttgttgaactggaaatgttttacatgattcttaaactga

SEQ ID NO: 357580 - DNA, 120 bp, Artificial Sequence
  ENSG00000140043_14 (sequence is synthesized)
aacttggtgtaaaaatagaattgagatggcctttttttcacattgtagactgaaaagagacttaatggtatgatgtgtacatagggactgggggcaggattgggggtttcggagcttgtg

SEQ ID NO: 357581 - DNA, 120 bp, Artificial Sequence
  ENSG00000140043_15 (sequence is synthesized)
taacagtttttgggataggagaccagcggttttgggttgggattagtatgggaagataaataacttaggttggttaagttgacaagatttactccagaggatcatctctttgtatttgcc

SEQ ID NO: 357582 - DNA, 120 bp, Artificial Sequence
  ENSG00000140043_16 (sequence is synthesized)
aaataatttactgtatagcctaaaaactccatatatattgagaaaagcatatgtttattttaggttagcaggcacatactgtcaagttgtaaagattgagagggcaaacagatgtaaaca

SEQ ID NO: 357583 - DNA, 83 bp, Artificial Sequence
  ENSG00000140043_17 (sequence is synthesized)
gtcaagttgtaaagattgagagggcaaacagatgtaaacatcacttgtaggtgattaaaaagattgacagccgggcctgatgt

SEQ ID NO: 357584 - DNA, 84 bp, Artificial Sequence
  ENSG00000140043_18 (sequence is synthesized)
caaaaacagattgacaacaaagacagtttcagaaaatgacaggactgggcaaattaacaaatgtttgtaaacatgaatgttcag

SEQ ID NO: 357585 - DNA, 120 bp, Artificial Sequence
  ENSG00000140043_19 (sequence is synthesized)
ctgggcaaattaacaaatgtttgtaaacatgaatgttcaggaactactgatgtacctcaaaagtttgttttattaattgtactcaaccctcgcagaacagtaaaactgaagattattgtt

SEQ ID NO: 357586 - DNA, 120 bp, Artificial Sequence
  ENSG00000140043_20 (sequence is synthesized)
ctgcggtcagagggccgaggcctgggggcgagctggggtcgtgcagtacagcctctttccggcaaatcacgcgagatttcgttcacccgggctccacagggtcagtgacgcgcgagcggc

SEQ ID NO: 357587 - DNA, 120 bp, Artificial Sequence
  ENSG00000140043_21 (sequence is synthesized)
gcggtcagagggccgaggcctgggggcgagctggggtcgtgcagtacagcctctttccggcaaatcacgcgagatttcgttcacccgggctccacagggagtattttatacagaaatctt

SEQ ID NO: 357588 - DNA, 120 bp, Artificial Sequence
  ENSG00000140043_22 (sequence is synthesized)
gtatgcaacatttgtaataagtagattcaaactgtgttggtaatcagcctccccagttttcgtgagtggcccttttttgttacttttcctggaccatttcatcgcctgagggggtttcac

SEQ ID NO: 357589 - DNA, 120 bp, Artificial Sequence
  ENSG00000140043_23 (sequence is synthesized)
ttttctctgtatgttgctaactcccaaatctccatctgtatttctgacctctttcttgagcactggacctttacctccaagtaaatatcctcaactctggattgcatcttatactctgct

SEQ ID NO: 357590 - DNA, 120 bp, Artificial Sequence
  ENSG00000140043_24 (sequence is synthesized)
gtgctgggattaaaggcgtgagccacggagtccggcctactctgcttttctaaagtggaattatcttcctctgaaatgtttctcctttattttaaatcaccattagtaatttgtgtaccc

SEQ ID NO: 357591 - DNA, 120 bp, Artificial Sequence
  ENSG00000140043_25 (sequence is synthesized)
cattagtaatttgtgtacccaaacctgtcatcaaggcttatctttaaccttgaaaatgcctttttaaagagaactcctttaattcccacggttgagtctctcattcttccgcacgcaaat

SEQ ID NO: 357592 - DNA, 120 bp, Artificial Sequence
  ENSG00000140043_26 (sequence is synthesized)
attttaaaataagtaatttcaagaagtcagtcaaactcacaaagctttaacaaggtggcatccagcttggaagtcaagtgttcaagcccgcagtcgggacatccaagagctctttacatc

SEQ ID NO: 357593 - DNA, 120 bp, Artificial Sequence
  ENSG00000140043_27 (sequence is synthesized)
ctaattacaacacggaacccagactcactgcataccccgtcccgtatataatgcaaaacttgattctgcaagttcctttctcgggcggtgaaacttcgaaggtcctctccatggagacct

SEQ ID NO: 357594 - DNA, 120 bp, Artificial Sequence
  ENSG00000140043_28 (sequence is synthesized)
ttgataaatgtttaagcagtgatcttttctttcgcgtttgcctccattgcaacgcctccgctgatgggaaaaactactccctccgctactgcggggtggcagtgacgtcaacgaattagc

SEQ ID NO: 357595 - DNA, 120 bp, Artificial Sequence
  ENSG00000140043_29 (sequence is synthesized)
tgacctgttttttcgggcttcgcggacataggagtcccgaaggccgagagtgagtgagtgagtgggagcggggcggctgcggctcctcctgtccggggcggagccctgcgtcgcgggcct

SEQ ID NO: 357596 - DNA, 120 bp, Artificial Sequence
  ENSG00000140043_30 (sequence is synthesized)
ggggaggccccgccagcacccttgacgtctgggtcccgagcagtgcggcagccacacgacactgaggcgagcgagtgggtgtgtgcgtggggggtcagccaaacttcctgtcccgcgctc

SEQ ID NO: 357597 - DNA, 120 bp, Artificial Sequence
  ENSG00000140043_31 (sequence is synthesized)
gatataactcactacctttggaccagccttgtgttgttttcttttaatcgagccataggaggcttaatcatgatggtgtgcttgaagatgaatgagcttgaattatctgagaccaaaaac

SEQ ID NO: 357598 - DNA, 80 bp, Artificial Sequence
  ENSG00000140043_32 (sequence is synthesized)
cttgaagatgaatgagcttgaattatctgagaccaaaaacatcttgccccactgggaagctgaggcgggcagatcacgag

SEQ ID NO: 357599 - DNA, 120 bp, Artificial Sequence
  ENSG00000140043_33 (sequence is synthesized)
ctgggcaacagagcgagactccgtctttaaaataaataaataaataaacaaacattttgccccacttaatcttcaatgaacttgttcctattagttaaaaattctaactagatttagtct

SEQ ID NO: 357600 - DNA, 120 bp, Artificial Sequence
  ENSG00000140043_34 (sequence is synthesized)
agttaaaaattctaactagatttagtctttcttcatatatttgctttaggaggcaaactctgacaggcgagtttatctttttggatcctaaatgtgatttttctccctcttcattgggaa

SEQ ID NO: 357601 - DNA, 120 bp, Artificial Sequence
  ENSG00000140043_35 (sequence is synthesized)
acacaaatggacttcttttttatttttaaattgttgaatacttcaaatcttgtgatttaaaaatttttttatttataggagtattttatacagaaatcttgtgaaaccactgcccaacca

SEQ ID NO: 357602 - DNA, 89 bp, Artificial Sequence
  ENSG00000140043_36 (sequence is synthesized)
ttgacgattgttataattcttaattgaaattccggatatatgtataccattaaaaatataaaattggataacaggctggagtgcagtgg

SEQ ID NO: 357603 - DNA, 120 bp, Artificial Sequence
  ENSG00000140043_37 (sequence is synthesized)
aaagttctgggattataggtgtgagctaccacgcccagccaaaattgactaaatttataatgactttcacacgtttcttgtagaaatggttttttttttttacctacttagactctctta

SEQ ID NO: 357604 - DNA, 120 bp, Artificial Sequence
  ENSG00000140043_38 (sequence is synthesized)
tagaaatggttttttttttttacctacttagactctcttactaacagtatgaaaaatgtagattttagtgtcttattctctgttaaccaaaaggagatatagtaaatgctaaagctttgc

SEQ ID NO: 357605 - DNA, 120 bp, Artificial Sequence
  ENSG00000140043_39 (sequence is synthesized)
tttcattattataaggaagagaatgatagagaagctgtttggaattgcatgaattaaaagtcaaactcacattttaaattaatatcctcaaataagaaaccacttattgaattctagaag

SEQ ID NO: 357606 - DNA, 120 bp, Artificial Sequence
  ENSG00000140043_40 (sequence is synthesized)
tgtaaacattttgatagaattttatgaagtcggcctggcacagtggctcatgcctgcaatcccagtgctttgggaggccaacttggcaggattacttgaggaaaggagcacaagaccagc

SEQ ID NO: 357607 - DNA, 120 bp, Artificial Sequence
  ENSG00000140043_41 (sequence is synthesized)
ctgggcaacatagtaagactcttcagtaaataaattagcccagcgtggtggcacgcctgttgtcctaactacttgagaggctgaggcaggaagagtacttcagcccaggagtttgaagtt

SEQ ID NO: 357608 - DNA, 120 bp, Artificial Sequence
  ENSG00000140043_42 (sequence is synthesized)
cactgtactccagcctgggtgacagaccctgtttctttaaaaaaacaaaaaaagaatcttataaaagtacatccttttataaataatagcctttataggttgaaaccattgaaaacaaac

SEQ ID NO: 357609 - DNA, 120 bp, Artificial Sequence
  ENSG00000140043_43 (sequence is synthesized)
tgaaaccattgaaaacaaacattgtgtccgagctgtgattttagttcgccacaagcttgaaaaataatgaattgcacgtgatgttttgggtctgattatttattccttttatgaaatcag

SEQ ID NO: 357610 - DNA, 120 bp, Artificial Sequence
  ENSG00000140043_44 (sequence is synthesized)
ttcaatgagtgaaagccaaaaattgtgagattttaacatttaaactacctatggtccccaacttatgatggttctactttacagtgatgcaaaagccctatgcattcagtggaagccata

SEQ ID NO: 357611 - DNA, 120 bp, Artificial Sequence
  ENSG00000140043_45 (sequence is synthesized)
ctttgaattttgaattttggtcttttcccaggctagcgatatcagtatgacactctctcgagatgctgggcagcggcaacaagctgtagctcctggtcagccaccgtatgtggctgaaca

SEQ ID NO: 357612 - DNA, 120 bp, Artificial Sequence
  ENSG00000140043_46 (sequence is synthesized)
actccgtgaatcatgcccagctggagtggatgtttattttgacaatgaccataagggtaaacaactggtactctacggtgtactgtgttgccagatgattttgcccagccataagtgttc

SEQ ID NO: 357613 - DNA, 120 bp, Artificial Sequence
  ENSG00000140043_47 (sequence is synthesized)
tgagcatgttttaggtaggctaggctaagctatgatgttcagtaggttaggtatattaaatgcattttttgcttaggatattttcaactaatgatggttttattgggacatatccctatc

SEQ ID NO: 357614 - DNA, 120 bp, Artificial Sequence
  ENSG00000140043_48 (sequence is synthesized)
ataagttgaggaacataagtctacctttgttcaattttaataatttttttttaggatgacattgtctgccctcagttcttttagtttcaaattacttttcattaaaagcagcgtaatcta

SEQ ID NO: 357615 - DNA, 120 bp, Artificial Sequence
  ENSG00000140043_49 (sequence is synthesized)
accttaattgtaatgaacactgtcatatacctgtaatatcttgtatactggtacatttttacatttaaatgtgacaatataaagccatttaatcttcaaatttcccccctagattggcca

SEQ ID NO: 357616 - DNA, 120 bp, Artificial Sequence
  ENSG00000140043_50 (sequence is synthesized)
ctttatatgttgtgatatctttttacctaatactgagaaaaaaatttataaaattggagggattattgtgacttaatgtgatgatcagtattgtatttaagtgatacaaaagagcttgct

SEQ ID NO: 357617 - DNA, 120 bp, Artificial Sequence
  ENSG00000140043_51 (sequence is synthesized)
gatacctacttccatttacttgcagatttgtactatgaacttcaatttcagttatttgctaccaatattatatttttcacttttggtttatttttgtgaaaaattacagttgcattgttg

SEQ ID NO: 357618 - DNA, 120 bp, Artificial Sequence
  ENSG00000140043_52 (sequence is synthesized)
aaatgctgaagcactgatccctaactcaccactgaccaactcacagccatggccccagacctatgggtttcataggctgcatgtatttatgcatatttactaacaatattataaaatatc

SEQ ID NO: 357619 - DNA, 120 bp, Artificial Sequence
  ENSG00000140043_53 (sequence is synthesized)
aacatgaggtattaacactacatagtcctttgctgcatctaaaattatttgcagttgagattattaaattgtttaaatccaaaaaaatacagttctaccactaataagtagcaacaacaa

SEQ ID NO: 357620 - DNA, 120 bp, Artificial Sequence
  ENSG00000140043_54 (sequence is synthesized)
ctaatgtaattcttttgctgattaccaaccatttatttgccttggtgttcctttggaatgtaattatttctagctagttaaaattcttaaatacctctaacaggtaaattaaaaaaaaaa

SEQ ID NO: 357621 - DNA, 120 bp, Artificial Sequence
  ENSG00000140043_55 (sequence is synthesized)
tcgaactagttgacagaaaggattaaatagtcaaggaggcttccattatggcagccataaaatcagtaaacataggaaagggatattttatcattatttttctctgtgcagatgaatgag

SEQ ID NO: 357622 - DNA, 120 bp, Artificial Sequence
  ENSG00000140043_56 (sequence is synthesized)
tctagataaataagatttagtgaaaacgtatacattgctgaagactgcagataagaagccattaggcacagggactttggctctacgagctggcgtcttgctttacttctcccagaggtc

SEQ ID NO: 357623 - DNA, 120 bp, Artificial Sequence
  ENSG00000140043_57 (sequence is synthesized)
atacagtcttttctttacttctaactttttcctatggccatgacaagcataactctttatgtcaatttaccccctgctattaagaggctcagctgggcatggtggctcttgcctgtaatc

SEQ ID NO: 357624 - DNA, 120 bp, Artificial Sequence
  ENSG00000140043_58 (sequence is synthesized)
cccaggagttcaagaccagcctggacaagagagtgagacccagtctcaacaaaaaattaaaaatttagacaggtgtggtggtgtgtgcctgtagtcctagctactcgagaggctgatgtg

SEQ ID NO: 357625 - DNA, 120 bp, Artificial Sequence
  ENSG00000140043_59 (sequence is synthesized)
gtgcctgtagtcctagctactcgagaggctgatgtgggcagatcgtttgagcctgggaggttgaggctgcattgagccatgattgcgccactgcacttccgttcgggtgatggagtgaga

SEQ ID NO: 357626 - DNA, 120 bp, Artificial Sequence
  ENSG00000140044_0 (sequence is synthesized)
cctgctttctcgagcgctcctgcaccgtggggtggcggagccgggggactgcatggaacccgggacgcccccgcggggagaggagcgcgagcggccgcgggaggagggcgcccaaggcgg

SEQ ID NO: 357627 - DNA, 120 bp, Artificial Sequence
  ENSG00000140044_1 (sequence is synthesized)
cgggggaggttaaggctggcctgccactcctcctgctatgatgcctgggcagatcccggacccttcggtgaccacaggctccctgccagggcttggccccctgaccgggctccccagctc

SEQ ID NO: 357628 - DNA, 120 bp, Artificial Sequence
  ENSG00000140044_2 (sequence is synthesized)
ggccctgactgtggaggagctgaaatacgctgacatccgcaacctcggggccatgattgcacccttgcacttcctggaggtgaaactgggcaagaggccccagcccgtgaaaagtgagct

SEQ ID NO: 357629 - DNA, 120 bp, Artificial Sequence
  ENSG00000140044_3 (sequence is synthesized)
agatgaggaagaggagcgaaggaaaaggcgccgggagaagaacaaagtcgcagcagcccgatgccggaacaagaagaaggagcgcacggagtttctgcagcgggaatccgagcggctgga

SEQ ID NO: 357630 - DNA, 120 bp, Artificial Sequence
  ENSG00000140044_4 (sequence is synthesized)
agagctgaagacccagattgaggagctgaagcaggagcggcagcagctcatcctgatgctgaaccgacaccgccccacctgcatcgtccggaccgacagtgtcaagacccccgagtcaga

SEQ ID NO: 357631 - DNA, 120 bp, Artificial Sequence
  ENSG00000140044_5 (sequence is synthesized)
aggcaacccactgctcgagcagctcgagaagaagtgaccatgggctgggaggaggtggaggaggaggaagaggagaaggaaaagtgacgaagagagaggaggaggggggccccagatggc

SEQ ID NO: 357632 - DNA, 120 bp, Artificial Sequence
  ENSG00000140044_6 (sequence is synthesized)
ccttcctttggtgcatgaaaaactgtacaatgaggttcagcacagccagcatcagccgagcttttttgtgaaactcagatcagccacccaggaggaagagcgggctgaggaaacccagag

SEQ ID NO: 357633 - DNA, 120 bp, Artificial Sequence
  ENSG00000140044_7 (sequence is synthesized)
ggaccaagcgctgagaccaaagttgaccctcgggtagggttgtcctgcctggggccccacttgaaggaggcaggacagaggcaccgaggccagggagacgcccaacgaggcagccctggg

SEQ ID NO: 357634 - DNA, 120 bp, Artificial Sequence
  ENSG00000140044_8 (sequence is synthesized)
ggaggctcccgcagcccagggacctcgagctttccccgcgccgggcgctgcagccgggcccctcccgcgaggcgcccggcagcctgaggcttccttttggttcccgccccgggacgggag

SEQ ID NO: 357635 - DNA, 120 bp, Artificial Sequence
  ENSG00000140044_9 (sequence is synthesized)
ttcccgccccgggacgggaggctccgtccgctccctggacagccggggtgctccctccttctccctcccgcgctctcctcccccgtccgtttgcagggaggtgctctcctcgggcggcgg

SEQ ID NO: 357636 - DNA, 120 bp, Artificial Sequence
  ENSG00000140044_10 (sequence is synthesized)
caacccacctgcccccagccctgcccctcgccctgatgcgaagctggagaggggcgtgctgcggggccctgatgcccccacccacctcggtccagcgcggccctgcccaggaggcggcag

SEQ ID NO: 357637 - DNA, 120 bp, Artificial Sequence
  ENSG00000140044_11 (sequence is synthesized)
ccgggcgcaccctcgccagccctgctggagtttgctgtgggcactgaggcgcgggcgcccttccaaagcacatactcaccgaatgtttacagactggctgtcctggcagggctttcaact

SEQ ID NO: 357638 - DNA, 120 bp, Artificial Sequence
  ENSG00000140044_12 (sequence is synthesized)
tttaatattttttacaaaaaaaaagattttatacaagcaatatatatatggatttctataatcactcgatgtgatacagtataaatatgctatggtttgtttgttatgaacagatagcca

SEQ ID NO: 357639 - DNA, 120 bp, Artificial Sequence
  ENSG00000140044_13 (sequence is synthesized)
atatgctatggtttgtttgttatgaacagatagccaccagttacggccgttgtgtgtaactcctaagtactgtagtctctgggtgtcgggggtggccagggcgggggcggggtgcatttc

SEQ ID NO: 357640 - DNA, 120 bp, Artificial Sequence
  ENSG00000140044_14 (sequence is synthesized)
catccttgtaaacccttcatagtactcagtcctgtatcgctcagtaaacattgctcttacttacatagccgccttgcgtggtgtctgcctggggaatgggtgcaaggccctctcagggtc

SEQ ID NO: 357641 - DNA, 120 bp, Artificial Sequence
  ENSG00000140044_15 (sequence is synthesized)
ggagactgtttggagcctctgctataggcctgttcattttcacaacagctctcctatttcacagatgaggaagctaaggctcagagacattaagccacctgcagttactattttgagagc

SEQ ID NO: 357642 - DNA, 120 bp, Artificial Sequence
  ENSG00000140044_16 (sequence is synthesized)
agtcagagtgttcgctcactctgcagatgttttctgagggcctgttgtgtgtgccaggccctgagaattcactggaggatgaaacagacctaagtcttgcccttgtggggcctccagtaa

SEQ ID NO: 357643 - DNA, 120 bp, Artificial Sequence
  ENSG00000140044_17 (sequence is synthesized)
ggagtgaatcctgtgcttgctccataagttgtctcatttcgtcttcatggcagccttgccagggaacagcacttgtccccaattcacagatggcgaattagaggtccagggaattaaact

SEQ ID NO: 357644 - DNA, 120 bp, Artificial Sequence
  ENSG00000140044_18 (sequence is synthesized)
cgcagacaccatttgttgaagacttattttgtgacaagcagacatagtctcttcccttctcacaagagcacaaactaggcacgattcttctcattttacagatggtttaactgaggctca

SEQ ID NO: 357645 - DNA, 120 bp, Artificial Sequence
  ENSG00000140044_19 (sequence is synthesized)
gagaaggtaagcgacttatccaaggtaacccagctagcaagggatagagctggtgtttgaactctccctccagaggcctgtgactctcctcctgtcaccaacccactatgattgtcctca

SEQ ID NO: 357646 - DNA, 120 bp, Artificial Sequence
  ENSG00000140044_20 (sequence is synthesized)
tggttgaataggaagcttatgaggccacagttatagatttagtttctgggaaggctggatagagttccaggttgtcccatgatcacagagtgaaccaactaccctggtcaatgtgtgtct

SEQ ID NO: 357647 - DNA, 120 bp, Artificial Sequence
  ENSG00000140044_21 (sequence is synthesized)
gacccagggaagggtgtggatggcttctctgccccctcacctcgacagctgaatccctgccacccagggccggagcagctcagtggcattcactcagtgcctgctgtgtacctggcactc

SEQ ID NO: 357648 - DNA, 120 bp, Artificial Sequence
  ENSG00000140044_22 (sequence is synthesized)
gcagttctcaaggcatgtcacgcatgaggaaggcgggagaggtgtttttagcttccttgtatactgaagcttgcaaaggctacagtttacccaactaaacttgactcctgcattctaatc

SEQ ID NO: 357649 - DNA, 120 bp, Artificial Sequence
  ENSG00000140044_23 (sequence is synthesized)
atgtgttctttctcctccatccctggacttaggataactagttgctggtgatgacttcgtgtcaagaacagcagtgaacctgggttgcttcccaaattgtggacgaggccttctgggatg

SEQ ID NO: 357650 - DNA, 120 bp, Artificial Sequence
  ENSG00000140044_24 (sequence is synthesized)
ggcagaagtggagaatggtgattaacacacctgtgatccctccctcgctcactcctctcagtttccctccacccaacacacttggtgtggactcccctgcaccccgccctagaaacagga

SEQ ID NO: 357651 - DNA, 120 bp, Artificial Sequence
  ENSG00000140044_25 (sequence is synthesized)
cctggtcctctcactgtcagctgtggcagaaggttgtggcagcgggttgccttctgtctcgggggtcttgaggctgtcggtccggacgatgcaggtgaggcagtgtcagttctgcatcag

SEQ ID NO: 357652 - DNA, 120 bp, Artificial Sequence
  ENSG00000140044_26 (sequence is synthesized)
gaacccctcgcgctgtaatcctttgatatttttcaagccatgagaaaaatgaagtggacttaccagggtccctccagtgacctagtggatgttcttacaggactgccgtgtgccactggc

SEQ ID NO: 357653 - DNA, 120 bp, Artificial Sequence
  ENSG00000140044_27 (sequence is synthesized)
tgtggcttccctggtcctgtgcttggccaccgggagctggcatctccaaaatagagcctccttagcctgtgcaggtgggctgtcttccaaagtcaccacaccagtgacttgtgctgtgcg

SEQ ID NO: 357654 - DNA, 120 bp, Artificial Sequence
  ENSG00000140044_28 (sequence is synthesized)
gagccttcctcaccaggaccactggctgctcctgtggctagaagtcacaattataggcttcattgcaagagccagcatttgagtttcttctgggcacctgccactgtgcatgtgtgacct

SEQ ID NO: 357655 - DNA, 120 bp, Artificial Sequence
  ENSG00000140044_29 (sequence is synthesized)
caactgctttgtgcaccctgactggggggtaggtgctagcgttccaacattacagatgagaaaaccgaggcacacagaagaggtaacctgcccaaggtcacaggtgttaggtggcagagc

SEQ ID NO: 357656 - DNA, 120 bp, Artificial Sequence
  ENSG00000140044_30 (sequence is synthesized)
caagatgttattgtcagtctgacttcaggtgcataaaacctgaggctgagcctccccatgagaggaaaaatgtgtttgtggtgtgacctcagttgccagggaacttgtgcaggaagccgg

SEQ ID NO: 357657 - DNA, 120 bp, Artificial Sequence
  ENSG00000140044_31 (sequence is synthesized)
gagagatggcacagacccacctgtgctcacagtacatgttaagaattcccaagtctcaggcaaaccatctccaagggtgttcacagaagacacaccttaaaggcaaacgggttcatgatg

SEQ ID NO: 357658 - DNA, 120 bp, Artificial Sequence
  ENSG00000140044_32 (sequence is synthesized)
taatcttctattgactagctgtgaacctcatttttcttatctgtgaagtgggaacagtaataatccaagtctttttatggagttatcaagatcaaaaaaggaatggatatacaaagtgtt

SEQ ID NO: 357659 - DNA, 120 bp, Artificial Sequence
  ENSG00000140044_33 (sequence is synthesized)
ttgtgaaataaaagctccctaaaatggtaattattttgtcctctgttagtgtcggtagttattgatatctacatagtacaggttatttaaatatgttttattctgtaaagatgggctgcc

SEQ ID NO: 357660 - DNA, 120 bp, Artificial Sequence
  ENSG00000140044_34 (sequence is synthesized)
aagtttgtgttctgaccctgtacgtggtccctatggtgtgatgaatgcctgggatcgcagactcctggatctgttcagctcctgactggtcacaaccagccatgctggatgcatcattcc

SEQ ID NO: 357661 - DNA, 120 bp, Artificial Sequence
  ENSG00000140044_35 (sequence is synthesized)
ctccctgggcctcagtgtgccctcctgccaggtggtcacacataagacctgtgccacctctgcccagggttcctatgagaatcaatcgagttgatgaatgcaaccatggcctgagaaaga

SEQ ID NO: 357662 - DNA, 120 bp, Artificial Sequence
  ENSG00000140044_36 (sequence is synthesized)
caagacgctttagctatcagatgggcagaaacaagtatgtgttggtaagaatatggattaaaggttgggaggccaagatgggtggatcatgaggtcagaagattgagaccaccctggata

SEQ ID NO: 357663 - DNA, 75 bp, Artificial Sequence
  ENSG00000140044_37 (sequence is synthesized)
aaaatgtggattaaaggaaacttagatatgctgccagtgagaaactgtgcaaagcaatttggaaataaccagtaa

SEQ ID NO: 357664 - DNA, 120 bp, Artificial Sequence
  ENSG00000140044_38 (sequence is synthesized)
agtgagaaactgtgcaaagcaatttggaaataaccagtaaaactaaagctaaacgcatcctttgacctagcagttttcctcctagtcttgggaggaactctagcacaggggcaaaaggaa

SEQ ID NO: 357665 - DNA, 120 bp, Artificial Sequence
  ENSG00000140044_39 (sequence is synthesized)
atgtacaagaatgttcactgatggctttgtttgtatttttaaaaagttgaaaacaacctaaatgatgatcagcataagaacaaataaattgtggtattttcctaaaattgaatattactc

SEQ ID NO: 357666 - DNA, 120 bp, Artificial Sequence
  ENSG00000140044_40 (sequence is synthesized)
aacaggtaaaaaagaatgaaccagagctatatgtatcaatatggataaatctcagaaacctactgttgagatggagggtaggggagtgaactgcggaaggataccacttatgtcatattt

SEQ ID NO: 357667 - DNA, 120 bp, Artificial Sequence
  ENSG00000140044_41 (sequence is synthesized)
ctaactaaatgtatacgttgatactttattgtttatggctacacacacatctgggtaatagaggtataaaagcctgcacaagaatgctgtcaatatcacaatcagtcatagggagtgctc

SEQ ID NO: 357668 - DNA, 120 bp, Artificial Sequence
  ENSG00000140044_42 (sequence is synthesized)
ctgggagggccgcggagaggagggaactagggatgccactgcaagggtaagtaggacgctggacttcaacttcaactatacacataacatttcatttatttttttaaaatccccatcaaa

SEQ ID NO: 357669 - DNA, 120 bp, Artificial Sequence
  ENSG00000140044_43 (sequence is synthesized)
tgtagaatgacaggatttttcagaggtgggtgatgtgtgcacagatgtgggctatcttctccacactcctctgtatatttgatattctttgcaataaaagagaacaagccacaatacaaa

SEQ ID NO: 357670 - DNA, 80 bp, Artificial Sequence
  ENSG00000140044_44 (sequence is synthesized)
cctgcagccgggccccggccccgggggcgccgcctccccccgcaccttctgcacggctggcctgccactcctcctgctat

SEQ ID NO: 357671 - DNA, 120 bp, Artificial Sequence
  ENSG00000140044_45 (sequence is synthesized)
tgaggctcatctggctgaacaactatgaagccatttaagtctgttttccttctactgtgcccaaaaggcacaaggcaacctggcctgaggttggagcatggagatctagaggaactcatg

SEQ ID NO: 357672 - DNA, 120 bp, Artificial Sequence
  ENSG00000140044_46 (sequence is synthesized)
gatggattcaggcgggatgtgaaagtgctgggagtgagggcctgggcctcctctgggtttagccacccttccaggttgtgtacaacctgccatatgctggggctcattgactgtgctctg

SEQ ID NO: 357673 - DNA, 120 bp, Artificial Sequence
  ENSG00000140044_47 (sequence is synthesized)
ctgaagagggccttttgctgctcgccttcactctcagtcttggggccttccccatcatcttgcttctcgccttctggatctcctcgacttttggaagccgcgtgacctacgtcattcaga

SEQ ID NO: 357674 - DNA, 120 bp, Artificial Sequence
  ENSG00000140057_0 (sequence is synthesized)
accttagcaaccagcgcggctcccaccatggctgaagaagaggaaactgctgctctcacggagaaggttatccggacccagagggtgtttataaacctgttggattcctacagcagcgga

SEQ ID NO: 357675 - DNA, 120 bp, Artificial Sequence
  ENSG00000140057_1 (sequence is synthesized)
aacatcgggaagtttctatctaactgtgtagttggggcttcgcttgaagaaattacagaggaagaggaagaggaagatgaaaataagtcagctatgctggaagcttcctcaaccaaagtg

SEQ ID NO: 357676 - DNA, 120 bp, Artificial Sequence
  ENSG00000140057_2 (sequence is synthesized)
aaggaaggcacattccagattgtgggcacgctgtccaagcctgacagcccgcggcctgactttgcggtggagacgtactctgccatctctcgagaagaccttctcatgcgcctgctggag

SEQ ID NO: 357677 - DNA, 120 bp, Artificial Sequence
  ENSG00000140057_3 (sequence is synthesized)
tgtgatgttattatttataacatcactgagagctcacagcaaatggaggaagccatctgggcagtctctgcactcagtgaagaagtcagccactttgaaaagcgaaagctatttatttta

SEQ ID NO: 357678 - DNA, 120 bp, Artificial Sequence
  ENSG00000140057_4 (sequence is synthesized)
ctgtcgacggtgatgacttgggcgcgctccaaagccctggaccccgaggattctgaggttccattcactgaagaagattatcgaagaagaaagtctcatcctaattttctggaccacata

SEQ ID NO: 357679 - DNA, 120 bp, Artificial Sequence
  ENSG00000140057_5 (sequence is synthesized)
aatgctgaaaaaatggttctcaaatttggaaaaaaggccagaaaatttgcagcatacgtagttgctgctggactccagtatggagcggaaggaggcatgttacacacattttttaagatg

SEQ ID NO: 357680 - DNA, 120 bp, Artificial Sequence
  ENSG00000140057_6 (sequence is synthesized)
gcttggttgggcgagattcctgcattaccagtttttggcgatggaacaaatgtaattccaacaatccatgttcttgatctagcaggagtgatacaaaacgtcatagatcacgtgccaaag

SEQ ID NO: 357681 - DNA, 120 bp, Artificial Sequence
  ENSG00000140057_7 (sequence is synthesized)
cctcactacctggttgctgtggatgagtctgttcataccctggaagacatagtcaagtgtatcagtaaaaatactggccctgggaaaatccagaaaatacccagagaaaatgcataccta

SEQ ID NO: 357682 - DNA, 120 bp, Artificial Sequence
  ENSG00000140057_8 (sequence is synthesized)
accaaggacttaacgcaagattgtcttgaccatttactggtcaacttaagaatggaagcgctctttgtgaaggagaattttaatattcgatgggctgcccaaacaggatttgtggaaaat

SEQ ID NO: 357683 - DNA, 120 bp, Artificial Sequence
  ENSG00000140057_9 (sequence is synthesized)
atcaacactatcctcaaggagtacaagcaaagcagaggattgatgccaatcaagatctgcattcttggtccccctgctgtgggaaaatccagtattgctaaagaattggccaactactac

SEQ ID NO: 357684 - DNA, 120 bp, Artificial Sequence
  ENSG00000140057_10 (sequence is synthesized)
aaactgcatcacatccaactgaaggatgtcatttctgaagccatagcaaaactggaggcgattgttgcccctaacgatgtaggggaaggagaagaagaagtcgaagaggaagaggaggag

SEQ ID NO: 357685 - DNA, 120 bp, Artificial Sequence
  ENSG00000140057_11 (sequence is synthesized)
gagaatgtggaagatgcacaggagctcctagatggcatcaaggagagcatggagcagaatgcaggtcaactagacgatcaatatataattagatttatgaaagaaaagctaaaatcaatg

SEQ ID NO: 357686 - DNA, 120 bp, Artificial Sequence
  ENSG00000140057_12 (sequence is synthesized)
ccttgcaggaatcaaggttatattttggatggattcccaaagacctatgatcaagcaaaagacctgttcaatcaggaagatgaggaggaggaagatgatgtcagaggcagaatgtttccc

SEQ ID NO: 357687 - DNA, 120 bp, Artificial Sequence
  ENSG00000140057_13 (sequence is synthesized)
cttcggatgagtttctgaaggagcgtgtgataaaccttcctgagagcatcgtggcggggacccactacagccaagaccgattcctccgggctctgagcaactaccgggacatcaatatcg

SEQ ID NO: 357688 - DNA, 120 bp, Artificial Sequence
  ENSG00000140057_14 (sequence is synthesized)
acgatgagactgtcttcaactattttgatgaacttgaaattcacccgatacatattgatgtaggaaaacttgaagatgctcagaatagacttgctatcaaacagctcatcaaagagattg

SEQ ID NO: 357689 - DNA, 120 bp, Artificial Sequence
  ENSG00000140057_15 (sequence is synthesized)
gggagcctcgaaattatggtttaacagacgaagaaaaggcagaagaggagcggaaggctgcggaggagcggctggccagggaggctgctgaggaagcagaacgcgagcaccaggaggccg

SEQ ID NO: 357690 - DNA, 120 bp, Artificial Sequence
  ENSG00000140057_16 (sequence is synthesized)
tggagatggcagagaagatagctcgctgggaggagtggaataaacgactggaggaagtgaaaagagaagaaagagaattactggaggctcagtcaattcccctgagaaactatttaatga

SEQ ID NO: 357691 - DNA, 120 bp, Artificial Sequence
  ENSG00000140057_17 (sequence is synthesized)
cctatgtgatgccaactcttattcagggcctgaatgaatgttgcaacgtccgacccgaagaccctgttgattttctggcagaatatctcttcaagaacaatcctgaagcacagtgaaact

SEQ ID NO: 357692 - DNA, 120 bp, Artificial Sequence
  ENSG00000140057_18 (sequence is synthesized)
tgaaagatctggtattatctacctttacagaaccacagatcacttattatactttgaaaaattgctttgaaaaatgcttttccagttcttagaaaattctttttttgtagacaaatattc

SEQ ID NO: 357693 - DNA, 120 bp, Artificial Sequence
  ENSG00000140057_19 (sequence is synthesized)
tataaactagaatctctattaaaagctatatgacatgactatgtcattaaaactatatttgaaatgtaaattgataaagacatttgtgcatagctcatgagacaaatactgatttaatat

SEQ ID NO: 357694 - DNA, 120 bp, Artificial Sequence
  ENSG00000140057_20 (sequence is synthesized)
tttattctttagtcagatctaaatataccgcttctgtacactaatgtttataggtatttatagcatgaagaaaatcagactatatattgtagactatgtattattctaacatgtaggcta

SEQ ID NO: 357695 - DNA, 120 bp, Artificial Sequence
  ENSG00000140057_21 (sequence is synthesized)
atttacatgacttgttatcgccccaataacaatgttattagaaatggaaataaattgaagtgatttatgcctgttgactcacagtaaatcagacaagattggtgcctgtaaggtggcttt

SEQ ID NO: 357696 - DNA, 120 bp, Artificial Sequence
  ENSG00000140057_22 (sequence is synthesized)
ttttttttttttttttaaatgaagcaatggttagggaaaggttgctttgagttcagggtcaggatcccagacaatgaatcggagagaactgtaaacctttaggcggagaaatctgcataa

SEQ ID NO: 357697 - DNA, 120 bp, Artificial Sequence
  ENSG00000140057_23 (sequence is synthesized)
caggataattccaatctttgtgataagtgagaagttgctaaatattttcaacacactttataacataggcataagttatcaatcctatagtcttttccagttctaaaaatcccataagat

SEQ ID NO: 357698 - DNA, 120 bp, Artificial Sequence
  ENSG00000140057_24 (sequence is synthesized)
tcctagaattaccctaaatgagaaattagtttaggtttaatggcatatgtattttatctctttaaataatgtaacctaatataactgcccgactttttatttgtgctaaaatacatgtaa

SEQ ID NO: 357699 - DNA, 120 bp, Artificial Sequence
  ENSG00000140057_25 (sequence is synthesized)
cataaaattgaccactgtaaccattttaaagtgtataattcagtggcactaagttcattcacaatgatctgcagccaccactatctagtccagaactttctcatcaccccaaatggaaac

SEQ ID NO: 357700 - DNA, 120 bp, Artificial Sequence
  ENSG00000140057_26 (sequence is synthesized)
ccagcacctattaggcagtcacgctccattattccctccccccagttccaggcaaccacgaatctgctttctgtctctatggatttacctattataaataaaaccatataatgggtggtc

SEQ ID NO: 357701 - DNA, 120 bp, Artificial Sequence
  ENSG00000140057_27 (sequence is synthesized)
caccttccgctccaacgccttgacaacttgttttactgtttgcctcccctcccctctcttccacagacatggccaggttgagggaatggctttctcctgtaatggagatttacctcacag

SEQ ID NO: 357702 - DNA, 120 bp, Artificial Sequence
  ENSG00000140057_28 (sequence is synthesized)
accccacttttaattttcggccaaagcaaagagtttaaattagatagtgttggaaaggatggatctaagttggactttcagactcatacagttctcctcttcagcatattctgccttgca

SEQ ID NO: 357703 - DNA, 65 bp, Artificial Sequence
  ENSG00000140057_29 (sequence is synthesized)
atattctgccttgcattatccaagacgagtctgtgccatgatgggtgccatctgtgaaggagaaa

SEQ ID NO: 357704 - DNA, 120 bp, Artificial Sequence
  ENSG00000140057_30 (sequence is synthesized)
gcaacatagcaagatcctgtctcttatatttatgaaaataattttttaagagaaacatcctttggtaatgcaccactcaggaataatataccactgctgtctccagaaacaatgctgtct

SEQ ID NO: 357705 - DNA, 120 bp, Artificial Sequence
  ENSG00000140057_31 (sequence is synthesized)
ccacgtgacaaattcaacacagtcctagtcctgagacatttaaatgtctgagaagaagtggccctcttcttctcctgggccaactcctcccttaccctgcctgctactctctggagccta

SEQ ID NO: 357706 - DNA, 120 bp, Artificial Sequence
  ENSG00000140057_32 (sequence is synthesized)
ccatacagctttccacatgctgtaccctggagtggccttctctctttttttttttattcatccttcaagagttgtgtctcttcctccaggaagccgttcatgattcctacttctccctca

SEQ ID NO: 357707 - DNA, 120 bp, Artificial Sequence
  ENSG00000140057_33 (sequence is synthesized)
ctcccagtttggattctgagctcttttctgagctcccatatcatcctttgcctgcctagatcatagtgcttttcacactcgttgttatcacctgtctatcgtgggggtccatggacactg

SEQ ID NO: 357708 - DNA, 120 bp, Artificial Sequence
  ENSG00000140057_34 (sequence is synthesized)
actgtcagctccttgagggtggagaccgtgacttgtttatccctgtgtttatccatgtatctgtggcacctaacacagccactgccacaaagtggcctcaataaacacttgtggaatgga

SEQ ID NO: 357709 - DNA, 120 bp, Artificial Sequence
  ENSG00000140057_35 (sequence is synthesized)
cgcatttcctggcgtggagctgagattcagtctgagagccatcagccaccaaagcctgctgggttcgctttttttctttggaatccaaaaccccatcattcaatagaatttatcttgaca

SEQ ID NO: 357710 - DNA, 120 bp, Artificial Sequence
  ENSG00000140057_36 (sequence is synthesized)
atctaggaacactagacaaagtagggctatagaaaaactggtctgagacttacctaaagtatgaaatccatgataataatatggatagatacttctgaagaatagaatatttttaattat

SEQ ID NO: 357711 - DNA, 120 bp, Artificial Sequence
  ENSG00000140067_0 (sequence is synthesized)
agttgagatcaaacagacttttcattcctggttggtgcctgggagagtgacgaggcctatcagtactggaggacacagtcaagtgtttggtggaagaacagcccacattaagagctttgg

SEQ ID NO: 357712 - DNA, 120 bp, Artificial Sequence
  ENSG00000140067_1 (sequence is synthesized)
aaagactttcgtaagacaccaactcacctcccacggagtccacgggcctggtggggaggcttactactggctaagaaaggagagacagcttcatgagcgggcagtgcagaatgggccagc

SEQ ID NO: 357713 - DNA, 120 bp, Artificial Sequence
  ENSG00000140067_2 (sequence is synthesized)
agggctgcaggtgccgtgggatctcaaggaagctgggagctgagctgagtggctctaaaatgtcttgatgcccttagaagagagaagatcttctggagagaggaatgatgcagcccccac

SEQ ID NO: 357714 - DNA, 120 bp, Artificial Sequence
  ENSG00000140067_3 (sequence is synthesized)
aaatcacagaaggcctggggagaaaagggcgagcacagcaaagcaggtcagctcggtgcccttccttggagctgccggccaccagcagagcctaccctcttcatggaaagcctcgtgcag

SEQ ID NO: 357715 - DNA, 120 bp, Artificial Sequence
  ENSG00000140067_4 (sequence is synthesized)
tggccccctggtgatggcatccgacagtgatgtgaagatgctgctgaacttcgtgaacctggcgtccagcgacatcaaggcagccctggataagtccgcaccctgccgccgctccgtgga

SEQ ID NO: 357716 - DNA, 120 bp, Artificial Sequence
  ENSG00000140067_5 (sequence is synthesized)
ccatcgcaagtacctgcagaagcagctcaagcgcttctcccagaagtattcccggctcccgcggggccttcctggcagagctgctgagccctacctgaaaagggggtctgaggaccggcc

SEQ ID NO: 357717 - DNA, 120 bp, Artificial Sequence
  ENSG00000140067_6 (sequence is synthesized)
caggaggctgctcctggatttgggccctgattccagccccggcgggggtgggggctgcaaggagaaggtgctgaggaacccctacagggaggaatgtcttgctaaggagcagctcccaca

SEQ ID NO: 357718 - DNA, 120 bp, Artificial Sequence
  ENSG00000140067_7 (sequence is synthesized)
gctgcccagcctggccaggtgcccatgaggaaaagacagctgcccgcttccttctgggaagagccaaggcccacccacagctaccatgtggggctggaggggggactgggccccagggag

SEQ ID NO: 357719 - DNA, 120 bp, Artificial Sequence
  ENSG00000140067_8 (sequence is synthesized)
ggacctccctatgagggtaagaaaaattgcaagggcttggagcccctgggacctgagactaccctggtgtccatgtctccaagggccctggctgaaaaggagccgctcaagatgcctggg

SEQ ID NO: 357720 - DNA, 120 bp, Artificial Sequence
  ENSG00000140067_9 (sequence is synthesized)
gtctccttggtgggccgcgtcaatgcctggagttgctgccccttccagtaccatggacagcccatctatccgggccccctgggggcactgcctcagagtcctgtccccagcctgggcctt

SEQ ID NO: 357721 - DNA, 120 bp, Artificial Sequence
  ENSG00000140067_10 (sequence is synthesized)
tggaggaagagcccagcctttcccggggagctggcgcacctctgcaaggatgtggacggcctggggcagaaggtgtgcaggcccgtggtgctgaaacccatccccaccaagccagccgtg

SEQ ID NO: 357722 - DNA, 120 bp, Artificial Sequence
  ENSG00000140067_11 (sequence is synthesized)
cccccacccatcttcaatgtctttggctacctctagccacgcggagagggcctcagcccccacctctggcctgcaggagtgtcgaggtccccgaggcgctctcctgtgaggaggtggctg

SEQ ID NO: 357723 - DNA, 120 bp, Artificial Sequence
  ENSG00000140067_12 (sequence is synthesized)
ggccacagtgtggcctcttccgtttgtgtgcgcatgggagtggagggcaggattggggcagggctcctcaggcagtgacccttcagccttgcagccttggaagctgggaggctggacctg

SEQ ID NO: 357724 - DNA, 120 bp, Artificial Sequence
  ENSG00000140067_13 (sequence is synthesized)
gttggcccctccccaggcaggccagggcccagcagcttgtcccgctgtccctgtgcagaccataggtactgggatgttgcccttccttgccttgcagtcaccccagaagccagagagacg

SEQ ID NO: 357725 - DNA, 120 bp, Artificial Sequence
  ENSG00000140067_14 (sequence is synthesized)
catctgtttacctgccacccactctgcgagccaatctcagttgttgttcttgttcttcttgttctttgtaaatattgagaaagttaaaagaataaagacatttcttttggagtttccata

SEQ ID NO: 357726 - DNA, 120 bp, Artificial Sequence
  ENSG00000140067_15 (sequence is synthesized)
tttgtatctggagaggcgctcctgattggcctgaggggccccccagctccggggagttgtcctccattcagcccactcaagggttgcacaactgcttccagccggacggagctcggccgg

SEQ ID NO: 357727 - DNA, 120 bp, Artificial Sequence
  ENSG00000140067_16 (sequence is synthesized)
ctgcgccggggcctgtcccaggtctgcagtggggaacctgccgggccacgttggtggggcctgggccgcaccttcggtcagctcggtgcccttccttggagctgccggccaccagcagag

SEQ ID NO: 357728 - DNA, 120 bp, Artificial Sequence
  ENSG00000140067_17 (sequence is synthesized)
cggggcctgtcccaggtctgcagtggggaacctgccgggccacgttggtggggcctgggccgcaccttcggtcagtgtggaggcccggtggctctggcccgactgggtggcgggtgtggg

SEQ ID NO: 357729 - DNA, 120 bp, Artificial Sequence
  ENSG00000140067_18 (sequence is synthesized)
ggcaggctggggcctgggggaggggcgaggtgccgtgggtggcggccgaggaggcatgaaattgctgcagatgcttcttcgggggaatccctgctgcccgcagcctgagatcagcccgca

SEQ ID NO: 357730 - DNA, 120 bp, Artificial Sequence
  ENSG00000140067_19 (sequence is synthesized)
aatcaaacccgagatgacagttgagatcaaacagacttttcattcctggttggtgcctgggagagtgacgaggcctatcagtactggaggacacagtcaaggtcagctcggtgcccttcc

SEQ ID NO: 357731 - DNA, 120 bp, Artificial Sequence
  ENSG00000140090_0 (sequence is synthesized)
agagagaaagttcccggggagagctcgcccctgggagggccgacgtcgagcctgctcgccgcgagggtctcagagacggcacccaggcgctccgggatggcgctccgcgggaccctccgg

SEQ ID NO: 357732 - DNA, 120 bp, Artificial Sequence
  ENSG00000140090_1 (sequence is synthesized)
ccgctcaaagttcgcaggaggcgagagatgctgccgcagcaagtcggcttcgtgtgcgcggtgctggccctggtgtgctgtgcgtccggcctcttcggcagcttggggcacaaaacagct

SEQ ID NO: 357733 - DNA, 120 bp, Artificial Sequence
  ENSG00000140090_2 (sequence is synthesized)
tctgctagcaaacgtgtcctgccagacacgtggagaaatagaaagttgatggccccagtgaatgggacacagacagccaagaactgcacagatcctgcgattcacgagttccccacagat

SEQ ID NO: 357734 - DNA, 120 bp, Artificial Sequence
  ENSG00000140090_3 (sequence is synthesized)
ctgttctccaataaggagcgacagcacggagccgtcctgctgcacatccttggtgctctgtatatgttctatgccttggccatagtgtgcgatgacttctttgttccgtctctagagaag

SEQ ID NO: 357735 - DNA, 120 bp, Artificial Sequence
  ENSG00000140090_4 (sequence is synthesized)
atctgtgagagactccatctgagcgaagatgtggctggagccaccttcatggctgcaggaagctcaacgccagagctgtttgcgtctgttattggggtgttcatcacccatggggacgtc

SEQ ID NO: 357736 - DNA, 120 bp, Artificial Sequence
  ENSG00000140090_5 (sequence is synthesized)
ggggtgggcaccatcgtgggctctgctgtgttcaacatcctgtgcataattggagtgtgcggactgtttgctggccaggtggtccgtctgacgtggtgggccgtgtgccgagactccgtg

SEQ ID NO: 357737 - DNA, 120 bp, Artificial Sequence
  ENSG00000140090_6 (sequence is synthesized)
tactacaccatctctgtcatcgtgctcatcgtgttcatatatgatgaacaaattgtgtggtgggaaggcctggtgctcatcatcttgtatgtgttttatattctgatcatgaagtacaat

SEQ ID NO: 357738 - DNA, 120 bp, Artificial Sequence
  ENSG00000140090_7 (sequence is synthesized)
gtgaagatgcaagcctttttcacagtcaaacaaaagagcattgcaaacggtaacccggtcaacagtgagctggaggctgtgaaggagaagccacagtatggcaagaaccccgtggtgatg

SEQ ID NO: 357739 - DNA, 120 bp, Artificial Sequence
  ENSG00000140090_8 (sequence is synthesized)
gtggacgagattatgagctccagccctcccaagttcaccttccctgaagcaggcttacgaatcatgatcaccaataagtttggacccaggacccgactacggatggccagcaggatcatc

SEQ ID NO: 357740 - DNA, 120 bp, Artificial Sequence
  ENSG00000140090_9 (sequence is synthesized)
attaatgagcggcagagactgatcaactcggccaatggtgtgagcagtaagccgcttcaaaacgggaggcacgagaacattgagaacgggaatgttcctgtggaaaaccccgaagaccct

SEQ ID NO: 357741 - DNA, 120 bp, Artificial Sequence
  ENSG00000140090_10 (sequence is synthesized)
cagcagaatcaggagcagcagccgccgccacagccaccaccgccagagccagagccggtggaggctgacttcctgtcccccttctccgtgccggaggccagaggggacaaggtcaagtgg

SEQ ID NO: 357742 - DNA, 120 bp, Artificial Sequence
  ENSG00000140090_11 (sequence is synthesized)
gtgttcacctggcccctcatcttcctcctgtgcgtcaccattcccaactgcagcaagccccgctgggagaagttcttcatggtcaccttcatcaccgccacgctgtggatcgctgtgttc

SEQ ID NO: 357743 - DNA, 120 bp, Artificial Sequence
  ENSG00000140090_12 (sequence is synthesized)
tcctacatcatggtgtggctggtgactattatcggatacacacttgggatcccggatgtcatcatgggcattactttcctggcagcagggacaagtgttccagactgcatggccagccta

SEQ ID NO: 357744 - DNA, 120 bp, Artificial Sequence
  ENSG00000140090_13 (sequence is synthesized)
attgtggcgagacaaggccttggggacatggcagtctccaacaccataggaagcaacgtgtttgacatcctggtaggacttggtgtaccgtggggcctgcagaccatggttgttaattat

SEQ ID NO: 357745 - DNA, 120 bp, Artificial Sequence
  ENSG00000140090_14 (sequence is synthesized)
ggatcaacagtgaagatcaacagccgggggctggtctattccgtggtcctgttgctgggctctgtcgctctcaccgtcctcggcatccacctaaacaagtggcgactggaccggaagctg

SEQ ID NO: 357746 - DNA, 120 bp, Artificial Sequence
  ENSG00000140090_15 (sequence is synthesized)
ggtgtctacgtgctggttctctacgccatcttcttgtgcttctccataatgatagagtttaacgtctttaccttcgtcaacttgccgatgtgccgggaagacgattagcgctgagtcgcg

SEQ ID NO: 357747 - DNA, 120 bp, Artificial Sequence
  ENSG00000140090_16 (sequence is synthesized)
gcccctgggagctgatctggacaccctgtgacactggcgttctcctctcccctccttcccccaccacaggtctctcctgcataggcagccactgtccgttctttcacacactggaaggaa

SEQ ID NO: 357748 - DNA, 120 bp, Artificial Sequence
  ENSG00000140090_17 (sequence is synthesized)
gagccatcgtggtctttgtctggccacaggccaggctgctgggcatcctcctcctccttggagttccgcccctgcaaggctggatttgggggccattatctgagcagcttcaaagacccc

SEQ ID NO: 357749 - DNA, 120 bp, Artificial Sequence
  ENSG00000140090_18 (sequence is synthesized)
ctgcaggcagcttcagaattgaggtcatttgtgagcacaagatctcatagggcaggtgcaaaataggaatgttgttctcaagtgtcacctccagcccagaggtggttccttaggcagcat

SEQ ID NO: 357750 - DNA, 120 bp, Artificial Sequence
  ENSG00000140090_19 (sequence is synthesized)
gtgctcctgggagcctctgacttttgctggaagcagccacagtttggaaggggcaagacctcaacctgttggggtttagggcccatgatggcagacattctaccccttttcctggaaaaa

SEQ ID NO: 357751 - DNA, 120 bp, Artificial Sequence
  ENSG00000140090_20 (sequence is synthesized)
ctggaagaatgaaaataatttttttctgtggaagagagaaaatgagtgaatattcttctcacttttattgatgcattcagagaataagcaatgaaatattaaaaaatgaaacatcatata

SEQ ID NO: 357752 - DNA, 120 bp, Artificial Sequence
  ENSG00000140090_21 (sequence is synthesized)
ggtcatcatacttgaaaattatcattccatatgaaaggatcatgatacacaccaaaaaagtaatgatcgtaaagacacaaatcctctgtatgccatcttgcattggcactgaggtgtttg

SEQ ID NO: 357753 - DNA, 120 bp, Artificial Sequence
  ENSG00000140090_22 (sequence is synthesized)
gtttggaatagggaaaaaggtaagagactaacgtggaaaggtgctaactcagagactggagattatagtttacagctgtactttccagatcttctatgtgacacaatgcactgtccttgt

SEQ ID NO: 357754 - DNA, 120 bp, Artificial Sequence
  ENSG00000140090_23 (sequence is synthesized)
gggtttgtcatttattggttaatgctctagtttcaaaaccaccctgttgaaagttccagttatttatatgcccaacaaatttcatagcctgctgaactgaactgagtgtgtcagaagtgc

SEQ ID NO: 357755 - DNA, 120 bp, Artificial Sequence
  ENSG00000140090_24 (sequence is synthesized)
tggttaatgacgagaagagattgcctgaaaaacaacaaactgctttctggttagctgaaggcaagtgtgaaaatcagaatttagaatatttagagctaagcttctggaaccacgtagttt

SEQ ID NO: 357756 - DNA, 120 bp, Artificial Sequence
  ENSG00000140090_25 (sequence is synthesized)
ctacacgtggcaggccaagaatgggaggctgactcaaaactagatagaaaaatataaaataatcttcgaccacttgatagctctcaaatatatatttaaaagatttatgaatacaaacca

SEQ ID NO: 357757 - DNA, 120 bp, Artificial Sequence
  ENSG00000140090_26 (sequence is synthesized)
tttatggtttatgatttctaaaaagaaagcacaattaattttatagagaggttttttatttttttaatatttctattgcaaaagtctatccgatttgatgcactttgaatattgagatat

SEQ ID NO: 357758 - DNA, 120 bp, Artificial Sequence
  ENSG00000140090_27 (sequence is synthesized)
tttgcacggatgaatgtatgggaactacccatgatgatgtaagaggaaagaacatttttttgtgattcaccagacatcactttaaacttggtgatgagtttaaatccagtagctaatccc

SEQ ID NO: 357759 - DNA, 120 bp, Artificial Sequence
  ENSG00000140090_28 (sequence is synthesized)
ttcctgagactcaaagatcgtgacgctggttggaatttctgactgtgccctttagggcctcctgagtttcaaaaggaggaagtgttcgtgcttgtgtccctgaagttccctgttgcatga

SEQ ID NO: 357760 - DNA, 120 bp, Artificial Sequence
  ENSG00000140090_29 (sequence is synthesized)
gcctgcgacaggacctcacccccaccaccaggcttctatttgggattcacatcagtattagtatcgtagctacaccaagttcaggcttctctttttgtttttttacctagaaattgggct

SEQ ID NO: 357761 - DNA, 120 bp, Artificial Sequence
  ENSG00000140090_30 (sequence is synthesized)
cagtggtcttcaacttgaggacgagggtgattttcctaagaaatcagcaaagagggaaggcagggcccctgtagattcaccagtataaacttcagctgcagggattccagagccctcggg

SEQ ID NO: 357762 - DNA, 120 bp, Artificial Sequence
  ENSG00000140090_31 (sequence is synthesized)
accactctgtcaccttaatagccaagttctcctggttcctccgatcttacaggctcatccaggttccaaagtgcttctgtctctgttttgattctccaaactgctctgtgatgtatgtag

SEQ ID NO: 357763 - DNA, 120 bp, Artificial Sequence
  ENSG00000140090_32 (sequence is synthesized)
ggattattctccccacttaacagaaagtagtgtcttggagaggtcaagggtctctagttcaatggccagtcatagcagaagggaggccaagcaccagtccatcacccctcccaggccagc

SEQ ID NO: 357764 - DNA, 120 bp, Artificial Sequence
  ENSG00000140090_33 (sequence is synthesized)
ctctgtaagttggccacacttggggagtgagtgtgggtatgactttaccctcctggttggttcttactgtttgagtcaaaacctcatcaatatatcattgactcctgggttcctcaggtc

SEQ ID NO: 357765 - DNA, 120 bp, Artificial Sequence
  ENSG00000140090_34 (sequence is synthesized)
atttcctaatatctgtccctatccaatgcctctattttatcttgaaaaaaggaccaaaaattatttttagctatggcaaggcacaggccacatggcccctgatggcgtccctgctggttt

SEQ ID NO: 357766 - DNA, 120 bp, Artificial Sequence
  ENSG00000140090_35 (sequence is synthesized)
tcaattctctgaagccttgtgtagctttcagagcacacgtatcctaattaccctcctcttcctcagcagaacccatttgagattctaaatgaatactcttagtctctaaagttgcagtta

SEQ ID NO: 357767 - DNA, 120 bp, Artificial Sequence
  ENSG00000140090_36 (sequence is synthesized)
gaaactaaaataatgttttttaatatgtaatatgctcctcttggctaattttcttttgactttaatgtgccaatgtaacttcctttaaaggatctatgcatttattaaatctggaaaact

SEQ ID NO: 357768 - DNA, 120 bp, Artificial Sequence
  ENSG00000140090_37 (sequence is synthesized)
gggatggagtggtctcagatgtgtctgggacatctggggtgcagaatctgtatttctgggccccctctccagtcatcatcctggagccgatgaaggcaggggcttcctcccatgtgcatt

SEQ ID NO: 357769 - DNA, 120 bp, Artificial Sequence
  ENSG00000140090_38 (sequence is synthesized)
ttgggagtctgttctgccctgtctcaggtaacccccaagagggaggagtctctccgtatagaaggaggaaacctgccagggtggcggggtgcggtccaggccacagcctggctgctgagg

SEQ ID NO: 357770 - DNA, 120 bp, Artificial Sequence
  ENSG00000140090_39 (sequence is synthesized)
cccacccacaaaggacagagctgaggagctgatgggcatggagtttgattcgtgtgtcgtgtttcataaatgctgagcagactaccccaggggaagcccgtttccaggacaacctcagaa

SEQ ID NO: 357771 - DNA, 120 bp, Artificial Sequence
  ENSG00000140090_40 (sequence is synthesized)
ggggaaggagccatgagggcggctgtgtcggattttagctctatggacgcagtggccccgagacggtccccacacacagcctggtccccacacacaggctggcaggacagaggctggttg

SEQ ID NO: 357772 - DNA, 120 bp, Artificial Sequence
  ENSG00000140090_41 (sequence is synthesized)
ctgccctgtcgtatatatggtgcttctgggtcctctgggccttcatggtgaagaagagaagtattgtgtgctgagtcactcaggccagtggcagatgcccatccaagagccacccaccac

SEQ ID NO: 357773 - DNA, 120 bp, Artificial Sequence
  ENSG00000140090_42 (sequence is synthesized)
ctgtgccaacccaggagacctcccaggaccctgcaggaaacattcctcattcacagcatgggggcctcagctcctcaccttcccagagcaacccaggctcccagaggcccccgcctacac

SEQ ID NO: 357774 - DNA, 120 bp, Artificial Sequence
  ENSG00000140090_43 (sequence is synthesized)
agtgccttttctggcactgctgtgactgtctccatcactctgtgcctgtgacagtagcacttccttgcaagtttattttctcccaaatctctttaagtccaggacattttctggaaaact

SEQ ID NO: 357775 - DNA, 120 bp, Artificial Sequence
  ENSG00000140090_44 (sequence is synthesized)
ggaagactggacacaggactgcccccaagcactggggaaggagggagaatcccatcttcctgcagcttttatcagagggaatgcatttagataagggccaagggagaaaacagtcctcag

SEQ ID NO: 357776 - DNA, 120 bp, Artificial Sequence
  ENSG00000140090_45 (sequence is synthesized)
aaagtgtggagggaagtggggtacaggcctggacgcctggaattggagaaaggggagacctggagaggcagacgtggggatttcttcaccccacttttactgcccctatcataagaggct

SEQ ID NO: 357777 - DNA, 120 bp, Artificial Sequence
  ENSG00000140090_46 (sequence is synthesized)
cccagagggccatgtgtgagtcactgttctgcactgtcccctgcgtagactcgactgaagcaggaggaaggagcccccggtaacaccctgggtgggactggggaggccagggctttgggg

SEQ ID NO: 357778 - DNA, 120 bp, Artificial Sequence
  ENSG00000140090_47 (sequence is synthesized)
cttttcctttcctaagggcggtgccatggaatcttttggctggagatgacattggggtttctttccctgtgcccagctccaagcaggtcgctgtgtggccaccccacccaaaggaatgca

SEQ ID NO: 357779 - DNA, 120 bp, Artificial Sequence
  ENSG00000140090_48 (sequence is synthesized)
cgggttgctggctgggagattcttcaagagcacacactctcaggcccgatcgagctgttctcagtttttgggtttcccatagaaaacccaaagttttatcttccagcttcttgacaggaa

SEQ ID NO: 357780 - DNA, 120 bp, Artificial Sequence
  ENSG00000140090_49 (sequence is synthesized)
aagtgggcagaaagccttttccccaccacactgataaaaggcgtttgagtactgaaacgttcttaaaggctgtgtggcttggctcaccaaagcagcctcctggtgcttctcaggtggcct

SEQ ID NO: 357781 - DNA, 120 bp, Artificial Sequence
  ENSG00000140090_50 (sequence is synthesized)
tgaacacagcctgggccacttgcctgccggcctcgcccaggaggcacactgtggacccttccaggctgccctggccctgggcacagccttggtttggagtggggagagttgggggtgatg

SEQ ID NO: 357782 - DNA, 120 bp, Artificial Sequence
  ENSG00000140090_51 (sequence is synthesized)
gaatgtgctgtcattgagttcttttcccggcagccactccgggcatgggcacacacccttgttctgtcattggtcaggggacaccaggacaagctgtcccgggaggcaggcatcctgggg

SEQ ID NO: 357783 - DNA, 120 bp, Artificial Sequence
  ENSG00000140090_52 (sequence is synthesized)
aaggaaggagaattccatcttcctgtagcttttatcagagtgaatgcatttagataagggccaagagagaatactacctagagagtgtggaaggaagtgggggtgcaggcctgtactcct

SEQ ID NO: 357784 - DNA, 120 bp, Artificial Sequence
  ENSG00000140090_53 (sequence is synthesized)
ggaattagagaagggggaggcctggctcttgtctcacagactccaggctctctccttctgagcccagttgttcctccagcagtacctggcatggggttggttctgtaggatggagcctga

SEQ ID NO: 357785 - DNA, 120 bp, Artificial Sequence
  ENSG00000140090_54 (sequence is synthesized)
agctgcgttttctgtgggttccgtcttcctctgggatggaggcttctgagcagggagggatttgagctttcatgcagcagtgaggggctgagggcatgagctgtggagggggctcctgct

SEQ ID NO: 357786 - DNA, 120 bp, Artificial Sequence
  ENSG00000140090_55 (sequence is synthesized)
cctcagagtggaagcagagccatcgaatcagccaggacaggagtcatcccaaaggccagaggccccaagtgttgatgctccccatagaaggagcccgctaataacactctccagcacata

SEQ ID NO: 357787 - DNA, 120 bp, Artificial Sequence
  ENSG00000140090_56 (sequence is synthesized)
acccctggcatcttcgccaccaccaagagtgctgccccagactctcggcacccaccgcacgctaatcatctctggcagtttctgttggcctttgtctccttaactctcctcctcttctaa

SEQ ID NO: 357788 - DNA, 120 bp, Artificial Sequence
  ENSG00000140090_57 (sequence is synthesized)
cccccttctccgtgccggccacagcggcctcctcactgtcattcctagaacacactgtcattcctagaactgcgcacctgccccaggacctttgcacctgccttttgctggaatgcagtt

SEQ ID NO: 357789 - DNA, 120 bp, Artificial Sequence
  ENSG00000140090_58 (sequence is synthesized)
tccccagctccacaaagcaggtacttttgtctactgcatttatctgcatccccagtacccaggactggccacatagtaggggcttgctgtgaataccctcaagatctggtccagccggga

SEQ ID NO: 357790 - DNA, 120 bp, Artificial Sequence
  ENSG00000140090_59 (sequence is synthesized)
gcagagtcccaaagcaccagcccagagctgtcatgaagccagcacatggccttaggctggagtgtagtggcatgatctccgctgactgcaacctccgcttcccgggttcaagagattctc

SEQ ID NO: 357791 - DNA, 120 bp, Artificial Sequence
  ENSG00000140090_60 (sequence is synthesized)
aacccggtcaacagtgagctggaggctggtaatgatttctatgacggtagctatgatgacccttccgtgccattgctggggcaagtgaaggagaagccacagtatggcaagaaccccgtg

SEQ ID NO: 357792 - DNA, 120 bp, Artificial Sequence
  ENSG00000140090_61 (sequence is synthesized)
aatgcatgttctcctggctttgttttctaacccacacgcctcctgtctgctgagccttgctgcctgtttggtgaggagtgtgtgtgtctggtgtgcttttgtgctattaactcttacacg

SEQ ID NO: 357793 - DNA, 120 bp, Artificial Sequence
  ENSG00000140090_62 (sequence is synthesized)
ggtttgctctccggacctattcgctggttaccctaaaacccgtaaaggacacaccaggagctggtaaccagtgcagagggacagtcctatccatttttatagccctttggaggggaacac

SEQ ID NO: 357794 - DNA, 120 bp, Artificial Sequence
  ENSG00000140090_63 (sequence is synthesized)
tctgcctgcttctgcatgctgtgttcatgagcagttttgtaactagaccctcctagggatctggagtcaaatgtgaaattcccaaggataccggcccagtgcaggtttatgaagatggca

SEQ ID NO: 357795 - DNA, 120 bp, Artificial Sequence
  ENSG00000140090_64 (sequence is synthesized)
agaaagaggtctggggacagggagttttgttcctccccattgtgaggggaaggaaagggtcagagagaccagcctccctccggagggtgtcagggtttatagtcactgggctcagccagc

SEQ ID NO: 357796 - DNA, 120 bp, Artificial Sequence
  ENSG00000140090_65 (sequence is synthesized)
ggctcaccgtgcaccctcaaacaagcaggctcctctcctgggtcttagttgcctgtctaggtcccatgatctaaatctttgacctcactacttgcccttataaagaacaaagttacaagc

SEQ ID NO: 357797 - DNA, 120 bp, Artificial Sequence
  ENSG00000140090_66 (sequence is synthesized)
attctgtcctgcagacagagcaggtggcctcgtaggaagttcagagccagtgcccactgctctgcaacattttccaccccggggacccttgtcaatttgcaaaatttcatctgagcctct

SEQ ID NO: 357798 - DNA, 120 bp, Artificial Sequence
  ENSG00000140090_67 (sequence is synthesized)
gtacgtgggggaaagaaaggtcccctcatagtcatgggtgaaaagtggtaggcccccgtgtgtattgtaggttggctgccctggtaaggcttagataacgaactgaaagacccttgtaat

SEQ ID NO: 357799 - DNA, 120 bp, Artificial Sequence
  ENSG00000140090_68 (sequence is synthesized)
tagccaagactgggccccagaagagaggcgaaaagagcatcaattgcccacgagtggtcctggagcaaggggacacactgggcttcacacactaggtcagcaggtgtttcaaagctagtg

SEQ ID NO: 357800 - DNA, 120 bp, Artificial Sequence
  ENSG00000140090_69 (sequence is synthesized)
acccactttgcctgacatgaggagttgaagccaggcatccagacttcccggtggctgccagctgccaggaccacagcctagggcagctcacaaggtgaggggaagtcagtggccccagca

SEQ ID NO: 357801 - DNA, 120 bp, Artificial Sequence
  ENSG00000140090_70 (sequence is synthesized)
gcacgcggcgcgcgggactctgagctccggccgcgtcgcgcgtccccaccttcccaaggggctcccccgccgacctcgccctcgggccatgaggctttggcccggagctcctcgcctctg

SEQ ID NO: 357802 - DNA, 120 bp, Artificial Sequence
  ENSG00000140090_71 (sequence is synthesized)
agtcgcgcaccgcctgctccagccccagcgccgctcggccactgattgcactctggccgctgaagctccccatcctctcccagagacggcacccaggcgctccgggatggcgctccgcgg

SEQ ID NO: 357803 - DNA, 120 bp, Artificial Sequence
  ENSG00000140090_72 (sequence is synthesized)
ggctttcatttttaaattacgctttcatcactacgcaggattactttattttattcccaaagctcattagcatgggataattactctgctacagaaataggcaatttaaaaaaatgaatt

SEQ ID NO: 357804 - DNA, 120 bp, Artificial Sequence
  ENSG00000140090_73 (sequence is synthesized)
tgcctcaccaggtcaagcgtggttagggtggaaggtgtccagtatcttgaaaacctggccctggaggaaggttctgggtcagctgcaatgagagactggtgattaagggcaccgtgggca

SEQ ID NO: 357805 - DNA, 120 bp, Artificial Sequence
  ENSG00000140090_74 (sequence is synthesized)
ggacacagtcctcgccttacccaccccatccttcctgttacccacagtctgctggcctccatgcctcttccccttgtcacttgtgtctcctccttatgcacagagctgcctgcctttatg

SEQ ID NO: 357806 - DNA, 69 bp, Artificial Sequence
  ENSG00000140090_75 (sequence is synthesized)
ttgtgtctcctccttatgcacagagctgcctgcctttatgaattttcttttcttttttttttgagacag

SEQ ID NO: 357807 - DNA, 120 bp, Artificial Sequence
  ENSG00000140090_76 (sequence is synthesized)
caggtgtgagccaccacgcccagcctgcccttgtgaattttcacctgctccttacccctcacctgttaggactgtttcttgcttttgcccctgtcggtcccctgccttaacagacctaag

SEQ ID NO: 357808 - DNA, 120 bp, Artificial Sequence
  ENSG00000140090_77 (sequence is synthesized)
ccctgtcggtcccctgccttaacagacctaagcagctgataatgcaccaagcttccctgaccaggtggggtgtgtctatcacccaagggcagtcctacagaccctgaccaaaggccgttc

SEQ ID NO: 357809 - DNA, 120 bp, Artificial Sequence
  ENSG00000140090_78 (sequence is synthesized)
ctgggcggcccaaggtccaggtttcttccacctgctcttccctgtttatggggatttgcaagcctaattgcatcagcaggagcccatctctcagagaacccggactccccaagcagactg

SEQ ID NO: 357810 - DNA, 120 bp, Artificial Sequence
  ENSG00000140090_79 (sequence is synthesized)
ggattttgggaagggtgtggggggtgtcattgctggatacccgtctttctgcctgtcctttctcctctctgaatcctggggcccctctccctccttaaagctggagtggacagagggaca

SEQ ID NO: 357811 - DNA, 120 bp, Artificial Sequence
  ENSG00000140090_80 (sequence is synthesized)
ggagaggatcagagttcatcccccctgggaaagagcaagagcgaatgaatcccagcgccagcggctgaggctgccttccgtgccttccctccatgggcgacgggtgagtggggcttagga

SEQ ID NO: 357812 - DNA, 120 bp, Artificial Sequence
  ENSG00000140090_81 (sequence is synthesized)
aactggaacagggaaggttctgttaccacactttggaactttccccctgggattcagcagttgagaagcagagacctttctgccctgggtgaatgggtccttgggggaggggttggtctt

SEQ ID NO: 357813 - DNA, 120 bp, Artificial Sequence
  ENSG00000140090_82 (sequence is synthesized)
ttgtctcgcatccccatctttcctttccttctgggccatgctcctccctggctggaaaaaggtggctgtgctgtccctgtgatccactctcagcaaatgcgtgtggctcaaataaacaaa

SEQ ID NO: 357814 - DNA, 120 bp, Artificial Sequence
  ENSG00000140090_83 (sequence is synthesized)
gaacttacctgttagagtgaaaatcctcaggagattgtacccaaatgccatgctctaaatattcatggtctctctaatgccctcaagacgtgatttccatgggaaccatcctcccctggg

SEQ ID NO: 357815 - DNA, 120 bp, Artificial Sequence
  ENSG00000140090_84 (sequence is synthesized)
ggcagttagcaggagtacgtggggcacgtgaggtggtcctcctttcagcacaccgtgcccatagaaacttctagaaatttctgaaaatgctctgtgggcagctcttgggtggcagtaagt

SEQ ID NO: 357816 - DNA, 120 bp, Artificial Sequence
  ENSG00000140090_85 (sequence is synthesized)
ccatcaacccccatctaccccgggcctgaagcgctgcgcttgctctctttatgtgtgtgcacccgaaggatttcctggtctctgtagctgatcctgtgagcccctcaagcatgaagcctc

SEQ ID NO: 357817 - DNA, 120 bp, Artificial Sequence
  ENSG00000140090_86 (sequence is synthesized)
ccttggggcttctcaaagcatggagaggggcccttcctgtcctttgggaaaatcttccccactgtgtcagttatatgggaacaagagtgatggggtctttctctaggcctgtgccacagg

SEQ ID NO: 357818 - DNA, 120 bp, Artificial Sequence
  ENSG00000140090_87 (sequence is synthesized)
acagagaacacgggattctgctgttcgctttgagccacagcctttaccagcccggcttgtgtggggggccccttcgccttgctgcaaagagctgttccccaaagggcatatccacagggt

SEQ ID NO: 357819 - DNA, 79 bp, Artificial Sequence
  ENSG00000140090_88 (sequence is synthesized)
gggtacaggttttaaaaaggtagactcagtgcagtggcgccatgttggctggttgcaacctccacctcctgggttcaag

SEQ ID NO: 357820 - DNA, 75 bp, Artificial Sequence
  ENSG00000140090_89 (sequence is synthesized)
cgcgccaccatgcccagctaatttttggatttttagtagagaaggagtttcaccatgctggggcctcccagagtg

SEQ ID NO: 357821 - DNA, 81 bp, Artificial Sequence
  ENSG00000140090_90 (sequence is synthesized)
aaggcattttgatttaggttgctgtgtttgcttgttgataaagaaaactcaatcgggacactagttttgtgctcagcttta

SEQ ID NO: 357822 - DNA, 120 bp, Artificial Sequence
  ENSG00000140090_91 (sequence is synthesized)
agaaaactcaatcgggacactagttttgtgctcagctttaggccgggtagctaatgggaggatgtccagcctgtcactgtgctcccagcgcaaggaaatgggtgcccacctggaatcagg

SEQ ID NO: 357823 - DNA, 120 bp, Artificial Sequence
  ENSG00000140090_92 (sequence is synthesized)
agaagaggcttttccctcctgttctgcaaccagggtggagctatctttccagggaagccagctgagaggttttagggctttggttattttatgggggttttaaacctcctaacttttcaa

SEQ ID NO: 357824 - DNA, 120 bp, Artificial Sequence
  ENSG00000140090_93 (sequence is synthesized)
tgacaaatggctcccaggtgccatagtctctgttaaatcctcaaacattcacaagcacacactgccaggggcacgggttgtctttcacctgcatgtttctaaggctctttattcaatctc

SEQ ID NO: 357825 - DNA, 120 bp, Artificial Sequence
  ENSG00000140090_94 (sequence is synthesized)
acggtgtcagtgtccagttgtcaaagttatgaatcttcctcctgcttctaaacagggctgacagtatactctcgtctagtctaggaacatgtctgctgctgggataccctggtaccagga

SEQ ID NO: 357826 - DNA, 120 bp, Artificial Sequence
  ENSG00000140090_95 (sequence is synthesized)
tttgagggccacgggtggcatctctgagagctgaaaatccacagagtgcctgtgggaaagccaagcccttggctgtgtggcttttctatcccttggatttacaggtctgggaattggctg

SEQ ID NO: 357827 - DNA, 120 bp, Artificial Sequence
  ENSG00000140090_96 (sequence is synthesized)
cttcttagttataaccccagtgacaaatgctggcttaagccacacctgttcccactgttgctagaattcaaacagttgctttttttttttctttttgagaaagggcctcactctgttgcc

SEQ ID NO: 357828 - DNA, 89 bp, Artificial Sequence
  ENSG00000140090_97 (sequence is synthesized)
aaaagtaggtaggactacaggcacatgccaccacatacagctaatttgttttcattttttttttttttagagacaggatctcgctgtgt

SEQ ID NO: 357829 - DNA, 89 bp, Artificial Sequence
  ENSG00000140090_98 (sequence is synthesized)
taggactacaggcacatgccaccacatacagctaatttgttttcattttttttttttttagagacaggatctcgctgtgttccccaggt

SEQ ID NO: 357830 - DNA, 62 bp, Artificial Sequence
  ENSG00000140090_99 (sequence is synthesized)
cctgccttgacctcccaaagtgctggattacaagcgtgagcccctgcacccggcccaagcag

SEQ ID NO: 357831 - DNA, 120 bp, Artificial Sequence
  ENSG00000140090_100 (sequence is synthesized)
tgatctcctgatctcgtgatccgcccaccccggcctcccaaagtgctggattacaagcgtgagccaccgcgccccgccaagcagttgcttcttatgcaacatgttggttgggacttgtcc

SEQ ID NO: 357832 - DNA, 120 bp, Artificial Sequence
  ENSG00000140090_101 (sequence is synthesized)
tggttgggacttgtccacgggccaggccaataaaattcttaatcctgcagagagtcagtaccctcatcaccccatcactggaaaacaaatgttttaagctatcaagagagggaatgtgca

SEQ ID NO: 357833 - DNA, 120 bp, Artificial Sequence
  ENSG00000140090_102 (sequence is synthesized)
gcttttggtttctagatgcatggtttggtgtgatctacctttgtgcctaaagggaatgtcccaaacaacagagccttctttgctgtcactccagaattctctacacagaatttcccaagt

SEQ ID NO: 357834 - DNA, 120 bp, Artificial Sequence
  ENSG00000140090_103 (sequence is synthesized)
ccattcaggacagacgcgcagtcctctttcaatggaagaagagaggacttttcccctcctgaaaaatgactggagtgtgaacaaggcagctctgtttttctaaataagttgttcttgtga

SEQ ID NO: 357835 - DNA, 120 bp, Artificial Sequence
  ENSG00000140090_104 (sequence is synthesized)
gttttttctggccactgggcatctctgccctcacttttcatccctgccctctaagctgcagaccccatgaccacactgtctgcttccttgagcttcccgcacgaggcttggacctggggg

SEQ ID NO: 357836 - DNA, 120 bp, Artificial Sequence
  ENSG00000140090_105 (sequence is synthesized)
acctggagaccctgcggacagaactgtggctgagccactgtggccaactcttggggagctccacagtgggggttgctggtctgtgaggctgagtctccatttcagagcacacactccctg

SEQ ID NO: 357837 - DNA, 120 bp, Artificial Sequence
  ENSG00000140090_106 (sequence is synthesized)
gcagggcgcctctgcctgtgtctcctgcccagcagccgccagcagggaatagttgctggtgtctgagcacaaagagagctttgattacctagagaggaaaaaggctgtcagccagatgca

SEQ ID NO: 357838 - DNA, 120 bp, Artificial Sequence
  ENSG00000140090_107 (sequence is synthesized)
gccaggcccaggggtagatacaggagttgctaaggaaggggccgagccaggagaggccaggcagatccacaaagcccaaggggatgcaggctgggtgtggtttctgagggaacctaccaa

SEQ ID NO: 357839 - DNA, 120 bp, Artificial Sequence
  ENSG00000140090_108 (sequence is synthesized)
atagcaggtagatggaatcagaggactcttgtgtcctgaaagaacctccttaaaaacaactaaaacgaagaacttctggggctgttcacacattgttcaagtcaccccaagatcgttctg

SEQ ID NO: 357840 - DNA, 120 bp, Artificial Sequence
  ENSG00000140090_109 (sequence is synthesized)
gcacgctgagctgaacaccaccatctttgttcattctctctctaatgggcaaagcaggatcatcgagttgaaaagttgtaaataatgaggatatttatcccgctatttattttttcaata

SEQ ID NO: 357841 - DNA, 120 bp, Artificial Sequence
  ENSG00000140090_110 (sequence is synthesized)
actgtgacctcctgcactgtgaatgctctgtgacatgagattcttagtttaataaaactgtcattaaatttgaatgaattgatattattggttactgaacactggcatgagtttattttt

SEQ ID NO: 357842 - DNA, 120 bp, Artificial Sequence
  ENSG00000140090_111 (sequence is synthesized)
attgtgaagaaaaaaatctacagcaatctaaactaaacctttctaagaaatctagcagtcagtattgtaatgcaatatatcaaaatctgtacactgtcaataaaataaatgagcacaagt

SEQ ID NO: 357843 - DNA, 120 bp, Artificial Sequence
  ENSG00000140090_112 (sequence is synthesized)
tgaggttcctgggatccagccccaggaagccttgatcgagggacaaggaggaaggcagtggaaggaaagatagaaggatcagggaggaatgtcctcggcatccacctaaacaagtggcga

SEQ ID NO: 357844 - DNA, 120 bp, Artificial Sequence
  ENSG00000140092_0 (sequence is synthesized)
ccgcccctcgccttctgcccgggcgctcgcagccgagcgcggccggggaagggctctcctcccagcgccgagcactgggccctggcagacgccccaagattgttgtgaggagtctagcca

SEQ ID NO: 357845 - DNA, 120 bp, Artificial Sequence
  ENSG00000140092_1 (sequence is synthesized)
gttggtgagcgctgtaatctgaaccagctgtgtccagactgaggccccatttgcattgtttaacatacttagaaaatgaagtgttcatttttaacattcctcctccaattggtttaatgc

SEQ ID NO: 357846 - DNA, 120 bp, Artificial Sequence
  ENSG00000140092_2 (sequence is synthesized)
tgaattactgaagagggctaagcaaaaccaggtgcttgcgctgagggctctgcagtggctgggaggaccccggcgctctccccgtgtcctctccacgactcgctcggcccctctggaata

SEQ ID NO: 357847 - DNA, 120 bp, Artificial Sequence
  ENSG00000140092_3 (sequence is synthesized)
aaacacccgcgagccccgagggcccagaggaggccgacgtgcccgagctcctccgggggtcccgcccgcgagctttcttctcgccttcgcatctcctcctcgcgcgtcttggacatgcca

SEQ ID NO: 357848 - DNA, 120 bp, Artificial Sequence
  ENSG00000140092_4 (sequence is synthesized)
ggaataaaaaggatactcactgttaccattctggctctctgtcttccaagccctgggaatgcacaggcacagtgcacgaatggctttgacctggatcgccagtcaggacagtgtttagat

SEQ ID NO: 357849 - DNA, 120 bp, Artificial Sequence
  ENSG00000140092_5 (sequence is synthesized)
attgatgaatgccgaaccatccccgaggcctgccgaggagacatgatgtgtgttaaccaaaatggcgggtatttatgcattccccggacaaaccctgtgtatcgagggccctactcgaac

SEQ ID NO: 357850 - DNA, 120 bp, Artificial Sequence
  ENSG00000140092_6 (sequence is synthesized)
ccctactcgaccccctactcaggtccgtacccagcagctgccccaccactctcagctccaaactatcccacgatctccaggcctcttatatgccgctttggataccagatggatgaaagc

SEQ ID NO: 357851 - DNA, 120 bp, Artificial Sequence
  ENSG00000140092_7 (sequence is synthesized)
gtacacctgctcctgcaccgacggatattggcttctggaaggccagtgcttagacattgatgaatgtcgctatggttactgccagcagctctgtgcgaatgttcctggatcctattcttg

SEQ ID NO: 357852 - DNA, 120 bp, Artificial Sequence
  ENSG00000140092_8 (sequence is synthesized)
tacatgcaaccctggttttaccctcaatgaggatggaaggtcttgccaagatgtgaacgagtgtgccaccgagaacccctgcgtgcaaacctgcgtcaacacctacggctctttcatctg

SEQ ID NO: 357853 - DNA, 120 bp, Artificial Sequence
  ENSG00000140092_9 (sequence is synthesized)
ccgctgtgacccaggatatgaacttgaggaagatggcgttcattgcagtgatatggacgagtgcagcttctctgagttcctctgccaacatgagtgtgtgaaccagcccggcacatactt

SEQ ID NO: 357854 - DNA, 120 bp, Artificial Sequence
  ENSG00000140092_10 (sequence is synthesized)
ctgctcctgccctccaggctacatcctgctggatgacaaccgaagctgccaagacatcaacgaatgtgagcacaggaaccacacgtgcaacctgcagcagacgtgctacaatttacaagg

SEQ ID NO: 357855 - DNA, 120 bp, Artificial Sequence
  ENSG00000140092_11 (sequence is synthesized)
gggcttcaaatgcattgaccccatccgctgtgaggagccttatctgaggatcagtgataaccgctgtatgtgtcctgctgagaaccctggctgcagagaccagccctttaccatcttgta

SEQ ID NO: 357856 - DNA, 120 bp, Artificial Sequence
  ENSG00000140092_12 (sequence is synthesized)
ccgggacatggacgtggtgtcaggacgctccgttcccgctgacatcttccaaatgcaagccacgacccgctaccctggggcctattacattttccagatcaaatctgggaatgagggcag

SEQ ID NO: 357857 - DNA, 120 bp, Artificial Sequence
  ENSG00000140092_13 (sequence is synthesized)
agaattttacatgcggcaaacgggccccatcagtgccaccctggtgatgacacgccccatcaaagggccccgggaaatccagctggacttggaaatgatcactgtcaacactgtcatcaa

SEQ ID NO: 357858 - DNA, 120 bp, Artificial Sequence
  ENSG00000140092_14 (sequence is synthesized)
cttcagaggcagctccgtgatccgactgcggatatatgtgtcgcagtacccattctgagcctcgggctggagcctccgacgctgcctctcattggcaccaagggacaggagaagagagga

SEQ ID NO: 357859 - DNA, 120 bp, Artificial Sequence
  ENSG00000140092_15 (sequence is synthesized)
aataacagagagaatgagagcgacacagacgttaggcatttcctgctgaacgtttccccgaagagtcagccccgacttcctgactctcacctgtactattgcagacctgtcaccctgcag

SEQ ID NO: 357860 - DNA, 120 bp, Artificial Sequence
  ENSG00000140092_16 (sequence is synthesized)
ttaccattctggctctctgtcttccaagccctgggaatgcacagcaacaggagagatggacccctgtgtgtcagccctgaaatgtgggcagatccctcctgaaaactccgagtggcctct

SEQ ID NO: 357861 - DNA, 120 bp, Artificial Sequence
  ENSG00000140092_17 (sequence is synthesized)
ctgtgtctctggctcaggaaagaagtgagagaagccctatctctgagcaggctgagggctgcaggcaggcacagtgcacgaatggctttgacctggatcgccagtcaggacagtgtttag

SEQ ID NO: 357862 - DNA, 120 bp, Artificial Sequence
  ENSG00000140092_18 (sequence is synthesized)
acttgccacccccagttcctatgacacagttatcaaaaagtattatcattgctcccctgatagaagattgttggtgaattttcaaggccttcagtttatttccactattttcaaagaaaa

SEQ ID NO: 357863 - DNA, 120 bp, Artificial Sequence
  ENSG00000140092_19 (sequence is synthesized)
tagattaggtttgcgggggtctgagtctatgttcaaagactgtgaacagcttgctgtcacttcttcacctcttccactccttctctcactgtgttactgctttgcaaagacccgggagct

SEQ ID NO: 357864 - DNA, 120 bp, Artificial Sequence
  ENSG00000140092_20 (sequence is synthesized)
ggcggggaaccctgggagtagctagtttgctttttgcgtacacagagaaggctatgtaaacaaaccacagcaggatcgaagggtttttagagaatgtgtttcaaaaccatgcctggtatt

SEQ ID NO: 357865 - DNA, 120 bp, Artificial Sequence
  ENSG00000140092_21 (sequence is synthesized)
ttcaaccataaaagaagtttcagttgtccttaaatttgtataacggtttaattctgtcttgttcattttgagtatttttaaaaaatatgtcgtagaattccttcgaaaggccttcagaca

SEQ ID NO: 357866 - DNA, 120 bp, Artificial Sequence
  ENSG00000140092_22 (sequence is synthesized)
catgctatgttctgtcttcccaaacccagtctcctctccattttagcccagtgttttctttgaggaccccttaatcttgctttctttagaatttttacccaattggattggaatgcagag

SEQ ID NO: 357867 - DNA, 120 bp, Artificial Sequence
  ENSG00000140092_23 (sequence is synthesized)
attgttaattataaaaagctgcgcctctgtaatttccatcttgaagcgttcttttgggagtgggtattttctaatacagtttcaaaagccagcatcagagagggctgcgaaattctcagc

SEQ ID NO: 357868 - DNA, 120 bp, Artificial Sequence
  ENSG00000140092_24 (sequence is synthesized)
gcttcattcctctttcttttctggaaagggcagcaactttgtcgttttaagggatttttgtatgtattttttaaatttcgggaggccaattactagttcactagcaattactgcgccgca

SEQ ID NO: 357869 - DNA, 120 bp, Artificial Sequence
  ENSG00000140092_25 (sequence is synthesized)
tcggctgatagacaagcagacaggctagctgaacaccgcggggctggatttgctctatgtttgtgtgggattctcacagaagtttcaagccaatgagaagtgggaactgcagacagagat

SEQ ID NO: 357870 - DNA, 120 bp, Artificial Sequence
  ENSG00000140092_26 (sequence is synthesized)
atgtatgtaggctggagggggtgatggaatgagggaaacatctggctttggatcacagctttgtaagtcctgtataaccccaataactccacacacagcatcagcagcaagccgtgtata

SEQ ID NO: 357871 - DNA, 120 bp, Artificial Sequence
  ENSG00000140092_27 (sequence is synthesized)
gtgcctgtatgtgccagacactattctaagtgctttctatacagtaaccctttaatcttcacaagaatcctatgatataggatggttttatcgtccagattttacagatgagagcactga

SEQ ID NO: 357872 - DNA, 120 bp, Artificial Sequence
  ENSG00000140092_28 (sequence is synthesized)
ggcacagagctaagcaacctgcccgactagtctcacaactaataagcaccagggcaggatttgaacctaagcagcctggcaccaaaaatctgtgctgttatacttttcttcagaatgggg

SEQ ID NO: 357873 - DNA, 120 bp, Artificial Sequence
  ENSG00000140092_29 (sequence is synthesized)
aggtatgctttacctactcttccagctttggggtctcagatgaaatggagatcacaagaaaagtctaacatccagttacaatagaaagtattccagaaatagcagttatgattgtataga

SEQ ID NO: 357874 - DNA, 120 bp, Artificial Sequence
  ENSG00000140092_30 (sequence is synthesized)
tactgttgtggccactgctactgttgctgctactgctgcaaggaggctgggagctgctgggccatggagagcttgggaatgctacccaggggactggagcatcgtgtgggaggtggggct

SEQ ID NO: 357875 - DNA, 120 bp, Artificial Sequence
  ENSG00000140092_31 (sequence is synthesized)
ggatggccatccaggctctcacaccctgagattcattgatttgattataaccacatgggaggagcttcatctcaccccgcaggcaaaccacacacacacacttgcatgcacacatgcaca

SEQ ID NO: 357876 - DNA, 120 bp, Artificial Sequence
  ENSG00000140092_32 (sequence is synthesized)
cacttatgcccacatgcgtacgtgtacacacacacacaagcccattcataagccttattggctgcctgtctctcactgagccctagaaagaggactgatgattggctttggccaggtggc

SEQ ID NO: 357877 - DNA, 120 bp, Artificial Sequence
  ENSG00000140092_33 (sequence is synthesized)
ttgggggtcataattagggccagaagaaggagcaaggtcatggggttcagactgtgccaaagtgcacttactccatgacacacgtggatcaagtgacagggcccatggaagctggcctgc

SEQ ID NO: 357878 - DNA, 120 bp, Artificial Sequence
  ENSG00000140092_34 (sequence is synthesized)
tacagcgtggctgcttgccacaggtcagaccatgccatcccacaagttgattagaataaacctgagtgtgtttgggatcagggccaagaagacacacagctggtgggctgttggcagccg

SEQ ID NO: 357879 - DNA, 120 bp, Artificial Sequence
  ENSG00000140092_35 (sequence is synthesized)
caagtccactggcgttcagtcattcgtgtgcattcttccgttaccagcgtgcattcagcaccactgcatatgaggcttcaagtcaggcactgagcgttgagaaacaaacaggatgtggtc

SEQ ID NO: 357880 - DNA, 120 bp, Artificial Sequence
  ENSG00000140092_36 (sequence is synthesized)
tctgccctggaggaacccacacacaccttagcggagagggggaaaacaacctagcaaacacaacacaaagtggcgattctcaagtcaagtcaagacccatgggatgcaaacgggccccat

SEQ ID NO: 357881 - DNA, 120 bp, Artificial Sequence
  ENSG00000140092_37 (sequence is synthesized)
cttggacatgccaggaataaaaaggatactcactgttaccattctggctctctgtcttccaagccctgggaatgcacaggagagatggacccctgtgtgtcagccctgaaatgtgggcag

SEQ ID NO: 357882 - DNA, 120 bp, Artificial Sequence
  ENSG00000140092_38 (sequence is synthesized)
tttttgagacagggtcttgctctgccgcccaggctggagtggcatatttggcctacgtggcaaatgtaaagtatcttggagaatgttctaatgttctgaaaaccagagatctaagccgct

SEQ ID NO: 357883 - DNA, 120 bp, Artificial Sequence
  ENSG00000140093_0 (sequence is synthesized)
gaaggttctgggctgcaaagctgaagctttggtttctgctctaaatgaaggacttttccaggacccaaggccacacactggaagtcttgcagctgaagggaggcactccttggcctccgc

SEQ ID NO: 357884 - DNA, 120 bp, Artificial Sequence
  ENSG00000140093_1 (sequence is synthesized)
agccgatcacatgaaggtggtgccaagtctcctgctctccgtcctcctggcacaggtgtggctggtacccggcttggcccccagtcctcagtcgccagagaccccagcccctcagaacca

SEQ ID NO: 357885 - DNA, 120 bp, Artificial Sequence
  ENSG00000140093_2 (sequence is synthesized)
gaccagcagggtagtgcaggctcccaaggaggaagaggaagatgagcaggaggccagcgaggagaaggccagtgaggaagagaaagcctggctgatggccagcaggcagcagcttgccaa

SEQ ID NO: 357886 - DNA, 120 bp, Artificial Sequence
  ENSG00000140093_3 (sequence is synthesized)
ggagacttcaaacttcggattcagcctgctgcgaaagatctccatgaggcacgatggcaacatggtcttctctccatttggcatgtccttggccatgacaggcttgatgctgggggccac

SEQ ID NO: 357887 - DNA, 120 bp, Artificial Sequence
  ENSG00000140093_4 (sequence is synthesized)
agggccgactgaaacccagatcaagagagggctccacttgcaggccctgaagcccaccaagcccgggctcctgccttccctctttaagggactcagagagaccctctcccgcaacctgga

SEQ ID NO: 357888 - DNA, 120 bp, Artificial Sequence
  ENSG00000140093_5 (sequence is synthesized)
actgggcctcacacaggggagttttgccttcatccacaaggattttgatgtcaaagagactttcttcaatttatccaagaggtattttgatacagagtgcgtgcctatgaattttcgcaa

SEQ ID NO: 357889 - DNA, 120 bp, Artificial Sequence
  ENSG00000140093_6 (sequence is synthesized)
tgcctcacaggccaaaaggctcatgaatcattacattaacaaagagactcgggggaaaattcccaaactgtttgatgagattaatcctgaaaccaaattaattcttgtggattacatctt

SEQ ID NO: 357890 - DNA, 120 bp, Artificial Sequence
  ENSG00000140093_7 (sequence is synthesized)
gttcaaagggaaatggttgaccccatttgaccctgtcttcaccgaagtcgacactttccacctggacaagtacaagaccattaaggtgcccatgatgtacggtgcaggcaagtttgcctc

SEQ ID NO: 357891 - DNA, 120 bp, Artificial Sequence
  ENSG00000140093_8 (sequence is synthesized)
cacctttgacaagaattttcgttgtcatgtcctcaaactgccctaccaaggaaatgccaccatgctggtggtcctcatggagaaaatgggtgaccacctcgcccttgaagactacctgac

SEQ ID NO: 357892 - DNA, 120 bp, Artificial Sequence
  ENSG00000140093_9 (sequence is synthesized)
cacagacttggtggagacatggctcagaaacatgaaaaccagaaacatggaagttttctttccgaagttcaagctagatcagaagtatgagatgcatgagctgcttaggcagatgggaat

SEQ ID NO: 357893 - DNA, 120 bp, Artificial Sequence
  ENSG00000140093_10 (sequence is synthesized)
cagaagaatcttctcaccctttgctgaccttagtgaactctcagctactggaagaaatctccaagtatccagggttttacaaagaacagtgattgaagttgatgaaaggggcactgaggc

SEQ ID NO: 357894 - DNA, 120 bp, Artificial Sequence
  ENSG00000140093_11 (sequence is synthesized)
agtggcaggaatcttgtcagaaattactgcttattccatgcctcctgtcatcaaagtggaccggccatttcatttcatgatctatgaagaaacctctggaatgcttctgtttctgggcag

SEQ ID NO: 357895 - DNA, 120 bp, Artificial Sequence
  ENSG00000140093_12 (sequence is synthesized)
ggtggtgaatccgactctcctataattcaggacacgcataagcacttcgtgctgtagtagatgctgaatctgaggtatcaaacacacacaggataccagcaatggatggcaggggagagt

SEQ ID NO: 357896 - DNA, 120 bp, Artificial Sequence
  ENSG00000140093_13 (sequence is synthesized)
gttccttttgttcttaactagtttagggtgttctcaaataaatacagtagtccccacttatctgagggggatacattcaaagacccccagcagatgcctgaaacggtggacagtgctgaa

SEQ ID NO: 357897 - DNA, 74 bp, Artificial Sequence
  ENSG00000140093_14 (sequence is synthesized)
caacattaagtaaaatgagttacttgaatgcaagcactgcaataccataacagtcaaactgattatagagaagg

SEQ ID NO: 357898 - DNA, 120 bp, Artificial Sequence
  ENSG00000140093_15 (sequence is synthesized)
cactgcaataccataacagtcaaactgattatagagaaggctactaagtgactcatgggcgaggagcatagacagtgtggagacattgggcaaggggagaattcacatcctgggtgggac

SEQ ID NO: 357899 - DNA, 120 bp, Artificial Sequence
  ENSG00000140093_16 (sequence is synthesized)
agagcaggacaatgcaagattccatcccactactcagaatggcatgctgcttaagacttttagattgtttatttctggaatttttcatttaatgtttttggaccatggttgaccatggtt

SEQ ID NO: 357900 - DNA, 120 bp, Artificial Sequence
  ENSG00000140093_17 (sequence is synthesized)
aactgagactgcagaaagcaaaaccatggataagggaggactactacaaaagcattaaattgatacatattttttaagatgtttgtgcaatctgtctggtattttaagcttgtttctaag

SEQ ID NO: 357901 - DNA, 120 bp, Artificial Sequence
  ENSG00000140093_18 (sequence is synthesized)
aaccttagttacttggctaaagactagctgggtagaatatcttttctctgttgctcacatattttcatttttaaaaagttgcagatgagaacactatgtcaagataaagcctttgggagg

SEQ ID NO: 357902 - DNA, 120 bp, Artificial Sequence
  ENSG00000140093_19 (sequence is synthesized)
aacacatgtaaacattctccttgagtcatgtgcttctctctctttccttctctctggtgcaaaataagtgttttattttaatctattacggagtcatttcttgctgactgacatcagaag

SEQ ID NO: 357903 - DNA, 120 bp, Artificial Sequence
  ENSG00000140093_20 (sequence is synthesized)
aaatcgcttggcagaggcattggctgaatcacagatcatctagttcaataccttcattttacaaaggaaagaaagagggacccagaaacaggtccatattcttactttcatgggccctag

SEQ ID NO: 357904 - DNA, 120 bp, Artificial Sequence
  ENSG00000140093_21 (sequence is synthesized)
gcacgtttaaccttgtagactcctccttccttcatgaagatatatatgttctatggctgcattggtagaaagatgaatatattcgtctttcaaagttgcatatctagcttcaaagttata

SEQ ID NO: 357905 - DNA, 120 bp, Artificial Sequence
  ENSG00000140093_22 (sequence is synthesized)
tgtctagcatatggcaataagcaaaacaccttcatgggcccttacagtactgtcagccttgggcactgtgtcttctgcatctagtggataagtcataccttatataccagtgggaacaaa

SEQ ID NO: 357906 - DNA, 120 bp, Artificial Sequence
  ENSG00000140093_23 (sequence is synthesized)
atacttgtccaaggtcttccagtgtggcaatggcagagtcagaagcctacctttcctgagtctagtctccaagccctttttactcttccttccatctaaaacatctgatggggaccaggt

SEQ ID NO: 357907 - DNA, 120 bp, Artificial Sequence
  ENSG00000140093_24 (sequence is synthesized)
aaacagcatgcactacagctacccatgggggttaaacagaatataagcatgaactttgtcccagggtgaaaaggaaaatcgtaaatatccctgatcttccttaggcagttattttctgtc

SEQ ID NO: 357908 - DNA, 120 bp, Artificial Sequence
  ENSG00000140093_25 (sequence is synthesized)
acagaaacagaaaagactatattcagagaatcctgaatagagctgatttacagtgtgaactatgttaactaaatgcctaattggatttctgtctgtctgctatctaatgtttaaaaaaac

SEQ ID NO: 357909 - DNA, 120 bp, Artificial Sequence
  ENSG00000140093_26 (sequence is synthesized)
ctaaaattcatttattgattagttgtttaatataattcagagtaatgtgaataggtaataatattaatatgcagtctaaatactgacttttcatcattccataacctggactgatgaaaa

SEQ ID NO: 357910 - DNA, 120 bp, Artificial Sequence
  ENSG00000140093_27 (sequence is synthesized)
gtcagtatttagactgcatattaataaaataaaattcattcctgtattcattccaagagtactaattgacacttatgaagggacaggcaattctaggccctagagggccaaagacagagg

SEQ ID NO: 357911 - DNA, 120 bp, Artificial Sequence
  ENSG00000140093_28 (sequence is synthesized)
actaactctatctgacattcttaagtcaccttgtttgtgttcaattagtcagatttgtttgtggaaaaatagtagaaagaggaataaagtagcatccagtccaatttcccacttttaaga

SEQ ID NO: 357912 - DNA, 120 bp, Artificial Sequence
  ENSG00000140093_29 (sequence is synthesized)
gatgaaatctggaaaaataagtctgtgagagcacaatactcactgaaatcaatatggccaaacccagtaataaaaaggtacattattattgaaggattcatatagcatgcagataaaaaa

SEQ ID NO: 357913 - DNA, 120 bp, Artificial Sequence
  ENSG00000140093_30 (sequence is synthesized)
ctcctgccttcttcccaccacatacactgcaaagcaacaacagcataataattgtatttaatatactactctttaaggtagaaaatggacctattctatattttaaatatactttttaat

SEQ ID NO: 357914 - DNA, 120 bp, Artificial Sequence
  ENSG00000140093_31 (sequence is synthesized)
gttccctcacatttgctttaagaagttcctaagacactcagtttcagatttcccaagtacacaggcatgacagaaaaacgcagaccaataaaaaatgtaacttaccttacacaaatacat

SEQ ID NO: 357915 - DNA, 120 bp, Artificial Sequence
  ENSG00000140093_32 (sequence is synthesized)
cttaccttacacaaatacatacacacaaattcagggtttccaaccgagcgggggaaatcttaacattgtagaagtcttcactatatatgtgtcgagtttttgtttttgtttttgtttttg

SEQ ID NO: 357916 - DNA, 120 bp, Artificial Sequence
  ENSG00000140093_33 (sequence is synthesized)
caggcatgagccaccacgcccggccaagtgtcgagtcttaaaaattgttcctacacagacacactcaaccacacgttctcacatatatatgctgtaacaactgagaacaggttactgact

SEQ ID NO: 357917 - DNA, 120 bp, Artificial Sequence
  ENSG00000140093_34 (sequence is synthesized)
taatctaattcattctatcttcattgtaaaacttccactccagctgaagagcctgtttcatttcaattcaaagatttctcatatatccactaattgtatggcaaaactgactcatctcca

SEQ ID NO: 357918 - DNA, 120 bp, Artificial Sequence
  ENSG00000140093_35 (sequence is synthesized)
gactaagatattcaagctcaggaagtcaaataatagaaatgattttttaaatgtgtaagaggttataaagaaaaactttatgtgctccttatttaacctctattaagtaaaatcctttat

SEQ ID NO: 357919 - DNA, 120 bp, Artificial Sequence
  ENSG00000140093_36 (sequence is synthesized)
agacctatctccatttctgcagtaaaagtgagctctacagttagcttgtaaggctaactagtgaaattcctggacttgttcttaaaaatgcaagttttagtaattaacaaaatgatgatg

SEQ ID NO: 357920 - DNA, 120 bp, Artificial Sequence
  ENSG00000140093_37 (sequence is synthesized)
aagatgtcccttttccctacaactacagatggagggagatttttctttgccatacaactagcttaaaggattaatttgataagttgttaaactgagaactttcacaaaagtatccatctt

SEQ ID NO: 357921 - DNA, 120 bp, Artificial Sequence
  ENSG00000140093_38 (sequence is synthesized)
gtttttgatataaatggagatacatgtagttattcataactgtcagtaatttgctgtttatcctgtttctatatatctgtccttgagagtataattttaataaatatttcaaagatttta

SEQ ID NO: 357922 - DNA, 120 bp, Artificial Sequence
  ENSG00000140093_39 (sequence is synthesized)
ctggagtggggtaagaggcgaattatagacacaaggggctcctctgcaggaaggaggccaagggaaagaggcttgaaaggcttgatatttcacccaccaccactcactgccggagtaagc

SEQ ID NO: 357923 - DNA, 120 bp, Artificial Sequence
  ENSG00000140093_40 (sequence is synthesized)
aggtctccccttcccagggctgaggggaggcagggatgtgtgctgtcccagggctgagaagtggcaggtgagctggtgattccttactgcccaggttctgtctaggaaggtgcgtcctca

SEQ ID NO: 357924 - DNA, 120 bp, Artificial Sequence
  ENSG00000140093_41 (sequence is synthesized)
ccatgctggatggtgtcctagtccaggagcaccccctgagctcctggcctagactccaaagggttgggtagatgagcaaagactttacaaagaccttaggcgatatatgtccaggagcac

SEQ ID NO: 357925 - DNA, 120 bp, Artificial Sequence
  ENSG00000140104_0 (sequence is synthesized)
aggcaacggggcggcgcaggcaggagggaacggctggttgcaggtttctctcgccctggtcccgcgcggccccgccgaggcggcgaccaaggtgggtgcggggactctcgggagccgtgg

SEQ ID NO: 357926 - DNA, 120 bp, Artificial Sequence
  ENSG00000140104_1 (sequence is synthesized)
gccaggcgcttagccggccacctcgggccctgtccaggcccaggcgttccagggctgctctgcgggccgcgtgcgagagggactctcgggaggccccggggcgccgcacccactccttcc

SEQ ID NO: 357927 - DNA, 120 bp, Artificial Sequence
  ENSG00000140104_2 (sequence is synthesized)
cacttgggactcccgcgggcgcccggctctcgctcctctggccagcgtgggcctcccaggccccctcgcggctctctccagagcaggagccccaccttgggccgcccctctcacacctgc

SEQ ID NO: 357928 - DNA, 120 bp, Artificial Sequence
  ENSG00000140104_3 (sequence is synthesized)
cgtgggtctggtacgcgcctctgtgtcggactccgcgcccgcctgcgtgggaggaagccaggactcccgggcgaccgggccattcctgtggtttgtgtcagttccacagcagcacgtggg

SEQ ID NO: 357929 - DNA, 120 bp, Artificial Sequence
  ENSG00000140104_4 (sequence is synthesized)
cactttccaccgtcagccactgggcagcccggggcactcctgcagcgtcccctggccctctccagggcaggggaaggttgggcagtcctgggcggccagcaccccggcgtgcatgtctcc

SEQ ID NO: 357930 - DNA, 120 bp, Artificial Sequence
  ENSG00000140104_5 (sequence is synthesized)
tgagcagctgcccatcgggcctctgctggcctgggggctccaagatgcaaggccggcgggagctggggggagagcctttgagtgacctccaggaggaagcagccagcgcttccctccgag

SEQ ID NO: 357931 - DNA, 120 bp, Artificial Sequence
  ENSG00000140104_6 (sequence is synthesized)
tggcacctgagaggctgagtgatgacagtttggaatggagacggacctgccccgaccttctcctgtccgatgggaaagccagcatctccatgccccgtgagggcggttccacctgcactg

SEQ ID NO: 357932 - DNA, 120 bp, Artificial Sequence
  ENSG00000140104_7 (sequence is synthesized)
cccgatgtcctgaccctggggaacacagcagcacttggggggagtttgaaggctttcgggaatcttcagccaagtctggacaattctcacagtcccttgaactcctcgagggacccacag

SEQ ID NO: 357933 - DNA, 120 bp, Artificial Sequence
  ENSG00000140104_8 (sequence is synthesized)
aaccccagccaccgagaaccacttctgccccaaaagagtgcagttctcaccaaccatgccagggtggaccttgggtgacaggaacttctgccgtcccaccttctgagcccattctcagct

SEQ ID NO: 357934 - DNA, 120 bp, Artificial Sequence
  ENSG00000140104_9 (sequence is synthesized)
aaaaacctggcgttgaacgtgtacataaattgtgtaacgaatccagaaaactctggagagcccttcagagcatacacaccacgtctacttctcagcgcctctggagcgagtcccgttgcc

SEQ ID NO: 357935 - DNA, 120 bp, Artificial Sequence
  ENSG00000140104_10 (sequence is synthesized)
aggagaacttctttcttgttctcggaatagatgctgcgcagaagaacctttctggaggccagggccacatcatggaagattgtgacctcaaagagcctgaaggactcctcactgtcagca

SEQ ID NO: 357936 - DNA, 120 bp, Artificial Sequence
  ENSG00000140104_11 (sequence is synthesized)
gcttctgtctccagcattgcaaagccctgatccagaccaagctctcggggccgcctggcagcaaacaggggaggctgatgacatgcagccgcttcctgaagaccccctcatgcggaggtg

SEQ ID NO: 357937 - DNA, 120 bp, Artificial Sequence
  ENSG00000140104_12 (sequence is synthesized)
gccagcacatcactattccaaggaaaaggatgttcactccacgcaagctcaaactgacactctttaatagcgacgtttgctaaaatcaggaggactttgtacctttatgaggaatttttc

SEQ ID NO: 357938 - DNA, 120 bp, Artificial Sequence
  ENSG00000140104_13 (sequence is synthesized)
attttcttcctggctgggttgatgtggaaaccagagctgtctgtggagctgttttccagaccccaggcccattcctgggatctctccaacaggacctgtcctgtgttctgggcttgtctc

SEQ ID NO: 357939 - DNA, 120 bp, Artificial Sequence
  ENSG00000140104_14 (sequence is synthesized)
gggtctgaccaggagatggaggatgtgtccttggcagagccaaggggagacagaggtttctggatgccatgacaggctgtcggggtccaggtggcactcatgggccccctgccccatgtg

SEQ ID NO: 357940 - DNA, 120 bp, Artificial Sequence
  ENSG00000140104_15 (sequence is synthesized)
aatgctgctggcacctggtggggggttgcccagggatggaccctgggcatggcttctgggctgcttagtccagggggagcaacttgtggccaaatccatgagttcagaggaaaaggggaa

SEQ ID NO: 357941 - DNA, 120 bp, Artificial Sequence
  ENSG00000140104_16 (sequence is synthesized)
ggcactgaaacgtcaccagagagacagctgttgagaccgctcagaaaccctctgtctgtcacactctgccctggctgctgtgtggtcagggcaccatgagggtgtacagatgtgctgtgt

SEQ ID NO: 357942 - DNA, 120 bp, Artificial Sequence
  ENSG00000140104_17 (sequence is synthesized)
cctcagagcctcgcaggtgccctcacttactgcctgggcccctgcccagcagcctcaaggacaggcctttgtccctcacggttgtggacaggaggtcgcaccactggcctgcgagagcct

SEQ ID NO: 357943 - DNA, 120 bp, Artificial Sequence
  ENSG00000140104_18 (sequence is synthesized)
ctggtgggcccgtggcttcccccagttatctgctaaggaaaactgtgctcttcgaagggcagagccaagaagtcagccctgacttttgtaaaattttactaaataaaaccacctggataa

SEQ ID NO: 357944 - DNA, 120 bp, Artificial Sequence
  ENSG00000140104_19 (sequence is synthesized)
ttgtggtaatgaactgaagaaatatttcttacagcaactgcttttgtacttttgtttgataaaagtaggtgtgtgaggctttgtttttgcctttatggagagtagcatctctcctgaggt

SEQ ID NO: 357945 - DNA, 120 bp, Artificial Sequence
  ENSG00000140104_20 (sequence is synthesized)
ccctgccatctgtgggtcataggggtcctatgagaaggggcagcacgattggcgctccagctgtggccttccactctgagccctattcatcctcctccccagccagctcacctggagcag

SEQ ID NO: 357946 - DNA, 120 bp, Artificial Sequence
  ENSG00000140104_21 (sequence is synthesized)
ctggacccaagcccagctccccttgggtctcagtgccagtgctggtggagtgggtgggggcctcgcattcagtgcgagtggctggtgggcctgggcagtgggcacaggggccttctgggg

SEQ ID NO: 357947 - DNA, 120 bp, Artificial Sequence
  ENSG00000140104_22 (sequence is synthesized)
gacttggctgagtgggcaccggctgcctcatggttctcagccacagagttctagaaaacgttccacactctggagccccattgtcagccccaggcccagccccaggggtgctcccggtgc

SEQ ID NO: 357948 - DNA, 120 bp, Artificial Sequence
  ENSG00000140104_23 (sequence is synthesized)
tgcctgcagggccacaggctcctaggggaaagtgcacccgcagtcactcgcagatggccattttccagggacacactttcaactgagcattgaaagacagacagcgctcgagtggattag

SEQ ID NO: 357949 - DNA, 120 bp, Artificial Sequence
  ENSG00000140104_24 (sequence is synthesized)
gacgtggagctctctccaagcagataactgagccgtcagccacatcagaggccagggacatggccttcagaggctttggccatcatgcaaaaaacctggccaccctgaagcctctatgct

SEQ ID NO: 357950 - DNA, 120 bp, Artificial Sequence
  ENSG00000140104_25 (sequence is synthesized)
ggagaaatgtctgcagtgatcccacagagatgctgacaagatgcccaaggacccagctgctggagctttccggccagcatgccagccctgggaggagggaagccttcagggtggggtgca

SEQ ID NO: 357951 - DNA, 120 bp, Artificial Sequence
  ENSG00000140104_26 (sequence is synthesized)
ttgtgtctctgagcaggcctggactttcagagagctctgcagacaggccattctgggctccagccctggcccaccgtgtcctctgctggggtccaaccagcacctgccccagggtaccct

SEQ ID NO: 357952 - DNA, 120 bp, Artificial Sequence
  ENSG00000140104_27 (sequence is synthesized)
ctacaggggcttgaggacagaggcctggagcccagaaggccgcaaccagcattgcccagatggcccgtgtgccctctgtgtgtggtgcttctgcaaagcatgatccctggggaaaaactg

SEQ ID NO: 357953 - DNA, 120 bp, Artificial Sequence
  ENSG00000140104_28 (sequence is synthesized)
tggagaatgtggtcccagcaagctgacggtgggggtgggctctgtgctggcagcattgacatctctgtccccagcagcacaactcgcggacccagaggcatggggagtcctgggtgtcag

SEQ ID NO: 357954 - DNA, 120 bp, Artificial Sequence
  ENSG00000140104_29 (sequence is synthesized)
gacttggcggggctggacactcgtgggacagaaggctggatggtactttgggggtggagtagagcatggtttgtgtgttctgaaacactggggtatttttggaaatggtttggtgtttag

SEQ ID NO: 357955 - DNA, 89 bp, Artificial Sequence
  ENSG00000140104_30 (sequence is synthesized)
ctgtactcatacagcctccgtctcctaggcttaagcgatcttcctgcctcagcctcctgagtactgggactacaggcacccgccactac

SEQ ID NO: 357956 - DNA, 120 bp, Artificial Sequence
  ENSG00000140104_31 (sequence is synthesized)
aagtgctgggtttacaggtgtgagctgccgcacctgcccttgcactcattttcccttccatactagaacgtgaacttcctgcaggcagaccttctcagtccctcacagtgcgtagcagtg

SEQ ID NO: 357957 - DNA, 120 bp, Artificial Sequence
  ENSG00000140104_32 (sequence is synthesized)
acgtgtggcacatagtagacattcaccgttggtttgctcatttgttctcctgagcatgcactggtactcgtagtttgggagcatctgttttgtactcagcacagttctaggcacttgagt

SEQ ID NO: 357958 - DNA, 120 bp, Artificial Sequence
  ENSG00000140104_33 (sequence is synthesized)
gaacaaaaccagcaaaatatctggtctcacggagcttccactccttggaggagacagtaacggcagtaagtcagctactccagggcaggtgctgtgaggcatagagggggcacgggaggt

SEQ ID NO: 357959 - DNA, 120 bp, Artificial Sequence
  ENSG00000140104_34 (sequence is synthesized)
gggttggggtgttgaaggatggcacgtgttgtttgaataaaagtataaatgaacaaataaatgagacagcccagtgctcctgcagggaatgctgtttttatttgtttttttgtttgtttg

SEQ ID NO: 357960 - DNA, 120 bp, Artificial Sequence
  ENSG00000140104_35 (sequence is synthesized)
caggcgtgagccactgtgcccagcccgggaacactgtttttagagttcttaacagccatacgcctcttggcttgtgcgcgtctcggcttgcgggtaaaggccaggcgccccgctgcgtgc

SEQ ID NO: 357961 - DNA, 120 bp, Artificial Sequence
  ENSG00000140104_36 (sequence is synthesized)
ggcttgcgggtaaaggccaggcgccccgctgcgtgcctcgggccgtgcctcatgatctcctcagaaggctctcaaggtcaccttttaacaagtgcatctgttttccagtaacgaatccag

SEQ ID NO: 357962 - DNA, 120 bp, Artificial Sequence
  ENSG00000140104_37 (sequence is synthesized)
gcacgccgttgccaggcaacggggcggcgcaggcaggagggaacggctggttgcaggtttctctcgccctggtcccgcgcggccccgccgaggcggcgaccaagcccattctcagctatg

SEQ ID NO: 357963 - DNA, 120 bp, Artificial Sequence
  ENSG00000140104_38 (sequence is synthesized)
aacagagcagcgcaggcgtttctcatccagcagcaatgctacttcctcacccagggcaggtgcatgggctgaccctgatgggagcctccaggaacactgccttgagaaggcaccaccgag

SEQ ID NO: 357964 - DNA, 120 bp, Artificial Sequence
  ENSG00000140104_39 (sequence is synthesized)
gggctatgaggtccctgaagaccaactggtgcctgtgatctacaaacagacaaatatttgacctttgtcttcaatgacatttacatataaatagacataaataaaatcctccataattta

SEQ ID NO: 357965 - DNA, 120 bp, Artificial Sequence
  ENSG00000140105_0 (sequence is synthesized)
tgtcaagccctatgctgggtctggtgtgggtggaaatcaaacacaaaacacagatccccccggaggccccagagcgatgaaagcaacaaacaagatacgaccagagatgggttttgaagg

SEQ ID NO: 357966 - DNA, 120 bp, Artificial Sequence
  ENSG00000140105_1 (sequence is synthesized)
atgaataggagttagctgagctgtcaatagtaagaagtaaggttggtccaaggcacagcgctttctgaaggaacaggaagtgaaaggaaggcgagcggctatgagagaccgcgttaagcg

SEQ ID NO: 357967 - DNA, 120 bp, Artificial Sequence
  ENSG00000140105_2 (sequence is synthesized)
gcacggggcgctttaggcgctgcccagtcccggcccctccagcccggggcccgccgctcaccacacgcaccggaagcgctcggttctcccggaggcagaccggccagcacactaccatcc

SEQ ID NO: 357968 - DNA, 120 bp, Artificial Sequence
  ENSG00000140105_3 (sequence is synthesized)
agtcacgttccgacgcgacgccgcggccgccagccaatcagtggcggcctctgccccgcccccgcgcgaacagccaatgacggcgccgtcgggccggaagttgttccgtccggacggcgt

SEQ ID NO: 357969 - DNA, 120 bp, Artificial Sequence
  ENSG00000140105_4 (sequence is synthesized)
ttccacggacgcccaggagacagccggttgctgagccgggagcgctgactggcccggctgggcaggtcttgactcgtctgctgaacaaatcctctgacctcaggccggctgtgaacgtag

SEQ ID NO: 357970 - DNA, 120 bp, Artificial Sequence
  ENSG00000140105_5 (sequence is synthesized)
ttcctgagagatagcaaacatgcccaacagtgagcccgcatctctgctggagctgttcaacagcatcgccacacaaggggagctcgtaaggtccctcaaagcgggaaatgcgtcaaagga

SEQ ID NO: 357971 - DNA, 120 bp, Artificial Sequence
  ENSG00000140105_6 (sequence is synthesized)
tgaaattgattctgcagtaaagatgttggtgtcattaaaaatgagctacaaagctgccgcgggggaggattacaaggctgactgtcctccagggaacccagcacctaccagtaatcatgg

SEQ ID NO: 357972 - DNA, 120 bp, Artificial Sequence
  ENSG00000140105_7 (sequence is synthesized)
cccagatgccacagaagctgaagaggattttgtggacccatggacagtacagacaagcagtgcaaaaggcatagactacgataagctcattgttcggtttggaagtagtaaaattgacaa

SEQ ID NO: 357973 - DNA, 120 bp, Artificial Sequence
  ENSG00000140105_8 (sequence is synthesized)
agagctaataaaccgaatagagagagccaccggccaaagaccacaccacttcctgcgcagaggcatcttcttctcacacagagatatgaatcaggttcttgatgcctatgaaaataagaa

SEQ ID NO: 357974 - DNA, 120 bp, Artificial Sequence
  ENSG00000140105_9 (sequence is synthesized)
gccattttatctgtacacgggccggggcccctcttctgaagcaatgcatgtaggtcacctcattccatttattttcacaaagtggctccaggatgtatttaacgtgcccttggtcatcca

SEQ ID NO: 357975 - DNA, 120 bp, Artificial Sequence
  ENSG00000140105_10 (sequence is synthesized)
gatgacggatgacgagaagtatctgtggaaggacctgaccctggaccaggcctatagctatgctgtggagaatgccaaggacatcatcgcctgtggctttgacatcaacaagactttcat

SEQ ID NO: 357976 - DNA, 120 bp, Artificial Sequence
  ENSG00000140105_11 (sequence is synthesized)
attctctgacctggactacatggggatgagctcaggtttctacaaaaatgtggtgaagattcaaaagcatgttaccttcaaccaagtgaaaggcattttcggcttcactgacagcgactg

SEQ ID NO: 357977 - DNA, 120 bp, Artificial Sequence
  ENSG00000140105_12 (sequence is synthesized)
gccttatcccatgtgccattgaccaggatccttactttagaatgacaagggacgtcgcccccaggatcggctatcctaaaccagccctgctgcactccaccttcttcccagccctgcagg

SEQ ID NO: 357978 - DNA, 120 bp, Artificial Sequence
  ENSG00000140105_13 (sequence is synthesized)
gcgcccagaccaaaatgagtgccagcgaccccaactcctccatcttcctcaccgacacggccaagcagatcaaaaccaaggtcaataagcatgcgttttctggagggagagacaccatcg

SEQ ID NO: 357979 - DNA, 120 bp, Artificial Sequence
  ENSG00000140105_14 (sequence is synthesized)
aggagcacaggcagtttgggggcaactgtgatgtggacgtgtctttcatgtacctgaccttcttcctcgaggacgacgacaagctcgagcagatcaggaaggattacaccagcggagcca

SEQ ID NO: 357980 - DNA, 120 bp, Artificial Sequence
  ENSG00000140105_15 (sequence is synthesized)
tgctcaccggtgagctcaagaaggcactcatagaggttctgcagcccttgatcgcagagcaccaggcccggcgcaaggaggtcacggatgagatagtgaaagagttcatgactccccgga

SEQ ID NO: 357981 - DNA, 120 bp, Artificial Sequence
  ENSG00000140105_16 (sequence is synthesized)
agctgtccttcgactttcagtagcactcgttttacatatgcttataaaagaagtgatgtatcagtaatgtatcaataatcccagcccagtcaaagcaccgccacctgtaggcttctgtct

SEQ ID NO: 357982 - DNA, 120 bp, Artificial Sequence
  ENSG00000140105_17 (sequence is synthesized)
catggtaattactgggcctggcctctgtaagcctgtgtatgttatcaatactgtttcttcctgtgagttccattatttctatctcttatgggcaaagcattgtgggtaattggtgctggc

SEQ ID NO: 357983 - DNA, 120 bp, Artificial Sequence
  ENSG00000140105_18 (sequence is synthesized)
taacattgcatggtcggatagagaagtccagctgtgagtctctccccaaagcagccccacagtggagcctttggctggaagtccatgggccaccctgttcttgtccatggaggactccga

SEQ ID NO: 357984 - DNA, 120 bp, Artificial Sequence
  ENSG00000140105_19 (sequence is synthesized)
gggttccaagtatactcttaagacccactctgtttaaaaatatatattctatgtatgcgtatatggaattgaaatgtcattattgtaacctagaaagtgctttgaaatattgatgtgggg

SEQ ID NO: 357985 - DNA, 120 bp, Artificial Sequence
  ENSG00000140105_20 (sequence is synthesized)
aggtttattgagcacaagatgtatttcagcccatgccccctcccaaaaagaaattgataagtaaaagcttcgttatacatttgactaagaaatcacccagctttaaagctgcttttaaca

SEQ ID NO: 357986 - DNA, 120 bp, Artificial Sequence
  ENSG00000140105_21 (sequence is synthesized)
atgaagattgaacagagttcagcaattttgattaaattaagacttgggggtgaaactttccagtttactgaactccagaccatgcatgtagtccactccagaaatcatgctcgcttccct

SEQ ID NO: 357987 - DNA, 120 bp, Artificial Sequence
  ENSG00000140105_22 (sequence is synthesized)
tggcacaccagtgttctcctgccaaatgaccctagaccctctgtcctgcagagtcagggtggcttttcccctgactgtgtccgatgccaaggagtcctggcctccgcagatgcttcattt

SEQ ID NO: 357988 - DNA, 120 bp, Artificial Sequence
  ENSG00000140105_23 (sequence is synthesized)
tgacccttggctgcagtggaagtcagcacagagcagtgccctggctgtgtccctggacgggtggacttagctagggagaaagtcgaggcagcagccctcgaggccctcacagatgtctag

SEQ ID NO: 357989 - DNA, 120 bp, Artificial Sequence
  ENSG00000140105_24 (sequence is synthesized)
gcaggcctcatttcatcacgcagcatgtgcaggcctggaagagcaaagccaaatctcagggaagtccttggttgatgtatctgggtctcctctggagcactctgccctcctgtcacccag

SEQ ID NO: 357990 - DNA, 120 bp, Artificial Sequence
  ENSG00000140105_25 (sequence is synthesized)
actctcagcagctcaactgcccagcgtgaccagtggccacctctgcagtgtcttccacaacctggagtgtactatttgttaaacaggtgaatctacttctcttaacaaagtctcaatgtc

SEQ ID NO: 357991 - DNA, 120 bp, Artificial Sequence
  ENSG00000140105_26 (sequence is synthesized)
ctatttgcaatttatgtggtaaacactgaagacaatggtccttaaccttttggcatctcagcctcctttcgaaagtcttgactcgtctgctgaacaaatcctctgacctcaggccggctg

SEQ ID NO: 357992 - DNA, 120 bp, Artificial Sequence
  ENSG00000140105_27 (sequence is synthesized)
aatgaccagctaatggctcgattctcaagagggtttcattggtctcaacctggccccccaggcaacccacccctgattggacagtctcatcaagaagagtgtactatttgttaaacaggt

SEQ ID NO: 357993 - DNA, 120 bp, Artificial Sequence
  ENSG00000140105_28 (sequence is synthesized)
gtgatttataagaaacccttagctgaatgcagggtggggagaacgaaagacaaaagcatcttttttcagaagggaaactgaaagaaagaggggaagagtattaaagaccatttctggctg

SEQ ID NO: 357994 - DNA, 120 bp, Artificial Sequence
  ENSG00000140105_29 (sequence is synthesized)
ttcttactctcttagtgaattgagaatgttgcttataaaccatgtttagaactgacaagatcatgctagttcatttgctgagcaaccaagatgtcaagagttggcacttttttggcttcc

SEQ ID NO: 357995 - DNA, 120 bp, Artificial Sequence
  ENSG00000140105_30 (sequence is synthesized)
attcactttgttcctgggctcactttagaggaccatggagtgatggggagagcgcagctttggagtcagccaggcctgctcctcttctcatcctgctccctgtctgcatggccatgggcc

SEQ ID NO: 357996 - DNA, 120 bp, Artificial Sequence
  ENSG00000140105_31 (sequence is synthesized)
tgctacttctctgagcctaagtttccacatctgcaagatgagaatgaagatacctacctcatagaactactgtaaagcttcaaaacaaagtgtgtagagcagctaacacagagcacacag

SEQ ID NO: 357997 - DNA, 120 bp, Artificial Sequence
  ENSG00000140105_32 (sequence is synthesized)
ggccacctggtcgataaatggtagtagaccttatcattatccatagtcaaattcatatcacaattcaaattgtgattttgtaggcaaggaagttttaacatacgttgtaagtaggagctg

SEQ ID NO: 357998 - DNA, 120 bp, Artificial Sequence
  ENSG00000140105_33 (sequence is synthesized)
caatgaccagctaatggctcgattctcaagagggtttcattggtctcaacctggccccccaggcaacccacccctgattggacagtctcatcaagaaggttggtcaagagctcaagtgtt

SEQ ID NO: 357999 - DNA, 120 bp, Artificial Sequence
  ENSG00000140105_34 (sequence is synthesized)
gatgcggggaatttacagtttctctttccaccgcccacgactacacaaaatcagtcacactgacgctgagggtggggaacgggaagagggtggggaggttatttggaggccagcgggggg

SEQ ID NO: 358000 - DNA, 120 bp, Artificial Sequence
  ENSG00000140105_35 (sequence is synthesized)
tgaggggtggctgatgcaatgaccagctaatggctcgattctcaagagggtttcattggtctcaacctggccccccaggcaacccacccctgattggacagtctcatcaagaagaaggga

SEQ ID NO: 358001 - DNA, 120 bp, Artificial Sequence
  ENSG00000140105_36 (sequence is synthesized)
gacagccggttgctgagccgggagcgctgactggcccggctgggcaggggcactctcagcagctcaactgcccagcgtgaccagtggccacctctgcagtgtcttccacaacctggtctt

SEQ ID NO: 358002 - DNA, 120 bp, Artificial Sequence
  ENSG00000140105_37 (sequence is synthesized)
gttcagccaatctttggaatcctaagaaacacaagaaatttaataacagcactcgtaacgtagttacatcttgctttacagtttacaaagtgctaccatgccttttttttctcattttgt

SEQ ID NO: 358003 - DNA, 120 bp, Artificial Sequence
  ENSG00000140105_38 (sequence is synthesized)
ggaaatttaaaatatgggctcagccacagcatgatggcatctcagatcttcatcctcagctgtgccaggaagtcctgccttgcagtttcttgccaaggatagtcagtcttccagagttat

SEQ ID NO: 358004 - DNA, 120 bp, Artificial Sequence
  ENSG00000140105_39 (sequence is synthesized)
gtcttcctccttttcaacgcaccttttcctcacagagaaaagactcagtggttacacagtttcctcagtctagttcttttaatcagccatttaataaaccaaaatatttcattctgaaaa

SEQ ID NO: 358005 - DNA, 120 bp, Artificial Sequence
  ENSG00000140105_40 (sequence is synthesized)
ggggagtaaggccggggcggagtgaggaaacaagggagggagtgatggagggacgctggcgcggcgcccagtggcctggccctcccgggagtatccttagagcccggcttgctgcccgcc

SEQ ID NO: 358006 - DNA, 120 bp, Artificial Sequence
  ENSG00000140105_41 (sequence is synthesized)
gcgttctggcactgtgaggcgcggagcctgccaccgacccctcgcccctttcctctgagcgccgccgacccaccccgtctccctttcccactggcacccttcatcgtctccgcctgttcg

SEQ ID NO: 358007 - DNA, 120 bp, Artificial Sequence
  ENSG00000140105_42 (sequence is synthesized)
cttttcccgaggagagaggcccccatttttatttagcgcctgccatgtgccagaggctttgcgtagtgttgcacttagtcccctcaacggtaatgttagcaggcttctccatgcccattc

SEQ ID NO: 358008 - DNA, 120 bp, Artificial Sequence
  ENSG00000140105_43 (sequence is synthesized)
cacagatgaggaaaccgaaggggaagcagaaaagtaatgcgacccttgcccaaggtttcgaataagtccaagctgggattgaaacccaggcgtctgtgaccccagaactcctgatctttc

SEQ ID NO: 358009 - DNA, 120 bp, Artificial Sequence
  ENSG00000140105_44 (sequence is synthesized)
atcaaaaccaaggtgagcagtggcccaggcagagggcagccagcgggatcagaaacatgccctggggggcacacgcacacacacaccactgcgcagtgctttgggcctcagccacccagc

SEQ ID NO: 358010 - DNA, 120 bp, Artificial Sequence
  ENSG00000140105_45 (sequence is synthesized)
caccgtagcaatgctgaactccaggattgccaactttgctccctgcagaactcaaggcagcctgtccttcccacatgaatcaggtgaatttgttttgtgtcctttcatttaggtaaaatt

SEQ ID NO: 358011 - DNA, 120 bp, Artificial Sequence
  ENSG00000140105_46 (sequence is synthesized)
ttgaattttttttctttttttccttttctgcttttcttatcagcactgttctgcaggcaaagtcatggcaatttccttaaagttataattagtgtggatgttattaaataatggaaaaga

SEQ ID NO: 358012 - DNA, 120 bp, Artificial Sequence
  ENSG00000140105_47 (sequence is synthesized)
ggtgctcaactgaaacaaggtgaaaactgagtagactcgccctcatggtttttaggcctgggctcagaagcctcatgaacaaatctcgaaagagcagatacaaatcactattcatttagg

SEQ ID NO: 358013 - DNA, 120 bp, Artificial Sequence
  ENSG00000140105_48 (sequence is synthesized)
aggagacagccggttgctgagccgggagcgctgactggcccggctgggcaggatgttcctgaactccaagttgaaaaacctctgaagttcaactcaattctgaaagtcaacaaagaaata

SEQ ID NO: 358014 - DNA, 120 bp, Artificial Sequence
  ENSG00000140105_49 (sequence is synthesized)
aatgtctttgccttttaagataatgttcatgctgttatttggcggggaaagcaatctttcttttagtgtttaaaaaaaatggaacatgatgggtcccaaaaggtgtcaagaaatccttgc

SEQ ID NO: 358015 - DNA, 120 bp, Artificial Sequence
  ENSG00000140107_0 (sequence is synthesized)
gctgttgaggccaccctggtggcaccaaagccctctcaggcaggcagacccagggcctccccgccacaccttgttcatggattttgtcgctggagccatcggaggcgtctgcggtgttgc

SEQ ID NO: 358016 - DNA, 120 bp, Artificial Sequence
  ENSG00000140107_1 (sequence is synthesized)
tgtgggctaccccctggacacggtgaaggtcaggatccagacggagccaaagtacacaggcatctggcactgcgtccgggatacgtatcaccgagagcgcgtgtggggcttctaccgggg

SEQ ID NO: 358017 - DNA, 120 bp, Artificial Sequence
  ENSG00000140107_2 (sequence is synthesized)
cctctcgctgcccgtgtgcacggtgtccctggtatcttccgtgtcttttggcacctaccgccactgcctggcgcacatctgccggctccggtacggcaaccctgacgccaagcccaccaa

SEQ ID NO: 358018 - DNA, 120 bp, Artificial Sequence
  ENSG00000140107_3 (sequence is synthesized)
ggccgacatcacgctctcgggatgcgcctccggcctcgtccgcgtgttcctgacgtcgcccactgaggtggccaaagtccgcttgcagacgcagacacaggcgcagaagcagcagcggcg

SEQ ID NO: 358019 - DNA, 120 bp, Artificial Sequence
  ENSG00000140107_4 (sequence is synthesized)
gctttcggcctcggggccgttggctgtgccccccatgtgtcctgtgcccccagcctgcccagagcccaagtaccgcgggccactgcactgcctggccacggtagcccgtgaggaggggct

SEQ ID NO: 358020 - DNA, 120 bp, Artificial Sequence
  ENSG00000140107_5 (sequence is synthesized)
gtgcggcctctacaagggcagctcggccctggtcttacgggacggccactcctttgccacctacttcctttcctacgcggtcctctgcgagtggctcagccccgctggccacagccggcc

SEQ ID NO: 358021 - DNA, 120 bp, Artificial Sequence
  ENSG00000140107_6 (sequence is synthesized)
agatgtcccgggcgtgctggtggccgggggctgtgcaggagtcctggcctgggctgtggccacccccatggacgtgatcaagtcgagactgcaggcagacgggcagggccagaggcgcta

SEQ ID NO: 358022 - DNA, 120 bp, Artificial Sequence
  ENSG00000140107_7 (sequence is synthesized)
caacatggtggtcttcgtcgcctatgaggcagtgctgaggctcgcccggggtctgctcacatagccggtccccacgcccagcggcccacccaccagcagctgctggaggtcgtagtggct

SEQ ID NO: 358023 - DNA, 120 bp, Artificial Sequence
  ENSG00000140107_8 (sequence is synthesized)
ggaggaggcaaggggtagtgtggctgggttcgggaccccacagggccattgcccaggagaatgaggagcctccctgcagtgttgtcggccgaggcctgagctcgccctgcccagctactg

SEQ ID NO: 358024 - DNA, 120 bp, Artificial Sequence
  ENSG00000140107_9 (sequence is synthesized)
acctcaggtcgaggggcccgccagccatcagccagggttggcctagggtggcaggagccagggaggagtgggcctctttgatgagagcgttgagttgcatggagtcggttgttcatccca

SEQ ID NO: 358025 - DNA, 120 bp, Artificial Sequence
  ENSG00000140107_10 (sequence is synthesized)
gcctccccatggccctcgcctcccatgtctttgaagcacccctccagggagtcaggtgtgtgctcagccaccctctgccccattcctagaccctcacccccaccactgttcctgtgtctt

SEQ ID NO: 358026 - DNA, 120 bp, Artificial Sequence
  ENSG00000140107_11 (sequence is synthesized)
cacgagctgtcccttacaggcaggggcttcccacaggctgggggcctcggggcggggagcatgagctgggctggcaccacgactgagggctcccggctcggcttcttccccacagcaggc

SEQ ID NO: 358027 - DNA, 120 bp, Artificial Sequence
  ENSG00000140107_12 (sequence is synthesized)
tgctcagagggggtgctgccgggactgccatgcccacctgagaggggcctggggtggccgtcctcggccggttagggaatttggggtgaggttcctcaggagccctcactctgcctgtgg

SEQ ID NO: 358028 - DNA, 120 bp, Artificial Sequence
  ENSG00000140107_13 (sequence is synthesized)
acgctgcacctgccacttaaagaccccaaagactctgttgggaactgttgtcaataaaatgtttctgaggatgttcagggctgtggctccatggccgtgggctgactgttccctgccccc

SEQ ID NO: 358029 - DNA, 120 bp, Artificial Sequence
  ENSG00000140153_0 (sequence is synthesized)
gaagagggagcaccaggaacagcgcctgcgcggtgggcgtgatccgggcacttagggcaggatgaacgctgctttccaagatggcgacggagggaggagggaaggagatgaacgagatta

SEQ ID NO: 358030 - DNA, 120 bp, Artificial Sequence
  ENSG00000140153_1 (sequence is synthesized)
agacccaattcaccacccgggaaggtctgtacaagctgctgccgcactcggagtacagccggcccaaccgggtgcccttcaactcgcagggatccaaccctgtccgcgtctccttcgtaa

SEQ ID NO: 358031 - DNA, 120 bp, Artificial Sequence
  ENSG00000140153_2 (sequence is synthesized)
acctcaacgaccagtctggcaacggcgaccgcctctgcttcaatgtgggccgggagctgtacttctatatctacaagggggtccgcaaggctgctgacttgagtaaaccaatagataaaa

SEQ ID NO: 358032 - DNA, 120 bp, Artificial Sequence
  ENSG00000140153_3 (sequence is synthesized)
ggatatacaaaggaacacagcctacttgtcatgacttcaaccacctaacagccacagcagaaagtgtctctctcctagtgggcttttccgcaggccaagtccagcttatagacccaatca

SEQ ID NO: 358033 - DNA, 120 bp, Artificial Sequence
  ENSG00000140153_4 (sequence is synthesized)
aaaaagaaactagcaaactttttaatgaggaaagactaatagacaagtcacgagttacctgtgtcaaatgggttcccggttcggaaagccttttcctagtagcccactcgagtgggaaca

SEQ ID NO: 358034 - DNA, 120 bp, Artificial Sequence
  ENSG00000140153_5 (sequence is synthesized)
tgtacttatataatgtggagcacacttgtggcaccacagccccccactaccagcttctgaagcagggagagagctttgccgtgcacacttgcaagagcaaatccacgaggaaccctctcc

SEQ ID NO: 358035 - DNA, 120 bp, Artificial Sequence
  ENSG00000140153_6 (sequence is synthesized)
ttaagtggacggtgggcgagggggccctcaacgagtttgctttctccccagatggcaagttcttagcgtgcgtgagccaggacgggtttctgcgggtgttcaactttgactcagtggagc

SEQ ID NO: 358036 - DNA, 120 bp, Artificial Sequence
  ENSG00000140153_7 (sequence is synthesized)
tgcacggtacgatgaaaagctactttgggggcttgctgtgtgtgtgctggagcccggatggcaagtacatcgtgacaggtggggaggacgacttggtgacagtctggtcctttgtagact

SEQ ID NO: 358037 - DNA, 120 bp, Artificial Sequence
  ENSG00000140153_8 (sequence is synthesized)
gccgagtaatagccagaggccacgggcacaagtcctgggtcagtgttgtagcgtttgacccttataccactagtgtagaagaaggtgaccctatggagtttagtggcagcgatgaggact

SEQ ID NO: 358038 - DNA, 120 bp, Artificial Sequence
  ENSG00000140153_9 (sequence is synthesized)
tccaagaccttcttcattttggcagagatcgagcaaatagtacacagtccaggctctccaaacggaactctacagacagccgccccgtaagtgtcacgtatcggtttggttccgtgggcc

SEQ ID NO: 358039 - DNA, 120 bp, Artificial Sequence
  ENSG00000140153_10 (sequence is synthesized)
ccacgagtcctcctgctggaagcaatgggaacagtgttacaacacccgggaactctgtgccgcctcctctgccacggtccaacagccttccacattcagcagtctcaaatgctggcagca

SEQ ID NO: 358040 - DNA, 120 bp, Artificial Sequence
  ENSG00000140153_11 (sequence is synthesized)
aaagcagtgtcatggacggggccattgcttctggggtcagcaaatttgcaacactttcactacatgaccggaaggagaggcaccacgagaaagatcacaagcgaaatcatagcatgggac

SEQ ID NO: 358041 - DNA, 120 bp, Artificial Sequence
  ENSG00000140153_12 (sequence is synthesized)
acatttctagcaagagcagtgacaaactgaatctagttaccaaaaccaaaacggaccctgctaaaactctgggaacgcccctgtgtcctcgaatggaagatgttcccttgttagagccgc

SEQ ID NO: 358042 - DNA, 120 bp, Artificial Sequence
  ENSG00000140153_13 (sequence is synthesized)
tgatatgtaaaaagatagcacatgagagactgactgtactaatatttcttgaagactgtatagtcactgcttgtcaggagggatttatttgcacatggggaaggcctggtaaagtgggct

SEQ ID NO: 358043 - DNA, 120 bp, Artificial Sequence
  ENSG00000140153_14 (sequence is synthesized)
cattgtcatccccaagccaggccagttctccaggtggaactgtagtgtagcgacctcactgctgcgcgcacagtctcccgggacttggactcgagggagtgacgaggaggagctccgagc

SEQ ID NO: 358044 - DNA, 120 bp, Artificial Sequence
  ENSG00000140153_15 (sequence is synthesized)
tgcgcctgagccgtgccagccggcggacctcaggcggtggacgtcggcgatagccgtgtggacggtgaccggctcactctgcggcgccgtgctcccgctgctcacccaaagaagttgttt

SEQ ID NO: 358045 - DNA, 120 bp, Artificial Sequence
  ENSG00000140153_16 (sequence is synthesized)
ccattttaaaccggtcttttggggctgcagtaaaaaataagaaatggagttttcttgctttttactctaaaattcaatgtaattaaatttcatatatatataatatatacatatatacat

SEQ ID NO: 358046 - DNA, 120 bp, Artificial Sequence
  ENSG00000140153_17 (sequence is synthesized)
agtgtaaaataaaatgtttcttggacaagaaatcccctgaaattcagctgttatagtgcttcactgtttttgcactgatttttctataccttaggtggtcagaagacaaccttgaatgca

SEQ ID NO: 358047 - DNA, 120 bp, Artificial Sequence
  ENSG00000140153_18 (sequence is synthesized)
ctcatagagaaaactgttactttctgacgtaatgtaattcaggaagacagacgctgcaatcacagattttaaaaaattgtttgcacttaaaaatagttgaatgctggtggaaagttactt

SEQ ID NO: 358048 - DNA, 120 bp, Artificial Sequence
  ENSG00000140153_19 (sequence is synthesized)
tgcagatgggtgtaaggactcatggccctctgaggtgcggcgtgaagatgccctttttacccgttgacgtttattttacgtaaaataaactgttgtttccaatgcaatcaactctgtatt

SEQ ID NO: 358049 - DNA, 120 bp, Artificial Sequence
  ENSG00000140153_20 (sequence is synthesized)
tctgtattatatgtataaatattgtaattctgcaattggggaaaatagttacttcactagtaattttcatcatttaagagtgatatttctaattcacaaaagttaatattaaaactatct

SEQ ID NO: 358050 - DNA, 120 bp, Artificial Sequence
  ENSG00000140153_21 (sequence is synthesized)
tgggaggggtggggtgtacaatgaatgtgaatgacacttcttattcttaatgtaaatctcaatgcatcagagccataattttggatactgcatgccatgtaattctgaatcatttgataa

SEQ ID NO: 358051 - DNA, 120 bp, Artificial Sequence
  ENSG00000140153_22 (sequence is synthesized)
tttaccttagagcatttaaaaaaatataatcaaactaattgccagccaagtcagtcatcctcctgggagtatatagagtcccaaggttagcgctcctgtattagactatttcaattttag

SEQ ID NO: 358052 - DNA, 120 bp, Artificial Sequence
  ENSG00000140153_23 (sequence is synthesized)
gaaaatcatgaccatgtggggaaacaatgactttaaaatgctgaaattaaaatttatgctttaactggaatattttttgcttaactactcaattagaatattgtacacctgatcaatgtg

SEQ ID NO: 358053 - DNA, 120 bp, Artificial Sequence
  ENSG00000140153_24 (sequence is synthesized)
tgttcagcacagatggccatgaattgtcatttatagtccaattttttatcttaatcataaaatgtttaggaatctatgaaatttaactttaggaacaaaacgtttagcagggttgattga

SEQ ID NO: 358054 - DNA, 120 bp, Artificial Sequence
  ENSG00000140153_25 (sequence is synthesized)
tattatttttacattgttctggcaatccacagaaagagaagagccttaatttttaaaacccattttagtcattttatgacaattaaagttgtttaataaacatcttttttcaaagaagca

SEQ ID NO: 358055 - DNA, 120 bp, Artificial Sequence
  ENSG00000140153_26 (sequence is synthesized)
gagtagctgggactacaggcatgagccacactgttggcctcttcttgtacctctgaggtttcatttcttacatatgatttctttttgatactgctgagatttattctggtataaattgtg

SEQ ID NO: 358056 - DNA, 120 bp, Artificial Sequence
  ENSG00000140153_27 (sequence is synthesized)
aaactcttgtcagcacttgtggaaggtggattggaatgaagaaagacagaatgaaggtagcaagaccagtgaggaggctctagtaactgtccagccggcagagcacttctgcaggcagga

SEQ ID NO: 358057 - DNA, 120 bp, Artificial Sequence
  ENSG00000140153_28 (sequence is synthesized)
ggacaggatgcaaggtgttctccaagaccagaactaaaagtgcccaacagcttgagaagagggcactggagagaggggcagggaagcgcccttctcctcggctgtgcttctgagtaatgg

SEQ ID NO: 358058 - DNA, 120 bp, Artificial Sequence
  ENSG00000140153_29 (sequence is synthesized)
ctcccgcagacctggggagggcctggggaggggtggccgcggtggttcctgatatcaggtgtgtaaggtgcaatgcgtgctgctaaccctaggagaaatttggggaaaatatttgtagtt

SEQ ID NO: 358059 - DNA, 120 bp, Artificial Sequence
  ENSG00000140153_30 (sequence is synthesized)
ttctcgccaaactttgagcttcctcattgaaatttttcagtctttcagcctaaacgttattatgagcaagaatatcttttctaacctaatctgtggaataaaacacagcatttggcaaga

SEQ ID NO: 358060 - DNA, 120 bp, Artificial Sequence
  ENSG00000140153_31 (sequence is synthesized)
agaggctgttaaatactcagtcagcatcactgttccagcgtgtaccaaaccacagagatgaaaggctcagacgaaagtcaggtgcacgctgcgtggctggagaatcccgctcccacccgg

SEQ ID NO: 358061 - DNA, 120 bp, Artificial Sequence
  ENSG00000140153_32 (sequence is synthesized)
caagggggcgagctggtccctgggcggtgtcagacaccttctgaaggtgccaggccagggccaggggagcttcaactcgccctccttgggttggcctttttcaccagaattcaagaagcc

SEQ ID NO: 358062 - DNA, 120 bp, Artificial Sequence
  ENSG00000140153_33 (sequence is synthesized)
agatttgtgctgtgactgcgatggggcaggcttctaaacactactggtggccctggagcctttctctgaggcttttttcttattcagaaggagaattaaaaattcccccagcggcctgga

SEQ ID NO: 358063 - DNA, 120 bp, Artificial Sequence
  ENSG00000140153_34 (sequence is synthesized)
gaagggaacctttggaaaagcttgccttcttttaaaagcaaatgcatgtgcaggagtagacactttacaaataaccagtagccttggggtcgaaatttgcttaaatcatggtaaaggatc

SEQ ID NO: 358064 - DNA, 120 bp, Artificial Sequence
  ENSG00000140153_35 (sequence is synthesized)
cttagctggggactgagggtaaatgccttaaaaatggaggcatggaaaatcagaaaggagctatcacaatcattcttttctcaaaggcgttcaggaattctgaggaagaaatgcagtgac

SEQ ID NO: 358065 - DNA, 120 bp, Artificial Sequence
  ENSG00000140153_36 (sequence is synthesized)
aggatgggattttaggggcaaggacaccgtccgggcggggcccagggctctccactggctgacttcacccccagggcccagctggcacgtggccaggcagccatttctccccagttcctc

SEQ ID NO: 358066 - DNA, 120 bp, Artificial Sequence
  ENSG00000140153_37 (sequence is synthesized)
cacttcctggggttcattttaaataataaattgtaaagtatgaaatgagtgctgaagttgcctgcatacaaggtcctcatcacctctcgcctgggagggagacgttttctttctttgttg

SEQ ID NO: 358067 - DNA, 120 bp, Artificial Sequence
  ENSG00000140153_38 (sequence is synthesized)
agcgagctcaaagtgtgaggcggagaaaacctaggggttgggggcggctggagaagggatccacggaaacccaagcgccacatcatgcgtgtctgactgcccacggaagaactagaagca

SEQ ID NO: 358068 - DNA, 120 bp, Artificial Sequence
  ENSG00000140153_39 (sequence is synthesized)
gttcaccagtggattttctggggaacgattcatggaacacagcgtctggcgtccagctttgtgggtgagggcatggcgggggatccggtggccctgccctgcctccggtgccggtggatg

SEQ ID NO: 358069 - DNA, 120 bp, Artificial Sequence
  ENSG00000140153_40 (sequence is synthesized)
ggggagggactggcctctgactgcggggttgcaccatggcggcggtcggtgtgcccttggctgaggtttcgttccttagcagtgagaacctccacatgcgtgggtaggggtcgggtgacc

SEQ ID NO: 358070 - DNA, 120 bp, Artificial Sequence
  ENSG00000140153_41 (sequence is synthesized)
tggagacgcctcctccggtctggtctgggtgacaaaggtgaaggtttatagtctaccaccctggcagcagcctgcagggcccccccttgtctggagcacacccttcgccacgggctgatt

SEQ ID NO: 358071 - DNA, 120 bp, Artificial Sequence
  ENSG00000140153_42 (sequence is synthesized)
gggactgtcgggtgttgctttaagttaacaaggtgcacatcacagcgaccccaagtgatgtcccaaagggaggagacattagtctggccgaagtgaagtctgtggctttatatgtaaaag

SEQ ID NO: 358072 - DNA, 120 bp, Artificial Sequence
  ENSG00000140153_43 (sequence is synthesized)
cactcgtatgcaactgttacctttgaaactcagatcctagttacgaactataagaacgtgcccctccagtagagggagactgtctcactgatgttgatttctttattcatttccgcatct

SEQ ID NO: 358073 - DNA, 120 bp, Artificial Sequence
  ENSG00000140153_44 (sequence is synthesized)
gttacacgaacttcgtgtcataaattgctatcctttcatttgaaagtgtaaaaaatttcctgcatttttatcatttctgtatacttgagtttattagagattgttatgttaggcgacact

SEQ ID NO: 358074 - DNA, 120 bp, Artificial Sequence
  ENSG00000140153_45 (sequence is synthesized)
gtataaaattgtatggatattttgagtgaaaatcaaaagtaaaattcacatgtatttccttttttatattttcatccaatttcttgacaacttgaataaatttcataaagagccttccta

SEQ ID NO: 358075 - DNA, 120 bp, Artificial Sequence
  ENSG00000140153_46 (sequence is synthesized)
acatgaaatattggtaaattaaattctttactgttgcaataattaatgaaactttagtatcagtattgttttataattttaaggaaatcatgtttgtttcactgctttgttttttttttt

SEQ ID NO: 358076 - DNA, 120 bp, Artificial Sequence
  ENSG00000140153_47 (sequence is synthesized)
agctgttgccttgtcactgtcacagctaacaagacttactacatacttgatattctgaagtactgtggggctgtcctctgtatactgacattaaataaacgtgtgtgagtgaactgtaaa

SEQ ID NO: 358077 - DNA, 120 bp, Artificial Sequence
  ENSG00000140153_48 (sequence is synthesized)
gcagggcgggagaccgctgaggaggcaccctcaagttcacctcaggctcatgacaccagccccgccgcggttccccctgaccggctttccgctggccctggcggctgcggaacggtcaac

SEQ ID NO: 358078 - DNA, 120 bp, Artificial Sequence
  ENSG00000140153_49 (sequence is synthesized)
tagaccccactagctgaagccggcatcacctgggaagcagccatgccgcccggaggccacacccgggggaggagcctgcggacgcccagtcgggtggagcacgccaggctgctgacttga

SEQ ID NO: 358079 - DNA, 120 bp, Artificial Sequence
  ENSG00000140153_50 (sequence is synthesized)
cccaggctggtctctaattcctggcctcaagctgtcctcctgccttggcctccagagcactgggataatagttgtgagccaccgtgcccagcctagattcttcttaatatactgtttcct

SEQ ID NO: 358080 - DNA, 120 bp, Artificial Sequence
  ENSG00000140153_51 (sequence is synthesized)
ttgcctggaatgtgcttctattcctcactctctgccccttcatctgtttaactcctactccttgaaatcttagctcatatgtaattttgtccaagcgttttaccctgaccttcagactag

SEQ ID NO: 358081 - DNA, 120 bp, Artificial Sequence
  ENSG00000140153_52 (sequence is synthesized)
aggcttgcctggtctgggctctttctctcgctaccagactgcccctgcctgggaagccatctgccaggggctgatgaccccatggggaagaggaatagctggcttgggtggttactcctg

SEQ ID NO: 358082 - DNA, 120 bp, Artificial Sequence
  ENSG00000140153_53 (sequence is synthesized)
agtggaaaagataagaactcttgtcagcacttgtggaaggtggattggaatgaagaaagacagaatgaaggtagcaagaccagtgaggaggctctagtaactgtccaggtgagagctgag

SEQ ID NO: 358083 - DNA, 120 bp, Artificial Sequence
  ENSG00000140153_54 (sequence is synthesized)
ggcttgaactagagttgcggccattgtttcattcattcaggaccttgactacctaccacatgcccagcactgggtctgcagcagtgggcaaaacctgccctcctgtgacccctctcagga

SEQ ID NO: 358084 - DNA, 120 bp, Artificial Sequence
  ENSG00000140153_55 (sequence is synthesized)
aggggaggtatgctacattttcaccatttgtatgaatgcagccacggaaaacttcacatcagctcagccctcggtttagttttcttcggaggagacattagttacagcttgagttctcag

SEQ ID NO: 358085 - DNA, 120 bp, Artificial Sequence
  ENSG00000140153_56 (sequence is synthesized)
cctgccccactcgaaggcgccagcagggactctggatcacggggccatgaactatggagtgagtcttctagaaagagaaataataaaagacactaagacttgctgttctaaatgaaagaa

SEQ ID NO: 358086 - DNA, 120 bp, Artificial Sequence
  ENSG00000140157_0 (sequence is synthesized)
gttttccggcgccggccctaggtcccggcagcggtggtgacggcggtgccggaggttgtccttggcaggttttcctcggcgcttctccatggaggaggcggtgcgaacggcttcagcccc

SEQ ID NO: 358087 - DNA, 120 bp, Artificial Sequence
  ENSG00000140157_1 (sequence is synthesized)
gaatgctcgcatctcccactggacggcgacgaaggcggtggccgtgcgagcgcaggactgggcggcctgtgtgggggtgtgagccgcggtgcccaaggctgcgccggcgaggggaagccg

SEQ ID NO: 358088 - DNA, 120 bp, Artificial Sequence
  ENSG00000140157_2 (sequence is synthesized)
cgcggccggccggccgactagggctggagctactcggccagggtttaagactttaaatgagaataaagggtggtatttacgaggaaatgagagtgaataagtcatctctaacctctccca

SEQ ID NO: 358089 - DNA, 120 bp, Artificial Sequence
  ENSG00000140157_3 (sequence is synthesized)
gcctttttttcataagagagaccatattaaacttacatgctctcccggctgtgatagaccttcagttacagagagagggagcagagtgggaccaggtctgagaatagtgaagcaactcat

SEQ ID NO: 358090 - DNA, 120 bp, Artificial Sequence
  ENSG00000140157_4 (sequence is synthesized)
tcctttcaggacattccctctgatgtcctattttcaaactgtttgaagactgcttcattctgcctctagtaccagcggtttctctgttctgtgatcaatgtgattcacaggaactcctta

SEQ ID NO: 358091 - DNA, 120 bp, Artificial Sequence
  ENSG00000140157_5 (sequence is synthesized)
agtaacaaacgaaatgagccaggggcgtggaaaatatgacttctatattggtctgggattggctatgagctccagcattttcattggaggaagtttcattttgaaaaaaaagggcctcct

SEQ ID NO: 358092 - DNA, 120 bp, Artificial Sequence
  ENSG00000140157_6 (sequence is synthesized)
tcgacttgccaggaaaggctctatgagagcaggtcaaggtggccatgcatatcttaaggaatggttgtggtgggctggactgctgtcaatgggagctggtgaggtggccaacttcgctgc

SEQ ID NO: 358093 - DNA, 120 bp, Artificial Sequence
  ENSG00000140157_7 (sequence is synthesized)
gtatgcgtttgcaccagccactctagtgactccactaggagctctcagcgtgctagtaagtgccattctttcttcatactttctcaatgaaagacttaatcttcatgggaaaattgggtg

SEQ ID NO: 358094 - DNA, 120 bp, Artificial Sequence
  ENSG00000140157_8 (sequence is synthesized)
tttgctaagtattctaggatctacagttatggtcattcatgctccaaaggaagaggagattgagactttaaatgaaatgtctcacaagctaggtgatccaggttttgtggtctttgcaac

SEQ ID NO: 358095 - DNA, 120 bp, Artificial Sequence
  ENSG00000140157_9 (sequence is synthesized)
ccttgtggtcattgtggccttgatattaatcttcgtggtgggtcctcgccatggacagacaaacattcttgtgtacataacaatctgctctgtaatcggcgcgttttcagtctcctgtgt

SEQ ID NO: 358096 - DNA, 120 bp, Artificial Sequence
  ENSG00000140157_10 (sequence is synthesized)
gaagggcctgggcattgctatcaaggagctgtttgcagggaagcctgtgctgcggcatcccctggcttggattctgctgctgagcctcatcgtctgtgtgagcacacagattaattacct

SEQ ID NO: 358097 - DNA, 120 bp, Artificial Sequence
  ENSG00000140157_11 (sequence is synthesized)
aaatagggccctggatatattcaacacttccattgtgactccaatatattatgtattctttacaacatcagttttaacttgttcagctattctttttaaggagtggcaagatatgcctgt

SEQ ID NO: 358098 - DNA, 120 bp, Artificial Sequence
  ENSG00000140157_12 (sequence is synthesized)
tgacgatgtcattggtactttgagtggcttctttacaatcattgtggggatattcttgttgcatgcctttaaagacgtcagctttagtctagcaagtctgcctgtgtcttttcgaaaaga

SEQ ID NO: 358099 - DNA, 120 bp, Artificial Sequence
  ENSG00000140157_13 (sequence is synthesized)
atggaaatctgacagctttttaagaaaggtgtaattaaaggttaatctgtgattgttatgaagtgaatttgaatatcatcagaatgtgtctgaaaaaacattgtcctcaaataatgttct

SEQ ID NO: 358100 - DNA, 120 bp, Artificial Sequence
  ENSG00000140157_14 (sequence is synthesized)
ttaaaggcaatctttttaaagatttcactaatttggaccaagaaattacttttcttgtatttaaacaaacaatggtagctcactaaaatgacctcagcacatgacgatttctattaacat

SEQ ID NO: 358101 - DNA, 120 bp, Artificial Sequence
  ENSG00000140157_15 (sequence is synthesized)
tttattgttgtagaagtattttacattttcatcccttctccaaaagccgaatgcactaatgacagttttaagtctatgaaaatgctttattttttcattggtgatgaaagtctgaaatgt

SEQ ID NO: 358102 - DNA, 120 bp, Artificial Sequence
  ENSG00000140157_16 (sequence is synthesized)
gcatttgtcatccccactccatcaatccctgaccatgtaaggcttttttattttaaaaaaacagagttatcccaatacattatcctgtgatttaccttacctacaaaagtggctcctgtt

SEQ ID NO: 358103 - DNA, 120 bp, Artificial Sequence
  ENSG00000140157_17 (sequence is synthesized)
tgtttgatgatgattggttttatttttgaaatatttattaagggaaaactaagttactgaatgaaggaacctctttcttacaaaacaaaaaaaagggcagaaatcaccccaaggaacgat

SEQ ID NO: 358104 - DNA, 120 bp, Artificial Sequence
  ENSG00000140157_18 (sequence is synthesized)
ttctcaggttgagatgatcaccgtgaatccggcttcctctgagcattcgatggccttagcacctcatcaagccagcacatcctgcctgctgttgcagcctggctgggtttattcttcagt

SEQ ID NO: 358105 - DNA, 120 bp, Artificial Sequence
  ENSG00000140157_19 (sequence is synthesized)
taccctaatcccatgatgcctggaaccttgattaccgttttacatcagctcttgtacttttcagtatattttcataatgagttatattgtcatttagactttgaacagctctgggaaata

SEQ ID NO: 358106 - DNA, 120 bp, Artificial Sequence
  ENSG00000140157_20 (sequence is synthesized)
gaagactagggttgtttcttaaatttagctcatgttataataaaaagttgaaatgaagttcttattctaaaagtctgaatgcttagaacaaacttaacatgtttatagaatatggtctct

SEQ ID NO: 358107 - DNA, 120 bp, Artificial Sequence
  ENSG00000140157_21 (sequence is synthesized)
ttgtaccaagtactttgcttaagagctcctttgggccactacatattttggtttctagaaaatgtttgtttatgaagaagtcgatggaaaactgcaaacatatgcagaaaaggtagaata

SEQ ID NO: 358108 - DNA, 120 bp, Artificial Sequence
  ENSG00000140157_22 (sequence is synthesized)
ataaaaaaggtctaatgaactccattcagctttgaacctatccactcataaccattgactggcctttaaaaaaaagtattggcagaattaatttccacctaggtgatgggaagaaagtgt

SEQ ID NO: 358109 - DNA, 120 bp, Artificial Sequence
  ENSG00000140157_23 (sequence is synthesized)
tcgcctgttccagcctgtggctcctgcctggaggttacccagtggtgcgccagcgccaagccatcactccccgagggcctcccctgccaatggtgctggtatcccatgcagctcaccact

SEQ ID NO: 358110 - DNA, 120 bp, Artificial Sequence
  ENSG00000140157_24 (sequence is synthesized)
ggctgcgtggaaactcccttttttccaactttattattggccttctaaggagctgttttagatgttttttctaactgcctcctcccatgccattttaatactacagatgtactacgtatc

SEQ ID NO: 358111 - DNA, 120 bp, Artificial Sequence
  ENSG00000140157_25 (sequence is synthesized)
tgtttatatactgtacctacatctgtgctttgtacataaaagaaccagttttctcccccttgaggacagagactcatttgaacatgcataggttaataaataataaattcttatttaaca

SEQ ID NO: 358112 - DNA, 120 bp, Artificial Sequence
  ENSG00000140157_26 (sequence is synthesized)
ttgtgtcggagaagggttcttcgggcaactttcctttccgggtgttctgaagcggttttcctgtaatcctcagtgaggaaacccaccgtgaatcggattgccgttcagtcccacggaagc

SEQ ID NO: 358113 - DNA, 120 bp, Artificial Sequence
  ENSG00000140157_27 (sequence is synthesized)
ttaagttcattaaaataatttcatttgtcttggtttgaagactgcttcattctgcctctagtaccagcggtttctctgttctgtgatcaatgtgattcacaggaactccttaagtaacaa

SEQ ID NO: 358114 - DNA, 120 bp, Artificial Sequence
  ENSG00000140199_0 (sequence is synthesized)
ggatcacagtctgaaacgacagcaaggaagaggtaggcagggaaaactaactggaaggaagtttaaatacagaaagagcaaagtattatctaactataacaatgccacattttactgtga

SEQ ID NO: 358115 - DNA, 120 bp, Artificial Sequence
  ENSG00000140199_1 (sequence is synthesized)
ctaaggtagaggacccagaggagggggcagcggcttcgatctctcaagagcctagtttagcagacataaaagcccggattcaggattcagatgaaccagacctgagtcagaactccatca

SEQ ID NO: 358116 - DNA, 120 bp, Artificial Sequence
  ENSG00000140199_2 (sequence is synthesized)
caggggaacacagccaactgttagacgacggacataagaaagctcgaaatgcttatctcaataattccaattatgaagaaggagatgaatattttgataaaaatttggcactctttgagg

SEQ ID NO: 358117 - DNA, 120 bp, Artificial Sequence
  ENSG00000140199_3 (sequence is synthesized)
aagaaatggacaccagaccgaaggtgtcttccctcctcaaccgcatggccaattacactaatctgactcaaggagcaaaggaacatgaagaggcagaaaacatcactgaagggaaaaaga

SEQ ID NO: 358118 - DNA, 120 bp, Artificial Sequence
  ENSG00000140199_4 (sequence is synthesized)
agcccaccaagaccccccaaatgggtaccttcatgggtgtctacctcccatgtctacaaaatatttttggagtgatcctttttttacgccttacatgggtggtgggcacagctggagttc

SEQ ID NO: 358119 - DNA, 120 bp, Artificial Sequence
  ENSG00000140199_5 (sequence is synthesized)
ttcaggcttttgcaattgtccttatctgctgctgctgtacaatgttgactgctatctccatgagtgccattgccactaatggagtggtgccagctgggggctcatactttatgatttccc

SEQ ID NO: 358120 - DNA, 120 bp, Artificial Sequence
  ENSG00000140199_6 (sequence is synthesized)
gggcactgggcccagagtttggtggggctgttggcctctgcttttatcttggtaccacatttgcagcagccatgtacatccttggtgccattgaaatctttctggtctatatcgtccccc

SEQ ID NO: 358121 - DNA, 120 bp, Artificial Sequence
  ENSG00000140199_7 (sequence is synthesized)
gagctgccatctttcacagtgatgacgcactcaaggaatcagcagccatgctaaataacatgcgtgtctacggcacagctttcttggtccttatggtattagtggtatttatcggcgtac

SEQ ID NO: 358122 - DNA, 120 bp, Artificial Sequence
  ENSG00000140199_8 (sequence is synthesized)
gctatgtgaacaagtttgcctcacttttcctggcctgtgtcattgtgtccatcttggccatctatgctggagccatcaagtcttcttttgctcctccacacttcccggtctgcatgctgg

SEQ ID NO: 358123 - DNA, 120 bp, Artificial Sequence
  ENSG00000140199_9 (sequence is synthesized)
gtaaccgcaccctttcatcaagacacattgacgtttgctctaagaccaaggaaattaacaacatgacagtcccatcaaagttatggggattcttctgtaactcgagtcaatttttcaatg

SEQ ID NO: 358124 - DNA, 120 bp, Artificial Sequence
  ENSG00000140199_10 (sequence is synthesized)
ccacctgtgatgaatactttgttcacaataacgtcacttcaatccagggcattcctggattggctagtggtataattacagagaatctttggagtaattacctacccaagggagagatca

SEQ ID NO: 358125 - DNA, 120 bp, Artificial Sequence
  ENSG00000140199_11 (sequence is synthesized)
tcgaaaagccttcagccaaatcttctgatgtcttaggcagcttaaaccatgaatatgttcttgttgacatcaccacctccttcacgcttctggtgggaatcttctttccctctgttacag

SEQ ID NO: 358126 - DNA, 120 bp, Artificial Sequence
  ENSG00000140199_12 (sequence is synthesized)
gtatcatggctggatcaaacagatctggagatctgaaagatgctcagaagtctattccgattggtactatccttgccatcctgaccacctcctttgtttatttaagcaatgttgtccttt

SEQ ID NO: 358127 - DNA, 120 bp, Artificial Sequence
  ENSG00000140199_13 (sequence is synthesized)
ttggtgcatgtattgaaggggttgttctcagagacaagttcggtgatgctgtgaaaggtaatttggtggtaggcaccttatcttggccatccccatgggtgattgttattggctccttct

SEQ ID NO: 358128 - DNA, 120 bp, Artificial Sequence
  ENSG00000140199_14 (sequence is synthesized)
tttcaacatgtggggctggacttcagagcctcacaggtgcaccgaggctgctacaagctattgccaaggataacatcataccgtttctgagggtttttggccacagcaaagccaatgggg

SEQ ID NO: 358129 - DNA, 120 bp, Artificial Sequence
  ENSG00000140199_15 (sequence is synthesized)
aacctacctgggctttacttctaactgctgccattgcagagcttggaatactcattgcctccctggatcttgtggccccaattctttccatgttttttctcatgtgttacctctttgtaa

SEQ ID NO: 358130 - DNA, 120 bp, Artificial Sequence
  ENSG00000140199_16 (sequence is synthesized)
acttggcatgtgccttgcaaacattacttcgaacacccaactggagaccccgattccgctactaccattgggccctttctttcatgggaatgagtatctgtctggctctgatgttcattt

SEQ ID NO: 358131 - DNA, 120 bp, Artificial Sequence
  ENSG00000140199_17 (sequence is synthesized)
cttcctggtattatgccattgtagccatggtaatagctggtatgatctacaagtacattgaataccaaggagctgagaaagaatggggtgatggtatccgtgggctgtccctcagtgcag

SEQ ID NO: 358132 - DNA, 120 bp, Artificial Sequence
  ENSG00000140199_18 (sequence is synthesized)
cccggtttgctttgcttcgattggaggaaggacctccacacactaaaaactggaggcctcagttgcttgtattactgaaactagatgaagacttacatgtcaagcatcctcgcctcctca

SEQ ID NO: 358133 - DNA, 120 bp, Artificial Sequence
  ENSG00000140199_19 (sequence is synthesized)
cctttgcctcacagctcaaagcaggaaaaggtctcactattgtgggctctgtcatcgtggggaacttcctagagaactacggtgaagctttagctgctgagcagaccataaagcacctaa

SEQ ID NO: 358134 - DNA, 120 bp, Artificial Sequence
  ENSG00000140199_20 (sequence is synthesized)
tggaggcagagaaggtaaaaggattctgccagctggtggtggccgccaagctgagagagggcatttcccacctcatccagtcatgtggccttgggggcatgaagcacaacacggtggtga

SEQ ID NO: 358135 - DNA, 120 bp, Artificial Sequence
  ENSG00000140199_21 (sequence is synthesized)
tgggctggcctaatggctggcgtcaaagcgaagatgcccgcgcttggaagacttttattggcacagttcgagtgacaactgctgcccatcttgcactgctggtggctaaaaacatctcct

SEQ ID NO: 358136 - DNA, 120 bp, Artificial Sequence
  ENSG00000140199_22 (sequence is synthesized)
tctttcccagcaatgtggagcaattttctgagggcaacattgatgtgtggtggattgtgcatgatggggggatgcttatgctactaccattcctactgaaacagcacaaggtgtggcgaa

SEQ ID NO: 358137 - DNA, 120 bp, Artificial Sequence
  ENSG00000140199_23 (sequence is synthesized)
agtgcagcatacggatcttcacagtagcccaattagaagacaacagtatccaaatgaagaaggacctagccaccttcctatatcacttacgcattgaggcggaggtagaagtggtggaga

SEQ ID NO: 358138 - DNA, 120 bp, Artificial Sequence
  ENSG00000140199_24 (sequence is synthesized)
tgcatgacagtgatatatcagcatatacttacgagcgcactttgatgatggaacaaaggtcccagatgctccggcacatgcggctatccaaaacagagcgagacagagaggcacaattgg

SEQ ID NO: 358139 - DNA, 120 bp, Artificial Sequence
  ENSG00000140199_25 (sequence is synthesized)
tgaaagaccgaaactcaatgctacgattgaccagcattggctctgatgaggacgaagagacagaaacctatcaggagaaggtgcacatgacttggacaaaagacaagtacatggcatccc

SEQ ID NO: 358140 - DNA, 120 bp, Artificial Sequence
  ENSG00000140199_26 (sequence is synthesized)
ggggacaaaaagcgaagtcaatggaaggattccaggacctgcttaacatgcgtccggaccagtccaatgtgaggcggatgcatacagcagtgaaactcaacgaggttatagttaacaagt

SEQ ID NO: 358141 - DNA, 120 bp, Artificial Sequence
  ENSG00000140199_27 (sequence is synthesized)
cccatgaagcaaagctggttttattgaatatgccagggccaccccgaaaccctgagggtgatgaaaactacatggagttcctagaggtgcttaccgagggactagagcgagtcctacttg

SEQ ID NO: 358142 - DNA, 120 bp, Artificial Sequence
  ENSG00000140199_28 (sequence is synthesized)
tccggggtggtggcagtgaagtgatcaccatttattcataacctactctgaatgaccgtgcttgacctgttttcttaaaaggcctacgtcctccatggaagtgccagctcattactacca

SEQ ID NO: 358143 - DNA, 120 bp, Artificial Sequence
  ENSG00000140199_29 (sequence is synthesized)
ctcccactcaactagaagcctgtgttctgtacacatcatactgaactcttgatgagctgagcctcaagtacctgtgtaaaagagctcccatctgatctgcagtcattacagaaaaagcaa

SEQ ID NO: 358144 - DNA, 120 bp, Artificial Sequence
  ENSG00000140199_30 (sequence is synthesized)
aataaatgaattggtaaaagggatgctagaaattcaactgaagaaaaaaagcaagtcaagtacgtattcagcattaaagatgaatctcagaagtcatggttcaatgttgacactgtgagg

SEQ ID NO: 358145 - DNA, 120 bp, Artificial Sequence
  ENSG00000140199_31 (sequence is synthesized)
ataacaactagagacagcttcatcttactaaagaatttatggtcaagtatatttggacctattatcctcggcaagccaagatgcaaacattttttagctatatttctttagtatacccac

SEQ ID NO: 358146 - DNA, 120 bp, Artificial Sequence
  ENSG00000140199_32 (sequence is synthesized)
tgctgtaattttatattaggatactaacttgaaacatggctgcagcctctacttcttcaaaaacatccccccaaaataccagatttaaatatccaaatactgtgtcagtgtatacttcaa

SEQ ID NO: 358147 - DNA, 120 bp, Artificial Sequence
  ENSG00000140199_33 (sequence is synthesized)
ctgttttgtttctcttaactcaaaacccattctgtcattgtaacacaggcagtgttaccatggaaattgtttttggtaaggtaaaaattatttctttcaggttcctttcaaatggccgaa

SEQ ID NO: 358148 - DNA, 120 bp, Artificial Sequence
  ENSG00000140199_34 (sequence is synthesized)
ctaagagaactccaaaaggaagctattaacatttactgaaatagtctgtggttctctatacaacatggacaaaacatacaagctgttgtctaagaaatgcaggtcatggtgcacattaat

SEQ ID NO: 358149 - DNA, 120 bp, Artificial Sequence
  ENSG00000140199_35 (sequence is synthesized)
caacaggttcttctccccccgcccccacccccgcgcctttttttatgccctcttattaagcacaggtcaaaaaatcttaaggaacaaatactaggaaaactggctaaacatccttccctg

SEQ ID NO: 358150 - DNA, 120 bp, Artificial Sequence
  ENSG00000140199_36 (sequence is synthesized)
aaagcactggaccatcttttaaagggcacatctagcaatggaattggaagttctagagccacactctttctttagtgccaacgttactgagcggctactctccttacctactttactaaa

SEQ ID NO: 358151 - DNA, 120 bp, Artificial Sequence
  ENSG00000140199_37 (sequence is synthesized)
atggcatacagattggcattgacctgttgaagaaattttaccactaagaaatcttttgcctcatctacaaagccatagttaagacttgaggcattcaacttaatgccaagtataagcatt

SEQ ID NO: 358152 - DNA, 120 bp, Artificial Sequence
  ENSG00000140199_38 (sequence is synthesized)
tccccctttttctttcaattttattcttcattctgactacagaaacttggccctgaactacgagattagccaagccaacagtcttctaatttgttttcagaaacttcaggccgggtgccg

SEQ ID NO: 358153 - DNA, 72 bp, Artificial Sequence
  ENSG00000140199_39 (sequence is synthesized)
tggtggtgcatgcctgtgatcccagcaacacggaaggctaaggcaggaggtctgcactccagcctgggtaac

SEQ ID NO: 358154 - DNA, 120 bp, Artificial Sequence
  ENSG00000140199_40 (sequence is synthesized)
agcctgggtaacagagtgatatgtttcaaaaagaaagttcagtgtgccaaggaaatacttgtgtaagctcagctttttatttactaatatactgatcaaacatctggcttacaagcatag

SEQ ID NO: 358155 - DNA, 120 bp, Artificial Sequence
  ENSG00000140199_41 (sequence is synthesized)
ggaaactacttatgtggctggctgagcagtaatttcaagtatgtgaaatcttcatttcttttacagaatagttatttagagaaacttttcttgcctgtattcatggctgtttttgaattt

SEQ ID NO: 358156 - DNA, 120 bp, Artificial Sequence
  ENSG00000140199_42 (sequence is synthesized)
caatttattagtcataaatagtgccactcttctttgattactaaataggacatggagcaagctgacctaggtgtcacaaattattcatttgacctgtaaggacagagaaaacccttcaat

SEQ ID NO: 358157 - DNA, 65 bp, Artificial Sequence
  ENSG00000140199_43 (sequence is synthesized)
ttattcatttgacctgtaaggacagagaaaacccttcaatatagcttaagaaattgagtaatttt

SEQ ID NO: 358158 - DNA, 60 bp, Artificial Sequence
  ENSG00000140199_44 (sequence is synthesized)
tgagtaattttgatttgttccctttgcttgcttcaacctccaggcccactgaggatggca

SEQ ID NO: 358159 - DNA, 120 bp, Artificial Sequence
  ENSG00000140199_45 (sequence is synthesized)
cctttgcttgcttcaacctccaggcccactgaggatggcaaagcggataggatcttaagtctttttttctgttacttcctacagatggtagaagcattatttacaactcccactgcaaca

SEQ ID NO: 358160 - DNA, 120 bp, Artificial Sequence
  ENSG00000140199_46 (sequence is synthesized)
cccactgcaacactccattgcttagttgagtttaacagtagtgagtcatgtcctgcaggatccagtatcttttttttttttttccgagacgtagtttcgctcttgttgcccaggctggag

SEQ ID NO: 358161 - DNA, 120 bp, Artificial Sequence
  ENSG00000140199_47 (sequence is synthesized)
caaccaggatccagtatcttaaaggcccatactgtaaaggtcagcctgcctaggaattctgccacatttacacacacccctggccaaagtaatattttttttttccatgtagaacaaatt

SEQ ID NO: 358162 - DNA, 120 bp, Artificial Sequence
  ENSG00000140199_48 (sequence is synthesized)
atgggcagaaagtaaagttagttttagaagtgctgtttgtggttggagaattgtaaaaatcttttaaagggataagggaattagtggcttttaatataaccactgcttcagcccgaaaca

SEQ ID NO: 358163 - DNA, 120 bp, Artificial Sequence
  ENSG00000140199_49 (sequence is synthesized)
caaaatcactgttacatggaaaactggttattaggccagatttatattcatgtctgtctagagtatttcatgtgtgtatgtgttgcttacgttgtctgtctccaaagtctctcatctctt

SEQ ID NO: 358164 - DNA, 120 bp, Artificial Sequence
  ENSG00000140199_50 (sequence is synthesized)
ttaatcactgcaaataaagcaatactgaaaacttgagagaatgcaccttaggggaaggggctatttcaagacagaaaacaaaggaaatacctgccttttgaataagatcccgcttttgag

SEQ ID NO: 358165 - DNA, 120 bp, Artificial Sequence
  ENSG00000140199_51 (sequence is synthesized)
tcttacctatgactttaccagggtagattagaaatacacatcctcctgctgaccctctgccttcaatagctatctatcttaaaagctgaagtttgaactgcagcatctgcttgacaggtg

SEQ ID NO: 358166 - DNA, 120 bp, Artificial Sequence
  ENSG00000140199_52 (sequence is synthesized)
ccaggttccttcggcagggggacgatcactctatatatcttccgttgcctcagattcctgtggcccaaggatcccaccaatcctcgttccccctaaacatgctaacaaaaatcccttatc

SEQ ID NO: 358167 - DNA, 120 bp, Artificial Sequence
  ENSG00000140199_53 (sequence is synthesized)
gtgggtattaaaataataacagttacactgtatgcatatttatgtgctccttttgtctggtttttcttttcatcatgtataagctgaattcagcattagtttctcacatcttcccccagg

SEQ ID NO: 358168 - DNA, 120 bp, Artificial Sequence
  ENSG00000140199_54 (sequence is synthesized)
tatccccaacagaatttttatgtcccagcttgtattaaatagaagtgaaatattaaggaaaataaggaacttgtgcaactttttttatgcattgttctcaaccatttaatttattgaaag

SEQ ID NO: 358169 - DNA, 120 bp, Artificial Sequence
  ENSG00000140199_55 (sequence is synthesized)
gagatgctgcaacagttcttgatttagcagcagttattctcttgtttacatagttatgtttttttgttgttgttttgctctgtactggaaacaaaaataaagttttctacattattttca

SEQ ID NO: 358170 - DNA, 120 bp, Artificial Sequence
  ENSG00000140199_56 (sequence is synthesized)
agttaccggctagtaaacaacagctgcgcgcgcacccgcatcagctggcgccgggatactgcacctgcgacctccttctccctcaccctgctgcccagtcaggccagcctgcgtggccgt

SEQ ID NO: 358171 - DNA, 120 bp, Artificial Sequence
  ENSG00000140199_57 (sequence is synthesized)
ctcctcctctactgggaccctgaggaagaacgacgagggggtgacctgcgccggggcgggggtaggggagaacgcgcctccggcaaagggggtggctcgtcctgtcacacgcaggagaaa

SEQ ID NO: 358172 - DNA, 120 bp, Artificial Sequence
  ENSG00000140199_58 (sequence is synthesized)
cctagcgagcggaccgtggctcagtggactagctacgacttgccacgactctgagctgcagtccgaggtgtcttgatccgctaacctcctcccagaccccgaggacctttctgctaggag

SEQ ID NO: 358173 - DNA, 120 bp, Artificial Sequence
  ENSG00000140199_59 (sequence is synthesized)
aagagcgggcgcgccacccccaccgacctctcggagacaggaatccgctctgcccctgcatcctcctctgctcacccttctctcagtagttcaaaagtagctagcgtaagaggaagattt

SEQ ID NO: 358174 - DNA, 120 bp, Artificial Sequence
  ENSG00000140199_60 (sequence is synthesized)
tgcgaggttccccccactttttttgttcttaaaaagaacaaaatgcatcctccagaaaccaccaccaagatggcttcagttcggttcatggtgacaccgacaaagatcgatgacattcca

SEQ ID NO: 358175 - DNA, 120 bp, Artificial Sequence
  ENSG00000140199_61 (sequence is synthesized)
ggtttgtcagacaccagtccggacctcagctctcgatctagttcccgagtaagatttagctcccgggaaagcgtgcctgaaacaagccggagtgagcctatgagtgagatgtctggggcc

SEQ ID NO: 358176 - DNA, 120 bp, Artificial Sequence
  ENSG00000140199_62 (sequence is synthesized)
ttggttctttttaacataagtgattagtttaagagtatgctgaggagccactgggcttaaagaaggatgtaaataagacccaaatacatagggaccaggcgctgctttctcatgttcaca

SEQ ID NO: 358177 - DNA, 120 bp, Artificial Sequence
  ENSG00000140199_63 (sequence is synthesized)
tgagtagaagtattcttagttggggctttttgtgtggtgtgaatcaaggttattgaaatgtgttatttttcaagttatcttttgtattgcagtcaaaagtagctagcgtaagaggaagat

SEQ ID NO: 358178 - DNA, 120 bp, Artificial Sequence
  ENSG00000140199_64 (sequence is synthesized)
actcggtcaccgcgggctgcggcggctgggcggggctttcgggcgcccgcgggacggttccgccctctcactgcacccccgggcttctcttcgcaagaacaaaatgcatcctccagaaac

SEQ ID NO: 358179 - DNA, 120 bp, Artificial Sequence
  ENSG00000140199_65 (sequence is synthesized)
taaatgtggattaatcccctagtgccaaaaaaaaaacaaaaaaaaaccctaatttgttgccctaagtagaatgtatatgtgatgcatgtttgatgttattttttggttttgctttcttgt

SEQ ID NO: 358180 - DNA, 120 bp, Artificial Sequence
  ENSG00000140199_66 (sequence is synthesized)
ttattacacagcccttatatttctgccagattctcatctgcttaatatagttttatgaaatttttattcatatattcagcttaaaatcacacatggcttttaaaaaaaacctaacagtat

SEQ ID NO: 358181 - DNA, 120 bp, Artificial Sequence
  ENSG00000140199_67 (sequence is synthesized)
aatttattattcttccttgaagactgatcaacttgagatagtactgggagcattcaaaataatgcccttatcctgtcatctcctgtgatctcttccttctgtcaaattacctgtttcata

SEQ ID NO: 358182 - DNA, 120 bp, Artificial Sequence
  ENSG00000140199_68 (sequence is synthesized)
cagatctcctgaattaaagggtggagtctgtcattctgttccccaaacccaaaatgttttctcctcccctccaacccccaccaacctcttcacaggcctcagttgcttgtattactgaaa

SEQ ID NO: 358183 - DNA, 120 bp, Artificial Sequence
  ENSG00000140199_69 (sequence is synthesized)
gtgcacctttcccaccagacccaagtggattgtcgacatcaaaaacaccgggtggctttgcatacacctccccccagccagacctgtggggtattcacctgatacacaacaggtggccgg

SEQ ID NO: 358184 - DNA, 120 bp, Artificial Sequence
  ENSG00000140199_70 (sequence is synthesized)
gtgtacaccttttagcaatctgatccacgctatagtcgcctgataaaggtttgcctgcacgcacttcgcccaactagaaccgtgggacactcaccagataaaggactacctcgacaggaa

SEQ ID NO: 358185 - DNA, 120 bp, Artificial Sequence
  ENSG00000140199_71 (sequence is synthesized)
actgggggctgaggggagggaggcttcatctgctgccctgagaccatggcactgagccttcagccccggaccagaggggttagctaggtagctcttcattctgaaggaaagaagtcacac

SEQ ID NO: 358186 - DNA, 120 bp, Artificial Sequence
  ENSG00000140199_72 (sequence is synthesized)
tatgtgttttgttgattttaggataaggaaaccatatgtggctcaaggaattggtataatggacctgttttgaactattctaaatccttaatttttttattcccttttcttcatgtcgtt

SEQ ID NO: 358187 - DNA, 120 bp, Artificial Sequence
  ENSG00000140199_73 (sequence is synthesized)
actcggtcaccgcgggctgcggcggctgggcggggctttcgggcgcccgcgggacggttccgccctctcactgcacccccgggcttctcttcgcaagaaaccaccaccaagatggcttca

SEQ ID NO: 358188 - DNA, 120 bp, Artificial Sequence
  ENSG00000140199_74 (sequence is synthesized)
actcggtcaccgcgggctgcggcggctgggcggggctttcgggcgcccgcgggacggttccgccctctcactgcacccccgggcttctcttcgcaagtcaaaagtagctagcgtaagagg

SEQ ID NO: 358189 - DNA, 120 bp, Artificial Sequence
  ENSG00000140199_75 (sequence is synthesized)
tttccatattgatgttctcacaggaattgcaagaattgttcttcagcatcataatctctcaaattcacatatccccccttagaaatgtagtaatgggaatatacctagtaacataaactg

SEQ ID NO: 358190 - DNA, 120 bp, Artificial Sequence
  ENSG00000140199_76 (sequence is synthesized)
tggttctcagtctgttagctattcagatttttcacaatggtttttgatacgtaatgagaaataacctactaagtaaataggaccccttgctcaaagaagtgtgaaaagagcatttccttg

SEQ ID NO: 358191 - DNA, 120 bp, Artificial Sequence
  ENSG00000140199_77 (sequence is synthesized)
actcggtcaccgcgggctgcggcggctgggcggggctttcgggcgcccgcgggacggttccgccctctcactgcacccccgggcttctcttcgcaaggttcacctcgaatgaggaacaag

SEQ ID NO: 358192 - DNA, 120 bp, Artificial Sequence
  ENSG00000140199_78 (sequence is synthesized)
atgaggaacaagcggggagggaagggaagggctgcggcggcgcgggcgcaccccgtcgggcccggggctgggggaggccaggtcacgtaactgctgctctggcgtcgggccggggagggg

SEQ ID NO: 358193 - DNA, 120 bp, Artificial Sequence
  ENSG00000140254_0 (sequence is synthesized)
cgcgcgaggtgagacggcgagggctcccggggcgcaggtagagatgttccgtcggtgccgaaggcccggctagtgcggttgtgtggacggcgaaaaaaaccaggccaggcgtcaaagcaa

SEQ ID NO: 358194 - DNA, 120 bp, Artificial Sequence
  ENSG00000140254_1 (sequence is synthesized)
gtcacccatccgacctaaacccctctaagaccccggagtcacgtctccctccggggatcctcgtgaggtcttgggggtcccaccgccctgcgagccgcgcccgcgccccgccagacccgg

SEQ ID NO: 358195 - DNA, 120 bp, Artificial Sequence
  ENSG00000140254_2 (sequence is synthesized)
aactgcgtcgctagaacgtcgggacctggttccctctttaatcacacccccgggggcgcttcgtgtgaggttccacgggggaaggcgagaggcgcaggctgccacacacgcactgtttgg

SEQ ID NO: 358196 - DNA, 120 bp, Artificial Sequence
  ENSG00000140254_3 (sequence is synthesized)
aagaggggaagcattgccccccctgcaccacctcaccaagatggctactttgggacacacattccccttctatgctggccccaagccaaccttcccgatggacaccactttggccagcat

SEQ ID NO: 358197 - DNA, 120 bp, Artificial Sequence
  ENSG00000140254_4 (sequence is synthesized)
catcatgatctttctgactgcactggccacgttcatcgtcatcctgcctggcattcggggaaagacgaggctgttctggctgcttcgggtggtgaccagcttattcatcggggctgcaat

SEQ ID NO: 358198 - DNA, 120 bp, Artificial Sequence
  ENSG00000140254_5 (sequence is synthesized)
cctggctgtgaatttcagttctgagtggtctgtgggccaggtcagcaccaacacatcatacaaggccttcagttctgagtggatcagcgctgatattgggctgcaggtcgggctgggtgg

SEQ ID NO: 358199 - DNA, 120 bp, Artificial Sequence
  ENSG00000140254_6 (sequence is synthesized)
agtcaacatcacactcacagggacccccgtgcagcagctgaatgagaccatcaattacaacgaggagttcacctggcgcctgggtgagaactatgctgaggagtatgcaaaggctctgga

SEQ ID NO: 358200 - DNA, 120 bp, Artificial Sequence
  ENSG00000140254_7 (sequence is synthesized)
gaaggggctgccagaccctgtgttgtacctagctgagaagttcactccaagaagcccatgtggcctataccgccagtaccgcctggcgggacactacacctcagccatgctatgggtggc

SEQ ID NO: 358201 - DNA, 120 bp, Artificial Sequence
  ENSG00000140254_8 (sequence is synthesized)
acgggcatcttccagctgttggctctgctcttcttctccatggccacatcactcacctcaccctgtcccctgcacctgggcgcttctgtgctgcatactcaccatgggcctgccttctgg

SEQ ID NO: 358202 - DNA, 120 bp, Artificial Sequence
  ENSG00000140254_9 (sequence is synthesized)
atcacattgaccacaggactgctgtgtgtgctgctgggcctggctatggcggtggcccacaggatgcagcctcacaggctgaaggctttcttcaaccagagtgtggatgaagaccccatg

SEQ ID NO: 358203 - DNA, 120 bp, Artificial Sequence
  ENSG00000140254_10 (sequence is synthesized)
ctggagtggagtcctgaggaaggtggactcctgagcccccgctaccggtccatggctgacagtcccaagtcccaggacattcccctgtcagaggcttcctccaccaaggcatactatcgc

SEQ ID NO: 358204 - DNA, 120 bp, Artificial Sequence
  ENSG00000140254_11 (sequence is synthesized)
cccaggagactttccctggtgcctgcggatgtccgaggcctcgcgccagcagcgctcagtgcccttcctggagctctcctggcccaggcctggcgggcactgcttcccggcctgcgatgt

SEQ ID NO: 358205 - DNA, 120 bp, Artificial Sequence
  ENSG00000140254_12 (sequence is synthesized)
cccaaggcggggaaggagtccagattgggtccccctcacagtccttggcgctttggtccagaagggtgcgaagagcgctgggccgaacatactggagactcaccacggcccctccgagga

SEQ ID NO: 358206 - DNA, 120 bp, Artificial Sequence
  ENSG00000140254_13 (sequence is synthesized)
agaggcacaggacgcctgtggcggtggggatcgaaagaaaggagggcatgtggagtcagggctatgttgcccaggctggtctcgaactctggcctcaaacgaccttcctgcctcgacctc

SEQ ID NO: 358207 - DNA, 120 bp, Artificial Sequence
  ENSG00000140254_14 (sequence is synthesized)
ccaaagtgctgggattacaggcgtgatgcccgggccttcttccatcttttggagcctaccccttgtgttacctcccgccacacacctctaatctgaattacatgaaacacggcaagacac

SEQ ID NO: 358208 - DNA, 120 bp, Artificial Sequence
  ENSG00000140254_15 (sequence is synthesized)
caaacccttctgagccccccacttttcatctgtaaaatggtcataacagtgcctgtttctgcgaactattgagaggggcaaatagggtaatagatgtgaattcattctgtaaactggaaa

SEQ ID NO: 358209 - DNA, 120 bp, Artificial Sequence
  ENSG00000140254_16 (sequence is synthesized)
ggagggacctctgcggagctggcagaccccggtactactgtcctggcgcacccagcccttctctgtaccaggccgggagagggaggcggcgccgcagagcctcgggtgcagtctgagaag

SEQ ID NO: 358210 - DNA, 120 bp, Artificial Sequence
  ENSG00000140254_17 (sequence is synthesized)
tttgggagtgacttgaagagtgactggaagcaccccagacccggtttgtccggtcacagccgggtccttacgtgagttaggagaggagtgggggtcggacgggagccccactgagagtaa

SEQ ID NO: 358211 - DNA, 120 bp, Artificial Sequence
  ENSG00000140254_18 (sequence is synthesized)
cccgtggaggccacctggacttccagtctggctccaaacctcattggcgccccataaaaccagcagaactgccctcagggtggctgttaccagacacccagcaccaatctacagacggag

SEQ ID NO: 358212 - DNA, 120 bp, Artificial Sequence
  ENSG00000140254_19 (sequence is synthesized)
tagaaaaaggaggctctatatactgatgttaaaaaacaaaacaaaacaaaaagccctaagggactgaagagatgctgggcctgtccataaagcctgttgccatgataaggccaagcaggg

SEQ ID NO: 358213 - DNA, 120 bp, Artificial Sequence
  ENSG00000140254_20 (sequence is synthesized)
gctagcttatctgcacagcaacccagcctttccgtgctgccttgcctcttcaagatgctattcactgaaacctaacttcacccccataacaccagcagggtgggggttacatatgattct

SEQ ID NO: 358214 - DNA, 120 bp, Artificial Sequence
  ENSG00000140254_21 (sequence is synthesized)
tcctgggttccttttgttcttcctttacttctccagcttgtgtggccttttggtacaatgaaagacagcactggaaaggaggggaaaccaaacttctcatcctaggtctaacattaacca

SEQ ID NO: 358215 - DNA, 120 bp, Artificial Sequence
  ENSG00000140254_22 (sequence is synthesized)
actatgccacattctctttgagcttcagttcccaaatttgctacataagattgcaagacttgccaagaatcttgggatttatctttctatgccttgctgacacctaccttggccctcaaa

SEQ ID NO: 358216 - DNA, 120 bp, Artificial Sequence
  ENSG00000140254_23 (sequence is synthesized)
caccacctcacaagaagccaggtgggaagttagggaatcaactccaaaacgctattccttcccaccccactcagctgggctagctgagtggcatccaggacgggggagtgggtgacctgc

SEQ ID NO: 358217 - DNA, 120 bp, Artificial Sequence
  ENSG00000140254_24 (sequence is synthesized)
ctcatcactgccacctaacgtccccctggggtggttcagaaagatgctagctctggtagggtccctccggcctcactagagggcgcccctattactctggagtcgacgcagagaatcagg

SEQ ID NO: 358218 - DNA, 120 bp, Artificial Sequence
  ENSG00000140254_25 (sequence is synthesized)
tttcacagcactgcggagagtgtactaggctgtctccagcccagcgaagctcatgaggacgtgcgaccccggcgcggagaagccatgaaaattaatgggaaaaacagtttttaaaaaaca

SEQ ID NO: 358219 - DNA, 120 bp, Artificial Sequence
  ENSG00000140259_0 (sequence is synthesized)
atcagtcgcgcagctgtgttcgcggactcaggtggaaggaatttcttctcttcgttgacgttgctggtgttcactgtttggaattagtcaagtttcgggaatcaccgtcgctgccatcaa

SEQ ID NO: 358220 - DNA, 120 bp, Artificial Sequence
  ENSG00000140259_1 (sequence is synthesized)
catgtcggtcccaagcgctctcatgaagcaaccgcccattcagtctacggctggggccgtcccagttcgcaatgagaaaggtgagatttcaatggaaaaagtgaaggtaaagcgttatgt

SEQ ID NO: 358221 - DNA, 120 bp, Artificial Sequence
  ENSG00000140259_2 (sequence is synthesized)
gtccggaaaaaggccagactatgcccctatggagtcctcagatgaggaggatgaagaatttcagttcattaagaaagccaaagaacaagaagcagagcctgaggaacaggaggaggattc

SEQ ID NO: 358222 - DNA, 120 bp, Artificial Sequence
  ENSG00000140259_3 (sequence is synthesized)
atccagtgacccccggctacggcgtttacagaaccgtattagtgaagatgtggaagagagattggctcgacatcgaaaaatagtggaacctgaagtggtaggagagagtgactcagaagt

SEQ ID NO: 358223 - DNA, 120 bp, Artificial Sequence
  ENSG00000140259_4 (sequence is synthesized)
agaaggagatgcttggcgcatggaacgagaagacagcagtgaagaagaggaggaggaaattgatgatgaggaaatagagcggcggcgtggcatgatgcgtcagcgagcacaggagagaaa

SEQ ID NO: 358224 - DNA, 120 bp, Artificial Sequence
  ENSG00000140259_5 (sequence is synthesized)
aaatgaagagatggaagtcatggaagtggaagatgagggtcgttctggagaggagtcagaatcagagtctgagtatgaagagtacacagacagtgaagatgagatggagcctcgccttaa

SEQ ID NO: 358225 - DNA, 120 bp, Artificial Sequence
  ENSG00000140259_6 (sequence is synthesized)
gccagtcttcattcgaaagaaggaccgagtgacagttcaagaacgtgaagccgaagcattgaaacagaaggagctggagcaggaagcaaaacgcatggctgaggaaaggcgcaagtacac

SEQ ID NO: 358226 - DNA, 120 bp, Artificial Sequence
  ENSG00000140259_7 (sequence is synthesized)
actcaagattgtcgaagaggaaaccaaaaaagagctggaagagaacaagcgatccctggctgcattggatgcactcaatactgatgatgaaaatgatgaggaggaatatgaggcatggaa

SEQ ID NO: 358227 - DNA, 120 bp, Artificial Sequence
  ENSG00000140259_8 (sequence is synthesized)
tcgagagctaaaaagaatcaagagggacagagaagatcgagaagcgcttgagaaggagaaagcagaaattgaacgcatgcgaaacctgactgaggaagagaggagagctgaacttcgggc

SEQ ID NO: 358228 - DNA, 120 bp, Artificial Sequence
  ENSG00000140259_9 (sequence is synthesized)
aaacggcaaagtcattaccaacaaagctgttaagggcaaatacaagttcttacagaagtattatcaccggggtgccttcttcatggatgaggatgaagaagtatacaagagagatttcag

SEQ ID NO: 358229 - DNA, 120 bp, Artificial Sequence
  ENSG00000140259_10 (sequence is synthesized)
cgctcctaccctggaggatcatttcaataaaaccattcttcctaaagtcatgcaggtcaagaactttggacgctcaggtcgcaccaaatacactcaccttgtggatcaagataccacctc

SEQ ID NO: 358230 - DNA, 120 bp, Artificial Sequence
  ENSG00000140259_11 (sequence is synthesized)
ctttgactcagcttggggccaagagagtgcccagaacacaaagttcttcaaacaaaaggcagctggggtacgagatgtatttgagcggccatctgccaagaagcggaaaactacctaggg

SEQ ID NO: 358231 - DNA, 120 bp, Artificial Sequence
  ENSG00000140259_12 (sequence is synthesized)
tccaactgcttattcttccaactgtggaacacaaggggagtctcagcatctggtccttgatttggttttttcattgtttccttggcccctgtatccagatattggacttactgctatact

SEQ ID NO: 358232 - DNA, 120 bp, Artificial Sequence
  ENSG00000140259_13 (sequence is synthesized)
tgtgatactgggtagcccagactttgaaggtgctttgtgaggtttggactcatgctgagaaacccacaggaaagcactgtccaggtaggattagaggcttcccacttaaaactatttctg

SEQ ID NO: 358233 - DNA, 120 bp, Artificial Sequence
  ENSG00000140259_14 (sequence is synthesized)
agaaatcttaggttttatcactgctatggtttcccatatttacttgggactgttctgactttctttttccagcccttagcttgggttagaaaagtggacatgtaagtgaacaatgcatta

SEQ ID NO: 358234 - DNA, 120 bp, Artificial Sequence
  ENSG00000140259_15 (sequence is synthesized)
cttctaccttaggtttaggagtaatatacccggaaatctaagctcatggaaacatgttttccatttttgcttggagtccgtttttctagttgtacatactttttgatccatatatgtgtg

SEQ ID NO: 358235 - DNA, 120 bp, Artificial Sequence
  ENSG00000140259_16 (sequence is synthesized)
catgtcaagaaataaaagaatcacacaacaaggagatttttagcatgatactggaaataaaatgtccaagctgacaagtattaattgcctattaaagtaaaagataacaattgtcaggca

SEQ ID NO: 358236 - DNA, 120 bp, Artificial Sequence
  ENSG00000140259_17 (sequence is synthesized)
atcaacttttgaaagttggcaatacctagtctagcaaacataatgaagactaactcacccatttgtttattgagctccttatcttgattcctaataggcaatgactagaattaaagaagg

SEQ ID NO: 358237 - DNA, 120 bp, Artificial Sequence
  ENSG00000140259_18 (sequence is synthesized)
tgactaatacttgaaatgacatgggactgttattttcagataatttggtctttctgaagctgtaacagtaccaataaattgttttgctccctggacaggcttgagaaggagaaagcagaa

SEQ ID NO: 358238 - DNA, 120 bp, Artificial Sequence
  ENSG00000140262_0 (sequence is synthesized)
agagacccacaagttctattcggggggaccgacagcccgccccgggaggaaggggcggccaggcccgaaagccgcctccccctcccagacccgagagctcgtgcggggcaaagtgaaccg

SEQ ID NO: 358239 - DNA, 120 bp, Artificial Sequence
  ENSG00000140262_1 (sequence is synthesized)
agccgctgggcggtgcaaggggaagcccaagcccgttctcccggccaaagtgaactttaatcggggtggttggatgcggagacggggcggcaggacctgctagaagtggccgaagatgaa

SEQ ID NO: 358240 - DNA, 120 bp, Artificial Sequence
  ENSG00000140262_2 (sequence is synthesized)
tccccagcaacaacgcatggccgctatagggaccgacaaggagctgagcgacctactggacttcagtgcgatgttttccccacctgttaatagtgggaaaactagaccaactacactggg

SEQ ID NO: 358241 - DNA, 120 bp, Artificial Sequence
  ENSG00000140262_3 (sequence is synthesized)
aagcagtcaattcagtggatcaggtattgatgaaagaggaggtacaacatcttggggaacaagtggtcaaccaagtccttcctatgattcatctagaggttttacagacagccctcatta

SEQ ID NO: 358242 - DNA, 120 bp, Artificial Sequence
  ENSG00000140262_4 (sequence is synthesized)
cagtgatcacttgaatgacagtcgattaggagcccatgaaggcttgtccccaacacctttcatgaactcaaatctgatgggaaaaacatcagagagaggctcattttccctgtacagcag

SEQ ID NO: 358243 - DNA, 120 bp, Artificial Sequence
  ENSG00000140262_5 (sequence is synthesized)
agatactggattaccaggctgtcaatctagtctcctgagacaagatctggggcttgggagcccagcacagctatcttcttcaggaaaacctgggacagcatactattcattctctgctac

SEQ ID NO: 358244 - DNA, 120 bp, Artificial Sequence
  ENSG00000140262_6 (sequence is synthesized)
aagttccaggaggagaccactccatgactctgcagcgcttgatcccttgcaagcaaaaaaagtcagaaaggtgcctcctggtttgccttcttctgtatatgcaccatccccaaattcaga

SEQ ID NO: 358245 - DNA, 120 bp, Artificial Sequence
  ENSG00000140262_7 (sequence is synthesized)
tgatttcaaccgtgaatctcctagttatccatctcctaagccaccaaccagtatgttcgctagcactttctttatgcaagatgggacccacaattcttctgacctttggagttcatcaaa

SEQ ID NO: 358246 - DNA, 120 bp, Artificial Sequence
  ENSG00000140262_8 (sequence is synthesized)
tgggatgagccagcctggttttggtggaattctggggacctccacttcccacatgtctcaatccagtagttatggcaaccttcattcacatgaccgcttgagttatcctccacactcagt

SEQ ID NO: 358247 - DNA, 120 bp, Artificial Sequence
  ENSG00000140262_9 (sequence is synthesized)
ttcaccaacagacataaacacgagtcttccaccaatgtccagctttcatcgcggcagtaccagcagttcaccttacgttgctgcctcacacactcctcccatcaatggatcagacagcat

SEQ ID NO: 358248 - DNA, 120 bp, Artificial Sequence
  ENSG00000140262_10 (sequence is synthesized)
tctaggaaccagagggaatgctgctggaagctcacagacaggtgatgcacttggaaaggctttggcatctatttattctcctgaccataccagcagtagttttccgtcaaatccatcaac

SEQ ID NO: 358249 - DNA, 120 bp, Artificial Sequence
  ENSG00000140262_11 (sequence is synthesized)
accagttggatcaccttcacctctcacaggtaccagtcagtggccaagacctggagggcaagcaccttcatccccaagctatgaaaactcactccactccctgaaaaatcgagttgagca

SEQ ID NO: 358250 - DNA, 120 bp, Artificial Sequence
  ENSG00000140262_12 (sequence is synthesized)
gcaacttcacgagcatttgcaagatgcaatgtccttcttaaaggatgtctgtgagcagtctcgaatggaggatcgtttagacagactggatgatgcaatccatgtgctgcggaaccatgc

SEQ ID NO: 358251 - DNA, 120 bp, Artificial Sequence
  ENSG00000140262_13 (sequence is synthesized)
tgtgggaccttccaccagtttgcctgctggtcacagtgatatacatagtttattgggaccatcccataatgcaccaattggaagcctcaattcaaactatggaggatcaagccttgttgc

SEQ ID NO: 358252 - DNA, 120 bp, Artificial Sequence
  ENSG00000140262_14 (sequence is synthesized)
aagcagtcgatcagcttcaatggttggaactcatcgggaagactctgtcagtctcaatggcaatcattcagtcctgtctagtacagtcactacttcaagcacagacctgaaccataaaac

SEQ ID NO: 358253 - DNA, 120 bp, Artificial Sequence
  ENSG00000140262_15 (sequence is synthesized)
acaagaaaattatagaggtggcttgcaaagtcagtctggaactgttgttacaacagaaatcaagactgaaaacaaagaaaaggatgaaaaccttcatgaacctccttcatcagatgacat

SEQ ID NO: 358254 - DNA, 120 bp, Artificial Sequence
  ENSG00000140262_16 (sequence is synthesized)
gaagtcagatgatgaatcctcccaaaaagatatcaaggtttcatctagaggcagaacaagcagtactaatgaagatgaggatttgaaccctgaacagaagatagaaagggagaaggagag

SEQ ID NO: 358255 - DNA, 120 bp, Artificial Sequence
  ENSG00000140262_17 (sequence is synthesized)
gcggatggctaacaatgccagagaacgcttacgcgtgcgggatattaatgaagcattcaaagagcttggccgaatgtgtcagcttcacttgaagagtgaaaaaccccaaacaaaactcct

SEQ ID NO: 358256 - DNA, 120 bp, Artificial Sequence
  ENSG00000140262_18 (sequence is synthesized)
tattcttcatcaagccgtggcagtcatccttagtctagaacagcaagtcagagagaggaaccttaaccccaaagcagcctgccttaagagaagggaagaagaaaaagtttctgccgtatc

SEQ ID NO: 358257 - DNA, 120 bp, Artificial Sequence
  ENSG00000140262_19 (sequence is synthesized)
gcttagtgaaactaccaaccctatgggtcatatgtaaacatcagccagttccagagttatcagtaggctagatagaaggtgacctctcctcataaggacttggacaactcagattatctg

SEQ ID NO: 358258 - DNA, 120 bp, Artificial Sequence
  ENSG00000140262_20 (sequence is synthesized)
aagacacaaacctgacaggagggagaagaaaaaacaaaacacttgaaccaagaaactcaaatgtaatcctacgatcaaagcaactggtcaacacttccatcagaagtgaagataggaagc

SEQ ID NO: 358259 - DNA, 120 bp, Artificial Sequence
  ENSG00000140262_21 (sequence is synthesized)
tcatcagatagaacatcagcccatgagatgtttgcaacaaatcttttgttgcaagcagtgtgtcgcttctgcacaatcagagactgtctcgatctctccactcaccgtggaagttgcctt

SEQ ID NO: 358260 - DNA, 120 bp, Artificial Sequence
  ENSG00000140262_22 (sequence is synthesized)
gtgcctaaactgaattgacaaatgcattgtaactacaaattttatttattgttatgaaactgtaaggtctacatataaagggaaaaagttaatgtggaaagctgatctacactcagctga

SEQ ID NO: 358261 - DNA, 120 bp, Artificial Sequence
  ENSG00000140262_23 (sequence is synthesized)
tgccagcatacattaaagcggttcacgtgcagagaacaaagcagtgacaaccattggcccttagcattcccggcatacctattagtgtcttaaaaaggaagggaaaagtcttttgttgcc

SEQ ID NO: 358262 - DNA, 120 bp, Artificial Sequence
  ENSG00000140262_24 (sequence is synthesized)
ctctcctatcctcttgccatatgaatagcgttttccatgaaataggaaaatattacttggtatagcatttctcttgctctcattttttgatttatttttattttctctttgtgggtgtta

SEQ ID NO: 358263 - DNA, 120 bp, Artificial Sequence
  ENSG00000140262_25 (sequence is synthesized)
tatttgatctctaaatctgaacagtttatggtcacagtccagcctcctccgtgcagccctgtgtgctttgcacatttaccttacagtggtaagcagagaccatctgtgaccatagcctag

SEQ ID NO: 358264 - DNA, 120 bp, Artificial Sequence
  ENSG00000140262_26 (sequence is synthesized)
ctagcattttaaaaggggaaattttgttctctaggttttcccccaaataaacattgctttatttctaataataaccaagacttttcaagcttctagatctcataggaaagcttgtaatag

SEQ ID NO: 358265 - DNA, 120 bp, Artificial Sequence
  ENSG00000140262_27 (sequence is synthesized)
caaaattgtaaattacaagggaagaatctactttttagaaatcgctttgttttccaagcagtaagtactacatacagtacttgtaaagtgttagctgtaagtaagcacaaaatacattta

SEQ ID NO: 358266 - DNA, 120 bp, Artificial Sequence
  ENSG00000140262_28 (sequence is synthesized)
aaatacaaagacgattttttcaggctgtgattatggtgaacataacaaaacccagtagtcaccaaggcaggtagtgtgataaatgaacacaccactctgaggctaattacctaatggaat

SEQ ID NO: 358267 - DNA, 120 bp, Artificial Sequence
  ENSG00000140262_29 (sequence is synthesized)
acaagagcaatggtcacccgtatttccttatcctagcctttatttctctgtcatttggatggctggtcaatggggaagaattgagtgggtgatttaatcaactgcaaaccatctgcccct

SEQ ID NO: 358268 - DNA, 120 bp, Artificial Sequence
  ENSG00000140262_30 (sequence is synthesized)
gtcccaaaatgatgagccagattagcattaaaccagtacttgtcagtccatcttaatactgttcattaaggcactctctgtctctaatccttaggagttgttttaaaagacataatcact

SEQ ID NO: 358269 - DNA, 120 bp, Artificial Sequence
  ENSG00000140262_31 (sequence is synthesized)
ttgaacttccatgaaacctgtcttccaccacaacaaccctgggagagaaaaacatgctaaaggaggtatcttggcttaataattccttatagccaatatcaacagtggcaatcagcacac

SEQ ID NO: 358270 - DNA, 120 bp, Artificial Sequence
  ENSG00000140262_32 (sequence is synthesized)
agaggaaaggacccaaatcactatgtagcttaaagatttctgttaatttgaaagaacaaaaacaagacagaacttctggtactctaatcaggatgattcctaacaagtcagtcatttgtg

SEQ ID NO: 358271 - DNA, 120 bp, Artificial Sequence
  ENSG00000140262_33 (sequence is synthesized)
aacttagtggactttttggttactttaatttgcatatattctccagttacatcggactctatctgtggccttgttcttcatttcagtgttaatcagctaaacagaagttgttgcttatga

SEQ ID NO: 358272 - DNA, 120 bp, Artificial Sequence
  ENSG00000140262_34 (sequence is synthesized)
tgtgtgagtgaacatatgccactgcctggcctttttttcttcagagcttgttgtctttttcgctatattagactttgcagtatgcccagaagctttccttcataaaatagaaagaaaaaa

SEQ ID NO: 358273 - DNA, 120 bp, Artificial Sequence
  ENSG00000140262_35 (sequence is synthesized)
acatttggcttatttttcactgtagctagtcttttatacaataatcttgtaagaaaatttcttgaattctaaatattactctttctagatttttgaaatcaaaaagttttcagtaaaaag

SEQ ID NO: 358274 - DNA, 120 bp, Artificial Sequence
  ENSG00000140262_36 (sequence is synthesized)
tttcttactttattttattatattaggtagtaaaaaatgtagggttatttaccataacctgttcattaatatcagaaatttacaatagcattttaagaccatagtaggattctagcatac

SEQ ID NO: 358275 - DNA, 120 bp, Artificial Sequence
  ENSG00000140262_37 (sequence is synthesized)
cgtgtagtacctatggagtattgtaagagctaattgttggagatgaattgcttctcatcttgttctccagtttccattgttggtttattgcagatttgtatcctgtgtcaaattcaaggt

SEQ ID NO: 358276 - DNA, 120 bp, Artificial Sequence
  ENSG00000140262_38 (sequence is synthesized)
attattgataaaccttttcaaccagcagcaagaagttcaaatttttttctgtcactgtaacagaaaacacaatatgtatataacatttatgtagcaataaatgtgccatcttttttttaa

SEQ ID NO: 358277 - DNA, 120 bp, Artificial Sequence
  ENSG00000140262_39 (sequence is synthesized)
atttctctttctcaaataataatgtattttgttttattttctccatctcattcgtcccagaaacactcacactgcttttcctaactgcattaccgacattatctgggaaacccttcagga

SEQ ID NO: 358278 - DNA, 120 bp, Artificial Sequence
  ENSG00000140262_40 (sequence is synthesized)
cagaatcaggcttgtggagctaagttggcaatctggtctagagcttctctagcttgtgcttttctcctcttgccctcactactgacggtggccttttaaccttttcctaaagattgacca

SEQ ID NO: 358279 - DNA, 120 bp, Artificial Sequence
  ENSG00000140262_41 (sequence is synthesized)
aacagcaactagtagttatagaaaatctactcatttgtagatacagagaaaaatgaagaagatggaaaaagactcaaaagaggctttttaagttattcttcaaagcacttttcacatttc

SEQ ID NO: 358280 - DNA, 120 bp, Artificial Sequence
  ENSG00000140262_42 (sequence is synthesized)
cccataccctttctcacaaaaaaagtgtcataattaagtaatggtattgtttactgtttaaaagttaaaagatcaaaaatttgcttttatcccagtttttaaccacaaaaaaaagcgtag

SEQ ID NO: 358281 - DNA, 120 bp, Artificial Sequence
  ENSG00000140262_43 (sequence is synthesized)
ggattatccatgaggacttcatgccaagcaagaacctcaaacaaactagacaaactttttttttgacagtgaatgactttttgtaggacctgtgcgtgcgaaacccatggcaattgtcac

SEQ ID NO: 358282 - DNA, 120 bp, Artificial Sequence
  ENSG00000140262_44 (sequence is synthesized)
atcctcttggtatgctggcagattgcttctcttggtgaattatgaaatccactgttcacattgggtgcctaacagaacattttgcttcttgtgggatttagtgaaaactattaaacttgt

SEQ ID NO: 358283 - DNA, 120 bp, Artificial Sequence
  ENSG00000140262_45 (sequence is synthesized)
taagttgattttatacaaaacgataaataaaaagctctaagaagaaaatgtataatcttagagctgaaataaaatatagagaccatctagtaaatgacctcattaatatatctgtgaaaa

SEQ ID NO: 358284 - DNA, 120 bp, Artificial Sequence
  ENSG00000140262_46 (sequence is synthesized)
ctgagactcagattgtatgtctctaagaacacataattagtaacagatcaagacacttaaaactttccctacaaaacctccctgccttgactttctctttctctttgcagatttctaggc

SEQ ID NO: 358285 - DNA, 120 bp, Artificial Sequence
  ENSG00000140262_47 (sequence is synthesized)
cgcttctgctcagtgtcttcattttcttccatatttgttttatttcatttttcttttctatagttcatgttttctttttccttggaaactcaaaatttaaacacacgtcgtgtgtgtgtg

SEQ ID NO: 358286 - DNA, 120 bp, Artificial Sequence
  ENSG00000140262_48 (sequence is synthesized)
tgtgtgtgtgtctgtgtgtgtgtgacttaaagaatcttaagctttggcattaaatagtcctcgattcaaatctaagctcaacatctgattaacttcattttcctatctgaaaaatggaga

SEQ ID NO: 358287 - DNA, 120 bp, Artificial Sequence
  ENSG00000140262_49 (sequence is synthesized)
taacattagaattgtgtaagtattgaatgaaacaatgtatggaaagctcttatggttcttgtcacctaagaagtacttaataaatgataaatatttttaaataaataatattataaccaa

SEQ ID NO: 358288 - DNA, 120 bp, Artificial Sequence
  ENSG00000140262_50 (sequence is synthesized)
aacatttgcatgagttgtttgaataatcacgttgctgacaaggctgtaattaacagaaattgatgctgagttcagtatttgatagtgtgttttctcagcattttattgttgtcactgcgg

SEQ ID NO: 358289 - DNA, 120 bp, Artificial Sequence
  ENSG00000140262_51 (sequence is synthesized)
ttaataatgaaagattttttaaaatgtgttgggcttataagtagccaatactatgctgaaggccaaacaaaaatattcatgtaaatttatttagttattgagtatctttaccctttcctt

SEQ ID NO: 358290 - DNA, 120 bp, Artificial Sequence
  ENSG00000140262_52 (sequence is synthesized)
gggcccggcgcgcggagcacccggcggcggcgcggagcagggggcgccgaggaggtggcagagactggctcggaaacttgggggagaggcggcgagttgcgggagccgccgcgtcgatct

SEQ ID NO: 358291 - DNA, 120 bp, Artificial Sequence
  ENSG00000140262_53 (sequence is synthesized)
ggggagaggcggcgagttgcgggagccgccgcgtcgatctcgggccgcggcgaggaacgcgtggattccgggacccggcgcgggcactgagccctcccgccccttgctcgcgccgcggtg

SEQ ID NO: 358292 - DNA, 120 bp, Artificial Sequence
  ENSG00000140262_54 (sequence is synthesized)
gcagttgggcagcggttttacctccattttgagaccagacaactggactcatgtcttccaactcaagtaccagtcagtggccaagacctggagggcaagcaccttcatccccaagctatg

SEQ ID NO: 358293 - DNA, 120 bp, Artificial Sequence
  ENSG00000140262_55 (sequence is synthesized)
actgaagacttactccctttgcctgtgtggatatatgtcttggagagaggctgtgtgcattagctacaaatagtaacattttcaaaatcaacatgtattgtgcttatcctgtccctggaa

SEQ ID NO: 358294 - DNA, 120 bp, Artificial Sequence
  ENSG00000140262_56 (sequence is synthesized)
tttcagtattgatgaaagaggaggtacaacatcttggggaacaagtggtcaaccaagtccttcctatgattcatctagaggttttacagacagccctcattacagtgatcacttgaatga

SEQ ID NO: 358295 - DNA, 120 bp, Artificial Sequence
  ENSG00000140262_57 (sequence is synthesized)
ttctctgcaagtagtcttctcaaagcttctttggtcagagacattttttatccctttgtccaggagggacaggtaagtatctagaagaaagttcttgagtttctaggggcatctagggct

SEQ ID NO: 358296 - DNA, 120 bp, Artificial Sequence
  ENSG00000140262_58 (sequence is synthesized)
tcctacaaaagagcaaaataaaaccaaagggtcttctgaagtcactgagacaatagctgatctcattgggccaatgagtcttctaaaaattgcagttccttctcccttggcattccacag

SEQ ID NO: 358297 - DNA, 120 bp, Artificial Sequence
  ENSG00000140262_59 (sequence is synthesized)
tcaagtaaacttacacgtattgtctggaagaatgaatcccattcctcctccatcttctttggctctggtgtgggcttatgtaatctggatacaatcccataaagttgctgtgtttagtaa

SEQ ID NO: 358298 - DNA, 120 bp, Artificial Sequence
  ENSG00000140262_60 (sequence is synthesized)
attttgcaagcaattataagcaatgtgtgctgtttagatgctaaccttgtaacttccctgttgaatcccagccttttcatatcttaataaaatagatctcgcaagtcttggcgttaactt

SEQ ID NO: 358299 - DNA, 120 bp, Artificial Sequence
  ENSG00000140262_61 (sequence is synthesized)
gacaaactgcaattcacgtagggaaggaaaggggaaagaaagggacagccaagagatgcaggggcagggggaccccccctctttaatttttcaaagaaaactgctttgtcgttgtgagtt

SEQ ID NO: 358300 - DNA, 120 bp, Artificial Sequence
  ENSG00000140262_62 (sequence is synthesized)
tgtgatcaaaagaaacgtgcaatttgcttcagattttacatattctcagtaattatatagttctgtctcatttgaagggttatctaatgattgccttttagaagctttgtatgatctgtc

SEQ ID NO: 358301 - DNA, 120 bp, Artificial Sequence
  ENSG00000140262_63 (sequence is synthesized)
aactttagaccatggcagatggtaacgctggaggtgtagcaagctaggtttctctgccacaagtgctctaatttaattaaaactaaaaacagattagcagaaaatctgtcagtatgcctt

SEQ ID NO: 358302 - DNA, 120 bp, Artificial Sequence
  ENSG00000140262_64 (sequence is synthesized)
ccttttgtgtgtgtatatatgtatatatgagacaaatctaataatttcttgggttatttttattcagggcatatttatttagcgcttaaaagtgacttgcatttttttaatacctcaaat

SEQ ID NO: 358303 - DNA, 120 bp, Artificial Sequence
  ENSG00000140262_65 (sequence is synthesized)
tttgtcttattggtatcctccaccaatgcaaggacttgatggaaattgaaagaggttacttacagcataaaccctccctctgtgctctgtgagttggttcagtcctattttgcataagtt

SEQ ID NO: 358304 - DNA, 120 bp, Artificial Sequence
  ENSG00000140262_66 (sequence is synthesized)
gtagcattttgatttaaatcaaatcaaaccctagaaaactaaatcataagcaaaaaatgaagaaaacacaagatggtcacttagaagtataaatctggaggctcagttcaatgctgaggt

SEQ ID NO: 358305 - DNA, 120 bp, Artificial Sequence
  ENSG00000140262_67 (sequence is synthesized)
tttatgtgagcacattgtttcttctatgtgatggtacttagtatgggaatgaagttacacaaaacaacagcaatttgttcagcttgagacctaattcataacttaaaaccatagtgataa

SEQ ID NO: 358306 - DNA, 120 bp, Artificial Sequence
  ENSG00000140262_68 (sequence is synthesized)
caggaacccatcctgggcttagtgaaactaccaaccctatgggtcatatgtaaacatcagccaggaggagaggctatgggagcctcaggtaccgagcatctggtgtctggagagatgcag

SEQ ID NO: 358307 - DNA, 120 bp, Artificial Sequence
  ENSG00000140262_69 (sequence is synthesized)
ctcttgagactttggatgcagttgaactagaaactatacagatgaaggtcctcttttccctttagtgggtgctttggatcagcatttcacagatgaagaaactgaggcttagagagaaga

SEQ ID NO: 358308 - DNA, 89 bp, Artificial Sequence
  ENSG00000140262_70 (sequence is synthesized)
gtgaactacatatgcaagggatctgggatctaggttgcttgctccttatgagaatctaatgcctgatgtgtcattctgtcatgaaaaca

SEQ ID NO: 358309 - DNA, 120 bp, Artificial Sequence
  ENSG00000140263_0 (sequence is synthesized)
agtgccctggaccctcggctgggtagcgccaccagagcgaccaaacgtcccgcgccttccaggccgcactccagagccaaaagagctccatggcggcggcggccaagcccaacaaccttt

SEQ ID NO: 358310 - DNA, 120 bp, Artificial Sequence
  ENSG00000140263_1 (sequence is synthesized)
ccctggtggtgcacggaccgggggacttgcgcctggagaactatcctatccctgaaccaggcccaaatgaggtcttgctgaggatgcattctgttggaatctgtggctcagatgtccact

SEQ ID NO: 358311 - DNA, 120 bp, Artificial Sequence
  ENSG00000140263_2 (sequence is synthesized)
actgggagtatggtcgaattgggaattttattgtgaaaaagcccatggtgctgggacatgaagcttcgggaacagtcgaaaaagtgggatcatcggtaaagcacctaaaaccaggtgatc

SEQ ID NO: 358312 - DNA, 120 bp, Artificial Sequence
  ENSG00000140263_3 (sequence is synthesized)
gtgttgccatcgagcctggtgctccccgagaaaatgatgaattctgcaagatgggccgatacaatctgtcaccttccatcttcttctgtgccacgccccccgatgacgggaacctctgcc

SEQ ID NO: 358313 - DNA, 120 bp, Artificial Sequence
  ENSG00000140263_4 (sequence is synthesized)
ggttctataagcacaatgcagccttttgttacaagcttcctgacaatgtcacctttgaggaaggcgccctgatcgagccactttctgtggggatccatgcctgcaggagaggcggagtta

SEQ ID NO: 358314 - DNA, 120 bp, Artificial Sequence
  ENSG00000140263_5 (sequence is synthesized)
ccctgggacacaaggtccttgtgtgtggagctgggccaatcgggatggtcactttgctcgtggccaaagcaatgggagcagctcaagtagtggtgactgatctgtctgctacccgattgt

SEQ ID NO: 358315 - DNA, 120 bp, Artificial Sequence
  ENSG00000140263_6 (sequence is synthesized)
ccaaagccaaggagattggggctgatttagtcctccagatctccaaggagagccctcaggaaatcgccaggaaagtagaaggtcagctggggtgcaagccggaagtcaccatcgagtgca

SEQ ID NO: 358316 - DNA, 120 bp, Artificial Sequence
  ENSG00000140263_7 (sequence is synthesized)
cgggggcagaggcctccatccaggcgggcatctacgccactcgctctggtgggaacctcgtgcttgtggggctgggctctgagatgaccaccgtacccctactgcatgcagccatccggg

SEQ ID NO: 358317 - DNA, 120 bp, Artificial Sequence
  ENSG00000140263_8 (sequence is synthesized)
aggtggatatcaagggcgtgtttcgatactgcaacacgtggccagtggcgatttcgatgcttgcgtccaagtctgtgaatgtaaaacccctcgtcacccataggtttcctctggagaaag

SEQ ID NO: 358318 - DNA, 120 bp, Artificial Sequence
  ENSG00000140263_9 (sequence is synthesized)
ctctggaggcctttgaaacatttaaaaagggattggggttgaaaatcatgctcaagtgtgaccccagtgaccagaatccctgatgttaatgggctctgccctcatccccacagtcttggg

SEQ ID NO: 358319 - DNA, 120 bp, Artificial Sequence
  ENSG00000140263_10 (sequence is synthesized)
atctcagggcacaatggctggacatgggtgggctctgatgcagaactttctcttttgaatgttaagaataactaatacaattcattgtgaacagaagtccttaagcagaggaattggtgt

SEQ ID NO: 358320 - DNA, 120 bp, Artificial Sequence
  ENSG00000140263_11 (sequence is synthesized)
gccttaaagatacaatctgggatagtttgggggaacttgtagccagaatgccctgttcatgctgagcaaagttcagcaagtagagcagagtttggcaggcaggtgccaggaactcccctt

SEQ ID NO: 358321 - DNA, 120 bp, Artificial Sequence
  ENSG00000140263_12 (sequence is synthesized)
cttcctggagtgccttcattgaggaaggaaatctggcccttgggtttcctggttccactgctactgacccagaggggaatgagggctgagttatgaaaagataacttcatgaagacttaa

SEQ ID NO: 358322 - DNA, 120 bp, Artificial Sequence
  ENSG00000140263_13 (sequence is synthesized)
ctggcccagaagctgattttcatgaaaatctgccactcagggtctgggatgaaggcttgtcagcacttccagtttagaacgcaatgtttctagagacatattggctgtttgttttgatga

SEQ ID NO: 358323 - DNA, 120 bp, Artificial Sequence
  ENSG00000140263_14 (sequence is synthesized)
taaaaggagaataagaaaaggcatcactttcctggatccaggataatttttaaaccaatcaaatgaaaaaaacaaacaaacaaaaaaggaaatgtcatgtgaggttaaaccagtttgcat

SEQ ID NO: 358324 - DNA, 120 bp, Artificial Sequence
  ENSG00000140263_15 (sequence is synthesized)
tcccctaatgtggaaaaagtaagaggactactcagcactgtttgaagattgcctcttctacagcttctgagaattgtgttatttcacttgccaagtgaaggaccccctccccaacatgcc

SEQ ID NO: 358325 - DNA, 120 bp, Artificial Sequence
  ENSG00000140263_16 (sequence is synthesized)
ccagcccacccctaagcatggtcccttgtcaccaggcaaccaggaaactgctacttgtggacctcaccagagaccaggagggtttggttagctcacaggacttcccccaccccagaagat

SEQ ID NO: 358326 - DNA, 120 bp, Artificial Sequence
  ENSG00000140263_17 (sequence is synthesized)
tagcatcccatactagactcatactcaactcaactaggctcatactcaattgatggttattagacaattccatttctttctggttattataaacagaaaatctttcctcttctcattacc

SEQ ID NO: 358327 - DNA, 120 bp, Artificial Sequence
  ENSG00000140263_18 (sequence is synthesized)
agtaaaggctcttggtatctttctgttggaatgatttctatgaacttgtcttattttaatggtgggttttttttctggtaagatttagacctaaatcgcatcatgccaacttgtgacttt

SEQ ID NO: 358328 - DNA, 120 bp, Artificial Sequence
  ENSG00000140263_19 (sequence is synthesized)
gagactattcatcaagaatgaggatatagtagccatgacatagcttgagctatagcctttaattccttactttggctatgggtggagggtgagtttgaagaggttctgattttcttgtaa

SEQ ID NO: 358329 - DNA, 120 bp, Artificial Sequence
  ENSG00000140263_20 (sequence is synthesized)
ttgtgcccgattctttcagattgctttgggtaataaatattggtggtggtatctgactcatgctgctgtttatggtcctgtttagtggggaatggactcaggttacccatttcccagagg

SEQ ID NO: 358330 - DNA, 120 bp, Artificial Sequence
  ENSG00000140263_21 (sequence is synthesized)
gaaggatcccaggatttttgaaggttacatattttctgtaccaaatataatttcattgacatgaattatctctaatcctcatgacaagccacatacacaatcattttgtagataaagaag

SEQ ID NO: 358331 - DNA, 120 bp, Artificial Sequence
  ENSG00000140263_22 (sequence is synthesized)
atataaatgccagaggagaccttaagattgtcttacaacacaacccttcagttaacgagagaggaaattgaggctcagattggggaagtgacttggcaaatcacacagtgggttagtcaa

SEQ ID NO: 358332 - DNA, 120 bp, Artificial Sequence
  ENSG00000140263_23 (sequence is synthesized)
tggcccaggattagacagaacccaggaatcctgacatcaaatcctttacaacatgctgcctctcataggcctgaggtgtccagtcctagaggacaaatgatgctccccatgccaccaccc

SEQ ID NO: 358333 - DNA, 120 bp, Artificial Sequence
  ENSG00000140263_24 (sequence is synthesized)
ccaccaagcagctcctactgatgagaagatgcactaagcagtcttggtggaaacatcttcctcacgccctgtgccccctttcaggtgcccagagaaggagctccagtgtctgcttcagcc

SEQ ID NO: 358334 - DNA, 120 bp, Artificial Sequence
  ENSG00000140263_25 (sequence is synthesized)
agggctttaagagagaaggaagctgggagtgaggggcagaggctctaccagagaatgtctgctggtgtcttggaggcacttcctgcagcctatgcatgcctcgtgaagccatttcactgc

SEQ ID NO: 358335 - DNA, 120 bp, Artificial Sequence
  ENSG00000140263_26 (sequence is synthesized)
tgccccttcatcctcctcctccctgagccctaggtagaagtcagtgtgtggaggaggccacccagagatgaccctgaccaggccccaccgcctgtagccagacccagcctctgtcccagc

SEQ ID NO: 358336 - DNA, 120 bp, Artificial Sequence
  ENSG00000140263_27 (sequence is synthesized)
tggctgctaatttctgagcatttcttccctgttatttggcctctgtaccttgaacctaggttgacatcatgagcagaggacagttcttaggaaaggcaaatatcccataaatcctatttg

SEQ ID NO: 358337 - DNA, 120 bp, Artificial Sequence
  ENSG00000140263_28 (sequence is synthesized)
cctctctttctcctaacctctggctccaccaactccccaacaggcctcctgcacacacaataggagtcaggagggaggaggcaggactgtgctacacaagggagactgggtggggaagat

SEQ ID NO: 358338 - DNA, 120 bp, Artificial Sequence
  ENSG00000140263_29 (sequence is synthesized)
gtcagagaaccagtgactgagtgcagaggtgacttcacaccagcatctgctgtagccagaggtgggctgcaagagggaattagaggagccaacatgtcctctttctcctttagggtccat

SEQ ID NO: 358339 - DNA, 120 bp, Artificial Sequence
  ENSG00000140263_30 (sequence is synthesized)
ggagcagtccgctgcttccaggttgcctgtggggtccttcccagctctccgccctgacacgtcttcactccctagcactcgtggagctgactgggtggggacctcagtgttgactgaaag

SEQ ID NO: 358340 - DNA, 120 bp, Artificial Sequence
  ENSG00000140263_31 (sequence is synthesized)
cgtgaatcaagtgccaggcactggtgacagagcacacagaggctgctgggcctcccaaggtcggggagcttgtggggaattcacattcttggttccgggactgattcactgagtcaatca

SEQ ID NO: 358341 - DNA, 120 bp, Artificial Sequence
  ENSG00000140263_32 (sequence is synthesized)
atattgattgagcacttagttggttgtggtggtggtaggaatgaattcctgggcttcctgcagcccctttccatgaatctatacatatcaaacatgtgcatgcatttgtaaacattaatg

SEQ ID NO: 358342 - DNA, 120 bp, Artificial Sequence
  ENSG00000140263_33 (sequence is synthesized)
ggagtgtactttacttttttcattttactcataaacagacgaggactttaaaaaaatcacaattattaaataattcccattactatacctgacaaaactaataataatttcataatagct

SEQ ID NO: 358343 - DNA, 120 bp, Artificial Sequence
  ENSG00000140263_34 (sequence is synthesized)
aataccccgtcaatccatgccatattttccctcatctaaaaaacagaaaaaattacttttttttcccccaaagacagggtcttgatcagagctcactgcaatatcaaactcctgggttca

SEQ ID NO: 358344 - DNA, 90 bp, Artificial Sequence
  ENSG00000140263_35 (sequence is synthesized)
taggcgagaaaaaaatttaaaaaggtctcactatgtggcccagagtgttcttgaattcctggcctcaagcaatcttcctgcctcagtttc

SEQ ID NO: 358345 - DNA, 88 bp, Artificial Sequence
  ENSG00000140263_36 (sequence is synthesized)
aaaaatttaaaaaggtctcactatgtggcccagagtgttcttgaattcctggcctcaagcaatcttcctgcctcagtttcccaaagca

SEQ ID NO: 358346 - DNA, 120 bp, Artificial Sequence
  ENSG00000140263_37 (sequence is synthesized)
gatctaaacatattgcatgcggttgatatattaagcctgttttattttttattttttcttctttcttaagcctctttattatagttccccctacattttggttcacatgccactgttatg

SEQ ID NO: 358347 - DNA, 120 bp, Artificial Sequence
  ENSG00000140263_38 (sequence is synthesized)
ttgaagaaactgggtcctttgtcttctggataccgttttacaaacatacttgttttcatttaataaatggctaaatttctttctatgtcaataattatacacatcattattttaaatcac

SEQ ID NO: 358348 - DNA, 120 bp, Artificial Sequence
  ENSG00000140263_39 (sequence is synthesized)
cacatcccattgtgtggatagactatcatttataaagcaaattgcagtattttgagtgtttggatagtttacagagttttgctctaataataaagttgcaatgacaacccttgttgcata

SEQ ID NO: 358349 - DNA, 120 bp, Artificial Sequence
  ENSG00000140263_40 (sequence is synthesized)
agaacccaccaattccggacacaaagagaggagtatatatgtgattaagatatgtatttctgacttgaagtgaaatattctggaaaactcacacaactatggagaactatcctatccctg

SEQ ID NO: 358350 - DNA, 120 bp, Artificial Sequence
  ENSG00000140263_41 (sequence is synthesized)
ggttgagcagttcagcagtgtacacaaatcacattctcaggaatttttggatgctcagctgatgcaaccagaagatacttgtgtgatgacaatatgttattgtaagtgggaagtcagtat

SEQ ID NO: 358351 - DNA, 120 bp, Artificial Sequence
  ENSG00000140263_42 (sequence is synthesized)
ctgcctcccagacagcctccccaggtagcgtgggcttcctccttccttctgaggctcacagcaggagggcactttgcatcacatgagacattctagggaaggctgacccaccaagctgag

SEQ ID NO: 358352 - DNA, 120 bp, Artificial Sequence
  ENSG00000140263_43 (sequence is synthesized)
tagcagagctgcctagacctcctcctactaagttgcccagcggccttgggagctgaggaagcagtgggggagagggaggagcgggtgccaccttggcagtgtcgtgagtttcagctggag

SEQ ID NO: 358353 - DNA, 120 bp, Artificial Sequence
  ENSG00000140263_44 (sequence is synthesized)
tctacccatggtatgtcttgggtacctaccatgtgccaggctttgtgctgggcactttgagggctaagacatgagtaggttgcatctgctgtcttcaagttgtcagcaggccactcgctc

SEQ ID NO: 358354 - DNA, 120 bp, Artificial Sequence
  ENSG00000140263_45 (sequence is synthesized)
ttgacagatcaaagtatgaggaaacgaagggaaaataacaacttccaggttccaagccctactgtacgccaggttctctgctgtactttataaacatgaggcctaatctgcacaatagcc

SEQ ID NO: 358355 - DNA, 120 bp, Artificial Sequence
  ENSG00000140263_46 (sequence is synthesized)
ctgaaaaccagttaccattttatgctgagggatttgtggtttgtttgaggcaagccaagtcaggcccaggcccagccctgccaggccccagtgcctgagttgccccgctgcttaggagag

SEQ ID NO: 358356 - DNA, 120 bp, Artificial Sequence
  ENSG00000140264_0 (sequence is synthesized)
agcgagctgtgaacaactcgtgtccaaataagtggctgagaggtggtcctaagtaagcacaagtttagtagtagagtactcgtaacacagaactggctgaaaccccgccctcttgtctac

SEQ ID NO: 358357 - DNA, 120 bp, Artificial Sequence
  ENSG00000140264_1 (sequence is synthesized)
gggcgttctttcagggcgactttgtcagtaccccaaactgtccccgcatgaggtcactctgcacggtcacgtgctcgagcccgcgggagcgccacatcgccagccgcacccctccacccc

SEQ ID NO: 358358 - DNA, 120 bp, Artificial Sequence
  ENSG00000140264_2 (sequence is synthesized)
caacctgcccacgtgacccggcctagtttctccaggcccgtccctacgtctcactcgggaagccccgccccacgctgagcgctccgcctgcgaccctccgccacttacccaccccggctc

SEQ ID NO: 358359 - DNA, 120 bp, Artificial Sequence
  ENSG00000140264_3 (sequence is synthesized)
aagcacgacccgtggatccacgtgctttttcttgtccaatgggagccggctcccgggcgcgaaggggcggggaggaaaggaacgactgtgctacgttgccagaaggggcgggacctgcaa

SEQ ID NO: 358360 - DNA, 120 bp, Artificial Sequence
  ENSG00000140264_4 (sequence is synthesized)
cgtccgacagaacgaggggacgtaacggaggcaggttggagccgctgccgtcgccatgacccgcggtaaccagcgtgagctcgcccgccagaagaatatgaaaaagcagagcgactcggt

SEQ ID NO: 358361 - DNA, 120 bp, Artificial Sequence
  ENSG00000140264_5 (sequence is synthesized)
taagggaaagcgccgagatgacgggctttctgctgccgcccgcaagcagagggactcggagatcatgcagcagaagcagaaaaaggcaaacgagaagaaggaggaacccaagtagctttg

SEQ ID NO: 358362 - DNA, 120 bp, Artificial Sequence
  ENSG00000140264_6 (sequence is synthesized)
cgatggcattccctttgccctgagtctgcagcgggtcccttttgtgcttccttcccctcaggtagcctctctccccctgggccactcccgggggtgagggggttaccccttcccagtgtt

SEQ ID NO: 358363 - DNA, 120 bp, Artificial Sequence
  ENSG00000140264_7 (sequence is synthesized)
ttttattcctgtggggctcaccccaaagtattaaaagtagctttgtaattccttgagcgcctggtttgactggggacttggggggatggggttggaagaatgactgccctttcccaccaa

SEQ ID NO: 358364 - DNA, 120 bp, Artificial Sequence
  ENSG00000140264_8 (sequence is synthesized)
aaaagggagaactctttagattcagattgtgggtatgtagacttaataagtgaaacatcacagaagaagcctttattatacaatgacaaccaaacaagtactccggatatgcagtagagg

SEQ ID NO: 358365 - DNA, 120 bp, Artificial Sequence
  ENSG00000140264_9 (sequence is synthesized)
aatcctctaagaaccatagagacttcttttctgtgatttttgttccccacccttgaacaccatctctaggatggagttggcctaagagtgaatgctgcaagatctgtgtttatgcctctt

SEQ ID NO: 358366 - DNA, 120 bp, Artificial Sequence
  ENSG00000140264_10 (sequence is synthesized)
ttcctcattcttcctcagtttgttcgtctgcttgaaagttggccaaaaaatcctgctgctcaccgacttcccgtggtcagctgctgtcaagcgttcactttctcttctgtcattcctcat

SEQ ID NO: 358367 - DNA, 120 bp, Artificial Sequence
  ENSG00000140264_11 (sequence is synthesized)
ggaatgagggtggttttgtcttcccgcttcccttgacctcaaaatcaggattaaaacctggggtagcctctgtgctcctttcttctatgccctggtttgttctgtggttctgggcttctt

SEQ ID NO: 358368 - DNA, 120 bp, Artificial Sequence
  ENSG00000140264_12 (sequence is synthesized)
ggccaaccgcccggacctcggcgctttcttctaggatccgcatgaatcgctttgggctatcggaagagctatccccagttctcgggagaaagagtccgcgaccagcgtctgacctctcac

SEQ ID NO: 358369 - DNA, 120 bp, Artificial Sequence
  ENSG00000140264_13 (sequence is synthesized)
tcagagtccccagtcctgccttagtttccccagcgaccctgaatttggagttgctgtctctaagtgaaagctgaacctgcaaccccttgagggtttcagccgcagaggggcgggagaaag

SEQ ID NO: 358370 - DNA, 120 bp, Artificial Sequence
  ENSG00000140264_14 (sequence is synthesized)
ggcctggttggtaggcgggctcagcggttcgcgcccagttagccccgagcttcggagacccgagagaccagaggatggctgacacgaaggggcacccgagacagcgcctgggctttttcc

SEQ ID NO: 358371 - DNA, 120 bp, Artificial Sequence
  ENSG00000140264_15 (sequence is synthesized)
cgcccgcggttccaccgctctgaaaccgatttctaacagagagagacatagtcttgctctgttacccatgctggagtacggtggcgagatcacgactcactacaactttgaattcctgga

SEQ ID NO: 358372 - DNA, 120 bp, Artificial Sequence
  ENSG00000140264_16 (sequence is synthesized)
agcgccgagatgacgggctttctgctgccgcccgcaagcagagaaagtacacacaaacctattatgcagctgtgcccgcgggctggtgggggagtggaggtggaccagcaacacagcctg

SEQ ID NO: 358373 - DNA, 120 bp, Artificial Sequence
  ENSG00000140264_17 (sequence is synthesized)
ccaaacaggttctgtttcaagctgattccagccatttgggattgccgcccactgacaacttagtagggctttcattataagcaggcttgagatatctgacctttctctcgacctaaacac

SEQ ID NO: 358374 - DNA, 120 bp, Artificial Sequence
  ENSG00000140264_18 (sequence is synthesized)
ctggggctggaaacatggcgggagagatttacagattatacctggggcaacgaaccagaacgacattagaggagaaaagaggcctgtcgtttttattggcttctgcacgtcttcctcccc

SEQ ID NO: 358375 - DNA, 120 bp, Artificial Sequence
  ENSG00000140264_19 (sequence is synthesized)
gccgtcgccatgacccgtgagcaccgagcccccttctccttgcccttttctttccgttcaccctaaacaccaccggcgaggcgccggctttgaccttccgtagcttccctagcaaggcgt

SEQ ID NO: 358376 - DNA, 120 bp, Artificial Sequence
  ENSG00000140264_20 (sequence is synthesized)
ttctctgggcgcgctctgtggccaccctcacactcggtgcccggaaatcgagccctttgcccacggctacttcacgggaccaccctcccgggttaggcataggccctcccggatcttccg

SEQ ID NO: 358377 - DNA, 120 bp, Artificial Sequence
  ENSG00000140264_21 (sequence is synthesized)
tgctgccgcccgcaagcagaggtagccccagggaggggagggaaagggacggtggagacctgggttagaccaagggttatagaaggaaagagagctacctcagggcttgaatgtggacta

SEQ ID NO: 358378 - DNA, 120 bp, Artificial Sequence
  ENSG00000140264_22 (sequence is synthesized)
gtcgtgaggagcagagtgcattgcttcctctagggttttatttcctccccaccctccaaattgttagctcacagccttacaggaaaggacgggggcgggcgcctgccctcagtctgattt

SEQ ID NO: 358379 - DNA, 120 bp, Artificial Sequence
  ENSG00000140264_23 (sequence is synthesized)
ctgagcgtccctgggtctgaccttaagggcaagggcagggagcttcacatttcaaatacagttgtggttacggcagcccagtacttttggccctccttgctgttcggttctcctcccttc

SEQ ID NO: 358380 - DNA, 120 bp, Artificial Sequence
  ENSG00000140264_24 (sequence is synthesized)
agagacccttgggcctgtgtcaccagacttctgaccccttgggcaacagccagatggagactggtcgccttttgagcctcagctctcttcctcttgttctcctagggtgggagtacagca

SEQ ID NO: 358381 - DNA, 120 bp, Artificial Sequence
  ENSG00000140264_25 (sequence is synthesized)
gccaaacgctgaacttagtcccatccacttccatcttatcctttgtgcccttcatccccctgcatcttgtcctttttgccctctggtacctcccagtgccccatcatctctacccccagg

SEQ ID NO: 358382 - DNA, 120 bp, Artificial Sequence
  ENSG00000140264_26 (sequence is synthesized)
gggctttctgctgccgcccgcaagcagagtgctattacttcatcccggaatttcctttacccagcctatgtctactttccctcctctgtcccctccccacccagaaagtacacacaaacc

SEQ ID NO: 358383 - DNA, 120 bp, Artificial Sequence
  ENSG00000140264_27 (sequence is synthesized)
ggctggtgccacactgtctgctgggatcagcggtggttctttgagctgctgatttgggtgttaggctcttgagctgggatgcagatgtaacagtagctccagtgagtcagacactctgcc

SEQ ID NO: 358384 - DNA, 120 bp, Artificial Sequence
  ENSG00000140264_28 (sequence is synthesized)
cagcacattagactgtgtttgaccacttcttccagttcatagtattgacttcagcccaaacggagataactccctgtgtgtccttgaggtattgagctgggctggacagctccccttgag

SEQ ID NO: 358385 - DNA, 120 bp, Artificial Sequence
  ENSG00000140264_29 (sequence is synthesized)
ggatatttgttatctggggatatgatgcggtggcggcggcgcctcaagataaggggctggggtttctgggtggggggccaacagagtggtgccagtaacagccccagatagaggagtacg

SEQ ID NO: 358386 - DNA, 120 bp, Artificial Sequence
  ENSG00000140264_30 (sequence is synthesized)
caggcccagcatgaggcaaccttgacccagaaggtggcccagctacccttgatgaaggtcttttccagttctgctccctcatagctgtgtaaccaaaggctctggttagagaatatgaag

SEQ ID NO: 358387 - DNA, 120 bp, Artificial Sequence
  ENSG00000140264_31 (sequence is synthesized)
ggccttagcttttagacctgttctacctcctcaccaaatataatggcagacccatgtgtgtctggaatggccttgaattgctctttccttaaaatagctagctcttcaggagagtatcta

SEQ ID NO: 358388 - DNA, 120 bp, Artificial Sequence
  ENSG00000140264_32 (sequence is synthesized)
aggcccactccatcttacctgaaccagttggtaagggtaaccatgacatagagtgaggcaaggaagaagacgaagtggaaggcagaatagttgtaggaaagatgctggacttggactgga

SEQ ID NO: 358389 - DNA, 120 bp, Artificial Sequence
  ENSG00000140264_33 (sequence is synthesized)
ggagctggaggggtttcttggtcagctggcctcgcagccccacccctttgccctggagagaggaaatggctgctgggagcagagctgctgaaacacctcttcccctctcccccaactacc

SEQ ID NO: 358390 - DNA, 120 bp, Artificial Sequence
  ENSG00000140264_34 (sequence is synthesized)
tttgttaaggctcttgagggttcttatggcactccacagagatctaccacttcttatggttcctcacttggcactcacctttgtctgcctccactgtttcagggcagcagaaacacagtg

SEQ ID NO: 358391 - DNA, 120 bp, Artificial Sequence
  ENSG00000140264_35 (sequence is synthesized)
agggcttctgcaaaacagaacgcaggttttggaatggtcttaaaagatgtgagggtgttaatctaggaaacttcccccgtgaaaagattggtctagtattaaaaagtggaggcacacctg

SEQ ID NO: 358392 - DNA, 120 bp, Artificial Sequence
  ENSG00000140264_36 (sequence is synthesized)
ggttcaaattctagctccagcatataagtggctgtgcagactttggtaagatgtttaatcttttgtgcctcgatttctccatttgtaaaatggagcaaatacctacctcacagggttgtt

SEQ ID NO: 358393 - DNA, 120 bp, Artificial Sequence
  ENSG00000140264_37 (sequence is synthesized)
gtgagggttaaattaaatgagattatgtaaaagtatctagcacagttgcctagcacattgtgggtactcaataaaaggtaacagcagctataatctgagcattctgggtagaggttggta

SEQ ID NO: 358394 - DNA, 120 bp, Artificial Sequence
  ENSG00000140264_38 (sequence is synthesized)
gtcagagaggccaaacaggaggcagcagattgctgaggcccccacatggaggaggatgtagaacaggcggctgcaagtggatgcggtgagagagggccacctagagtggcagcagctggc

SEQ ID NO: 358395 - DNA, 120 bp, Artificial Sequence
  ENSG00000140264_39 (sequence is synthesized)
acaaggagcaggcccacagcagcacacctgggagtagagcagatgcaaggcagcgaggtggagacttgctgaggaaaggcatacgttaatgtatgtgtgaggttaacccaggaggttgaa

SEQ ID NO: 358396 - DNA, 120 bp, Artificial Sequence
  ENSG00000140264_40 (sequence is synthesized)
aggcccagggaggtgccggggctggggccggccttggcacccaccatccttgtcccagggattaggcttaggtccaccagatggaaggcagatgagagcagcagttgcttctgtcctcag

SEQ ID NO: 358397 - DNA, 120 bp, Artificial Sequence
  ENSG00000140264_41 (sequence is synthesized)
cccattggactgccactgtgttggggctgagcacccggtcccgggcagaatggagacgtccggaagagaacactgacctccaggttgcggtaaatgcaaatgccctgtgaaggagctttg

SEQ ID NO: 358398 - DNA, 120 bp, Artificial Sequence
  ENSG00000140264_42 (sequence is synthesized)
tccttagggcctcaacactgcggccactcaggctgttctctccagattagggggcagtttgtctatctggccccctgtggattagcattctttattggtttaggattagacgtcattcag

SEQ ID NO: 358399 - DNA, 120 bp, Artificial Sequence
  ENSG00000140264_43 (sequence is synthesized)
gtgtttatgtgttgaggggactattcctagtttatgaggtggttaaggatatcggtggggtgggctggagcggtgtcgggttaggtctgagagaaggcctcgcacaaaacactgtacaaa

SEQ ID NO: 358400 - DNA, 120 bp, Artificial Sequence
  ENSG00000140264_44 (sequence is synthesized)
cccgaaaggaagtctgagagacgaaccgccttcctccctgaagcttctagaactggagcagaaagaaggtgtggcccagggccagccccgcctcctccccgggcggaagctgtgtcagtt

SEQ ID NO: 358401 - DNA, 120 bp, Artificial Sequence
  ENSG00000140264_45 (sequence is synthesized)
gccggaagtcggcgtgaggtggggcttatgcggcggcgtggtgaaatagatatggcgaccgagggggatgtggagctggagttggagactgagaccagtggaccagagcggcctccggag

SEQ ID NO: 358402 - DNA, 120 bp, Artificial Sequence
  ENSG00000140264_46 (sequence is synthesized)
aagccacggaaacatgacagcggtgcggcggacttggagcgggtcaccgactatgcagaggagaaggagatccagagttccaatctggagacggccatgtctgtgattggagacagaagg

SEQ ID NO: 358403 - DNA, 120 bp, Artificial Sequence
  ENSG00000140264_47 (sequence is synthesized)
tcccgggagcagaaagccaaacaggagcgggagaaagaactggcaaaagtcactatcaagaaggaagatctggagctaataatgactgagatggagatatctcgagcagcagcagaacgc

SEQ ID NO: 358404 - DNA, 120 bp, Artificial Sequence
  ENSG00000140264_48 (sequence is synthesized)
agtttgcgggaacacatgggcaacgtggtagaggcgcttattgccctaaccaactgatgcgtgctttctcaaatatacctactggattaatttatggcaataaaatttttttttgtcttt

SEQ ID NO: 358405 - DNA, 120 bp, Artificial Sequence
  ENSG00000140264_49 (sequence is synthesized)
ttcagttttatcatcttgggtcaagtagagtgtatactatatcctatgttgtggagaatttatatgttggagactaactgaatttaagtgacccattaaaatctagcacacctgtatgaa

SEQ ID NO: 358406 - DNA, 120 bp, Artificial Sequence
  ENSG00000140264_50 (sequence is synthesized)
aaatcagtgtagaagaatacctcatgtgcagatgctaggtggcaggccagtctcattcatctgactagctctcaacagtattcaaggtacatctggagtctcagcagagttactgtactc

SEQ ID NO: 358407 - DNA, 120 bp, Artificial Sequence
  ENSG00000140264_51 (sequence is synthesized)
aaatggcatgtgtctccaagacagcttatgaatatctaaaaggccagctacctgcctaggagccactatatatatagatagatgtaggttatgaacccagttcataggccaccttgagtt

SEQ ID NO: 358408 - DNA, 120 bp, Artificial Sequence
  ENSG00000140264_52 (sequence is synthesized)
gaacccagttcataggccaccttgagttagaattttggtacctacaacatgcttgattttgagtgattaaaaaaaaataatttggctgggtgctgtggctcacacctctaatcccagcac

SEQ ID NO: 358409 - DNA, 84 bp, Artificial Sequence
  ENSG00000140264_53 (sequence is synthesized)
ggaggctgaggcaggaatcgcttgaaattggatactactgtactccagcctgggggaaagagtgaaactccatctcaaaaaaaa

SEQ ID NO: 358410 - DNA, 120 bp, Artificial Sequence
  ENSG00000140264_54 (sequence is synthesized)
ggcctcgatgggccgttgtcggggcccggagattgaagtggtgttggatcctgctgctggccgcgctggggtagaagggtcgccggtgtgtgggcagagcggcccccgcgtctcaccttt

SEQ ID NO: 358411 - DNA, 120 bp, Artificial Sequence
  ENSG00000140265_0 (sequence is synthesized)
agtgccatctttctctgccctaggaagaaacacctcttacagtcatctgcaggggattctccaaggacatgggaagatagatgtaagccctggaacccagactcctaagcgaagggaagc

SEQ ID NO: 358412 - DNA, 120 bp, Artificial Sequence
  ENSG00000140265_1 (sequence is synthesized)
tgcattctgctattaatgatggccaaatcagctctaagagagaatggcactaactctgagaccttccgacagcgtttcaggagattccattaccaggaggtggctgggccgcgggaggct

SEQ ID NO: 358413 - DNA, 120 bp, Artificial Sequence
  ENSG00000140265_2 (sequence is synthesized)
ttcagccaactctgggaactttgctgtcggtggctaaggccggaggtgcgcaccaaggagcagattgtagaactgttggtgctagagcagttcctgaccgtcttacctggggagatccag

SEQ ID NO: 358414 - DNA, 120 bp, Artificial Sequence
  ENSG00000140265_3 (sequence is synthesized)
aattgggtacaggaacaatgtccagaaaatggagaggaggcagtgactctcgtggaagatttagaaagagagcctggaagacctagatcttcggtcacagtctctgtgaaggggcaggaa

SEQ ID NO: 358415 - DNA, 120 bp, Artificial Sequence
  ENSG00000140265_4 (sequence is synthesized)
gtgcgcttggagaagatgacacccccgaaatcatcacaagagttattaagtgttcggcaggagtcagtggaaccccagcccaggggtgtacccaagaaagagagggcaagaagcccagac

SEQ ID NO: 358416 - DNA, 120 bp, Artificial Sequence
  ENSG00000140265_5 (sequence is synthesized)
ctgggaccacaggagcagatgaacccaaaggagaagctcaaaccttttcaaaggagcggattgccatttcctaaatccggtgtggtctccaggttggagcaaggagagccatggatccca

SEQ ID NO: 358417 - DNA, 120 bp, Artificial Sequence
  ENSG00000140265_6 (sequence is synthesized)
gatctgctgggctctaaggagaaagaacttccaagtggcagccacataggagacagacgagtgcatgctgatctgttaccatccaagaaagatagaagaagctgggtggaacaggatcac

SEQ ID NO: 358418 - DNA, 120 bp, Artificial Sequence
  ENSG00000140265_7 (sequence is synthesized)
tggagctttgaagatgagaaggtggcaggtgtgcactggggctatgaagagaccagaacgctcctcgcaattctcagccagactgagttttatgaggctctcagaaactgccataggaac

SEQ ID NO: 358419 - DNA, 120 bp, Artificial Sequence
  ENSG00000140265_8 (sequence is synthesized)
agccaagtgtatggggctgtggctgagcggctcagggaatatggcttcctccggaccctggaacagtgtcggaccaagttcaaaggtctccagaagagctatcggaaagtcaagagcggc

SEQ ID NO: 358420 - DNA, 120 bp, Artificial Sequence
  ENSG00000140265_9 (sequence is synthesized)
cacccacctgagacctgccccttctttgaagagatggaagccctgatgagtgctcaggtcattgccctgcccagtaatggcctggaagcagcagcctctcactctggcctggtaggcagc

SEQ ID NO: 358421 - DNA, 120 bp, Artificial Sequence
  ENSG00000140265_10 (sequence is synthesized)
gatgctgagactgaagagccagggcagaggggctggcagcatgaggagggagcagaagaggctgtggctcaggagtctgacagtgatgacatggatctagaggcgaccccccaggacccc

SEQ ID NO: 358422 - DNA, 120 bp, Artificial Sequence
  ENSG00000140265_11 (sequence is synthesized)
aactcagctgcacctgttgtgttcagaagcccaggtggtgtacactggggctatgaagagaccaagacttaccttgcaattcttagtgagacccagttttatgaagccctccggaactgt

SEQ ID NO: 358423 - DNA, 120 bp, Artificial Sequence
  ENSG00000140265_12 (sequence is synthesized)
caccgcaacagccagctgtatggagcagtggctgagaggttatgggaatatggctttcttaggaccccagaacagtgtcggaccaagtttaaaagcctgcaaaccagctatcggaaagtt

SEQ ID NO: 358424 - DNA, 120 bp, Artificial Sequence
  ENSG00000140265_13 (sequence is synthesized)
aagaatggccaggcaccagagacctgtcccttctttgaagagatggatgctttggtgagtgtccgggttgctgccccacccaatgatggccaggaagagactgcttcttgccccgtccag

SEQ ID NO: 358425 - DNA, 120 bp, Artificial Sequence
  ENSG00000140265_14 (sequence is synthesized)
gggaccagtgaggctgaagctcagaagcaagctgaggaagcagacgaggccacagaggaagattctgatgatgatgaagaggatactgagatacccccaggggctgtcataacccgtgct

SEQ ID NO: 358426 - DNA, 120 bp, Artificial Sequence
  ENSG00000140265_15 (sequence is synthesized)
ccagtgttattccaaagcccccgtggttttgaagctggatttgagaatgaagataattcaaaacgggatatttctgaggaagtacaactgcataggacattacttgcaagatctgaaagg

SEQ ID NO: 358427 - DNA, 120 bp, Artificial Sequence
  ENSG00000140265_16 (sequence is synthesized)
aaaattccccggtatcttcatcagggtaaaggcaatgagagtgactgtagatcaggaagacagtgggcaaagacctcaggggagaaaagaggaaaactgacactcccggagaagagctta

SEQ ID NO: 358428 - DNA, 120 bp, Artificial Sequence
  ENSG00000140265_17 (sequence is synthesized)
agtgaagtcctaagtcaacagagaccttgcttgggagagagaccctataaatatctcaaatacagcaaaagctttggtccaaactcccttctcatgcatcaggtatcccaccaggtggaa

SEQ ID NO: 358429 - DNA, 120 bp, Artificial Sequence
  ENSG00000140265_18 (sequence is synthesized)
aatccatataaatgtgctgattgtgggaaaagcttcagtcggagtgcacgactcattagacaccggagaatccacactggagagaaaccttataaatgtcttgactgtggaaaaagtttc

SEQ ID NO: 358430 - DNA, 120 bp, Artificial Sequence
  ENSG00000140265_19 (sequence is synthesized)
cgtgacagttcaaatttcatcacccataggagaatccacacaggagagaaaccttatcaatgtggtgagtgtgggaaatgcttcaatcagagctcaagccttatcattcaccagagaacc

SEQ ID NO: 358431 - DNA, 120 bp, Artificial Sequence
  ENSG00000140265_20 (sequence is synthesized)
cacacaggagaaaagccctatcaatgtgaagagtgtggaaaaagcttcaataacagttctcattttagtgcacatcggaggatacacacaggagagagaccccatgtgtgtcctgactgt

SEQ ID NO: 358432 - DNA, 120 bp, Artificial Sequence
  ENSG00000140265_21 (sequence is synthesized)
ggaaagagtttcagtaagagttctgacttacgtgcacatcatagaacccacacaggagagaaaccctatgggtgtcatgactgtggtaagtgcttcagtaaaagctctgcccttaataag

SEQ ID NO: 358433 - DNA, 120 bp, Artificial Sequence
  ENSG00000140265_22 (sequence is synthesized)
cacggagaaatccatgcacgggaaaagcttctgacacagtcagctcccaagtaagcccctgaggatatataacggaaagaggctcaataaatgtattgtttagaaagtcttccaatagtg

SEQ ID NO: 358434 - DNA, 120 bp, Artificial Sequence
  ENSG00000140265_23 (sequence is synthesized)
ttttcctgatctagactcaaatccccaaggcagtctaaagaatgaaaggaagatttcagtccctctctttgcctgcatctgaattgatggataacatcttttccctctcagtgcctatgg

SEQ ID NO: 358435 - DNA, 120 bp, Artificial Sequence
  ENSG00000140265_24 (sequence is synthesized)
tgttcccttaatataagcacagaggacaaggtaatagatcctatgaatttgataagcatccttctttactcattctgtcattcagctgcattttgacaggaaaaacccattacatttcga

SEQ ID NO: 358436 - DNA, 80 bp, Artificial Sequence
  ENSG00000140265_25 (sequence is synthesized)
ttcagctgcattttgacaggaaaaacccattacatttcgagaagaagttatgagactttgcccattaggtgggtctagct

SEQ ID NO: 358437 - DNA, 60 bp, Artificial Sequence
  ENSG00000140265_26 (sequence is synthesized)
ccaccataccaggctgacctcatgatctgcctgcctaggtctcccaaagtgctgggatta

SEQ ID NO: 358438 - DNA, 120 bp, Artificial Sequence
  ENSG00000140265_27 (sequence is synthesized)
caggtgtgagccactgcacccggcccagctcttctttatacaataatggaaatgctaaaatgaatgactcttcctgctcacttaaacctgtgctcaaaatgacatatttgtcaggcaccc

SEQ ID NO: 358439 - DNA, 120 bp, Artificial Sequence
  ENSG00000140265_28 (sequence is synthesized)
tcttcatttaccttaaagaaggagagtttaatgtccatcttggttctgccctatgaatcatcttgtcaagaacaggtgttcttatgcagaaacaatgaaaaccttatactgaagtgtgaa

SEQ ID NO: 358440 - DNA, 120 bp, Artificial Sequence
  ENSG00000140265_29 (sequence is synthesized)
ccctggatttcttagtttcttctgagtcctagaagaagggttggaatagaataatacatttacaggatttaggttggttttctttctgtccagtctcatctgaatttcgtctgtctcttg

SEQ ID NO: 358441 - DNA, 120 bp, Artificial Sequence
  ENSG00000140265_30 (sequence is synthesized)
tggtccagaagttccacagagcaacgcagctgcatgtggtgacaggtagagcagttaaagctgccaataggaactcgtccatattccacacacctggtatagtgttatgccctccatggg

SEQ ID NO: 358442 - DNA, 120 bp, Artificial Sequence
  ENSG00000140265_31 (sequence is synthesized)
cacttacctgcaataagcagaagccactgccacattcccgtgtattgggaaaatggactactgtgtgcgaacaggccctttaccctaatggcagggaagatggattatctttggccagtg

SEQ ID NO: 358443 - DNA, 120 bp, Artificial Sequence
  ENSG00000140265_32 (sequence is synthesized)
gagctgccaatctagacatacacattcaactgaatacaattaaaagcagttctttaaatgcaaatataattactcatctttataatacaatagtattaactgcccatatgctcatagtat

SEQ ID NO: 358444 - DNA, 120 bp, Artificial Sequence
  ENSG00000140265_33 (sequence is synthesized)
gatgagccctgtatagcacaaggtcaacaggtcctctccttgtccttacaatctaaagcagatgacactgacatggacaaacaagtgcacatgcatagttgcggcagttttagagaaatc

SEQ ID NO: 358445 - DNA, 120 bp, Artificial Sequence
  ENSG00000140265_34 (sequence is synthesized)
tagaaagctaggtagcaacactatgcataaatgttgtggtccaatgcattagtttgctttaacaaaaatctgggaggtattttttctctttattcaggaaggcttcatgaagcaggaagt

SEQ ID NO: 358446 - DNA, 120 bp, Artificial Sequence
  ENSG00000140265_35 (sequence is synthesized)
ggtcaaaggagggaaggttactggttaaattatgataggaagaactttccataactagttgcaaaattgagtgctgggtgggttgaggaatgggaaaaagggggagcaaggtgttttgtg

SEQ ID NO: 358447 - DNA, 120 bp, Artificial Sequence
  ENSG00000140265_36 (sequence is synthesized)
tagatggaacaaagggcaaaggatagactgtaaggaaggccagataaagcttggagtagcatgagaacttgaggaatagtatgatatgggctgtgcagcaggcagagagaatcaccttag

SEQ ID NO: 358448 - DNA, 120 bp, Artificial Sequence
  ENSG00000140265_37 (sequence is synthesized)
ctgaaacatgggtgttaggagcagaccatgaggtggtagaaccatcatctatagtaaatcaggtactacgctataactattgataaggaaacagctgactgccactgaaagaataagcag

SEQ ID NO: 358449 - DNA, 120 bp, Artificial Sequence
  ENSG00000140265_38 (sequence is synthesized)
ttttaggggactagctcctatgggagataaaggtcagaaatcgtagtatctgatgaagatattttgatgagcaggtgagaagaaagataaacatggccagatggccaaggactgggataa

SEQ ID NO: 358450 - DNA, 120 bp, Artificial Sequence
  ENSG00000140265_39 (sequence is synthesized)
gtagccgtttcacattcaattagaattctgtggctggaataagatcagggagagcagtaggaagatatagtattctataattcatagcttgttgtgttagagattaattaggattctgct

SEQ ID NO: 358451 - DNA, 120 bp, Artificial Sequence
  ENSG00000140265_40 (sequence is synthesized)
gttgaatcttagtacaaaaaaatctaatatttattaggaattaagggaagatggtacttctgttatgttgcctaagcagacaggaagctacaagaaacaccagtctgaagcagtgcctca

SEQ ID NO: 358452 - DNA, 120 bp, Artificial Sequence
  ENSG00000140265_41 (sequence is synthesized)
ggatctcagatgatttaggaagtgtgctgtaatgtcaaaaaaaaaaaaaagtattgtctttagtatatctatgtatagtctcgtgggaaaagcattggttgtggtatcaacagatattct

SEQ ID NO: 358453 - DNA, 120 bp, Artificial Sequence
  ENSG00000140265_42 (sequence is synthesized)
ggttccagatgtcttgtaagttaacctgcctccatttccctttctgtaaagcaaaataatgtttacacctaatctgtctctcagggataccatattaataaaaatcatgtctataaagtg

SEQ ID NO: 358454 - DNA, 120 bp, Artificial Sequence
  ENSG00000140265_43 (sequence is synthesized)
ttctcatgatgcagatgataggactgaggaattcaggctctaaagctctggattaagtggtgctgaaatttctcttctggtggcaggtgtacactggggctatgaagagaccaagactta

SEQ ID NO: 358455 - DNA, 120 bp, Artificial Sequence
  ENSG00000140265_44 (sequence is synthesized)
tgggacttaggaaaaatatcatctgattgagaactggcctctacacccagctttcatggattcttcttgtgaccacccatatttcttgtctattaaagcagctcactgaggggatataaa

SEQ ID NO: 358456 - DNA, 120 bp, Artificial Sequence
  ENSG00000140265_45 (sequence is synthesized)
ggccggggccggggccggggccggggtcagggtcggaccccgagtgggtgaggctggcccggaggcaaggatgcgagggggttgaggggcagctcgagagggagacgctcccaggggtgg

SEQ ID NO: 358457 - DNA, 120 bp, Artificial Sequence
  ENSG00000140265_46 (sequence is synthesized)
agagggagacgctcccaggggtgggctggagggcgccctcagggcgccttagccgggtcagaggcctctggagggaccgcacgacggctccgggttacccggccggagggagcggagaca

SEQ ID NO: 358458 - DNA, 120 bp, Artificial Sequence
  ENSG00000140265_47 (sequence is synthesized)
ctctgcgtccgcgaaccggcagcacctggagcctctggccgacacccgagcccgtcctcaggaagcccgttactactgctcctcggattccgtctctcctgcccaatgtgactctcccca

SEQ ID NO: 358459 - DNA, 120 bp, Artificial Sequence
  ENSG00000140265_48 (sequence is synthesized)
ttccgacagcaggatggtgacttgtctttagatcctctcgaactccagctctcctatatggttcggactcactgtgcaacattggccagggaagttaaatgggatcggatttggaggagg

SEQ ID NO: 358460 - DNA, 120 bp, Artificial Sequence
  ENSG00000140265_49 (sequence is synthesized)
tgggagaggggcagacagtacttttattctctgctgcttcctggggctgccctggaagtcaaccagaaaagcagtttttgcaaagtctatttactgaagattgtgctaccttagaaggcc

SEQ ID NO: 358461 - DNA, 120 bp, Artificial Sequence
  ENSG00000140265_50 (sequence is synthesized)
actcggagcacatggaaaggcaggccagctctggcaagactttagacatatgaatgtattccttctgatagtgccatctttctctgccctaggaagaaacacctcttacagtcatctgca

SEQ ID NO: 358462 - DNA, 120 bp, Artificial Sequence
  ENSG00000140274_0 (sequence is synthesized)
agcgccaacccgcagaaccaggaaagtaacggctacagacagtgagaaatagtttcgctcgccggctagaaaaactctgtcggtaccaaccccagagcgttgagagcagcccacctccac

SEQ ID NO: 358463 - DNA, 120 bp, Artificial Sequence
  ENSG00000140274_1 (sequence is synthesized)
gcttccttaacggagaggtgcaggactcagacttcaccagcccactcggtcccagccttgtacgcaaagagacgccaaggacgcgctctcccgcgtccaggcagccccagcttgctggct

SEQ ID NO: 358464 - DNA, 120 bp, Artificial Sequence
  ENSG00000140274_2 (sequence is synthesized)
tgcctgcccgcctgcgtgcagcactcggccggcgtgcagcatgaccctgtggaacggcgtactgcctttttacccccagccccggcatgccgcaggcttcagcgttccactgctcatcgt

SEQ ID NO: 358465 - DNA, 120 bp, Artificial Sequence
  ENSG00000140274_3 (sequence is synthesized)
tattctagtgtttttggctctagcagcaagcttcctgctcatcttgccggggatccgtggccactcgcgctggttttggttggtgagagttcttctcagtctgttcataggcgcagaaat

SEQ ID NO: 358466 - DNA, 120 bp, Artificial Sequence
  ENSG00000140274_4 (sequence is synthesized)
tgtggctgtgcacttcagtgcagaatggttcgtgggtacagtgaacaccaacacatcctacaaagccttcagcgcagcgcgcgttacagcccgtgtccgtctgctcgtgggcctggaggg

SEQ ID NO: 358467 - DNA, 120 bp, Artificial Sequence
  ENSG00000140274_5 (sequence is synthesized)
cattaatattacactcacagggaccccagtgcatcagctgaacgagaccattgactacaacgagcagttcacctggcgtctgaaagagaattacgccgcggagtacgcgaacgcactgga

SEQ ID NO: 358468 - DNA, 120 bp, Artificial Sequence
  ENSG00000140274_6 (sequence is synthesized)
gaaggggctgccggacccagtgctctacctggcggagaagttcacaccgagtagcccttgcggcctgtaccaccagtaccacctggcgggacactacgcctcggccacgctatgggtggc

SEQ ID NO: 358469 - DNA, 120 bp, Artificial Sequence
  ENSG00000140274_7 (sequence is synthesized)
caccggagccttcgcgctcttcggggtcttcgccttggcctccatctctagcgtgccgctctgcccgctccgcctaggctcctccgcgctcaccactcagtacggcgccgccttctgggt

SEQ ID NO: 358470 - DNA, 120 bp, Artificial Sequence
  ENSG00000140274_8 (sequence is synthesized)
cacgctggcaaccggcgtcctgtgcctcttcctcggaggggccgtggtgagtctccagtatgttcggcccagcgctcttcgcacccttctggaccaaagcgccaaggactgcagccagga

SEQ ID NO: 358471 - DNA, 120 bp, Artificial Sequence
  ENSG00000140274_9 (sequence is synthesized)
gagagggggctcacctcttatcctcggcgacccactgcacaagcaggccgctctcccagacttaaaatgtatcaccactaacctgtgagggggacccaatctggactccttccccgcctt

SEQ ID NO: 358472 - DNA, 120 bp, Artificial Sequence
  ENSG00000140274_10 (sequence is synthesized)
gggacatcgcaggccgggaagcagtgcccgccaggcctgggccaggagagctccaggaagggcactgagcgctgctggcgcgaggcctcggacatccgcaggcaccagggaaagtctcct

SEQ ID NO: 358473 - DNA, 120 bp, Artificial Sequence
  ENSG00000140274_11 (sequence is synthesized)
ggggcgatctgtaaataaacctttttttcttttgttttttaaaaactgtttttcccattaattttcatggcttctccgcgccggggtcgcacgtcctcatgagcttcgctgggctggaga

SEQ ID NO: 358474 - DNA, 120 bp, Artificial Sequence
  ENSG00000140274_12 (sequence is synthesized)
cagcctagtacactctccgcagtgctgtgaaacctgattctctgcgtcgactccagagtaataggggcgccctctagtgaggccggagggaccctaccagagctagcatctttctgaacc

SEQ ID NO: 358475 - DNA, 120 bp, Artificial Sequence
  ENSG00000140274_13 (sequence is synthesized)
accccagggggacgttaggtggcagtgatgaggcaggtcacccactcccccgtcctggatgccactcagctagcccagctgagtggggtgggaaggaatagcgttttggagttgattccc

SEQ ID NO: 358476 - DNA, 120 bp, Artificial Sequence
  ENSG00000140274_14 (sequence is synthesized)
agcttcctgctcatcttgccggggatccgtggccactcggagtatctgcattcccacctcctcccctcggagatcaggctggggcctccctcttctgagggaggtgacccctgcgtgcct

SEQ ID NO: 358477 - DNA, 120 bp, Artificial Sequence
  ENSG00000140274_15 (sequence is synthesized)
agcacttctggactcactgagcctcaccaagcagtgactggaccaggaggcagaaccaggaccaggcgccagacagctaggggagtgaaggtggtggaagagtgccaggaagtgggggtg

SEQ ID NO: 358478 - DNA, 120 bp, Artificial Sequence
  ENSG00000140274_16 (sequence is synthesized)
gaggggaggtgctgttagggtagatgggaaatggggctagggaggtgaaagtgcgtggtcacaaaatatcagaaatgccagtagcccagagggacttgcaggaaaagcgtgcctaacatt

SEQ ID NO: 358479 - DNA, 120 bp, Artificial Sequence
  ENSG00000140274_17 (sequence is synthesized)
agtctcaaaagtctggatataactaaagatccaggtgaagtggggtcaagggtggtcttggggactctggtttggcagggctcaggcctgacccgggtgcctattcctgcagcgctggtt

SEQ ID NO: 358480 - DNA, 120 bp, Artificial Sequence
  ENSG00000140274_18 (sequence is synthesized)
ggtaagtgctggagggaaggctgtgtgcacgtgtgtgtgtgccaggagctgggccgtatgagcgggaggatgcaggcctcggaggcgctgagcagctgcagccagacccgacgcgctcgg

SEQ ID NO: 358481 - DNA, 120 bp, Artificial Sequence
  ENSG00000140274_19 (sequence is synthesized)
ggtgggcatgacagcctcgcgggttagaagatccacgagatctgcacagacggaatccggagagactccagccaccgcctggacctcaggagcccgcttctcccccggggaattcccctg

SEQ ID NO: 358482 - DNA, 120 bp, Artificial Sequence
  ENSG00000140274_20 (sequence is synthesized)
caccgctgccatcccagtccctggctttgacgctggggtagggataaagaagagcgcagctgtgggaaccccggtgggctgggagaagcccgctcacagcgggtccccccactccccggc

SEQ ID NO: 358483 - DNA, 120 bp, Artificial Sequence
  ENSG00000140279_0 (sequence is synthesized)
ggtctgtcctgagccgacacctgcacagtggcgagaccaaggacccagagagaaaggtgagagtgcagccggggaggctgaggatcggcggagctggaagagtgagggtgaaggcaagaa

SEQ ID NO: 358484 - DNA, 120 bp, Artificial Sequence
  ENSG00000140279_1 (sequence is synthesized)
gtagagcacagaagcaaagattttaagaggaaagaagacatctgaacccaacaccaccctaaaccacaggctgcagggttggcatgctccgtgcaagaccagaggcactgatgctcctgg

SEQ ID NO: 358485 - DNA, 120 bp, Artificial Sequence
  ENSG00000140279_2 (sequence is synthesized)
gagctcttctgactggatccctgggtccatcgggcaatcaggacgcactctcactgccctgggaagtgcagcgctatgacggctggtttaacaacctgaggcaccacgagcgtggtgctg

SEQ ID NO: 358486 - DNA, 120 bp, Artificial Sequence
  ENSG00000140279_3 (sequence is synthesized)
ttggctgccggttgcagcgccgcgtaccagccaattacgccgacggtgtgtatcaggctctggaggagccgcagctgcccaacccgcgccggctcagcaacgcagccacgcggggcatag

SEQ ID NO: 358487 - DNA, 120 bp, Artificial Sequence
  ENSG00000140279_4 (sequence is synthesized)
ccggcctgccgtcgctccacaaccgcaccgtactgggggtcttctttggctaccatgttctttccgacgtggtgagcgtggaaacgcccggttgccccgccgagttcctcaacatccgca

SEQ ID NO: 358488 - DNA, 120 bp, Artificial Sequence
  ENSG00000140279_5 (sequence is synthesized)
tcccacctggagaccccgtgttcgaccccgaccagcgcggggacgtggtgctgcccttccagaggagccgctgggaccccgagaccggacggagtcccagcaacccccgggacctggcca

SEQ ID NO: 358489 - DNA, 120 bp, Artificial Sequence
  ENSG00000140279_6 (sequence is synthesized)
accaggtgacgggctggctggacggcagcgccatctatggctcctcgcactcctggagcgacgcgctgcggagcttctcggggggacagctggcgtcggggcccgaccccgctttccccc

SEQ ID NO: 358490 - DNA, 120 bp, Artificial Sequence
  ENSG00000140279_7 (sequence is synthesized)
gagactcgcagaaccccctgctcatgtgggcggcgcccgaccccgccaccgggcagaacgggccccgggggctgtacgccttcggggcagagagagggaaccgggaacccttcctgcagg

SEQ ID NO: 358491 - DNA, 120 bp, Artificial Sequence
  ENSG00000140279_8 (sequence is synthesized)
cgctgggcctgctctggttccgctaccacaacctgtgggcgcagaggctggcccgccagcacccagactgggaggacgaggagctgttccagcacgcacgcaagagggtcatcgccacct

SEQ ID NO: 358492 - DNA, 120 bp, Artificial Sequence
  ENSG00000140279_9 (sequence is synthesized)
accagaacatcgctgtgtatgagtggctgcccagcttcctgcagaaaacactcccggagtatacaggataccgtcctttcctagaccccagcatctccccggaatttgtggtggcctctg

SEQ ID NO: 358493 - DNA, 120 bp, Artificial Sequence
  ENSG00000140279_10 (sequence is synthesized)
agcagttcttctctaccatggtgccccctggtgtctacatgagaaatgccagctgtcatttccggaaggtcctgaacaagggttttcaaagctcccaagctctcagggtctgcaacaact

SEQ ID NO: 358494 - DNA, 120 bp, Artificial Sequence
  ENSG00000140279_11 (sequence is synthesized)
actggattcgggagaaccccaatctgaacagtacccaggaggtgaatgagctgctgctgggaatggcctcccagatttcggagttggaggacaacatagtggttgaagatctgagggatt

SEQ ID NO: 358495 - DNA, 120 bp, Artificial Sequence
  ENSG00000140279_12 (sequence is synthesized)
actggcctggccctggcaaattctcccgtacagactatgtggccagcagcatccaacgtggccgagatatggggctgcccagctatagccaggccctgctggcctttgggctggacatcc

SEQ ID NO: 358496 - DNA, 120 bp, Artificial Sequence
  ENSG00000140279_13 (sequence is synthesized)
caaggaactggagtgatctcaaccctaatgtggacccccaggtgctggaggccacagctgccctgtacaaccaggacctatcccagctagagctgctccttggggggctcctggagagcc

SEQ ID NO: 358497 - DNA, 120 bp, Artificial Sequence
  ENSG00000140279_14 (sequence is synthesized)
atggggaccctggacccctgttcagtgccattgtcctcgaccagtttgtacggctgcgggatggtgaccgctactggtttgagaacaccaggaatgggctgttctccaagaaggagattg

SEQ ID NO: 358498 - DNA, 120 bp, Artificial Sequence
  ENSG00000140279_15 (sequence is synthesized)
aagacatccgaaataccaccctgcgggacgtgctggtcgctgttatcaacattgaccccagtgccctgcagcccaatgtctttgtctggcataaaggtgcaccctgccctcaacctaagc

SEQ ID NO: 358499 - DNA, 120 bp, Artificial Sequence
  ENSG00000140279_16 (sequence is synthesized)
agctcacaactgacggcctgccccagtgtgcacccctgactgtgcttgacttctttgaaggcagcagccctggttttgccatcaccatcattgctctctgctgccttcccttagtgagtc

SEQ ID NO: 358500 - DNA, 120 bp, Artificial Sequence
  ENSG00000140279_17 (sequence is synthesized)
tgcttctctctggagtggtggcctatttccggggccgagaacacaagaagctacaaaagaaactcaaagagagcgtgaagaaggaagcagccaaagatggagtgccagcgatggagtggc

SEQ ID NO: 358501 - DNA, 120 bp, Artificial Sequence
  ENSG00000140279_18 (sequence is synthesized)
caggccccaaggagaggagcagtcccatcatcatccagctgctgtcagacaggtgtctgcaggtcctgaacaggcatctcactgtgctccgtgtggtccagctgcagcctctgcagcagg

SEQ ID NO: 358502 - DNA, 120 bp, Artificial Sequence
  ENSG00000140279_19 (sequence is synthesized)
tcaacctcatcctgtccaacaaccgaggatgccgcaccctgctgctcaagatccctaaggagtatgacctggtgctgctgtttagttctgaagaggaacggggcgcctttgtgcagcagc

SEQ ID NO: 358503 - DNA, 120 bp, Artificial Sequence
  ENSG00000140279_20 (sequence is synthesized)
tatgggacttctgcgtgcgctgggctctgggcctccatgtggctgagatgagcgagaaggagctatttaggaaggctgtgacaaagcagcagcgggaacgcatcctggagatcttcttca

SEQ ID NO: 358504 - DNA, 120 bp, Artificial Sequence
  ENSG00000140279_21 (sequence is synthesized)
gacacctttttgctcaggtgctggacatcaaccaggccgacgcagggaccctgcccctggactcctcccagaaggtgcgggaggccctgacctgcgagctgagcagggccgagtttgccg

SEQ ID NO: 358505 - DNA, 120 bp, Artificial Sequence
  ENSG00000140279_22 (sequence is synthesized)
agtccctgggcctcaagccccaggacatgtttgtggagtccatgttctctctggctgacaaggatggcaatggctacctgtccttccgagagttcctggacatcctggtggtcttcatga

SEQ ID NO: 358506 - DNA, 120 bp, Artificial Sequence
  ENSG00000140279_23 (sequence is synthesized)
aaggctccccagaggataagtcccgtctaatgtttaccatgtatgacctggatgagaatggcttcctctccaaggacgaattcttcaccatgatgcgatccttcatcgagatctccaaca

SEQ ID NO: 358507 - DNA, 120 bp, Artificial Sequence
  ENSG00000140279_24 (sequence is synthesized)
actgcctgtccaaggcccagctggccgaggtggtggagtctatgttccgggagtcgggattccaggacaaggaggagctgacatgggaggattttcacttcatgctgcgggaccatgaca

SEQ ID NO: 358508 - DNA, 120 bp, Artificial Sequence
  ENSG00000140279_25 (sequence is synthesized)
gcgagctccgcttcacgcagctctgtgtcaaaggtggaggtggaggtggaaatggtattagagatatctttaaacaaaacatcagctgtcgagtctcgttcatcactcggacacctgggg

SEQ ID NO: 358509 - DNA, 120 bp, Artificial Sequence
  ENSG00000140279_26 (sequence is synthesized)
cccggctgtacacagaggcgctgcaagagaagatgcagcgaggcttcctagcccaaaagctgcagcagtacaagcgcttcgtggagaactaccggaggcacatcgtgtgtgtggcaatct

SEQ ID NO: 358510 - DNA, 120 bp, Artificial Sequence
  ENSG00000140279_27 (sequence is synthesized)
tctcggccatctgtgttggcgtgtttgcagatcgtgcttactactatggctttgcctcgccaccctcggacattgcacagaccaccctcgtgggcatcatcctgtcacgaggcacggcgg

SEQ ID NO: 358511 - DNA, 120 bp, Artificial Sequence
  ENSG00000140279_28 (sequence is synthesized)
ccagcgtctccttcatgttctcttatatcttgctcaccatgtgccgcaacctcataaccttcctgcgagagactttcctcaaccgctatgtgccttttgatgccgcagtggacttccacc

SEQ ID NO: 358512 - DNA, 120 bp, Artificial Sequence
  ENSG00000140279_29 (sequence is synthesized)
gctggatcgccatggctgctgttgtcctggccattttgcacagtgctggccacgcagtcaatgtctacatcttctcagtcagcccactcagcctgctggcctgcatattccccaacgtct

SEQ ID NO: 358513 - DNA, 120 bp, Artificial Sequence
  ENSG00000140279_30 (sequence is synthesized)
ttgtgaatgatgggtccaagcttccccagaagttctattggtggttcttccagaccgtcccaggtatgacaggtgtgcttctgctcctggtcctggccatcatgtatgtcttcgcctccc

SEQ ID NO: 358514 - DNA, 120 bp, Artificial Sequence
  ENSG00000140279_31 (sequence is synthesized)
accacttccgccgccgcagcttccggggcttctggctgacccaccacctctacatcctgctctatgccctgctcatcatccatggcagctatgctctgatccagctgcccactttccaca

SEQ ID NO: 358515 - DNA, 120 bp, Artificial Sequence
  ENSG00000140279_32 (sequence is synthesized)
tctacttcctggtcccggcaatcatctatggaggtgacaagctggtgagcctgagccggaagaaggtggagatcagcgtggtgaaggcggagctgctgccctcaggagtgacctacctgc

SEQ ID NO: 358516 - DNA, 120 bp, Artificial Sequence
  ENSG00000140279_33 (sequence is synthesized)
aattccagaggccccaaggctttgagtacaagtcaggacagtgggtgcggatcgcctgcctggctctggggaccaccgagtaccaccccttcacactgacctccgcgccccatgaggaca

SEQ ID NO: 358517 - DNA, 120 bp, Artificial Sequence
  ENSG00000140279_34 (sequence is synthesized)
cactcagcctgcacatccgggcagtggggccctggaccactcgcctcagggagatctactcatccccaaagggcaatggctgtgctggatacccaaagctgtaccttgatggaccgtttg

SEQ ID NO: 358518 - DNA, 120 bp, Artificial Sequence
  ENSG00000140279_35 (sequence is synthesized)
gagagggccatcaggagtggcataaatttgaggtgtcagtgttggtgggagggggcattggggtcaccccctttgcctccatcctcaaagacctggtcttcaagtcatccttgggcagcc

SEQ ID NO: 358519 - DNA, 120 bp, Artificial Sequence
  ENSG00000140279_36 (sequence is synthesized)
aaatgctgtgtaagaagatctacttcatctgggtgacacggacccagcgtcagtttgagtggctggctgacatcatccaagaggtggaggagaacgaccaccaggacctggtgtctgtgc

SEQ ID NO: 358520 - DNA, 120 bp, Artificial Sequence
  ENSG00000140279_37 (sequence is synthesized)
acatttatgtcacccagctggctgagaagttcgacctcaggaccaccatgctatacatctgcgagcggcacttccagaaagtgctgaaccggagtctgttcacgggcctgcgctccatca

SEQ ID NO: 358521 - DNA, 120 bp, Artificial Sequence
  ENSG00000140279_38 (sequence is synthesized)
cccactttggccgtccccccttcgagcccttcttcaactccctgcaggaggtccacccacaggtgcgcaagatcggggtgttcagctgcggccctccaggaatgaccaagaatgtagaga

SEQ ID NO: 358522 - DNA, 120 bp, Artificial Sequence
  ENSG00000140279_39 (sequence is synthesized)
aggcctgtcagctcgtcaacaggcaggaccgagcccacttcatgcaccactatgagaacttctgagcctgtcctccctggctgctgcttccagtatcctgccttctcttctgtgcaccta

SEQ ID NO: 358523 - DNA, 120 bp, Artificial Sequence
  ENSG00000140279_40 (sequence is synthesized)
agttgcccagccctgctggcaatctctccatcagaatccaccttaggcctcagctggagggctgcagagcccctcccaatattgggagaatattgacccagacaattatacaaatgagaa

SEQ ID NO: 358524 - DNA, 120 bp, Artificial Sequence
  ENSG00000140279_41 (sequence is synthesized)
aaggcaggagactatgttctacaattgcagtgcatgatgattataagtccacctgtttatcaacggcaccattcctgcagccctccagacttcctgcccttagcaagtgcgcaaccagtc

SEQ ID NO: 358525 - DNA, 120 bp, Artificial Sequence
  ENSG00000140279_42 (sequence is synthesized)
aggatctcccaaagaagataaagaccactcctcaccccagctcaagccatggcaggcgtggcaagcaaagtggggaggagacagtccctgcttgtgacaagtgtggaggtgaaaaggtac

SEQ ID NO: 358526 - DNA, 120 bp, Artificial Sequence
  ENSG00000140279_43 (sequence is synthesized)
aatagtgcttgtctccgatagctccccacatctctaattgacttccacaaaatcgatgcgttgctttggtatttgcttggactgacatttgagggaggaggaggctgggatcctctggct

SEQ ID NO: 358527 - DNA, 120 bp, Artificial Sequence
  ENSG00000140279_44 (sequence is synthesized)
gagaatctcctcagagcccagtgcagaagctgtgatgcttagaacctggacagcccgactgcctcaactctgtctccaggtctattccctccagctccaaaaggagcagccctacttcta

SEQ ID NO: 358528 - DNA, 120 bp, Artificial Sequence
  ENSG00000140279_45 (sequence is synthesized)
ccccttcccgtccccaaagtgtcagcaactttgaggagggcaccaggaaacaaagatgcctccccagccctgatattcttgatgtcaccagtgatacccactgccctgacccctgggcag

SEQ ID NO: 358529 - DNA, 120 bp, Artificial Sequence
  ENSG00000140279_46 (sequence is synthesized)
gcccctctctgcatctactggagtggtccctgggctctggggctgaaggattccagcctctctgccagatattcagtactcgatctcaattcccctcttccacaagagttgggtgaccag

SEQ ID NO: 358530 - DNA, 120 bp, Artificial Sequence
  ENSG00000140279_47 (sequence is synthesized)
ctgtcctagtttgcccaggactctccctgttttagcactgaaagtctcttgccccaggaaaccccatcagtcccaggcagattgggacagctggtcaccttacgcaagagccaggctgaa

SEQ ID NO: 358531 - DNA, 120 bp, Artificial Sequence
  ENSG00000140279_48 (sequence is synthesized)
acatcccctccatactcagctctttaacttttcttttcctttttcatcgggctctttcctaaaaagctgagctgtaaaatattttacatcgaggtataataaataatcatgtacatgttt

SEQ ID NO: 358532 - DNA, 120 bp, Artificial Sequence
  ENSG00000140279_49 (sequence is synthesized)
taccaccacccaggtcaagacatagaatgtttcaacatttccatcaccccagaaactccccttgtacccccttccacttcgtctcccctagctcctagaagcaaccactgatgtgatttc

SEQ ID NO: 358533 - DNA, 120 bp, Artificial Sequence
  ENSG00000140279_50 (sequence is synthesized)
taccaaatccagttttggtcctactaaatatactcttttgagactggcctcttttactcaccataatgcctttgtaattcatccatgctgttgtgtgtatcagcagtttgttccttttca

SEQ ID NO: 358534 - DNA, 120 bp, Artificial Sequence
  ENSG00000140279_51 (sequence is synthesized)
ttgctgagtagtattctattgtagagatgtaccacagtttgtttattcttctgttgatggacgtttgggttgtttctaattttgaatgattataaataaaaattctgtgagtgttcttgt

SEQ ID NO: 358535 - DNA, 120 bp, Artificial Sequence
  ENSG00000140279_52 (sequence is synthesized)
ggttctgcgggttggcgctgagtttggaagtcgcgcgggaccccttttatagcagcgtgggcgacgtgccacacgggtgtcccagcccaggggctggtctgagctggaagaggttgtgca

SEQ ID NO: 358536 - DNA, 120 bp, Artificial Sequence
  ENSG00000140279_53 (sequence is synthesized)
tggtagcacaaacattccagctgcctctctcaccctatgctgctcggatgcttggctctctccctgctgctccaggccagaatcattctacaaaacaaatcatgagatcctattaattca

SEQ ID NO: 358537 - DNA, 120 bp, Artificial Sequence
  ENSG00000140279_54 (sequence is synthesized)
ttttgtgccttgccccctgcctggtaccaggagccactccctacctctaccccatgctctgcccagggagttgttctcctggctgcaaagacaaggggagaacagccccatttctttttc

SEQ ID NO: 358538 - DNA, 120 bp, Artificial Sequence
  ENSG00000140279_55 (sequence is synthesized)
tggatggagcaaagacagaagtaaagggttggaggaggaagaagcccccagattgcttttttccattcatctgttgtggcccatcctgatgcctgccagatccccaggtcacctttcatg

SEQ ID NO: 358539 - DNA, 80 bp, Artificial Sequence
  ENSG00000140279_56 (sequence is synthesized)
caggtggggcctgggcttcgggcctggcagggcctggaggggagaggcgcccactccccagccgcggacacccgccgggc

SEQ ID NO: 358540 - DNA, 120 bp, Artificial Sequence
  ENSG00000140279_57 (sequence is synthesized)
cggggccggctgggggtctgcgagtgtgggctcccccgatcacgctaccgctcgtctcctcccctgcgcccccacgtcggatgcagccttcggggcagagagagggaaccgggaaccctt

SEQ ID NO: 358541 - DNA, 120 bp, Artificial Sequence
  ENSG00000140279_58 (sequence is synthesized)
caggttcatgggagatgaagggtagaggaaattatccggggacaacagttcaagagagtctgggactggccaagggccctttgtcctggggtactaaagtggtccaggctgagagagacc

SEQ ID NO: 358542 - DNA, 120 bp, Artificial Sequence
  ENSG00000140279_59 (sequence is synthesized)
gagttttgggtagaggcctatcttgagtgcattgtttacttccagaaccccaatctgaacagtacccaggaggtgaatgagctgctgctgggaatggcctcccagatttcggagttggag

SEQ ID NO: 358543 - DNA, 120 bp, Artificial Sequence
  ENSG00000140279_60 (sequence is synthesized)
gacaacatagtggttgaagatctgaggggtgagctcagagccagaaggggtggatggtaagggaccaggaagcctgaggatccctctgggttcatcaatagcagacctagggcgctcacg

SEQ ID NO: 358544 - DNA, 120 bp, Artificial Sequence
  ENSG00000140279_61 (sequence is synthesized)
atgcaggaacacagatacaaacacagacttcaaggagccataagaagaaaatgaactttgaactttttttttttttttgcttaatttacacttttgtgttgcttttattttaaattaact

SEQ ID NO: 358545 - DNA, 120 bp, Artificial Sequence
  ENSG00000140279_62 (sequence is synthesized)
atgtctgagtattggggaggggtggtaccacaatctctttggtgcttaattaggtctctaaaggttttcattcagccctgtcttgaaactagggaggcataggacagggaatttactgct

SEQ ID NO: 358546 - DNA, 120 bp, Artificial Sequence
  ENSG00000140279_63 (sequence is synthesized)
tggtgactagaacagtcttgagtcttagaggaagggtcttactggaaaaactggctctgatcacccatggtgacattggccttgcagcaaggcaaggtcagcatgggcacagatctcatg

SEQ ID NO: 358547 - DNA, 120 bp, Artificial Sequence
  ENSG00000140279_64 (sequence is synthesized)
tggatcactgggggtagccaggagggaagaaccgtagtgccaatagtcagatacaaggctgcagggcaaaaaaggatggagaggacaaagcccatagtctagtcttctctcctcttcaga

SEQ ID NO: 358548 - DNA, 120 bp, Artificial Sequence
  ENSG00000140279_65 (sequence is synthesized)
actcatttaatctacataataatattgtaaggtatgtataatcattttccccattttactgatgacatagttggtaaatcatagaggagggacttaaattcagccatctgattccagaat

SEQ ID NO: 358549 - DNA, 120 bp, Artificial Sequence
  ENSG00000140279_66 (sequence is synthesized)
atattcctaaccactgcattgtaccattcctgcagggtggcttctgggttgggtgccattgtcctgttgctgcagggtcccaccccaagggctgtgtgcccctgaagctgctaatcattg

SEQ ID NO: 358550 - DNA, 120 bp, Artificial Sequence
  ENSG00000140279_67 (sequence is synthesized)
aggtcaggcaggctggtgatggtcacaggatatggtcctagggcacctgaccgtggtgttaccgtgggtagggacacactgatccttccaccagacttgtcctgcctgagggggcttgcc

SEQ ID NO: 358551 - DNA, 120 bp, Artificial Sequence
  ENSG00000140279_68 (sequence is synthesized)
taagaagaggaaatcaggcctgagcagcagccaggcagcggctgaggttctgtgcccgagggatggggcaacagtggctgccctccgcagcaaacatacgctcaccccttatctcctgtg

SEQ ID NO: 358552 - DNA, 120 bp, Artificial Sequence
  ENSG00000140279_69 (sequence is synthesized)
ttggcgtcagggagggggggcgtgtcctcaaaatgagagttcctggtgggcaggacccaggtcttactcttttctgagtccttggtacctagtatagaaccaagcacatgtaattgggat

SEQ ID NO: 358553 - DNA, 120 bp, Artificial Sequence
  ENSG00000140279_70 (sequence is synthesized)
ggcacatgtaggtgtgcaagttgcctaatgcacaatgatacccactgaggtcaaggagcaggttgaaatctatcctacacactgctcaaagccaccggcattgctctaagatgtatctgg

SEQ ID NO: 358554 - DNA, 120 bp, Artificial Sequence
  ENSG00000140279_71 (sequence is synthesized)
ccagaggaagaggcattgtttcttttacacaaaggacctgcagggttgcatccacctaagaggatgtcccctttcttgtgcaaagttgccacattgtctgccctgtgtacagtgagtgct

SEQ ID NO: 358555 - DNA, 120 bp, Artificial Sequence
  ENSG00000140279_72 (sequence is synthesized)
tagtctagggaatgagggaaacaggactcgagtcagagatctggacatgactttcccagaagggaggagggcacagtctcccatcctaccccactgcccttgtggggaagccagtcctgc

SEQ ID NO: 358556 - DNA, 120 bp, Artificial Sequence
  ENSG00000140279_73 (sequence is synthesized)
aagagttccaggctgtgggcagtgggtagggagcaggctctgacccttggagaggagtggaaagccctctgatcctaagagtctgcatgggagagcccagggctcgggaccttggccacc

SEQ ID NO: 358557 - DNA, 120 bp, Artificial Sequence
  ENSG00000140279_74 (sequence is synthesized)
ttccccaacgtctttgtgaatgatgggtcagttctggggatggtttctcctgggactcatagggtgggcccaagggtataatagaaaaagaaataggcaggccgggcgcggtggctcacg

SEQ ID NO: 358558 - DNA, 80 bp, Artificial Sequence
  ENSG00000140280_0 (sequence is synthesized)
aagctccccgacccggcggcctcggcaggacccatggcggattcctcgcccgcactgtccctgcgggaaggcggcccccg

SEQ ID NO: 358559 - DNA, 120 bp, Artificial Sequence
  ENSG00000140280_1 (sequence is synthesized)
cgctccggctccgagtccgaggaggccgagctgtcgctgagcctggcccgcaccaagacccgctcgtacggcagcaccgccagcgtgcgggcgccgctgggcgccggcgtcatcgagcgc

SEQ ID NO: 358560 - DNA, 120 bp, Artificial Sequence
  ENSG00000140280_2 (sequence is synthesized)
catgtggagcaccgggtccgcgcgggcgacacgctgcagggcatcgcgctcaagtacggtgtcacgatggaacagattaaaagggccaataaactgtttaccaatgattgtatatttctg

SEQ ID NO: 358561 - DNA, 120 bp, Artificial Sequence
  ENSG00000140280_3 (sequence is synthesized)
aagaaaactttgaacatcccagttatatcagagaagcctttgttgtttaatggacttaactccattgattctccagaaaatgaaactgctgataacagtttttctcaggaagaggagcca

SEQ ID NO: 358562 - DNA, 120 bp, Artificial Sequence
  ENSG00000140280_4 (sequence is synthesized)
gtggtggccggggaagacctccctcctcccagtcctcaagaatctgatgttcagcctgtgcagcctgaggaagtgtcagccagagatttcctgcagagacttgacttgcagattaagtta

SEQ ID NO: 358563 - DNA, 120 bp, Artificial Sequence
  ENSG00000140280_5 (sequence is synthesized)
ttaggtgatttgggggcataactctaaccaaaattaagatatgtttggaccataaagaatccaacaactgaagattcaaaaacatcccttctggattcctatagtgtccatcttaaaatc

SEQ ID NO: 358564 - DNA, 120 bp, Artificial Sequence
  ENSG00000140280_6 (sequence is synthesized)
ataactaggtagttctacctgctgcagttgcactgaagtgattagttccctctggctttctataattttaagtctttattatggcatgatggcaaggttgtagcctaaagctcatcactt

SEQ ID NO: 358565 - DNA, 120 bp, Artificial Sequence
  ENSG00000140280_7 (sequence is synthesized)
ttgtaggtggtgttagtttttagactagcttttataaatactaattgacataaagcatcaaagattatttatatatttaggctaaaaataatgtttatctccttatgcaatcctgattat

SEQ ID NO: 358566 - DNA, 120 bp, Artificial Sequence
  ENSG00000140280_8 (sequence is synthesized)
gtgaaaatatggttgctgtttaagtgatgctgaatttgctgtgtgtttataacttaagtgctatatatatatttcgatatgtcttacatattctctattaatataaagaaccaaattttg

SEQ ID NO: 358567 - DNA, 120 bp, Artificial Sequence
  ENSG00000140280_9 (sequence is synthesized)
tctgctattttgtaaaaataaactacaaaagcctgaatgagaaaataaactatgttttcaaacttgagtctcctttttttttttaacaaatgagaaaataaaattgacttttaaattata

SEQ ID NO: 358568 - DNA, 120 bp, Artificial Sequence
  ENSG00000140280_10 (sequence is synthesized)
ttggcagagctggaaggtctgtgcaagctggctcctgctggggaatcaataaaggaggcagagcaacgctttttttttttttcgccgtggccagggcagggttctgccagggctctatcg

SEQ ID NO: 358569 - DNA, 120 bp, Artificial Sequence
  ENSG00000140280_11 (sequence is synthesized)
ccaatggagcaggggtccacctggggcctaggacgcctgcagatagccctctcttagccccaacggccgcgggcttcagcgctccccggctccctcgctctgcagggtcttcccggtacc

SEQ ID NO: 358570 - DNA, 120 bp, Artificial Sequence
  ENSG00000140280_12 (sequence is synthesized)
acagctctgcaggggaggaagcacctgggtcggggagaagcctgggcaggctctttggagacgctcggggctccggagagcgtggatggcaaaggctttcaagcctgtgatgagcattcc

SEQ ID NO: 358571 - DNA, 120 bp, Artificial Sequence
  ENSG00000140280_13 (sequence is synthesized)
cgccggggcgcgcggctgcagcggagcaggctgggaagcgtagttcccggctgagcctcgccgcggccccgcagtcccccagccccgcccttccccgacaggtgtcctctcccggaatcg

SEQ ID NO: 358572 - DNA, 120 bp, Artificial Sequence
  ENSG00000140284_0 (sequence is synthesized)
agtcctgcccggaacccccggcaacgcgcatacgactacacctgctccggagcccgcggcggtacctgcagcggaggagctctgtcttccccttcatctcacgcgagcccggcgtcccgc

SEQ ID NO: 358573 - DNA, 120 bp, Artificial Sequence
  ENSG00000140284_1 (sequence is synthesized)
ccccggcgcagcccgccagtccgcccggagcccgcccagtcgccgcgctgcacgcccggggtgaaccctctgccctcgctgggacagagggccccgcagccgtcatgctttccgccatct

SEQ ID NO: 358574 - DNA, 120 bp, Artificial Sequence
  ENSG00000140284_2 (sequence is synthesized)
cgccatctacacagtcctggcgggactgctgttcctgccgctcctggtgaacctctgctgcccatacttcttccaggacataggctacttcttgaaggtggccgccgtgggccggagggt

SEQ ID NO: 358575 - DNA, 120 bp, Artificial Sequence
  ENSG00000140284_3 (sequence is synthesized)
gcgcagctacgggaagcggcggccggcgcgcaccatcctgcgggcgttcctggagaaagcgcgccagacgccacacaagccttttctgctcttccgcgacgagactctcacctacgcgca

SEQ ID NO: 358576 - DNA, 120 bp, Artificial Sequence
  ENSG00000140284_4 (sequence is synthesized)
ggtggaccggcgcagcaatcaagtggcccgggcgctgcacgaccacctcggcctgcgccagggagactgcgtggcgctccttatgggtaacgagccggcctacgtgtggctgtggctggg

SEQ ID NO: 358577 - DNA, 120 bp, Artificial Sequence
  ENSG00000140284_5 (sequence is synthesized)
gctggtgaagctgggctgtgccatggcgtgcctcaattacaacatccgcgcgaagtccctgctgcactgcttccagtgctgcggggcgaaggtgctgctggtgtcgccagaactacaagc

SEQ ID NO: 358578 - DNA, 120 bp, Artificial Sequence
  ENSG00000140284_6 (sequence is synthesized)
agctgtcgaagagatactgccaagccttaaaaaagatgatgtgtccatctattatgtgagcagaacttctaacacagatgggattgactctttcctggacaaagtggatgaagtatcaac

SEQ ID NO: 358579 - DNA, 120 bp, Artificial Sequence
  ENSG00000140284_7 (sequence is synthesized)
tgaacctatcccagagtcatggaggtctgaagtcactttttccactcctgccttatacatttatacttctggaaccacaggtcttccaaaagcagccatgatcactcatcagcgcatatg

SEQ ID NO: 358580 - DNA, 120 bp, Artificial Sequence
  ENSG00000140284_8 (sequence is synthesized)
gtatggaactggcctcacttttgtaagcggattgaaggcagatgatgtcatctatatcactctgcccttttaccacagtgctgcactactgattggcattcacggatgtattgtggctgg

SEQ ID NO: 358581 - DNA, 120 bp, Artificial Sequence
  ENSG00000140284_9 (sequence is synthesized)
atttatgcaactcaccacagaaaccaaatgaccgtgatcataaagtgagactggcactgggaaatggcttacgaggagatgtgtggagacaatttgtcaagagatttggggacatatgca

SEQ ID NO: 358582 - DNA, 120 bp, Artificial Sequence
  ENSG00000140284_10 (sequence is synthesized)
tctatgagttctatgctgccactgaaggcaatattggatttatgaattatgcgagaaaagttggtgctgttggaagagtaaactacctacagaaaaaaatcataacttatgacctgatta

SEQ ID NO: 358583 - DNA, 120 bp, Artificial Sequence
  ENSG00000140284_11 (sequence is synthesized)
aatatgatgtggagaaagatgaacctgtccgtgatgaaaatggatattgcgtcagagttcccaaaggtgaagttggacttctggtttgcaaaatcacacaacttacaccatttaatggct

SEQ ID NO: 358584 - DNA, 120 bp, Artificial Sequence
  ENSG00000140284_12 (sequence is synthesized)
atgctggagcaaaggctcagacagagaagaaaaaactgagagatgtctttaagaaaggagacctctatttcaacagtggagatctcttaatggttgaccatgaaaatttcatctatttcc

SEQ ID NO: 358585 - DNA, 120 bp, Artificial Sequence
  ENSG00000140284_13 (sequence is synthesized)
acgacagagttggagatacattccggtggaaaggggaaaatgtggccaccactgaagttgctgatacagttggactggttgattttgtccaagaagtaaatgtttatggagtgcatgtgc

SEQ ID NO: 358586 - DNA, 120 bp, Artificial Sequence
  ENSG00000140284_14 (sequence is synthesized)
cagatcatgagggtcgcattggcatggcctccatcaaaatgaaagaaaaccatgaatttgatggaaagaaactctttcagcacattgctgattacctacctagttatgcaaggccccggt

SEQ ID NO: 358587 - DNA, 120 bp, Artificial Sequence
  ENSG00000140284_15 (sequence is synthesized)
ttctaagaatacaggacaccattgagatcactggaacttttaaacaccgcaaaatgaccctggtggaggagggctttaaccctgctgtcatcaaagatgccttgtatttcttggatgaca

SEQ ID NO: 358588 - DNA, 120 bp, Artificial Sequence
  ENSG00000140284_16 (sequence is synthesized)
cagcaaaaatgtatgtgcctatgactgaggacatctataatgccataagtgctaaaaccctgaaactctgaatattcccaggaggataactcaacatttccagaaagaaactgaatggac

SEQ ID NO: 358589 - DNA, 120 bp, Artificial Sequence
  ENSG00000140284_17 (sequence is synthesized)
agccacttgatataatccaactttaatttgattgaagattgtgaggaaattttgtaggaaatttgcatacccgtaaagggagacttttttaaataacagttgagtctttgcaagtaaaaa

SEQ ID NO: 358590 - DNA, 120 bp, Artificial Sequence
  ENSG00000140284_18 (sequence is synthesized)
gatttagagattattatttttcagtgtgcacctactgtttgtatttgcaaactgagcttgttggagggaaggcattattttttaaaatacttagtaaattaaatgaacaccaacatgtga

SEQ ID NO: 358591 - DNA, 120 bp, Artificial Sequence
  ENSG00000140284_19 (sequence is synthesized)
acactgccaattaacaatgttatgggaacactgctgtatggaagaagcaatattaagggtagcatgtgtactaggcattcttcaaggagctttacaacatttgttgataagattctgccc

SEQ ID NO: 358592 - DNA, 120 bp, Artificial Sequence
  ENSG00000140284_20 (sequence is synthesized)
ccactcttgacatcggtactctttttacttccattttagagattcagaaaatgatgcttagagaggttaagaacttcccaaggtcttccaaaagcagccatgatcactcatcagcgcata

SEQ ID NO: 358593 - DNA, 120 bp, Artificial Sequence
  ENSG00000140285_0 (sequence is synthesized)
acacacacacacaagcacacacgcgctcacacacagagagaaaatccttctgcctgttgatttatggaaacaattatgattctgctggagaacttttcagctgagaaatagtttgtagct

SEQ ID NO: 358594 - DNA, 120 bp, Artificial Sequence
  ENSG00000140285_1 (sequence is synthesized)
acagtagaaaggctcaagttgcaccaggcagacaacagacatggaattcttatatatccagctgttagcaacaaaacaaaagtcaaatagcaaacagcgtcacagcaactgaacttacta

SEQ ID NO: 358595 - DNA, 120 bp, Artificial Sequence
  ENSG00000140285_2 (sequence is synthesized)
cgaactgtttttatgaggatttatcaacagagttatttaaggaggaatcctgtgttgttatcaggaactaaaaggataaggctaacaatttggaaagagcaactactctttcttaaatca

SEQ ID NO: 358596 - DNA, 120 bp, Artificial Sequence
  ENSG00000140285_3 (sequence is synthesized)
atctacaattcacagataggaagaggtcaatgacctaggagtaacaatcaactcaagattcattttcattatgttattcatgaacacccggagcactacactataatgcacaaatggata

SEQ ID NO: 358597 - DNA, 120 bp, Artificial Sequence
  ENSG00000140285_4 (sequence is synthesized)
ctgacatggatcctgccaactttgctctacagatcatgctttcacattatctgtctagtgggtactatatctttagcttgcaatgacatgactccagagcaaatggctacaaatgtgaac

SEQ ID NO: 358598 - DNA, 120 bp, Artificial Sequence
  ENSG00000140285_5 (sequence is synthesized)
tgttccagccctgagcgacacacaagaagttatgattacatggaaggaggggatataagagtgagaagactcttctgtcgaacacagtggtacctgaggatcgataaaagaggcaaagta

SEQ ID NO: 358599 - DNA, 120 bp, Artificial Sequence
  ENSG00000140285_6 (sequence is synthesized)
aaagggacccaagagatgaagaataattacaatatcatggaaatcaggacagtggcagttggaattgtggcaatcaaaggggtggaaagtgaattctatcttgcaatgaacaaggaagga

SEQ ID NO: 358600 - DNA, 120 bp, Artificial Sequence
  ENSG00000140285_7 (sequence is synthesized)
aaactctatgcaaagaaagaatgcaatgaagattgtaacttcaaagaactaattctggaaaaccattacaacacatatgcatcagctaaatggacacacaacggaggggaaatgtttgtt

SEQ ID NO: 358601 - DNA, 120 bp, Artificial Sequence
  ENSG00000140285_8 (sequence is synthesized)
gccttaaatcaaaaggggattcctgtaagaggaaaaaaaacgaagaaagaacaaaaaacagcccactttcttcctatggcaataacttaattgcatatggtatataaagaaccagttcca

SEQ ID NO: 358602 - DNA, 120 bp, Artificial Sequence
  ENSG00000140285_9 (sequence is synthesized)
gcagggagatttctttaagtggactgttttctttcttctcaaaattttctttccttttattttttagtaatcaagaaaggctggaaaactactgaaaaactgatcaagctggacttgtgc

SEQ ID NO: 358603 - DNA, 120 bp, Artificial Sequence
  ENSG00000140285_10 (sequence is synthesized)
atttatgtttgttttaagacactgcattaaagaaagatttgaaaagtatacacaaaaatcagatttagtaactaaaggttgtaaaaaattgtaaaactggttgtacaatcatgatgttag

SEQ ID NO: 358604 - DNA, 120 bp, Artificial Sequence
  ENSG00000140285_11 (sequence is synthesized)
tcatgatgttagtaacagtaatttttttcttaaattaatttacccttaagagtatgttagatttgattatctgataatgattatttaaatattcctatctgcttataaaatggctgctat

SEQ ID NO: 358605 - DNA, 120 bp, Artificial Sequence
  ENSG00000140285_12 (sequence is synthesized)
acagatgttgttatataaggtatatcagacctacaggcttctggcaggatttgtcagataatcaagccacactaactatggaaaatgagcagcattttaaatgctttctagtgaaaaatt

SEQ ID NO: 358606 - DNA, 120 bp, Artificial Sequence
  ENSG00000140285_13 (sequence is synthesized)
tcagaaaaaaaattctcaaaaaaactattatgaaagtcaataaaatagataatttaacaaaagtacaggattagaacatgcttatacctataaataagaacaaaatttctaatgctgctc

SEQ ID NO: 358607 - DNA, 120 bp, Artificial Sequence
  ENSG00000140285_14 (sequence is synthesized)
caaaatttctaatgctgctcaagtggaaagggtattgctaaaaggatgtttccaaaaatcttgtatataagatagcaacagtgattgatgataatactgtacttcatcttacttgccaca

SEQ ID NO: 358608 - DNA, 120 bp, Artificial Sequence
  ENSG00000140285_15 (sequence is synthesized)
aaataacattttataaatcctcaaagtaaaattgagaaatctttaagtttttttcaagtaacataatctatctttgtataattcatatttgggaatatggcttttaataatgttcttccc

SEQ ID NO: 358609 - DNA, 120 bp, Artificial Sequence
  ENSG00000140285_16 (sequence is synthesized)
acaaataatcatgcttttttcctatggttacagcattaaactctattttaagttgtttttgaactttattgttttgttatttaagtttatgttatttataaaaaaaaaaccttaataagc

SEQ ID NO: 358610 - DNA, 120 bp, Artificial Sequence
  ENSG00000140285_17 (sequence is synthesized)
tgtatctgtttcatatgcttttaattttaaaggaataacaaaactgtctggctcaacggcaagtttccctcccttttctgactgacactaagtctagcacacagcacttgggccagcaaa

SEQ ID NO: 358611 - DNA, 120 bp, Artificial Sequence
  ENSG00000140285_18 (sequence is synthesized)
tcctggaaggcagacaaaaataagagcctgaagcaatgcttacaatagatgtctcacacagaacaatacaaatatgtaaaaaatctttcaccacatattcttgccaattaattggatcat

SEQ ID NO: 358612 - DNA, 120 bp, Artificial Sequence
  ENSG00000140285_19 (sequence is synthesized)
caccacatattcttgccaattaattggatcatataagtaaaatcattacaaatataagtatttacaggattttaaagttagaatatatttgaatgcatgggtagaaaatatcatatttta

SEQ ID NO: 358613 - DNA, 120 bp, Artificial Sequence
  ENSG00000140285_20 (sequence is synthesized)
aatctctagaaatctctgctgttcaaaaggtggcagcactgaaagttgttttcctgttagatggcaagagcacaatgcccaaaatagaagatgcagttaagaataaggggccctgaatgt

SEQ ID NO: 358614 - DNA, 120 bp, Artificial Sequence
  ENSG00000140285_21 (sequence is synthesized)
catgaaggcttgaggtcagcctacagataacaggattattacaaggatgaatttccacttcaaaagtctttcattggcagatcttggtagcactttatatgttcaccaatgggaggtcaa

SEQ ID NO: 358615 - DNA, 120 bp, Artificial Sequence
  ENSG00000140285_22 (sequence is synthesized)
aatttcaaaatatttgtcattcaagtccctttacataaatagtatttggtaatacatttatagatgagagttatatgaaaaggctaggtcaacaaaaacaatagattcatttaattttcc

SEQ ID NO: 358616 - DNA, 120 bp, Artificial Sequence
  ENSG00000140285_23 (sequence is synthesized)
tgtggttgacctatacgaccaggatgtagaaaactagaaagaactgcccttcctcagatatactcttgggagagagcatgaatggtattctgaactatcacctgattcaaggactttgct

SEQ ID NO: 358617 - DNA, 120 bp, Artificial Sequence
  ENSG00000140285_24 (sequence is synthesized)
agctaggttttgaggtcaggcttcagtaactgtagtcttgtgagcatattgagggcagaggaggacttagtttttcatatgtgtttccttagtgcctagcagactatctgttcataatca

SEQ ID NO: 358618 - DNA, 120 bp, Artificial Sequence
  ENSG00000140285_25 (sequence is synthesized)
gttttcagtgtgaattcactgaatgtttatagacaaaagaaaatacacactaaaactaatcttcattttaaaagggtaaaacatgactatacagaaatttaaatagaaatagtgtatata

SEQ ID NO: 358619 - DNA, 120 bp, Artificial Sequence
  ENSG00000140285_26 (sequence is synthesized)
catataaaatacaagctatgttaggaccaaatgctctttgtctatggagttatacttccatcaaattacatagcaatgctgaattaggcaaaaccaacatttagtggtaaatccattcct

SEQ ID NO: 358620 - DNA, 120 bp, Artificial Sequence
  ENSG00000140285_27 (sequence is synthesized)
ggtagtataagtcacctaaaaaagacttctagaaatatgtactttaattatttgtttttctcctatttttaaatttattatgcaaattttagaaaataaaatttgctctagttacacacc

SEQ ID NO: 358621 - DNA, 120 bp, Artificial Sequence
  ENSG00000140285_28 (sequence is synthesized)
tttagaattctagaatattaaaactgtaaggggcctccatccctcttactcatttgtagtctaggaaattgagattttgatacacctaaggtcacgcagctgggtagatatacagctgtc

SEQ ID NO: 358622 - DNA, 120 bp, Artificial Sequence
  ENSG00000140285_29 (sequence is synthesized)
acaagagtctagatcagttagcacatgctttctactcttcgattattagtattattagctaatggtctttggcatgtttttgttttttatttctgttgagatatagcctttacatttgta

SEQ ID NO: 358623 - DNA, 120 bp, Artificial Sequence
  ENSG00000140285_30 (sequence is synthesized)
cacaaatgtgactatgtcttggcaatgcacttcatacacaatgactaatctatactgtgatgatttgactcaaaaggagaaaagaaattatgtagttttcaattctgattcctattcacc

SEQ ID NO: 358624 - DNA, 120 bp, Artificial Sequence
  ENSG00000140285_31 (sequence is synthesized)
ttttgtttatgaatggaaagctttgtgcaaaatatacatataagcagagtaagccttttaaaaatgttctttgaaagataaaattaaatacatgagtttctaacaattagaaaagaaaaa

SEQ ID NO: 358625 - DNA, 120 bp, Artificial Sequence
  ENSG00000140285_32 (sequence is synthesized)
aaacatgaaatgataacaaaagtaaacaaaagatactttcaaagcagtgaacaaaacattttgacataagccataatataaattataatataaaaaataaaaaccatagtataaattgtc

SEQ ID NO: 358626 - DNA, 120 bp, Artificial Sequence
  ENSG00000140285_33 (sequence is synthesized)
tgtcagcctttgagttggctacaaattcaatttaatgacagaagagaagggatgctggaggtaaattcttagggtttctatctcatagagtttgctcttctggttctctagactgccaaa

SEQ ID NO: 358627 - DNA, 120 bp, Artificial Sequence
  ENSG00000140285_34 (sequence is synthesized)
gaacataaagatgtgcgaggggacctagctgtagtaaaagcaatcctataacaagaaaaactctaaaacagtgccccttacgattttctactgaaatttctctaatagtagaggtgtaaa

SEQ ID NO: 358628 - DNA, 120 bp, Artificial Sequence
  ENSG00000140285_35 (sequence is synthesized)
ataagaagttagagaataatgcaaagggggcccaccacagacggaacatttcttttctcttaagactcatgtgatttttgcatcttactccataatatatttgtggttgcgttaatatga

SEQ ID NO: 358629 - DNA, 120 bp, Artificial Sequence
  ENSG00000140285_36 (sequence is synthesized)
caatgtctgcaattaaacaccagtaagcaaaattgatacatcagaatgacttgcagggcttatcatgcagtttggtttacatccctactccactgccatttacttgagcgtgaatgagac

SEQ ID NO: 358630 - DNA, 120 bp, Artificial Sequence
  ENSG00000140285_37 (sequence is synthesized)
acaaaagattatttgcctcccataatccaactttacacataaataacacaaggctaaagaaaaccagaactcaaattcaccacgcataggagtgataacaaaaatatttaacagtcagta

SEQ ID NO: 358631 - DNA, 120 bp, Artificial Sequence
  ENSG00000140285_38 (sequence is synthesized)
tgggtgattactggccaatcagaatacatcactgatacatcgaaatggatgcaggccactatgactaacttgtgggtatcatttctatgatcaccctaaaacagagttgggaaaatatct

SEQ ID NO: 358632 - DNA, 120 bp, Artificial Sequence
  ENSG00000140285_39 (sequence is synthesized)
attaactggtctctctggtttgaattctcaatatgtatcttaatatgaaatagctcattaaaacttcatgtgtaactatttcagcattgttgtcagctactctttattccacttctgtac

SEQ ID NO: 358633 - DNA, 120 bp, Artificial Sequence
  ENSG00000140285_40 (sequence is synthesized)
agtatttattcaaccaagctgctgctttcaatgaaggtcacttgttccttcagggacacatatactcccacctatcctttaattttgaatggtttgtcaggaaaatttactttctcttga

SEQ ID NO: 358634 - DNA, 120 bp, Artificial Sequence
  ENSG00000140285_41 (sequence is synthesized)
gttgaaaaacttgacaggaagcaagaaataatacagtcctagcctctttccaataacatctgatttctccattctcaaactacacttctcaaggaaccagatatttactctcatctggga

SEQ ID NO: 358635 - DNA, 120 bp, Artificial Sequence
  ENSG00000140285_42 (sequence is synthesized)
agatgcctcttatgttttccttttacttcctggttatcatgtggttgcattttccaagttcttatcattgaatttatgagagcctatcaaaatttattttctttcatttatattctaata

SEQ ID NO: 358636 - DNA, 120 bp, Artificial Sequence
  ENSG00000140285_43 (sequence is synthesized)
attgaaatgtgagatgaaaataacatttcacttatgaaaaacccttctcttgatgaatccttccatgtgttagttatctattgctgtgtaacaaattaaaacttaatggcttgaaacaaa

SEQ ID NO: 358637 - DNA, 120 bp, Artificial Sequence
  ENSG00000140285_44 (sequence is synthesized)
tggaaaaaaaattaaataaaatgtcacctaatttctctaaattgaactatgttgaactatgcccctaaaaatatctcttttaacagggcaaatctacttacattatagttggacctgata

SEQ ID NO: 358638 - DNA, 120 bp, Artificial Sequence
  ENSG00000140285_45 (sequence is synthesized)
atccaagccaatttgaaaatatatactccttgtcctgaaaatgctcataagttaagcaaaatgtaaataatattattcacaccaaaatgtgacttaatattgtctaagcaaaactcatta

SEQ ID NO: 358639 - DNA, 120 bp, Artificial Sequence
  ENSG00000140285_46 (sequence is synthesized)
aagctatttatcactagtttaaagagtagggaaattatttttattaatttgattttctttgaaataatattttcatgatgtaaattaaaatacttaatctgtgctaagatatgcattcct

SEQ ID NO: 358640 - DNA, 120 bp, Artificial Sequence
  ENSG00000140285_47 (sequence is synthesized)
ttaaaatacttaatctgtgctaagatatgcattcctttgcaattgtgtataatgataaaatagaagggaatctgtggtatccttattcatttgagtcataatgagcttgtattaagttga

SEQ ID NO: 358641 - DNA, 120 bp, Artificial Sequence
  ENSG00000140285_48 (sequence is synthesized)
tgacttatcaacttaggcagaaaaacagatctctcctaacgttttccttaactaaatcttttatgtcataaaagttctgtgctatcttaagaaaaatgtaaaggtgaggggaaaaaagtg

SEQ ID NO: 358642 - DNA, 120 bp, Artificial Sequence
  ENSG00000140285_49 (sequence is synthesized)
ggctggaagagatggtaattccatgtttttcaatttaaagccttacatttttcccaagaatcagttattcttcttatgttaaaatatcagggttgtgttttgcatttaatggttatgatg

SEQ ID NO: 358643 - DNA, 120 bp, Artificial Sequence
  ENSG00000140285_50 (sequence is synthesized)
aataaccaacttcaatagtattaaatgtaatggaataagatacacacctcaacatgtacattaaggatttaaaatacttagtaaaaataaattttgtttacattactagcactcagaaaa

SEQ ID NO: 358644 - DNA, 120 bp, Artificial Sequence
  ENSG00000140285_51 (sequence is synthesized)
agtcaagggagaactccaagtcagagtgagtaagtttagggcacatcgcaggttgtcaaacccaacacaaggagaagggcatggaaatcttttctgagaggaaatagcctgaaggatgaa

SEQ ID NO: 358645 - DNA, 120 bp, Artificial Sequence
  ENSG00000140285_52 (sequence is synthesized)
aggacaaaagatagaggacagatgtattatcctcagaggaaatgctttttgtagatgtttggtagtaacagtactgcaagattgggaaatgaaaagtgatttaacatctttccaagtatc

SEQ ID NO: 358646 - DNA, 120 bp, Artificial Sequence
  ENSG00000140287_0 (sequence is synthesized)
gagtgcgcaggactggcaagagggaagccgggctgctccacgcctttcacgccttccacctcctgcgtgtccatctgtgagaaggagccagagcccaagggagatgatggagcctgagga

SEQ ID NO: 358647 - DNA, 120 bp, Artificial Sequence
  ENSG00000140287_1 (sequence is synthesized)
gtacagagagagagggagagagatggtggattacatctgccagtacctgagcactgtgcgggagagacgtgtgacgccagacgtgcagcctggctacctgcgagcccagctgcctgagag

SEQ ID NO: 358648 - DNA, 120 bp, Artificial Sequence
  ENSG00000140287_2 (sequence is synthesized)
tgctcctgaggaccccgacagctgggacagcatctttggggacattgaacgaatcatcatgcctggggtggtacattggcagagcccccatatgcacgcctactacccagccctcacctc

SEQ ID NO: 358649 - DNA, 120 bp, Artificial Sequence
  ENSG00000140287_3 (sequence is synthesized)
ttggccctccctgctaggagacatgctggctgatgccatcaactgcttgggattcacctgggcatccagccctgcgtgtacagagctggagatgaacgtcatggactggttggcaaaaat

SEQ ID NO: 358650 - DNA, 120 bp, Artificial Sequence
  ENSG00000140287_4 (sequence is synthesized)
gctgggacttccagagcacttcttgcaccaccaccccagcagccagggcggaggcgtcctgcagagcacggtcagtgaatccactttgattgccctgctggcagcaaggaagaacaaaat

SEQ ID NO: 358651 - DNA, 120 bp, Artificial Sequence
  ENSG00000140287_5 (sequence is synthesized)
cctggaaatgaaaacgtctgagcccgatgctgatgagtcctgcctaaatgcccgactcgtggcctatgcctctgaccaggctcactcctctgtggaaaaggctggtttgatttcccttgt

SEQ ID NO: 358652 - DNA, 120 bp, Artificial Sequence
  ENSG00000140287_6 (sequence is synthesized)
gaagatgaaatttctgcctgtggatgacaacttctcactccgaggggaagctcttcagaaggccatcgaggaagacaagcagcggggcttggtgcccgtctttgtctgtgcaacactagg

SEQ ID NO: 358653 - DNA, 120 bp, Artificial Sequence
  ENSG00000140287_7 (sequence is synthesized)
gaccactggggtctgtgcatttgactgcctgtcagagctgggccccatctgtgcccgtgaggggctgtggctccacatcgatgctgcttatgcaggcactgccttcctgtgccccgagtt

SEQ ID NO: 358654 - DNA, 120 bp, Artificial Sequence
  ENSG00000140287_8 (sequence is synthesized)
ccgggggtttctgaaggggattgagtatgccgactccttcacctttaatccttccaagtggatgatggtgcattttgactgtactgggttctgggtcaaggacaagtacaagctgcagca

SEQ ID NO: 358655 - DNA, 120 bp, Artificial Sequence
  ENSG00000140287_9 (sequence is synthesized)
gaccttcagtgtgaatcccatctacctcaggcatgccaactcaggcgtggccaccgacttcatgcactggcagatccccctgagccgacggtttcgctctgttaaactctggttcgtgat

SEQ ID NO: 358656 - DNA, 120 bp, Artificial Sequence
  ENSG00000140287_10 (sequence is synthesized)
ccttcggggtgaagaatcttcaagcacatgtcagacatggtactgaaatggctaaatattttgaatctctggtcagaaacgacccttcctttgaaattcctgccaagaggcaccttggcc

SEQ ID NO: 358657 - DNA, 120 bp, Artificial Sequence
  ENSG00000140287_11 (sequence is synthesized)
tggtggtttttcgtctaaagggtcctaattgtctcacagaaaatgtgttaaaggaaatagctaaagctggccgtctcttcctcatcccggccactatccaggacaagttaatcatccgtt

SEQ ID NO: 358658 - DNA, 120 bp, Artificial Sequence
  ENSG00000140287_12 (sequence is synthesized)
tcactgtgacatcccagtttaccactagggatgacatcctgagagactggaatctcattcgagatgctgccactctcatcctgagtcagcactgtacttcccaacccagccctcgggttg

SEQ ID NO: 358659 - DNA, 120 bp, Artificial Sequence
  ENSG00000140287_13 (sequence is synthesized)
ggaacctcatctcccaaatcaggggtgccagagcctgggcctgtggaacgtcccttcagtctgtcagtggggcaggagatgatccagtccaggccaggaagatcatcaagcagcctcagc

SEQ ID NO: 358660 - DNA, 120 bp, Artificial Sequence
  ENSG00000140287_14 (sequence is synthesized)
gtgtgggagccggtcccatgaaaagggaaaatggcctccatcttgaaaccctgctggacccagttgatgactgcttttcagaagaggccccagatgccaccaagcacaagctgtcctcct

SEQ ID NO: 358661 - DNA, 120 bp, Artificial Sequence
  ENSG00000140287_15 (sequence is synthesized)
tcctgttcagttacttgtctgtgcagactaagaagaagacggtgcgctccctcagttgcaacagtgtgccagtgagtgctcagaagccactgcccacagaggcctctgtgaagaatgggg

SEQ ID NO: 358662 - DNA, 120 bp, Artificial Sequence
  ENSG00000140287_16 (sequence is synthesized)
gctcctccagggtcagaatcttttccaggtttccagaagacatgatgatgctgaagaaaagtgccttcaaaaaactcatcaaattctacagcgtccccagctttcctgaatgcagctctc

SEQ ID NO: 358663 - DNA, 120 bp, Artificial Sequence
  ENSG00000140287_17 (sequence is synthesized)
aatgtggactccagctgccctgttgccctctgcaggccatggtttagacacagggccttcagccagagtctgaggatatacttcagggactctgtgaacccctcacaattgtatgccaac

SEQ ID NO: 358664 - DNA, 120 bp, Artificial Sequence
  ENSG00000140287_18 (sequence is synthesized)
tttgtgtgcttatgtgtacatgcatttttcttggggcgagttcataattttaatcaaattctcataggggttcatgacccacaataggatacaaacgaagagtttaagccagcatgatcc

SEQ ID NO: 358665 - DNA, 120 bp, Artificial Sequence
  ENSG00000140287_19 (sequence is synthesized)
agatgggttcagcagtctggtcagtgagaaagggccgagggtagacaggcagcttctgtggttcagcttgtgacatgatatataacacagaaataaattatgcttgtccctgaaacaaaa

SEQ ID NO: 358666 - DNA, 120 bp, Artificial Sequence
  ENSG00000140287_20 (sequence is synthesized)
aatgcaggctatatccaaaatacagtgtgaattaggctagaatagaaatgctttctattctaccttcagaaaaggaaaagggtagggtaggggaaatcatgggagagattaaaggcagag

SEQ ID NO: 358667 - DNA, 120 bp, Artificial Sequence
  ENSG00000140287_21 (sequence is synthesized)
aggaaacccagatgggactgtttaatccccaagcaagaaaccactaggaaagagagataccttccctctaacttttgtattcggtgcactgacattgctctctgtgctggtgggaaattg

SEQ ID NO: 358668 - DNA, 120 bp, Artificial Sequence
  ENSG00000140287_22 (sequence is synthesized)
atttctgtgccaggatgttctaggctgaggccaagagggtgctggccctttacccagtggaagaaaaaggcaagggtgaggctttgtagactttcccattcggaggtaatgatgcctcct

SEQ ID NO: 358669 - DNA, 120 bp, Artificial Sequence
  ENSG00000140287_23 (sequence is synthesized)
tcagccccacttcttcaaactgactccacctgctcccatctccacacccctccgtttctcatttagccaaagcacatcatccttgcagcccaccactcagcttggccaggtgcgagacat

SEQ ID NO: 358670 - DNA, 120 bp, Artificial Sequence
  ENSG00000140287_24 (sequence is synthesized)
gtctgtgcatttgactgcctgtcagagctgggccccatctgtaagtatcttccctctgtggctaggaagacaaggaatacatttttaaatgtctcctaaagcaaggacctgaaaccagct

SEQ ID NO: 358671 - DNA, 120 bp, Artificial Sequence
  ENSG00000140287_25 (sequence is synthesized)
ctatgggattattcttgttcctctttggtcaatgcagagacatgggaagaaccaccaaaggtcatgagggtctcttccagggatccctggacattgcctttcccagtggtgtgacaagag

SEQ ID NO: 358672 - DNA, 120 bp, Artificial Sequence
  ENSG00000140287_26 (sequence is synthesized)
tcttttacggcatccacctggaggctgcctgcaggcttgggttgctaagtgcactgcttaatttagaagcgccttttatcctggctctcttgaccagtcaaagttgtggtcgctgttttc

SEQ ID NO: 358673 - DNA, 120 bp, Artificial Sequence
  ENSG00000140287_27 (sequence is synthesized)
tgtgaggaaggaattttggcagaattcaggtaagtaacatgctgcacacaaaagcagaaaggtcctcccatacagtattttacacatcatgaggtgctatccataggtgtgttatggaat

SEQ ID NO: 358674 - DNA, 120 bp, Artificial Sequence
  ENSG00000140287_28 (sequence is synthesized)
aaattttgtgggtcataaccagcattaaaaagaaatatagtataaaatattagagtgcacacatatagccagagtatgtattgttttatgaaacttttttttcaaatacacacgtataca

SEQ ID NO: 358675 - DNA, 120 bp, Artificial Sequence
  ENSG00000140287_29 (sequence is synthesized)
tgtactagattgttatataaaatgtgtttcttacgagccatggtaaaacacagtctgaaatatacactgttctggtgggatggatgggagtagatcacgtctgtggtgaaatctttctca

SEQ ID NO: 358676 - DNA, 120 bp, Artificial Sequence
  ENSG00000140297_0 (sequence is synthesized)
gagtcagagcctcttctctctaagtcacgggaactgcccttgctacttgtgacctgccctttactcagcagtttttgttctgggaagccctgggattctgctaatacctatcactgtagg

SEQ ID NO: 358677 - DNA, 120 bp, Artificial Sequence
  ENSG00000140297_1 (sequence is synthesized)
tgctgaagggaaacagatgaagaacatgacctcaaggagcttcctgtcaatgagaagaccaagctgacgcctggcaaagatattaaagaggagcctgaaactgttccttggacatcttat

SEQ ID NO: 358678 - DNA, 120 bp, Artificial Sequence
  ENSG00000140297_2 (sequence is synthesized)
gaatgtcagaaaataccttttggagggttagaagatcaggggacatggttgttcacatttgctgccacggaacaccgccagtcttcacttggaaacagaatcacgccttgtgaagagatc

SEQ ID NO: 358679 - DNA, 120 bp, Artificial Sequence
  ENSG00000140297_3 (sequence is synthesized)
atccctaagcaggagagaagctactaaaggattgtgtcctcctccaccttccctgtgctcggtctccacctgtctcccattctgtgacgatggttcaatggaagagactctgccagctgc

SEQ ID NO: 358680 - DNA, 120 bp, Artificial Sequence
  ENSG00000140297_4 (sequence is synthesized)
attacttgtgggctctgggctgctatatgctgctggccactgtggctctgaaactttctttcaggttgaagtgtgactctgaccacttgggtctggagtccagggaatctcaaagccagt

SEQ ID NO: 358681 - DNA, 120 bp, Artificial Sequence
  ENSG00000140297_5 (sequence is synthesized)
actgtaggaatatcttgtataatttcctgaaacttccagcaaagaggtctatcaactgttcaggggtcacccgaggggaccaagaggcagtgcttcaggctattctgaataacctggagg

SEQ ID NO: 358682 - DNA, 120 bp, Artificial Sequence
  ENSG00000140297_6 (sequence is synthesized)
tcaagaagaagcgagagcctttcacagacacccactacctctccctcaccagagactgtgagcacttcaaggctgaaaggaagttcatacagttcccactgagcaaagaagaggtggagt

SEQ ID NO: 358683 - DNA, 120 bp, Artificial Sequence
  ENSG00000140297_7 (sequence is synthesized)
tccctattgcatactctatggtgattcatgagaagattgaaaactttgaaaggctactgcgagctgtgtatgcccctcagaacatatactgtgtccatgtggatgagaagtccccagaaa

SEQ ID NO: 358684 - DNA, 120 bp, Artificial Sequence
  ENSG00000140297_8 (sequence is synthesized)
ctttcaaagaggcggtcaaagcaattatttcttgcttcccaaatgtcttcatagccagtaagctggttcgggtggtttatgcctcctggtccagggtgcaagctgacctcaactgcatgg

SEQ ID NO: 358685 - DNA, 120 bp, Artificial Sequence
  ENSG00000140297_9 (sequence is synthesized)
aagacttgctccagagctcagtgccgtggaaatacttcctgaatacatgtgggacggactttcctataaagagcaatgcagagatggtccaggctctcaagatgttgaatgggaggaata

SEQ ID NO: 358686 - DNA, 120 bp, Artificial Sequence
  ENSG00000140297_10 (sequence is synthesized)
gcatggagtcagaggtacctcctaagcacaaagaaacccgctggaaatatcactttgaggtagtgagagacacattacacctaaccaacaagaagaaggatcctcccccttataatttaa

SEQ ID NO: 358687 - DNA, 120 bp, Artificial Sequence
  ENSG00000140297_11 (sequence is synthesized)
ctatgtttacagggaatgcgtacattgtggcttcccgagatttcgtccaacatgttttgaagaaccctaaatcccaacaactgattgaatgggtaaaagacacttatagcccagatgaac

SEQ ID NO: 358688 - DNA, 120 bp, Artificial Sequence
  ENSG00000140297_12 (sequence is synthesized)
acctctgggccacccttcagcgtgcacggtggatgcctggctctgttcccaaccaccccaagtacgacatctcagacatgacttctattgccaggctggtcaagtggcagggtcatgagg

SEQ ID NO: 358689 - DNA, 120 bp, Artificial Sequence
  ENSG00000140297_13 (sequence is synthesized)
gagacatcgataagggtgctccttatgctccctgctctggaatccaccagcgggctatctgcgtttatggggctggggacttgaattggatgcttcaaaaccatcacctgttggccaaca

SEQ ID NO: 358690 - DNA, 120 bp, Artificial Sequence
  ENSG00000140297_14 (sequence is synthesized)
agtttgacccaaaggtagatgataatgctcttcagtgcttagaagaatacctacgttataaggccatctatgggactgaactttgagacacactatgagagcgttgctacctgtggggca

SEQ ID NO: 358691 - DNA, 120 bp, Artificial Sequence
  ENSG00000140297_15 (sequence is synthesized)
agagcatgtacaaacatgctcagaacttgctgggacagtgtgggtgggagaccagggctttgcaattcgtggcatcctttaggataagagggctgctattagagtgtgggtaagtagatc

SEQ ID NO: 358692 - DNA, 120 bp, Artificial Sequence
  ENSG00000140297_16 (sequence is synthesized)
ttttgccttgcaaattgctgcctgggtgaatgctgcttgttctctcacccctaaccctagtagttcctccactaactttctcactaagtgagaatgagaactgctgtgatagggagagtg

SEQ ID NO: 358693 - DNA, 120 bp, Artificial Sequence
  ENSG00000140297_17 (sequence is synthesized)
aaggagggatatgtggtagagcacttgatttcagttgaatgcctgctggtagcttttccattctgtggagctgccgttcctaataattccaggtttggtagcgtggaggagaactttgat

SEQ ID NO: 358694 - DNA, 120 bp, Artificial Sequence
  ENSG00000140297_18 (sequence is synthesized)
ggaaagagaaccttcccttctgtactgttaacttaaaaataaatagctcctgattcaaagtattacctctactttttgcctagtatgccagaaataatataaatataaacagataaagtg

SEQ ID NO: 358695 - DNA, 120 bp, Artificial Sequence
  ENSG00000140297_19 (sequence is synthesized)
tgtgagactttttctcataactattcatgacatttaaaatccctaggggctggcaagagagttctcattattctgaaatggtcctgacaagctgcatgaatagcaattttttttttgaga

SEQ ID NO: 358696 - DNA, 68 bp, Artificial Sequence
  ENSG00000140297_20 (sequence is synthesized)
caccatatccgaaatgctgggattacaggtgggaactactgcgcctggcctacaaatagcaaattcta

SEQ ID NO: 358697 - DNA, 120 bp, Artificial Sequence
  ENSG00000140297_21 (sequence is synthesized)
gtgggaactactgcgcctggcctacaaatagcaaattctaacgaagacaggggaacagggatggttcttccattgttaaaagccatcctcattttgtttatattgccaggtttgtgattt

SEQ ID NO: 358698 - DNA, 120 bp, Artificial Sequence
  ENSG00000140297_22 (sequence is synthesized)
ttctgtaaaggaaaaggcagggtgatttaaccagtttgaccacctttcctgtactcttacaggaaaatcgcagcactaattctaattttgtccactttacagccaaagcttagctaatgt

SEQ ID NO: 358699 - DNA, 120 bp, Artificial Sequence
  ENSG00000140297_23 (sequence is synthesized)
tccataaaggagataatagccaatcaggtaaggtaatgtgtaattcattattcaaagtggaacatgtttttgtagggggagagtctgcactattaataattgtattgagaaataaaaata

SEQ ID NO: 358700 - DNA, 120 bp, Artificial Sequence
  ENSG00000140297_24 (sequence is synthesized)
actattaataattgtattgagaaataaaaataaactaggactattcagttaaaccaggatgtcttattattccatgtttaggcctcttgagtcaaaactctttttttttttttttttttt

SEQ ID NO: 358701 - DNA, 120 bp, Artificial Sequence
  ENSG00000140297_25 (sequence is synthesized)
tgtgagccaccatgcctggtcccctcttgagtcaaaactcttatttcagaatgcgaatggaaggatcgctattagtgattctgcagattacacatttccttgcggggagacaataaggta

SEQ ID NO: 358702 - DNA, 120 bp, Artificial Sequence
  ENSG00000140297_26 (sequence is synthesized)
tgtgtaaatacatatatgtgtgtgtatgtatacacacatacagcacgctacctcccaagtgttacctagtgaaacagtttcctttccgaagctccagagatggttgttggctaagttata

SEQ ID NO: 358703 - DNA, 120 bp, Artificial Sequence
  ENSG00000140297_27 (sequence is synthesized)
ctcttctgtgatgggcaagggatactataaaaacataggcagtgccctttgaatatagtacagctcatcttctgcatacgatatgccctggaaaggtgatttatatgcaagttaattggt

SEQ ID NO: 358704 - DNA, 120 bp, Artificial Sequence
  ENSG00000140297_28 (sequence is synthesized)
gccctggaaaggtgatttatatgcaagttaattggtgtaatctgaaggatgctcccattaatacgtcatgatgtcattaatatgtttcttcctttctgatttttgttttttttttttttt

SEQ ID NO: 358705 - DNA, 120 bp, Artificial Sequence
  ENSG00000140297_29 (sequence is synthesized)
ctaccgcacccagccctttctgagtgttgtcattcaattcatcaagttttctgtcatgatcaactttctctatgcaaaccctgtaactctgacagttatcactgtgtctgacacagtgaa

SEQ ID NO: 358706 - DNA, 67 bp, Artificial Sequence
  ENSG00000140297_30 (sequence is synthesized)
ctgtaactctgacagttatcactgtgtctgacacagtgaattttttatttataaggtagttactttt

SEQ ID NO: 358707 - DNA, 120 bp, Artificial Sequence
  ENSG00000140297_31 (sequence is synthesized)
cactgcactccagcctgggcgatagagccagactgagtctcaaaaaaaaaaaaaaagttacctttttttggtaaggttgtacttcttagataatggtcattgtcactaccaacttgcctg

SEQ ID NO: 358708 - DNA, 120 bp, Artificial Sequence
  ENSG00000140297_32 (sequence is synthesized)
atggtcattgtcactaccaacttgcctgcattgtaatagagtcctattcactttgctcccaaccccactacggagatgactgatgactagttgtatacacagtgggtgtgccctgagagg

SEQ ID NO: 358709 - DNA, 120 bp, Artificial Sequence
  ENSG00000140297_33 (sequence is synthesized)
tctgttgccagcagtggtgatcgatcacggcctccccctgctggctgatgtgatggtccttggtcctcctctgaaggaggtagaaggggcacacggccaccgtgggaagtaggcagaaaa

SEQ ID NO: 358710 - DNA, 120 bp, Artificial Sequence
  ENSG00000140297_34 (sequence is synthesized)
gcctccctgggtgcagattctctgagaaaagaactttggcctcatagttaacttactccaaaagctttcatgtgaaataatttataattttttatataaataaaaagattaaaatgtgaa

SEQ ID NO: 358711 - DNA, 120 bp, Artificial Sequence
  ENSG00000140297_35 (sequence is synthesized)
gagaatgtttctgcatgatttctctgagcttgctgtcttacctgagagcaggaagtcaaaaggagagtgatggagccacctgctgccctctactttgcagatattaaagaggagcctgaa

SEQ ID NO: 358712 - DNA, 120 bp, Artificial Sequence
  ENSG00000140297_36 (sequence is synthesized)
attgtgactcgaggctcaggccactgtgttggaccttcagctcagtggttcctgcttctcctgttgtttgtctggctgatctctgctcacccatcaagtattagcctaaatgccacttcc

SEQ ID NO: 358713 - DNA, 120 bp, Artificial Sequence
  ENSG00000140297_37 (sequence is synthesized)
tccaggatgtcttcccggaacccaagcttcccacagtttatgtcttcttgctgcaggaaccattgccggaaggtactgagaactaaatcagtctgttcaacctcccacctgtgcagtttt

SEQ ID NO: 358714 - DNA, 120 bp, Artificial Sequence
  ENSG00000140297_38 (sequence is synthesized)
aaaggctttcaagttcttgcgtgagcactgacaggcttttatgaatagttggtgacacaggtacaaactgggctgttctggctgaaatatctgtttgccttgtcggatattgccagcatt

SEQ ID NO: 358715 - DNA, 120 bp, Artificial Sequence
  ENSG00000140297_39 (sequence is synthesized)
gagaccagatgagccagtttatcaatctggatggtgcctctcaagggctggggctgcaaaacatctcagagtttgactctttgcttcgacactaccgtctgcaagttcttgtgctagccg

SEQ ID NO: 358716 - DNA, 120 bp, Artificial Sequence
  ENSG00000140297_40 (sequence is synthesized)
aggttattcatgcctcttgcaaaccacgtttctgcttaaactctgccaataaagggcactggagggagacagccggctggaggagggacttcctgtttgcttcctatctgcttcctggtt

SEQ ID NO: 358717 - DNA, 120 bp, Artificial Sequence
  ENSG00000140297_41 (sequence is synthesized)
ctatattaaagaggagcctgaaactgttccttggacatcttatgaatgtcagaaaataccttttggagggttagaagatcaggggacatggttgttcacatttgctgccacggaacaccg

SEQ ID NO: 358718 - DNA, 120 bp, Artificial Sequence
  ENSG00000140297_42 (sequence is synthesized)
ctttgagtgcagagaggatgtggagctctaaggaggaacctacaggctgtccctgtctttcagcaaattgcatccagtctgagcttcactttgcaaccctgattagaaaccagtttgatc

SEQ ID NO: 358719 - DNA, 120 bp, Artificial Sequence
  ENSG00000140297_43 (sequence is synthesized)
acactgggtctttcaaccgtttgtctgtggctagagttcataacttcatctttgttaagagcccactacctagaacatttatttaatgttagagctcaaaacaccctacctcccctctcc

SEQ ID NO: 358720 - DNA, 120 bp, Artificial Sequence
  ENSG00000140297_44 (sequence is synthesized)
agttgttccttttctcctggggtggaggtggatccagatccagacttgagtgtggtcggctagtttgtagggtcagattacagatctccatcaacaaaccagatgtaaggggcttctagg

SEQ ID NO: 358721 - DNA, 120 bp, Artificial Sequence
  ENSG00000140297_45 (sequence is synthesized)
attttacttgcagtgtgggcagctggactggagtggagaattttaccctgtgcctccctggcagggagagaagagaagaggcccatgactggctcctacagagtttgactctttgcttcg

SEQ ID NO: 358722 - DNA, 120 bp, Artificial Sequence
  ENSG00000140297_46 (sequence is synthesized)
ttccttgagtcaacaatcttctcactaaagatcaattactacaccgtgctgaagtgtgagggaaaatcctcaaaaactactgcaataaacaaggccaatctgctacttctcatccactga

SEQ ID NO: 358723 - DNA, 120 bp, Artificial Sequence
  ENSG00000140299_0 (sequence is synthesized)
ctgtttgtatttggcagtttggccccccaccccgtcgcttttccgtttctggtagttgtgctcgggatggaaccttgcccctcctccgctcccccacccttttaccctggtgtgggtgaa

SEQ ID NO: 358724 - DNA, 120 bp, Artificial Sequence
  ENSG00000140299_1 (sequence is synthesized)
gtggctgggctacgatggttcagtatttatgaccagcgtccgtcctggtacagaacaaagaaacttggacttctggacattggctccctggattatcaagagtttgtagttgacattgaa

SEQ ID NO: 358725 - DNA, 120 bp, Artificial Sequence
  ENSG00000140299_2 (sequence is synthesized)
tccaggctgaggatggaaggtgtggaacttaaagaagaatggcaagatgaagattttccgatacctttaccagaagatgatagtattgaagcagatatactagctataactggaccagag

SEQ ID NO: 358726 - DNA, 120 bp, Artificial Sequence
  ENSG00000140299_3 (sequence is synthesized)
gaccagcctggctcactagaagttaatggaaataaagtgagaaagaaactaatggctccagacattagcctgacactggatcctagtgatggctctgtattgtcagatgatttggatgaa

SEQ ID NO: 358727 - DNA, 120 bp, Artificial Sequence
  ENSG00000140299_4 (sequence is synthesized)
agtggggagattgacttagatggcttagacacaccgtcagagaatagtaatgagtttgagtgggaagatgatcttccaaaacccaagactactgaagtaattaggaaaggctcaattact

SEQ ID NO: 358728 - DNA, 120 bp, Artificial Sequence
  ENSG00000140299_5 (sequence is synthesized)
gaatacacagcagcagaggaaaaagaagatggacgacgctggcgtatgttcaggattggagaacaggaccacagggttgatatgaaggcaattgaaccctataaaaaagttatcagccat

SEQ ID NO: 358729 - DNA, 120 bp, Artificial Sequence
  ENSG00000140299_6 (sequence is synthesized)
cagcctaactatagatacctgatggacaatctttttaaatatgttattggcactttggagctattagtagcagaaaactacatgatagtttatttaaatggtgcaacaactcgaagaaaa

SEQ ID NO: 358730 - DNA, 120 bp, Artificial Sequence
  ENSG00000140299_7 (sequence is synthesized)
atgcccagtctgggatggctcaggaaatgttatcagcaaattgatagaaggttacggaaaaatctaaaatccctaatcattgtacatccttcttggtttatcagaacacttctggctgtt

SEQ ID NO: 358731 - DNA, 120 bp, Artificial Sequence
  ENSG00000140299_8 (sequence is synthesized)
acaagaccatttattagctcgaaattcagccaaaaaattagatacgtgtttaatttggcagaactagcagaacttgtccccatggaatacgttggcataccagaatgcataaaacaagtt

SEQ ID NO: 358732 - DNA, 120 bp, Artificial Sequence
  ENSG00000140299_9 (sequence is synthesized)
gatcaagaacttaatggaaaacaagatgaaccgaaaaatgaacagtaagtttggcatctagtccaaacaagactgaagaatgtgctgatggagcagtgctgtttctgcattcataatgca

SEQ ID NO: 358733 - DNA, 120 bp, Artificial Sequence
  ENSG00000140299_10 (sequence is synthesized)
tttattggcccatatttttatgtaacctgttacaaaatagacttgactttttcataatggacttttgtattatacaagggactgttcactgctgtactggtttgcaaatttcttgaattt

SEQ ID NO: 358734 - DNA, 120 bp, Artificial Sequence
  ENSG00000140299_11 (sequence is synthesized)
agctctttaatagctaactgtattattatcgttttatattttatattgctaaatagagaaccacactttatataaagtagtttttgcatttgtttattgaatgatgcatcttcttcggtg

SEQ ID NO: 358735 - DNA, 120 bp, Artificial Sequence
  ENSG00000140299_12 (sequence is synthesized)
actgtgtccgggtcagctgctgccgccgacgccgtaccgctgcggccgggggattgggccggggtctccaccgccgaccgaggggagcgggctccgctcggccctgctttttgcgacctg

SEQ ID NO: 358736 - DNA, 120 bp, Artificial Sequence
  ENSG00000140299_13 (sequence is synthesized)
caatattttttaatgtgtacctgtcttatggaagaaatatgcaggtatataagaccacgattttctaaagtgcatattagaatttttgtttttgtaaatggttaaatacatttcctgggt

SEQ ID NO: 358737 - DNA, 120 bp, Artificial Sequence
  ENSG00000140299_14 (sequence is synthesized)
aacttaggaaattaagtttttcataaggcaacagatggttaaactgattgtcatgaatacccaaagatcatgtatataatcgaagtgtattagtaccatcccaaggtttttttctcattt

SEQ ID NO: 358738 - DNA, 120 bp, Artificial Sequence
  ENSG00000140299_15 (sequence is synthesized)
aacatatttgtttcataattcagcaagtacagatgcaagcgcattgcacactttttcctttctaaacttaaagacaagtcaaaaagccattcttagaactagaggatttaagagggtagg

SEQ ID NO: 358739 - DNA, 120 bp, Artificial Sequence
  ENSG00000140299_16 (sequence is synthesized)
aattagggtttgtatatatgtatatatgggacattttatcttctggcccaaagtcagaactttataaaaatcttgagtttgttcactaatgtgaaataagctatgtgtccagggtattgc

SEQ ID NO: 358740 - DNA, 120 bp, Artificial Sequence
  ENSG00000140299_17 (sequence is synthesized)
tcccctgagtgtatatgagtgctgagtagtattgcagagaatgtgatgagttattcactgtcacaactttttctatagaaaacaggggctgctttttaaactctcactatgggcacttta

SEQ ID NO: 358741 - DNA, 120 bp, Artificial Sequence
  ENSG00000140299_18 (sequence is synthesized)
ccaaaatacttccatatcaattatttgaactcggtagttgtttgacctagttagatgtggtgtttattcaagtttgtatgaaatcatgtttgacaatactgtaaattaggttaattttgt

SEQ ID NO: 358742 - DNA, 120 bp, Artificial Sequence
  ENSG00000140299_19 (sequence is synthesized)
aagtcttagcatcatcatattgtgctgttttggataacacgtttgttacaagcatttaaactgtttcatttggtagtacctttacattgaaataaattgtgtttgtgcctccaaacaaaa

SEQ ID NO: 358743 - DNA, 120 bp, Artificial Sequence
  ENSG00000140299_20 (sequence is synthesized)
agtttaattaccgacaaaattatttctaaaacaacagattgatctgatattgtgtcatatacttgaaaggctcatacacagctggtaagcataataccttccaaatttgaaggtcatggc

SEQ ID NO: 358744 - DNA, 120 bp, Artificial Sequence
  ENSG00000140299_21 (sequence is synthesized)
tactcttcaacccttcctgtaaggtattttacaaaacagtggcctagagtagcaaaattgaagtggatgtgagctaacctttcaagatttagtctatcctagattgaacacacatgtggc

SEQ ID NO: 358745 - DNA, 120 bp, Artificial Sequence
  ENSG00000140299_22 (sequence is synthesized)
tgtgaccattctcatgtacttacaaaccttctgttacaaaagggaactttcctatattttttgtcctcctcagtcctaaacttggcatgctaacttaaaaccagttataggagagagatg

SEQ ID NO: 358746 - DNA, 120 bp, Artificial Sequence
  ENSG00000140299_23 (sequence is synthesized)
ctggaggattcccaggatgaaacattcctcagcagcctcctgacttaactcagatccagcagctcttggcagatcctgaactaatgtcattacagtgaattgagccaaaacgattattgc

SEQ ID NO: 358747 - DNA, 120 bp, Artificial Sequence
  ENSG00000140299_24 (sequence is synthesized)
ttgctcacattttaggaacacttgttgttgaagaagcaaactaacaataacaagttaggcattccttctgaatttaccatataaggattatgtataaacaattatattgaatttgtcatt

SEQ ID NO: 358748 - DNA, 120 bp, Artificial Sequence
  ENSG00000140299_25 (sequence is synthesized)
gttcttcagtttaaaaaatatgaagaataacttcaactcttttttgcattattttgatttttgattttgcagtcattgctcctaactgtagatacatgttgcaaaagtgatgtttttctg

SEQ ID NO: 358749 - DNA, 120 bp, Artificial Sequence
  ENSG00000140299_26 (sequence is synthesized)
aattttttttaaaagtagaagactattctgttaaacattaaaattcagagacaacagtgataacacctgggatataatgaaaatgaggtgctgtgaatcagtaaactaaagggatacctg

SEQ ID NO: 358750 - DNA, 120 bp, Artificial Sequence
  ENSG00000140299_27 (sequence is synthesized)
ctttaacctgcaccttaatggaatctggtatagagatgtacccacaataaatgttttataagatttaagatcataatagtaggttagaggaagagcatttattaagtctgttgtttctaa

SEQ ID NO: 358751 - DNA, 120 bp, Artificial Sequence
  ENSG00000140299_28 (sequence is synthesized)
tctatagctaagttaacatttcccatattattccattttaatttcccattactgaccaaggtgaaagtatatgtgattgtacttttatctttctgttgggatcatggatctaatttaact

SEQ ID NO: 358752 - DNA, 120 bp, Artificial Sequence
  ENSG00000140299_29 (sequence is synthesized)
ggcttaatttgatgcttctgtcactaggctctaagtgccccttttttagtcagaagtttttcatgtgaaataatttgattctgtgttctgcttgatcatactcctaagcaagcaccaagg

SEQ ID NO: 358753 - DNA, 120 bp, Artificial Sequence
  ENSG00000140299_30 (sequence is synthesized)
gaagacgttctattcaccccacaatttaagcttaacaatctttaactcagagggagatatgaagaaatatgattctaagtagggtctagcagaggcattggaaagtgataaaagtaggaa

SEQ ID NO: 358754 - DNA, 120 bp, Artificial Sequence
  ENSG00000140299_31 (sequence is synthesized)
gtaagagaaagcaaacctttataaagagataaagacatagttgttacctaagatgccactgtatgtgtgccctctctttttttttttttttttttggagacagagactcactctgtcacc

SEQ ID NO: 358755 - DNA, 120 bp, Artificial Sequence
  ENSG00000140299_32 (sequence is synthesized)
cacgcccggccatgtgtgtccttttaagggaagtaccatatgtgactgctgatggtaacatttcttgtatgcagcaggaaaacctgcaggctatacgcaaggtatgtgaataaagactgt

SEQ ID NO: 358756 - DNA, 120 bp, Artificial Sequence
  ENSG00000140299_33 (sequence is synthesized)
ggattgaagggggaaaagttgataatacatacccatgataagaattcatattttctctttctttgtctcttcatacagaagcaagttcgagcagagaaggttagcagttacagcacttaa

SEQ ID NO: 358757 - DNA, 120 bp, Artificial Sequence
  ENSG00000140299_34 (sequence is synthesized)
aagtttaggattgagggtttttggttggtttttttgttttttcatatttcactgttgctgaacattgatttagtcttccaaaatggacatcactagtaagtgcactgaatactgaaatat

SEQ ID NO: 358758 - DNA, 120 bp, Artificial Sequence
  ENSG00000140299_35 (sequence is synthesized)
gctgattggcaagcatatatctgtagctagaatttttttaaccgtaattccagaatttaaaaaggtaagagatctgctttttgatagaggccttttaaaaagactatataacatttctat

SEQ ID NO: 358759 - DNA, 120 bp, Artificial Sequence
  ENSG00000140299_36 (sequence is synthesized)
ttggctgtttatgtgaatgctcagggaatttggacatgtgttttatacagaagtggctttttatatttcttcaagtgataaattagcattaggacatatcagatagaacaggccagtttc

SEQ ID NO: 358760 - DNA, 120 bp, Artificial Sequence
  ENSG00000140299_37 (sequence is synthesized)
ctgatgagattggtagagatgttacggtaggttcatccttcctttttccatgttatatgtggagaagtgttaaacttgctcaagcaaatgggagtaggagataggctgaaaatagagatt

SEQ ID NO: 358761 - DNA, 120 bp, Artificial Sequence
  ENSG00000140299_38 (sequence is synthesized)
gctacaccattctattttgttttcatgcctgttttttctccaatcctatatggacatttgagaaatggaccacaaatctgagagggatagagtaaaaagaggcattaatgtatgtactca

SEQ ID NO: 358762 - DNA, 120 bp, Artificial Sequence
  ENSG00000140299_39 (sequence is synthesized)
caagttagacctattttgctgttaaaataggtctggtcttgttataggtcataggaattgtgtagtttgagttgctgcgagaaagagtcaagaacttagacttgaatgggaaggccaact

SEQ ID NO: 358763 - DNA, 120 bp, Artificial Sequence
  ENSG00000140299_40 (sequence is synthesized)
ggtgagggaagtggggtattatctactcaaatgttctaagctaatacaaaagaattacctggcaagcatccccctctgcccttcttgaaattctgaatgaacttagaatcagatcaatgg

SEQ ID NO: 358764 - DNA, 120 bp, Artificial Sequence
  ENSG00000140299_41 (sequence is synthesized)
tgagacccagttatgtaactttcctttgaagttctaaaggataattgaaaataaagtagtctggcatgtttaacagtaaggagtgacactaaaatttgaatataacagtatgttgcaact

SEQ ID NO: 358765 - DNA, 120 bp, Artificial Sequence
  ENSG00000140299_42 (sequence is synthesized)
atttataatagacctatttatgttttgagaactaagtaaaatgctatgaaaaattcacataaagcacgtaagcaccaaatgaaaatcatttcgtgctttcaaattaatgatactaggctt

SEQ ID NO: 358766 - DNA, 120 bp, Artificial Sequence
  ENSG00000140299_43 (sequence is synthesized)
gtaggatgtcttagaatcatgtttaacaagaagttaaaatatttgcattttgaaatttttatgcagtttggctaaggaggaacttggaaaataacattcatcagcttctacactgcactt

SEQ ID NO: 358767 - DNA, 120 bp, Artificial Sequence
  ENSG00000140299_44 (sequence is synthesized)
tttgtatgtggactttgtaaagtttaatgtccgtttaacagttgcttgtttatttgtgtaaacctagctagtaaatattgatgatgttcagggccactgacttgcacagcccttggagca

SEQ ID NO: 358768 - DNA, 120 bp, Artificial Sequence
  ENSG00000140299_45 (sequence is synthesized)
ctattcacacagaacacaattcagagtttgttaagacattaacacactttgatatctattccaaaaatacttttgttaccacaggttcattgctgtcatttagacaaaattaatgtactg

SEQ ID NO: 358769 - DNA, 120 bp, Artificial Sequence
  ENSG00000140299_46 (sequence is synthesized)
tgatattttcctactcttaagatgatgttgcccagccgagtactgtcagaaattcagttctgatgtctgtgtgtgcaagatattaatgtggtccctgtaagaaataccagagttggtcat

SEQ ID NO: 358770 - DNA, 120 bp, Artificial Sequence
  ENSG00000140299_47 (sequence is synthesized)
gatttactaaggagatgtaatattttctttgacctgttaggaatataacttgtgtcttgatttgttgcacatcatattttttgcaacattaatgaatttaaataaattaattggaacgtt

SEQ ID NO: 358771 - DNA, 120 bp, Artificial Sequence
  ENSG00000140299_48 (sequence is synthesized)
gctaatgctaatttaaatagacttctgcatgtatacttcaaagtattataaatacatttctgctttataaaactgatcaaatgagaagtgatcattgagtagttaaccacttcctatctg

SEQ ID NO: 358772 - DNA, 120 bp, Artificial Sequence
  ENSG00000140299_49 (sequence is synthesized)
gtattacagttaatttatgtgctcaacaacaacaaaattggctcccagatagctacttgaagtaacctatagtcataactgccagggagaatattgtcacaagttgaatctggaaaggca

SEQ ID NO: 358773 - DNA, 120 bp, Artificial Sequence
  ENSG00000140299_50 (sequence is synthesized)
ttgtaaggccagtgtactaagattttgatgactctacaaattatattttctgaacttgtggatacacgtttcactatgattaggtggtttttgctaaattgggcaataaaagttaaagaa

SEQ ID NO: 358774 - DNA, 120 bp, Artificial Sequence
  ENSG00000140299_51 (sequence is synthesized)
ccatgatttccaaagacataaaacagcctcatgttaagaataagccttttcctcctttatggaagagagattgaaaattgtgcagatggtataatgaaaattctctgtaaaatctaggta

SEQ ID NO: 358775 - DNA, 120 bp, Artificial Sequence
  ENSG00000140299_52 (sequence is synthesized)
cgttaacagctttgtcttggaaacaactaacatgcagtaggtttccccctccccccatcttttggtaaggactataatactgaaattttgaaaattattactacattgaaaatcagctaa

SEQ ID NO: 358776 - DNA, 120 bp, Artificial Sequence
  ENSG00000140299_53 (sequence is synthesized)
actgcaatctcaaaacataaattacacttaatcattggtgcttatgctttggctaatgctaatttaaatagacttctgcatgtatacttcaaagtattataaatacatttctgctttata

SEQ ID NO: 358777 - DNA, 120 bp, Artificial Sequence
  ENSG00000140299_54 (sequence is synthesized)
cagaactagcagaacttgtccccatggaatacgttggcataccagaatgcataaaacagtatgaagaagaaaagtttaaaaagaaacaaaaaagagacggagttttgccatgttgcccag

SEQ ID NO: 358778 - DNA, 120 bp, Artificial Sequence
  ENSG00000140299_55 (sequence is synthesized)
atagtaatgagtttgagtgggaaggtaaatgtttcactgtttttaatctgatctttattaatgtactaagggattttgtttgaaatacatcattctttctaaagttcatatatttgttac

SEQ ID NO: 358779 - DNA, 120 bp, Artificial Sequence
  ENSG00000140299_56 (sequence is synthesized)
taagataggaaattgtgctaacccttgaatattctcaaggacttaaaaagtgtgtatagagtacaccagtggcttttttcccctcttatttgcccactgctctcatgtttttttcatagc

SEQ ID NO: 358780 - DNA, 120 bp, Artificial Sequence
  ENSG00000140299_57 (sequence is synthesized)
tgtttcaaaaatatttcttgataattatggcatgctcttttttagtcaatcaagtaagaaacttttgaagagacatatagttaacagtttgtgggaagggagttctgaaaggaggcattt

SEQ ID NO: 358781 - DNA, 120 bp, Artificial Sequence
  ENSG00000140299_58 (sequence is synthesized)
gggatgctgtgtgggtttcaagaagacgccacgcctccgccgccgccacgcccccgccgcctccaccgccggctgccgcgcccggaggaggtcgggatgttatcacttccgccggggctt

SEQ ID NO: 358782 - DNA, 120 bp, Artificial Sequence
  ENSG00000140299_59 (sequence is synthesized)
tccttaattgtattggatcttaacattttgatgtgcaatggataatacttttcaatactcattctttatgtattatattttataactgtgcgcgcgcgcgcgtgtgtgtgtgtgtgtaac

SEQ ID NO: 358783 - DNA, 120 bp, Artificial Sequence
  ENSG00000140299_60 (sequence is synthesized)
agtaatgagtttgagtgggaagtcatttcctggaaggatattttccgttaacagctttgtcttggaaacaactaacatgcaatgatcttccaaaacccaagactactgaagtaattagga

SEQ ID NO: 358784 - DNA, 120 bp, Artificial Sequence
  ENSG00000140307_0 (sequence is synthesized)
agttctgcggtttctgcggcggctggagaggtggtcggagaagtaggaacctcctgccgggctcgtggcggcttctgtccgctccgcggagggaagcgccttccccacaggacatcaatg

SEQ ID NO: 358785 - DNA, 120 bp, Artificial Sequence
  ENSG00000140307_1 (sequence is synthesized)
caagcttgaataagaaaaacaaattcttcctcctaagccatggcatatcagttatacagaaatactactttgggaaacagtcttcaggagagcctagatgagctcatacagtctcaacag

SEQ ID NO: 358786 - DNA, 120 bp, Artificial Sequence
  ENSG00000140307_2 (sequence is synthesized)
atcaccccccaacttgcccttcaagttctacttcagtttgataaggctataaatgcagcactggctcagagggtcaggaacagagtcaatttcaggggctctctaaatacgtacagattc

SEQ ID NO: 358787 - DNA, 120 bp, Artificial Sequence
  ENSG00000140307_3 (sequence is synthesized)
tgcgataatgtgtggacttttgtactgaatgatgttgaattcagagaggtgacagaacttattaaagtggataaagtgaaaattgtagcctgtgatggtaaaaatactggctccaatact

SEQ ID NO: 358788 - DNA, 120 bp, Artificial Sequence
  ENSG00000140307_4 (sequence is synthesized)
acagaatgaatagaaaaaatatgacttttttacaccatcttctgttattcattgcttttgaagagaagcatagaagagactttttatttattctagaattgcagaaatgactacactgtg

SEQ ID NO: 358789 - DNA, 120 bp, Artificial Sequence
  ENSG00000140307_5 (sequence is synthesized)
ctataccagagaattccagtagaaagaaacttgtaactctgtagcctcttacatcacctttattatacagcatgaaaaaccataacttttttttaaggacaaaagttgttgccttcctaa

SEQ ID NO: 358790 - DNA, 120 bp, Artificial Sequence
  ENSG00000140307_6 (sequence is synthesized)
ccctttcagaatgcttatttcaataaagtcatgttttgtcagttgtaactttacctgatgaaagcatcagcaggggcaaaaccaaactctggatggaattttttaagaaaatcccttgct

SEQ ID NO: 358791 - DNA, 120 bp, Artificial Sequence
  ENSG00000140307_7 (sequence is synthesized)
ttttaaaatacaaaaccaaagttaatcattggtataaaaaaacccaagtacaacttgattaggaaaagttagacaatcatagcaaaaacaaaaccaaaaaactttccttcttagaccagg

SEQ ID NO: 358792 - DNA, 120 bp, Artificial Sequence
  ENSG00000140307_8 (sequence is synthesized)
taacatgaggaagggggaaaaaaacccaaacaaaatagtccccccacatgacaggtgtcttcagcttgccatattgatccaaagttcatacattttatcatgtacaagatacattagact

SEQ ID NO: 358793 - DNA, 120 bp, Artificial Sequence
  ENSG00000140307_9 (sequence is synthesized)
tacaataaagtctaattattagacttttatgtcagtggattgtgcttgcagaaatacagaagtaacatactgaccctaggtgaggagtttcttacatggttaactggattgacccaattg

SEQ ID NO: 358794 - DNA, 120 bp, Artificial Sequence
  ENSG00000140307_10 (sequence is synthesized)
gagtaaaagatttttgctgttacctcgatgctcctgcagttgttacctcagcatgccactgtagtccttgactctcacattaaaactaactttggctaggtactggtggctcacacctgt

SEQ ID NO: 358795 - DNA, 89 bp, Artificial Sequence
  ENSG00000140307_11 (sequence is synthesized)
taaaactaactttggctaggtactggtggctcacacctgtaagtaatcccagtactttaggaggctgagactggaggattccaatatag

SEQ ID NO: 358796 - DNA, 120 bp, Artificial Sequence
  ENSG00000140307_12 (sequence is synthesized)
ggagaagtaggaacctcctgccgggctcgtggcggcttctgtccgctccgcggagggaagcgccttccccacaggtagtgggttagggagggcagggttagggagggaagcagggccgcg

SEQ ID NO: 358797 - DNA, 120 bp, Artificial Sequence
  ENSG00000140307_13 (sequence is synthesized)
ctccctgccgcccccccggagtcggagtgcgttggtggggtagtctctgagggcccttcgctcctgggatctgcccgttaccgaccgttgccggcaaggccccgcggccggcaccggaga

SEQ ID NO: 358798 - DNA, 120 bp, Artificial Sequence
  ENSG00000140307_14 (sequence is synthesized)
agggcggcgaggcggcggtgatggtcgcgtcccgtggcgggaggctcgtcgttcacggggcgcccacagaacccacctaggggaggtcttcagcccaccaccgtattttcagccaggaca

SEQ ID NO: 358799 - DNA, 120 bp, Artificial Sequence
  ENSG00000140307_15 (sequence is synthesized)
gttctgcggtttctgcggcggctggagaggtggtcggagaagtaggaacctcctgccgggctcgtggcggcttctgtccgctccgcggagggaagcgccttccccacagcttgttgtttg

SEQ ID NO: 358800 - DNA, 120 bp, Artificial Sequence
  ENSG00000140307_16 (sequence is synthesized)
aagtctgccttccaactttcttcgtgcgaactccgacaaaaggaacgaattttaaacttggtggtttaatcaaaaaatgctaggacgagttacttccgaatttgacttctaattttctga

SEQ ID NO: 358801 - DNA, 120 bp, Artificial Sequence
  ENSG00000140307_17 (sequence is synthesized)
tggaatgacttccctcctctgcttggctaaagtctagcttaaagaacctggaagcttttctgagccagctcacttctacaggcagcctccatggacatcaatgcaagcttgaataagaaa

SEQ ID NO: 358802 - DNA, 120 bp, Artificial Sequence
  ENSG00000140307_18 (sequence is synthesized)
tatttgacccagcaagtcagtaacactgattaaattacctcaaattcttgtttattacactgtcctgacaacaggacacaaaacatgattgaatgatatcattaaatatagctaaatctg

SEQ ID NO: 358803 - DNA, 120 bp, Artificial Sequence
  ENSG00000140307_19 (sequence is synthesized)
ggtacatgcagtgtttcatgcctctaatcccagcactttaggaggacaaggtggaaggatcgcttgaggccagaagtttgagaccagcttaagcaacatagcaccacccatctccacaaa

SEQ ID NO: 358804 - DNA, 120 bp, Artificial Sequence
  ENSG00000140307_20 (sequence is synthesized)
aacccaggagtttgaggcttaagtgcactatgatggtaccactgtactccagccttggtgacagagcaacatcctgcctctaaataaataaagttaaatcttcaaaaatttttgttcaac

SEQ ID NO: 358805 - DNA, 120 bp, Artificial Sequence
  ENSG00000140307_21 (sequence is synthesized)
ataaaaattgagattgttggtttcccccttctcaaatttagggaagaaagtcatatactttttagctttaagatagttttgtccaatttaagtcttctgagatttacaagtctgaattta

SEQ ID NO: 358806 - DNA, 120 bp, Artificial Sequence
  ENSG00000140307_22 (sequence is synthesized)
agtctgaatttatatttcaattttaagagaattaacccttctgtataattctcccaaataaaaacatattaagtatttccagctgggcaccatggctcatgactgtaatcccagcacttt

SEQ ID NO: 358807 - DNA, 120 bp, Artificial Sequence
  ENSG00000140319_0 (sequence is synthesized)
aggccgaacttccggctctcactgctaggggcttaagcggagggagtcgagccagcgtcgccgcgatggtgttgttggagagcgagcagttcctgacggagctgaccagacttttccaga

SEQ ID NO: 358808 - DNA, 120 bp, Artificial Sequence
  ENSG00000140319_1 (sequence is synthesized)
agtgccggacgtcgggcagcgtctatatcaccttgaagaagtatgacggtcgaaccaaacccattccaaagaagggtactgtggagggctttgagcccgcagacaacaagtgtctgttaa

SEQ ID NO: 358809 - DNA, 120 bp, Artificial Sequence
  ENSG00000140319_2 (sequence is synthesized)
gagctaccgatgggaagaagaagatcagcactgtggtgagctccaaggaagtgaataagtttcagatggcttattcaaacctccttagagctaacatggatgggctgaagaagagagaca

SEQ ID NO: 358810 - DNA, 120 bp, Artificial Sequence
  ENSG00000140319_3 (sequence is synthesized)
aaaagaacaaaactaagaagaccaaagcagcagcagcagcagcagcagcagcacctgccgcagcagcaacagcaccaacaacagcagcaacaacagcagcaacagcagcacagtaaaggg

SEQ ID NO: 358811 - DNA, 120 bp, Artificial Sequence
  ENSG00000140319_4 (sequence is synthesized)
tattttttccttttggccagatagctaggtttctggttcccccacagtaggtgttttcacataagattagggtccttttggaaagaatagttgcagtgtttataggatagttgtggtaag

SEQ ID NO: 358812 - DNA, 120 bp, Artificial Sequence
  ENSG00000140319_5 (sequence is synthesized)
aatctagtttattttgcatttggctaattggtctgtgctgcatggttatatactcctggattatagattaaaagtctctgtagacatctctgtgaagagcaagctatcattaaacatgtc

SEQ ID NO: 358813 - DNA, 120 bp, Artificial Sequence
  ENSG00000140319_6 (sequence is synthesized)
tgtttatcagcactgtctctttattcctttcccaacccattttaatagttctggcaataactactaaatctagaatgatgtgattaatgaataggctttagctctataatatcttctagg

SEQ ID NO: 358814 - DNA, 120 bp, Artificial Sequence
  ENSG00000140319_7 (sequence is synthesized)
ttattagaattgaaacctgacagttttataaaaagtcatgttatctcatgagctgcttcccacctggctgtataattttatcatcatggttccccagtttcgatgagttctcacagtcaa

SEQ ID NO: 358815 - DNA, 120 bp, Artificial Sequence
  ENSG00000140319_8 (sequence is synthesized)
atgagagtttgtttaaccaccttaggagaaacatactacaaagtcatcaagaataaaggttccaaagtaattatgatttttggtttctttatgccctttggtttggatattttcatgtgc

SEQ ID NO: 358816 - DNA, 120 bp, Artificial Sequence
  ENSG00000140319_9 (sequence is synthesized)
aagcagcgggaggggagccgggcgatgctccctgggttcccggtgtctgggagccaccggagtctgtctgccgcggaccgccgccttcctctacctttccccaccctgtactgagcacat

SEQ ID NO: 358817 - DNA, 120 bp, Artificial Sequence
  ENSG00000140319_10 (sequence is synthesized)
tcggggcttcgggcccggaaaatagtagggattgtagctggctcagtccccagcactgagccgcctaggttgcttctggtaacaatgggccccaagcagcccagggctctttgtcaggga

SEQ ID NO: 358818 - DNA, 120 bp, Artificial Sequence
  ENSG00000140319_11 (sequence is synthesized)
tcccagacgccgccactttgagtggaatttaacgtgcttcgatattacatgtttccgtcgtggaaataatagtttctccagggtttcgccagaccgtgatagcagatgagatgacggtcg

SEQ ID NO: 358819 - DNA, 120 bp, Artificial Sequence
  ENSG00000140319_12 (sequence is synthesized)
aacactgggtaagattgatacttgggttcactgctctccggagataagttttaccagtatgtttcaagtaaaagctgccagggtgtgaatttcaatgctaataccgtcttcctttctagt

SEQ ID NO: 358820 - DNA, 120 bp, Artificial Sequence
  ENSG00000140319_13 (sequence is synthesized)
ttttttaagttagattttgtcttaggctgtagatatatgctacctatactatagttgaacaagaagttgcctgcaattttcccttggaaaaaaacgtaaaaaatgtgtgcaactgtctgt

SEQ ID NO: 358821 - DNA, 120 bp, Artificial Sequence
  ENSG00000140319_14 (sequence is synthesized)
gcgttactcgagacctgtgcctcctgcaggaggaccagggccttgacgcggcaggacgaggatttggggctggctaacggggctgggcctgttgttttccagttcctgacggagctgacc

SEQ ID NO: 358822 - DNA, 120 bp, Artificial Sequence
  ENSG00000140319_15 (sequence is synthesized)
ggtcatcacttaccccactcctctgttttaactgtttgtctgccgctcagccacgtacgcggccgtgttcaccaggatgcattttttccttcagatgacggtcgaaccaaacccattcca

SEQ ID NO: 358823 - DNA, 120 bp, Artificial Sequence
  ENSG00000140320_0 (sequence is synthesized)
atgacacacactcggagaaagtcccttcccatgctgagttcgggcctcactggccgccgagagcccctgcagatggaagacagcaacatggagcagggggttgagggtgtggagccaggc

SEQ ID NO: 358824 - DNA, 120 bp, Artificial Sequence
  ENSG00000140320_1 (sequence is synthesized)
atgcccgagagcccaggtcacctcacagggcgccgcaagaattacccacttcgtaagcgcccattggttcctgagaagcccaaggcctgcaaagtgctgctgactcgcctggagaatgtg

SEQ ID NO: 358825 - DNA, 120 bp, Artificial Sequence
  ENSG00000140320_2 (sequence is synthesized)
gccggtccccggagtgcagatgaggctgatgagctaccgcctgacctgcccaagccccccagcccggccccatccagtgaagaccctggccttgcccagccccgcaagcggcgcctggcc

SEQ ID NO: 358826 - DNA, 120 bp, Artificial Sequence
  ENSG00000140320_3 (sequence is synthesized)
tccctcaatgctgaagctctcaataacctgctgctggagcgagaggacaccagcagcctggcaggcacccgccgcagtcgagcaggggatccccaccgcagccgtgaccgtgatcgtgct

SEQ ID NO: 358827 - DNA, 120 bp, Artificial Sequence
  ENSG00000140320_4 (sequence is synthesized)
actgggggctggtcctcctccaagaagcggccccggctgggggaccttggaggaggaagtcgggacctgtctccagagccagcacccgatgaaggtccccgccgagatggagacccagct

SEQ ID NO: 358828 - DNA, 120 bp, Artificial Sequence
  ENSG00000140320_5 (sequence is synthesized)
cccaagagactggctagcctgaacgcagctgctttcctaaaactgagccaggagcgggagctacccctgcggctgcctcgtgcccatgcagaagtagatgggcgctccactgagccccca

SEQ ID NO: 358829 - DNA, 120 bp, Artificial Sequence
  ENSG00000140320_6 (sequence is synthesized)
gcacccaaggccccgaggccaaagtggcccaaggtcaatggcaagaactatcccaaggcttggcagggggccagctctggggaggctgcaggcccacctggctggcaaggctgccctgat

SEQ ID NO: 358830 - DNA, 120 bp, Artificial Sequence
  ENSG00000140320_7 (sequence is synthesized)
gaaccatggccatctgcaactccttgtgggccatccgtccagccatctcatcagcccctgagcaaggctctggagagccctttggggctgcgccctcacctgcccctgctgatgggtgga

SEQ ID NO: 358831 - DNA, 120 bp, Artificial Sequence
  ENSG00000140320_8 (sequence is synthesized)
caggcggctctgaagccggagcctgggcgcccaggcgaggagtcacctgcccctaagcaggaactgcatcagccctctttccccacacctcagctgtcgccgctgccgatgcctggcaac

SEQ ID NO: 358832 - DNA, 120 bp, Artificial Sequence
  ENSG00000140320_9 (sequence is synthesized)
cccgccgactacaatggcctgtgtgttgggcctgagctcactgcactaggcagcttctacctgtactgtggccaagaggggctgcagtgtgggggctactcgccctgccccatgcttcct

SEQ ID NO: 358833 - DNA, 120 bp, Artificial Sequence
  ENSG00000140320_10 (sequence is synthesized)
gagggcaagctgtccccagtggctgcacctcacgaggaggggctcctcttagctccgagctcagtgccctcaggcacccctttccagcaccctccctggggctcctctcgctactgctct

SEQ ID NO: 358834 - DNA, 120 bp, Artificial Sequence
  ENSG00000140320_11 (sequence is synthesized)
agcgaggacactggagtgaatggctacagcatctgcggagtgttgcccctgtctgttacccacgctggcactacctgtggcggctgcccatacaaaatgccttttgcagcagaaggctgc

SEQ ID NO: 358835 - DNA, 120 bp, Artificial Sequence
  ENSG00000140320_12 (sequence is synthesized)
agatccctgggccagttggaatttcctctcccggaagctggccacccagcctcacccgcccacccactcctggggtgccctgtacccagtgtgccacctgcagcagagcccgtcccccat

SEQ ID NO: 358836 - DNA, 120 bp, Artificial Sequence
  ENSG00000140320_13 (sequence is synthesized)
cttcagacacccacctcggagccccagacagtagcccgtgcgtgccctcagagcgccaaacctcccagcggttctaagtcaggtctgcgcacaggctccagctgcaggcacactgcaagg

SEQ ID NO: 358837 - DNA, 120 bp, Artificial Sequence
  ENSG00000140320_14 (sequence is synthesized)
agcaaggctgcccgcaggcctagccaccccaagcagccacgtgtccagcgcccacgccctcgccgccgccgtcgccgccgcactaatggctgggtacctgttggggctgcgtgtgagaag

SEQ ID NO: 358838 - DNA, 120 bp, Artificial Sequence
  ENSG00000140320_15 (sequence is synthesized)
gctgtgtatgtcttggatgagccggagccagccatccgaaagagctaccaggcggtagagcggcatggggagacaatccgagtccgggacaccgtccttctcaaatcaggcccacgaaag

SEQ ID NO: 358839 - DNA, 120 bp, Artificial Sequence
  ENSG00000140320_16 (sequence is synthesized)
acctccacaccttatgtggccaagatctctgccctctgggagaaccccgagtcaggagagctgatgatgagcctcctgtggtattacagacctgagcacttacagggaggccgcagtccc

SEQ ID NO: 358840 - DNA, 120 bp, Artificial Sequence
  ENSG00000140320_17 (sequence is synthesized)
agcatgcacgagaatgaagtgtttgcatcgcgacatcaggaccagaacagtgtggcctgcattgaggagaagtgctatgtgctgacttttgccgagtactgcaggttctgtgccatggcc

SEQ ID NO: 358841 - DNA, 120 bp, Artificial Sequence
  ENSG00000140320_18 (sequence is synthesized)
tgttcctttgccgccatgtctatgacttccgccacgggcgcatccttaagaacccccagtagcctcctcatgcccatgctggggctacccatgggcaagtggggctcggggtagggggca

SEQ ID NO: 358842 - DNA, 120 bp, Artificial Sequence
  ENSG00000140320_19 (sequence is synthesized)
ctgcttgaagcacagcacttggttagggggccacagaggcctaagtttgctggcctgtggttttcttgggggggagggcaggggcccctgtgggttctgggctccaggggagggagctgg

SEQ ID NO: 358843 - DNA, 120 bp, Artificial Sequence
  ENSG00000140320_20 (sequence is synthesized)
ggaggccagggtataagaaaagcatcagaactctcagcttggcccaaggtaccttctgtggttcccctgggtggagatttccgaaaagtagtcttctctgaggctgggccaagcctgagg

SEQ ID NO: 358844 - DNA, 120 bp, Artificial Sequence
  ENSG00000140320_21 (sequence is synthesized)
gaaatggggccctaggagggtgggggcgggaaggaggggcaaggtctttcaggaaccagacccaacaggcccttctgtagcctcccccttgccctcaaagggggagtgggggccagcttt

SEQ ID NO: 358845 - DNA, 120 bp, Artificial Sequence
  ENSG00000140320_22 (sequence is synthesized)
acctcacccactgtgacccgccgcttccccttcagcctgggaccaggctttcctagatcccagcacagctctgagcttgttcctttgaggcatagagagccagagtctggcttccagagc

SEQ ID NO: 358846 - DNA, 120 bp, Artificial Sequence
  ENSG00000140320_23 (sequence is synthesized)
attgacttcctcttcctagacttgaggccttttctctggctttcctcctttgccctgcagtagcaactggtgctgggacaagttgacccacctctcacagtcatgggtgtggcccacttg

SEQ ID NO: 358847 - DNA, 120 bp, Artificial Sequence
  ENSG00000140320_24 (sequence is synthesized)
tgggagtctcctgtccacctcccagagacggccacccagcgggtctggcttcccagaaagttaactgatgattgtggggtttgtcatatctgggagggaagatgggtgctgggagagggt

SEQ ID NO: 358848 - DNA, 120 bp, Artificial Sequence
  ENSG00000140320_25 (sequence is synthesized)
tgggggcagggggcaaggaaaattgctacctgatttgttgaagatttttcctcttgccttacacatggaggttccaggaaacctcttgcagaacttcacacgtgattcttcaagccacac

SEQ ID NO: 358849 - DNA, 120 bp, Artificial Sequence
  ENSG00000140320_26 (sequence is synthesized)
ccacctgaaatcaaaccaaaggagtgctgtggctccccttgccctgccaccctttccctagtcttttgtagattgcactaatttacatcctagcaagaatcaacactgtatcagtccacg

SEQ ID NO: 358850 - DNA, 120 bp, Artificial Sequence
  ENSG00000140320_27 (sequence is synthesized)
gacctgctgagctgcagccacttgctctaggagctaaggacttgcattttcagtttgttcctgttgcccagaggccctgttctcacctcatgctgctccccagagtagactaacaggctc

SEQ ID NO: 358851 - DNA, 120 bp, Artificial Sequence
  ENSG00000140320_28 (sequence is synthesized)
agtcccctgttgtccttgtggagactaggccttggccctggccctgagactctgtgagggggctggagcagcctggttatttcctatctgtaccaaagaggagtatggtgggagagggag

SEQ ID NO: 358852 - DNA, 120 bp, Artificial Sequence
  ENSG00000140320_29 (sequence is synthesized)
tggagtgcagtgtggcttgggcctggtgctgggaacctgctagctgagcacttccacaagggcatacccctgggggcaggggctggggctgagaactgcagccctgggtcttcccttagg

SEQ ID NO: 358853 - DNA, 120 bp, Artificial Sequence
  ENSG00000140320_30 (sequence is synthesized)
gaggaagggcagatgaacccagcaggcttaggaggtggcactgggtgaggacagctgggcaggggctgcagagggaggtggaaatgaaccctgagggctcccccaacttgccatgccctg

SEQ ID NO: 358854 - DNA, 120 bp, Artificial Sequence
  ENSG00000140320_31 (sequence is synthesized)
tcccttagtagatgagttgctcctgattggtcattgggtttgggtgaggcctggaggcttcagaggtgaatttatgcttgggaagcctgatcccaaacctgaagggaagggacttggatc

SEQ ID NO: 358855 - DNA, 120 bp, Artificial Sequence
  ENSG00000140320_32 (sequence is synthesized)
tccttatattgaataagctgtttggaggaaggtgtctgtctgggaggatggggcagtaaatgaggttggcagagtggcagtgggggctctgcagagccagccttggagcctgctcattct

SEQ ID NO: 358856 - DNA, 120 bp, Artificial Sequence
  ENSG00000140320_33 (sequence is synthesized)
gggcccttgctgccaaggagcccagcctcacctagcaggaaaggagatgaaggccctcctcccaggaggtagggtcttggctgccccgaacttaaatgcttttgaaatctcttagatgtg

SEQ ID NO: 358857 - DNA, 120 bp, Artificial Sequence
  ENSG00000140320_34 (sequence is synthesized)
gaaatattttttcgaacctgaaaatgcagctggtagaatttcaatggaagcataatccatgtaaaatatattttagttgatattttgtaaaatgcactttttgtgtgtgttgatcctggt

SEQ ID NO: 358858 - DNA, 120 bp, Artificial Sequence
  ENSG00000140320_35 (sequence is synthesized)
ttcccagatctgtatttcagtgtttacaagggaggaaggacctttcctcacctcccttttgacagagattagaagtacttctttaagaaaaaaataaatttgagaaattgtattgattta

SEQ ID NO: 358859 - DNA, 120 bp, Artificial Sequence
  ENSG00000140320_36 (sequence is synthesized)
tttctcgagaacctactgtgtgcatatcccgggcttagtgaagtcctaggcgggctctggcaccaccaggtgcccaagacacagctccttcccgcacctaacagggacttcccatctctc

SEQ ID NO: 358860 - DNA, 120 bp, Artificial Sequence
  ENSG00000140320_37 (sequence is synthesized)
tctgtgcccttagcctgctgtgcccacccaccccactgaccccgcgagcgtgctcgggcttgggagggcacgtctgtgggggtgagagacggagccacagcatttggtgactagggggaa

SEQ ID NO: 358861 - DNA, 80 bp, Artificial Sequence
  ENSG00000140320_38 (sequence is synthesized)
gagtttgtgggggaaccgcgagcggcgtagcggatcccggagcccggcccccgccgcccgcccgtccggctgcctgcccc

SEQ ID NO: 358862 - DNA, 80 bp, Artificial Sequence
  ENSG00000140320_39 (sequence is synthesized)
gctccgcccgcccggccccggcccccaggaggaggcgctgacgcagcagcgtggagcccgggaattgagcgcccccgggg

SEQ ID NO: 358863 - DNA, 120 bp, Artificial Sequence
  ENSG00000140320_40 (sequence is synthesized)
gaaagactcctcctaacaccccataggctctccaccaagctgtgtgctaaaagaggtgactgccatctgtgtgtgccctgggctcaccttttatttcactttcccttgcagggactttcc

SEQ ID NO: 358864 - DNA, 120 bp, Artificial Sequence
  ENSG00000140320_41 (sequence is synthesized)
atctaactggaaagatgaagaacatttcccctctcctacgctaggcagggctggggtttgggaggtcagtgacaatcaggggctagagcagatacctggctattctggagaaggggggga

SEQ ID NO: 358865 - DNA, 80 bp, Artificial Sequence
  ENSG00000140323_0 (sequence is synthesized)
cgccgccgccgccgccgccgcggcttcagcaccagcgcccggacagcggtgccgcccacgggcatggacggtgacagcag

SEQ ID NO: 358866 - DNA, 120 bp, Artificial Sequence
  ENSG00000140323_1 (sequence is synthesized)
cagcagcagcggcggcagcggtccggctcccggcccgggtccggaaggggagcaacggcccgagggggagcccttggccccagacggcggctccccggacagcacccagaccaaggctgt

SEQ ID NO: 358867 - DNA, 120 bp, Artificial Sequence
  ENSG00000140323_2 (sequence is synthesized)
gccccctgaggcaagcccagagagaagctgctccctccacagctgccccctggaggacccttccagctcttcaggacccccaccaacaacttccaccctccagcctgtgggtccatccag

SEQ ID NO: 358868 - DNA, 120 bp, Artificial Sequence
  ENSG00000140323_3 (sequence is synthesized)
ccccttggcccctgcccacttcacctatccccgggcactgcaggaataccaggggggcagttccctgccaggacttggggatcgggcagctctctgctcccacggctccagcctcagccc

SEQ ID NO: 358869 - DNA, 120 bp, Artificial Sequence
  ENSG00000140323_4 (sequence is synthesized)
ttctccagccccctcacagcgcgatgggacctggaagccacccgctgtgcagcaccatgtggtcagcgtcaggcaggaacgagccttccagatgccaaagagctattcccagctgattgc

SEQ ID NO: 358870 - DNA, 120 bp, Artificial Sequence
  ENSG00000140323_5 (sequence is synthesized)
tgagtggccagtggccgtgctgatgctgtgtctggctgtcatcttcctctgcaccctggctggactgttgggggcccggctgcccgacttctccaagcctttgctgggctttgagccacg

SEQ ID NO: 358871 - DNA, 120 bp, Artificial Sequence
  ENSG00000140323_6 (sequence is synthesized)
ggacacagacattgggagcaagttagtggtctggagagcactacaagccctcacaggccccaggaagctgcttttcctttccccagaccttgagctgaacagctcgagctcccacaacac

SEQ ID NO: 358872 - DNA, 120 bp, Artificial Sequence
  ENSG00000140323_7 (sequence is synthesized)
tctgaggcctgcacccagaggcagtgcccaggagagcgctgtccggcctcggagaatggtggagcccctggaggacagaaggcaagagaacttcttctgtggcccccctgagaagagcta

SEQ ID NO: 358873 - DNA, 120 bp, Artificial Sequence
  ENSG00000140323_8 (sequence is synthesized)
tgcaaagctggtgttcatgtccacctcctcgggcagcctatggaacctgcatgccatccattccatgtgtcgcatggaacaggaccagatccgctcccataccagcttcggggctctgtg

SEQ ID NO: 358874 - DNA, 120 bp, Artificial Sequence
  ENSG00000140323_9 (sequence is synthesized)
ccagcggacagcagccaaccagtgctgccccagctggtccctgggcaactatctggctgtgctctccaaccgctcctcctgcctggacactacccaagctgacgcagcccgcacactggc

SEQ ID NO: 358875 - DNA, 120 bp, Artificial Sequence
  ENSG00000140323_10 (sequence is synthesized)
cctgcttcggacctgtgccctctactaccacagtggcgccttggtgccctcttgtctgggacctgggcagaacaagtccccacgctgtgcccaggttcccaccaagtgctcccagagtag

SEQ ID NO: 358876 - DNA, 120 bp, Artificial Sequence
  ENSG00000140323_11 (sequence is synthesized)
tgccatctaccaactcctgcactttctgcttgacagggactttctgagtccccagaccactgactaccaggtgccttccctcaagtacagcctgctcttcctgcccaccccaaagggtgc

SEQ ID NO: 358877 - DNA, 120 bp, Artificial Sequence
  ENSG00000140323_12 (sequence is synthesized)
ttccctcatggacatctacctggaccggctggccaccccctgggggcttgctgacaactacacctctgtcactggcatggacctgggcctcaagcaggagctgctgaggcacttcctggt

SEQ ID NO: 358878 - DNA, 120 bp, Artificial Sequence
  ENSG00000140323_13 (sequence is synthesized)
ccaggacacggtgtaccccttgctggctctggttgccatcttcttcggcatggccctgtacctgcgctcactcttcctcacgctcatggtgctgctgggggtgctgggctcactgctggt

SEQ ID NO: 358879 - DNA, 120 bp, Artificial Sequence
  ENSG00000140323_14 (sequence is synthesized)
ggccttcttcctttaccaggtggccttccgcatggcctacttccccttcgtcaatctggcagccctcctcctgctgagcagcgtctgcgccaaccacacgctcatcttcttcgacctgtg

SEQ ID NO: 358880 - DNA, 120 bp, Artificial Sequence
  ENSG00000140323_15 (sequence is synthesized)
gcgccttagcaagagccagctgccgtcgggggggctggcgcagcgcgtgggccgcaccatgcaccacttcggctacctgctgctggtctccggcctcaccacgagcgcggccttctatgc

SEQ ID NO: 358881 - DNA, 120 bp, Artificial Sequence
  ENSG00000140323_16 (sequence is synthesized)
cagctacctgagccgcctgccggccgttcgctgcctcgccctcttcatgggcacggctgtgctggtgcacctggcgctcacgctggtctggctgcccgcctccgccgtgctccacgagcg

SEQ ID NO: 358882 - DNA, 80 bp, Artificial Sequence
  ENSG00000140323_17 (sequence is synthesized)
cccggcggctactgctggcgctgcaccggcggctccgcggcctgcggagggcggcggctggcacctcgcgtctgctcttc

SEQ ID NO: 358883 - DNA, 120 bp, Artificial Sequence
  ENSG00000140323_18 (sequence is synthesized)
ctcgcgtctgctcttccagcgcctgctgccctgcggcgtcatcaagttccgctacatctggatctgctggttcgcagcactggcggcagggggcgcctacatcgccggagtcagcccccg

SEQ ID NO: 358884 - DNA, 120 bp, Artificial Sequence
  ENSG00000140323_19 (sequence is synthesized)
cctgcggctgcccacgctgccgccgcccggcggccaggtcttccggcccagccaccccttcgagcgcttcgacgcggagtatcgccagctgttcctgttcgagcagctgccgcagggcga

SEQ ID NO: 358885 - DNA, 120 bp, Artificial Sequence
  ENSG00000140323_20 (sequence is synthesized)
gggcggccacatgcccgtggttttggtgtggggcgtcctgcctgtggacactggcgaccctctggaccctcgtagcaacagcagcctggtgagggaccctgccttctcggccagcggccc

SEQ ID NO: 358886 - DNA, 120 bp, Artificial Sequence
  ENSG00000140323_21 (sequence is synthesized)
tgaggcccagcgctggctgctggcactctgtcaccgggcccggaatcagagcttcttcgacaccctgcaggaaggctggcccacgctgtgtttcgtggagaccctccagcgctggatgga

SEQ ID NO: 358887 - DNA, 120 bp, Artificial Sequence
  ENSG00000140323_22 (sequence is synthesized)
gagccccagctgcgcccgcctggggcctgacctctgctgcggccactcggacttcccctgggccccccagtttttcctgcactgcctgaaaatgatggctctggagcaaggccccgatgg

SEQ ID NO: 358888 - DNA, 120 bp, Artificial Sequence
  ENSG00000140323_23 (sequence is synthesized)
cacccaggacctgggactccgctttgatgcccatggcagcctggccgccctggtcctacaattccagaccaacttccggaacagtccggactacaaccagacccagctcttctacaatga

SEQ ID NO: 358889 - DNA, 120 bp, Artificial Sequence
  ENSG00000140323_24 (sequence is synthesized)
ggtcagccactggctggcagcggagctgggcatggcacctccaggcctccgccgtggttggttcactagccgtctagagctgtatagcctgcagcacagcctgagcactgagcctgctgt

SEQ ID NO: 358890 - DNA, 120 bp, Artificial Sequence
  ENSG00000140323_25 (sequence is synthesized)
ggtgctgggcctggctttggcgctggcctttgccacactgctcctgggcacctggaatgttcccctcagcctattctccgtggcagctgtggcaggcaccgtgctgctcactgtaggact

SEQ ID NO: 358891 - DNA, 120 bp, Artificial Sequence
  ENSG00000140323_26 (sequence is synthesized)
cctggttctcctcgagtggcagctcaacactgccgaggccctgtttctctctgcctcagtgggcctctcagtagacttcactgtcaactactgcatctcctatcacctgtgcccacaccc

SEQ ID NO: 358892 - DNA, 120 bp, Artificial Sequence
  ENSG00000140323_27 (sequence is synthesized)
tgaccgcctgagccgtgtggccttctctctgcgccagaccagctgcgccacagccgtgggggctgcagccctgtttgcggcaggcgtgctcatgctgcctgccacagtgctgctctatcg

SEQ ID NO: 358893 - DNA, 120 bp, Artificial Sequence
  ENSG00000140323_28 (sequence is synthesized)
caagctgggcatcatcctcatgatggtcaaatgcgtcagttgtggctttgccagcttcttcttccaatctctctgctgtttcttcgggccagagaagaactgtgggcagatcctctggcc

SEQ ID NO: 358894 - DNA, 120 bp, Artificial Sequence
  ENSG00000140323_29 (sequence is synthesized)
ctgtgcccacctgccatgggatgctggtactggggaccctggtggggagaaggcaggccgcccacgaccagggtcagtgggagggatgcccgggtcctgctcagagcaatatgagctaca

SEQ ID NO: 358895 - DNA, 120 bp, Artificial Sequence
  ENSG00000140323_30 (sequence is synthesized)
gcccctggcacggcgtcggagccccagctttgacaccagcacagccaccagcaagctgtcccaccggccctcagtactctctgaggatctgcagctccatgatggtccgtgctgttcccg

SEQ ID NO: 358896 - DNA, 120 bp, Artificial Sequence
  ENSG00000140323_31 (sequence is synthesized)
gcccccaccagcccctgcctccccaagggagctgctgctggaccaccaggcagtcttcagccagtgccctgccctgcagacctcctccccctataagcaggctggccccagccccaaaac

SEQ ID NO: 358897 - DNA, 120 bp, Artificial Sequence
  ENSG00000140323_32 (sequence is synthesized)
ccgggccaggcaggactcccaaggggaggaggctgagcccctgccagcctcaccagaagccccagcccactctcctaaggccaaggctgcagatcctcctgatggcttctgttcctcagc

SEQ ID NO: 358898 - DNA, 120 bp, Artificial Sequence
  ENSG00000140323_33 (sequence is synthesized)
cagcaccctggaggggctcagcgtctctgatgagacctgcctaagcacctctgagcccagtgcccgtgtaccagattccgtgggtgtgtccccagatgacctggatgacactgggcagcc

SEQ ID NO: 358899 - DNA, 120 bp, Artificial Sequence
  ENSG00000140323_34 (sequence is synthesized)
agtccttgagcgaggccagctcaatgggaagcgggacaccctgtggctggcgctgagggagacagtgtatgacccatcattgcccgcttcccatcacagcagcttgtcctggaagggccg

SEQ ID NO: 358900 - DNA, 120 bp, Artificial Sequence
  ENSG00000140323_35 (sequence is synthesized)
aggggggccaggggatggcagccctgtggtgctgcccaatagccagccagacctgccagatgtttggctgcgcaggcccagcactcacacgtcaggctatagcagctgagggggacccgg

SEQ ID NO: 358901 - DNA, 120 bp, Artificial Sequence
  ENSG00000140323_36 (sequence is synthesized)
ggaggctggacagggcgcggaaccctgtcatggatgacaaggcaagggcagcaataggctggagcccgaaggtatttctccagatccacagggagaggtctcaccctccagctgtggatg

SEQ ID NO: 358902 - DNA, 120 bp, Artificial Sequence
  ENSG00000140323_37 (sequence is synthesized)
ttaaaccctgccagatgtcccagccttgatctgtctgctcctactcctcacatctggaggattccagcaggaggggttttggaggggacctgcttgcgacctgctgagggcttgtctgct

SEQ ID NO: 358903 - DNA, 120 bp, Artificial Sequence
  ENSG00000140323_38 (sequence is synthesized)
cccacagcaccatctaagacccctcctctagaagtggggaaggccagatgtgtagcttcgggtatcagaggaggctgacctggcccccatcccaagttacaagaacttcagtgagactaa

SEQ ID NO: 358904 - DNA, 120 bp, Artificial Sequence
  ENSG00000140323_39 (sequence is synthesized)
gggacccccatcctagggatcttgtcagggttccttactgaccagaggagcccgcagcaatctccacagcctcctgggtctcacccctttcatgggctcttcatcaggacacttccctct

SEQ ID NO: 358905 - DNA, 120 bp, Artificial Sequence
  ENSG00000140323_40 (sequence is synthesized)
cttttgggagcttctctgggcagaattgggctgggacctctctccccaactgccctgctctcctcatactcaccggtttgaccagaaattctccaaatccagccatagatggctgctggg

SEQ ID NO: 358906 - DNA, 120 bp, Artificial Sequence
  ENSG00000140323_41 (sequence is synthesized)
tgtgcagcaggagaaggaggatggtcagccttggagcatctctcaattacgggacagtccctctttggaagcaggctcctgtgctttcctgtgttaataaacagtaataatcctttccat

SEQ ID NO: 358907 - DNA, 120 bp, Artificial Sequence
  ENSG00000140323_42 (sequence is synthesized)
ctctgcacattttagtctccttggaatctatctcactacttcactacagggtagcctgacattggtcaggttcttttgacacccaatttataggtaaagacattgagactaagtaagatg

SEQ ID NO: 358908 - DNA, 120 bp, Artificial Sequence
  ENSG00000140323_43 (sequence is synthesized)
aactgacctcagggtcacttagccactaaatggcagagcggtttcattccaccactacaacctccagtttccctttggctacctgccttctttcaccgctagcaccctcctccaatctgc

SEQ ID NO: 358909 - DNA, 120 bp, Artificial Sequence
  ENSG00000140323_44 (sequence is synthesized)
tttctctggtgtctctgactgaatccagccaccctctttgggcctccacttcctgagagagctgtattccaaaaaaacccaggagttcctctccatctcccccgtgcctccctctggaat

SEQ ID NO: 358910 - DNA, 120 bp, Artificial Sequence
  ENSG00000140323_45 (sequence is synthesized)
ctggctgagatgtctgctggccctggggcgtcctagctgacctgattcccaggcttcaggaccgtgcctcttctacagccacagtgtataagaggccccaccagaagaggtactgagggg

SEQ ID NO: 358911 - DNA, 120 bp, Artificial Sequence
  ENSG00000140323_46 (sequence is synthesized)
cagaagaggtgaagccaaatccaatcaaggcaggaactcagacctgccctttgggaagtgtatgagtctgaagctgcttcccaggttagggtccccagctttttaaggacaagtctctct

SEQ ID NO: 358912 - DNA, 120 bp, Artificial Sequence
  ENSG00000140323_47 (sequence is synthesized)
gtggagcgttaagcagaccaaaggctggttcctccttcccaaacttcctggtagggaagttttatcccatgtgagagctcatgacaccaggtggcatcaacatgtttattgaacacctac

SEQ ID NO: 358913 - DNA, 120 bp, Artificial Sequence
  ENSG00000140323_48 (sequence is synthesized)
tttgcatatggtattacaaggggacagaggtgtggaagaaaaattgaacaccaccctcaaagagctcaccttctagctggggagacagcttatgcacacatgcaggcatcggatggctca

SEQ ID NO: 358914 - DNA, 120 bp, Artificial Sequence
  ENSG00000140323_49 (sequence is synthesized)
cggacggcaccatatgcctgccatcatcattattgttggagctcaagtacccaggactgggtaacaagaaaggctttctggaggaggaaaaacttgagctgggcttcagaagaccaagcg

SEQ ID NO: 358915 - DNA, 120 bp, Artificial Sequence
  ENSG00000140323_50 (sequence is synthesized)
tctcagactggaaggggccttggcgatcgtttattccagcagttttcaaattttgtagcctcaggactctttcttcaaagaagctctgtgtggaaaaacaatatataaaacaggtaaaag

SEQ ID NO: 358916 - DNA, 120 bp, Artificial Sequence
  ENSG00000140323_51 (sequence is synthesized)
gcagctactctggtgggcgctgggtgttgggggtggagtcagcttagcctgtctttccactgcagcctctccgggtatctggggaacccctccggctcctggcagcttcacagaatgtaa

SEQ ID NO: 358917 - DNA, 120 bp, Artificial Sequence
  ENSG00000140323_52 (sequence is synthesized)
tgatccaggctattttacagaggagtatcaggaaagggaagggattgttctagggccaaatagtctgtggcagagctggaggcaaatcagatgatgtttttgttttatttagttttttat

SEQ ID NO: 358918 - DNA, 120 bp, Artificial Sequence
  ENSG00000140323_53 (sequence is synthesized)
tattgagacctacttcctactccaagtagcccatgagaagtggagcagaaaccgaaaagagacatgggagttgtggaagagacagaaggcaataggcaggtacggcaggataccttggct

SEQ ID NO: 358919 - DNA, 120 bp, Artificial Sequence
  ENSG00000140323_54 (sequence is synthesized)
cctttgcaagataagtaaatcaagatgagtaactcctgacaccaggaaggggaagctggaacctaatttgaacctgtccccagggggtctgctgggacctctctcttcatgtccaggtag

SEQ ID NO: 358920 - DNA, 120 bp, Artificial Sequence
  ENSG00000140323_55 (sequence is synthesized)
cattcggcctctctgacctagagctgctcatcagccctggtttctctgataatggtgtccctctgtcatcatgcagccaggctgagagagccctggtatcctcagggacaatgagccaca

SEQ ID NO: 358921 - DNA, 120 bp, Artificial Sequence
  ENSG00000140323_56 (sequence is synthesized)
gggaggttaagggaactcttcctcccaagcatgagcagaagacactttgcctgaacataaccactgaaatgttagaatgcagaggggtggatgggtgggcatgagggatctgagcacacc

SEQ ID NO: 358922 - DNA, 120 bp, Artificial Sequence
  ENSG00000140323_57 (sequence is synthesized)
cgagggccctacctggggatttccaggtcatattcttgcaggctgtggccacacaacacttcaggaaggtgaatgagccatagcagctgatgcattgattagatttgttctttatgttgc

SEQ ID NO: 358923 - DNA, 120 bp, Artificial Sequence
  ENSG00000140323_58 (sequence is synthesized)
caggcccagaagaacccagcagtaatctaaaacattaccttatacctagaatggcccaaaccaacagcaggcaatccacatcagcaggaaatccagcctgcctctctagccctgactttg

SEQ ID NO: 358924 - DNA, 120 bp, Artificial Sequence
  ENSG00000140323_59 (sequence is synthesized)
gaatgtggaacttaaagcacttcctatttcctttgagttgcagcagatcctttgctttattattattaggggcacttacaatgagtgtatggccctggagacatggcttacaagcacgct

SEQ ID NO: 358925 - DNA, 120 bp, Artificial Sequence
  ENSG00000140323_60 (sequence is synthesized)
gtgaggcgtacaaaaatgagtcaaagcacttatgcttgccctgcaaaattcaagaaatgatttctccccactcagacactctaatagaactacattaacatttggaacttgaggtcattt

SEQ ID NO: 358926 - DNA, 120 bp, Artificial Sequence
  ENSG00000140323_61 (sequence is synthesized)
ggtcatttcccctatttgtgccactgatccttgaactcacattctgagtacgagtatgtatcctgtatgctattaaaatataacttgaggccggacatgatggctcatgcctgtaatccc

SEQ ID NO: 358927 - DNA, 60 bp, Artificial Sequence
  ENSG00000140323_62 (sequence is synthesized)
tgaacccgggatgcaccgtctcaaaaaataaataaataaataagtcgggcacggtggctc

SEQ ID NO: 358928 - DNA, 67 bp, Artificial Sequence
  ENSG00000140323_63 (sequence is synthesized)
aaacttgatatagtctgttaccatgggaaaaccatccttccatggctgtggtgatttggggactttt

SEQ ID NO: 358929 - DNA, 120 bp, Artificial Sequence
  ENSG00000140323_64 (sequence is synthesized)
aaaaccatccttccatggctgtggtgatttggggacttttagagtgacagtgttagacagactgattttattggctgaatcttagattttactgatatatagcatatcccataccatgat

SEQ ID NO: 358930 - DNA, 64 bp, Artificial Sequence
  ENSG00000140323_65 (sequence is synthesized)
cttagattttactgatatatagcatatcccataccatgatatgcgggcaatattccagcttgag

SEQ ID NO: 358931 - DNA, 120 bp, Artificial Sequence
  ENSG00000140323_66 (sequence is synthesized)
gcctggccgagacaatttttaaaaagacatttctcaagagagttataagccaaaatttccctagccccctccaactcattctgtccttctcccagtgcatgtcaggacagggaagaaggc

SEQ ID NO: 358932 - DNA, 120 bp, Artificial Sequence
  ENSG00000140323_67 (sequence is synthesized)
gtcaggacagggaagaaggctttaaatcagattttaagaaagaggatacattggtttacaacctttgcctatcgtccagagagtttctgatcttttctttttttttgagacggagtcttg

SEQ ID NO: 358933 - DNA, 120 bp, Artificial Sequence
  ENSG00000140323_68 (sequence is synthesized)
cccggccctgatcttttctttgacggtggcagtatctcattttttgataatacacatgggtaatggcaagctcttgggaccccatgccaagcatcaagatcccatttacctggtgatagg

SEQ ID NO: 358934 - DNA, 120 bp, Artificial Sequence
  ENSG00000140323_69 (sequence is synthesized)
aaagacagacattcctcaccctttctacccacacccttgttcacagggatgactgtaactaaggtctgcaggtatttatgcttaggagaagaaatcgtagttcaattcaccaggaatatg

SEQ ID NO: 358935 - DNA, 120 bp, Artificial Sequence
  ENSG00000140323_70 (sequence is synthesized)
agaaacaaaagaaagccactatgtgctatgtaaatgtctggccatccaaagccaccttatgcagaggaacactggaagggccttgataaatttctcataattattatcgggcctctttgt

SEQ ID NO: 358936 - DNA, 120 bp, Artificial Sequence
  ENSG00000140323_71 (sequence is synthesized)
gattactcacatttttctcaatataggggaaagatcagcattttaccaaatccacaaccatcaaacaaacaagagctttaatattgctaaagaaaatcacacagctgagcagattgatgt

SEQ ID NO: 358937 - DNA, 120 bp, Artificial Sequence
  ENSG00000140323_72 (sequence is synthesized)
agatttgaattcatgaccacctatcttaactggaccctcagctctgcctagctagtattcattctagctactagttttgattatttgtattgactcttttatattttctccaccttcctc

SEQ ID NO: 358938 - DNA, 120 bp, Artificial Sequence
  ENSG00000140323_73 (sequence is synthesized)
aaatatctcaccttcccccacccctcagtggacaaaaaaaaaaaaaaaattcttcatgaagaaaactgaagccttcaaatagaaatttcctcaccttcaaggcaccaaagccacaactta

SEQ ID NO: 358939 - DNA, 120 bp, Artificial Sequence
  ENSG00000140323_74 (sequence is synthesized)
cctacccccgctcctgcctgctcctctccccatcccttctgctacaacgaaggaagcagtaatggctccatcaatggcttctcacacttggtgtcagaggccttcacacgagggtttgca

SEQ ID NO: 358940 - DNA, 120 bp, Artificial Sequence
  ENSG00000140323_75 (sequence is synthesized)
ctcccctacaaggacatgaagactttctagaaggtaggtggacacagatagttttaaagtaatcagtttccagagccgccttctccatatgttcccctccttatattggtgggcctaaga

SEQ ID NO: 358941 - DNA, 120 bp, Artificial Sequence
  ENSG00000140323_76 (sequence is synthesized)
agccacaggcctgacagctgtccttcccaacttccactttcccagttgcctcccctccctcattctgaatcctactctggctccttgctctgcgctgtaaaaaacaaataaaagggccac

SEQ ID NO: 358942 - DNA, 120 bp, Artificial Sequence
  ENSG00000140323_77 (sequence is synthesized)
ttgagaatgctctgcttgaggaagtccttgaaagagcaaagcctggagagcttctttgagaaagttcacaggggcagccctgtggctcagttctgtgccttcttcatttaagaattcaaa

SEQ ID NO: 358943 - DNA, 120 bp, Artificial Sequence
  ENSG00000140323_78 (sequence is synthesized)
ttcattgacatgttatattgtaaaatatataaatatatattaaaaaggaaaaaataataaaaatttttaaaaataattcaacttcaggtgagacacagtggctcatgcctataatcccag

SEQ ID NO: 358944 - DNA, 74 bp, Artificial Sequence
  ENSG00000140323_79 (sequence is synthesized)
acttcaggtgagacacagtggctcatgcctataatcccagtgttttgaaaggctgaagtgggaggattcccgta

SEQ ID NO: 358945 - DNA, 120 bp, Artificial Sequence
  ENSG00000140323_80 (sequence is synthesized)
tgacagagcgagactacatctcaaaataaataaataaataataaaataaaaataaaaattagctgggcatggtgatatgcgcctgtagacccagctactccagaggctgaagcaagagga

SEQ ID NO: 358946 - DNA, 120 bp, Artificial Sequence
  ENSG00000140323_81 (sequence is synthesized)
ggctgaagcaagaggatcacttgaactctggagttcgaggttacagtgagccataatcacattatggcactccagcctggcaacagagcgagaccttaactctaaaaaaagaaataaaga

SEQ ID NO: 358947 - DNA, 120 bp, Artificial Sequence
  ENSG00000140323_82 (sequence is synthesized)
agaatttaaactgaaagtgagatggttgacacaggatacatattaaccacattgatttgaatggaaaaataaaatcagactttttctgttagaaggtcagaattggctcacaggtttgac

SEQ ID NO: 358948 - DNA, 120 bp, Artificial Sequence
  ENSG00000140323_83 (sequence is synthesized)
agagaggatagtctttgcaagtaggatgtatggtggacattttccctaaaatggaataactttaatctgcagctccacagtttgaacaaaaacagactgaaggctgggcgtggtggctca

SEQ ID NO: 358949 - DNA, 120 bp, Artificial Sequence
  ENSG00000140323_84 (sequence is synthesized)
caacagagtctcaaaaaaaaaaaaaaaaatttttgactgaaagtacagatacaacttccctttccagccaagatggaggagcaggggccaagtttatcctcctgcctgaaacaaccaacc

SEQ ID NO: 358950 - DNA, 120 bp, Artificial Sequence
  ENSG00000140323_85 (sequence is synthesized)
aaacagtaaatacatgaaataatgagtttcaagacactggacatgaggtaacaaaagacagtgatctctcagaggcaagaaacaaacaaggagaacccctcggttgcccagcttaccgct

SEQ ID NO: 358951 - DNA, 120 bp, Artificial Sequence
  ENSG00000140323_86 (sequence is synthesized)
tgagaggatgtatttcacggagggagaacccaggcaaagcaagtgactctgaggtgaggggatagctgggagtgtggagcagccaagctggctagagtgctcaggacagggtactggaga

SEQ ID NO: 358952 - DNA, 120 bp, Artificial Sequence
  ENSG00000140323_87 (sequence is synthesized)
ggagaaaggtggatatatagagaattctggggatctgcaaagggccccccttgagtgttccacagagcatgattcatcatataagtgtaaggaaaccacttgagacaaaggaaaggacca

SEQ ID NO: 358953 - DNA, 120 bp, Artificial Sequence
  ENSG00000140323_88 (sequence is synthesized)
cccaaaacaatgggccggaacagtagccagaagtcacacacagcctggaccacgcctgtccccatcagccagattggaaaacctcaaatttatggagcattggtcagaggtctcagaagg

SEQ ID NO: 358954 - DNA, 120 bp, Artificial Sequence
  ENSG00000140323_89 (sequence is synthesized)
gccttgcctcgtagtggggattcattagccctagtttaaacattgctggaacctacctaacaaatctcaaaagcaagacctgaattcaggaatcaagctgtttctaagtaactgaagtgt

SEQ ID NO: 358955 - DNA, 120 bp, Artificial Sequence
  ENSG00000140323_90 (sequence is synthesized)
atcccagaacaaaacccaagaacattaacagaaatccaaaattaacgagcacccaaaaatgtaaaattcacaatggctggttttccaataaaaaattaccagtcatgcaaactataaccc

SEQ ID NO: 358956 - DNA, 120 bp, Artificial Sequence
  ENSG00000140323_91 (sequence is synthesized)
atcataaggagaaaaatcagttgaaaccactacagctgacacctatgtgagaattagacaaggacactaaaagaattattataactgtattccatatgtactaagtagagactaggaaga

SEQ ID NO: 358957 - DNA, 120 bp, Artificial Sequence
  ENSG00000140323_92 (sequence is synthesized)
tatttttaaatacccactttgaattttagagacgaaaactaaaatgtctgagatgatggggtgggtggggtaggcagaaagaggaggatgggaagaagtaccaaggggaaggaggaatga

SEQ ID NO: 358958 - DNA, 120 bp, Artificial Sequence
  ENSG00000140323_93 (sequence is synthesized)
tttggggatgacggctgtgtttattatcttaattgtggtgatggtttcacaggtatatgtaatttctaaacttatcaaattgtacacttaaaatatgtggtctatggaatgttaattata

SEQ ID NO: 358959 - DNA, 120 bp, Artificial Sequence
  ENSG00000140323_94 (sequence is synthesized)
tctcaataaagctgttaaaattgtactgaaacaaaaccattgggggaaactgggtaaagagtccaaaggacctccctatactatcattgtaacttcctgtcaattataacgattccaaaa

SEQ ID NO: 358960 - DNA, 120 bp, Artificial Sequence
  ENSG00000140323_95 (sequence is synthesized)
caggaaggggacattgggtgacccaccccaaggcaggtcagaggggcttgccaaggaaggctccctggggagtggtctctggcctcctctgagtcttccaaccctaatggtgcctggcat

SEQ ID NO: 358961 - DNA, 120 bp, Artificial Sequence
  ENSG00000140326_0 (sequence is synthesized)
agtcgccccagagcgccccgaccgggatggcggccgttttggagtcgctgctgcgagaagaggtgtcggtcgcagccgtcgtgcggtggatcgcgcgcagcacccagggttcggaggata

SEQ ID NO: 358962 - DNA, 120 bp, Artificial Sequence
  ENSG00000140326_1 (sequence is synthesized)
acgctggggaggcggccgcgctgagctcactccgggccctgcggaaagaattcgtaccgttcctgttgaacttcctgagggagcagagcagccgcgtcctcccgcaggggcccccgaccc

SEQ ID NO: 358963 - DNA, 80 bp, Artificial Sequence
  ENSG00000140326_2 (sequence is synthesized)
gccgggaggcccgccgcggggtagccgcggggcgcgcagccagcttttccctccgaccgaggcccagagcaccgctgccg

SEQ ID NO: 358964 - DNA, 80 bp, Artificial Sequence
  ENSG00000140326_3 (sequence is synthesized)
cccgcgagcgtggaggccgcggcctggaggagggggtcagcggggagagcctgcccggagccgggggccggaggcttagg

SEQ ID NO: 358965 - DNA, 120 bp, Artificial Sequence
  ENSG00000140326_4 (sequence is synthesized)
ggcttaggggctctggcagccccagccgccccagcctcacgctgtctgatccgccaaacctcagcaacctggaggagttccctcccgtaggctcggttccccccggccctacagggacga

SEQ ID NO: 358966 - DNA, 120 bp, Artificial Sequence
  ENSG00000140326_5 (sequence is synthesized)
agccttctcgcaggatcaacccaactccggtgagcgaagagcggtcactctccaagcccaagacctgcttcacctcacccccaatcagctgtgtccccagttcccaaccctcagccctgg

SEQ ID NO: 358967 - DNA, 120 bp, Artificial Sequence
  ENSG00000140326_6 (sequence is synthesized)
acactagcccttggggccttggccttcccccagggtgcagaagtctgcaagaggagcgagagatgctcaggaaggagcgctctaagcagctgcagcagtcacctacccccacctgtccca

SEQ ID NO: 358968 - DNA, 120 bp, Artificial Sequence
  ENSG00000140326_7 (sequence is synthesized)
ccccagaattggggtcgcccctccccagccggacaggaagcctcacagatgaacctgcagaccctgccagagtgtcttcccgccagcgcctggagcttgtagcccttgtttactcctcgt

SEQ ID NO: 358969 - DNA, 120 bp, Artificial Sequence
  ENSG00000140326_8 (sequence is synthesized)
gcattgctgagaacctggtaccaaacctcttcttggagcttttcttcgtctttcagctcctcactgcccggaggatggtgactgccaaggacagcgaccctgaactaagtccagctgtcc

SEQ ID NO: 358970 - DNA, 120 bp, Artificial Sequence
  ENSG00000140326_9 (sequence is synthesized)
tagattccctggaaagtccactgttccaaagcatccacgattgtgtcttctttgcagtgcaggttttggagtgtcactttcaggttctttccaacctggacaaagggaccttgaagctgc

SEQ ID NO: 358971 - DNA, 120 bp, Artificial Sequence
  ENSG00000140326_10 (sequence is synthesized)
tggctgagaatgagcggctgctgtgcttctcaccagctctgcaaggccgccttcgagctgcctatgagggcagtgttgccaaggtctctctggtgatgcctccctctactcaagctgtct

SEQ ID NO: 358972 - DNA, 120 bp, Artificial Sequence
  ENSG00000140326_11 (sequence is synthesized)
cctttcagccagagactgacaatcgtgccaacttctccagtgaccgagcctttcatacttttaagaaacagagggatgtgttttatgaggtgctgcgagagtgggaagatcaccatgagg

SEQ ID NO: 358973 - DNA, 120 bp, Artificial Sequence
  ENSG00000140326_12 (sequence is synthesized)
agcctggctgggattttgagaagggcttgggcagcagaatcagggccatgatgggtcagctctccgcagcctgcagccacagccactttgttcggcttttccaaaaacaactactccaga

SEQ ID NO: 358974 - DNA, 120 bp, Artificial Sequence
  ENSG00000140326_13 (sequence is synthesized)
tgtgtcagagccctggtggtgctgggggcaccgtcttgggcgaggccccagatgtgttgagtatgctgggagctgacaagctggggcggttgtggcgcctacaggaacggcttatggctc

SEQ ID NO: 358975 - DNA, 120 bp, Artificial Sequence
  ENSG00000140326_14 (sequence is synthesized)
ctcagagcagtggggggccctgcccaccccccaccttcccaggctgtcaaggcttctttagggacttcatccttagtgccagcagcttccagtttaaccagcatctcatggacagtctga

SEQ ID NO: 358976 - DNA, 120 bp, Artificial Sequence
  ENSG00000140326_15 (sequence is synthesized)
gcttgaagatccaggagctcaatggtcttgccctgccccagcatgagcccaatgatgaagacggggagtcagacgtagactggcagggtgagcggaagcaatttgctgtggtgcttctta

SEQ ID NO: 358977 - DNA, 120 bp, Artificial Sequence
  ENSG00000140326_16 (sequence is synthesized)
gcctgagacttttggctaaattcctgggctttgtggctttcctgccataccgggggcctgaacctcccccgaccggtgagcttcaggactccattctggccctcaggagccaggtccctc

SEQ ID NO: 358978 - DNA, 120 bp, Artificial Sequence
  ENSG00000140326_17 (sequence is synthesized)
cggtcctggatgtgcggactctgctgcagcgagggctgcaggcccgccgggcggtgctcaccgtgccctggctggtggagtttctctcctttgctgaccatgttgttcccttgctggaat

SEQ ID NO: 358979 - DNA, 120 bp, Artificial Sequence
  ENSG00000140326_18 (sequence is synthesized)
attaccgggacatcttcactctcctgctgcgcctgcaccggagcttggtgttgtcgcaggagagtgaggggaagatgtgtttcctgaacaagctgctgctacttgctgtcctgggctggc

SEQ ID NO: 358980 - DNA, 120 bp, Artificial Sequence
  ENSG00000140326_19 (sequence is synthesized)
ggacaatgcgcctgtggtggaccagcagctgctctacacctgctgcccctacatcggagagctccggaaactgctcgcttcgtgggtgtcaggcagtagtggacggagtgggggcttcat

SEQ ID NO: 358981 - DNA, 120 bp, Artificial Sequence
  ENSG00000140326_20 (sequence is synthesized)
gaggaaaatcacccccaccactaccaccagcctgggagcccagccttcccagaccagccaggggctgcaggcacagctcgcccaggcctttttccacaaccagccgccctccttgcgccg

SEQ ID NO: 358982 - DNA, 120 bp, Artificial Sequence
  ENSG00000140326_21 (sequence is synthesized)
gaccgtagagttcgtggcagaaagaattggatcaaactgtgtcaaacatatcaaggctacactggtggcagatctggtgcgccaggcagagtcacttctccaagagcagctggtgacaca

SEQ ID NO: 358983 - DNA, 120 bp, Artificial Sequence
  ENSG00000140326_22 (sequence is synthesized)
gggagaggaagggggagacccagcccagctgttggagatcttgtgttcccagctgtgccctcacggggcccaggcattggccctggggcgggagttctgtcaaaggaagagccctggggc

SEQ ID NO: 358984 - DNA, 120 bp, Artificial Sequence
  ENSG00000140326_23 (sequence is synthesized)
tgtgcgggcgctgcttccagaggagaccccggcagccgttctgagcagtgcagagaacattgctgtggggcttgcaacagagaaagcctgtgcttggctgtcagccaacatcacagcact

SEQ ID NO: 358985 - DNA, 120 bp, Artificial Sequence
  ENSG00000140326_24 (sequence is synthesized)
gatcaggagggaggtgaaagcagcagtgagtcgcacacttcgagcccagggtcctgaacctgctgcccggggggagcggaggggctgctcccgcgcctgtgagcaccatgctcccctccc

SEQ ID NO: 358986 - DNA, 120 bp, Artificial Sequence
  ENSG00000140326_25 (sequence is synthesized)
ctcccacctcatctccgagataaaagacgtgctctccttggccgtggggccacgggaccctgacgagggagtctccccagagcatctggaacagctcctaggccagctgggccagacgct

SEQ ID NO: 358987 - DNA, 120 bp, Artificial Sequence
  ENSG00000140326_26 (sequence is synthesized)
gcggtgccgccagttcctgtgcccacctgctgagcagcatctggcaaagtgctctgtggagttagcttccctcctcgttgcagatcaaattcctatcctagggcccccggcacagtacag

SEQ ID NO: 358988 - DNA, 120 bp, Artificial Sequence
  ENSG00000140326_27 (sequence is synthesized)
gctggagagagggcaggctcgaaggcttctgcacatgctgctttccttgtggaaggaagactttcaggggccggttccgctgcagctgctgctgagcccaagaaatgtggggcttctggc

SEQ ID NO: 358989 - DNA, 120 bp, Artificial Sequence
  ENSG00000140326_28 (sequence is synthesized)
agacacaaggccaagggagtgggacttgctgctattcttgctacgggagctggtggagaagggtctgatgggacggatggagatagaggcctgcctgggcagcctccaccaggcccagtg

SEQ ID NO: 358990 - DNA, 120 bp, Artificial Sequence
  ENSG00000140326_29 (sequence is synthesized)
gccaggggactttgctgaagaattagcaacactgtctaatctgtttctagccgagccccacctgccagaaccccagctaagagcctgtgagttggtgcagccaaaccggggcactgtgct

SEQ ID NO: 358991 - DNA, 120 bp, Artificial Sequence
  ENSG00000140326_30 (sequence is synthesized)
ggcccagagctagggctgagaagtggccctgccttgggcattgcaccagaaccctggacccccgcctcacgaggaggcccaagtgcccaatgcagaccctcactggttggggtgtagctg

SEQ ID NO: 358992 - DNA, 120 bp, Artificial Sequence
  ENSG00000140326_31 (sequence is synthesized)
ggtctacagtcagacttcctgctctaagggtgtcactgcctggcatcccaccacgcgaatcctagaggaaggagagttggcctgatttgggattatggcagaaaagtccagagatgccag

SEQ ID NO: 358993 - DNA, 120 bp, Artificial Sequence
  ENSG00000140326_32 (sequence is synthesized)
tcctggagtagaagaggtggtgtttgtttatctcttggatactaaatgaaatgaggtgtgtgggcttgtcaacacagaattcaagcctcatttgctatcccagcatctcttaaaactttg

SEQ ID NO: 358994 - DNA, 120 bp, Artificial Sequence
  ENSG00000140326_33 (sequence is synthesized)
tagtcttggaattcatgacagaggcaaatgactcctgcttaacttatgaagaaagttaaaacatgaatcttgggagtctacattttcttatcaccaggagctggactgccatctccttat

SEQ ID NO: 358995 - DNA, 80 bp, Artificial Sequence
  ENSG00000140326_34 (sequence is synthesized)
cattttcttatcaccaggagctggactgccatctccttataaatgcctaacacaggccgggttgaggtcggcggactgcc

SEQ ID NO: 358996 - DNA, 120 bp, Artificial Sequence
  ENSG00000140326_35 (sequence is synthesized)
agccgaggtcgcaccactgcactccagtctgggtaacagagcgagactttctagaaaaagcctaacaaacagataaggtaggactcaaccaactgaaacctgactttccccctgtacctt

SEQ ID NO: 358997 - DNA, 120 bp, Artificial Sequence
  ENSG00000140326_36 (sequence is synthesized)
ccttcagcccctgtgcaggtagtaacctcttgagacctctccctgaccagggaccaagcacagggcatttagagctttttagaataaactggttttctttaacaagggcttgatgtctaa

SEQ ID NO: 358998 - DNA, 120 bp, Artificial Sequence
  ENSG00000140326_37 (sequence is synthesized)
ttccccttcctgttccacacagaaatgggctccatttatccatctcaagtctcttcccagcagctctgccctttgagatctcaatctctgtcatcagggtcactctgtcgtcctcctagc

SEQ ID NO: 358999 - DNA, 120 bp, Artificial Sequence
  ENSG00000140326_38 (sequence is synthesized)
gagtcttcagggccaccctgaaattgtcccgatttgagtagttattatatgagggactgtgttagtgggaagacggacgaaaggcaggcagttagttggaaagcagcacagcccattata

SEQ ID NO: 359000 - DNA, 120 bp, Artificial Sequence
  ENSG00000140326_39 (sequence is synthesized)
tgggtttttaaaattagaataacctggattttaacgggaataataatttcaagatgaagtagatgcactcagtagtactcaaaaactggtcaagcctgtgcctccatcagagttcgctcc

SEQ ID NO: 359001 - DNA, 120 bp, Artificial Sequence
  ENSG00000140326_40 (sequence is synthesized)
ctgccataacttcagcctcccagagtactaacaaacagacaaggtttcatgtccatttcagtgtggagggcagttgagaaaaaataatatagccagccaggttgtggtctttagtgacaa

SEQ ID NO: 359002 - DNA, 120 bp, Artificial Sequence
  ENSG00000140332_0 (sequence is synthesized)
tataatatatatctatttattatatgtctttcggttaattcctgatctgaggagcgctgtttttcactcccatgcgaaagtcaccagcgggtagggcctgattgctacttttcatgcata

SEQ ID NO: 359003 - DNA, 120 bp, Artificial Sequence
  ENSG00000140332_1 (sequence is synthesized)
gttttagacacaagagggcattgtgacgtcgcgcccagcggcacccagtcgtaggccgagtcccgcagccccacgtgggggccccgcgctcccattggccagcgccggacgaagctgcca

SEQ ID NO: 359004 - DNA, 120 bp, Artificial Sequence
  ENSG00000140332_2 (sequence is synthesized)
cattattttgttacttttcagtccctatttggaactgctctcgcggcagttcagacctcgtgctcgtccccttcgcctgtctgtgtgtggtatccgtaggtccggggcactttttttttt

SEQ ID NO: 359005 - DNA, 120 bp, Artificial Sequence
  ENSG00000140332_3 (sequence is synthesized)
ggtgtgtgtgtgtgtgcgtgcgcgcgtgtgtgtgtgttgggtgtgtgtgttttgggggtttgccggggcgcggagaggagagccgggccgaggggaaggaaggaagccgtagagctcccc

SEQ ID NO: 359006 - DNA, 120 bp, Artificial Sequence
  ENSG00000140332_4 (sequence is synthesized)
ggtctcgggctgcgtctcccctccagcgctctcctgcctgtgcgctccgacgcggcagcggcggtggcgctgagcgctcctcggtggggacgcggtgctcaagctgggagcagcgagaac

SEQ ID NO: 359007 - DNA, 120 bp, Artificial Sequence
  ENSG00000140332_5 (sequence is synthesized)
cctttgcggaggcttcccgtgcccgctggacttaggatgccagggcgtttgatttgcacctactgagcccggagttcctccccggccctgggaagggcttgcagcggcggcggcggcggc

SEQ ID NO: 359008 - DNA, 120 bp, Artificial Sequence
  ENSG00000140332_6 (sequence is synthesized)
ggcagcggcagtagcagacggaacagcaggctctcctctccgagggggggcgtcgaagcgcccgcgccgggctcccgccctcaccctccggcgctcctgcggccccaagccaccacctcg

SEQ ID NO: 359009 - DNA, 120 bp, Artificial Sequence
  ENSG00000140332_7 (sequence is synthesized)
tagcccgcctccttcctcttctcgccgcgagccccaggcccggacgcctctaggatcggacccgcgcgccccggatgcttggggctgccccggcgcgcccccctacaggcgcgacccgct

SEQ ID NO: 359010 - DNA, 120 bp, Artificial Sequence
  ENSG00000140332_8 (sequence is synthesized)
gagtgacccggagggggcccgagctcgccccaggaggggcccccggcctcgggaccccgcgccggacctgctggggagccgacgatgtccgcgcagtcccaggcattgacgcgctcgacg

SEQ ID NO: 359011 - DNA, 120 bp, Artificial Sequence
  ENSG00000140332_9 (sequence is synthesized)
cgagccctaggcgcacaaagcccgcgcccgccgcccggccccggcgcccgccgacgactttgccgcctgctccgcggctctttgtctccacttggggcgggcgcccgactctgggatttc

SEQ ID NO: 359012 - DNA, 120 bp, Artificial Sequence
  ENSG00000140332_10 (sequence is synthesized)
cacttggggcgggcgcccgactctgggatttcgctgcgagaacgagctgggggggccgggggcgagctctcggtttcccggccgccccccgctcgggctcggctcccccctcccccgcac

SEQ ID NO: 359013 - DNA, 120 bp, Artificial Sequence
  ENSG00000140332_11 (sequence is synthesized)
ctccccggcccgggctctcggcgcttccacgctctcggaatcacgacccctccctgccatgtatccgcagggcagacatccggctccccatcaacccgggcagccgggatttaaattcac

SEQ ID NO: 359014 - DNA, 120 bp, Artificial Sequence
  ENSG00000140332_12 (sequence is synthesized)
ggtggctgagtcttgtgacaggatcaaagacgaattccagttcctgcaagctcagtatcacagcctcaaagtggagtacgacaagctggcaaacgagaagacggagatgcagcgccatta

SEQ ID NO: 359015 - DNA, 120 bp, Artificial Sequence
  ENSG00000140332_13 (sequence is synthesized)
tgtgatgtactatgagatgtcctatggcttgaacattgaaatgcacaagcagacagagattgcgaagagactgaacacaattttagcacagatcatgcctttcctgtcacaagagcacca

SEQ ID NO: 359016 - DNA, 120 bp, Artificial Sequence
  ENSG00000140332_14 (sequence is synthesized)
gcagcaggtggcgcaggcagtggagcgcgccaagcaggtcaccatgacggagctgaacgccatcatcgggcagcagcagctccaggcgcagcacctctcccatgccacacacggcccccc

SEQ ID NO: 359017 - DNA, 120 bp, Artificial Sequence
  ENSG00000140332_15 (sequence is synthesized)
ggtccagttgccaccccacccgtcaggtctccagcctccaggaatccccccagtgacagggagcagctccgggctgctggcactgggcgccctgggcagccaggcccatctgacggtgaa

SEQ ID NO: 359018 - DNA, 120 bp, Artificial Sequence
  ENSG00000140332_16 (sequence is synthesized)
ggatgagaagaaccaccatgaactcgatcacagagagagagaatccagtgcgaataactctgtgtcaccctcggaaagcctccgggccagtgagaagcaccggggctctgcggactacag

SEQ ID NO: 359019 - DNA, 120 bp, Artificial Sequence
  ENSG00000140332_17 (sequence is synthesized)
catggaagccaagaagcggaaggcggaggagaaggacagcttgagccgatacgacagtgatggagacaagagtgatgatctggtggtggatgtttccaatgaggaccccgcaacgccccg

SEQ ID NO: 359020 - DNA, 120 bp, Artificial Sequence
  ENSG00000140332_18 (sequence is synthesized)
ggtcagcccggcacactcccctcctgaaaatgggctggacaaggcccgtagcctgaaaaaagatgcccccaccagccctgcctcggtggcctcttccagtagcacaccttcctccaagac

SEQ ID NO: 359021 - DNA, 120 bp, Artificial Sequence
  ENSG00000140332_19 (sequence is synthesized)
caaagaccttggtcataacgacaaatcctccacccctgggctcaagtccaacacaccaaccccaaggaacgacgccccaactccaggcaccagcacgaccccagggctcaggtcgatgcc

SEQ ID NO: 359022 - DNA, 120 bp, Artificial Sequence
  ENSG00000140332_20 (sequence is synthesized)
gggtaaacctccgggcatggacccgataggtataatggcctcggctctgcgcacgcccatctccatcaccagctcctatgcggcgcccttcgccatgatgagccaccatgagatgaacgg

SEQ ID NO: 359023 - DNA, 120 bp, Artificial Sequence
  ENSG00000140332_21 (sequence is synthesized)
ctccctcaccagtcctggcgcctacgccggcctccacaacatcccaccccagatgagcgccgccgccgctgctgcagccgctgcctatggccgatcgccaatggtgagctttggagctgt

SEQ ID NO: 359024 - DNA, 120 bp, Artificial Sequence
  ENSG00000140332_22 (sequence is synthesized)
tggttttgaccctcaccccccgatgcgggccacaggcctcccctcaagcctggcctccattcctggaggaaaaccagcgtactcattccatgtgagtgctgatgggcagatgcagcccgt

SEQ ID NO: 359025 - DNA, 120 bp, Artificial Sequence
  ENSG00000140332_23 (sequence is synthesized)
gcccttcccccacgacgccctggcaggccccggcatcccgaggcacgcccggcagatcaacacactcagccacggggaggtggtgtgtgccgtgaccatcagcaaccccacgaggcacgt

SEQ ID NO: 359026 - DNA, 120 bp, Artificial Sequence
  ENSG00000140332_24 (sequence is synthesized)
ctacacaggtggcaagggctgcgtgaagatctgggacatcagccagccaggcagcaagagccccatctcccagctggactgcctgaacagggacaattacatccgctcctgcaagctgct

SEQ ID NO: 359027 - DNA, 120 bp, Artificial Sequence
  ENSG00000140332_25 (sequence is synthesized)
gatgggcgcacgctcatcgtgggcggcgaggccagcacgctcaccatctgggacctggcctcgcccacgccccgcatcaaggccgagctgacgtcctcggctcccgcctgttatgccctg

SEQ ID NO: 359028 - DNA, 120 bp, Artificial Sequence
  ENSG00000140332_26 (sequence is synthesized)
gccattagccctgacgccaaagtctgcttctcctgctgcagcgatgggaacattgctgtctgggacctgcacaaccagaccctggtcaggcagttccagggccacacagatggggccagc

SEQ ID NO: 359029 - DNA, 120 bp, Artificial Sequence
  ENSG00000140332_27 (sequence is synthesized)
tgcatagacatctcccatgatggcaccaaactgtggacagggggcctggacaacacggtgcgctcctgggacctgcgggagggccgacagctacagcagcatgacttcacttcccagatc

SEQ ID NO: 359030 - DNA, 120 bp, Artificial Sequence
  ENSG00000140332_28 (sequence is synthesized)
ttctcgctgggctactgccccactggggagtggctggctgtgggcatggagagcagcaacgtggaggtgctgcaccacaccaagcctgacaagtaccagctgcacctgcacgagagctgc

SEQ ID NO: 359031 - DNA, 120 bp, Artificial Sequence
  ENSG00000140332_29 (sequence is synthesized)
gtgctctccctcaagttcgcctactgcggcaagtggttcgtgagcactgggaaagataaccttctcaacgcctggaggacgccttatggagccagcatattccagtctaaagaatcctcg

SEQ ID NO: 359032 - DNA, 120 bp, Artificial Sequence
  ENSG00000140332_30 (sequence is synthesized)
tctgtcttgagttgtgacatttcagcggatgacaaatacattgtaacaggctctggtgacaagaaggccacagtttatgaggtcatctactaaacaagaactccagcagggctgtcaaac

SEQ ID NO: 359033 - DNA, 120 bp, Artificial Sequence
  ENSG00000140332_31 (sequence is synthesized)
tctgggagaaaccgactcggctctgacagggagacccccaggcgaggggccccgaggatggcggaggatgggccgcaggcagccgagcgttcagggctgcgctccggccggctgagaggg

SEQ ID NO: 359034 - DNA, 120 bp, Artificial Sequence
  ENSG00000140332_32 (sequence is synthesized)
cacgtgccccgtcacagtctggactcctgggcctggattgatgtgtctcacagactcggaagggttctgctcctcctcctccccctgaacaatgctggcagttgctacaaatagatttat

SEQ ID NO: 359035 - DNA, 120 bp, Artificial Sequence
  ENSG00000140332_33 (sequence is synthesized)
tggaggcttatggctccggttcccccacagacccgctcatgagtctctgtttgttcttcccttttcttttgccctgtccctcaccttgggtcgggggtgctggagtggaccacaatgttg

SEQ ID NO: 359036 - DNA, 120 bp, Artificial Sequence
  ENSG00000140332_34 (sequence is synthesized)
tgctgggggatgggggggtctctctttgccgattgtgcagtgcacaagatttgtgaaaaatgtaaataacagactcctattgcggactgatcagtgggagaggaggccccttcccaccgg

SEQ ID NO: 359037 - DNA, 120 bp, Artificial Sequence
  ENSG00000140332_35 (sequence is synthesized)
aaactctgagtgtgtatttcgcctgctgtatttgtaatccactcgtggtggtggcttttttttttttttttttttaaataaacagatgctctcacctgggaagaggagacagggagggga

SEQ ID NO: 359038 - DNA, 120 bp, Artificial Sequence
  ENSG00000140332_36 (sequence is synthesized)
accaattgaagaaagaggagaaaagtcttagagtgtggaaaaggcaaccaggttggccgtaaggtgcctgctggaatgcgtgtgcctccacacgggtctgggcatccggactgataacca

SEQ ID NO: 359039 - DNA, 120 bp, Artificial Sequence
  ENSG00000140332_37 (sequence is synthesized)
gccggccagactgagggatggaaggcactgagatgggggcccgtccaggcggacacccgcagaaatggagctttctgtggtctcttgcactctggctgcctcttgccctctctgtgtctc

SEQ ID NO: 359040 - DNA, 120 bp, Artificial Sequence
  ENSG00000140332_38 (sequence is synthesized)
tctttcttggtctctccctctctcctcctcagcctggtctttctctttggtgcacacttagttattgttgtgagcaatggaagttcaaaggaactccctctccagctcttctgaatcttg

SEQ ID NO: 359041 - DNA, 120 bp, Artificial Sequence
  ENSG00000140332_39 (sequence is synthesized)
ggacacagcctaaaaaggacaaaaagttagaagacagcatagcaactcagctcagggagctaccagagaaaaatagcaactgatgtgggtgctttttttttttttttaatttgaataaaa

SEQ ID NO: 359042 - DNA, 120 bp, Artificial Sequence
  ENSG00000140332_40 (sequence is synthesized)
agaattagaagtgatgtccttttataaaatgccttctcccccttcccgcctacagtctcttcctctccccttagaggggggaaagtgtataaacctacagggttgtgagtctgaaaagag

SEQ ID NO: 359043 - DNA, 120 bp, Artificial Sequence
  ENSG00000140332_41 (sequence is synthesized)
gatccccctcacccccaccctgggcagagcagtgggggttggggggtgggagagggggacacagatcctggcacactgtggatatttcttgcagattgcagtctcttgtggcccaaacag

SEQ ID NO: 359044 - DNA, 120 bp, Artificial Sequence
  ENSG00000140332_42 (sequence is synthesized)
cttgtggcccaaacaggttaggtagactatcgcctctggcaggtgccaccttttggtaccaacatgttctgaggtgttaggatttgggttgggttttttttgtttgttttttttttcctt

SEQ ID NO: 359045 - DNA, 120 bp, Artificial Sequence
  ENSG00000140332_43 (sequence is synthesized)
tctccttttaaagaaaagctaaaggccgctgtgagtcctggtggcaggctctccatggatgtagcatatcgaagataatttttatactgcatttttatggattattttgtaatgtgtgat

SEQ ID NO: 359046 - DNA, 120 bp, Artificial Sequence
  ENSG00000140332_44 (sequence is synthesized)
tccgtctgctgaggaggtgggaggggctccagggaaagccacccaccttcagtgaggttgctccccagctgagcgcaccgggcatgggatgtggaggctggcgacacaccctgtgcctct

SEQ ID NO: 359047 - DNA, 120 bp, Artificial Sequence
  ENSG00000140332_45 (sequence is synthesized)
ccaaggctgggcgcgtggggcgtccagagtctctctgggtctcagatgtccatctgccacctcttgttaaggctctagccagaagggagggtgagggtagaagaaagttattcccgaaga

SEQ ID NO: 359048 - DNA, 120 bp, Artificial Sequence
  ENSG00000140332_46 (sequence is synthesized)
aaaaaagaatgaaaagtcattgtactgaactgtttttatatttttaaaagttactatttaaaggttggtttgattgttgcgtcttaattgcctctccccccagtttgccagtcccgcccc

SEQ ID NO: 359049 - DNA, 120 bp, Artificial Sequence
  ENSG00000140332_47 (sequence is synthesized)
ccgccccccgggaaaacagccaggccactgttgctgtcacattctggagcctgggccagggccatttcccatcgatgtgagctcttctcatctcacagcattccctgcgctgcttccacc

SEQ ID NO: 359050 - DNA, 120 bp, Artificial Sequence
  ENSG00000140332_48 (sequence is synthesized)
cccttctccccttccagatacccagcatcgcagcagggatttcacaatcccatactgtgtcgcctcccatccaagcgccagggagggtggggggtaggagctaagacttcctctggacag

SEQ ID NO: 359051 - DNA, 120 bp, Artificial Sequence
  ENSG00000140332_49 (sequence is synthesized)
atgggcagggcagagttcactgaggtgaaggaagaccacaggttaacaccaaagtattgtacagctgtcaatgcaaaacttttttggaaaaaaattaaacgtaatgaacttgaagcgaaa

SEQ ID NO: 359052 - DNA, 120 bp, Artificial Sequence
  ENSG00000140332_50 (sequence is synthesized)
aattccgcgcgagtggcgcggggggctgcttgtgttccagggggagctgttcacgcggtccccggccccgctctgaagtctcccaactcacccggcttgtctcccgcccccgccttactg

SEQ ID NO: 359053 - DNA, 120 bp, Artificial Sequence
  ENSG00000140332_51 (sequence is synthesized)
gggagagggaggcccttggtgaaaggcatgggagccccgctgccgacggggagagatggggcgccccccctccgccccgtcggagagctgagaaacttgctgggaaggttctgggctgag

SEQ ID NO: 359054 - DNA, 120 bp, Artificial Sequence
  ENSG00000140332_52 (sequence is synthesized)
ggtggcctcttttggttgggcgccgttggggaggggccggggccgctctgagcgcggtctcatgcccccgccccctcccctgtcttgtcttcgcgggctccaggctccccatcaacccgg

SEQ ID NO: 359055 - DNA, 120 bp, Artificial Sequence
  ENSG00000140332_53 (sequence is synthesized)
gtggcgcaggcagtggagcgcgccaagcaggtcaccatgacggagctgaacgccatcatcgggataaggaaatttgaggctccaggacttgaagtaacctgccccaggccacacagctag

SEQ ID NO: 359056 - DNA, 120 bp, Artificial Sequence
  ENSG00000140332_54 (sequence is synthesized)
tagctctcattccactggcccccagctcatctggctctggggcctttgctgtgatgacctgccctgcccctgctctgtaaggcaggcttggagttcctaagaaataaggagccttcccca

SEQ ID NO: 359057 - DNA, 120 bp, Artificial Sequence
  ENSG00000140332_55 (sequence is synthesized)
gggtccagcctcagggtggaagatgctggcagctaatgctgaaggcatcagcagctccaggcgcagcacctctcccatgccacacacggccccccggtccagttgccaccccacccgtca

SEQ ID NO: 359058 - DNA, 120 bp, Artificial Sequence
  ENSG00000140332_56 (sequence is synthesized)
ttggtcatgtatgtggggtctgggtggaagggagtgggaagggagcggcagggactggagctggggtggtgccgattggcaggcagaggggtggagtgggagaagctgggtgggtgattg

SEQ ID NO: 359059 - DNA, 120 bp, Artificial Sequence
  ENSG00000140332_57 (sequence is synthesized)
gccccggtttaccttctgtgcctgctgggcctgtgctaatgagttaacgtttctgagcctcggttgctacgtctgtaaaatgggagtgatcaccccagtccctgccaaacaaggttgggc

SEQ ID NO: 359060 - DNA, 120 bp, Artificial Sequence
  ENSG00000140332_58 (sequence is synthesized)
aaggattgagaggctgttcggcagaagcttcataagggtctggctctgggcttcacgttgggaccggcaccagttgtgcccggctcctaggagaatggaagcctcatggcctcccttgtt

SEQ ID NO: 359061 - DNA, 120 bp, Artificial Sequence
  ENSG00000140332_59 (sequence is synthesized)
gggatagagcacaggcagtgtctcccagggcctgcccctggggacttcacggtcagatttgaggaggtgacaccagggtttctgggacccctgctgggccagacatgaaagcagcatcag

SEQ ID NO: 359062 - DNA, 120 bp, Artificial Sequence
  ENSG00000140332_60 (sequence is synthesized)
acgggtcagggctcccaaaatctgttcccacccctgtcattagtccagtgaggctctaagcaagcccatttgggcctccatatcctgctctgtaaaaagaggtgggtgcatctgccaagc

SEQ ID NO: 359063 - DNA, 120 bp, Artificial Sequence
  ENSG00000140332_61 (sequence is synthesized)
tctaagcttctttggctctgaaggcagggatcccacttgggtgggttcagtctgagaggactgcctggagcaggcagcttaagaatgcagggagggttattgctgggtgaggcggccatg

SEQ ID NO: 359064 - DNA, 120 bp, Artificial Sequence
  ENSG00000140332_62 (sequence is synthesized)
gagagcactctacccccaattccaacaacgcccctcatcccctgaccaagggtttgccctggtgcacctccctttggaaaggtatctgtccctctagaggcaccgagggctggttgcaac

SEQ ID NO: 359065 - DNA, 120 bp, Artificial Sequence
  ENSG00000140332_63 (sequence is synthesized)
cccaggaaactgtagccaagccacacttctgagcacccacagaagctccctccgacagaggagccatggagttagctaagtacatggccactgggctgggagagaaggaacactcctcac

SEQ ID NO: 359066 - DNA, 120 bp, Artificial Sequence
  ENSG00000140332_64 (sequence is synthesized)
cgagtcacctggagctgtggtgggccttgccgactcctttgggttcgacctgctgggaaggccccagtgccgctggtcgcaggcccttccctgtcagcagtgcttccctcccctggaggg

SEQ ID NO: 359067 - DNA, 120 bp, Artificial Sequence
  ENSG00000140332_65 (sequence is synthesized)
cacactctccccggcccttcacttccttgggttgctaggaaactaaaagattgagcctacagataatgccgagacactgcctgacacagtcctctaattgtcaacgagaatctagatgct

SEQ ID NO: 359068 - DNA, 120 bp, Artificial Sequence
  ENSG00000140332_66 (sequence is synthesized)
gattgagagggcacccaccagagcctgaaacagcaggcaggccaggctggctcaccacaggctctgacatggactttcccatttgctattgcaggggcaagcagatcccttccctaatac

SEQ ID NO: 359069 - DNA, 120 bp, Artificial Sequence
  ENSG00000140332_67 (sequence is synthesized)
caccggctcctaaagcaagaggtggcatttcagccaggccctttccagggttggcatgttgggggaatgtatggatcgtgggaaagggcattccaggacacctgtgggtttctggtctga

SEQ ID NO: 359070 - DNA, 120 bp, Artificial Sequence
  ENSG00000140332_68 (sequence is synthesized)
tttgaagcaaggatatataactgggtgtaaaaatcaaagctggtctgttaatcatgtctacctcgatggagccatcccagtacatggggttactgggttcgaatggtttcagagcagagg

SEQ ID NO: 359071 - DNA, 120 bp, Artificial Sequence
  ENSG00000140332_69 (sequence is synthesized)
gggctagaggcagggcagccagtcgggggcagtgcagatgacctgggccaggcctatgggaactctgaggggccggggtggatggcagcagtgacggtttctcaccttttcagagcgtac

SEQ ID NO: 359072 - DNA, 120 bp, Artificial Sequence
  ENSG00000140332_70 (sequence is synthesized)
ctggtgagaatcccagggctgctgcgccgcctccagctggtgtaggaggatggggcagcctgggccacaggggagagccccagggcctggctcagcatcgtattggctgagcaactttag

SEQ ID NO: 359073 - DNA, 120 bp, Artificial Sequence
  ENSG00000140332_71 (sequence is synthesized)
gcaagctgactaacctctctgagcctcagttgtgccttctgtgtgtggggctgattctgacctcctggtattcatgaaagatcaaagggttgtgaatttgaggaatggggacagcctggc

SEQ ID NO: 359074 - DNA, 120 bp, Artificial Sequence
  ENSG00000140332_72 (sequence is synthesized)
agctgctgggtatagggggaggctgtaagcaggactggtgagggtgctcggtgttgctggacaggactctcctggtgcccaggaggggaagtaggcagcactcagccctgccccttctcc

SEQ ID NO: 359075 - DNA, 120 bp, Artificial Sequence
  ENSG00000140332_73 (sequence is synthesized)
cagaccctggtcaggtgagccggcaggagggagcattagtgcctcgtcctggggaagtttttacccatcctgcctggtcttgtttgctgtgaccttggccctgtctgaggcactgtgggg

SEQ ID NO: 359076 - DNA, 120 bp, Artificial Sequence
  ENSG00000140332_74 (sequence is synthesized)
tggccagaaccgttgggatgagggatgcacaggtgaaaagacagctccgcctgccttatgcgagggacagaggagggagggccattgggcccaggagttggagagggctctgggaagaaa

SEQ ID NO: 359077 - DNA, 120 bp, Artificial Sequence
  ENSG00000140332_75 (sequence is synthesized)
gtggagctggagcatgtctggggaagtggaggtcagattagtggagcaagcagagagtctgggagcagagccccagagaccagattagggagacccgactgggaagccacatcacgtggt

SEQ ID NO: 359078 - DNA, 120 bp, Artificial Sequence
  ENSG00000140332_76 (sequence is synthesized)
agctaaacaagcctcaggacaaaactgctggctttgaatcctgcctccactatgacctagtgcaagtcgctgaacccctgcggctcagtttcttcctgtgtaaaacagtgacagtggagc

SEQ ID NO: 359079 - DNA, 120 bp, Artificial Sequence
  ENSG00000140332_77 (sequence is synthesized)
atcttcctctgactgtgccgcagcgcaaaggcagacgggtgcctggcccagctgactcttgtatacatgggctgtgtgtgttattcagcgtgttcatggatggcctcagccccatagttc

SEQ ID NO: 359080 - DNA, 120 bp, Artificial Sequence
  ENSG00000140332_78 (sequence is synthesized)
gaagagatagattaagagggcaaattgagggcgtgtggagtgcgagttaaggagctgtgtcctaaaggcagtggggccctgcattctctttatcagtcatctcacacgtagcttccccag

SEQ ID NO: 359081 - DNA, 120 bp, Artificial Sequence
  ENSG00000140332_79 (sequence is synthesized)
ggccttcctgccttcctcaccttcctgagcctccagctccacctcctccagaggcccaccctggagggactcagtctcagaaggctagtgcaaggtccctttttcacctcccccccccat

SEQ ID NO: 359082 - DNA, 120 bp, Artificial Sequence
  ENSG00000140332_80 (sequence is synthesized)
ttcccaggggacttgtccctgggcaaacccttccgtggaactggaaagaggcctggaactggaaagaggccggggctagctttgctgcaagctcgctaagggaccatgcgcatagtgcac

SEQ ID NO: 359083 - DNA, 120 bp, Artificial Sequence
  ENSG00000140332_81 (sequence is synthesized)
tcttctgggcctcagttttctcttctgctcagactgcccctgggatggccgccacctggcagtctgtggttcccgggactcaccctcctccctgcttggctttcgtaggcagttccaggg

SEQ ID NO: 359084 - DNA, 120 bp, Artificial Sequence
  ENSG00000140332_82 (sequence is synthesized)
ggccaagagacttgggaccaacctgagccatctgggaaggcttcctggaggaagcagcagtgaaacagatggagatgaccttggggttggacacatttggcccaactgtggaaattcgat

SEQ ID NO: 359085 - DNA, 120 bp, Artificial Sequence
  ENSG00000140332_83 (sequence is synthesized)
tcattctctgctgctattgagcactttgtcctcggcgtcctcattcacaagatggaaataatagtagcaccctcctaggtctgatgtgggcacctgaaatgatccctctaaaaggcgtag

SEQ ID NO: 359086 - DNA, 120 bp, Artificial Sequence
  ENSG00000140332_84 (sequence is synthesized)
ccataaacccgactcacagaaagcattcagtaaatgccagggattattatttcttatttgcattcctcactttaatattttaatcttaaatttttaatattttagttttttttttttaac

SEQ ID NO: 359087 - DNA, 120 bp, Artificial Sequence
  ENSG00000140332_85 (sequence is synthesized)
tcacttttttcttaaggaaagatgaaagtctcagagacagagtaactgaatgcaaaatgtctgtgctttctcacctataaaatggggatggaaaatgacctcccatactcctgggttatt

SEQ ID NO: 359088 - DNA, 120 bp, Artificial Sequence
  ENSG00000140332_86 (sequence is synthesized)
gggtgggtggggagggaccctgagcctcagaggacctgagcagcacctttgggagccgccctcctcttgagggcagagaatgctgagctcagtccatctgccctcccaccacctgcagat

SEQ ID NO: 359089 - DNA, 120 bp, Artificial Sequence
  ENSG00000140332_87 (sequence is synthesized)
ctgagtcctcctctgggttctacccagagttgaaacttggtgatggtgatgggagtgaggatagcagcaggaagaacaggaggagcctggagccaggatcagacctgccctggtcccctc

SEQ ID NO: 359090 - DNA, 120 bp, Artificial Sequence
  ENSG00000140332_88 (sequence is synthesized)
cccacccctacctgataggggagcaagattgggttctcccaaggacctggggacttcagcaggacacacaatctgctactgatggcttctgacccccgagggcaagggcttctaagccgg

SEQ ID NO: 359091 - DNA, 120 bp, Artificial Sequence
  ENSG00000140332_89 (sequence is synthesized)
ggcgcttgtcggatttggagagtgaggaatagcataagtgtttttgctctgggctggatgctgagcacctgcgggaggtgcgctgggcacctgggcacccggcagccttgcccagagcag

SEQ ID NO: 359092 - DNA, 120 bp, Artificial Sequence
  ENSG00000140332_90 (sequence is synthesized)
tgttgcctcctcaagtgagtgagtgtttccacctgcattcagcaccagcagggacatggacaggaaagagaggaggaaaggaagaggctttttataatctaccaggatctggggcctgcc

SEQ ID NO: 359093 - DNA, 120 bp, Artificial Sequence
  ENSG00000140332_91 (sequence is synthesized)
atactgcactgattggcacacacacgtgtgcacacacacacgtgcactctttcccatacacgatcaaactcacactcatttactcacgcacacttggtctcccccacacactttcttcct

SEQ ID NO: 359094 - DNA, 120 bp, Artificial Sequence
  ENSG00000140332_92 (sequence is synthesized)
ctctctctcttgcgcttccacacacacacttgcattctctctcactccctcagccaacatgccgctttctggacccaggctgaaatgtctggtgtgcagcgtgtcaaacctcattgttag

SEQ ID NO: 359095 - DNA, 120 bp, Artificial Sequence
  ENSG00000140332_93 (sequence is synthesized)
ggtctctagttacagcacatgcttcaaacatcaggtggcaatccttttcctaactcatcaggctgtgggcctgagctgctgacgccagctcctagcttggaaatgcttcttcctatttgt

SEQ ID NO: 359096 - DNA, 120 bp, Artificial Sequence
  ENSG00000140332_94 (sequence is synthesized)
aaactcggaggagaagctcttgctaaagcgtcctgttctgatcattatgacttactgtaaagatcacgtgggagactgttactgagcttttccttatggaaaagcaggtgggaggggagc

SEQ ID NO: 359097 - DNA, 120 bp, Artificial Sequence
  ENSG00000140332_95 (sequence is synthesized)
tctacctgaaaatgcttcatgggtgctttaaagcctcccccacctcctcttcaccgcactgtgctccaggtcggagcatcagagaggggcagaggagggcaattgttgccgagagaaccg

SEQ ID NO: 359098 - DNA, 120 bp, Artificial Sequence
  ENSG00000140332_96 (sequence is synthesized)
attatgtgatggtgagatgcggccgcgggcctggggggcggttggggcgccgaccccggccgggggcgcggcgtggatctggggagatgagcgccaggtccccaccaccgcccagccgca

SEQ ID NO: 359099 - DNA, 120 bp, Artificial Sequence
  ENSG00000140332_97 (sequence is synthesized)
ccgaatgagggtctaggtcgcggcgagcgggttcactccgggttctgggtgtcgggagccagcgtcagggtcctactcccctgctgccgtgataagtcctttggctcgcgggaagtttcg

SEQ ID NO: 359100 - DNA, 120 bp, Artificial Sequence
  ENSG00000140332_98 (sequence is synthesized)
aattgtttcacatccccctccccacggcggggacccaaatccccccgcgtccccaggctgtgggataatgggggcgcccccgggggggtgtcaggaaagtggaaaagtggctctagaggc

SEQ ID NO: 359101 - DNA, 120 bp, Artificial Sequence
  ENSG00000140332_99 (sequence is synthesized)
ccttgggtcggggcctcagaggaggctgtccaggcgccacgcctgagccggctcctcctgccctcgcagcctcaaagtggagtacgacaagctggcaaacgagaagacggagatgcagcg

SEQ ID NO: 359102 - DNA, 120 bp, Artificial Sequence
  ENSG00000140350_0 (sequence is synthesized)
agtgtgcgccgcgggtgctgggggctcgagaaccgagcggagctggttgagccttcaaagtcctaaaacgcgcggccgtgggttcggggtttattgattgaattccgccggcgcgggagc

SEQ ID NO: 359103 - DNA, 120 bp, Artificial Sequence
  ENSG00000140350_1 (sequence is synthesized)
ctctgcagagagagagcgcgagagatggagatgggcagacggattcatttagagctgcggaacaggacgccctctgatgtgaaagaacttgtcctggacaacagtcggtcgaatgaaggc

SEQ ID NO: 359104 - DNA, 120 bp, Artificial Sequence
  ENSG00000140350_2 (sequence is synthesized)
aaactcgaaggcctcacagatgaatttgaagaactggaattcttaagtacaatcaacgtaggcctcacctcaatcgcaaacttaccaaagttaaacaaacttaagaagcttgaactaagc

SEQ ID NO: 359105 - DNA, 120 bp, Artificial Sequence
  ENSG00000140350_3 (sequence is synthesized)
gataacagagtctcagggggcctggaagtattggcagaaaagtgtccgaacctcacgcatctaaatttaagtggcaacaaaattaaagacctcagcacaatagagccactgaaaaagtta

SEQ ID NO: 359106 - DNA, 120 bp, Artificial Sequence
  ENSG00000140350_4 (sequence is synthesized)
gaaaacctcaagagcttagaccttttcaattgcgaggtaaccaacctgaacgactaccgagaaaatgtgttcaagctcctcccgcaactcacatatctcgacggctatgaccgggacgac

SEQ ID NO: 359107 - DNA, 120 bp, Artificial Sequence
  ENSG00000140350_5 (sequence is synthesized)
aaggaggcccctgactcggatgctgagggctacgtggagggcctggatgatgaggaggaggatgaggatgaggaggagtatgatgaagatgctcaggtagtggaagacgaggaggacgag

SEQ ID NO: 359108 - DNA, 120 bp, Artificial Sequence
  ENSG00000140350_6 (sequence is synthesized)
gatgaggaggaggaaggtgaagaggaggacgtgagtggagaggaggaggaggatgaagaaggttataacgatggagaggtagatgacgaggaagatgaagaagagcttggtgaagaagaa

SEQ ID NO: 359109 - DNA, 120 bp, Artificial Sequence
  ENSG00000140350_7 (sequence is synthesized)
aggggtcagaagcgaaaacgagaacctgaagatgagggagaagatgatgactaagtggaataacctattttgaaaaattcctattgtgatttgactgtttttacccatatcccctctccc

SEQ ID NO: 359110 - DNA, 120 bp, Artificial Sequence
  ENSG00000140350_8 (sequence is synthesized)
ccccccctccaatcctgccccctgaaacttatttttttctgattgtaacgttgctgtgggaacgagaggggaagagtgtactgggggttgcggggggagggatggcgggtgggggtggaa

SEQ ID NO: 359111 - DNA, 120 bp, Artificial Sequence
  ENSG00000140350_9 (sequence is synthesized)
taaaatactatttttactgccactctttatttttttcccctactttttctttgtgtccggtttttgtccctgtaaatgcgatagctaagtacacactaagtgagcatttgttcctgactc

SEQ ID NO: 359112 - DNA, 120 bp, Artificial Sequence
  ENSG00000140350_10 (sequence is synthesized)
tttcccaagtctcttgggttggttggaaggctgtggctggtctcagtttggttactcaatgcccaggaggggctgagcaccagccatatcttttgctttggttcacatgatgatacctgc

SEQ ID NO: 359113 - DNA, 120 bp, Artificial Sequence
  ENSG00000140350_11 (sequence is synthesized)
ttttctcaggcctgctagaggcatccaacgccctggtttgtaaatagcaacctaaaggcgtattttggcactggtctggggacattccccatctctcatcccttttcccccttcacagat

SEQ ID NO: 359114 - DNA, 120 bp, Artificial Sequence
  ENSG00000140350_12 (sequence is synthesized)
ggtggtgggcttcgctctacaaagaggactctgatgttactcttgagcttatgagccagagagctgaaaaccgcaggcttgttgtgttaagttacaaggaaaatggatttggtaattaaa

SEQ ID NO: 359115 - DNA, 120 bp, Artificial Sequence
  ENSG00000140350_13 (sequence is synthesized)
attagaagaaacacaccttcaaacttcaacttctttaaaagaaaaaaaaaactgtcctatcttgttctgtaaaatattagaacgctttgttttacaaaaaatgatgagagaattcttcca

SEQ ID NO: 359116 - DNA, 120 bp, Artificial Sequence
  ENSG00000140350_14 (sequence is synthesized)
catgtacttctgtgcttagaacatttttacggacctaagcgctggagacgttgctgcatgtcggctgggttttttttttcatacacccgagcacggaaaaactaacgcaaaattgtattt

SEQ ID NO: 359117 - DNA, 120 bp, Artificial Sequence
  ENSG00000140350_15 (sequence is synthesized)
tcttacctagtggaaatctgaaatgactgcaaattcctagtgaatgtacaggtttgctttcgtgtccctcttctggttgctttagaagtgacgtgtaatttctgaacccatgtttcatct

SEQ ID NO: 359118 - DNA, 120 bp, Artificial Sequence
  ENSG00000140350_16 (sequence is synthesized)
gtataaaagaacatctgcaccagtttttctcctgcccctcagaagagccaaactttgagttttatgtctgtttgtcattgataaatttcaataaatctttttatacaatttttttgggga

SEQ ID NO: 359119 - DNA, 120 bp, Artificial Sequence
  ENSG00000140350_17 (sequence is synthesized)
tggcttctttgagtccaacaggccattgatcttttcaagatgcattccagatgaactgctaggtgagggggaagcttcatttttgttacctgatagaatagcttttcttatgagatatat

SEQ ID NO: 359120 - DNA, 120 bp, Artificial Sequence
  ENSG00000140350_18 (sequence is synthesized)
ataatgtgatactatgtttggatatttttggtcttaaagcaagactcagtggtgtatcttcattaaaagcttcctttaaaaaagttacagagttactaaaaaaacaagtacccaaacaat

SEQ ID NO: 359121 - DNA, 120 bp, Artificial Sequence
  ENSG00000140350_19 (sequence is synthesized)
caagttgggccaaccttggaaccttgttttgaatatctttcattgttttgtttgtcgtattgtaaaaagaatgtatggttgaaaactcaggaatgtttataaaacaaattatttcacaaa

SEQ ID NO: 359122 - DNA, 120 bp, Artificial Sequence
  ENSG00000140350_20 (sequence is synthesized)
gacagggtgcggcccagggctgcaggggcccagctgaggccttggggctcgtccttggctttgcagaggtgggtgggctgggtgttgggaggcccccacccagctactgaaggctggctg

SEQ ID NO: 359123 - DNA, 120 bp, Artificial Sequence
  ENSG00000140350_21 (sequence is synthesized)
ggacgacgatcctctgtgcaaatgcccccccccacgcgctccctgcctcccccgcctcctctccggggtttcgccgttcctcctgcaggcgctcagacgtagttaaatgtggccttaagg

SEQ ID NO: 359124 - DNA, 120 bp, Artificial Sequence
  ENSG00000140350_22 (sequence is synthesized)
aaacatgaggttcttttggcgggggtgaggggtgtcgcgcacgcgactctagtggccctgactgaagccaaggacagcagcctgttccccgggagggaagagttgtcgatccgttgggga

SEQ ID NO: 359125 - DNA, 120 bp, Artificial Sequence
  ENSG00000140350_23 (sequence is synthesized)
aacgccctcccgggctgggctctccgggaagaggtatttacatttggagattctggtttggtgaggaaattaccagagaactattaaagacttggatgctcttctcggctttgctattaa

SEQ ID NO: 359126 - DNA, 120 bp, Artificial Sequence
  ENSG00000140350_24 (sequence is synthesized)
tggtcagtggaattgggaaaaagtctacaaaagtacaaattttcagtttaattttaactttgcgcttcactcacacccaggacttggcaggggaagtgggccttggttttttttttttct

SEQ ID NO: 359127 - DNA, 120 bp, Artificial Sequence
  ENSG00000140350_25 (sequence is synthesized)
ttttaaagcagaacacaccctgggtggaaaagggatgttctctttgcatggaagggttagaaccaagtacagaggaaatgggttggtattgtagcaagagttcaggggtgggtctaggct

SEQ ID NO: 359128 - DNA, 120 bp, Artificial Sequence
  ENSG00000140350_26 (sequence is synthesized)
ttgaaactagagcactaggaaagtgtggccctcatggaggcaggcagggaagggaatgggatgtctttcacaggcagctgttgggctgacatttttgttttgtcctgtttggtgcatttc

SEQ ID NO: 359129 - DNA, 120 bp, Artificial Sequence
  ENSG00000140350_27 (sequence is synthesized)
agatacttcacagctcacctgctgctctcactgggacccctcttcatctcatgacaaagcagtgggtctttcccccatgtggtttgggctttttggtggtatcagcaacctcaggtctaa

SEQ ID NO: 359130 - DNA, 120 bp, Artificial Sequence
  ENSG00000140350_28 (sequence is synthesized)
gccctgtcccctccttcccctctgtgatctcaccctgcatggtgctgaaaccaaccagggaggaaatgcagaaacagtggggattctgaagacaccacctttaaaacgatggggatttcc

SEQ ID NO: 359131 - DNA, 120 bp, Artificial Sequence
  ENSG00000140350_29 (sequence is synthesized)
caagggagtggaagcaacctcttgctatttggggaagagcagggtcccaggcccctctctgtatccttgccccctcctgcagcgtcatctgagccagggcagggttaggctctgtgcttt

SEQ ID NO: 359132 - DNA, 120 bp, Artificial Sequence
  ENSG00000140350_30 (sequence is synthesized)
ggttgctaaggatgtgtaaccagagcagagacctctaggggtggtgcccacctggctggtggaacagttagaagaggagctgaaaagaaacagttacagctgtaggggcgggaaggtgtg

SEQ ID NO: 359133 - DNA, 120 bp, Artificial Sequence
  ENSG00000140350_31 (sequence is synthesized)
atccctttccttacccgtcgtaagagtcatggccaacacttataacaaaagaaaggctaacaaaagaagagcgtaacaaatttatttaatcaaagttgtaagtgacatgagaaccttcag

SEQ ID NO: 359134 - DNA, 120 bp, Artificial Sequence
  ENSG00000140350_32 (sequence is synthesized)
agaagaagaaccaaagacccagggaaactgcctatttttatacttaggtttgatgaagaatagacagccatgaagaaatgggactggacaaaggggtgtaggctgagagggaacccagca

SEQ ID NO: 359135 - DNA, 120 bp, Artificial Sequence
  ENSG00000140350_33 (sequence is synthesized)
aggcctgtctgttcagattctttgtggcctctctgtgtagcattccttcctcctagatatggggcaggacttccctggcatgagggtcttcaagggagaagggacaggagagagtaacct

SEQ ID NO: 359136 - DNA, 120 bp, Artificial Sequence
  ENSG00000140350_34 (sequence is synthesized)
ttctcggctttgctttgggagagaggaattctagtttctgtgacccgccttggggaagagaagttctggattctgtgacttctggggagagagggtgagagacaggagggcaagagaaat

SEQ ID NO: 359137 - DNA, 120 bp, Artificial Sequence
  ENSG00000140350_35 (sequence is synthesized)
tcacagagcttgcttctgaggccttccaatctcctttagttcaaagtacccagcacgccaaagccccttacatttgggtattgtgttctgagccccagcacagccaagaacttgtagaat

SEQ ID NO: 359138 - DNA, 120 bp, Artificial Sequence
  ENSG00000140350_36 (sequence is synthesized)
tgacttgggggtctggggagagtcccaagaagccaacaggggcccctcctcatcttgtggctaacactagccacctgagtgcagtagacacccaccctcctgtgaccttcttttgggatt

SEQ ID NO: 359139 - DNA, 120 bp, Artificial Sequence
  ENSG00000140350_37 (sequence is synthesized)
ttaggataagcagttcggacgtgcctttaaaacggagagaacacaccccaaggagtggttatggggattaaacgagactgtgtatgaagcacctagagtgtgcctagcgagtgcttgaga

SEQ ID NO: 359140 - DNA, 120 bp, Artificial Sequence
  ENSG00000140350_38 (sequence is synthesized)
aagatatgacgattatttttaatcaaagcattaatagtgattgcttgagtattgtcctccagaggagcagccaccagttttggtgttgtggtaggagccagggactggcctcgtcagggc

SEQ ID NO: 359141 - DNA, 120 bp, Artificial Sequence
  ENSG00000140350_39 (sequence is synthesized)
gacttcctggacgaattccctgggctccccagcactgctctctgaggccctcctctcctcggccaacggcagtaaggagaagccattgacccgtctagaaaaaccgcatgtctgcagtct

SEQ ID NO: 359142 - DNA, 120 bp, Artificial Sequence
  ENSG00000140350_40 (sequence is synthesized)
ttgagggtagactggaatctcttctcatatttgccttgctttggtggagcttcaagaattcccaggccttccaaggaaaccaattactaaagaagactgtgggccacgtgactccagtgt

SEQ ID NO: 359143 - DNA, 120 bp, Artificial Sequence
  ENSG00000140350_41 (sequence is synthesized)
ttactgcaaacgaaggagatggctcccctcccccaacacagttactctccctccatctgcactggccccctaaggcctggcttcctggctctgcgatgctttcctgccctagggcagaag

SEQ ID NO: 359144 - DNA, 120 bp, Artificial Sequence
  ENSG00000140350_42 (sequence is synthesized)
gcctcacaggatttattcccaggcactcttgccatgaccttgagaaggtggcttgacctggacatctggatctcagggactgagggggtgggaaaggactgagcctccccctcccagacc

SEQ ID NO: 359145 - DNA, 120 bp, Artificial Sequence
  ENSG00000140350_43 (sequence is synthesized)
caacaggaaggtgggctttggtgaccatttcctaggctgagagctccttagctccaggagagggctgcgctccctggttctcctgctctgtgggctgtgctagatgaaacccacaaattg

SEQ ID NO: 359146 - DNA, 120 bp, Artificial Sequence
  ENSG00000140350_44 (sequence is synthesized)
ctgctgtcccgggcggagtggcatgcctccacccaccagtgaagaatgaaggcagggcagttgcagggccctgcaggactctgagatccagatgtgtaccccagtgctcccctgctctgc

SEQ ID NO: 359147 - DNA, 120 bp, Artificial Sequence
  ENSG00000140350_45 (sequence is synthesized)
ccactggcaagagggggctgaggaggggcatagcaggcctcatgtggactctgtttccacctcctttcccccatatctctacttggcccagagatgcctgagtaagaggggcacctagtc

SEQ ID NO: 359148 - DNA, 120 bp, Artificial Sequence
  ENSG00000140350_46 (sequence is synthesized)
attctgggcccagaaagaagaagctaggcatgttggcctgctcaaaggagcaggagcagccctggacagggacaggttagaaagcctggctgcttatccaagagaagaaaaggccctgag

SEQ ID NO: 359149 - DNA, 120 bp, Artificial Sequence
  ENSG00000140350_47 (sequence is synthesized)
gggcaggagcaaccctttgaacaatgctggactgctgttgagaaggaaggcttgtgccatgtgacccattggtgagaaatcagggcctgtgcatggaagttccagggagggaggcaacaa

SEQ ID NO: 359150 - DNA, 120 bp, Artificial Sequence
  ENSG00000140350_48 (sequence is synthesized)
ccactggtaagtcattcggaccctcccctccctgcaggggtaggaggtgggaggaattggcatcagcaaatactacttttgcatttgtccttttcccacttaatttttttgactctcatg

SEQ ID NO: 359151 - DNA, 120 bp, Artificial Sequence
  ENSG00000140350_49 (sequence is synthesized)
atgtgctatgagatagaattgagctattgtttctgctgagtccatagagaaactgaggcccagagaagttaaataccttgaccaaggtcacagacagaatgggcagctattgtacgggta

SEQ ID NO: 359152 - DNA, 120 bp, Artificial Sequence
  ENSG00000140350_50 (sequence is synthesized)
tgtgatcagtcttggcagccccggagccctggttaggaaagtcgctccccgatgggtagtgaagtgagtccatttcagagcctttcactgggctgtttctggggagacaagacttgcagt

SEQ ID NO: 359153 - DNA, 120 bp, Artificial Sequence
  ENSG00000140350_51 (sequence is synthesized)
tggccagatgagcttggtttctgtttagttgtgctgctggctttgccttctccctaggtctagactcttaggctcatctctaaagaatattgtattttaaaaataaagtcttagtaaaac

SEQ ID NO: 359154 - DNA, 120 bp, Artificial Sequence
  ENSG00000140350_52 (sequence is synthesized)
aggttcccctagaacagggcagtaagttgtattggctaatagctgttacatcttcctcttcctgtcacaggagtgctgcatgtgaggtttgggggggtggggatgggggagggttgtgga

SEQ ID NO: 359155 - DNA, 120 bp, Artificial Sequence
  ENSG00000140350_53 (sequence is synthesized)
ttttgttttttgttttttgttttttaaataatctcactgaccatctgcatatttccagctttcagtaaaggagagcttatacatgcaaaaaaaaaccagaaccttagcaaacagactgat

SEQ ID NO: 359156 - DNA, 120 bp, Artificial Sequence
  ENSG00000140350_54 (sequence is synthesized)
gagggaactctttggtgacattttaaaagaatgtttcccttgacaaaaaagaagtctgtcaccaagttcttttaaacttcaggaaccaggtttaacaagcagagattcaacttgcatata

SEQ ID NO: 359157 - DNA, 120 bp, Artificial Sequence
  ENSG00000140350_55 (sequence is synthesized)
ctttcaggagcagaggaaagcaagggccctgtgttgagaaagaaagtcatacaccttgctgaatctcaagccggttgggaatgatgtcctcagggggtcttgaatttatcttccccaacc

SEQ ID NO: 359158 - DNA, 120 bp, Artificial Sequence
  ENSG00000140350_56 (sequence is synthesized)
cttccaggtggtccaagtttgcaagctagggaaggggctgggtcaggtgacgttgaacttgcccacagaatctggatttgcttaaactggggtcttctcttgaagccaaaactagattga

SEQ ID NO: 359159 - DNA, 120 bp, Artificial Sequence
  ENSG00000140350_57 (sequence is synthesized)
ggacagatgcaagaaaggatggcctactttgcacgtcagggagtctgctcgggaacttgttctcctcagagaatgtgcagactggagagctgcctgccttacagggacttcagatcagag

SEQ ID NO: 359160 - DNA, 120 bp, Artificial Sequence
  ENSG00000140350_58 (sequence is synthesized)
ttcttaacctgggtcctggaatccataaccccctgaaactgcttgcaaatattataaatgatacggacattttctggagaaggagttcaaagctttctgcagatttcccaatgagtcctt

SEQ ID NO: 359161 - DNA, 120 bp, Artificial Sequence
  ENSG00000140350_59 (sequence is synthesized)
ttgtgctctgtgtggcttcctcagcatgtcccaaggcagggcatttctaatgttctggtgtctgtcctttctcctaggaggatgaagaaggttataacgatggagaggtagatgacgagg

SEQ ID NO: 359162 - DNA, 120 bp, Artificial Sequence
  ENSG00000140365_0 (sequence is synthesized)
attcccgggccctggcttcttggcgcgatgaggttccggttctgtggtgatctggactgtcccgactgggtcctggcagaaatcagcacgctggccaagatgtcctctgtgaagttgcgg

SEQ ID NO: 359163 - DNA, 120 bp, Artificial Sequence
  ENSG00000140365_1 (sequence is synthesized)
ctgctctgcagccaggtactaaaggagctgctgggacaggggattgattatgagaagatcctgaagctcacggctgacgccaagtttgagtcaggcgatgtgaaggccacagtggcagtg

SEQ ID NO: 359164 - DNA, 120 bp, Artificial Sequence
  ENSG00000140365_2 (sequence is synthesized)
ctgagtttcatcctctccagtgcggccaagcacagtgtcgatggcgaatccttgtccagtgaactgcagcagctggggctgcccaaagagcacgcggccagcctgtgccgctgttatgag

SEQ ID NO: 359165 - DNA, 120 bp, Artificial Sequence
  ENSG00000140365_3 (sequence is synthesized)
ggttggcaggtgtgggctggcgggtggactacaccctgagctccagcctgctgcaatccgtggaagagcccatggtgcacctgcggctggaggtggcagctgccccagggaccccagccc

SEQ ID NO: 359166 - DNA, 120 bp, Artificial Sequence
  ENSG00000140365_4 (sequence is synthesized)
agcctgttgccatgtccctctcagcagacaagttccaggtcctcctggcagaactgaagcaggcccagaccctgatgagctccctgggctgaggagaagggtgttccaggcctgtgtgga

SEQ ID NO: 359167 - DNA, 120 bp, Artificial Sequence
  ENSG00000140365_5 (sequence is synthesized)
gccgccctgcccgtatggagtcacgccctctgaactgctcttcgggaggcagccctggttctaggatgctgaggccctggcccggactctggcctcccagatccccagctgcctcacttc

SEQ ID NO: 359168 - DNA, 120 bp, Artificial Sequence
  ENSG00000140365_6 (sequence is synthesized)
tctcttgagaacttggctcagggctcctgaggacctttcccagcattaccttcccttcccttgaaaggcaattgttggctgttttcataagcaggaaaaataaacagaagtataaaggaa

SEQ ID NO: 359169 - DNA, 120 bp, Artificial Sequence
  ENSG00000140365_7 (sequence is synthesized)
ccttgatcagtggctggcctgctctgagccagtccccaggaaggaggggtgaggtttgccagcctggctgatgtaaggacttcccttccagtcctctgtgaagttgcggctgctctgcag

SEQ ID NO: 359170 - DNA, 120 bp, Artificial Sequence
  ENSG00000140365_8 (sequence is synthesized)
ggaaaaagaaattcccgggccctggcttcttggcgcgatgaggttccggttctgtggtgatctggactgtcccgactgggtcctggcagaaatcagcacgctggccaagatgtatgagaa

SEQ ID NO: 359171 - DNA, 120 bp, Artificial Sequence
  ENSG00000140365_9 (sequence is synthesized)
gcgatggtgaggcactaggggcgaagcgaggcttgggctgctggagcgggaatgagggggcgccaagtggctccggaaactgggggaggttgtactggcctctccgcaaacacagtgtgt

SEQ ID NO: 359172 - DNA, 120 bp, Artificial Sequence
  ENSG00000140365_10 (sequence is synthesized)
cagtgaactgcagcagctggggctgcccaaaggtacgggttgtgggtgggcagctgggcagcctgtgggccaagggctgctagagaaggggacaggccctgtgaccctgaggtgtacctg

SEQ ID NO: 359173 - DNA, 120 bp, Artificial Sequence
  ENSG00000140365_11 (sequence is synthesized)
ccctgtctgggccaggagcccaagccaggccccgacatgctacctccagagctactccattctacccccagagcacgcggccagcctgtgccgctgttatgaggagaagcaaagcccctt

SEQ ID NO: 359174 - DNA, 120 bp, Artificial Sequence
  ENSG00000140365_12 (sequence is synthesized)
gcagaagcacttgcgggtctgcagcctacgcagtaagtatgaggccagccagggtccgggctcattctagaaggtgcacgcagcacacaaagtgcatggagagtccagggagacgactta

SEQ ID NO: 359175 - DNA, 120 bp, Artificial Sequence
  ENSG00000140365_13 (sequence is synthesized)
accacggtcacatggttactagcagccgtagagctgggacctggccctgggtctcctgactccccacaaggtttcttgtcactgaggtctgctgtgggtgatcagaactgattatcgggc

SEQ ID NO: 359176 - DNA, 120 bp, Artificial Sequence
  ENSG00000140365_14 (sequence is synthesized)
aggcaaccctgggaacttggcctggtgcctggtacagaggggccccccacccctcccagcagcatccttaacttaccttccctagtggaggagcatgagggaaagaaagaccgacagtcc

SEQ ID NO: 359177 - DNA, 120 bp, Artificial Sequence
  ENSG00000140365_15 (sequence is synthesized)
attcccgggccctggcttcttggcgcgatgaggttccggttctgtggtgatctggactgtcccgactgggtcctggcagaaatcagcacgctggccaagatggttgatcctctgtgaagt

SEQ ID NO: 359178 - DNA, 120 bp, Artificial Sequence
  ENSG00000140365_16 (sequence is synthesized)
ctgccctgaaactctgcactaggcccagggagacgggtgagccagcctctcaacctctctgggcacctcccttccttctttccagcctgtctgttccttatcgcaggatccaggctgggg

SEQ ID NO: 359179 - DNA, 120 bp, Artificial Sequence
  ENSG00000140365_17 (sequence is synthesized)
gtgaggggctggtgagcaggggcctggcaccccctgaaggtctcctttccccatagtatgagaagatcctgaagctcacggctgacgccaagtttggtgagtatcccgctgagtctatag

SEQ ID NO: 359180 - DNA, 120 bp, Artificial Sequence
  ENSG00000140365_18 (sequence is synthesized)
cctgccctgttctgagcctgggtcagcaggatgggagcttcttagaggccacatagccttgaatggttgagagctgagccagggtgtcggctgaggtctacttggcttgcctgctttgat

SEQ ID NO: 359181 - DNA, 120 bp, Artificial Sequence
  ENSG00000140365_19 (sequence is synthesized)
tccaggaggcctgggggctttgagctaaagttaatagggcaacagggaggtggctggacccacagtgacaccccctgccccacccacgggtccctcagagtcaggcgatgtgaaggccac

SEQ ID NO: 359182 - DNA, 120 bp, Artificial Sequence
  ENSG00000140365_20 (sequence is synthesized)
ccggccggcttagagtcccggtgcttccctggcggaaggaagggcccctgcctcccggggcaggaactagggcttgtctggagctgggagtcctttcaggtcttccccatccccaagagg

SEQ ID NO: 359183 - DNA, 120 bp, Artificial Sequence
  ENSG00000140365_21 (sequence is synthesized)
acctcccaaggatacccccttccccagccctgccgtggggcttgtacaagaaggtgcttagaatcaggctcactcttccacactgttaggaagcccctccgctctttccagagccagaaa

SEQ ID NO: 359184 - DNA, 120 bp, Artificial Sequence
  ENSG00000140365_22 (sequence is synthesized)
gtagtagttttggggttgagacttatccatccatccatccaatccatccatccgtacgttctaagcgcctggtctataccatgaagtgtgctaggcactgggaggacttgagctgccaag

SEQ ID NO: 359185 - DNA, 120 bp, Artificial Sequence
  ENSG00000140365_23 (sequence is synthesized)
ggaaggggaaatcggaggcttgaattggagtcatagctaaggctccaggggcagagacctaactgcgccttgtgtgtagtgctaagggggcttcctaaggatgccatcaaacttaaaggc

SEQ ID NO: 359186 - DNA, 120 bp, Artificial Sequence
  ENSG00000140365_24 (sequence is synthesized)
ggatggatggcaggagctggctggctgaagtacagtttgtgtaccaggggtagggaggcaagggtgggagacgtgtgtcttcagacagggaacagcatgtgcagagacttcaggttagag

SEQ ID NO: 359187 - DNA, 120 bp, Artificial Sequence
  ENSG00000140365_25 (sequence is synthesized)
agagtatggctccccaggaatggatgcatttcccatagctgggagagtatcatctgcaggttagggaaagatgaggctggacaagtagagaacaaatcttcctggctcttggatcaccac

SEQ ID NO: 359188 - DNA, 120 bp, Artificial Sequence
  ENSG00000140365_26 (sequence is synthesized)
atcaccacaatcaagataatgaacgtatccactggcctccataatttccttgtgtgaggggctattttaagaagtataatcaagaaaggctgttctggctgggtgcggtggctcatgcct

SEQ ID NO: 359189 - DNA, 84 bp, Artificial Sequence
  ENSG00000140365_27 (sequence is synthesized)
aggagttcgagaccagcatggccatgtatttttttattttttaaaaaaagaagggctggtctgatgtgtcacttaaaggatagc

SEQ ID NO: 359190 - DNA, 86 bp, Artificial Sequence
  ENSG00000140365_28 (sequence is synthesized)
gcaacagagggagactctgtcttatttttttattttttaaaaaaagaagggctggtctgatgtgtcacttaaaggatagcaagcca

SEQ ID NO: 359191 - DNA, 61 bp, Artificial Sequence
  ENSG00000140365_29 (sequence is synthesized)
ggtcgggatagcaagccacacagagagtgcagcaggcatggaggcgggagcaaggctggtg

SEQ ID NO: 359192 - DNA, 120 bp, Artificial Sequence
  ENSG00000140365_30 (sequence is synthesized)
agagagtgcagcaggcatggaggcgggagcaaggctggtgtgccccagcagcagcagggaagctggagtggctggagttgtgtgggtatggggaagaggggagagagttcactcgtctct

SEQ ID NO: 359193 - DNA, 120 bp, Artificial Sequence
  ENSG00000140365_31 (sequence is synthesized)
gtgaggcccaggactttgttttatcccatgctgtacccccagcacttagagtgggagctagcacagagaaggtgcttaattgatgtttgctgagcagatgaatgcctggagtagacctca

SEQ ID NO: 359194 - DNA, 120 bp, Artificial Sequence
  ENSG00000140365_32 (sequence is synthesized)
gagcagggtttggtggcagggtgggtcagggagagagtttactcaacagcctggtgataggggagaacaagaggccagagggtatccatctatgtcggggaccaggggtccctggtgggc

SEQ ID NO: 359195 - DNA, 120 bp, Artificial Sequence
  ENSG00000140365_33 (sequence is synthesized)
agcagtgtgggagacacacggatcctggccacacctcaggcctccctccagcctgattacctgcctccctcccttgcagaggttccggttctgtggtgatctggactgtcccgactgggt

SEQ ID NO: 359196 - DNA, 120 bp, Artificial Sequence
  ENSG00000140365_34 (sequence is synthesized)
tttaggaagagagaagtgaccatgcctgaaccagtcattggcaagaggaacggtgttatggactgaatgttcatgttcctccagaattcatatgctgaagcctctgtccacacatgcaca

SEQ ID NO: 359197 - DNA, 120 bp, Artificial Sequence
  ENSG00000140365_35 (sequence is synthesized)
catgcacaccagatgagggccatgtgcgcacacgaggtggctgtctacaaggccagaaagagggctgtcaacaggaactgcgtctgctggcaccttgatcttgaacttcccagcctccag

SEQ ID NO: 359198 - DNA, 120 bp, Artificial Sequence
  ENSG00000140365_36 (sequence is synthesized)
agccctgccgtggggcttgtacaagaagaggttccggttctgtggtgatctggactgtcccgactgggtcctggcagaaatcagcacgctggccaagatgtcctctgtgaagttgcggct

SEQ ID NO: 359199 - DNA, 120 bp, Artificial Sequence
  ENSG00000140365_37 (sequence is synthesized)
aaagaaatctctatggtgtaagccactagtctgtggcattgttatagcagctcgagaagactaaggcagatgggcttccaggactggcccagaccagccagggctccttgtagaaaaggc

SEQ ID NO: 359200 - DNA, 120 bp, Artificial Sequence
  ENSG00000140365_38 (sequence is synthesized)
tgatgccagggttggcacatggagggtacaaggaggactcgcctggagtatcttaaggaacctatcgaagaataatggcttgttccactggccaaagatgggacaatttgaacatcaaaa

SEQ ID NO: 359201 - DNA, 120 bp, Artificial Sequence
  ENSG00000140365_39 (sequence is synthesized)
gagatacttactgactccactcctgacttctgcttctgaaaaaatgaagtaggtgttttccctattcctcccactaagtacagttaacaaccctggatgttacatataaaacaaacaaaa

SEQ ID NO: 359202 - DNA, 120 bp, Artificial Sequence
  ENSG00000140365_40 (sequence is synthesized)
ggttacacaaaactgatcatcacagatctgtagaactatacaaaagtgctaacattcatgattagggtctcagaaggtaaggaggaagagagtggaatggaaaaagtattcaaaaaaata

SEQ ID NO: 359203 - DNA, 120 bp, Artificial Sequence
  ENSG00000140365_41 (sequence is synthesized)
tgtaatcccagcactttgggaggtgggacaattgctttagaccttgcaactggcctgagcaacacagggagactcagtttctccaaaaaaataaaaaattagccgatcatggtggtgcgt

SEQ ID NO: 359204 - DNA, 84 bp, Artificial Sequence
  ENSG00000140365_42 (sequence is synthesized)
tcgcttgagcccaggggtttgaggctgcagtgagctgtgatcatacctctgcactccagcctggataacagagctgagaccctg

SEQ ID NO: 359205 - DNA, 80 bp, Artificial Sequence
  ENSG00000140365_43 (sequence is synthesized)
tacacacattggaatatttttcagcccttaaaaagcagaaggttctgtcatttgtgacttggatgaacctagacgacatg

SEQ ID NO: 359206 - DNA, 120 bp, Artificial Sequence
  ENSG00000140365_44 (sequence is synthesized)
ggttctgtcatttgtgacttggatgaacctagacgacatgatgctaagtgaaataagccaggcacagagagacaaatacctcgtcacctcacttatgcctggagttgaaaaaagggcctg

SEQ ID NO: 359207 - DNA, 90 bp, Artificial Sequence
  ENSG00000140365_45 (sequence is synthesized)
ccacgagaccaggctgggcaacatggcaaacctgtctctacaaaaagtaaaaaaattagccgggtgcagtggcacatgcctgtggttcca

SEQ ID NO: 359208 - DNA, 85 bp, Artificial Sequence
  ENSG00000140365_46 (sequence is synthesized)
aggctgggcaacatggcaaacctgtctctacaaaaagtaaaaaaattagccgggtgcagtggcacatgcctgtggttccagcagg

SEQ ID NO: 359209 - DNA, 120 bp, Artificial Sequence
  ENSG00000140365_47 (sequence is synthesized)
gtgagaccctgtctcaaaaaaaaaaagttaaattcatagaagtcgacagtagaatggtggttagcagaggctggaggagagagagggtgggttgtggggaaaaggggagacaccggtcaa

SEQ ID NO: 359210 - DNA, 120 bp, Artificial Sequence
  ENSG00000140365_48 (sequence is synthesized)
gggagacaccggtcaaaaggtacaaagttccagttaggaggagtacattctggtgatttattgcccagcgtggtgaccagttaataatgatgtatacttcaaaatagctaaaagagggtt

SEQ ID NO: 359211 - DNA, 120 bp, Artificial Sequence
  ENSG00000140365_49 (sequence is synthesized)
ggttttaaatgttctcatcacaaagaaataaatatttgaggtaatggatatcctaattagcctgatttgatctttttttgtgttttttgttttcttgagacagagtctcactctgttgcc

SEQ ID NO: 359212 - DNA, 120 bp, Artificial Sequence
  ENSG00000140365_50 (sequence is synthesized)
ccaccgtgcccagccgatttgatcattccacaatatatgcatgtaacaaaacatcacactgtactccataaatttatacaattattatttgtcaattaaaaataaaactatagataagtc

SEQ ID NO: 359213 - DNA, 120 bp, Artificial Sequence
  ENSG00000140367_0 (sequence is synthesized)
gctggagtcggttacaaaggaagcgccacccaggccgccacacgccgaggcttccgcgcccctcgccattttccagcagcgctcgacgaggcggagccgcgagagcgcggcccaggccgg

SEQ ID NO: 359214 - DNA, 120 bp, Artificial Sequence
  ENSG00000140367_1 (sequence is synthesized)
gcggggcggtcgcggccgtgacggcggctccgggcccggctccccttccgcgcccggctccccttccgcgcccctcccgccggagatgaggggaagatgtccgtgtcagggctcaaggcc

SEQ ID NO: 359215 - DNA, 120 bp, Artificial Sequence
  ENSG00000140367_2 (sequence is synthesized)
ggccgagctgaagttcctggcgtccatcttcgacaagaaccacgagcgattccgcatcgtcagttggaagctggacgagctgcactgccagttcctggtgccgcagcagggcagcccgca

SEQ ID NO: 359216 - DNA, 120 bp, Artificial Sequence
  ENSG00000140367_3 (sequence is synthesized)
ctcgctgccgccgccactcacgctccactgcaacatcacggaatcctatccatcttcttcaccgatatggtttgtggattctgaagacccaaatctgacatcagttctggaacgtctaga

SEQ ID NO: 359217 - DNA, 120 bp, Artificial Sequence
  ENSG00000140367_4 (sequence is synthesized)
agatactaagaacaacaatttgcttcgtcagcaattgaagtggttgatatgtgaactctgcagtttatataaccttcctaagcacctggatgttgagatgctagatcaaccactacccac

SEQ ID NO: 359218 - DNA, 120 bp, Artificial Sequence
  ENSG00000140367_5 (sequence is synthesized)
gggtcagaatgggacaacagaagaagtgacttcagaagaagaggaagaagaagaagagatggctgaagatatagaagacttagatcactatgagatgaaggaagaagagcctattagtgg

SEQ ID NO: 359219 - DNA, 120 bp, Artificial Sequence
  ENSG00000140367_6 (sequence is synthesized)
gaaaaagtcagaggatgaaggaattgaaaaagaaaatttggcaatattagagaaaattaggaagactcaaaggcaagaccatttaaatggtgcagtgtctgggtcagtgcaagcttcaga

SEQ ID NO: 359220 - DNA, 120 bp, Artificial Sequence
  ENSG00000140367_7 (sequence is synthesized)
tagacttatgaaagagctcagggacatatacagatcacagagttataaaacagggatttattcagtggaactcataaatgacagtttatatgactggcatgttaaactgcagaaggttga

SEQ ID NO: 359221 - DNA, 120 bp, Artificial Sequence
  ENSG00000140367_8 (sequence is synthesized)
ccctgatagtcctttgcacagtgatcttcagatcttaaaagaaaaagaaggcatagaatatattttgcttaacttctcttttaaggataactttccatttgatcctccatttgttcgagt

SEQ ID NO: 359222 - DNA, 120 bp, Artificial Sequence
  ENSG00000140367_9 (sequence is synthesized)
ggtgttacctgttctctcaggagggtatgtattgggtggaggagcattatgtatggaacttctcacaaaacagggctggagcagtgcctactcaatagaatcggtcatcatgcaaataaa

SEQ ID NO: 359223 - DNA, 120 bp, Artificial Sequence
  ENSG00000140367_10 (sequence is synthesized)
tgccaccttagtcaaaggcaaagccagagtgcagtttggagcaaataagaatcaatataatctagcaagagcccaacaatcctataattccattgtacagatacatgagaaaaatggctg

SEQ ID NO: 359224 - DNA, 120 bp, Artificial Sequence
  ENSG00000140367_11 (sequence is synthesized)
gtacacccctccaaaggaagatggctaaatgtgttgactgttgtatgtttggactaatgttgctttaaagaaaatctttctaacatgcagacaaaagctttgagtgcccctattacagca

SEQ ID NO: 359225 - DNA, 120 bp, Artificial Sequence
  ENSG00000140367_12 (sequence is synthesized)
tttagatatcttggactgagcagtggggcctttactgtatttttcctgataaatacacatactggccactccttatctctttttcttgaaaagtgaactttttaaagcagccaagtcaac

SEQ ID NO: 359226 - DNA, 120 bp, Artificial Sequence
  ENSG00000140367_13 (sequence is synthesized)
atcaggctactgaagttgaggctttagggtaactttcctatattgagcccatgggttacaaggatttgcaatatattgttccatttacagccaatacaggtttaatcgatgttcaatatt

SEQ ID NO: 359227 - DNA, 120 bp, Artificial Sequence
  ENSG00000140367_14 (sequence is synthesized)
ggtttaggaaatttaaggccttctaaatcataatagctctttcatgtctaaaaccattttatgatattgccaaaatgtgataggaaacctactcattaaattgttaaactttttaatgac

SEQ ID NO: 359228 - DNA, 120 bp, Artificial Sequence
  ENSG00000140367_15 (sequence is synthesized)
tatgtgaagatatgaattgtttcctgaagataatactcttaattgagttgtattgtacttcttaggcaaagcagtgtaaaactgtatcaattaaggcttgtgagtagtgatttccactgg

SEQ ID NO: 359229 - DNA, 120 bp, Artificial Sequence
  ENSG00000140367_16 (sequence is synthesized)
ggcatcagagtcttggctgggctgaatctgctgcttgttggttcagtgtttcttatgaacaagagccacagtacagagcttcaagttatttaaaatactaagtcatcttacgtttccatt

SEQ ID NO: 359230 - DNA, 120 bp, Artificial Sequence
  ENSG00000140367_17 (sequence is synthesized)
ttattaacgggatgttgcaatcgtttgtaaactaataaacttataaagtgattggcacaaagactccttgagcaaaagctgtgcagttaagtacaaaaagatacttaatttggagactct

SEQ ID NO: 359231 - DNA, 120 bp, Artificial Sequence
  ENSG00000140367_18 (sequence is synthesized)
tacagtaatttttgccatgtcaaaacaatggcttttacattgaaagattaatagaaactctacatatgttaatttttttatagaacctgactcaaatcaaggtactctccattttattgc

SEQ ID NO: 359232 - DNA, 120 bp, Artificial Sequence
  ENSG00000140367_19 (sequence is synthesized)
cttacctgaatcagtcctttttggttggtaatagatttttttatacacccacgtttgatttaaaagtaaattctagttcttaagcacttttaacaaatccagaagcacatttttctgcac

SEQ ID NO: 359233 - DNA, 120 bp, Artificial Sequence
  ENSG00000140367_20 (sequence is synthesized)
aaacaagttacaaagttcaaaagtgtttcttgtgcattagctttgagattcagtttttaactttgtaaaccacatctgagagacttgtcatttctacattgtgtgtgtttaatttctttt

SEQ ID NO: 359234 - DNA, 120 bp, Artificial Sequence
  ENSG00000140367_21 (sequence is synthesized)
gattccattttggttaagagagcagtaaatagattttctggtattcttgttcacttgattacatttgtataaagttctgattgccagttgctcagataacaagtgacaaggcagaattct

SEQ ID NO: 359235 - DNA, 120 bp, Artificial Sequence
  ENSG00000140367_22 (sequence is synthesized)
ttaaatcagtaaagttccttaagcctaaggctaaatcttgaatacattgttgaattctttaatatcctgatggcaagcagactgatagctgcacatttggcatgctttgtttaatggatt

SEQ ID NO: 359236 - DNA, 120 bp, Artificial Sequence
  ENSG00000140367_23 (sequence is synthesized)
ttatttttaattgcagatttatttggcaatgtacagtaaattttgtaaacttgcatcaagtttatgaataaagaaccatttaaaaattttgtttgtgctgatcatggcaagcaaaaaaaa

SEQ ID NO: 359237 - DNA, 120 bp, Artificial Sequence
  ENSG00000140367_24 (sequence is synthesized)
gtgcacgcgctgaaaccggagcgcgcagggcgcgccagggtgagggggacgggggcggggtgggggcagccctttcccaggcggtagcgggggcggcgtcgctgttgcccttttaagccg

SEQ ID NO: 359238 - DNA, 120 bp, Artificial Sequence
  ENSG00000140367_25 (sequence is synthesized)
aggtctaataagaaagtgagaaagaggaaggacagaaagagggaccagctgcgggataaagtgttttatggagttagagcaggggaacttaaaaacaaaagtgtatttaataacttcatg

SEQ ID NO: 359239 - DNA, 120 bp, Artificial Sequence
  ENSG00000140367_26 (sequence is synthesized)
gcgtctttccggcttctcgccaggggctggcttgggggcttctggcccatctcggtccccgtctcctagccccgaggggggagtccgcggcggcccaagcccttgtggggtccatggccg

SEQ ID NO: 359240 - DNA, 120 bp, Artificial Sequence
  ENSG00000140367_27 (sequence is synthesized)
ccctcagccggcctgctcccgggaccggggcggggcggggcggggcggcgcagctccggctgttgtttgagcccaggccggcaaggggaacggcccttaagttttaacgcctcatttttc

SEQ ID NO: 359241 - DNA, 120 bp, Artificial Sequence
  ENSG00000140367_28 (sequence is synthesized)
agtcggattttccttcttcccgcttgttcagccaattgtttttaagtttgcgtttaaggagaaactgacaatgagaatggactcgttgacggaggaaaagttggaatgcagactctggtg

SEQ ID NO: 359242 - DNA, 120 bp, Artificial Sequence
  ENSG00000140367_29 (sequence is synthesized)
ctgtttgagcgacccctctcccccgggcctggctgcgcgctgctgtgttctggaaaggagcatagtaccgtcgttgcggcaggaatcctatccatcttcttcaccgatatggtttgtgga

SEQ ID NO: 359243 - DNA, 120 bp, Artificial Sequence
  ENSG00000140367_30 (sequence is synthesized)
ggagcatagtaccgtcgttgcggcaggtggtgttgagtgtgtattcgtgtggcccctcccttgtgtgtaagcctcgaaaatggataggtgaaaggagatacgcgccagggctgctccccg

SEQ ID NO: 359244 - DNA, 120 bp, Artificial Sequence
  ENSG00000140367_31 (sequence is synthesized)
gaaagatcacgaatcctatccatcttcttcaccgatatggtttgtggattctgaagacccaaatctgacatcagttctggaacgtctagaagatactaagaacaacaatttgcttcgtca

SEQ ID NO: 359245 - DNA, 120 bp, Artificial Sequence
  ENSG00000140368_0 (sequence is synthesized)
aaaccttcctgcgcaggcctcgggctgcctgcctgcctgcctgcctggcccggcccgagctccagcctgcctcttccactggccactgcctcccacccagggctggcatccctgctccct

SEQ ID NO: 359246 - DNA, 120 bp, Artificial Sequence
  ENSG00000140368_1 (sequence is synthesized)
gccctgggtcccagactgtgtcctccatcaccgcagggtcggtgaggggctgggctggacaccagggcccgccctcccatcactgagctccactccttcctcattttgctgctgattcta

SEQ ID NO: 359247 - DNA, 120 bp, Artificial Sequence
  ENSG00000140368_2 (sequence is synthesized)
gccccaaacaaaacaggttgagctttttcctcccctcagaagctcctctctggctcgtggctgccttctgagtgttgcagacggcgccggccgggaaggggggcctgggccagccctgcc

SEQ ID NO: 359248 - DNA, 120 bp, Artificial Sequence
  ENSG00000140368_3 (sequence is synthesized)
aggactgggacgctgctgctggcgcctggccctccatcaggccagcctgtggcaggagagtgagctttgccgcggcagacgcctgaggatgatgccccagctgcagttcaaagatgcctt

SEQ ID NO: 359249 - DNA, 120 bp, Artificial Sequence
  ENSG00000140368_4 (sequence is synthesized)
ttggtgcagggacttcacagcccacacgggctacgaggtgctgctgcagcggcttctggatggcaggaagatgtgcaaagacatggaggagctactgaggcagagggcccaggcggagga

SEQ ID NO: 359250 - DNA, 120 bp, Artificial Sequence
  ENSG00000140368_5 (sequence is synthesized)
gcggtacgggaaggagctggtgcagatcgcacggaaggcaggtggccagacggagatcaactccctgagggcctcctttgactccttgaagcagcaaatggagaatgtgggcagctcaca

SEQ ID NO: 359251 - DNA, 120 bp, Artificial Sequence
  ENSG00000140368_6 (sequence is synthesized)
catccagctggccctgaccctgcgtgaggagctgcggagtctcgaggagtttcgtgagaggcagaaggagcagaggaagaagtatgaggccgtcatggaccgggtccagaagagcaagct

SEQ ID NO: 359252 - DNA, 120 bp, Artificial Sequence
  ENSG00000140368_7 (sequence is synthesized)
gtcgctctacaagaaggccatggagtccaagaagacatacgagcagaagtgccgggacgcggacgacgcggagcaggccttcgagcgcattagcgccaacggccaccagaagcaggtgga

SEQ ID NO: 359253 - DNA, 120 bp, Artificial Sequence
  ENSG00000140368_8 (sequence is synthesized)
gctggagaaggtccgggctgagtgggagcaggagcaccggaccacctgtgaggcctttcagctgcaagagtttgaccggctgaccattctccgcaacgccctgtgggtgcacagcaacca

SEQ ID NO: 359254 - DNA, 120 bp, Artificial Sequence
  ENSG00000140368_9 (sequence is synthesized)
gctctccatgcagtgtgtcaaggatgatgagctctacgaggaagtgcggctgacgctggaaggctgcagcatagacgccgacatcgacagtttcatccaggccaagagcacgggcacaga

SEQ ID NO: 359255 - DNA, 120 bp, Artificial Sequence
  ENSG00000140368_10 (sequence is synthesized)
gccccccgctccggtgccctaccagaactattacgatcgggaggtcaccccgctgaccagcagccctggcatacagccgtcctgcggcatgataaagaggttctctggactgctgcacgg

SEQ ID NO: 359256 - DNA, 120 bp, Artificial Sequence
  ENSG00000140368_11 (sequence is synthesized)
aagtcccaagaccacttcgttggcagcttctgctgcgtccacagagaccctgacccccacccccgagcggaatgagggtgtctacacagccatcgcagtgcaggagatacagggaaaccc

SEQ ID NO: 359257 - DNA, 120 bp, Artificial Sequence
  ENSG00000140368_12 (sequence is synthesized)
ggcctcaccagcccaggagtaccgggcgctctacgattatacagcgcagaacccagatgagctggacctgtccgcgggagacatcctggaggtgatcctggaaggggaggatggctggtg

SEQ ID NO: 359258 - DNA, 120 bp, Artificial Sequence
  ENSG00000140368_13 (sequence is synthesized)
gactgtggagaggaacgggcagcgtggcttcgtccctggttcctacctggagaagctttgaggaagggccaggagccccttcggacctgccctgccagtggagccagcagtgcccccagc

SEQ ID NO: 359259 - DNA, 120 bp, Artificial Sequence
  ENSG00000140368_14 (sequence is synthesized)
actgtccccaccttgctagggcccagaaccaagcgtcccccagccccgagagggagcctgtcgtctcccagggaataaaggagtgcgttctgttctccttggtgtgctggggtcccgttc

SEQ ID NO: 359260 - DNA, 120 bp, Artificial Sequence
  ENSG00000140368_15 (sequence is synthesized)
tctttttctcctgctccagtgtccgagtgctcagttcagaggaggcaaaggaacaagggaaggagcctggatgtggagctccccaactcagccgaggcttcagctatagttggagaagag

SEQ ID NO: 359261 - DNA, 120 bp, Artificial Sequence
  ENSG00000140368_16 (sequence is synthesized)
caccagcatggccctccatccggggctgccctggctggacagccccccagagcacagctgtgtctgctcccagactatgggctccttgagggcaggacctggtttgggtcccagagcagc

SEQ ID NO: 359262 - DNA, 120 bp, Artificial Sequence
  ENSG00000140368_17 (sequence is synthesized)
aatgggataataaaggcacctgtgctggcagagttgtgagcagttctgacgtctggatgggcatcagcagcgcttggggccgggccccaccccgaagcctcagcctcaggaggtcgggga

SEQ ID NO: 359263 - DNA, 120 bp, Artificial Sequence
  ENSG00000140368_18 (sequence is synthesized)
ggagcctgagaatctgtatttctaacaggctccgcggatgctgatgccgctggtctgtggacctcactttgggatccacgagtttagggcgaggggcctggcccccaccgatctccccca

SEQ ID NO: 359264 - DNA, 120 bp, Artificial Sequence
  ENSG00000140368_19 (sequence is synthesized)
ggcctggatccccaggctcctgccaggctactgctcctccttggcctctgcttccccaggtgtctactgagaggagaagccccctgagaagcctgcctggtgcgctgccccctccaccca

SEQ ID NO: 359265 - DNA, 120 bp, Artificial Sequence
  ENSG00000140368_20 (sequence is synthesized)
ggggctgagggccttggtgtggggtaaggtagggcagcctctaggcagcaaagcacccaggtccatctgagccggtcaacaagcacctggtcctctgtgatccaagcctggccccagggg

SEQ ID NO: 359266 - DNA, 120 bp, Artificial Sequence
  ENSG00000140368_21 (sequence is synthesized)
tctcaggcctcagcagctcagcctttgcccccagaaccccaagacaggagctcagtaccacacagggccatggcttctctgcctggaagatgatgactctgtggttcccctgacttcctc

SEQ ID NO: 359267 - DNA, 120 bp, Artificial Sequence
  ENSG00000140368_22 (sequence is synthesized)
cttatgcctcagagccacagagcacctgccccctctgccggggatgggaggggaggtggacacagctgtcagaggttggcagaagctggaggaccgtggctgctctgctctaggcctggt

SEQ ID NO: 359268 - DNA, 120 bp, Artificial Sequence
  ENSG00000140368_23 (sequence is synthesized)
gcttgcaggagccgaggcgcagtccttcctctgctccccacatctccagggtgtcctggttccccttactgagcccaacctgctgggtgggtcctccccagcagagagggcccccagcca

SEQ ID NO: 359269 - DNA, 120 bp, Artificial Sequence
  ENSG00000140368_24 (sequence is synthesized)
agcctgtcaccctctctccagagccaggagaggtgctgcgcctcatcccagggacactccgtcctcttggcctaggggagcctcccgaggccgcggccctcggctcagaacctcgtgtcc

SEQ ID NO: 359270 - DNA, 120 bp, Artificial Sequence
  ENSG00000140368_25 (sequence is synthesized)
acttcctcggaacatcccagtccttgtgacagtagctcactcggccacagcccctgccagcagcccaaagctctgagcgggggactgggcgggatcctggagcctgcagcctctggggac

SEQ ID NO: 359271 - DNA, 120 bp, Artificial Sequence
  ENSG00000140368_26 (sequence is synthesized)
gtgtctttgccaagaggggagccctggaagaggagaggtttgcagggcaggtgctgagtccggttttggacacgctgaatttgagctccctgagggcctcctttgactccttgaagcagc

SEQ ID NO: 359272 - DNA, 120 bp, Artificial Sequence
  ENSG00000140368_27 (sequence is synthesized)
agcagaaggaagaggcagggcccagcatggagaaaccccattctagtaggacttccaggggccagtgtccccagaaggggaggggtctatgtctcaccctgctcttagcgtccacagaga

SEQ ID NO: 359273 - DNA, 120 bp, Artificial Sequence
  ENSG00000140368_28 (sequence is synthesized)
ttcagggcagagaagccctagcaggggttgtggggagttgggtcccaggcctgctgcctcctctcaggcaaagctaagggcatgatggcactcagaggaagaggtggggatggggattga

SEQ ID NO: 359274 - DNA, 120 bp, Artificial Sequence
  ENSG00000140368_29 (sequence is synthesized)
ggtgaggagctcccacggcccccactccccgcctgtttggttccactggatcacgggtccagaatattaggtcttgatggtacctacggtggggtctctcatgggagcaagacaggcacc

SEQ ID NO: 359275 - DNA, 120 bp, Artificial Sequence
  ENSG00000140368_30 (sequence is synthesized)
tcctcaggcaccaggatgggccagggccagattgggaatgtagggccccagctgagtctggcagggccagaatggggtgttgggggccgccctggggctcacggcttgctgtctgcagct

SEQ ID NO: 359276 - DNA, 120 bp, Artificial Sequence
  ENSG00000140374_0 (sequence is synthesized)
attaggtgactggctgaggcggcgccagttggccgggcacggggctgctgtaaggccgaggttgcggcggaagcggagaccatgttccgagcggcggctccggggcagctccggcgggcg

SEQ ID NO: 359277 - DNA, 120 bp, Artificial Sequence
  ENSG00000140374_1 (sequence is synthesized)
gcctcattgctacgatttcagagtaccctggtaatagctgagcatgcaaatgattccctagcacccattactttaaataccattactgcagccacacgccttggaggtgaagtgtcctgc

SEQ ID NO: 359278 - DNA, 120 bp, Artificial Sequence
  ENSG00000140374_2 (sequence is synthesized)
ttagtagctggaaccaaatgtgacaaggtggcacaagatctctgtaaagtagcaggcatagcaaaagttctggtggctcagcatgatgtgtacaaaggcctacttccagaggaactgaca

SEQ ID NO: 359279 - DNA, 120 bp, Artificial Sequence
  ENSG00000140374_3 (sequence is synthesized)
ccattgattttggcaactcagaagcagttcaattacacacacatctgtgctggagcatctgccttcggaaagaaccttttgcccagagtagcagccaaacttgaggttgccccgatttct

SEQ ID NO: 359280 - DNA, 120 bp, Artificial Sequence
  ENSG00000140374_4 (sequence is synthesized)
gacatcattgcaatcaagtcacctgacacatttgtgagaactatttatgcaggaaatgctctatgtacagtgaagtgtgatgagaaagtgaaagtgttttctgtccgtggaacatccttt

SEQ ID NO: 359281 - DNA, 120 bp, Artificial Sequence
  ENSG00000140374_5 (sequence is synthesized)
gatgctgcagcaacaagtggcggtagtgccagttcagaaaaggcatcaagtacttcaccagtggaaatatcagagtggcttgaccagaaattaacaaaaagtgatcgaccagagctaaca

SEQ ID NO: 359282 - DNA, 120 bp, Artificial Sequence
  ENSG00000140374_6 (sequence is synthesized)
ggtgccaaagtggtggtatctggtggtcgaggcttgaagagtggagagaactttaagttgttatatgacttggcagatcaactacatgctgcagttggtgcttcccgtgctgctgttgat

SEQ ID NO: 359283 - DNA, 120 bp, Artificial Sequence
  ENSG00000140374_7 (sequence is synthesized)
gctggctttgttcccaatgacatgcaagttggacagacgggaaaaatagtagcaccagaactttatattgctgttggaatatctggagccatccaacatttagctgggatgaaagacagc

SEQ ID NO: 359284 - DNA, 120 bp, Artificial Sequence
  ENSG00000140374_8 (sequence is synthesized)
aagacaattgtggcaattaataaagacccagaagctccaattttccaagtggcagattatggaatagttgcagatttatttaaggtagttcctgaaatgactgagatattgaagaaaaaa

SEQ ID NO: 359285 - DNA, 120 bp, Artificial Sequence
  ENSG00000140374_9 (sequence is synthesized)
atcatgccttaaaaagaaaacttttgttaaagtattccactgaaatcacagatatttgtgggtattataacaatcattggaaagcatggagagctacatttcataatttgagggaaaatt

SEQ ID NO: 359286 - DNA, 120 bp, Artificial Sequence
  ENSG00000140374_10 (sequence is synthesized)
tctaacagatgccagaatgcttgtttatgggattgctgtgtttccttttaattatttgtggttccaaacaattattgtttgaactttttaaattctgtactaaaatctataataaagctt

SEQ ID NO: 359287 - DNA, 120 bp, Artificial Sequence
  ENSG00000140374_11 (sequence is synthesized)
ttccacagctttaaaactatcagaaatatgcctagcctctagagaaaattgaagaaaaggagtaaaaattttgtttatttatttatttttttgcctttcttgttcatggagagctctatg

SEQ ID NO: 359288 - DNA, 120 bp, Artificial Sequence
  ENSG00000140374_12 (sequence is synthesized)
ttttaggaagattgtaaacatgattgtctccaccagcctaatcaacctactaatctcattgttgaagggcaaacttcataggagaaggtaactgaattggcaagtgcagagttaaaaaag

SEQ ID NO: 359289 - DNA, 120 bp, Artificial Sequence
  ENSG00000140374_13 (sequence is synthesized)
cacggctataaagcatgaatattatcttaaacatactccagtcttcagaagaccatagctaatgtgacaaaagcagacctgacttaaacctgacccagctccatgtatttagttggctta

SEQ ID NO: 359290 - DNA, 120 bp, Artificial Sequence
  ENSG00000140374_14 (sequence is synthesized)
aggtaaatttcattttccgtttaattttaaggttttgtcagtttataggacttttgtctgtaaaggagggagagtggaggaggggctgctttgagacagcatggcctctgatgcaagcag

SEQ ID NO: 359291 - DNA, 120 bp, Artificial Sequence
  ENSG00000140374_15 (sequence is synthesized)
atagtttgatgttattataaacattcaaaatcctgtgcagagaatgctctagcctttcttttgccttctgttggcttcttttgggctctcttaggaagcacccaggcctgtgtagtcacc

SEQ ID NO: 359292 - DNA, 120 bp, Artificial Sequence
  ENSG00000140374_16 (sequence is synthesized)
tctggcactctcattctgctgcccagggcacagctgaggtccaagagtgtcaccagggctgcagctggtgtggatgcaggcccaagagcagaggctggtgaggctttgaacaggcctgca

SEQ ID NO: 359293 - DNA, 120 bp, Artificial Sequence
  ENSG00000140374_17 (sequence is synthesized)
ggaaggcgtgggtaggtaggtgagtagaacaaagagggctgccctcctgaatcagatctgcagaagtaggagtagtgacctggatcaagcagacagtagggaagagaagggaagtgataa

SEQ ID NO: 359294 - DNA, 120 bp, Artificial Sequence
  ENSG00000140374_18 (sequence is synthesized)
gtgatggaggtggctagagtgcctttgtgtgaccagcctggggcccttccccagctgactagtgaaccctttctgatttgtgtcacaatcagttgctataaaacacttttaaaagttgta

SEQ ID NO: 359295 - DNA, 120 bp, Artificial Sequence
  ENSG00000140374_19 (sequence is synthesized)
caatcaagtcacctgacacatttgtgagaactatttatgcaggtgagtactcaaggaagataattaatcaacatgttaaattttagtgaaaagcataaattaatcttgaagatagaattt

SEQ ID NO: 359296 - DNA, 120 bp, Artificial Sequence
  ENSG00000140374_20 (sequence is synthesized)
ccaggtgaggttttccagtagaaaaaaatgtagtgtctaaattacgcttgaatatatgaatatgaaagtatttcaaaatatttttttatcaaatgtgtttaattctcagaggaactgaca

SEQ ID NO: 359297 - DNA, 120 bp, Artificial Sequence
  ENSG00000140374_21 (sequence is synthesized)
accagtaagtattgcaataaaatatgctgtgtaaaatgttatggggataagtactgtatgtatttgttgaacagtgatctcagtgatttaccttactcagtgttcctgagcagttagcca

SEQ ID NO: 359298 - DNA, 120 bp, Artificial Sequence
  ENSG00000140374_22 (sequence is synthesized)
gtaccatggtgaatatgtcattttcacaaggtctgtgtagttcttgatcctagtaaaatgcccagcagttcttaaatccagcttattattcaagtattttaaagcagtggaacattttat

SEQ ID NO: 359299 - DNA, 78 bp, Artificial Sequence
  ENSG00000140374_23 (sequence is synthesized)
gaggcttgaagagtggagagaactttaagttgttatatgacttggcagatcaactacatgctgcagttggtgcttccc

SEQ ID NO: 359300 - DNA, 120 bp, Artificial Sequence
  ENSG00000140374_24 (sequence is synthesized)
aacgtagatctgggaactgaaagaaataaaagctaccgttcactgccttaaaaattattggtcacagaggcagtgctgtgtcatggaaagaggcctgaacctgagttatagctccactgc

SEQ ID NO: 359301 - DNA, 120 bp, Artificial Sequence
  ENSG00000140374_25 (sequence is synthesized)
taacttaatgcatgatgagtgctgtctgcaaactcagtttctttgtctactaaatagtgggtattgaatgatgatcactaagttgcccttcagctatcacaatctgtggatagaaaatat

SEQ ID NO: 359302 - DNA, 120 bp, Artificial Sequence
  ENSG00000140374_26 (sequence is synthesized)
cagacttaaacaatttgatgaggttctgaacgtgtaacttatttttgaggttttgatccctgattctctctctgtctgcttcactttggtcctgtaaccctcacaatctcatatatcagc

SEQ ID NO: 359303 - DNA, 120 bp, Artificial Sequence
  ENSG00000140374_27 (sequence is synthesized)
agggccccacttcttgggttgttatcaaagtataaccaacacattttgggttggagcatcaggccatcttaatatctcagtatctcagtaattatcaaaagtgcaataagtatggggccg

SEQ ID NO: 359304 - DNA, 120 bp, Artificial Sequence
  ENSG00000140374_28 (sequence is synthesized)
gaactttatattgctgttggaatatctggagccatccaacatttagctgggatgaaagacagcaagttacctggactataccatgttccaatcttagacattctggcatcttctgcacat

SEQ ID NO: 359305 - DNA, 120 bp, Artificial Sequence
  ENSG00000140374_29 (sequence is synthesized)
ctctctgaggaacccctctaagggaaatacacagatgttggatatcctgtagcctgtattttaagtcaggctacatcaaaatacttaatgtattttttaataccagctgttttcacaaca

SEQ ID NO: 359306 - DNA, 120 bp, Artificial Sequence
  ENSG00000140374_30 (sequence is synthesized)
aggtgactggctgaggcggcgccagttggccgggcacggggctgctgtaaggccgaggttgcggcggaagcggagaccatgttccgagcggcggctccggggcagctccggcgggcgagg

SEQ ID NO: 359307 - DNA, 120 bp, Artificial Sequence
  ENSG00000140374_31 (sequence is synthesized)
agctctcctctgtccaagcagtcacaaagcagctctacactggaagctccagttgcagccactgcactgccacgactaagggtagttcctgaaatgactgagatattgaagaaaaaatga

SEQ ID NO: 359308 - DNA, 120 bp, Artificial Sequence
  ENSG00000140374_32 (sequence is synthesized)
gtaccactgcactccagcctgagcaacacaatgagaccctgtctcaaagtaataatgataataacaattgttatatagtataatgaaaaagctttcggatgattaaactcccagatgtct

SEQ ID NO: 359309 - DNA, 120 bp, Artificial Sequence
  ENSG00000140374_33 (sequence is synthesized)
gactaagtggcctctagaagaataatttaccatcaataactaaacaaatctctgcttatcgccgtgaagcaggttacacattcccaaaagagaaacacgccaatgcaaatcaacacctgc

SEQ ID NO: 359310 - DNA, 120 bp, Artificial Sequence
  ENSG00000140374_34 (sequence is synthesized)
aattcagaatgtttgttcttgtgcctttggatttgaggctcacgtttgaaacttgtttattgtctctgactatgcatcttaatgtgtgtagcatgtttctctggattagcagttacctgg

SEQ ID NO: 359311 - DNA, 120 bp, Artificial Sequence
  ENSG00000140374_35 (sequence is synthesized)
tgggattacaggtatgagccactgtgcctgtcctccagaataataattttaaaataataaatgaaggacaaaataatttgcactacaaaggctgtggatttgggtatagatttgttactt

SEQ ID NO: 359312 - DNA, 120 bp, Artificial Sequence
  ENSG00000140374_36 (sequence is synthesized)
tttcacctaaaatcaaatattttttttgtaagtcaaaagaagaacttttaaaaaataatgattttaaactctttaatactgagatgggctagatgtgggtaagagagaattttattacat

SEQ ID NO: 359313 - DNA, 120 bp, Artificial Sequence
  ENSG00000140379_0 (sequence is synthesized)
agtgagcattctcagcacattgcctcaacagcttcaaggtgagccagctcaagactttgctctccaccaggcagaagatgacagactgtgaatttggatatatttacaggctggctcagg

SEQ ID NO: 359314 - DNA, 120 bp, Artificial Sequence
  ENSG00000140379_1 (sequence is synthesized)
actatctgcagtgcgtcctacagataccacaacctggatcaggtccaagcaaaacgtccagagtgctacaaaatgttgcgttctcagtccaaaaagaagtggaaaagaatctgaagtcat

SEQ ID NO: 359315 - DNA, 120 bp, Artificial Sequence
  ENSG00000140379_2 (sequence is synthesized)
gcttggacaatgttaatgttgtgtccgtagacactgccagaacactattcaaccaagtgatggaaaaggagtttgaagacggcatcattaactggggaagaattgtaaccatatttgcat

SEQ ID NO: 359316 - DNA, 120 bp, Artificial Sequence
  ENSG00000140379_3 (sequence is synthesized)
ataaggagatttcatattttgttgcggagttcataatgaataacacaggagaatggataaggcaaaacggaggctgggaaaatggctttgtaaagaagtttgaacctaaatctggctgga

SEQ ID NO: 359317 - DNA, 120 bp, Artificial Sequence
  ENSG00000140379_4 (sequence is synthesized)
tgacttttctagaagttacaggaaagatctgtgaaatgctatctctcctgaagcaatactgttgaccagaaaggacactccatattgtgaaaccggcctaatttttctgactgatatgga

SEQ ID NO: 359318 - DNA, 120 bp, Artificial Sequence
  ENSG00000140379_5 (sequence is synthesized)
aacgattgccaacacatacttctacttttaaataaacaactttgatgatgtaacttgaccttccagagttatggaaattttgtccccatgtaatgaataaattgtatgtatttttctcta

SEQ ID NO: 359319 - DNA, 120 bp, Artificial Sequence
  ENSG00000140379_6 (sequence is synthesized)
ataaggcaaaacggaggctgggggaaatggcacaatcacacacctatgctggtagagtcagtggcccacaagaagaggaaaatggctttgtaaagaagtttgaacctaaatctggctgga

SEQ ID NO: 359320 - DNA, 120 bp, Artificial Sequence
  ENSG00000140382_0 (sequence is synthesized)
agctgtgagacgacgagtgcgtgaagtgaaggcgattgagaggggctgagggaattgtcctctgtggaagggactttcttttggccctaggccccttcctgcccctgtcgtcagcagaga

SEQ ID NO: 359321 - DNA, 120 bp, Artificial Sequence
  ENSG00000140382_1 (sequence is synthesized)
gatggaaaacttgatgactagctccaccctaccgcccctttttgcagatgaagacggttccaaggagagtaatgatctggctaccactgggttaaatcacccagaggttccatacagtag

SEQ ID NO: 359322 - DNA, 120 bp, Artificial Sequence
  ENSG00000140382_2 (sequence is synthesized)
tggcgccacatcatccaccaacaatccagaatttgtggaggatctctctcaaggtcagttgcttcagagtgagtcttcaaatgcagcagaaggcaatgaacagaggcatgaagatgagca

SEQ ID NO: 359323 - DNA, 120 bp, Artificial Sequence
  ENSG00000140382_3 (sequence is synthesized)
acgaagtaaacgaggaggttggtccaaaggaagaaagaggaagaaacctcttcgagacagcaatgcacccaaatccccccttacaggatatgttcggttcatgaatgagcgtcgagaaca

SEQ ID NO: 359324 - DNA, 120 bp, Artificial Sequence
  ENSG00000140382_4 (sequence is synthesized)
acttcgagcaaagagaccagaagtcccatttccagaaatcacaaggatgttaggcaatgaatggagtaaactgcctcctgaggaaaaacagcgctaccttgatgaagcagacagagataa

SEQ ID NO: 359325 - DNA, 120 bp, Artificial Sequence
  ENSG00000140382_5 (sequence is synthesized)
ggagcgttacatgaaggaactggaacagtatcagaaaacagaggcctacaaggtcttcagtaggaaaacccaggaccgtcagaaaggcaaatctcataggcaagatgcagcccggcaggc

SEQ ID NO: 359326 - DNA, 120 bp, Artificial Sequence
  ENSG00000140382_6 (sequence is synthesized)
cactcatgatcatgagaaagaaacagaggtaaaggaacggtctgtttttgacatccctatatttacagaggaattcttgaaccatagcaaagctcgggaagcagagctccgccagcttcg

SEQ ID NO: 359327 - DNA, 120 bp, Artificial Sequence
  ENSG00000140382_7 (sequence is synthesized)
caaatccaacatggagtttgaggagaggaatgcagccctgcaaaagcacgtggagagcatgcgcacagcagtggagaagctggaggtggatgtgatccaggagcggagccgcaacacagt

SEQ ID NO: 359328 - DNA, 120 bp, Artificial Sequence
  ENSG00000140382_8 (sequence is synthesized)
cttacagcagcacctggagaccctgcggcaggtgctgaccagcagctttgccagcatgcccttgcctggaagtggagagacacctacagtggacaccattgactcatatatgaacagact

SEQ ID NO: 359329 - DNA, 120 bp, Artificial Sequence
  ENSG00000140382_9 (sequence is synthesized)
gcacagtattattttagctaatccccaagacaatgaaaacttcatagctacagttcgagaagttgtgaacagactcgatcgttagggaatggtcttagaactccaagatgttccataagt

SEQ ID NO: 359330 - DNA, 120 bp, Artificial Sequence
  ENSG00000140382_10 (sequence is synthesized)
gtttttacttgtgaggaatgagaagccatccatggaaatttgaactgagtgggggcagagaaagagtgcagatccctttgcttgtgaaagaattatcagtgagtgaaaggccatcacccc

SEQ ID NO: 359331 - DNA, 120 bp, Artificial Sequence
  ENSG00000140382_11 (sequence is synthesized)
aggaagccaaatgagggagcagcaacatgtatatgagcttcctatggaattgtccttatgtgaagctttgaaggtgtacagccactctcccgggtcttcaggttcctaccatttccattt

SEQ ID NO: 359332 - DNA, 120 bp, Artificial Sequence
  ENSG00000140382_12 (sequence is synthesized)
ctgttaaagtggatctgcatatcttcagcttactaggtgacccggatgctgacatctgctgctgcagaaaggaagacttttcattgtaatttcgcttagacccttttatcagtggagctc

SEQ ID NO: 359333 - DNA, 120 bp, Artificial Sequence
  ENSG00000140382_13 (sequence is synthesized)
cagttttcttacctagctgtcacttttttaaatgcctctgggggttatttttgctttccttggcccccaccaatttatacatctccattttctgacctctggactaactggttgctcagc

SEQ ID NO: 359334 - DNA, 120 bp, Artificial Sequence
  ENSG00000140382_14 (sequence is synthesized)
aaggttctgaaggagagtttcttgcattggacaggcccagtcttctcccatcattgccctgctgtgactccaaagaaaggagcttcttgctgacagtgccctgtggagcaaggctgtgtt

SEQ ID NO: 359335 - DNA, 120 bp, Artificial Sequence
  ENSG00000140382_15 (sequence is synthesized)
tcactggtactgcctgctgttttctaagcattgctcctgcacagacatggagtcccagccccagcaaggctcttctgttcccatctgttgacaatgtcttgtggagcatttttgctgagg

SEQ ID NO: 359336 - DNA, 120 bp, Artificial Sequence
  ENSG00000140382_16 (sequence is synthesized)
aaaaggtcacttgtaaacagaggagaaagggaaagagtacaaagccctaagtttattgtaagtgaaaactgagggaattcctgtcttctttaggagtaatgattcatagatctagatagg

SEQ ID NO: 359337 - DNA, 120 bp, Artificial Sequence
  ENSG00000140382_17 (sequence is synthesized)
tggaaatatcattcaaaatagtcacttgagctcacaaaaaaagcaaggaagaattctcatgtcctttgtcttccttctgtagccattaactgctgaatccatgtgaggaagacaggcttc

SEQ ID NO: 359338 - DNA, 120 bp, Artificial Sequence
  ENSG00000140382_18 (sequence is synthesized)
ctgaatccatgtgaggaagacaggcttcccttccttccccctccttagtgattttttctttaacagcataagtaaagaggactttctggttcatttttgtttgttttgttttgttttgtt

SEQ ID NO: 359339 - DNA, 120 bp, Artificial Sequence
  ENSG00000140382_19 (sequence is synthesized)
gcccaggctggagtgcggtggctattcacagatgctatcatagcacactacagcctacaactcttgggctcaagcatcacgcctagcagtttctggttcctttaacagcaaaaggaaaga

SEQ ID NO: 359340 - DNA, 120 bp, Artificial Sequence
  ENSG00000140382_20 (sequence is synthesized)
gaggttctgattcttacctcagggttttttggttgttcattgtttttgtttttgtttttgttttgacactgcagagcacaaggctaaaggttacagctgagatctttggaaccaaaggca

SEQ ID NO: 359341 - DNA, 120 bp, Artificial Sequence
  ENSG00000140382_21 (sequence is synthesized)
gagcaagcagagcccgttgtctgggccccacaccactgcaggcaggtggatagaagtgcggcccctctcatagtatgcccataagtcagggcatagggcagaactacctgtcatgttgct

SEQ ID NO: 359342 - DNA, 120 bp, Artificial Sequence
  ENSG00000140382_22 (sequence is synthesized)
acaccatcctgtcttctcagcatctccttgcctgttttctttattagtccaaaggaaaacaacagcaacaaaatctgtttttaaaatgtcttatatgaacatatatcaaatatccatgcg

SEQ ID NO: 359343 - DNA, 120 bp, Artificial Sequence
  ENSG00000140382_23 (sequence is synthesized)
ctgaaacccacataccatcacttggcaattttttagaataagaccccattattatctattgctataaacctagccagttctcttgctcttctgtattttcctatttccctgccatcatct

SEQ ID NO: 359344 - DNA, 120 bp, Artificial Sequence
  ENSG00000140382_24 (sequence is synthesized)
gctatttctgccacttctcttagactccttgtctgcaaagcccaagctagaactcactgtctatggcagaaggacatccagagcccattctggagttttgttttttccttctgccagatg

SEQ ID NO: 359345 - DNA, 120 bp, Artificial Sequence
  ENSG00000140382_25 (sequence is synthesized)
ctttgtgtcctgtcttccttcctcctcatatttctgtttctcatttgtgttcagttttgtgcagcattgctagcactgcttttgtgaccagaaaaggccataacatggtccaggatcatc

SEQ ID NO: 359346 - DNA, 120 bp, Artificial Sequence
  ENSG00000140382_26 (sequence is synthesized)
attcttctgactctagatgggacacttgacagtgacttgaaacatttgcatattcaggaatgcatgagatttcaagagagcctacagtatgaaatcattttcacaaaataagcagcttgc

SEQ ID NO: 359347 - DNA, 120 bp, Artificial Sequence
  ENSG00000140382_27 (sequence is synthesized)
ttctgaaatgctgtctttcccagtagctactcacctgcctctggtggctgggattcagatgccacaaaactgtcagtatctatagaccaggtctgtgccacctcctctctcctctgtgct

SEQ ID NO: 359348 - DNA, 120 bp, Artificial Sequence
  ENSG00000140382_28 (sequence is synthesized)
cagtgaggaggcagtaaatgaagttacaggctagcacaatacctaactcatgtttcccagtacacctgtagatattactgtacttttatgttctcaagaaataagttgttgcctattcag

SEQ ID NO: 359349 - DNA, 120 bp, Artificial Sequence
  ENSG00000140382_29 (sequence is synthesized)
tgttacagatttctttgtttctttttaattaaaatacaagaagcagctgaggaaagggagacaaggtattttatttctgactgattttagaaaaaacttgtgtacatgtgtttggaactg

SEQ ID NO: 359350 - DNA, 120 bp, Artificial Sequence
  ENSG00000140382_30 (sequence is synthesized)
ttgaaatgccaagttttctgtataagtgtttttgtaattaaactttcagattttctttgttttttaagaagttgatgtgcttgtttgacatttgtctcattaaaacttttctacgttgaa

SEQ ID NO: 359351 - DNA, 120 bp, Artificial Sequence
  ENSG00000140382_31 (sequence is synthesized)
accttgcgtaaccacgtagtccttcgccgcattggggcaaaataatcccttcatttttgtgaaggtaccgtggaaaatatttcatttttcttctcaccggagcaattgtaaatgctatgc

SEQ ID NO: 359352 - DNA, 120 bp, Artificial Sequence
  ENSG00000140382_32 (sequence is synthesized)
ggtaagaggagttacctgtggaaaggtggttaagagattaggtaaagaaaaggaaaggacaccaaaataaagtgctgcggaagaatttttgtccagctgtgagacgacgagtgcgtgaag

SEQ ID NO: 359353 - DNA, 120 bp, Artificial Sequence
  ENSG00000140382_33 (sequence is synthesized)
tgaaggcgattgagaggggctgagggaattgtcctctgtggaagggactttcttttggccctaggccccttcctgcccctgtcgtcagcagagtctctacaaggaagataacggactgta

SEQ ID NO: 359354 - DNA, 120 bp, Artificial Sequence
  ENSG00000140382_34 (sequence is synthesized)
gacaaggggcggggctgccgagaccttgggcccgcgtgagggaaaatttgggttcgattaagccgcagaggaaaagaccaggggagtctgggcccatttgggcgtcggggcccgctaggt

SEQ ID NO: 359355 - DNA, 120 bp, Artificial Sequence
  ENSG00000140382_35 (sequence is synthesized)
cagccgtcatcgaatacagaatatgttttcgaggacgctaatatgtagtcatgaccaatttcagttcttctactttctgcgggccttcgcaataaaaaaaaaaaaactacatctcccaga

SEQ ID NO: 359356 - DNA, 120 bp, Artificial Sequence
  ENSG00000140382_36 (sequence is synthesized)
cttcatttttgtgaaggtaccgtggaaaatatttcatttttcttctcaccggagcaattgtaaatgctatgcggtaagaggagttacctgtggaaaggtggttaagagattagatgaaga

SEQ ID NO: 359357 - DNA, 120 bp, Artificial Sequence
  ENSG00000140382_37 (sequence is synthesized)
ggagaaacatcttgcttgaaaatatctgcgtagatgagtacagaatccaagactagaaccacagatatctaaactctctcattcactgggtttctaaaacattgctctaaggaagaggtg

SEQ ID NO: 359358 - DNA, 120 bp, Artificial Sequence
  ENSG00000140382_38 (sequence is synthesized)
gatgggggaaggggaaagcactaaaaaatcctgaaatagagcattaagatacataggaagtaaacagataaaaattgtaatccaggaattataatgttatagaattttagctcattttaa

SEQ ID NO: 359359 - DNA, 120 bp, Artificial Sequence
  ENSG00000140382_39 (sequence is synthesized)
aattattttgataaatatacagtggaagaattaccctacctgtctgtcacctttcttgtagctgagtagtacctagagacaagtggagctaggaggaggccatgagggtgattttaagtt

SEQ ID NO: 359360 - DNA, 120 bp, Artificial Sequence
  ENSG00000140382_40 (sequence is synthesized)
gaaaggtgactaccttatataaactattaaaatgcatatgttgcctgatttcaatgataatatttggctgtttgagtttagggaaaaaaaatcttatgtgactgtatttttattaatatg

SEQ ID NO: 359361 - DNA, 120 bp, Artificial Sequence
  ENSG00000140382_41 (sequence is synthesized)
agaaatgttcttgattatatgcacataatacatctctatacatgcagatatccttagttaacacttgaagaaaattggttttgattgaccatacattcttcagactaaagtagggtactc

SEQ ID NO: 359362 - DNA, 120 bp, Artificial Sequence
  ENSG00000140382_42 (sequence is synthesized)
attttccctcctcaggtttgtccctgatagttgcttttctgtgtttagctgatgattttcctacctcccattgttgctgaactggaacagggccatgtttctcattgaaatgttatgtaa

SEQ ID NO: 359363 - DNA, 120 bp, Artificial Sequence
  ENSG00000140382_43 (sequence is synthesized)
aacatctcaatgaggttgcctgcttacagctttatgagttcttcagtttacatacaccctgcactcactttaacgcttatgaaaccaaagcatttttaaaatccatagcgctaacccctt

SEQ ID NO: 359364 - DNA, 120 bp, Artificial Sequence
  ENSG00000140382_44 (sequence is synthesized)
aaggtgttcatatgaccttcttatattcttaggctgatacctgcaaaattttgttttctatttcttgttttatacggaaccatattaataattttaatgacatagacaggtagactcttt

SEQ ID NO: 359365 - DNA, 120 bp, Artificial Sequence
  ENSG00000140382_45 (sequence is synthesized)
tttccctgttccctaagaaatgtatacttacctcatattagatgttgaacaaatacttgttgaatgagtgaatgatttaatcattaataagtaactaatgagaagtgtacatgcccttgc

SEQ ID NO: 359366 - DNA, 120 bp, Artificial Sequence
  ENSG00000140382_46 (sequence is synthesized)
tcaaggctctgctcagcaagccctgctgcatggagccctatgtgcccaaaggattcatactacttaccaaatctttcaccctcccatagggggtaactttccttaactcacacaaaggcg

SEQ ID NO: 359367 - DNA, 120 bp, Artificial Sequence
  ENSG00000140382_47 (sequence is synthesized)
tcaggcgtttcattgctgaaattgctatctggaatgccataatgagaatagggagatgaggtggggtagctaaattagaggcagctaagcagaacttccctgtaagagtcattgggactc

SEQ ID NO: 359368 - DNA, 120 bp, Artificial Sequence
  ENSG00000140382_48 (sequence is synthesized)
aaaataagatgtcatcagactttatcaatactactaaaaccctgggattacattggatgaacaagttggagacttggttaagattcctgttgcatggttgttaaatgtagtaaataatat

SEQ ID NO: 359369 - DNA, 66 bp, Artificial Sequence
  ENSG00000140382_49 (sequence is synthesized)
tagaaaagagaatcagttcaagtccagagagatcctgtctctaaaaataaaagaaaacagactcaa

SEQ ID NO: 359370 - DNA, 120 bp, Artificial Sequence
  ENSG00000140386_0 (sequence is synthesized)
gagtcatactccatgggtttatgtgataaatgatcttggcatagaagagaatttaaagaatgatggcttcattccagcgctccaatagtcatgacaaagtaaggagaatagttgcagagg

SEQ ID NO: 359371 - DNA, 120 bp, Artificial Sequence
  ENSG00000140386_1 (sequence is synthesized)
agggtcgtacagcaagaaacctaatagcttggagtgttccactagaaagcaaagatgatgatggaaaacctaaatgtcaaactggtggaaaatctaagaggaccattcaaggcactcata

SEQ ID NO: 359372 - DNA, 120 bp, Artificial Sequence
  ENSG00000140386_2 (sequence is synthesized)
aaactactaaacagagtactgcagtggactgtaaaataacatcgtctacgactggagataaacactttgataaaagtcccactaaaacaaggcaccctcggaaaattgatctaagagctc

SEQ ID NO: 359373 - DNA, 120 bp, Artificial Sequence
  ENSG00000140386_3 (sequence is synthesized)
gatactgggcatttctttttgataatcttcgccgagcagtagatgaaatctatgtaacttgcgaatcagatcagagtgtggtcgaatgtaaggaggtgctaatgatgctggataactatg

SEQ ID NO: 359374 - DNA, 120 bp, Artificial Sequence
  ENSG00000140386_4 (sequence is synthesized)
taagagatttcaaagcattgattgactggattcagcttcaggaaaagctagagaagacagatgctcaaagcagaccaacatcattggcatgggaagtaaagaagatgtctccgggacgcc

SEQ ID NO: 359375 - DNA, 120 bp, Artificial Sequence
  ENSG00000140386_5 (sequence is synthesized)
atgtgattccaagtccatcaacagatagaataaatgtaacatcaaatgctcgacgaagcttaaattttggaggttcaactggcacagtgccagctcctcgtctggctcccacaggtgtca

SEQ ID NO: 359376 - DNA, 120 bp, Artificial Sequence
  ENSG00000140386_6 (sequence is synthesized)
gttgggctgacaaggtaaaggctcatcatacaggctctactgcttcttcagaaataacacccgcccagtcttgcccaccaatgacagtgcagaaggcctcacgcaaaaatgaacggaaag

SEQ ID NO: 359377 - DNA, 120 bp, Artificial Sequence
  ENSG00000140386_7 (sequence is synthesized)
atgctgaaggatgggagaccgttcagagaggaaggcctattcgttctcgatcaacagcagtgatgccaaaagtttcattggcaacagaagccacaagatcaaaggatgacagtgataaag

SEQ ID NO: 359378 - DNA, 120 bp, Artificial Sequence
  ENSG00000140386_8 (sequence is synthesized)
aaaatgtatgtcttttacctgatgaaagcatacagaaaggtcaatttgttggagatggaacttctaatactatagaatctcatcccaaagactcattacactcttgtgaccatcctcttg

SEQ ID NO: 359379 - DNA, 120 bp, Artificial Sequence
  ENSG00000140386_9 (sequence is synthesized)
ccgaaaaaacccagttcacagtgagtacattggatgatgtgaagaattctggcagtattcgagacaattatgttcgaacttctgaaatatctgctgtccacattgatacagagtgtgttt

SEQ ID NO: 359380 - DNA, 120 bp, Artificial Sequence
  ENSG00000140386_10 (sequence is synthesized)
cagttatgctgcaagctggtacacctcctttacaagtaaatgaagaaaaatttccagcagagaaagcaaggatagaaaatgaaatggacccttcagatatttcaaattccatggcagaag

SEQ ID NO: 359381 - DNA, 120 bp, Artificial Sequence
  ENSG00000140386_11 (sequence is synthesized)
tccttgctaaaaaagaagagctagcagatcgtctagaaaaggccaatgaagaagccattgctagtgctattgctgaagaagaacagttaactagagaaattgaagctgaagaaaacaatg

SEQ ID NO: 359382 - DNA, 120 bp, Artificial Sequence
  ENSG00000140386_12 (sequence is synthesized)
atattaacattgaaactgacaacgacagtgatttttctgccagcatgggcagtgggagtgtttctttctgtggtatgtccatggactggaacgatgtccttgcagattatgaagctcgtg

SEQ ID NO: 359383 - DNA, 120 bp, Artificial Sequence
  ENSG00000140386_13 (sequence is synthesized)
agtcttggcgccaaaatacatcctggggggacattgtagaagaagaacctgctagacctccagggcatggaattcacatgcatgaaaaactttcttcaccctctcgtaaaagaacaattg

SEQ ID NO: 359384 - DNA, 120 bp, Artificial Sequence
  ENSG00000140386_14 (sequence is synthesized)
cagaatctaagaagaaacatgaagaaaaacaaatgaaagcacagcagctaagggaaaagttacgcgaagagaaaacattgaagcttcagaaattgttagaaagggagaaggatgtccgga

SEQ ID NO: 359385 - DNA, 120 bp, Artificial Sequence
  ENSG00000140386_15 (sequence is synthesized)
agtggaaggaagaattgctagatcaacgacgcaggatgatggaagaaaaattacttcatgctgagtttaagcgagaagtgcagttacaagcaattgtgaaaaaagcacaagaagaagaag

SEQ ID NO: 359386 - DNA, 120 bp, Artificial Sequence
  ENSG00000140386_16 (sequence is synthesized)
ctaaggtaaatgaaattgcctttataaatacccttgaagcccagaataaacgtcatgatgttttatcaaaattgaaggaatatgaacagaggcttaatgagctacaggaagagcgtcaga

SEQ ID NO: 359387 - DNA, 120 bp, Artificial Sequence
  ENSG00000140386_17 (sequence is synthesized)
gaagacaggaagaaaagcaagcacgtgatgaagctgtgcaggaacgcaagagagctctagaggcagagcggcaggcccgtgtagaagaattgttaatgaagaggaaagaacaagaagccc

SEQ ID NO: 359388 - DNA, 120 bp, Artificial Sequence
  ENSG00000140386_18 (sequence is synthesized)
gaattgaacaacagaggcaagaaaaggaaaaagcccgtgaggatgcagcccgggaaagagctagagacagggaagaacgattggcagcactcacagctgctcaacaagaagctatggaag

SEQ ID NO: 359389 - DNA, 120 bp, Artificial Sequence
  ENSG00000140386_19 (sequence is synthesized)
atgatgaaagtattcgaaggcacatggaacagattgaacaaagaaaagaaaaagctgctgagctaagcagtgggcgacatgcaaatactgattatgcccccaaactgaccccttatgaaa

SEQ ID NO: 359390 - DNA, 120 bp, Artificial Sequence
  ENSG00000140386_20 (sequence is synthesized)
gaaagaagcagtgttctctctgcaatgtcctgatctcttcagaggtatatctttttagccatgttaaagggagaaaacaccagcaagccgtgagagagaataccagcatccaggggcgtg

SEQ ID NO: 359391 - DNA, 120 bp, Artificial Sequence
  ENSG00000140386_21 (sequence is synthesized)
aactgtcagatgaagaagtggagcatctttccttgaagaagtacattattgacattgtggttgaaagtacagctccagcagaagctttgaaagatggagaagagcggcaaaaaaataaaa

SEQ ID NO: 359392 - DNA, 120 bp, Artificial Sequence
  ENSG00000140386_22 (sequence is synthesized)
aaaaagccaaaaagataaaagcccggatgaacttcagggctaaggaatatgagagtttaatggaaaccaaaaattctggctctgattcaccttataaagcaaagcttcagcgattagcca

SEQ ID NO: 359393 - DNA, 120 bp, Artificial Sequence
  ENSG00000140386_23 (sequence is synthesized)
aagatcttctaaaacaagtacaagttcaagacagtggctcatgggcaaacaataaagtgtctgctttggatcggaccctaggagagatcactagaatactggaaaaagagaatgtggcag

SEQ ID NO: 359394 - DNA, 120 bp, Artificial Sequence
  ENSG00000140386_24 (sequence is synthesized)
atcagattgcatttcaagctgctggtggattaacagcccttgaacacatccttcaagcagtagtcccagccacaaatgtgaacacagttttaagaattcctcctaagtctctctgcaatg

SEQ ID NO: 359395 - DNA, 120 bp, Artificial Sequence
  ENSG00000140386_25 (sequence is synthesized)
caatcaatgtttacaacctcacctgcaataactgttcagaaaactgcagtgatgttctgtttagtaacaagattaccttcttaatggacctcctgatacaccagttgacggtttatgttc

SEQ ID NO: 359396 - DNA, 120 bp, Artificial Sequence
  ENSG00000140386_26 (sequence is synthesized)
cagatgaaaataatactattttggggagaaatacaaataaacaagtttttgaaggcttgacaactggacttctcaaagtcagtgctgtggttttgggctgcctgattgccaatcgaccag

SEQ ID NO: 359397 - DNA, 120 bp, Artificial Sequence
  ENSG00000140386_27 (sequence is synthesized)
atggaaactgccagccagctaccccaaaaataccaacacaggaaatgaaaaacaaaccctcacaaggtgatccttttaacaatcgagttcaggaccttatcagctacgtggtgaacatgg

SEQ ID NO: 359398 - DNA, 120 bp, Artificial Sequence
  ENSG00000140386_28 (sequence is synthesized)
gtctgattgacaaactgtgtgcctgcttcctctcggtgcaaggcccagtggatgagaatcccaagatggccatatttctgcagcatgccgcaggactcttacatgcaatgtgtacactgt

SEQ ID NO: 359399 - DNA, 120 bp, Artificial Sequence
  ENSG00000140386_29 (sequence is synthesized)
gctttgctgtcactggaaggtcatacagcatatttgacaataatcgccaggatcccacagggctgacagctgctcttcaggcaaccgacctggctggagttcttcatatgctctactgtg

SEQ ID NO: 359400 - DNA, 120 bp, Artificial Sequence
  ENSG00000140386_30 (sequence is synthesized)
tcctcttccatggcaccatcttggaccccagcactgccagtcccaaggagaattacactcaaaataccatccaagtggccattcagagtttacgtttcttcaacagctttgcagctcttc

SEQ ID NO: 359401 - DNA, 120 bp, Artificial Sequence
  ENSG00000140386_31 (sequence is synthesized)
atctgcctgcttttcagtctattgtaggggcagagggcttgtcccttgcattccggcacatggccagctccctgctgggccactgcagccaagtctcctgtgaaagcctccttcatgagg

SEQ ID NO: 359402 - DNA, 120 bp, Artificial Sequence
  ENSG00000140386_32 (sequence is synthesized)
tcatcgtctgtgtgggctacttcactgtcaaccacccagataaccaggtgatcgtgcagtccggccgccaccccacagtgctgcagaagctctgccagttgcccttccagtatttcagtg

SEQ ID NO: 359403 - DNA, 120 bp, Artificial Sequence
  ENSG00000140386_33 (sequence is synthesized)
acccacggctgatcaaagtactgttcccttcacttatcgctgcttgttacaacaaccatcagaacaagatcattctggagcaagagatgagctgtgttttactggccactttcattcagg

SEQ ID NO: 359404 - DNA, 120 bp, Artificial Sequence
  ENSG00000140386_34 (sequence is synthesized)
atttggcacagactccaggtcaagcggaaaaccagccttaccaacccaaagggaaatgccttggttcccaagactatcttgagctggctaacagatttcctcagcaggcctgggaagaag

SEQ ID NO: 359405 - DNA, 120 bp, Artificial Sequence
  ENSG00000140386_35 (sequence is synthesized)
ctcgacagtttttcttgaaaaaagagaaaaaataaatgttttggttgattctgtatttgagtacccttgttaatattttaaattgtccaaacaaacattctaattgttccttaagaactc

SEQ ID NO: 359406 - DNA, 120 bp, Artificial Sequence
  ENSG00000140386_36 (sequence is synthesized)
attttcccatgtttatactcttcccacactgtagatatggcatgtactttacactatttataatgactgtagatacttgaatgttctacttgctaattttgcaagttgagtttatttcat

SEQ ID NO: 359407 - DNA, 120 bp, Artificial Sequence
  ENSG00000140386_37 (sequence is synthesized)
ttatgcagagtatcttggagtttggtaatttccatcttatgataatatatactttgcatttgtgatatgggtgaaaggagacataaaattagcaagtctgttttgttcttgtaataaagt

SEQ ID NO: 359408 - DNA, 120 bp, Artificial Sequence
  ENSG00000140386_38 (sequence is synthesized)
aacttattctgttttcattgttgacttttcatgttaaggaaatacgaatctgaaagaaaaatgttaactccagctcttgaagtatcttaaataaagacttaattaaagtttacctgctct

SEQ ID NO: 359409 - DNA, 120 bp, Artificial Sequence
  ENSG00000140386_39 (sequence is synthesized)
tttgcattctgactacataatatgtttgggggctatttgaaatcaacttagggcgttgtattcattggtctgcccgaactctcctagcagataatcctctcttggcattgccgagctgaa

SEQ ID NO: 359410 - DNA, 120 bp, Artificial Sequence
  ENSG00000140386_40 (sequence is synthesized)
attactctcctaaggaaaaattagtgataaaaaagatgtgtcctagtgaatcaccctagagtattttctcacatggttgtgaaatgaagcaacgctgaaataaaagtcacacagaaagtc

SEQ ID NO: 359411 - DNA, 120 bp, Artificial Sequence
  ENSG00000140386_41 (sequence is synthesized)
cccgccccgtcacgcccctttcccggcgggacgctttgagccgccccgaactaagcagggcggtcggggctctgcccaggaaacggggcaggaatggcctctccgtcttccagatgcgtg

SEQ ID NO: 359412 - DNA, 120 bp, Artificial Sequence
  ENSG00000140386_42 (sequence is synthesized)
cgctgaggcctggaggggcgaagagcctctcgcacctgggagtagtgggacccagcctcctgcctctgttgctgctcttttccaaaacagcacttccttggcgcctttcctctacaccgt

SEQ ID NO: 359413 - DNA, 120 bp, Artificial Sequence
  ENSG00000140386_43 (sequence is synthesized)
ggaagcagtcacattggggtatgactacaacttgacagagctatgataacccctttaaaagagtgtttattcttttcaaatagcagaaagaatgttcagagagaacgttagcagagagaa

SEQ ID NO: 359414 - DNA, 120 bp, Artificial Sequence
  ENSG00000140386_44 (sequence is synthesized)
tgttcagaattgctctcccgtgacttattgaggtttgtctccaaagccttctgtttccctctctttgtgttgtgtagaggctgatgcaattcctcttacaatagaaagaagatatctcac

SEQ ID NO: 359415 - DNA, 67 bp, Artificial Sequence
  ENSG00000140386_45 (sequence is synthesized)
tgcccttctaaacctaaatgtcaaactggtggaaaatctaagaggaccattcaaggcactcataaaa

SEQ ID NO: 359416 - DNA, 120 bp, Artificial Sequence
  ENSG00000140386_46 (sequence is synthesized)
ctaggggctgccagccacttgtcaactcattagcatacaaaaagacacatcattttgggaattccaaagattttaggagttgcatgccaggagacttgagatgaagaccaaatatatatt

SEQ ID NO: 359417 - DNA, 120 bp, Artificial Sequence
  ENSG00000140386_47 (sequence is synthesized)
atggaatggatggcacttcatgcccacacaaatcatgctgtttttgcccagctgtactctcctttaaggtcatacagcatatttgacaataatcgccaggatcccacagggctgacagct

SEQ ID NO: 359418 - DNA, 120 bp, Artificial Sequence
  ENSG00000140386_48 (sequence is synthesized)
ataggtaagagattagggtcctctcaaatatttcctaggtatgcacacaacctgcatatgtgtgtggccttcttgattttcaggaatttgctagaacttttcaaagcctcccatggatgt

SEQ ID NO: 359419 - DNA, 120 bp, Artificial Sequence
  ENSG00000140386_49 (sequence is synthesized)
ctcattcttgagcttttccttttaagttttttggtcagctctttgtttgcttcaaatggtatttcaatctctggtagttgtattattttaaaaaattgtcacatttgtttcgcacaaaca

SEQ ID NO: 359420 - DNA, 120 bp, Artificial Sequence
  ENSG00000140386_50 (sequence is synthesized)
gacggtatgtaatattattgctttgagttagaagcagttaaggtttgagaaatagtccctgtggagaaaactaaaagaattcaacttagttactctccagatgaaaaaaaaaaaaaagaa

SEQ ID NO: 359421 - DNA, 120 bp, Artificial Sequence
  ENSG00000140386_51 (sequence is synthesized)
ctgcttttcaggtaccaagtattggtttatatcgatgttaaccaatcaagagttagtattttagtgtagataggatgtcagattcttctcctgaattggggcataaggaataaactacaa

SEQ ID NO: 359422 - DNA, 120 bp, Artificial Sequence
  ENSG00000140386_52 (sequence is synthesized)
taaatggaattataatatatattataatttattaaactactattttctgggaactgtattagatgctctataacatctagcattctcatttattctcatagctaccatgcaaagtattat

SEQ ID NO: 359423 - DNA, 120 bp, Artificial Sequence
  ENSG00000140386_53 (sequence is synthesized)
tatacccattttacagatagagaagctgacagttaagtaatgtgcccaaggttacatgtttgtgaaccaggactagtaaccatgactctcccaccccaaagcctatgttcatcctttgcc

SEQ ID NO: 359424 - DNA, 120 bp, Artificial Sequence
  ENSG00000140386_54 (sequence is synthesized)
atgctgctatttataaatcttttgtctggaattctttatatcaggacattatcatctcatcaacttttaaatattaaggaaagtaatggtttcttacgtaaatagaaccaaaattagata

SEQ ID NO: 359425 - DNA, 120 bp, Artificial Sequence
  ENSG00000140386_55 (sequence is synthesized)
aattgattgatatgactttctacggatggtttagctgattttgtgtccaatgtaaagtgtataactagctttacagggatttgcatctttagctatgaagtttttatagctaaagaaaga

SEQ ID NO: 359426 - DNA, 120 bp, Artificial Sequence
  ENSG00000140386_56 (sequence is synthesized)
agaattgctttatgctataacaccagactgtcagcctggaaacagattttttttttcatgtaggaaatttaattttcaaaaacactgaacctttggaacagagcaagccccaaggaatag

SEQ ID NO: 359427 - DNA, 120 bp, Artificial Sequence
  ENSG00000140386_57 (sequence is synthesized)
actttctctttcagtttattaactgtcaagtgatttcattaaaaaaggaacaaatttggcagatgatgaacccataatttagatgaattgctttgctctgagggaaaaaggttatagaga

SEQ ID NO: 359428 - DNA, 120 bp, Artificial Sequence
  ENSG00000140386_58 (sequence is synthesized)
aacaaatgtatgaaaatagtggactttgccattctgagatgagaagaatacttctatattgtagctgatgacaaatgtgccattctttaattgatgtcttcctgtcattttgttcaaaaa

SEQ ID NO: 359429 - DNA, 120 bp, Artificial Sequence
  ENSG00000140386_59 (sequence is synthesized)
aggaaacttgtgactaagttgtatcattggatctagtatctttcaactttgtagaattagtttatctgtcacaagaacagaaatcccttcctttgggttaatgcttttctgtctccagag

SEQ ID NO: 359430 - DNA, 120 bp, Artificial Sequence
  ENSG00000140386_60 (sequence is synthesized)
cagttgaactagccttaggaggtaactgactgcacaatacgtagagttctgggaggttacagccacatataaatgagagatatctgctccaaaaaatgtcagtagttcttgcctcagggt

SEQ ID NO: 359431 - DNA, 120 bp, Artificial Sequence
  ENSG00000140386_61 (sequence is synthesized)
tgaacataacatctgtgttttatgaagacgtaagcccaccgtattctgtctggaaacagtttggaaatcagggaaccttaactttacatgctcaggatatggagtccaccagtctaccca

SEQ ID NO: 359432 - DNA, 120 bp, Artificial Sequence
  ENSG00000140386_62 (sequence is synthesized)
tcagctgcgtcgaaagggagtgatttcttttgttaacagattatggaatagcaaatatctaaaaactgtctcttagcttcctgtttcacgggtcttcttggccaacatttatactgctac

SEQ ID NO: 359433 - DNA, 120 bp, Artificial Sequence
  ENSG00000140386_63 (sequence is synthesized)
aggggactccatatcataaacaagcatctaggataagtcagctgttcggtcagtcactccatcagggagccctaggtccctgctccctgcccctctcctcctgtgaacttgtggcctgtg

SEQ ID NO: 359434 - DNA, 120 bp, Artificial Sequence
  ENSG00000140386_64 (sequence is synthesized)
caggctcactcacaaaggcgcaccactgaacttcaccagacctgctccctagtgcctttaagcctaaagggcttaataatgggcgataatgtcaagtgatttcattaaaaaaggaaaaag

SEQ ID NO: 359435 - DNA, 120 bp, Artificial Sequence
  ENSG00000140386_65 (sequence is synthesized)
agccgggagcggcgcggcagcggctgagatcacgtggtgcgccgggaagccaccccgcctctccgaggcctccctgccccgccccgtcacgcccctttcccggcgggacgctttgagccg

SEQ ID NO: 359436 - DNA, 120 bp, Artificial Sequence
  ENSG00000140386_66 (sequence is synthesized)
tcccattttccttagaattaccttttctttcttggacctgcctgcatacagaatagatctgtctgcattgagtgtattcagtgagctaagctaagggaagactgcagtgggcagggcctt

SEQ ID NO: 359437 - DNA, 120 bp, Artificial Sequence
  ENSG00000140386_67 (sequence is synthesized)
actttcttgtgagtgaactctttgcaggttttaaggaatatgactactctgctttaagggggtgtggggagcactttgttaaagcaatgtgcattctgaatccatttcataggcgtcctt

SEQ ID NO: 359438 - DNA, 120 bp, Artificial Sequence
  ENSG00000140386_68 (sequence is synthesized)
actccgtggcagctacacctttaatcgtggattataataacttttaaatgagtgcaaaactttcaggatcttttccttaagttgggaaatgagattttttttttctgctcttttcaagta

SEQ ID NO: 359439 - DNA, 120 bp, Artificial Sequence
  ENSG00000140386_69 (sequence is synthesized)
tcacttaaattaagctctggtacggagtcaggagtctttttctttacactccttcagcatgttttccatggtactagccgacactgtgcaggtgggtgagggacaggctggggcgtttcg

SEQ ID NO: 359440 - DNA, 120 bp, Artificial Sequence
  ENSG00000140386_70 (sequence is synthesized)
aggtcaagcggaaaaccagccttaccaacccaaaggtatgtctctattgaaattaaatttcatgtgtttgttagccaaatggacatctttcttatcctttcctctggaactgctacatta

SEQ ID NO: 359441 - DNA, 120 bp, Artificial Sequence
  ENSG00000140386_71 (sequence is synthesized)
tatgtaaaattttatacataacctaaaaatatttgagattcagataccaagtatatttcagtaagtaaagaaatcgattttgtcatgaagcatgaatgcatccaaatatgtatagaaatc

SEQ ID NO: 359442 - DNA, 120 bp, Artificial Sequence
  ENSG00000140386_72 (sequence is synthesized)
tgtgggagtaaaagaaaagcacaaatatctttgtataatttataatcatctcatgcaagatatattaaatggtaaataattactaaagagccgctttgtaatacaggagccagatcatta

SEQ ID NO: 359443 - DNA, 120 bp, Artificial Sequence
  ENSG00000140386_73 (sequence is synthesized)
atactggcccacatttctcacataaatgctgaaatcacataggtttggttccttatccatgttcagaataaagttatcagtaatagtagcccacagtttccccccaagttcaagtagttg

SEQ ID NO: 359444 - DNA, 120 bp, Artificial Sequence
  ENSG00000140386_74 (sequence is synthesized)
aacttttgttttgaaaataattgttttacatggagaaaaagtcatctaattggcaaagtccagggcaaaagatttacaagttgtttttttttcctatagcattcctgctggggtgtttgc

SEQ ID NO: 359445 - DNA, 120 bp, Artificial Sequence
  ENSG00000140386_75 (sequence is synthesized)
tgtgatcagagttagagatgtagaatttttaccacatttttacttttttaaatattctgctacccagactgtaattgagaagtacaagttgctctttgggtgttatgacagcatctctga

SEQ ID NO: 359446 - DNA, 120 bp, Artificial Sequence
  ENSG00000140386_76 (sequence is synthesized)
tgaatgagaacctaatccagatcttcttcaattcttccattagtttgatagtctttaaagtggccatttagaggtacactcccagcaggaccctttagggcacccaccaagaaaccctta

SEQ ID NO: 359447 - DNA, 90 bp, Artificial Sequence
  ENSG00000140386_77 (sequence is synthesized)
ctctacagtggacaggtgttgaaaagtgcacagaagaaaatataactaaagctattacaatatcatgaaaagaaaaaaaaaagacgtttt

SEQ ID NO: 359448 - DNA, 120 bp, Artificial Sequence
  ENSG00000140386_78 (sequence is synthesized)
gctattacaatatcatgaaaagaaaaaaaaaagacgttttattgactcaggcacccagaaaagttaaacagaaagctatgcaacttttcagaaattcaagtccacatccttgtcggtacc

SEQ ID NO: 359449 - DNA, 120 bp, Artificial Sequence
  ENSG00000140386_79 (sequence is synthesized)
tgttttaactactggaggatacttggggagaaatcagcaaaatgtgttactgttcttacaaaacaatttcattttgaataaattaaaatgcttagaaaaatctaatgtatttattttcaa

SEQ ID NO: 359450 - DNA, 120 bp, Artificial Sequence
  ENSG00000140386_80 (sequence is synthesized)
ttgtacagcagttttgttttgttttgtttgccactaagaagtataagcatttttttcttactctttctcctgatcataaagatgagtcacaatttgttacattgtctggaagacacagtc

SEQ ID NO: 359451 - DNA, 120 bp, Artificial Sequence
  ENSG00000140386_81 (sequence is synthesized)
ccagaagctgcctctctctgcttggtggactgaggcctgtggaagtctcaaccttctttcttttccaagggaccatcttccctgattttcatgctttcccccagttacagtaggcttaac

SEQ ID NO: 359452 - DNA, 120 bp, Artificial Sequence
  ENSG00000140386_82 (sequence is synthesized)
ccacagaacagcaaagggggaattggtctctcctttgctcagaaagggtcatcactatgttaatgacagctcataatatgttgcttgattttttttttaatgatgatgcctaagttgcca

SEQ ID NO: 359453 - DNA, 120 bp, Artificial Sequence
  ENSG00000140386_83 (sequence is synthesized)
gtttgcaccttgggtatttgttccccttttgcctagattaagtcctcataaaatgtctcaagatattttgagttcattgtccaggtaaacctttaaatataaaagcagctcttggtaata

SEQ ID NO: 359454 - DNA, 120 bp, Artificial Sequence
  ENSG00000140386_84 (sequence is synthesized)
ccacattcctattgcccaggaagaattttggttttcaaatacctactgcctgtctagctgcaattgtttactttacctatgtcactggccagtaaagctcctatcattcattcctactgc

SEQ ID NO: 359455 - DNA, 120 bp, Artificial Sequence
  ENSG00000140386_85 (sequence is synthesized)
tttgttagataggctgtgctatatttgaataattttaaagatatacttaaaactacattcatgttttaaattaaatagactttcagaaaacgtcatcatttacatacagttttccccttt

SEQ ID NO: 359456 - DNA, 80 bp, Artificial Sequence
  ENSG00000140386_86 (sequence is synthesized)
tttcagaaaacgtcatcatttacatacagttttcccctttcatggctaacttaaggatagaatataggactgtcatttta

SEQ ID NO: 359457 - DNA, 120 bp, Artificial Sequence
  ENSG00000140386_87 (sequence is synthesized)
gctactcacaggtgcgatcatagcaaactatagcctctaactcctgggctcaagcattcccccgacttcagccttccaaatagctgggactacaggcgcgcaccactgtgcttgcctggt

SEQ ID NO: 359458 - DNA, 120 bp, Artificial Sequence
  ENSG00000140386_88 (sequence is synthesized)
tgctaatttttttctcattgtggagtccaaaaacatctttttgtaatttatataggggttaatgtctgaatatgttaaaggacaaactggattgtggttaaaatatatgtcatatatttt

SEQ ID NO: 359459 - DNA, 120 bp, Artificial Sequence
  ENSG00000140386_89 (sequence is synthesized)
atactacagatagattgatacatatagatcaatcaccttatttacctaaattgtgtcatggtttatttgaagtggatatctccattttatactcagatatcaaaataagtttaatttatg

SEQ ID NO: 359460 - DNA, 120 bp, Artificial Sequence
  ENSG00000140386_90 (sequence is synthesized)
aggacttgcccaggaattgcagttcttgtggcttaaacctcctttcaagtttatttaggtccccagaacactttaacctgcaactcaggttccgagtgctaggatgggcgattccccgct

SEQ ID NO: 359461 - DNA, 120 bp, Artificial Sequence
  ENSG00000140391_0 (sequence is synthesized)
acttgctggggtcggggctgcgcgacggcgcaggggctgcggggagcgccgcgcaggccgtgcagttcctagcgaggaggcgccgccgccattgccgctctctcggtgagcgcagccccg

SEQ ID NO: 359462 - DNA, 120 bp, Artificial Sequence
  ENSG00000140391_1 (sequence is synthesized)
ctctccgggccgggccttcgcgggccaccggcgccatgggccagtgcggcatcacctcctccaagaccgtgctggtctttctcaacctcatcttctggggggcagctggcattttatgct

SEQ ID NO: 359463 - DNA, 120 bp, Artificial Sequence
  ENSG00000140391_2 (sequence is synthesized)
atgtgggagcctatgtcttcatcacttatgatgactatgaccacttctttgaagatgtgtacacgctcatccctgctgtagtgatcatagctgtaggagccctgcttttcatcattgggc

SEQ ID NO: 359464 - DNA, 120 bp, Artificial Sequence
  ENSG00000140391_3 (sequence is synthesized)
taattggctgctgtgccacaatccgggaaagtcgctgtggacttgccacgtttgtcatcatcctgctcttggtttttgtcacagaagttgttgtagtggttttgggatatgtttacagag

SEQ ID NO: 359465 - DNA, 120 bp, Artificial Sequence
  ENSG00000140391_4 (sequence is synthesized)
caaaggtggaaaatgaggttgatcgcagcattcagaaagtgtataagacctacaatggaaccaaccctgatgctgctagccgggctattgattatgtacagagacagctgcattgttgtg

SEQ ID NO: 359466 - DNA, 120 bp, Artificial Sequence
  ENSG00000140391_5 (sequence is synthesized)
gaattcacaactactcagactgggaaaatacagattggttcaaagaaaccaaaaaccagagtgtccctcttagctgctgcagagagactgccagcaattgtaatggcagcctggcccacc

SEQ ID NO: 359467 - DNA, 120 bp, Artificial Sequence
  ENSG00000140391_6 (sequence is synthesized)
cttccgacctctatgctgaggggtgtgaggctctagtagtgaagaagctacaagaaatcatgatgcatgtgatctgggccgcactggcatttgcagctattcagctgctgggcatgctgt

SEQ ID NO: 359468 - DNA, 120 bp, Artificial Sequence
  ENSG00000140391_7 (sequence is synthesized)
gtgcttgcatcgtgttgtgcagaaggagtagagatcctgcttacgagctcctcatcactggcggaacctatgcatagttgacaactcaagcctgagctttttggtcttgttctgatttgg

SEQ ID NO: 359469 - DNA, 120 bp, Artificial Sequence
  ENSG00000140391_8 (sequence is synthesized)
aaggtgaattgagcaggtctgctgctgttggcctctggagttcatttagttaaagcacatgtacactggtgttggacagagcagcttggcttttcatgtgcccacctacttacctactac

SEQ ID NO: 359470 - DNA, 120 bp, Artificial Sequence
  ENSG00000140391_9 (sequence is synthesized)
ctgcgactttctttttccttgttctagctgactcttcatgcccctaagattttaagtacgatggtgaacgttctaatttcagaaccaattgcgagtcatgtagtgtggtagaattaaagg

SEQ ID NO: 359471 - DNA, 120 bp, Artificial Sequence
  ENSG00000140391_10 (sequence is synthesized)
aggacacgagcctgcttctgttacctccaagtggtaacaggactgatgccgaaatgtcaccaggtcctttcagtcttcacagtggagaactcttggccaaaggtttttgcggggaggagg

SEQ ID NO: 359472 - DNA, 120 bp, Artificial Sequence
  ENSG00000140391_11 (sequence is synthesized)
aggaaaccagctttctggttaaggttaacaccagatggtgcccctcattggtgtccttttaaaaaatatttactgtagtccaataagatagcagctgtacaaaatgactaaaatagattg

SEQ ID NO: 359473 - DNA, 120 bp, Artificial Sequence
  ENSG00000140391_12 (sequence is synthesized)
taggatcatatggcgtatatcttggttcatcttcaaaatcagagactgagctttgaaactagtggtttttaatcaaagttggctttataggaggagtataatgtatgcactactgtttta

SEQ ID NO: 359474 - DNA, 120 bp, Artificial Sequence
  ENSG00000140391_13 (sequence is synthesized)
aaagaattagtgtgagtgtgtttttgtatgaatgagcccattcatggtaagtcttaagcttgttggaaataatgtacccatgtagactagcaaaatagtatgtagatgtgatctcagttg

SEQ ID NO: 359475 - DNA, 120 bp, Artificial Sequence
  ENSG00000140391_14 (sequence is synthesized)
taaatagaaaaatctaattcaataaactctgtatcagcccccaacatattatttttcattatttgggggatatttcagttccagagcagcagtatcatgttttctttgttggtgctgtct

SEQ ID NO: 359476 - DNA, 120 bp, Artificial Sequence
  ENSG00000140391_15 (sequence is synthesized)
atagttcatcatggtttacgtgtgttttcgttatagctgttgccagattctaaagggcttgatattcaaaaaaccacagatgctttcagtccagtatatcctagaaatatagagctctac

SEQ ID NO: 359477 - DNA, 120 bp, Artificial Sequence
  ENSG00000140391_16 (sequence is synthesized)
tttgtgcaatgcactggggatacagtggcgatactgtccttgtcttcaaggagttcggagtcctagtataggagacatacataggagaagataattttcacactgcagtggttgtagtaa

SEQ ID NO: 359478 - DNA, 120 bp, Artificial Sequence
  ENSG00000140391_17 (sequence is synthesized)
tagaatgggagtccaaaggggagttccggagaggtcaggggtgacttcctggaggagatgcccaagcttggaggctggataggctttgttgaaagatggtacacaagagtgtgaaacaaa

SEQ ID NO: 359479 - DNA, 120 bp, Artificial Sequence
  ENSG00000140391_18 (sequence is synthesized)
attgtgtgtgcagggagcttaaaatacaaggctggggaaagaagttggagaagcaggaaagcccaggccctctagtgtcttacggaacatcctgtggaggtgagagctgacttgtaggtg

SEQ ID NO: 359480 - DNA, 120 bp, Artificial Sequence
  ENSG00000140391_19 (sequence is synthesized)
gaagcagctctttggaggtttgatttggaaggtgaactgagaagaaggtggtgatgcaagccggccgtgctgaagccaggatgaattggtgtgactgggcttcagttaggctggcatagc

SEQ ID NO: 359481 - DNA, 120 bp, Artificial Sequence
  ENSG00000140391_20 (sequence is synthesized)
agttgagagagcttagcagtgggcagcagggcactgttgggggcggtggtgagcggtggattctggctgtttggaggcaggacagtggtggaattcgatcattgattggacgtgggacag

SEQ ID NO: 359482 - DNA, 120 bp, Artificial Sequence
  ENSG00000140391_21 (sequence is synthesized)
agaagggagaagagaagactcatctaggatgagtcccaggtttctggctcagtcaactggggaaacaaagtcacagagctagggagtagttagagaacacatctgggggtgtgactcatg

SEQ ID NO: 359483 - DNA, 120 bp, Artificial Sequence
  ENSG00000140391_22 (sequence is synthesized)
gtcagttttgggctcgtcagttttgagatgcccaaatatcatgcagatctgtcccacctgaaaatggagaagacacgggaaaggagaggagtaaaaactaactccttttcacaaagtgga

SEQ ID NO: 359484 - DNA, 120 bp, Artificial Sequence
  ENSG00000140391_23 (sequence is synthesized)
agttaccagaatgtgatttcagaggccccgggggatttatcatgtgactactgacccatcccacctcttgcccctgcctgttgcacagtgggcaagaatgtttgtgacctttcactacca

SEQ ID NO: 359485 - DNA, 120 bp, Artificial Sequence
  ENSG00000140391_24 (sequence is synthesized)
ccacctcccccgagcatggtccccccagttttcaatatgaaccatcctgtgggtaccctgtcacaggctggccctgaggtgagcaatatttggactgtgatgttggttgttctccactct

SEQ ID NO: 359486 - DNA, 120 bp, Artificial Sequence
  ENSG00000140391_25 (sequence is synthesized)
ttctacaggacagaacagggcctctagagtgggaaatggctttgggaaatatgccaagcagtagccttgttcttcaacttgcccaagaggataattctccacacccttcctgtactcagt

SEQ ID NO: 359487 - DNA, 120 bp, Artificial Sequence
  ENSG00000140391_26 (sequence is synthesized)
tctgaggtctgggaaaccattccagctcctgccagttttaacttgtgtttaattcctggcacagttgtcctggaaatgcctttttctcttgcctgggaaccactagaaggggatgttgtc

SEQ ID NO: 359488 - DNA, 120 bp, Artificial Sequence
  ENSG00000140391_27 (sequence is synthesized)
tgtgttggccagggccatgcaaattcaacatcttgtttctgcccttcccccgtgtagctgaggctaggtgttggcattacccagtgcttgttcttcagagagcaaaagcactgctcgtca

SEQ ID NO: 359489 - DNA, 120 bp, Artificial Sequence
  ENSG00000140391_28 (sequence is synthesized)
tgtctgaaatttagtgagtgagctcacccactaggctggtgtttcctgcccgtggctgcacattggaagcaccggggcactttgagaactacagatgcctgggtcccagagcatctaagg

SEQ ID NO: 359490 - DNA, 120 bp, Artificial Sequence
  ENSG00000140391_29 (sequence is synthesized)
tgctctagggtgtgtccaggacacagccctggttgaggaccactgctatattgtatggcctcttttaaaaaagttaattttacttggaaatgatttcaaagctacagaaaagttgcaaga

SEQ ID NO: 359491 - DNA, 120 bp, Artificial Sequence
  ENSG00000140391_30 (sequence is synthesized)
ataaaaactgtacaaatgaggctcaaatatcctttgcccagatacacctattaacatttcgtcccattctatctgtcatgtgtgttctcaaatgtgtgtgcgttctctctcccttgcgcc

SEQ ID NO: 359492 - DNA, 120 bp, Artificial Sequence
  ENSG00000140391_31 (sequence is synthesized)
aaccccctgtctctccctctccctccctcctgctgcctccacacctgtcatggccttttacccctaatacctcagtgggtacttaccaagaagaagatactctctgacgactgcagtaca

SEQ ID NO: 359493 - DNA, 120 bp, Artificial Sequence
  ENSG00000140391_32 (sequence is synthesized)
gttgtcaaattccgtccatctaacactgatagaatacctcaccactcatattcccattggccgcatcgtgtcctctatagcacctttccctctgcggtgctggatctggtctggatcagg

SEQ ID NO: 359494 - DNA, 120 bp, Artificial Sequence
  ENSG00000140391_33 (sequence is synthesized)
taatcagttgagttgtcatgtctccttggtcttctttaatctggatcatttccatagctttgtctgtgatgataggaacagtttgtaaggatacagttcgttttaggtggtgctgcttat

SEQ ID NO: 359495 - DNA, 120 bp, Artificial Sequence
  ENSG00000140391_34 (sequence is synthesized)
ctgtgtttgtctgcgatttcctcgtgattagatttggttttgcattccaggtggctgaaccactacctgcgtcacgcggcctctcagggcatcgcatctcgaggcacacaatgcccatct

SEQ ID NO: 359496 - DNA, 120 bp, Artificial Sequence
  ENSG00000140391_35 (sequence is synthesized)
gccccacagtggggatgttcgttttgatcatctagtccaaggaggaggaaatgtgaacaggaaggttttaatataagtaattgttaactgtgtagaaggtagttaactactaaaagggat

SEQ ID NO: 359497 - DNA, 120 bp, Artificial Sequence
  ENSG00000140391_36 (sequence is synthesized)
aaaaaagagctctaaagcagcttagcagagaacagccatcacccctagggctaagggaagagaaaacagagaaggaacgtggaaactcagaggaggttccccaaggtggagagacctccg

SEQ ID NO: 359498 - DNA, 120 bp, Artificial Sequence
  ENSG00000140391_37 (sequence is synthesized)
aggggtggctgtggttgcctgggatatgctgcctgtcccatgctggagaatcaacttactggaggtgcccccccgccaagccacaggagcagagagctgtcacggtggggaatgctgctg

SEQ ID NO: 359499 - DNA, 120 bp, Artificial Sequence
  ENSG00000140391_38 (sequence is synthesized)
ggacccgtgcaggacgaaaggagacagaagaaaaaggccatcttcctcctctagccttgttagccccttcagagcccactgtgggtcaggctggcaaagggtaaaggagttttcagagcc

SEQ ID NO: 359500 - DNA, 120 bp, Artificial Sequence
  ENSG00000140391_39 (sequence is synthesized)
ccctcttcagtgtgacaaggaagggcaaggtcagggaaatttggagttaagaggcaataaatgagtacctggcacacctagtcgaggtgtgtccactttctccatagcatggttactgtt

SEQ ID NO: 359501 - DNA, 120 bp, Artificial Sequence
  ENSG00000140391_40 (sequence is synthesized)
tttttcttttcaactaataagaaatctctggagacacactgtctccatgtacataccctgttcctcatgagactcttccccattccccgaccaggttcagcaaatgttgctgattctggc

SEQ ID NO: 359502 - DNA, 120 bp, Artificial Sequence
  ENSG00000140391_41 (sequence is synthesized)
ctgattcaatctttatgatgactgccaagcgacgtttctgcagcccagcactccttcctcatttgccagtcatccctcccttctccttcatttattttcatatatccactatggattccc

SEQ ID NO: 359503 - DNA, 120 bp, Artificial Sequence
  ENSG00000140391_42 (sequence is synthesized)
attttttcaaaagtcgacttcatcattgacctttggggatgggggaagagttcctcagatagttcccgacttggccagcgagagccccttcgagtgcctcctatatcccagcatttttgg

SEQ ID NO: 359504 - DNA, 120 bp, Artificial Sequence
  ENSG00000140391_43 (sequence is synthesized)
aagcactcccctaatttctgatctaacaagatgttccaggcccctgggcaccagccatggatcagtgtttgtcccaggagccctggtccctggcactaggtgtgcttattgcagctgggg

SEQ ID NO: 359505 - DNA, 120 bp, Artificial Sequence
  ENSG00000140391_44 (sequence is synthesized)
tgtctttgcttcttgtcctatagatgattgacagagcttgtcttactgccttttttaagtgtatttttttaaacaaaagtaattggtgctttaaaaaatgtgaacaatacagacatctgt

SEQ ID NO: 359506 - DNA, 120 bp, Artificial Sequence
  ENSG00000140391_45 (sequence is synthesized)
aaagaagtacccacagggaagcaagttcagcagttcagcaatggcatgtgtctttgcagactacatacacagaaacagacttggtattgggttttggtttttgctttttgctaataggaa

SEQ ID NO: 359507 - DNA, 120 bp, Artificial Sequence
  ENSG00000140391_46 (sequence is synthesized)
ttttatcctacaagatcctctttctgtcttcacaacatagtctgatgctccttccatgtctaactgtaggatttgtcattccattgtgttagctgtgtgggtacattagtaccatgatta

SEQ ID NO: 359508 - DNA, 120 bp, Artificial Sequence
  ENSG00000140391_47 (sequence is synthesized)
accaaggtgtataaagggcaggcctgcaggctgcctccagtgcctccactactcgccacagtgatcatctctatacacacactgcagtcatttacaatttttaaaatgaaaacaattttt

SEQ ID NO: 359509 - DNA, 120 bp, Artificial Sequence
  ENSG00000140391_48 (sequence is synthesized)
attgagatgcaattcacatggcataaaattaacgattttaaagtaaagaagttgccttgagtacattcaccatgctatagaaccactgcctgtatctagtttcaaagcactttcatcacc

SEQ ID NO: 359510 - DNA, 120 bp, Artificial Sequence
  ENSG00000140391_49 (sequence is synthesized)
aagcactttcatcaccctgtgtcatgtatttttacatgaactccaagggtggattcttgttagttggatttactctggatggaaaagtcatgtttggctgggtgcagtggctcatgcctg

SEQ ID NO: 359511 - DNA, 120 bp, Artificial Sequence
  ENSG00000140391_50 (sequence is synthesized)
ggaggagcgaggcacttgctggggtcggggctgcgcgacggcgcaggggctgcggggagcgccgcgcaggccgtgcagttcctagcgaggaggcgccgccgccattgccgctctctcggg

SEQ ID NO: 359512 - DNA, 120 bp, Artificial Sequence
  ENSG00000140391_51 (sequence is synthesized)
tttttaaatcaagagtgtatttaaagttattttttcatttgtatataattttaaaccatgttttcttacagtttgtcatcatcctgctcttggtttttgtcacagaagttgttgtagtgg

SEQ ID NO: 359513 - DNA, 120 bp, Artificial Sequence
  ENSG00000140391_52 (sequence is synthesized)
ttttgggatatgtttacagagcaaaggtatgttgtctactgtaattcacataatgccttaaaaggtggtttaagtgtttcaagtaaaatagaacacattcattttatcagagtaaacatt

SEQ ID NO: 359514 - DNA, 120 bp, Artificial Sequence
  ENSG00000140391_53 (sequence is synthesized)
ttcttttgccttacttgtttaatctgtatttcaaatatctaaagttaattggcaaatatttacatgtcaagactccttacctcatttaatatagcagagtgttatatatgtattgttctt

SEQ ID NO: 359515 - DNA, 120 bp, Artificial Sequence
  ENSG00000140391_54 (sequence is synthesized)
gattataggtatttatagctgcaaatgaataattagctgagaagtttgttcagatttcctcagcacacagattgcctatatgaggggaggcataattttctgatttctgctttagaagaa

SEQ ID NO: 359516 - DNA, 120 bp, Artificial Sequence
  ENSG00000140391_55 (sequence is synthesized)
ccaaactcagaattgcgttttccattgtctctttaaaaaatgctttggtcctaaacatagaaaaaggtgttgtgagttgtgatcccaccttccacccctgtcctgaggaacaaggggtcc

SEQ ID NO: 359517 - DNA, 120 bp, Artificial Sequence
  ENSG00000140391_56 (sequence is synthesized)
tgccaacttagaacaccaaggcagctggtgccagcactcctttcttgcccttcattctttttaatcatttcaccgttccttcctttctattttgcctgattttgctgtctacctgtagta

SEQ ID NO: 359518 - DNA, 120 bp, Artificial Sequence
  ENSG00000140391_57 (sequence is synthesized)
ctacttaaggctaaacaggctgctttaaattaattaatatgggtataattttagaggcatggtaaagacataatagactcattctcattataacttaatggttttgagtcaagggcataa

SEQ ID NO: 359519 - DNA, 120 bp, Artificial Sequence
  ENSG00000140391_58 (sequence is synthesized)
tatgccaagttaattttcagatcattgatacgtaaggtactgtaaagctgtgctaaaaaaaaaatgcaatggattatgtccctacctatgatctggttatcaattttatggacttatgat

SEQ ID NO: 359520 - DNA, 120 bp, Artificial Sequence
  ENSG00000140391_59 (sequence is synthesized)
attactgttgtaattaccagataagtccagtcctccgaggggtaaggaggatctggtacaagcaaactttactaagtgatacttgcttgccattttagtaattggcagcaataagctatg

SEQ ID NO: 359521 - DNA, 120 bp, Artificial Sequence
  ENSG00000140391_60 (sequence is synthesized)
aagcttgtttcctgtctcctttttgcaatacattgaacagtagctttttcataaagtgccatttctaaggactgatttttttaaacctgccgattacttttgcacatttagccaactcta

SEQ ID NO: 359522 - DNA, 120 bp, Artificial Sequence
  ENSG00000140391_61 (sequence is synthesized)
aacgttgaataaataaaatggaaataatgttggcatttgtcctaaaagtatcttacaggagcttcagagttactttgttttacctcctttaggaaaggaaaatgagtaacttatttgtaa

SEQ ID NO: 359523 - DNA, 120 bp, Artificial Sequence
  ENSG00000140391_62 (sequence is synthesized)
aaggaaggcatccatttataatttaggacatctatcccaagcctcaacttttctcccttttgaatacattgttagcctgccattttgcacacaatcttctctttgaatgcttgaatgtat

SEQ ID NO: 359524 - DNA, 120 bp, Artificial Sequence
  ENSG00000140391_63 (sequence is synthesized)
tgaatttttacctgtcacttttctccctcctgccttcatctatatctatatgaagatgaaggcaggaagggagaaaactttacaggaaattcatagatatctggcaacttgcaaacattt

SEQ ID NO: 359525 - DNA, 120 bp, Artificial Sequence
  ENSG00000140391_64 (sequence is synthesized)
gactgggtaggtggcaagcctgagtgatcggagagaagccgggacggatgcaaatgcagagcccgctggcagaggcgcagaggcaccgaccgaccgaccaaccggagcgaggaggccccc

SEQ ID NO: 359526 - DNA, 120 bp, Artificial Sequence
  ENSG00000140391_65 (sequence is synthesized)
ggaaaacagaagcttcagcggtagaataaggttcaactccttcccctggtcttggagcagaagtcctcagtctggtcccaaatcaccttgcctctctgaacttgtcatttccttaaacac

SEQ ID NO: 359527 - DNA, 120 bp, Artificial Sequence
  ENSG00000140391_66 (sequence is synthesized)
ggacttgccacggtaagatgtgttgtgagaacatgcaggagtatttagtctatgctactctccttgaacatgagactccttggctcttatagttggaacagagttaacatttaaacttct

SEQ ID NO: 359528 - DNA, 120 bp, Artificial Sequence
  ENSG00000140391_67 (sequence is synthesized)
agcaattatctctgataactttttttaaatcaagagtgtatttaaagttattttttcatttgtatataattttaaaccatgttttcttacagtttgtcatcatcctgctcttggtttttg

SEQ ID NO: 359529 - DNA, 120 bp, Artificial Sequence
  ENSG00000140395_0 (sequence is synthesized)
gcagtcgcgcggagcccggcttccgacgtgcagcctggcagtgcagtgagctgtctggccttttgtccttgatccttggttaaggaaatgaccaaccagtacggtattctcttcaaacaa

SEQ ID NO: 359530 - DNA, 120 bp, Artificial Sequence
  ENSG00000140395_1 (sequence is synthesized)
gagcaagcccatgatgatgccatttggtcagttgcttgggggacaaacaagaaggaaaactctgagacagtggtcacaggctccctagatgacctggtgaaggtctggaaatggcgtgat

SEQ ID NO: 359531 - DNA, 120 bp, Artificial Sequence
  ENSG00000140395_2 (sequence is synthesized)
gagaggctggacctacagtggagtctggagggacatcagctgggagtggtgtctgtggacatcagccacaccctgcccattgctgcatccagctctcttgatgctcatattcgtctttgg

SEQ ID NO: 359532 - DNA, 120 bp, Artificial Sequence
  ENSG00000140395_3 (sequence is synthesized)
gacttggaaaatggcaaacagataaagtccatagatgcaggacctgtggatgcctggactttggccttttctcctgattcccagtatctggccacaggaactcatgtcgggaaagtgaac

SEQ ID NO: 359533 - DNA, 120 bp, Artificial Sequence
  ENSG00000140395_4 (sequence is synthesized)
atttttggtgtggaaagtgggaaaaaggaatattctttggacacgagaggaaaattcattcttagtattgcatatagtcctgatgggaaatacctagccagtggagccatagatggaatc

SEQ ID NO: 359534 - DNA, 120 bp, Artificial Sequence
  ENSG00000140395_5 (sequence is synthesized)
caatatttttgatattgcaactggaaaacttctgcataccctggaaggccatgccatgcccattcgctccttgaccttttccccggactcccagctccttgtcactgcttcagatgatgg

SEQ ID NO: 359535 - DNA, 120 bp, Artificial Sequence
  ENSG00000140395_6 (sequence is synthesized)
ctacatcaagatctatgatgtacaacatgccaatttggctggcacgctgagcggccatgcctcctgggtgctgaacgttgcattctgtcctgatgacactcactttgtttccagttcgtc

SEQ ID NO: 359536 - DNA, 120 bp, Artificial Sequence
  ENSG00000140395_7 (sequence is synthesized)
tgacaaaagtgtaaaagtttgggatgttggaacgaggacttgtgttcacaccttctttgatcaccaggatcaggtctggggagtaaaatacaatggaaatggttcaaaaattgtgtctgt

SEQ ID NO: 359537 - DNA, 120 bp, Artificial Sequence
  ENSG00000140395_8 (sequence is synthesized)
tggagatgaccaggaaattcacatctatgattgtccaatttaaacatcaaagtctccaggcttatgctgcaaagagaatgtacggattgatcatgacattccttaccttcttaggcttgt

SEQ ID NO: 359538 - DNA, 120 bp, Artificial Sequence
  ENSG00000140395_9 (sequence is synthesized)
ttaaaagaaatatagcatttattgtagcaaagacttaaattttgtagatacaatatgaatcttttcatgttttattggaaatgctgttcatactttaacataaagctttcttaatgcaaa

SEQ ID NO: 359539 - DNA, 120 bp, Artificial Sequence
  ENSG00000140395_10 (sequence is synthesized)
tcgcgcggagcccggcttccgacgtgcagcctggcagtgcagtggggaacttcctgtgtgccttctatcctgatgacaccccctcactgaaatcctggtgttgtttccacagagctgtct

SEQ ID NO: 359540 - DNA, 120 bp, Artificial Sequence
  ENSG00000140395_11 (sequence is synthesized)
tttagtgatgttagttgaccttagctggaacaaaagtcaacaagtaatccttttaaacagtaaaactcttagttttttcattataaattgaggcttctaccaaagtgactctaaggtaga

SEQ ID NO: 359541 - DNA, 120 bp, Artificial Sequence
  ENSG00000140395_12 (sequence is synthesized)
cttgtgttccaatggtaacttaaaatatgtaaatgtttgtaaaatgttgtttatagatcccagtgttggtcaggcctgggatggccaagacagttggaaagcaggagatggacaacttga

SEQ ID NO: 359542 - DNA, 120 bp, Artificial Sequence
  ENSG00000140395_13 (sequence is synthesized)
aggcattgcacagtgctttagaggcctcctgcgagccttggttttgaagctttaacaggcctccctcccatctggaaataggtagctgtgtctgagactcctggagaacaattaatatga

SEQ ID NO: 359543 - DNA, 120 bp, Artificial Sequence
  ENSG00000140395_14 (sequence is synthesized)
taccgaggcatggggttggggggtctgaagttagaagaatgtaagtcatcaaaggatttttggtcgaagtccttccaacttcaaaccgatactaatgttcactttttaaaatagttcgtc

SEQ ID NO: 359544 - DNA, 120 bp, Artificial Sequence
  ENSG00000140395_15 (sequence is synthesized)
gcagaagaattggcagctgaaaacaaatactcttaaaaaacagacaacaacaacaacaacaacaaaaacctgaacaaccagctaaaaaaaaaaagcagtcatcatgataggttggggaat

SEQ ID NO: 359545 - DNA, 120 bp, Artificial Sequence
  ENSG00000140395_16 (sequence is synthesized)
tctaggctgaggaaaatttttccacctgaggaagacatgatggagcttcccagctgctgaggtggaagaaggaaatgctttgaggctcaaaactctgttaatgccggctcatctggggag

SEQ ID NO: 359546 - DNA, 120 bp, Artificial Sequence
  ENSG00000140395_17 (sequence is synthesized)
gtgaacgtgagcctttttctgaactcagaacttgctttggcccttaatgaaagtgaagcctataatagtgaaatgagtttctcttgaggccaccgagtgcatggggagggctgggagctg

SEQ ID NO: 359547 - DNA, 120 bp, Artificial Sequence
  ENSG00000140395_18 (sequence is synthesized)
acaacatgccaatttggctggcacgctgagcggccatgcctcctgggtgctgaacgttgcattctgtcctgatgacactcactttgtttccagatcccagtgttggtcaggcctgggatg

SEQ ID NO: 359548 - DNA, 120 bp, Artificial Sequence
  ENSG00000140395_19 (sequence is synthesized)
atagcgacggcaacgggcgctgcggagtgctccgagccgtgagggcggggccggcgcgatgccccgccccttcgatagctcatctttgcgcgtcgcagtcgcgcggagcccggcttccga

SEQ ID NO: 359549 - DNA, 120 bp, Artificial Sequence
  ENSG00000140395_20 (sequence is synthesized)
cgtgcagcctggcagtgcagtgagctgtctggccttttgtccttgatccttggttaaggaaatgaccaaccaggtaagacctgtgttgaagggaaaaacatcaattggtctctttgccaa

SEQ ID NO: 359550 - DNA, 120 bp, Artificial Sequence
  ENSG00000140395_21 (sequence is synthesized)
gttcaagtccagtaggttttctggatgtgtagtcaagaaactagcatctcattcttgcctggctcctaaagagctgggtgaccctgggtacctagtcaccacagtgttaggtgggactag

SEQ ID NO: 359551 - DNA, 120 bp, Artificial Sequence
  ENSG00000140395_22 (sequence is synthesized)
tgaaatgcaaatactgagaggaggattggttcatccaagtctttaccacaatttagtgagtaatagaagaagcttaaaagatgttgtacaaaaaaaaaaaaaaaaagatcagaataggag

SEQ ID NO: 359552 - DNA, 120 bp, Artificial Sequence
  ENSG00000140395_23 (sequence is synthesized)
gacggttaggcaggctgtgtgttcttattgcagctgcaaaatttaagctacaaactggactttgagcttccttggtgatcagaacagaaaaagaaaacataatttattggtctcttgttg

SEQ ID NO: 359553 - DNA, 120 bp, Artificial Sequence
  ENSG00000140395_24 (sequence is synthesized)
agtgagtttgggtagtaggaaggaggggagaatgtcagtttctttaagaatttttttctgatatgactgtacaaatcttgcatgaatgggaatcaaggagcttgcgggatggccaggttg

SEQ ID NO: 359554 - DNA, 120 bp, Artificial Sequence
  ENSG00000140395_25 (sequence is synthesized)
acagcagaggaagtaactaacactgtggtgactctgtctactcggggaggagtgctttctggaggcaatgtgagacatctgaaatctgaccatgggtttaatgtggcttctgttcttttt

SEQ ID NO: 359555 - DNA, 120 bp, Artificial Sequence
  ENSG00000140395_26 (sequence is synthesized)
gcttccgacgtgcagcctggcagtgcagtgagctgtctggccttttgtccttgatccttggttaaggaaatgaccaaccagtacggtattctcttcaaacaagagcaagtggatgcctgg

SEQ ID NO: 359556 - DNA, 120 bp, Artificial Sequence
  ENSG00000140395_27 (sequence is synthesized)
agtgcagtggtgagttggagcgcagggccgttggggattggggtcattagggccgttgacagtccaggccagagggcgagtgagcgaggttgggcccgaggctgcctgtaagcagagctg

SEQ ID NO: 359557 - DNA, 120 bp, Artificial Sequence
  ENSG00000140395_28 (sequence is synthesized)
cttctgcataccctggaaggccatgccatgcccattcgctccttgaccttttccccggactcccagctccttgtcactgcttcagatgatggctacatcaagatctatgatgtgtgtcgc

SEQ ID NO: 359558 - DNA, 120 bp, Artificial Sequence
  ENSG00000140395_29 (sequence is synthesized)
ctaaaaggctctggggaagaaggcatttcaacagcagaaaagaggaagaagagggagaagagaaaatggagaaacaagaaataagccaacacaaaagaggggtgaagaaaagagagggtg

SEQ ID NO: 359559 - DNA, 120 bp, Artificial Sequence
  ENSG00000140395_30 (sequence is synthesized)
caaaagagaacaaagtaaaaacaaaaacaaaacaaaaaggacaaacaaatccccaaagaactctccaacggcaggtttcctggatgctccacccttccttataataaagaaggaaatgga

SEQ ID NO: 359560 - DNA, 120 bp, Artificial Sequence
  ENSG00000140395_31 (sequence is synthesized)
ccaggatcaggtgtcgcttcttgctgctctcaagccctactccccatgcttctgcttctagcttgctgggagctgggaaactgaccaagcatggaaaactacagcaatgctcataacagg

SEQ ID NO: 359561 - DNA, 120 bp, Artificial Sequence
  ENSG00000140395_32 (sequence is synthesized)
ggatagaatgtgttttacagctcagaattttttggatttgagaggggtgataatgtgtgcatgaactgtatttcacataataccctcagtggggctggaaacagcactgtaatgaaagac

SEQ ID NO: 359562 - DNA, 120 bp, Artificial Sequence
  ENSG00000140395_33 (sequence is synthesized)
taatacctctgcaagtaaacatgaatgtttacactaagggagataaataaaggctataaatagccttatgtcaattcaggttagattttgctgccaaatgaattttggtagtaaacctgt

SEQ ID NO: 359563 - DNA, 120 bp, Artificial Sequence
  ENSG00000140395_34 (sequence is synthesized)
agaaaaagcttgtagtttccagagctttttggatttcaaaactgctggtttggcgttgacctgtattttgcattttccagaggttctttatttgccatattctgaactgattcattcact

SEQ ID NO: 359564 - DNA, 120 bp, Artificial Sequence
  ENSG00000140395_35 (sequence is synthesized)
gccttacggaaacctagaatgtaaagcatggggtccttatagatctgtatcatggtcatctctactaattttgattaaagggtgtgattcttggtatgtgatacatatgaaacttttaag

SEQ ID NO: 359565 - DNA, 120 bp, Artificial Sequence
  ENSG00000140395_36 (sequence is synthesized)
ggtggatgaaagtattgtgcccactgtccacaccggtggcctctggaaaggaggactgggtagctaaagaacaggggccatgccatgcccattcgctccttgaccttttccccggactcc

SEQ ID NO: 359566 - DNA, 120 bp, Artificial Sequence
  ENSG00000140395_37 (sequence is synthesized)
tcaactactgatctttttactaaggcccaggactttttaccctcccatggtcccactgtatcccacctgccccctagcccctaactgaggtctgctccactctgctgaggtctgtgttta

SEQ ID NO: 359567 - DNA, 120 bp, Artificial Sequence
  ENSG00000140395_38 (sequence is synthesized)
ggggtaaaattgctgacctcagttaggtcttatggtggttctcctgccagaggtggttgggtttcatttttattaaaaaagtgaaaatagctgttgtaattagacctgtcttgttcttga

SEQ ID NO: 359568 - DNA, 120 bp, Artificial Sequence
  ENSG00000140395_39 (sequence is synthesized)
ttaggtttaaactggtctctccaagctgcatctgtcataatgaatacatcttgacactttccttggactgggagcactggccccatacggaaaggctgctggtgcaggcaggagtctgaa

SEQ ID NO: 359569 - DNA, 120 bp, Artificial Sequence
  ENSG00000140395_40 (sequence is synthesized)
cctgcccttctcctcagatggcttccttgccccgttggttctcaatttcctcatctgaggggttggcttgcgaagcctctgtagtgtggttctttgttcattttgagcttcagctctttg

SEQ ID NO: 359570 - DNA, 120 bp, Artificial Sequence
  ENSG00000140395_41 (sequence is synthesized)
cttgtgaaggattttattcttggcttttggtggtgtcaacacattatgggttaatgctactattaaaatttgtctctaatgcatgaagctacttcattgaaagaggaatttttgatatag

SEQ ID NO: 359571 - DNA, 120 bp, Artificial Sequence
  ENSG00000140395_42 (sequence is synthesized)
tattcatggtcattataaggatagcagatttggtccagcttattggcagagttaataatatactttccacttcagtgattatactgtagaaattaacatctcaattttgtttgaaacttt

SEQ ID NO: 359572 - DNA, 120 bp, Artificial Sequence
  ENSG00000140395_43 (sequence is synthesized)
cccatttcagacaacatgccaatttggctggcacgctgagcggccatgcctcctgggtgctgaacgttgcattctgtcctgatgacactcactttgtttccaggtacttaatgattctta

SEQ ID NO: 359573 - DNA, 120 bp, Artificial Sequence
  ENSG00000140395_44 (sequence is synthesized)
gcagtttctaaaatgctggggagatgagagcagtcttcttgtatagattgccttaacatttaaagatgtttgacccttttttattcagttagcctttcttttctgcagttcttaaaattt

SEQ ID NO: 359574 - DNA, 120 bp, Artificial Sequence
  ENSG00000140395_45 (sequence is synthesized)
aacgaggacttgtgttcacaccttctttgatcaccaggatcaggtatggcattattatttcatctttagatagtcggggttgtttgaccattgtaccaaagagattttcttttcctgacc

SEQ ID NO: 359575 - DNA, 120 bp, Artificial Sequence
  ENSG00000140395_46 (sequence is synthesized)
ttgttgcttgagctgtggataccagtagatgcctgggcctgagctgctctatctgctcagtcatccatgtagccagagttcctgtgcagagtctggggtgcagaggctgggatgtgctgt

SEQ ID NO: 359576 - DNA, 120 bp, Artificial Sequence
  ENSG00000140395_47 (sequence is synthesized)
acataggctggaaaacatggtgttagccccacagcctttaaatgccgtctttggaaattgctgcagctggtgtctggggccctctcctgggggctgctgcgccatggcaggctcaccaag

SEQ ID NO: 359577 - DNA, 120 bp, Artificial Sequence
  ENSG00000140395_48 (sequence is synthesized)
gaccttcctcttcaggagattccattgcttaaacacaatcatcgcttgtcatttttgggactgtccaaagaagagatgtgatttttttttttttaatatagtagaagctggaaattcata

SEQ ID NO: 359578 - DNA, 120 bp, Artificial Sequence
  ENSG00000140395_49 (sequence is synthesized)
caagttttttggctttagtgttattgataacttttcagtctttaaaaggaaactgttctcacaagcaactttatctttgccaaggtgaatatgtgaaatagcaaaggtgttctagtgcaa

SEQ ID NO: 359579 - DNA, 120 bp, Artificial Sequence
  ENSG00000140395_50 (sequence is synthesized)
tactgctgagtctttcatgtgtgctcgtatcccctgggaacctggtgaaaatgcagatgctgcttcactaggtctggcagagggcctgggattctgcatttctaacaggcttccaggtga

SEQ ID NO: 359580 - DNA, 120 bp, Artificial Sequence
  ENSG00000140395_51 (sequence is synthesized)
ggccaaggctgctggtcctaaccacactgtaaggtcttggggaactgagcataaaaaataaaatgtccatggcaatataatattggcttttaatatattttaaatatttttagatggtcc

SEQ ID NO: 359581 - DNA, 120 bp, Artificial Sequence
  ENSG00000140395_52 (sequence is synthesized)
tatagatttctcctctttgaaatggaacttaaagttaactaacattgttcatgcttatttttcaacttaaattgtcccaacaaaattgagggggttctatcttgatattccacttctgga

SEQ ID NO: 359582 - DNA, 120 bp, Artificial Sequence
  ENSG00000140395_53 (sequence is synthesized)
tttaagcatcttactcagggagtaagtcctggctagctgtgtttccttgtatgtatggatcattgcggtgctgtgtcagaggctggagtgaaaggccatcatgcagcccaatcccaacac

SEQ ID NO: 359583 - DNA, 120 bp, Artificial Sequence
  ENSG00000140395_54 (sequence is synthesized)
taaaatcagagtagggtgacaggcttaccacccagaatcacctcctaataatcaggaagttatttatgattagagaaactccaaccacatcaattctgtctgggaaggaggtgtgaatca

SEQ ID NO: 359584 - DNA, 120 bp, Artificial Sequence
  ENSG00000140395_55 (sequence is synthesized)
gttaatttaacacatagcaaataaaaatctatggtccacaatatcatgttgtctagctcctggggacaggcaggctccataggccactaataacagagtgagaattactgactgtggggg

SEQ ID NO: 359585 - DNA, 120 bp, Artificial Sequence
  ENSG00000140395_56 (sequence is synthesized)
gcggacacaaggggtcagctgaggagcgcagtttgtgactttccctataggcagtgacctcggggtagttgtggggctctttcttcctggaagcataaatgttggtctcttatggcttcc

SEQ ID NO: 359586 - DNA, 120 bp, Artificial Sequence
  ENSG00000140395_57 (sequence is synthesized)
gtcttcctggcattaggttacacttcaggattctgactctttgaaagggttgtagatagtcttgattagtactgtatttaaaaatgatttttttttttttttttggagtatgggaagggg

SEQ ID NO: 359587 - DNA, 120 bp, Artificial Sequence
  ENSG00000140395_58 (sequence is synthesized)
caggaattctaattaaatagcaataatggaaggtgctcggttaaagcctccattctcactgatttagaaagtacaagaacatcctcatctcagttttggtagattcagaataacgagaaa

SEQ ID NO: 359588 - DNA, 120 bp, Artificial Sequence
  ENSG00000140395_59 (sequence is synthesized)
ataaggatgttcatttcataaatattataaagaataaaggcatttgtagaactatctttttttaaatttacaggtctggggagtaaaatacaatggaaatggttcaaaaattgtgtctgt

SEQ ID NO: 359589 - DNA, 120 bp, Artificial Sequence
  ENSG00000140395_60 (sequence is synthesized)
ctgagatgacagaaattaatgatgtcataggctgactaatgtggagcagcagaggacatttcaggattcttttgaacttcacatttacttataaatggctgcacaacattccccagcaga

SEQ ID NO: 359590 - DNA, 120 bp, Artificial Sequence
  ENSG00000140395_61 (sequence is synthesized)
acctgctctgccagaatgggtggtaactgctagagggtgcagatagcctggcatttctctggcacacccctttttgggttgatgatagaagagctgcttaggtgttccatgaacacagtt

SEQ ID NO: 359591 - DNA, 120 bp, Artificial Sequence
  ENSG00000140396_0 (sequence is synthesized)
agcagttattaacacgggaacatggcggccgcagcctcggctacagcttcggcggcgaaggtcagcgccgacggcagccggcacctgacggcgtgaccgacccgagccgatttctcttgg

SEQ ID NO: 359592 - DNA, 120 bp, Artificial Sequence
  ENSG00000140396_1 (sequence is synthesized)
atttggctacacacttatagatcttctgcactgtttacaggcacagttgctgatatgtgttcaagatgagtgggatgggagaaaatacctctgacccctccagggcagagacaagaaagc

SEQ ID NO: 359593 - DNA, 120 bp, Artificial Sequence
  ENSG00000140396_2 (sequence is synthesized)
gcaaggaatgtcctgaccaacttggacccagccccaaaaggaacactgaaaaacgtaatcgtgaacaggaaaataaatatatagaagaacttgcagagttgatttttgcaaattttaatg

SEQ ID NO: 359594 - DNA, 120 bp, Artificial Sequence
  ENSG00000140396_3 (sequence is synthesized)
atatagacaactttaacttcaaacctgacaaatgtgcaatcttaaaagaaactgtgaagcaaattcgtcagatcaaagaacaagagaaagcagcagctgccaacatagatgaagtgcaga

SEQ ID NO: 359595 - DNA, 120 bp, Artificial Sequence
  ENSG00000140396_4 (sequence is synthesized)
agtcagatgtatcctctacagggcagggtgtcatcgacaaggatgcgctggggcctatgatgcttgaggcccttgatgggttcttctttgtagtgaacctggaaggcaacgttgtgtttg

SEQ ID NO: 359596 - DNA, 120 bp, Artificial Sequence
  ENSG00000140396_5 (sequence is synthesized)
tgtcagagaatgtgacacagtatctaaggtataaccaagaagagctgatgaacaaaagtgtatatagcatcttgcatgttggggaccacacggaatttgtcaaaaacctgctgccaaagt

SEQ ID NO: 359597 - DNA, 120 bp, Artificial Sequence
  ENSG00000140396_6 (sequence is synthesized)
ctatagtaaatgggggatcttggtctggcgaacctccgaggcggaacagccataccttcaattgtcggatgctggtaaaacctttacctgattcagaagaggagggtcatgataaccagg

SEQ ID NO: 359598 - DNA, 120 bp, Artificial Sequence
  ENSG00000140396_7 (sequence is synthesized)
aagctcatcagaaatatgaaactatgcagtgcttcgctgtctctcaaccaaagtccatcaaagaagaaggagaagatttgcagtcctgcttgatttgcgtggcaagaagagttcccatga

SEQ ID NO: 359599 - DNA, 120 bp, Artificial Sequence
  ENSG00000140396_8 (sequence is synthesized)
aggaaagaccagttcttccctcatcagaaagttttactactcgccaggatctccaaggcaagatcacgtctctggataccagcaccatgagagcagccatgaaaccaggctgggaggacc

SEQ ID NO: 359600 - DNA, 120 bp, Artificial Sequence
  ENSG00000140396_9 (sequence is synthesized)
tggtaagaaggtgtattcagaagttccatgcgcagcatgaaggagaatctgtgtcctatgctaagaggcatcatcatgaagtactgagacaaggattggcattcagtcaaatctatcgtt

SEQ ID NO: 359601 - DNA, 120 bp, Artificial Sequence
  ENSG00000140396_10 (sequence is synthesized)
tttccttgtctgatggcactcttgttgctgcacaaacgaagagcaaactcatccgttctcagactactaatgaacctcaacttgtaatatctttacatatgcttcacagagagcagaatg

SEQ ID NO: 359602 - DNA, 120 bp, Artificial Sequence
  ENSG00000140396_11 (sequence is synthesized)
tgtgtgtgatgaatccggatctgactggacaaacgatggggaagccactgaatccaattagctctaacagccctgcccatcaggccctgtgcagtgggaacccaggtcaggacatgaccc

SEQ ID NO: 359603 - DNA, 120 bp, Artificial Sequence
  ENSG00000140396_12 (sequence is synthesized)
tcagtagcaatataaattttcccataaatggcccaaaggaacaaatgggcatgcccatgggcaggtttggtggttctgggggaatgaaccatgtgtcaggcatgcaagcaaccactcctc

SEQ ID NO: 359604 - DNA, 120 bp, Artificial Sequence
  ENSG00000140396_13 (sequence is synthesized)
agggtagtaactatgcactcaaaatgaacagcccctcacaaagcagccctggcatgaatccaggacagcccacctccatgctttcaccaaggcatcgcatgagccctggagtggctggca

SEQ ID NO: 359605 - DNA, 120 bp, Artificial Sequence
  ENSG00000140396_14 (sequence is synthesized)
gccctcgaatcccacccagtcagttttcccctgcaggaagcttgcattcccctgtgggagtttgcagcagcacaggaaatagccatagttataccaacagctccctcaatgcacttcagg

SEQ ID NO: 359606 - DNA, 120 bp, Artificial Sequence
  ENSG00000140396_15 (sequence is synthesized)
ccctcagcgaggggcacggggtctcattagggtcatcgttggcttcaccagacctaaaaatgggcaatttgcaaaactccccagttaatatgaatcctcccccactcagcaagatgggaa

SEQ ID NO: 359607 - DNA, 120 bp, Artificial Sequence
  ENSG00000140396_16 (sequence is synthesized)
gcttggactcaaaagactgttttggactatatggggagccctctgaaggtacaactggacaagcagagagcagctgccatcctggagagcaaaaggaaacaaatgaccccaacctgcccc

SEQ ID NO: 359608 - DNA, 120 bp, Artificial Sequence
  ENSG00000140396_17 (sequence is synthesized)
cggccgtgagcagtgagagagctgacgggcagagcagactgcatgacagcaaagggcagaccaaactcctgcagctgctgaccaccaaatctgatcagatggagccctcgcccttagcca

SEQ ID NO: 359609 - DNA, 120 bp, Artificial Sequence
  ENSG00000140396_18 (sequence is synthesized)
gctctttgtcggatacaaacaaagactccacaggtagcttgcctggttctgggtctacacatggaacctcgctcaaggagaagcataaaattttgcacagactcttgcaggacagcagtt

SEQ ID NO: 359610 - DNA, 120 bp, Artificial Sequence
  ENSG00000140396_19 (sequence is synthesized)
cccctgtggacttggccaagttaacagcagaagccacaggcaaagacctgagccaggagtccagcagcacagctcctggatcagaagtgactattaaacaagagccggtgagccccaaga

SEQ ID NO: 359611 - DNA, 120 bp, Artificial Sequence
  ENSG00000140396_20 (sequence is synthesized)
agaaagagaatgcactacttcgctatttgctagataaagatgatactaaagatattggtttaccagaaataacccccaaacttgagagactggacagtaagacagatcctgccagtaaca

SEQ ID NO: 359612 - DNA, 120 bp, Artificial Sequence
  ENSG00000140396_21 (sequence is synthesized)
caaaattaatagcaatgaaaactgagaaggaggagatgagctttgagcctggtgaccagcctggcagtgagctggacaacttggaggagattttggatgatttgcagaatagtcaattac

SEQ ID NO: 359613 - DNA, 120 bp, Artificial Sequence
  ENSG00000140396_22 (sequence is synthesized)
cacagcttttcccagacacgaggccaggcgcccctgctggatcagttgacaagcaagccatcatcaatgacctcatgcaactcacagctgaaaacagccctgtcacacctgttggagccc

SEQ ID NO: 359614 - DNA, 120 bp, Artificial Sequence
  ENSG00000140396_23 (sequence is synthesized)
agaaaacagcactgcgaatttcacagagcacttttaataacccacgaccagggcaactgggcaggttattgccaaaccagaatttaccacttgacatcacattgcaaagcccaactggtg

SEQ ID NO: 359615 - DNA, 120 bp, Artificial Sequence
  ENSG00000140396_24 (sequence is synthesized)
ctggacctttcccaccaatcagaaacagtagtccctactcagtgatacctcagccaggaatgatgggtaatcaagggatgataggaaaccaaggaaatttagggaacagtagcacaggaa

SEQ ID NO: 359616 - DNA, 120 bp, Artificial Sequence
  ENSG00000140396_25 (sequence is synthesized)
tgattggtaacagtgcttctcggcctactatgccatctggagaatgggcaccgcagagttcggctgtgagagtcacctgtgctgctaccaccagtgccatgaaccggccagtccaaggag

SEQ ID NO: 359617 - DNA, 120 bp, Artificial Sequence
  ENSG00000140396_26 (sequence is synthesized)
gtatgattcggaacccagcagccagcatccccatgaggcccagcagccagcctggccaaagacagacgcttcagtctcaggtcatgaatatagggccatctgaattagagatgaacatgg

SEQ ID NO: 359618 - DNA, 120 bp, Artificial Sequence
  ENSG00000140396_27 (sequence is synthesized)
ggggacctcagtatagccaacaacaagctcctccaaatcagactgccccatggcctgaaagcatcctgcctatagaccaggcgtcttttgccagccaaaacaggcagccatttggcagtt

SEQ ID NO: 359619 - DNA, 120 bp, Artificial Sequence
  ENSG00000140396_28 (sequence is synthesized)
ctccagatgacttgctatgtccacatcctgcagctgagtctccgagtgatgagggagctctcctggaccagctgtatctggccttgcggaattttgatggcctggaggagattgatagag

SEQ ID NO: 359620 - DNA, 120 bp, Artificial Sequence
  ENSG00000140396_29 (sequence is synthesized)
ccttaggaatacccgaactggtcagccagagccaagcagtagatccagaacagttctcaagtcaggattccaacatcatgctggagcagaaggcgcccgttttcccacagcagtatgcat

SEQ ID NO: 359621 - DNA, 120 bp, Artificial Sequence
  ENSG00000140396_30 (sequence is synthesized)
ctcaggcacaaatggcccagggtagctattctcccatgcaagatccaaactttcacaccatgggacagcggcctagttatgccacactccgtatgcagcccagaccgggcctcaggccca

SEQ ID NO: 359622 - DNA, 120 bp, Artificial Sequence
  ENSG00000140396_31 (sequence is synthesized)
cgggcctagtgcagaaccagccaaatcaactaagacttcaacttcagcatcgcctccaagcacagcagaatcgccagccacttatgaatcaaatcagcaatgtttccaatgtgaacttga

SEQ ID NO: 359623 - DNA, 120 bp, Artificial Sequence
  ENSG00000140396_32 (sequence is synthesized)
ctctgaggcctggagtaccaacacaggcacctattaatgcacagatgctggcccagagacagagggaaatcctgaaccagcatcttcgacagagacaaatgcatcagcaacagcaagttc

SEQ ID NO: 359624 - DNA, 120 bp, Artificial Sequence
  ENSG00000140396_33 (sequence is synthesized)
agcaacgaactttgatgatgagaggacaagggttgaatatgacaccaagcatggtggctcctagtggtatgccagcaactatgagcaaccctcggattccccaggcaaatgcacagcagt

SEQ ID NO: 359625 - DNA, 120 bp, Artificial Sequence
  ENSG00000140396_34 (sequence is synthesized)
ttccatttcctccaaactacggaataagtcagcaacctgatccaggctttactggggctacgactccccagagcccacttatgtcaccccgaatggcacatacacagagtcccatgatgc

SEQ ID NO: 359626 - DNA, 120 bp, Artificial Sequence
  ENSG00000140396_35 (sequence is synthesized)
ccccctccgacataaatggatgggcgcaggggaacatgggcggaaacagcatgttttcccagcagtccccaccacactttgggcagcaagcaaacaccagcatgtacagtaacaacatga

SEQ ID NO: 359627 - DNA, 120 bp, Artificial Sequence
  ENSG00000140396_36 (sequence is synthesized)
acatcaatgtgtccatggcgaccaacacaggtggcatgagcagcatgaaccagatgacaggacagatcagcatgacctcagtgacctccgtgcctacgtcagggctgtcctccatgggtc

SEQ ID NO: 359628 - DNA, 120 bp, Artificial Sequence
  ENSG00000140396_37 (sequence is synthesized)
ccgagcaggttaatgatcctgctctgaggggaggcaacctgttcccaaaccagctgcctggaatggatatgattaagcaggagggagacacaacacggaaatattgctgacactgctgaa

SEQ ID NO: 359629 - DNA, 120 bp, Artificial Sequence
  ENSG00000140396_38 (sequence is synthesized)
gccagttgcttcttcagctgaccgggctcacttgctcaaaacacttccagtctggagagctgtgtctatttgtttcaacccaactgacctgccagccggttctgctagagcagacaggcc

SEQ ID NO: 359630 - DNA, 120 bp, Artificial Sequence
  ENSG00000140396_39 (sequence is synthesized)
tggccctggttcccagggtggcgtccactcggctgtggcaggaggagctgcctcttctcttgacagtctgaagctcgcatccagacagtcgctcagtctgttcactgcattcaccttagt

SEQ ID NO: 359631 - DNA, 120 bp, Artificial Sequence
  ENSG00000140396_40 (sequence is synthesized)
gcaacttagatctctcctgcaaaagtaaatgttgacaggcaaatttcatacccatgtcagattgaatgtatttaaatgtatgtatttaaggagaaccatgctcttgttctgttcctgttc

SEQ ID NO: 359632 - DNA, 120 bp, Artificial Sequence
  ENSG00000140396_41 (sequence is synthesized)
ggttccagacactggtttcttgctttgttttccctggctaacagtctagtgcaaaagattaagattttatctgggggaaagaaaagaattttttaaaaaattaaactaaagatgttttaa

SEQ ID NO: 359633 - DNA, 120 bp, Artificial Sequence
  ENSG00000140396_42 (sequence is synthesized)
gctaaagcctgaatttgggatggaagcaggacagacaccgtggacagcgctgtatttacagacacacccagtgcgtgaagaccaacaaagtcacagtcgtatctctagaaagctctaaag

SEQ ID NO: 359634 - DNA, 120 bp, Artificial Sequence
  ENSG00000140396_43 (sequence is synthesized)
accatgttggaaagagtctccagttactgaacagatgaaaaggagcctgtgagagggctgttaacattagcaaatattttttccttgttttttctttgttaaaaccaaactggttcacct

SEQ ID NO: 359635 - DNA, 120 bp, Artificial Sequence
  ENSG00000140396_44 (sequence is synthesized)
gaatcatgaattgagaagaaataattttcatttctaaattaagtcccttttagtttgatcagacagcttgaatcagcatctcttcttccctgtcagcctgactcttcccttcccctctct

SEQ ID NO: 359636 - DNA, 120 bp, Artificial Sequence
  ENSG00000140396_45 (sequence is synthesized)
cattccccatactccctattttcattccttttttaaaaaataatataagctacagaaaccaggtaagccctttatttccttaaatgttttgccagccacttaccaattgctaagtattga

SEQ ID NO: 359637 - DNA, 120 bp, Artificial Sequence
  ENSG00000140396_46 (sequence is synthesized)
atttcagaaaaaaaaaatgcatttactggcaaggagaagagcaaagttaaggcttgataccaatcgagctaaggatacctgctttggaagcatgtttattctgttccccagcaactctgg

SEQ ID NO: 359638 - DNA, 120 bp, Artificial Sequence
  ENSG00000140396_47 (sequence is synthesized)
cctccaaaatgggagaaaacgccagtgtgtttaaattgatagcagatatcacgacagatttaacctctgccatgtgttttttattttgttttttagcagtgctgactaagccgaagtttt

SEQ ID NO: 359639 - DNA, 120 bp, Artificial Sequence
  ENSG00000140396_48 (sequence is synthesized)
gtaaggtacataaaatccaatttatatgtaaacaagcaataatttaagttgagaacttatgtgttttaattgtataatttttgtgaggtatacatattgtggaattgactcaaaaatgag

SEQ ID NO: 359640 - DNA, 120 bp, Artificial Sequence
  ENSG00000140396_49 (sequence is synthesized)
gtacttcagtattaaattagatatcttcatagcaatgtctcctaaaggtgttttgtaaaggatatcaatgccttgattagacctaatttgtagacttaagactttttattttctaaacct

SEQ ID NO: 359641 - DNA, 120 bp, Artificial Sequence
  ENSG00000140396_50 (sequence is synthesized)
tgtgattctgcttataagtcatttatctaatctatatgatatgcagccgctgtaggaaccaattcttgatttttatatgtttatattctttcttaatgaaccttagaaagactacatgtt

SEQ ID NO: 359642 - DNA, 120 bp, Artificial Sequence
  ENSG00000140396_51 (sequence is synthesized)
actaagcaggccacttttatggttgtttttcttgcccactctggtaggggaaaaatcttttattaataggtgtcagtttcagacaactccaataccaagaaactgatgaccttttttgag

SEQ ID NO: 359643 - DNA, 120 bp, Artificial Sequence
  ENSG00000140396_52 (sequence is synthesized)
ctatttctccttaacccctaatacctttcttacctaaatttcagaatgatatctttttgatgtctaaaaagcaaagcattttataatatctcattagccaggctttttaggaacagagaa

SEQ ID NO: 359644 - DNA, 120 bp, Artificial Sequence
  ENSG00000140396_53 (sequence is synthesized)
gtttttccttgaaatttgattgtttgtttatttgtggcagggtgaaaaatgtacaaactacccctatttatacttatatctctctctatatgtacgcattatggaaatataggaagagat

SEQ ID NO: 359645 - DNA, 120 bp, Artificial Sequence
  ENSG00000140396_54 (sequence is synthesized)
atagcccaaagatagatggtaagtagacagtctgaaaatgttgctccatactaaagaacctttctggaaatttgcatttcgctacttttttccacttgagaggggtctcaatacagggag

SEQ ID NO: 359646 - DNA, 120 bp, Artificial Sequence
  ENSG00000140396_55 (sequence is synthesized)
gtggccaaggaacaacacttctcagtggccaccagttcatatatcccctcaaaaggctctacttttctccaccaaaccattgggttgcccaactgtgatggaaaaaacaagcagatgttg

SEQ ID NO: 359647 - DNA, 120 bp, Artificial Sequence
  ENSG00000140396_56 (sequence is synthesized)
gcccagaactccaggacctccccgtgggctgaggctcatgtggcatacaattcagtgtgaccagttttaatgttcagaaatatgtgaattagaatgacttttaacttcacacagcacaaa

SEQ ID NO: 359648 - DNA, 120 bp, Artificial Sequence
  ENSG00000140396_57 (sequence is synthesized)
agagaaatggagtttaaactggatttgttttgttttgagtttcaagtcccttttcactacaacaccgtccaaaactatctacctatctcttcttttttatccatctgcccgctgtatttt

SEQ ID NO: 359649 - DNA, 120 bp, Artificial Sequence
  ENSG00000140396_58 (sequence is synthesized)
aatgtcaatcctaattcagacaaatccgcaacttcatgatactggtaatttataataattcgtgatcattgctgttttgaaggaaaagagatgataaattctcttacggtttcaatcagg

SEQ ID NO: 359650 - DNA, 120 bp, Artificial Sequence
  ENSG00000140396_59 (sequence is synthesized)
taatggattttgttttacatctagttaggagaagaaaagtaagtgaaggaatcctctgatcatattgatcactatagaagcaaaagccaaatcagttcccttcattatcagtatttctca

SEQ ID NO: 359651 - DNA, 120 bp, Artificial Sequence
  ENSG00000140396_60 (sequence is synthesized)
tgctgtacacaataaatttgttagactgagtacttggtttttgtttaatagaacaaataatcagtgtttcacttatattactaaatgtgaaaaacataatgtgaaaagtatacatacatt

SEQ ID NO: 359652 - DNA, 120 bp, Artificial Sequence
  ENSG00000140396_61 (sequence is synthesized)
aacttggttgtaaaactcattttaagtgttcatgtaatgtggtaagtttaaaaagtgaagtgagctgttttactacaatgaattcgtttgactcaaagattaaaatgcccctccccctat

SEQ ID NO: 359653 - DNA, 120 bp, Artificial Sequence
  ENSG00000140396_62 (sequence is synthesized)
gtgtatctcttatggcctgtaataattgaaagcaatgtttttgcagtttatataatgcaatttttaatctgtgttcaaaaatggagttcatatgggcttaacacatgaaatgggtggcac

SEQ ID NO: 359654 - DNA, 120 bp, Artificial Sequence
  ENSG00000140396_63 (sequence is synthesized)
agatccacttgcagaacccaaagatacacaatcagttttgaaatgcaacttaagccattaattgttggtgtgaatttaaaattttctagtgtttgtatggtggtatgctgcctaagagca

SEQ ID NO: 359655 - DNA, 120 bp, Artificial Sequence
  ENSG00000140396_64 (sequence is synthesized)
aagcatcctctgcacaaaagaaaattactgtagtggcttcgattttaattagaattttctccctggtgtttctttatagactaaagcaaaatcttttaagtttcttactacaggtaaaag

SEQ ID NO: 359656 - DNA, 120 bp, Artificial Sequence
  ENSG00000140396_65 (sequence is synthesized)
ctatgtgcaagaacctcaaaatgctaaaatctagcataatgccttagatctgtttttaagtcttgtatattcctacatagctgtccgatgtattatatttgtatagtgaattgtgtacaa

SEQ ID NO: 359657 - DNA, 120 bp, Artificial Sequence
  ENSG00000140396_66 (sequence is synthesized)
tttttgaataagtgcatcatcacttaacctttatgttgtttgaatagtgatgatgatacatttcttcagacatttaactgtcatttttttcctttgtcatttgtgagttttatttgtaca

SEQ ID NO: 359658 - DNA, 120 bp, Artificial Sequence
  ENSG00000140396_67 (sequence is synthesized)
gttcctcatgaagttgcatctgagatgtgtgtatatgaaaagattatacaagggtaaaattaagcaatatattaactatggttcttcaggagaaagcttacagtgtttcaggttgtgatt

SEQ ID NO: 359659 - DNA, 120 bp, Artificial Sequence
  ENSG00000140396_68 (sequence is synthesized)
tattttcaaaatggagttgactctgaacatcactttgttcacctgcattgatgtttgtatttctagtgtgagcagtttatgcaaaggtagatatattcagagaaattttaaatacattta

SEQ ID NO: 359660 - DNA, 120 bp, Artificial Sequence
  ENSG00000140396_69 (sequence is synthesized)
tgcaagttaatattgctttgctgatgctatttgcttatttgatgttaaataatgctattgtaaataaagaattctgttgttattgcatcatttaataaattttaatgccttcgggtttta

SEQ ID NO: 359661 - DNA, 120 bp, Artificial Sequence
  ENSG00000140396_70 (sequence is synthesized)
gagtcatggagacgctgagagccagctactcttgtccatccccgagtcacccgctccttgatttctggggttgtgtcacttataggggctccgacccgcagaggctgccgaggcactcga

SEQ ID NO: 359662 - DNA, 120 bp, Artificial Sequence
  ENSG00000140396_71 (sequence is synthesized)
ggtcctgtatgtctttcgtaccgaaatagacgttgtcttagacacgacgaagtctaaagccactttaggatgtggcagtaactcaccgaggccggtttctaaaatggcatatgctgtagt

SEQ ID NO: 359663 - DNA, 120 bp, Artificial Sequence
  ENSG00000140396_72 (sequence is synthesized)
ggagggggccggggtcgtcgctgccggctgcgctccccgcctcctcccctcgggggagtcccagaggcgcctcttccgagaccgggggtgggtcggtccctggttagatggcccctccct

SEQ ID NO: 359664 - DNA, 120 bp, Artificial Sequence
  ENSG00000140396_73 (sequence is synthesized)
cttcccctccctctagtggtttccggggcctgcgggaccgaggggcgggaatcggggactggagcccccttccgctggcccggagctggactgggcctcccgcgttctgggtccgtcact

SEQ ID NO: 359665 - DNA, 120 bp, Artificial Sequence
  ENSG00000140396_74 (sequence is synthesized)
ctccgccacctcgtcctctaatcccactccctctccacctcctccgacgccttcccctcccaccgacccgaatctcggtgcgtctgactgatggggcagtgagccaatcgaaggcaggga

SEQ ID NO: 359666 - DNA, 120 bp, Artificial Sequence
  ENSG00000140396_75 (sequence is synthesized)
gctgacctgccgggtgtcgatttctcttggatttggctacacacttatagatcttctgcactgtttacaggcacagttgctgatatgtgttcaagatgagtgggatgggagaaaatacct

SEQ ID NO: 359667 - DNA, 120 bp, Artificial Sequence
  ENSG00000140396_76 (sequence is synthesized)
agagcaagcaatagaatagaagcaggaagaattttcgagtgttccaccatgctggattgtcaaagggggatctgtctgatcagcagctaaaaaaggatttgtgtggctagtttgtcagct

SEQ ID NO: 359668 - DNA, 120 bp, Artificial Sequence
  ENSG00000140396_77 (sequence is synthesized)
tggtttgggttaacagaggagatttatctctgaggcaataaatttattgctaattgtgggggtttttgttttgatgagtgatgtatggtatttgtatttacatcactggtgaagataaag

SEQ ID NO: 359669 - DNA, 120 bp, Artificial Sequence
  ENSG00000140396_78 (sequence is synthesized)
agaagctgctgagctctaatatgaactgcagaagctgtggacagttacaagttgctgatatgtgttcaagatgagtgggatgggagaaaatacctctgacccctccagggcagagacaag

SEQ ID NO: 359670 - DNA, 120 bp, Artificial Sequence
  ENSG00000140396_79 (sequence is synthesized)
gctctttgcatggctcccagatgaatctggctaaccagggaatgataggaaacctgggaggacagttggggcctgtgaggagtccccaagtccagcacagtaccttccaggctctcagct

SEQ ID NO: 359671 - DNA, 120 bp, Artificial Sequence
  ENSG00000140396_80 (sequence is synthesized)
gccaaaacaggtgagtcctgagcacctagggtagccagttattttatacctgtccagaaattaatcttttcctttggagtagtcggtgcctgaccagttttcatttattggtactatatt

SEQ ID NO: 359672 - DNA, 120 bp, Artificial Sequence
  ENSG00000140396_81 (sequence is synthesized)
atctactgtgcagtgcatgaagaggaggggtgaatccagaaatcagtatgacctaggacatacctttaaaggagttacaaattaaatggaaaataacatatgtatgctgataactgtaat

SEQ ID NO: 359673 - DNA, 120 bp, Artificial Sequence
  ENSG00000140398_0 (sequence is synthesized)
cgtcgggtttcctcgtttttgcggactggcgctttctgatttcagagactctccgcaacagaaccatctcaagtgggtctacctcctcgcctttttttgttgttgttgttgcttggctgc

SEQ ID NO: 359674 - DNA, 120 bp, Artificial Sequence
  ENSG00000140398_1 (sequence is synthesized)
gcttctgacagggcaggccgtgatgatgtttgtttatgagttaggtctgactgttcgttggtgcttaagatccccaccgggtccctagggcctgtgcgtaccgcgcacctgtgcacgtcc

SEQ ID NO: 359675 - DNA, 120 bp, Artificial Sequence
  ENSG00000140398_2 (sequence is synthesized)
tgcgcgcagctgcaggcgactccgctctggctcgtcgctgctgtttcctgctgggggtgccgaccctgtcccacgctagctgggtgacttcccccaaccgcagagacagcggcgacccgg

SEQ ID NO: 359676 - DNA, 120 bp, Artificial Sequence
  ENSG00000140398_3 (sequence is synthesized)
ggcctcagacctgcccccgcatctcgccggcgccaggcagtgggaagtcaggttcttccgccacctcccagccaggactctgccaccctccctcaggatgcctgagggccccgagctgca

SEQ ID NO: 359677 - DNA, 120 bp, Artificial Sequence
  ENSG00000140398_4 (sequence is synthesized)
cctggccagccagtttgtgaatgaggcctgcagggcgctggtgttcggcggctgcgtggagaagtcctctgtcagccgcaaccctgaggtgccctttgagagcagtgcctaccgcatctc

SEQ ID NO: 359678 - DNA, 120 bp, Artificial Sequence
  ENSG00000140398_5 (sequence is synthesized)
agcttcagcccgcggcaaggagctgcgcctgatactgagccctctgcctggggcccagccccaacaggagccactggccctggtcttccgcttcggcatgtccggctcttttcagctggt

SEQ ID NO: 359679 - DNA, 120 bp, Artificial Sequence
  ENSG00000140398_6 (sequence is synthesized)
gccccgcgaggagctgccacgccatgcccacctgcgcttttacacggccccgcctggcccccggctcgccctatgtttcgtggacatccgccggttcggccgctgggaccttgggggaaa

SEQ ID NO: 359680 - DNA, 120 bp, Artificial Sequence
  ENSG00000140398_7 (sequence is synthesized)
gtggcagccgggccgcgggccctgtgtcttgcaggagtaccagcagttcagggagaatgtgctacgaaacctagcggataaggcctttgaccggcccatctgcgaggccctcctggacca

SEQ ID NO: 359681 - DNA, 120 bp, Artificial Sequence
  ENSG00000140398_8 (sequence is synthesized)
gaggttcttcaatggcattggcaactatctgcgggcagagatcctgtaccggctgaagatccccccctttgagaaggcccgctcggtcctggaggccctgcagcagcacaggccgagccc

SEQ ID NO: 359682 - DNA, 120 bp, Artificial Sequence
  ENSG00000140398_9 (sequence is synthesized)
ggagctgaccctgagccagaagataaggaccaagctgcagaatccagacctgctggagctatgtcactcagtgcccaaggaagtggtccagttggggggcaaaggctacgggtcagagag

SEQ ID NO: 359683 - DNA, 120 bp, Artificial Sequence
  ENSG00000140398_10 (sequence is synthesized)
cggggaggaggactttgctgcctttcgagcctggctgcgctgctatggcatgccaggcatgagctccctgcaggaccggcatggccgtaccatctggttccagggggatcctggaccgtt

SEQ ID NO: 359684 - DNA, 120 bp, Artificial Sequence
  ENSG00000140398_11 (sequence is synthesized)
ggcacccaaagggcgcaagtcccgcaaaaagaaatccaaggccacacagctgagtcctgaggacagagtggaggacgctttgcctccaagcaaggccccttccaggacacgaagggcaaa

SEQ ID NO: 359685 - DNA, 120 bp, Artificial Sequence
  ENSG00000140398_12 (sequence is synthesized)
gagagaccttcctaagaggactgcaacccagcggcctgaggggaccagcctccagcaggacccagaagctcccacagtgcccaagaaggggaggaggaaggggcgacaggcagcctctgg

SEQ ID NO: 359686 - DNA, 120 bp, Artificial Sequence
  ENSG00000140398_13 (sequence is synthesized)
ccactgcagaccccggaaggtcaaggctgacatcccatccttggaaccagaggggacctcagcctcttagcaggaggctctccttgcttgcactcaccctttcttattgtcttgccctgc

SEQ ID NO: 359687 - DNA, 120 bp, Artificial Sequence
  ENSG00000140398_14 (sequence is synthesized)
atctgggggtctgaatttttgggagcaggcaatatctgaaggtgcaaacaggccctacggctgttccctgcacaactctcatggttttaattgtaccccatcttccacatctttaaagct

SEQ ID NO: 359688 - DNA, 120 bp, Artificial Sequence
  ENSG00000140398_15 (sequence is synthesized)
ggcccagctcctcacaaggcaaactgagcccccatcccagtcctcaaggctctgactctatcagaggacagtttgcctctgcaaggacagcccctcagaggtggtacaaagaccctggcc

SEQ ID NO: 359689 - DNA, 120 bp, Artificial Sequence
  ENSG00000140398_16 (sequence is synthesized)
ccaggcagcccaggagccagagctcctccagtccagattctccagggtccagggctgccccctcatcctggcaggagccaggcaaaacccacccttcggcccctccccagccccaggccc

SEQ ID NO: 359690 - DNA, 120 bp, Artificial Sequence
  ENSG00000140398_17 (sequence is synthesized)
aggccctttacctgctggcacaggggaggggcttctcaactcatggtctcttcactggcttttggtggctcgaggtccccagtctctcctgtgggggctgcaacccagaccctgcacgca

SEQ ID NO: 359691 - DNA, 120 bp, Artificial Sequence
  ENSG00000140398_18 (sequence is synthesized)
caggtaccttaggatcttgcccctacccaccaaatacctgggaagccatcccaccccagacttcccacccccaccccaagcgtgaggatgggccctaaggggactgagcagcagggttcc

SEQ ID NO: 359692 - DNA, 120 bp, Artificial Sequence
  ENSG00000140398_19 (sequence is synthesized)
cgatccaaggatttattccacaagaaaagactgatccctgctttaggctggggaagcagaaattaggagtccccagagccttctacaaacaaaaccccagccccagggactcagtgtggc

SEQ ID NO: 359693 - DNA, 120 bp, Artificial Sequence
  ENSG00000140398_20 (sequence is synthesized)
ggaggctgaagcacgagcaacagggacagcacttggaagggagaaaaggtgagcttcaggcggttgtcccgaagggtcaagtggccagcagggtctggtcgctccaagagatcgcagctg

SEQ ID NO: 359694 - DNA, 120 bp, Artificial Sequence
  ENSG00000140398_21 (sequence is synthesized)
gagaacaggaggggccatgaaggctctgcgagggcgagactcgacccccgccccaatcccacaccgccactcacaggatggcctcctgaaccggcagcgacaagtgcagccagcagtcca

SEQ ID NO: 359695 - DNA, 120 bp, Artificial Sequence
  ENSG00000140398_22 (sequence is synthesized)
cgtggctgccgtgggcctcatacagcctcaggaccagcgagcggcgctgggggctgctctccgcctgcagaggaacacgtctggtgggaggggccgagggcaggcccagttcggaacccc

SEQ ID NO: 359696 - DNA, 120 bp, Artificial Sequence
  ENSG00000140398_23 (sequence is synthesized)
gtccccagcacgtcccaccccttgcctgcttgacggtctccaatacgaccgcgggtgaagacacggaaaacgcactccaggaggtggcgggcgctgggctgggggctggcagagccaaca

SEQ ID NO: 359697 - DNA, 120 bp, Artificial Sequence
  ENSG00000140398_24 (sequence is synthesized)
gggggaagtttaggctgtaggcagcttggataacgccagcatcctggaaagagcctggggtacgaccaggaaacaatgctggtggagaatgggggctaccctcccctgtccctagaaggg

SEQ ID NO: 359698 - DNA, 120 bp, Artificial Sequence
  ENSG00000140398_25 (sequence is synthesized)
gcaggaagccaggttgctggggtttgggctcagggaagggcagagaggtgtctagggctgcaggaaggccccaccgtccccagcactcacccttgtgcggcatcagtgcataggtgaact

SEQ ID NO: 359699 - DNA, 120 bp, Artificial Sequence
  ENSG00000140398_26 (sequence is synthesized)
cgtggcgccccgtgtcagcagtagcgtccggggctttaggcgcccgcaagctggggtgaggagggcgcgtaggggccacgctgaagctgttggagttgtggtcgggaagacccatttctc

SEQ ID NO: 359700 - DNA, 120 bp, Artificial Sequence
  ENSG00000140398_27 (sequence is synthesized)
catgccagctcccaggcctggtgggtaccccacttacagcgagaggctgaggatgctgcctcgcactgacgcgccatacttgcagtcgttgagcagggccagcccaaagccgtgttctga

SEQ ID NO: 359701 - DNA, 120 bp, Artificial Sequence
  ENSG00000140398_28 (sequence is synthesized)
cagatccatccagcgatgggcccacacctggagggcagatccaagacccacttggtggccctgtgcccctctttgtgctcccagactccagagctcctgtcactaggccgagcacaagct

SEQ ID NO: 359702 - DNA, 120 bp, Artificial Sequence
  ENSG00000140398_29 (sequence is synthesized)
ctagaaccacacaactgaactccagctcccactgtacggggccctgggcatgccacccaacctgcctaagcctcagtttccttatctgtgaaacgggaataaataatagtactcacccca

SEQ ID NO: 359703 - DNA, 120 bp, Artificial Sequence
  ENSG00000140398_30 (sequence is synthesized)
cctttagtggctgcagtggcgacgagcggaacggagtgcgggttcccggggagggggcgtgcaggatcgggttgtggggggtgcgctgtagggctaaggagaagatgagctttggggggc

SEQ ID NO: 359704 - DNA, 120 bp, Artificial Sequence
  ENSG00000140398_31 (sequence is synthesized)
cctgaggaggaggggagtcaggattaaccgaggacagggtcgcagcgggggcatggggaggacgggcccgagagcgccgctcctccccaaaactaggatttggagcctcacgttctcccg

SEQ ID NO: 359705 - DNA, 120 bp, Artificial Sequence
  ENSG00000140398_32 (sequence is synthesized)
caaaacgagccctgtgggtgccaggccaggggcggctcccaggtgtggagggggcaaggtacgggcgtctgccgtcgctaagtgcccccttccacttaaggcacaccttcgcctccgatt

SEQ ID NO: 359706 - DNA, 120 bp, Artificial Sequence
  ENSG00000140398_33 (sequence is synthesized)
ccgaaccgcccggggacagagatggtgggagagcctggagaaagagacagcgtgtgcggagggggtgctccctcagatggggggtcaggaagtctccctcaagtgtctgggacagaggga

SEQ ID NO: 359707 - DNA, 120 bp, Artificial Sequence
  ENSG00000140398_34 (sequence is synthesized)
cagcaggggccaaggcggagatgagatccgtgagtgaggggagccgggaagaagtaaggctgcagccgcggccccgcaaggattgggactttcgtctaaacgcggtggaagcccatggaa

SEQ ID NO: 359708 - DNA, 120 bp, Artificial Sequence
  ENSG00000140398_35 (sequence is synthesized)
gcagttcaggtagggccagcaccaggtgtgatgaacatagtcgcgggctccacacctgactctcttagtgccttcttggccaacaaggggcgagtccctgccccttctgggcctcagttc

SEQ ID NO: 359709 - DNA, 120 bp, Artificial Sequence
  ENSG00000140398_36 (sequence is synthesized)
tctcatctgcagatcaagacagtatacctgtcctgggtcagctccctgagccagtgggcatggaaactcaaaactaattgggggccgggtgtggtggctcaagtctgtaaatcccagcac

SEQ ID NO: 359710 - DNA, 78 bp, Artificial Sequence
  ENSG00000140398_37 (sequence is synthesized)
aaacaaaaaaacagtgtttcctccaagctgcccatgagacaggcaggacaaggattcttttttatatatatttttggt

SEQ ID NO: 359711 - DNA, 120 bp, Artificial Sequence
  ENSG00000140398_38 (sequence is synthesized)
agagataggatcttgccatgttgcctggactagcctcaaactgggctcaagtgatcctcccacatctgcctctaagtagctaggactacaggctcacaccaccacaccgggctaattgtt

SEQ ID NO: 359712 - DNA, 120 bp, Artificial Sequence
  ENSG00000140398_39 (sequence is synthesized)
cagggtctccctatgttgcccaggctggtattgaactcctggcccctagggattctcccatctaagcttcccaaagtgtcgggattacaggtgtggccactgcacagggccaggacaagg

SEQ ID NO: 359713 - DNA, 120 bp, Artificial Sequence
  ENSG00000140398_40 (sequence is synthesized)
tgcacagggccaggacaaggattcttaatcccactccaggatgggaaacccatggccgagtgggaagaaaccagctgaggtcacatcaccagaggagggagagtgtggcccctgactcag

SEQ ID NO: 359714 - DNA, 120 bp, Artificial Sequence
  ENSG00000140398_41 (sequence is synthesized)
tccatcagcttgtgtagctgaggtctgggccaggtctaaccaggctccccactcctcccaacctgagcctgccctctgatctctgcctgttcctctgtcccacagggggcaaaggctacg

SEQ ID NO: 359715 - DNA, 120 bp, Artificial Sequence
  ENSG00000140398_42 (sequence is synthesized)
acacaggacttctttgagttctttcagtgaccaatctctttctcgcctcagggcctttgtactggcggttccttccgccggacacgtcgggtttcctcgtttttgcggactggcgctttc

SEQ ID NO: 359716 - DNA, 120 bp, Artificial Sequence
  ENSG00000140398_43 (sequence is synthesized)
agtaccagcagttcagggtctcgctctgttgcctaggctagagtacagtggcgccatcacagctcattgcagccttaacctccagggctcagaaacaggttctctgagcccctctcccca

SEQ ID NO: 359717 - DNA, 120 bp, Artificial Sequence
  ENSG00000140398_44 (sequence is synthesized)
accctggggcacttgtccctctctggacctgattcaccgatttggaagtttgtagccctagctgatactcaatggactaggcctcctcacttgtcaatagtgtttccaggctgggcgcag

SEQ ID NO: 359718 - DNA, 120 bp, Artificial Sequence
  ENSG00000140398_45 (sequence is synthesized)
ttccaggttgggccctactgttcacacaggcagagaccccaggaggctgatgggtggaaacgtggggtcacaataactggggtggtgatgctcagggtctgtctagaccctccaaggacc

SEQ ID NO: 359719 - DNA, 120 bp, Artificial Sequence
  ENSG00000140398_46 (sequence is synthesized)
acactgttcctgagggtcacacccctcccctcccatgcgtcccagggttgcagctagtggaagtagcccaaggcaggtagcccaagtgaaagtagccaagggcagagcagctttgctgat

SEQ ID NO: 359720 - DNA, 120 bp, Artificial Sequence
  ENSG00000140398_47 (sequence is synthesized)
gtggactctaacatgggggatgtcctagaggcttcctaagggagaagctacactgatctggatgggtgtgtgtgagtcctgcctctccaaggaataccgcccctgtgccaacccaggctg

SEQ ID NO: 359721 - DNA, 120 bp, Artificial Sequence
  ENSG00000140398_48 (sequence is synthesized)
attcctgaattatccccatcccattttagggggatcctggaccgttggcacccaaaggtaagctactcctaatgtaataggctaagagagcagaaaggacttcacgcctgcaagggctac

SEQ ID NO: 359722 - DNA, 120 bp, Artificial Sequence
  ENSG00000140398_49 (sequence is synthesized)
cctttccctcccccaggcccggggcaggagctcggggagcccttcctggtgcccgccgtcctcctgcggagccatggggagcggctccagcgcatggcggcagcccgcccgcctcgtcct

SEQ ID NO: 359723 - DNA, 120 bp, Artificial Sequence
  ENSG00000140398_50 (sequence is synthesized)
ccttgatgttcccatttaacagataggaaaacgggggcagggagaagaggaactgtaactcccagtttccttccccttgcacccagaaacaggttctctgagcccctctccccatcccat

SEQ ID NO: 359724 - DNA, 120 bp, Artificial Sequence
  ENSG00000140400_0 (sequence is synthesized)
ggaaagaggagcgagagcccggcgatggcggctgcgccggccttgaagcactggcgcaccacgctggagcgggtggagaagttcgtgtcgccgctctactttaccgactgtaacctccgc

SEQ ID NO: 359725 - DNA, 120 bp, Artificial Sequence
  ENSG00000140400_1 (sequence is synthesized)
ggcaggctttttggggccagctgccctgtggctgtgctctccagcttcctgacgccggagagacttccctaccaggaggcagtccagcgggacttccgccccgcgcaggtcggcgacagc

SEQ ID NO: 359726 - DNA, 120 bp, Artificial Sequence
  ENSG00000140400_2 (sequence is synthesized)
ttcggacccacatggtggacctgctggttccgggtggagctgaccatcccagaggcatgggtgggccaggaagttcacctttgctgggaaagtgatggagaaggtctggtgtggcgtgat

SEQ ID NO: 359727 - DNA, 120 bp, Artificial Sequence
  ENSG00000140400_3 (sequence is synthesized)
ggagaacctgtccagggtttaaccaaagagggtgagaagaccagctatgtcctgactgacaggctgggggaaagagacccccgaagcctcactctctatgtggaagtagcctgcaatggg

SEQ ID NO: 359728 - DNA, 120 bp, Artificial Sequence
  ENSG00000140400_4 (sequence is synthesized)
ctcctgggggccgggaagggaagcatgattgcagcccctgaccctgagaagatgttccagctgagccgggctgagctagctgtgttccaccgggatgtccacatgctcctggtggatctg

SEQ ID NO: 359729 - DNA, 120 bp, Artificial Sequence
  ENSG00000140400_5 (sequence is synthesized)
gagctgctgctgggcatagccaagggcctcgggaaggacaaccagcgcagcttccaggccctgtacacagccaatcagatggtgaacgtgtgtgaccctgcccagcccgagaccttccca

SEQ ID NO: 359730 - DNA, 120 bp, Artificial Sequence
  ENSG00000140400_6 (sequence is synthesized)
gtggcccaggccctggcctccaggttctttggccaacatgggggtgaaagccaacacaccattcatgccacagggcactgccacattgatacagcctggctttggcccttcaaagagact

SEQ ID NO: 359731 - DNA, 120 bp, Artificial Sequence
  ENSG00000140400_7 (sequence is synthesized)
gtgaggaaatgtgcccggagctgggtgaccgccctgcagctcatggagcggaaccctgagttcatctttgcctgctcccaggcgcagcagctggaatgggtgaagagccgctaccctggc

SEQ ID NO: 359732 - DNA, 120 bp, Artificial Sequence
  ENSG00000140400_8 (sequence is synthesized)
ctgtactcccgcatccaggagtttgcgtgccgtgggcagtttgtgcctgtggggggcacctgggtggagatggatgggaacctgcccagtggagaggccatggtgaggcagtttttgcag

SEQ ID NO: 359733 - DNA, 120 bp, Artificial Sequence
  ENSG00000140400_9 (sequence is synthesized)
ggccagaacttctttctgcaggagtttgggaagatgtgctctgagttctggctgccggacacctttggctactcagcacagctcccccagatcatgcacggctgtggcatcaggcgcttt

SEQ ID NO: 359734 - DNA, 120 bp, Artificial Sequence
  ENSG00000140400_10 (sequence is synthesized)
ctcacccagaaattgagctggaatttggtgaactccttcccacaccatacatttttctgggagggcctggatggctcccgtgtactggtccacttcccacctggcgactcctatgggatg

SEQ ID NO: 359735 - DNA, 120 bp, Artificial Sequence
  ENSG00000140400_11 (sequence is synthesized)
cagggcagcgtggaggaggtgctgaagaccgtggccaacaaccgggacaaggggcgggccaaccacagtgccttcctctttggctttggggatgggggtggtggccccacccagaccatg

SEQ ID NO: 359736 - DNA, 120 bp, Artificial Sequence
  ENSG00000140400_12 (sequence is synthesized)
ctggaccgcctgaagcgcctgagcaatacggatgggctgcccagggtgcagctatcttctccaagacagctcttctcagcactggagagtgactcagagcagctgtgcacgtgggttggg

SEQ ID NO: 359737 - DNA, 120 bp, Artificial Sequence
  ENSG00000140400_13 (sequence is synthesized)
aatggcacatacaccacccatgcccagatcaagaaggggaaccgggaatgtgagcggatcctgcacgacgtggagctgctcagtagcctggccctggcccgcagtgcccagttcctatac

SEQ ID NO: 359738 - DNA, 120 bp, Artificial Sequence
  ENSG00000140400_14 (sequence is synthesized)
ccagcagcccagctgcagcacctctggaggctccttcttctgaaccagttccatgatgtggtgactggaagctgcatccagatggtggcagaggaagccatgtgccattatgaagacatc

SEQ ID NO: 359739 - DNA, 120 bp, Artificial Sequence
  ENSG00000140400_15 (sequence is synthesized)
cgttcccatggcaatacactgctcagcgctgcagccgcagccctgtgtgctggggagccaggtcctgagggcctcctcatcgtcaacacactgccctggaagcggatcgaagtgatggcc

SEQ ID NO: 359740 - DNA, 120 bp, Artificial Sequence
  ENSG00000140400_16 (sequence is synthesized)
ctgcccaaaccgggcggggcccacagcctagccctggtgacagtgcccagcatgggctatgctcctgttcctccccccacctcactgcagcccctgctgccccagcagcctgtgttcgta

SEQ ID NO: 359741 - DNA, 120 bp, Artificial Sequence
  ENSG00000140400_17 (sequence is synthesized)
gtgcaagagactgatggctccgtgactctggacaatggcatcatccgagtgaagctggacccaactggtcgcctgacgtccttggtcctggtggcctctggcagggaggccattgctgag

SEQ ID NO: 359742 - DNA, 120 bp, Artificial Sequence
  ENSG00000140400_18 (sequence is synthesized)
ggcgccgtggggaaccagtttgtgctatttgatgatgtccccttgtactgggatgcatgggacgtcatggactaccacctggagacacggaagcctgtgctgggccaggcagggaccctg

SEQ ID NO: 359743 - DNA, 120 bp, Artificial Sequence
  ENSG00000140400_19 (sequence is synthesized)
gcagtgggcaccgagggcggcctgcggggcagcgcctggttcttgctacagatcagccccaacagtcggcttagccaggaggttgtgctggacgttggctgcccctatgtccgcttccac

SEQ ID NO: 359744 - DNA, 120 bp, Artificial Sequence
  ENSG00000140400_20 (sequence is synthesized)
accgaggtacactggcatgaggcccacaagttcctgaaggtggagttccctgctcgcgtgcggagttcccaggccacctatgagatccagtttgggcacctgcagcgacctacccactac

SEQ ID NO: 359745 - DNA, 120 bp, Artificial Sequence
  ENSG00000140400_21 (sequence is synthesized)
aatacctcttgggactgggctcgatttgaggtgtgggcccatcgctggatggatctgtcagaacacggctttgggctggccctgctcaacgactgcaagtatggcgcgtcagtgcgaggc

SEQ ID NO: 359746 - DNA, 120 bp, Artificial Sequence
  ENSG00000140400_22 (sequence is synthesized)
agcatcctcagcctctcgctcttgcgggcgcctaaagccccggacgctactgctgacacggggcgccacgagttcacctatgcactgatgccgcacaagggctctttccaggatgctggc

SEQ ID NO: 359747 - DNA, 120 bp, Artificial Sequence
  ENSG00000140400_23 (sequence is synthesized)
gttatccaagctgcctacagcctaaacttccccctgttggctctgccagcccccagcccagcgcccgccacctcctggagtgcgttttccgtgtcttcacccgcggtcgtattggagacc

SEQ ID NO: 359748 - DNA, 120 bp, Artificial Sequence
  ENSG00000140400_24 (sequence is synthesized)
gtcaagcaggcggagagcagcccccagcgccgctcgctggtcctgaggctgtatgaggcccacggcagccacgtggactgctggctgcacttgtcgctgccggttcaggaggccatcctc

SEQ ID NO: 359749 - DNA, 120 bp, Artificial Sequence
  ENSG00000140400_25 (sequence is synthesized)
tgcgatctcttggagcgaccagaccctgctggccacttgacccttcgggacaaccgcctgaagctcaccttttctcccttccaagtgctgtccctgttgctcgtgcttcagcctccgcca

SEQ ID NO: 359750 - DNA, 120 bp, Artificial Sequence
  ENSG00000140400_26 (sequence is synthesized)
cactgagtccctggggctggggttttgtttgtagaaggctctggggactcctaatttctgcttccccagcctaaagcagggatcagtcttttcttgtggaataaatccttggatcgggaa

SEQ ID NO: 359751 - DNA, 120 bp, Artificial Sequence
  ENSG00000140400_27 (sequence is synthesized)
cccacaggagagactggggacctcgagccaccaaaagccagtgaagagaccatgagttgagaagcccctcccctgtgccagcaggtaaagggcctgggcctggggctggggaggggccga

SEQ ID NO: 359752 - DNA, 120 bp, Artificial Sequence
  ENSG00000140400_28 (sequence is synthesized)
gggctgcctggggccagggtctttgtaccacctctgaggggctgtccttgcagaggcaaactgtcctctgatagagtcagagccttgaggactgggatgggggctcagtttgccttgtga

SEQ ID NO: 359753 - DNA, 120 bp, Artificial Sequence
  ENSG00000140400_29 (sequence is synthesized)
ggagctgggccttctgtcaccaggaccggacagcaggcccttcctacctggccatctcagaccaagaggtgccaagaagttcaaatgtatcagtttattaaaaatgcagcatttttcaca

SEQ ID NO: 359754 - DNA, 120 bp, Artificial Sequence
  ENSG00000140400_30 (sequence is synthesized)
gcatgcccagggccccgtacagtgggagctggagttcagttgtgtggttctagagcttgtgctcggcctagtgacaggagctctggagtctgggagcacaaagaggggcacagggccacc

SEQ ID NO: 359755 - DNA, 120 bp, Artificial Sequence
  ENSG00000140400_31 (sequence is synthesized)
tcctcagcctctcgctgtaagtggggtacccaccaggcctgggagctggcatggagaaatgggtcttcccgaccacaactccaacagcttcagcgtggcccctacgcgccctcctcaccc

SEQ ID NO: 359756 - DNA, 120 bp, Artificial Sequence
  ENSG00000140400_32 (sequence is synthesized)
ctctgcccttccctgagcccaaaccccagcaacctggcttcctgccccttctagggacaggggagggtagcccccattctccaccagcattgtttcctggtcgtaccccaggctctttcc

SEQ ID NO: 359757 - DNA, 120 bp, Artificial Sequence
  ENSG00000140400_33 (sequence is synthesized)
acaccttcgttgtctgccctctgccgtagacaactacgtgggatcgagcagcaccctctgctgggagcagcaccctctgctgggaacagctctctggtccctgggtcttcaggggatggt

SEQ ID NO: 359758 - DNA, 120 bp, Artificial Sequence
  ENSG00000140400_34 (sequence is synthesized)
tttcattcccacgtggccgcctctggacatcccttaggaagggcaccctagggatcacgaacctttgacgcctctgcctgtttccctcatcttgcttctcaccttgttgctcctttcttg

SEQ ID NO: 359759 - DNA, 120 bp, Artificial Sequence
  ENSG00000140400_35 (sequence is synthesized)
aggagagcctccagcgctgtgacaagttgcatggcctagtcctgggcaccccctcaggcagatggacagtcaggcctgaaggacaggggcccttcctgagttctggctgtaactcccatg

SEQ ID NO: 359760 - DNA, 120 bp, Artificial Sequence
  ENSG00000140400_36 (sequence is synthesized)
tttgagcagccctggcttctcctgcagggattgggttggcctgagcgcctgcctgctccccgtccagcgctgacctgggctgcctcccacttccttcactgccaggatgggaacctgccc

SEQ ID NO: 359761 - DNA, 120 bp, Artificial Sequence
  ENSG00000140400_37 (sequence is synthesized)
acggatgggctgcccaggtcaggccaggccttggctctcctttagccccaccctgggcccttgccatgagccctgccttccctcagacattgggcccaacccctcctctggaccttgtcc

SEQ ID NO: 359762 - DNA, 120 bp, Artificial Sequence
  ENSG00000140400_38 (sequence is synthesized)
tgtcccaatcctagaccacgggttcctccaaacttccaccctgggggtgggtgggggagaagctgaagctggtaagggctccagcccatcagagagagaggctctcctagggcgtccagg

SEQ ID NO: 359763 - DNA, 120 bp, Artificial Sequence
  ENSG00000140400_39 (sequence is synthesized)
gcgattctcatgcctcagcttcccgagtagcagggattacagcctcactctctatgtggaagtagcctgcaatgggctcctgggggccgggaagggaagcatgattgcagcccctgaccc

SEQ ID NO: 359764 - DNA, 120 bp, Artificial Sequence
  ENSG00000140400_40 (sequence is synthesized)
attagtccctgggatctcaaggcctgggacttcaagggggaggagagcctccagcgctgtgacaagttgcatggcctagtcctgggcaccccctcaggcagatggacagtcaggcctgaa

SEQ ID NO: 359765 - DNA, 120 bp, Artificial Sequence
  ENSG00000140400_41 (sequence is synthesized)
ggggcaggaactgtgctgggatactttcttacaactgagggtcctgagctcccctgtctggagcaagtggtgaggcggggctggggttggggtgggaagacttttggtgtgggaagcccc

SEQ ID NO: 359766 - DNA, 120 bp, Artificial Sequence
  ENSG00000140400_42 (sequence is synthesized)
ttgatctgcagagggtcagagaaggcagcaggggacagagcccaggccagatctaggggaagagaagtttggaggagagaagttcaagacctgggttggtcaagaaagcttgaaggaggc

SEQ ID NO: 359767 - DNA, 120 bp, Artificial Sequence
  ENSG00000140400_43 (sequence is synthesized)
agaaacccctgaagaaagaagggtttgggctgcggggagaagagggaaggcatttaaggcaggtcacccgccagaggccttctccacgaggcccttggtgagtcctcagggattctgagc

SEQ ID NO: 359768 - DNA, 120 bp, Artificial Sequence
  ENSG00000140400_44 (sequence is synthesized)
gagggacagctgtgagggaggagggaagcacgtggccctccctggagctccacaggccctgaaggcttcccaggcctggggtcagggctgctcctcaccctcagccacacactgagtccc

SEQ ID NO: 359769 - DNA, 120 bp, Artificial Sequence
  ENSG00000140400_45 (sequence is synthesized)
cggcgatggcggctgcgccggccttgaagcactggcgcaccacgctggagcgggtggagaagttcgtgtcgccgctctactttaccgactgtaacctccgcggcaggtgtggcccctggt

SEQ ID NO: 359770 - DNA, 120 bp, Artificial Sequence
  ENSG00000140400_46 (sequence is synthesized)
cccccgcagccggccgaccgcaaccgtgcgcctcaagctttccttccggggagaaacctaagctgcagccacccgggccgcgggacaaagtgcccgccgcgggcagggcaggggccgggg

SEQ ID NO: 359771 - DNA, 120 bp, Artificial Sequence
  ENSG00000140400_47 (sequence is synthesized)
gacagtgcccagcatgggctatgctcctgttcctccccccacctcactgcagcccctgctgccccagcagcctgtgttcgtagtgcaagagcccctacagactcagcctcaaggcctcct

SEQ ID NO: 359772 - DNA, 120 bp, Artificial Sequence
  ENSG00000140400_48 (sequence is synthesized)
ggaggaactgcagcctgggagtcaggagaggctgtagcacctctggtaggacagctggctccatcctgggagccatgcctctgttcccaggtatacatcaagtttgtgcaggggcagggt

SEQ ID NO: 359773 - DNA, 120 bp, Artificial Sequence
  ENSG00000140400_49 (sequence is synthesized)
agtccctgctacttctcgtaggatcctctaggggatgtctaattccccaagaggactgaggctattctggggcctggagcctccatttcctgacctgtataattggcctcatagcactgc

SEQ ID NO: 359774 - DNA, 120 bp, Artificial Sequence
  ENSG00000140400_50 (sequence is synthesized)
accgggcggggcccacagcctaggtacgagctgaggggaagggttgctactgcagcaggaaggatggaggccagacagatcaggcctgggataccccgagggatctgggtgcccctgact

SEQ ID NO: 359775 - DNA, 120 bp, Artificial Sequence
  ENSG00000140400_51 (sequence is synthesized)
ggagagtagtagcacatcttccaccaacccatccccacctgcgcaagcttcctgaaaggtcaggaaggctgcactgatgcccaggcctcacccccagccctggtgacagtgcccagcatg

SEQ ID NO: 359776 - DNA, 120 bp, Artificial Sequence
  ENSG00000140400_52 (sequence is synthesized)
cccatttgcctctcccccttattgtggggtcctagacagaccaccaaaccctcactctgcctctgccagggtcacatagcaggcaggggcaggaccaagtctggaaggcctggctctgcc

SEQ ID NO: 359777 - DNA, 120 bp, Artificial Sequence
  ENSG00000140400_53 (sequence is synthesized)
ctccctggctggggagactgcttgtgtggaacaggctggggaggaagaggataatcaacatttgctgcttcctaacgtgtgtgccaggcattgcactaaatgctttacattggcaaggca

SEQ ID NO: 359778 - DNA, 120 bp, Artificial Sequence
  ENSG00000140400_54 (sequence is synthesized)
cgtcatggactaccacctggagacacggtataggctgggcagcatgtggggatggtggaggtggtgggaacacaggctgctctggatcagtatgtccacccctgtcccataggaagcctg

SEQ ID NO: 359779 - DNA, 120 bp, Artificial Sequence
  ENSG00000140400_55 (sequence is synthesized)
gtgcctggcaagtagaccccaggccatttcctctctccccttgccacaacactgcccacagcagcccaccagtggctctgggctggaacccacacatggagcagggcaggctgggcagta

SEQ ID NO: 359780 - DNA, 120 bp, Artificial Sequence
  ENSG00000140400_56 (sequence is synthesized)
gtcccctgtccactgggtctactcactccaccctaccccaccaagagcagctggagacagcgaggtcagttggttgtacagcaccaatcccatgtccttccagggaggccattgctgagg

SEQ ID NO: 359781 - DNA, 120 bp, Artificial Sequence
  ENSG00000140400_57 (sequence is synthesized)
gtcaagcaggcaaggggtgggacgtgctggggacggggttccgaactgggcctgccctcggcccctcccaccagacgtgttcctctgcaggcggagagcagcccccagcgccgctcgctg

SEQ ID NO: 359782 - DNA, 120 bp, Artificial Sequence
  ENSG00000140400_58 (sequence is synthesized)
acagcagctggttgggctggctggggaagcaggagtgcccttgaagacctggatgtgccctagaagcactgtgtgatgctcagcaagttcttgctcctcttggacctgcgttttccccgt

SEQ ID NO: 359783 - DNA, 120 bp, Artificial Sequence
  ENSG00000140400_59 (sequence is synthesized)
cagcaagttcttgctcctcttggacctgcgttttccccgtctgtaaaacggggccggggggctggactgtgggctctgcttgctttggattcactttttttttttttgagacggagtctc

SEQ ID NO: 359784 - DNA, 120 bp, Artificial Sequence
  ENSG00000140400_60 (sequence is synthesized)
cctcctttccccagcccctcctcccacctcgctggagtgaagtgaagtgaccacttaggagggacaccacagggctttccagggtgaagggcctgggatgggaggggggctaggtgaccc

SEQ ID NO: 359785 - DNA, 120 bp, Artificial Sequence
  ENSG00000140400_61 (sequence is synthesized)
cacaatagtcctgcctgctctctccaaccccagggctgagcccagagtgtcccctgtgggatacccatgggcacattccagacctgttgcccacctatgaccagccagtctttcctcaga

SEQ ID NO: 359786 - DNA, 68 bp, Artificial Sequence
  ENSG00000140400_62 (sequence is synthesized)
gactccatctcaaaaaaaaaaaaaaagccgggcgtggtggcacatgtggagggcggaggttgcagtga

SEQ ID NO: 359787 - DNA, 83 bp, Artificial Sequence
  ENSG00000140400_63 (sequence is synthesized)
tcctgtgtgaaaaaaacaaagttttacatttaatttgatactcatgatcattcgatggggtgagtactattatttattcccgt

SEQ ID NO: 359788 - DNA, 120 bp, Artificial Sequence
  ENSG00000140400_64 (sequence is synthesized)
gatcgggaaccctgctgctcagtccccttagggcccatcctcacgcttggggtgggggtgggaagtctggggtgggatggcttcccaggtatttggtgggtaggggcaagatcctaaggt

SEQ ID NO: 359789 - DNA, 120 bp, Artificial Sequence
  ENSG00000140400_65 (sequence is synthesized)
gagagactggggacctcgagccaccaaaagccagtgaagagaccatgagttgagaagcccctcccctgtgccagcagagtcagagccttgaggactgggatgggggctcagtttgccttg

SEQ ID NO: 359790 - DNA, 120 bp, Artificial Sequence
  ENSG00000140403_0 (sequence is synthesized)
agacggcggccacacccccggggagaggccgggtggggaccgcagggcgcagctctcccagtcccacccttcggcgcagggctccggccaacacagccctccaggccgcctactctccag

SEQ ID NO: 359791 - DNA, 120 bp, Artificial Sequence
  ENSG00000140403_1 (sequence is synthesized)
ctctccagccagccggctccacggacccacggaagggcaagggggcggcctcggggcggcgggacagttgtcggagggcgccctccaggcccaagccgccttctccggcccccgccatgg

SEQ ID NO: 359792 - DNA, 120 bp, Artificial Sequence
  ENSG00000140403_2 (sequence is synthesized)
ggcagtcagagctggagctccggggaatcagacgggcagccaaaggagcagacgcccgagaagcccagacacaagatggtgaaggagacccagtactatgacatcctgggcgtgaagccc

SEQ ID NO: 359793 - DNA, 120 bp, Artificial Sequence
  ENSG00000140403_3 (sequence is synthesized)
agcgcgtccccggaggagatcaagaaggcctatcggaagctggcgctcaagtaccacccggacaagaacccggatgagggcgagaagtttaaactcatatcccaggcatatgaagtgctt

SEQ ID NO: 359794 - DNA, 120 bp, Artificial Sequence
  ENSG00000140403_4 (sequence is synthesized)
tcagatccaaagaaaagggatgtttatgaccaaggcggagagcaggcaattaaagaaggaggctcaggcagccccagcttctcttcacccatggacatctttgacatgttctttggtggt

SEQ ID NO: 359795 - DNA, 120 bp, Artificial Sequence
  ENSG00000140403_5 (sequence is synthesized)
ggtggacggatggctagagagagaagaggcaagaatgttgtacaccagttatctgtaactcttgaagatctatataatggagtcacgaagaaattggccctccagaaaaatgtaatttgt

SEQ ID NO: 359796 - DNA, 120 bp, Artificial Sequence
  ENSG00000140403_6 (sequence is synthesized)
gagaaatgtgaaggtgttggtgggaagaagggatcggtggagaagtgcccgctgtgcaaggggcgggggatgcagatccacatccagcagatcgggccgggcatggtacagcagatccag

SEQ ID NO: 359797 - DNA, 120 bp, Artificial Sequence
  ENSG00000140403_7 (sequence is synthesized)
accgtgtgcatcgagtgcaagggccagggtgagcgcatcaaccccaaggaccgctgcgagagctgcagcggggccaaggtgatccgtgagaagaagattatcgaggtacatgttgaaaaa

SEQ ID NO: 359798 - DNA, 120 bp, Artificial Sequence
  ENSG00000140403_8 (sequence is synthesized)
ggtatgaaagatgggcaaaagatactatttcatggagaaggagatcaggagcctgagctggagcctggtgatgtcataattgtgcttgatcagaaggatcatagtgtctttcagagacga

SEQ ID NO: 359799 - DNA, 120 bp, Artificial Sequence
  ENSG00000140403_9 (sequence is synthesized)
ggccatgacttgatcatgaaaatgaaaattcagctttctgaagctctttgtggcttcaagaagacgataaaaacattggacaatcgaattcttgttattacatccaaagcaggtgaggtg

SEQ ID NO: 359800 - DNA, 120 bp, Artificial Sequence
  ENSG00000140403_10 (sequence is synthesized)
ataaagcacggggacctgagatgcgtgcgcgatgaaggaatgcccatctacaaagcacccctggaaaaagggattctgatcatacagtttttagtaatctttcctgaaaaacactggctt

SEQ ID NO: 359801 - DNA, 120 bp, Artificial Sequence
  ENSG00000140403_11 (sequence is synthesized)
tctctggaaaagcttcctcagctggaagctttactccctcctcgacagaaagtgaggattacagatgacatggatcaggtggagctgaaggagttttgtcccaatgagcagaactggcgt

SEQ ID NO: 359802 - DNA, 120 bp, Artificial Sequence
  ENSG00000140403_12 (sequence is synthesized)
cagcacagggaggcctacgaggaggacgaagacgggccccaggctggagtgcagtgccagacggcatgacgtggtgcggggcagcgtggccccaccggactagcacatgatgaatgtaaa

SEQ ID NO: 359803 - DNA, 120 bp, Artificial Sequence
  ENSG00000140403_13 (sequence is synthesized)
cacaatgaaaatgacatcgctttaatggccttgtgtttgggatgtcctgtgtatgtgttcagcattcttaattgctgagtgtctttttggcttttcttttggttgtaacttaagttatag

SEQ ID NO: 359804 - DNA, 120 bp, Artificial Sequence
  ENSG00000140403_14 (sequence is synthesized)
cttaatttatatttaaatgttttaagtataaatcacctctagtctgcatatggaatctgttcatttctattttcaggatatacttttgagatgtcagtgattgcaccaatactttgtgct

SEQ ID NO: 359805 - DNA, 120 bp, Artificial Sequence
  ENSG00000140403_15 (sequence is synthesized)
tctagtggctttgccataattcagtgtcaccaataaggcacagcccagttagcagcttagcccccctagcaaaccccaaggcacaaagtgggcatcctgactcatctctaggtctgtggt

SEQ ID NO: 359806 - DNA, 120 bp, Artificial Sequence
  ENSG00000140403_16 (sequence is synthesized)
ttctcccctcttcccttggcagagttattgagggcatgatctcagggctgctaagataacatttctgaggattctagatgatcctcttaaagaataaaagcacatccgtggatcggacat

SEQ ID NO: 359807 - DNA, 120 bp, Artificial Sequence
  ENSG00000140403_17 (sequence is synthesized)
ggctgcatgtgcctgcttaacagggccaacttagttcctactgttctgtgcccttcagtggatggaacgtgagtgtctgatcatctctcttggaagttttctgaaccttccaagctctgt

SEQ ID NO: 359808 - DNA, 120 bp, Artificial Sequence
  ENSG00000140403_18 (sequence is synthesized)
ggtgaggacaaaccagtgtttgaatcatatgctgataactgtttgcctgtgaccctcacaccttgttcttcagggttttaatgattttctgttgacaacttttgcaatgctttcccacca

SEQ ID NO: 359809 - DNA, 120 bp, Artificial Sequence
  ENSG00000140403_19 (sequence is synthesized)
aagtgcttacttgtaaagaaaactaaatccttctgtgtccccggcagcctcagtgcagcaacagaagccaagggagaatgctgctggtttggcccatggcacagccagcttctctgacca

SEQ ID NO: 359810 - DNA, 120 bp, Artificial Sequence
  ENSG00000140403_20 (sequence is synthesized)
gtaatccggggtgacttgagggtctgcaaaggcatagaactccccagtgttttccacctcattctcccagattgagctcccttccaaaggatcgttcctctcattgcacagccatattac

SEQ ID NO: 359811 - DNA, 120 bp, Artificial Sequence
  ENSG00000140403_21 (sequence is synthesized)
aaagggtttcctgctcaagtgatgttttggtaagaacttcgctgagttccactgtggattacagtttgtatggactactactgtaaattatagcttgtttggagggatattagtcattat

SEQ ID NO: 359812 - DNA, 120 bp, Artificial Sequence
  ENSG00000140403_22 (sequence is synthesized)
tttattcatgacaggtagactacaattcgaacttagggttacctcagtctttagccattactgcttatttcttttccccaagtcacaaaaaacttgtaagctgctgggttaaagcagagg

SEQ ID NO: 359813 - DNA, 120 bp, Artificial Sequence
  ENSG00000140403_23 (sequence is synthesized)
ccacctgtcagatctaccctacccttatttggttacatggcacctgagagtttcactcagaccagggatcttccttaggagggtcaaagtgcagatcagaccatgcaggtaaggtgaacc

SEQ ID NO: 359814 - DNA, 120 bp, Artificial Sequence
  ENSG00000140403_24 (sequence is synthesized)
agctgcacggaccaggttcccgcaaaacattgccagctagtgaggcataatttgctcaaagtatagaaacagcccacctgtgcccactttgaccattggtgaggatagatataaaatcac

SEQ ID NO: 359815 - DNA, 120 bp, Artificial Sequence
  ENSG00000140403_25 (sequence is synthesized)
ttcttccaacgaagcctaggtgaaaatctatttataaatggaccacaactctggggtgtcgtttttgtgctgtgacttcctaattattgctaaagaactactgtttagttggtaatggtg

SEQ ID NO: 359816 - DNA, 120 bp, Artificial Sequence
  ENSG00000140403_26 (sequence is synthesized)
taaaattacattcagctccttcttgtcatataaaaggaatttggagggtgtcgcttaaaattttattccacctgtacatttgtcactttaaaattaaaattgagctggtatgagagataa

SEQ ID NO: 359817 - DNA, 80 bp, Artificial Sequence
  ENSG00000140403_27 (sequence is synthesized)
ccaggcgtggaagtcggtccggcgcggggcggggggcgggcgggagctacaagcggcggcggcggcggcgaccgtgaccg

SEQ ID NO: 359818 - DNA, 120 bp, Artificial Sequence
  ENSG00000140403_28 (sequence is synthesized)
atttttaaaacctcctctttaaagatttcctcttgaagagacagctcactttctacatagtcccgtatggaagtggactgctgaagaaattagtgtttccattcccctccaccgtctccc

SEQ ID NO: 359819 - DNA, 120 bp, Artificial Sequence
  ENSG00000140403_29 (sequence is synthesized)
ccattttttccgaacatttctttctgtctttgtccattttcatcgctgagctgaagagcatgctttatcagaaacccttttgtccctttccttttccatgcttagagggaagtttctgac

SEQ ID NO: 359820 - DNA, 120 bp, Artificial Sequence
  ENSG00000140403_30 (sequence is synthesized)
ttgggagaacgccttagagttcttggggtctgaactcctctgatgccttccaaagtcacgtagctgtaagacccagcgggtgccagccgggagggtgactccagctcagcagcatgtatg

SEQ ID NO: 359821 - DNA, 120 bp, Artificial Sequence
  ENSG00000140403_31 (sequence is synthesized)
gaagtgcattgtgaccatgaaggagtctgccagtggccaagccacctagtgagctccctaccaaggaacctgggtgtcacctgcaggtggccaagagccagtttttatgccaggcagggg

SEQ ID NO: 359822 - DNA, 120 bp, Artificial Sequence
  ENSG00000140403_32 (sequence is synthesized)
actggttggactctattgaggcttcttcctgtctgtggggagcactcctgtccccctcgtggtagggatacctgtcaccccacaaagaggcagggtgacaggtgttggccccattttagg

SEQ ID NO: 359823 - DNA, 120 bp, Artificial Sequence
  ENSG00000140403_33 (sequence is synthesized)
cagacttgggtgtcatgacttctagttcacttgttttaaacctacctgtgatggcagctgcaccatgctgccctcttgacacactgctggagcccagagcacaggccagagtctcagcct

SEQ ID NO: 359824 - DNA, 120 bp, Artificial Sequence
  ENSG00000140403_34 (sequence is synthesized)
gagccccttccccaggcagtacctgacaaggatacctgggattggggccagctttccagtcagatgccacgtttcctttgcccactgccacggggcactagggcctgccgcaggctctcc

SEQ ID NO: 359825 - DNA, 120 bp, Artificial Sequence
  ENSG00000140403_35 (sequence is synthesized)
ggtttgtatccaatgtctggcacgtggttagatgctcacagatgcctgtagttgaatttcattctagtaaactagtgaaatgattcccatgaggaggtgagccagtggtaatgcccagag

SEQ ID NO: 359826 - DNA, 120 bp, Artificial Sequence
  ENSG00000140403_36 (sequence is synthesized)
tcctggctctatctggttagaggttcacccctggcactgtctcatggtatcctagctggtctcgacttcctgtctggtgcagccggattagtgagaaactttccctctctactggcttct

SEQ ID NO: 359827 - DNA, 120 bp, Artificial Sequence
  ENSG00000140403_37 (sequence is synthesized)
ctcccttattcttatcgtgtccctaccaccagtcccttaatatgtttgccctgtgtttcccactttaccaaaggagtaggtagacaggcaagtcagattccaggtagaggatgtatagac

SEQ ID NO: 359828 - DNA, 120 bp, Artificial Sequence
  ENSG00000140403_38 (sequence is synthesized)
tggctagttcaagggtttgggggcagaatacctctattactttgtatgtttatatggcaggtttgcttaacaaaacaactgaaacttctctaaaaatctctctctctctctcttttaaag

SEQ ID NO: 359829 - DNA, 120 bp, Artificial Sequence
  ENSG00000140403_39 (sequence is synthesized)
gctaatcgtgagatacacagactagatgtcagggaagtgagctgtatcacaacatgtattgggtgtgccatgaattcctcttgtttcccagtcttctcttcacccttcctggccttattt

SEQ ID NO: 359830 - DNA, 120 bp, Artificial Sequence
  ENSG00000140403_40 (sequence is synthesized)
ccattccatgtcacctgccaaagtgttcttgctgaggtttacttccttgagatcacagacagcctctttatgaggttttctaacgctctgaaagtcttacctggccttggtttgggttag

SEQ ID NO: 359831 - DNA, 120 bp, Artificial Sequence
  ENSG00000140403_41 (sequence is synthesized)
ttgccatctcctgacattctcaagccattcctctagaatctttcggagtgtcttcctggtcgcttctgatgctcattggccataagggcttgtgtaagtgtttgtggctgcatgttccct

SEQ ID NO: 359832 - DNA, 120 bp, Artificial Sequence
  ENSG00000140403_42 (sequence is synthesized)
ttctccacatttccccatgtgctgcatcagattcccccaaatacagcaccttctcctgctattcattttgcctgatgccatcattttaaggcctttttccattttagctgtcctccaagt

SEQ ID NO: 359833 - DNA, 120 bp, Artificial Sequence
  ENSG00000140403_43 (sequence is synthesized)
attccgatgattctgtggctttccaatccagtaaatatatcctagatcagagatgagaccaaaagtaaaagaatcaacagccaaaccgacacaggtgttattaaaggacttactgtttaa

SEQ ID NO: 359834 - DNA, 120 bp, Artificial Sequence
  ENSG00000140403_44 (sequence is synthesized)
acatgcctaaaccctgtgccttgagtgtgcaagctgacttattagaaaaggacagggctggctgacctgtccctatcagtcccaagtcatgcaccctgtgccccgggaagtgggcggtga

SEQ ID NO: 359835 - DNA, 120 bp, Artificial Sequence
  ENSG00000140403_45 (sequence is synthesized)
ccctatgctggtggtgtggcatcacaggccctgggcagggagtgctgtgtaaacctgggatgtagagccgcattcccccactccctgtgcatgctgggcttggccccacattatgccaag

SEQ ID NO: 359836 - DNA, 120 bp, Artificial Sequence
  ENSG00000140403_46 (sequence is synthesized)
ggaagcgggacctcttctgtcattggccatcctagccacccctccctgccttgtgcctgcatgaggttgggagacttgatgaataaagaatccctgaaggactctgttccttcttcaaaa

SEQ ID NO: 359837 - DNA, 120 bp, Artificial Sequence
  ENSG00000140403_47 (sequence is synthesized)
agtctcctttaaggagagcttgtaggcttctaatttcacatttcagcaagctggctaaagacatgtgggaaagcctgaccctggattcaggtcaaatctcagcactcacaagatttaaac

SEQ ID NO: 359838 - DNA, 120 bp, Artificial Sequence
  ENSG00000140403_48 (sequence is synthesized)
taagtaccaatcatagactgaaaatgctctgcattttagagacagaagttaaaagcttttccatcctgtttacagaaagtttgctttttatctctaaagaggctcatgacccacctgaat

SEQ ID NO: 359839 - DNA, 120 bp, Artificial Sequence
  ENSG00000140403_49 (sequence is synthesized)
aggtgaattgaaggatgaggcattgcaaggaaaggctgctaaccctcccgttcctcctttcacttcttgccattttcttacaaaactttggttgttccgcatgggtcttgagaggtgggg

SEQ ID NO: 359840 - DNA, 120 bp, Artificial Sequence
  ENSG00000140403_50 (sequence is synthesized)
ccgttatagtagctgatagcagtgtcacttgggccacgtttgaaaccacaccaatcacccatgtagcatttaagacctgtggaaacgacgctggaatcaaaatacctgtctgtgttagtt

SEQ ID NO: 359841 - DNA, 120 bp, Artificial Sequence
  ENSG00000140403_51 (sequence is synthesized)
gttccaagctggagaaagctacttcaggacggttggctgaatggcaacagtgatggaatatttatatttagccacatgtgctgaatgtggctgtcacaagtttaaaatgctttcctgtaa

SEQ ID NO: 359842 - DNA, 120 bp, Artificial Sequence
  ENSG00000140406_0 (sequence is synthesized)
aaaagatttctataggctccagggaggttacggccgaggcggcggcggcggcgagcccgggggcgaggcgcggacgggaacaggaaaagcctccggcagcccctgcgggcggcggcgcag

SEQ ID NO: 359843 - DNA, 120 bp, Artificial Sequence
  ENSG00000140406_1 (sequence is synthesized)
ccacggccgcgctccgaggtgaagccgcgcgcggagaggaagcgggtgttttcccctctgcctttcggcccccgcccttcctttcagtttctgcccgctcgctcggaagttggcggttga

SEQ ID NO: 359844 - DNA, 120 bp, Artificial Sequence
  ENSG00000140406_2 (sequence is synthesized)
caaaaatggcaggagccggggcccgggccggttgccgcagcgccgcggggaccttctgagttggcccggtggcagggagactcgtgcaggggcgtccgatgcgcggggcccggggcctcg

SEQ ID NO: 359845 - DNA, 120 bp, Artificial Sequence
  ENSG00000140406_3 (sequence is synthesized)
ctcgggagagctcagctgctgcgggccccagacgaggcgacagggatggacttgcgtagacagccagcgccgggccgccgggcgcgcggtctgggagggcgtgccgccgcggcgccgggc

SEQ ID NO: 359846 - DNA, 120 bp, Artificial Sequence
  ENSG00000140406_4 (sequence is synthesized)
ctctgtgaaccggcgaggcgggaaggggccgccgtggtgctcggcacgcccgggcgtgtggcgggcgggcgagagcttgagcgcgatccgggcggccgctgtgcgcaatcagtgcaggct

SEQ ID NO: 359847 - DNA, 120 bp, Artificial Sequence
  ENSG00000140406_5 (sequence is synthesized)
cccgactctgactcggcgcggccgcgacagtgccggccacaccctctgccccgctgccgccggcgccgcttcccaagagctggaggcaggagatgcgcccggggcggccgcgcgtcccag

SEQ ID NO: 359848 - DNA, 120 bp, Artificial Sequence
  ENSG00000140406_6 (sequence is synthesized)
ccagagagccagccccggccgccgtcgcggggaagtgccgcctggtggggtcacggcgcctgaagcccacgtgcgccgccgagcccgaggtggcctcgagcgcggcggctgacagcacag

SEQ ID NO: 359849 - DNA, 120 bp, Artificial Sequence
  ENSG00000140406_7 (sequence is synthesized)
cccgcctgagctgcctcccgcgctcctccccgaggaaaggattttgatttcaaagaaaggaaggaaggaaggacaactcccagcttccccgtcccgccctccccgctccgagggccgcgc

SEQ ID NO: 359850 - DNA, 120 bp, Artificial Sequence
  ENSG00000140406_8 (sequence is synthesized)
caggccatgcccaagaaggcggcggcggcggcgaaccagcagaagggactttcctggcagcccggcgacgaggagcgcggacagtgagtttgctctgccccggttcatggttcctgcaag

SEQ ID NO: 359851 - DNA, 120 bp, Artificial Sequence
  ENSG00000140406_9 (sequence is synthesized)
ccctctaggaggccgaaagctgcagcccctccccttgccccgaagagccttccgcgttctctcgccctcgggcccaccccgcgccgcccgggctcccgccgccgcagcccagtgccctct

SEQ ID NO: 359852 - DNA, 80 bp, Artificial Sequence
  ENSG00000140406_10 (sequence is synthesized)
gcccgcggcggtggatggcatgatggtgcggggaaggcaccgcggccttggccagctgagtcgcgacggccgccggggcg

SEQ ID NO: 359853 - DNA, 120 bp, Artificial Sequence
  ENSG00000140406_11 (sequence is synthesized)
ggcatgccagtgccccccgggcgcgatggctagcggcagcgccgggaagcccactggcgaggcggcttctccggctcctgcgagcgccatcggcggggccagctcgcagccgcggaagag

SEQ ID NO: 359854 - DNA, 120 bp, Artificial Sequence
  ENSG00000140406_12 (sequence is synthesized)
agaggctggtatccgtctgcgaccactgcaagggcaagatgcagctggtggctgacctgctgctgctgtcgagcgaggcgcggcccgtgctcttcgagggccccgcctcctctggtgccg

SEQ ID NO: 359855 - DNA, 120 bp, Artificial Sequence
  ENSG00000140406_13 (sequence is synthesized)
gcgccgagtccttcgagcagtgccgggacaccatcatcgcgcgcaccaaggggctctccatcctcacccacgacgtgcagagccagctcaacatgggccgcttcggggaggcgggggaca

SEQ ID NO: 359856 - DNA, 120 bp, Artificial Sequence
  ENSG00000140406_14 (sequence is synthesized)
gcctggtggagctgggcgacctggtggtgtcgctgaccgagtgctcggcccacgcggcctatctggccgctgtggccacgccgggcgcccagcccgcgcagccgggcctggtggaccgct

SEQ ID NO: 359857 - DNA, 120 bp, Artificial Sequence
  ENSG00000140406_15 (sequence is synthesized)
accgcgtgacgcgatgccgccacgaggtggagcagggttgcgccgtgctgcgcgccacgccgctggccgacatgacgccgcagctgctgctggaggtgtcgcagggcctgtcgcgcaacc

SEQ ID NO: 359858 - DNA, 120 bp, Artificial Sequence
  ENSG00000140406_16 (sequence is synthesized)
tcaagttcctgacggacgcgtgcgccctggccagtgacaagtcacgggaccgcttttcgcgggagcagttcaagctgggcgtcaagtgcatgagcaccagcgcgtcggcgctgctggcct

SEQ ID NO: 359859 - DNA, 120 bp, Artificial Sequence
  ENSG00000140406_17 (sequence is synthesized)
gcgtgcgcgaggtgaaggtggcgcccagtgagctggcgcgcagccgctgtgcgctcttcagcgggcccctggtgcaggcagtgagcgccctggtaggcttcgccaccgagccgcagttcc

SEQ ID NO: 359860 - DNA, 120 bp, Artificial Sequence
  ENSG00000140406_18 (sequence is synthesized)
tgggtcgcgcggcagctgtgagcgccgagggcaaggcggtgcagaccgccatcctgggcggcgccatgagcgtggtgtcggcctgcgtgctcctgacccagtgcctcagggatctggcgc

SEQ ID NO: 359861 - DNA, 120 bp, Artificial Sequence
  ENSG00000140406_19 (sequence is synthesized)
agcaccccgacgggggcgccaagatgtcggaccacagggagaggctgaggaactcggcctgcgccgtgtctgaaggctgcaccctgctatctcaggctttaagggagaggtcttcgccca

SEQ ID NO: 359862 - DNA, 120 bp, Artificial Sequence
  ENSG00000140406_20 (sequence is synthesized)
ccccagactaaaggaagatacttactctctgcccctctccatttataccaaagaaatcataggtgaaaccccctaccctccccaacgttaaatgctcgagaggaatcttccacaaggcag

SEQ ID NO: 359863 - DNA, 120 bp, Artificial Sequence
  ENSG00000140406_21 (sequence is synthesized)
ggccatgcacgcaacctgcacacgcacttggagggcccaggtgtctctccaccagcccccatgcagtagggactggaagatatgtcatctgctggttgtgttatcactcccaccccctac

SEQ ID NO: 359864 - DNA, 120 bp, Artificial Sequence
  ENSG00000140406_22 (sequence is synthesized)
cccagcccgtcttccggaatttctcaactaaatttcattattgggcaggaaggaggtcatgggttcatttcatttttgttttttgtgtttttaattaaaagaaaggttacctcagttttc

SEQ ID NO: 359865 - DNA, 120 bp, Artificial Sequence
  ENSG00000140406_23 (sequence is synthesized)
actccttagacatggatgtagctacctttttttgtatgtcttttttttttttaagcaatcgtgttgaattaggagtatacttggtgtggaaagagtatgaatttgccatgtgatttgcaa

SEQ ID NO: 359866 - DNA, 120 bp, Artificial Sequence
  ENSG00000140406_24 (sequence is synthesized)
atggggggaagctactgtgagcgtgtgtttttttaatttacactatagagtgatttttttttcccccaacgtcaagtttttaccttgcatgtactggagtatttatttcatctattaaaa

SEQ ID NO: 359867 - DNA, 120 bp, Artificial Sequence
  ENSG00000140406_25 (sequence is synthesized)
tgttatgtttctcagatggctttttgcaattattgttgatttttcaataattgtaattttgcatgctgcatgtcatgtatgggaagggtctgtgggaaggctatttcaatagtagtgagg

SEQ ID NO: 359868 - DNA, 120 bp, Artificial Sequence
  ENSG00000140406_26 (sequence is synthesized)
cgggcccccaattcccagccctttctactatttcctcaagaaaaagtactgctcaagaagtactcccttgagcagcctggaactgaagagaggactatgtgtaacgttctattttaaaag

SEQ ID NO: 359869 - DNA, 120 bp, Artificial Sequence
  ENSG00000140406_27 (sequence is synthesized)
gcaggtgacacaaatgggattgggttatgtagagtgcttgggacggttttgtctcatttttcctggaaagtgatttagctccctttgtctccacttacctttccatcatcatgaacagtg

SEQ ID NO: 359870 - DNA, 120 bp, Artificial Sequence
  ENSG00000140406_28 (sequence is synthesized)
gctcaggctgcttgaattctgatttgtattctgcctatcattttcagattaaatcctaatcctgtgtggtatgccagccttcccaactcagagtctctggatggaactctaaaagtactg

SEQ ID NO: 359871 - DNA, 120 bp, Artificial Sequence
  ENSG00000140406_29 (sequence is synthesized)
tacatcaagtgagaatagttagcatcttttatgtacacaggtctattcagacaagatcctcatgatttcagaaaaaatatagagagggtcctagactgcttaatagaggaaagaagtatc

SEQ ID NO: 359872 - DNA, 120 bp, Artificial Sequence
  ENSG00000140406_30 (sequence is synthesized)
ctggaaagcttgttaagaacgttctagagccacaacatgattgtaggccaagggcttgtttttgtgaccttgatctaagataatgccatggttgattgtatgttggaagaatctttgatt

SEQ ID NO: 359873 - DNA, 120 bp, Artificial Sequence
  ENSG00000140406_31 (sequence is synthesized)
ggaatttggagtaatattaaggtagtttgtcttttctgcagacatttttaggagtctttttgtgtgagtggtggtggagtgtatagttttgttgaacctagttaaattctgaatatcttc

SEQ ID NO: 359874 - DNA, 120 bp, Artificial Sequence
  ENSG00000140406_32 (sequence is synthesized)
ccactaaaagcacaacaaatctatttacagtgcctgaagcctgggagagccacatgagtaaaaactcgtacgtggtttagatttgttccatttacatttttcttgggatttgttgtgctt

SEQ ID NO: 359875 - DNA, 120 bp, Artificial Sequence
  ENSG00000140406_33 (sequence is synthesized)
aaacctttgcagttcccacagatctgaaaagaaagcatttttcactgtaatacattaagagagagagaaaaaagtcatattgactattttacttgtttgaatcgctgtttttattacaat

SEQ ID NO: 359876 - DNA, 120 bp, Artificial Sequence
  ENSG00000140406_34 (sequence is synthesized)
gacatgaaatacaacgtgtaaaagtctttaacctgtgttgggtaagggtaggactgtttcaccaccctgaatttgaaatttgaaaaagtcttaaagtggtagggtacttaaatttttaaa

SEQ ID NO: 359877 - DNA, 120 bp, Artificial Sequence
  ENSG00000140406_35 (sequence is synthesized)
aaaatgaccatgggagcagtttttctctgttaaatcctggtaaacttcgggtttttgaagactttaaaagatgaaaatgaccttgagcatctttattcctttcctctgccccttaatgtt

SEQ ID NO: 359878 - DNA, 120 bp, Artificial Sequence
  ENSG00000140406_36 (sequence is synthesized)
gggatggggttcaggatgaaagggaggtgggattctaattcatgtgccagtgacaatcctgcatgcatatagaaatttttatttattgaatgtacacaagtaatgatggagtttgattat

SEQ ID NO: 359879 - DNA, 120 bp, Artificial Sequence
  ENSG00000140406_37 (sequence is synthesized)
atggttcattttcatttatcctatgcagatcacaaagagtaaactgaaaggaacaaacgctaagtaaaataagggccagaaatctgtaaatttggtattagattaagaaaaaaagaattg

SEQ ID NO: 359880 - DNA, 120 bp, Artificial Sequence
  ENSG00000140406_38 (sequence is synthesized)
ccagttttttcctggactctttccttgcagaagcgattttcaggacaactcaagccaattaaaaaaaagaaaatcactttccctatctgtttggatgaagttaactagctagtcactaag

SEQ ID NO: 359881 - DNA, 120 bp, Artificial Sequence
  ENSG00000140406_39 (sequence is synthesized)
tgaattttgaaacctcttacctaaatgatagctgctcttggtgtttctttatgctctacgtttggtcatgtaacatgcataatctctgttctctgaagttgattaaagttctaaacttaa

SEQ ID NO: 359882 - DNA, 120 bp, Artificial Sequence
  ENSG00000140416_0 (sequence is synthesized)
gctcgcactcccgctcctccgcccgaccgcgcgctcgccccgccgctcctgctgcagccccagggcccctcgccgccgccaccatggacgccatcaagaagaagatgcagatgctgaagc

SEQ ID NO: 359883 - DNA, 120 bp, Artificial Sequence
  ENSG00000140416_1 (sequence is synthesized)
tcgacaaggagaacgccttggatcgagctgagcaggcggaggccgacaagaaggcggcggaagacaggagcaagcagctggaagatgagctggtgtcactgcaaaagaaactcaagggca

SEQ ID NO: 359884 - DNA, 120 bp, Artificial Sequence
  ENSG00000140416_2 (sequence is synthesized)
ccgaagatgaactggacaaatactctgaggctctcaaagatgcccaggagaagctggagctggcagagaaaaaggccaccgatgctgaagccgacgtagcttctctgaacagacgcatcc

SEQ ID NO: 359885 - DNA, 120 bp, Artificial Sequence
  ENSG00000140416_3 (sequence is synthesized)
agctggttgaggaagagttggatcgtgcccaggagcgtctggcaacagctttgcagaagctggaggaagctgagaaggcagcagatgagagtgagagaggcatgaaagtcattgagagtc

SEQ ID NO: 359886 - DNA, 120 bp, Artificial Sequence
  ENSG00000140416_4 (sequence is synthesized)
gagcccaaaaagatgaagaaaaaatggaaattcaggagatccaactgaaagaggccaagcacattgctgaagatgccgaccgcaaatatgaagaggtggcccgtaagctggtcatcattg

SEQ ID NO: 359887 - DNA, 120 bp, Artificial Sequence
  ENSG00000140416_5 (sequence is synthesized)
gcagaggagcgggctgagctctcagaaggcaaatgtgccgagcttgaagaagaattgaaaactgtgacgaacaacttgaagtcactggaggctcaggctgagaagtactcgcagaaggaa

SEQ ID NO: 359888 - DNA, 120 bp, Artificial Sequence
  ENSG00000140416_6 (sequence is synthesized)
gacagatatgaggaagagatcaaggtcctttccgacaagctgaaggaggctgagactcgggctgagtttgcggagaggtcagtaactaaattggagaaaagcattgatgacttagaagac

SEQ ID NO: 359889 - DNA, 120 bp, Artificial Sequence
  ENSG00000140416_7 (sequence is synthesized)
gagctgtacgctcagaaactgaagtacaaagccatcagcgaggagctggaccacgctctcaacgatatgacttccatataagtttctttgcttcacttctcccaagactccctcgtcgag

SEQ ID NO: 359890 - DNA, 120 bp, Artificial Sequence
  ENSG00000140416_8 (sequence is synthesized)
ctggatgtcccacctctctgagctctgcatttgtctattctccagctgaccctggttctctctcttagcatcctgccttagagccaggcacacactgtgctttctattgtacagaagctc

SEQ ID NO: 359891 - DNA, 120 bp, Artificial Sequence
  ENSG00000140416_9 (sequence is synthesized)
ttcgtttcagtgtcaaataaacactgtgtaagctatttctgtttgctattctttttacttcttatttattgacattttagtttcaacattgaataaaactacaaagctgcttcacacata

SEQ ID NO: 359892 - DNA, 120 bp, Artificial Sequence
  ENSG00000140416_10 (sequence is synthesized)
ttaaaggtagctcaccacaagacagtcttcctatctgaaatcagcattgcagtcccagccatttcctgaagctaccaccctcactttctccccaactctgaaatgcttttcactctctac

SEQ ID NO: 359893 - DNA, 120 bp, Artificial Sequence
  ENSG00000140416_11 (sequence is synthesized)
gccttcaggaagccagggagcaatgtacagtcttgattcccgagtgaggccatctgctttgttggcagaaatgggtggttttgagaagcagagttcctttgtgtccagaaaacggttcta

SEQ ID NO: 359894 - DNA, 120 bp, Artificial Sequence
  ENSG00000140416_12 (sequence is synthesized)
attttaatcctgctaggggatcccaggctttatcaggaagccaatcagtagcactgcgaagaaggaccaaaactcctctcccccagccacaaagacccggacaaaagatctttggccgga

SEQ ID NO: 359895 - DNA, 120 bp, Artificial Sequence
  ENSG00000140416_13 (sequence is synthesized)
ggacgagcgggaccgggtgctggaggagctgcacaaggcggaggacagcctcctggccgccgaagaggccgccgccaaggtacccggggcgcgcggcacggcgtggcgcacgaatggcta

SEQ ID NO: 359896 - DNA, 120 bp, Artificial Sequence
  ENSG00000140416_14 (sequence is synthesized)
actctttctctttctctctctccctccctgtctttccctctgtctctcccgctgtccctgtccttctggttctgtgcacccacacccctccccttcgggatcacgctgcctgctgcaccc

SEQ ID NO: 359897 - DNA, 120 bp, Artificial Sequence
  ENSG00000140416_15 (sequence is synthesized)
tccgttaccccgggtcaccaccgcgccgcggaggggccctagaagtggaagccagagccctagtgcagtggcctcccggagcgcccagctcaccaggctgaagccgacgtagcttctctg

SEQ ID NO: 359898 - DNA, 120 bp, Artificial Sequence
  ENSG00000140416_16 (sequence is synthesized)
ttgggctgaattctaggcgtggagcccatgtgcagaaaatctaagactgtcctaccttcaactaatagagttgaaaacagttgctttctgcagaaatgcaaatgcaaggaattggctgaa

SEQ ID NO: 359899 - DNA, 120 bp, Artificial Sequence
  ENSG00000140416_17 (sequence is synthesized)
actgctccttgaaatagcaggtcctcttgtttgaactgataaataatgaggagcccccccaaaaaatgttttctatttcctgacagccatgagtcctactttaagtatgtatatatatat

SEQ ID NO: 359900 - DNA, 120 bp, Artificial Sequence
  ENSG00000140416_18 (sequence is synthesized)
atgtgtgtgtgtgtgtgtgtgtatatattcctatcagatactcatattcctaacttctaaatatctggtatagtgtttgaaatatgattaaatgtacctatgcttgggcaaaatagcttt

SEQ ID NO: 359901 - DNA, 120 bp, Artificial Sequence
  ENSG00000140416_19 (sequence is synthesized)
cttttgaaaacaggaactcatgccagaagcccctggttgtctgaaaggtatgctttactcagtctaatggtgctgttggagtctggggagaatgtcatgctaataaatagaacactataa

SEQ ID NO: 359902 - DNA, 120 bp, Artificial Sequence
  ENSG00000140416_20 (sequence is synthesized)
aaatattaagagaatgtcctaatgaagtgtgcatgaaacatgttgacaattttttatgagcaacagaaataaatcattttaaaagttctcagaaaacctatttatgtcatctttgctttt

SEQ ID NO: 359903 - DNA, 120 bp, Artificial Sequence
  ENSG00000140416_21 (sequence is synthesized)
gtgagtttgtgttaccgcacaactcccagacttttaactgcctgtaccttggaaatgtctgctgttcgtaacttcttcagtttgtataacagtgctgcagctgtatttggtttttacctc

SEQ ID NO: 359904 - DNA, 120 bp, Artificial Sequence
  ENSG00000140416_22 (sequence is synthesized)
tccctgttcccacggcacaccgtcagtgaaccttcaccaaaccccacgtgcattttatcctcagtgaattgttggtggaggtgcacctgactgctctgtgagaatccgtgccatggctcc

SEQ ID NO: 359905 - DNA, 120 bp, Artificial Sequence
  ENSG00000140416_23 (sequence is synthesized)
tttgggtcaaagatgccctcccctccgtcttaggttcttgtctagaaatgagtaatgtcttacaagcatgcctagttctaatcatctcatcctgtgtttgtgattgatgtttgcctgcct

SEQ ID NO: 359906 - DNA, 120 bp, Artificial Sequence
  ENSG00000140416_24 (sequence is synthesized)
agccaggacagccgcggcagccgggtccgcagggcagcagccggcctctcccactgcagccctcccgcccgcctaccgtccggcgcgatggcggggagtagctcgctggaggcggtgcgc

SEQ ID NO: 359907 - DNA, 120 bp, Artificial Sequence
  ENSG00000140416_25 (sequence is synthesized)
aggaagatccggagcctgcaggagcaggcggacgccgctgaggagcgcgcgggcaccctgcagcgcgagctggaccacgagaggaagctgagggagaccgctgaagccgacgtagcttct

SEQ ID NO: 359908 - DNA, 120 bp, Artificial Sequence
  ENSG00000140416_26 (sequence is synthesized)
tcaccaccatgccttccttgctccctaatctccatctttgcactcttgtgttcaccctttttgtcataacctagaatagtcattgttttttcactttctgctaatataaaggccaattag

SEQ ID NO: 359909 - DNA, 120 bp, Artificial Sequence
  ENSG00000140416_27 (sequence is synthesized)
attaagtctgtctatacaaaccattttcttttcagaatccgtttattttgtaaacgctgaactagagcagtgaactagaatgagtgaccttgagcactgtccttttgggaaattaagcta

SEQ ID NO: 359910 - DNA, 120 bp, Artificial Sequence
  ENSG00000140416_28 (sequence is synthesized)
ctaagtacaacataatcattttcgttaaatataatttgaaggaacccttaaagtgtcaggttattgagaatctgaggataaggaaattggcatgatccaatacagctttaacagtggtac

SEQ ID NO: 359911 - DNA, 77 bp, Artificial Sequence
  ENSG00000140416_29 (sequence is synthesized)
aggaaattggcatgatccaatacagctttaacagtggtactacaaaagatcatctcttttacttttaagaattctag

SEQ ID NO: 359912 - DNA, 71 bp, Artificial Sequence
  ENSG00000140416_30 (sequence is synthesized)
caccacgaatgataagtttctttgcttcacttctcccaagactccctcgtcgagctggatgtcccacctct

SEQ ID NO: 359913 - DNA, 120 bp, Artificial Sequence
  ENSG00000140416_31 (sequence is synthesized)
ttctttcgttttgttttgttttgtttttaaacacctgcttaccccttaaatgcaatttatttacttttaccactgtcacagaaacatccacaagataccagctaggtcagggggtgggga

SEQ ID NO: 359914 - DNA, 120 bp, Artificial Sequence
  ENSG00000140416_32 (sequence is synthesized)
aaacacatacaaaaaggcaagcccatgtcagggcgatcctggttcaaatgtgccatttcccgggttgatgctgccacactttgtagagagtttagcaacacagtgtgcttagtcagcgta

SEQ ID NO: 359915 - DNA, 120 bp, Artificial Sequence
  ENSG00000140416_33 (sequence is synthesized)
ggaatcctcactaaagcagaagaagttccattcaaagtgccaatgatagagtcaacaggaaggttaatgttggaaacacaatcaggtgtggattggtgctactttgaacaaaaggtcccc

SEQ ID NO: 359916 - DNA, 120 bp, Artificial Sequence
  ENSG00000140416_34 (sequence is synthesized)
ctgtggtcttttgttcaacattgtacaatgtagaactctgtccaacactaatttattttgtcttgagttttactacaagatgagactatggatcccgcatgcctgaattcactaaagcca

SEQ ID NO: 359917 - DNA, 120 bp, Artificial Sequence
  ENSG00000140416_35 (sequence is synthesized)
agggtctgtaagccacgctgctcttccgagacttccattcctttctgattggcacacgtgcagctcatgacaatctgtaggataacaatcagtgtggatttccactcttttcagtccttc

SEQ ID NO: 359918 - DNA, 120 bp, Artificial Sequence
  ENSG00000140416_36 (sequence is synthesized)
atgttaaagatttagacaccacatacaactggtaaaggacgttttcttgagagttttaactatatgtaaacattgtataatgatatggaataaaatgcacattgtaggacattttctaaa

SEQ ID NO: 359919 - DNA, 120 bp, Artificial Sequence
  ENSG00000140416_37 (sequence is synthesized)
tggcagagaaaaaggccaccgatgtaagtgcacgctcacactgcttccctcacctcttgcctgcgtggccactccggggtcaccacagggctggagagcaatgaaggaagtttacctttt

SEQ ID NO: 359920 - DNA, 120 bp, Artificial Sequence
  ENSG00000140416_38 (sequence is synthesized)
cctgctggacacctgcacacagccctgccatggcccagagcattggatgccgcctctgactgctactgcacacattcatttatatttcatccactcctctcttcttctcctttcctttac

SEQ ID NO: 359921 - DNA, 120 bp, Artificial Sequence
  ENSG00000140416_39 (sequence is synthesized)
ctccctgggggtggaggtgggtggatgagaggctgggagaatagagcagctgaaattggactctggaggtgaacttcacctccctggtggcagaaaacccttgaggtgtcatcaccaagg

SEQ ID NO: 359922 - DNA, 120 bp, Artificial Sequence
  ENSG00000140416_40 (sequence is synthesized)
tttgtgtagagaatgccaggttttcttcactttctttccttttgccgtttccagtgggtgggaagttctgggtttggtggtgggtctagtcagggttcagagaacctggcctctaaatga

SEQ ID NO: 359923 - DNA, 120 bp, Artificial Sequence
  ENSG00000140416_41 (sequence is synthesized)
aagaaatgacacagcggtacctttacttagatggctgcacttcatggtggggcacagagacactttgaggcttcctttctcattagtgtaagccttaatccaccccttaagatctgcctg

SEQ ID NO: 359924 - DNA, 120 bp, Artificial Sequence
  ENSG00000140416_42 (sequence is synthesized)
ggaagatgatacttgcttgggtctgcagtctgaaggcactagatccagaaagtaagctgtgagttatatatagctcagtgctttatatggtatagtgagctagctgccccctgcccctcc

SEQ ID NO: 359925 - DNA, 120 bp, Artificial Sequence
  ENSG00000140416_43 (sequence is synthesized)
tgctggccccgcccccacctgtcagccttctgacaaccaccacatagttgcaggggtgatgcacacagctaaggctctcctaagctctttgtccactgccctttggaagctttttaattg

SEQ ID NO: 359926 - DNA, 120 bp, Artificial Sequence
  ENSG00000140416_44 (sequence is synthesized)
atagcttgcctcttctgcctcggaaagtcaagccaaaggaccaacttcttttcacaccgttggattccattctaaaagctaattaagcctagaggcccaattagaaaagaattccttggg

SEQ ID NO: 359927 - DNA, 120 bp, Artificial Sequence
  ENSG00000140416_45 (sequence is synthesized)
aagttggtaacaattccaagaatgtgtgagcaccagggaaagctatgccagcagttgaaacaccgagagcaacagcagacttttttatatgaaagtaacatgcaaataactgaagggtct

SEQ ID NO: 359928 - DNA, 120 bp, Artificial Sequence
  ENSG00000140416_46 (sequence is synthesized)
caggtcttgaaattagtgaagtcttttgtagcatgaaaggcttgagatgtatatccaggtgtgctttgtaaatgagaactccagagacgacatttaggatctgacaaaaagaaattttca

SEQ ID NO: 359929 - DNA, 120 bp, Artificial Sequence
  ENSG00000140416_47 (sequence is synthesized)
gtgaaaatcaagcttcctggaaaggggatttggggggaagcactgatttcgctaaaacatttaaattctaaactacctggctttggaaaaagagccaaaaaccatatatgactctgagcc

SEQ ID NO: 359930 - DNA, 120 bp, Artificial Sequence
  ENSG00000140416_48 (sequence is synthesized)
tactttgtataatgcagatcagatgcctgctctatatatggctaaatggaagatgcctgcctcccgcaaattctccagcaggacgtttatttagctttttcaaaagagctgctaatagat

SEQ ID NO: 359931 - DNA, 120 bp, Artificial Sequence
  ENSG00000140416_49 (sequence is synthesized)
caaggaaagatattccttataaggaaaagaatgcagagaatttgaaaatagcccagtaagactgaaggcaaaagagggagaaaaaggttactacaattcttaagggaaaaaaataggata

SEQ ID NO: 359932 - DNA, 120 bp, Artificial Sequence
  ENSG00000140416_50 (sequence is synthesized)
ggaagcagcaggggagggagcttcttgaatcttgttttggttatttttcccaccgggaaactgcccctaaatctggcatatatggcttttttgatagtgtattgatcacattccctttta

SEQ ID NO: 359933 - DNA, 120 bp, Artificial Sequence
  ENSG00000140416_51 (sequence is synthesized)
ggacactttaggttgtctggagtttggagcccgtaggaatattgaagaagttagtgaagaaatgctatacagtcatttgttgattaatgaagggggataaggtctgagacatgtgtcgtt

SEQ ID NO: 359934 - DNA, 120 bp, Artificial Sequence
  ENSG00000140416_52 (sequence is synthesized)
aggtgatttattcattgtgcaaacaccatagagtgtatggtacttacacaaacctagagggtatagcctactaaacacctaggctacaaacttgtacagtgtgttactgtactgaatact

SEQ ID NO: 359935 - DNA, 120 bp, Artificial Sequence
  ENSG00000140416_53 (sequence is synthesized)
gtcaacaattgtaacacaaatcaccaggcgataggaattttttagttctattgtaatcttatgaggctactctcatatatgcagcccctcattgaccaaaacatcattatgcagtgcatg

SEQ ID NO: 359936 - DNA, 120 bp, Artificial Sequence
  ENSG00000140416_54 (sequence is synthesized)
accatattgagagtattcgttttttatttactaaaaaatagtcaaaacttgaggaggaagagacagatgtcactagaaaaagggagaagtccggtaagggagaagtcagcttcctgaggt

SEQ ID NO: 359937 - DNA, 120 bp, Artificial Sequence
  ENSG00000140416_55 (sequence is synthesized)
ggaatcgtattacctttgggattaggacatttcattgtcattattcaccagtgtaaaacacttttacatttttctactattattactaaaaacatttttctactactttacaaatcctat

SEQ ID NO: 359938 - DNA, 120 bp, Artificial Sequence
  ENSG00000140416_56 (sequence is synthesized)
tctggaagtgggctctacctagcttagaagattgtcattcaggagtagtatccctgatggtcttgtttcgaattttgtgttgtctttccacctaagtcaaaagtgaggctgaaggggatc

SEQ ID NO: 359939 - DNA, 120 bp, Artificial Sequence
  ENSG00000140416_57 (sequence is synthesized)
gaagactccatttttttctggcccccaatctcttccccagtaactgtgatatatctgatatttatagcatatgagtctttatccctttgtaggtctttacttcttaacttagggattctc

SEQ ID NO: 359940 - DNA, 120 bp, Artificial Sequence
  ENSG00000140416_58 (sequence is synthesized)
aaccttctctaaacataatcacttagggagcttttaaaacccaaagttaggatgcacccaaagccagttaaatcagaatccctggggatgcaacccaggcggcagcatttaaaaaatacc

SEQ ID NO: 359941 - DNA, 120 bp, Artificial Sequence
  ENSG00000140416_59 (sequence is synthesized)
caagtgattccaacctacagacaaggatgagaaaactctcctaaactcttgtataatgacatcggcatgaaaatgaactcacctgaaactgaccttcccaggacattaagtcactagttg

SEQ ID NO: 359942 - DNA, 120 bp, Artificial Sequence
  ENSG00000140416_60 (sequence is synthesized)
gctgcttatggcacttgccagtgtccagcagtttcctggctgctcctggaggttgccagacacccggttcccccattctcaatgttggaggcccacagtctctgcacttaggggaccagc

SEQ ID NO: 359943 - DNA, 120 bp, Artificial Sequence
  ENSG00000140416_61 (sequence is synthesized)
tgtaacctccccacctgaccagatgaaccgcggggaaacaaagcgagaagctcccacctacaggatgcaaggacccaagctgggatttgtgagagtctcagcagaggctgtgaggaactc

SEQ ID NO: 359944 - DNA, 120 bp, Artificial Sequence
  ENSG00000140416_62 (sequence is synthesized)
cacagaaaatgaggcaggaaagcaaaagttccttgttagggcttggaggaggagagggttgtcaagcatgttttctttattattcccacacataagggagctggctttaagagctttctg

SEQ ID NO: 359945 - DNA, 120 bp, Artificial Sequence
  ENSG00000140416_63 (sequence is synthesized)
tgacaaacctgaggagaaaaagccctgagacttagaaggcatttaagaatacagctcaagggggaaatcggtggagactgtatctgcggtggttttctccacctgtagccagaggctctc

SEQ ID NO: 359946 - DNA, 120 bp, Artificial Sequence
  ENSG00000140416_64 (sequence is synthesized)
tcatagggttctgtggctttccttggggtgccttttaaaggcatcccagtccagcccaggactgactggattccaggagatctcagaggctggtctgacaccaaagaaggctgtaaagag

SEQ ID NO: 359947 - DNA, 120 bp, Artificial Sequence
  ENSG00000140416_65 (sequence is synthesized)
aagagaccatttggatgactgttttcatggaaagtgagccccagggaggctggcctgagattacacagctgattatgggcctcagcctgactcttaaaacaatgcttgtgtatttcttaa

SEQ ID NO: 359948 - DNA, 120 bp, Artificial Sequence
  ENSG00000140416_66 (sequence is synthesized)
aggagcgggctgagctctcagaagggtaagcgggcccggcgccaggaggccacgaatggggtgctgcagagcagtgactaaacagcatgaccttctggcagctgcacattacctgtttca

SEQ ID NO: 359949 - DNA, 120 bp, Artificial Sequence
  ENSG00000140416_67 (sequence is synthesized)
gctccgggctccttttgtgctcatttgatgtggatgagccacgagtatggaacatggaggactcgtgtggggtgtcttatgtatgaatgcgtgtatcactgcatgccttacctgcacact

SEQ ID NO: 359950 - DNA, 120 bp, Artificial Sequence
  ENSG00000140416_68 (sequence is synthesized)
gattttgtgaatggccttgtgcatttcctgtgtccactaacagccaagtccgacagctggaagaacaattaagaataatggatcagaccttgaaagcattaatggctgcagaggataagc

SEQ ID NO: 359951 - DNA, 120 bp, Artificial Sequence
  ENSG00000140416_69 (sequence is synthesized)
attcatgacttaattttctaatctcaccacagagaaagtggctcatgccaaagaagaaaaccttagtatgcatcagatgctggatcagactttactggagttaaacaacatgtgaaaacc

SEQ ID NO: 359952 - DNA, 120 bp, Artificial Sequence
  ENSG00000140416_70 (sequence is synthesized)
taagagatccttaacatctgttggctgagctggcgagttctttgcatgagaagccatgagtagattgagctgcagcctgacatctggaatgctctttctaattacagtactcgcagaagg

SEQ ID NO: 359953 - DNA, 120 bp, Artificial Sequence
  ENSG00000140416_71 (sequence is synthesized)
ggatcagaccttgaaagcattaatggctgcagaggataaggtactgatggctcgtgtggtttttaggtttaactgcaacccagacatctttcagcttccaatgcctcctggttcgtttgg

SEQ ID NO: 359954 - DNA, 120 bp, Artificial Sequence
  ENSG00000140416_72 (sequence is synthesized)
tataacgactgcaccttcacttcaccctctgctatttatatcttgccttaagtgctttcccttggtcctttatgctcctttgttttcccttcataaatgctctttgggcagccaaaaaag

SEQ ID NO: 359955 - DNA, 120 bp, Artificial Sequence
  ENSG00000140416_73 (sequence is synthesized)
gtgttcctggaaaacctaaacattttaatacctgatgatttggctactttaaggcagcccttcgtctctaggactcagttttcattttttcccatccctctcctttttctctcctccttc

SEQ ID NO: 359956 - DNA, 120 bp, Artificial Sequence
  ENSG00000140416_74 (sequence is synthesized)
ggccccagccaacccgacgcccgtgtgttgtgtgtgtctaacacccggtccgtgccggccgcccgcgcccgcccgccgctgcccccagctcgaggaggacatcgcggccaaggagaagtt

SEQ ID NO: 359957 - DNA, 120 bp, Artificial Sequence
  ENSG00000140416_75 (sequence is synthesized)
ccatatttgttaggattttcatattgagtctttttcattttattttctaatgggttttgttctctttgtttttgtttcaatttacttaaaacaaaacgcacgcctcctgcattggccacc

SEQ ID NO: 359958 - DNA, 120 bp, Artificial Sequence
  ENSG00000140416_76 (sequence is synthesized)
tgctgcggcaccaaccccttcatgcattgcccttttcttgctgctgtgttgggatggtgcgcgcaccaccctcactcaccctccatttcttgatcactctccatgttcttgcacctctgc

SEQ ID NO: 359959 - DNA, 120 bp, Artificial Sequence
  ENSG00000140416_77 (sequence is synthesized)
atgtgcaaggctggaatgaacatgaggtgctgtttccttcctttctggtgactcggctgtgtggggagctggggatagagacctgtcacccagagggttctttccccaaagcataaacag

SEQ ID NO: 359960 - DNA, 120 bp, Artificial Sequence
  ENSG00000140416_78 (sequence is synthesized)
ccacgcctccagggcgcacctggcgcacctgggccagctggcggcgggctctggggaggggcccggcctgttctcctgagcctttgttttccatctcgctgatccaaagctgaagccgac

SEQ ID NO: 359961 - DNA, 120 bp, Artificial Sequence
  ENSG00000140416_79 (sequence is synthesized)
cggaagacaggagcaagcaggtctgcgcctccccggccctgcgcccgcgcccagagcgccgggactcgagcctggcacccccggctggatccccaccccgaggactcggggagccaccac

SEQ ID NO: 359962 - DNA, 120 bp, Artificial Sequence
  ENSG00000140416_80 (sequence is synthesized)
cctacccccaccaccacccagggcggccagggcgcgcgtctggaaagaaggaagggaaacgcaagagccaggcttagtctaacttagtctggtctgaggacgcttatttcccttctctgg

SEQ ID NO: 359963 - DNA, 120 bp, Artificial Sequence
  ENSG00000140416_81 (sequence is synthesized)
ttcccatggcccgcgaaatcaagtcctagaggcgctttattctcaggactgggaatcagtttgggggagggaggaggacacccggttcctggggacgtttgaaggaagggcgagggatgg

SEQ ID NO: 359964 - DNA, 120 bp, Artificial Sequence
  ENSG00000140416_82 (sequence is synthesized)
agaaagggggtcgagtaactcaagtgttagaagttcgttgacttttgactggggagaaaggaaccttaaacttggggaggagaagggagtcctggagttgttacctaagaacaaagatgg

SEQ ID NO: 359965 - DNA, 120 bp, Artificial Sequence
  ENSG00000140416_83 (sequence is synthesized)
ggcggaatggaggctacagcccgaaagccaggccagcagtggcgttcttctgtgtccccaagtagtggacttgagcccgctgagacctcggcaggagtctcgtcccagggcaggtgggtg

SEQ ID NO: 359966 - DNA, 120 bp, Artificial Sequence
  ENSG00000140416_84 (sequence is synthesized)
aaactgtgacgaacaacttgaagtcactggaggctcaggctgagaaggtaggccaggaggatggtgtgggggaaaggcatcttttaagagctgctcaaaagaggccctgccagaaagcaa

SEQ ID NO: 359967 - DNA, 120 bp, Artificial Sequence
  ENSG00000140416_85 (sequence is synthesized)
cacttacagtagacattttagtaaaatggcaatattgtgaggtgatttttggagagttactagataacaaattcttttttttaactagagaatttattttatgttagggatatgaggcat

SEQ ID NO: 359968 - DNA, 120 bp, Artificial Sequence
  ENSG00000140416_86 (sequence is synthesized)
caatttaatttaaaccaagtgccaagtggataagttatcttgttgttatcccatgtaaaacaataggcaagaaagcagagaatgtattgcagtgtgccatttgatatcagaggttccatt

SEQ ID NO: 359969 - DNA, 120 bp, Artificial Sequence
  ENSG00000140416_87 (sequence is synthesized)
aacatacattcaaagtggatgaggatattttacctgattagtaaattccatctcccacttccatgcacaatatttaaacagccaccagtgcaagtgtgtataatggaccatcatagtctt

SEQ ID NO: 359970 - DNA, 120 bp, Artificial Sequence
  ENSG00000140416_88 (sequence is synthesized)
ataagtgttctgaggctcatagcaacaatttcttatgacaggaaaaaaatcattgcctctcaaagaaaccaacattttatttcagtgacagataccaagtaaaaacagtacttgtattat

SEQ ID NO: 359971 - DNA, 120 bp, Artificial Sequence
  ENSG00000140416_89 (sequence is synthesized)
ttttctttttaggagtttgatacttttcttgtattaaccttgacttcaaagaaaaatcataggcttacatcaaaaacacttgggaaatttgtcttggctctgttccaatgaggccagtta

SEQ ID NO: 359972 - DNA, 120 bp, Artificial Sequence
  ENSG00000140416_90 (sequence is synthesized)
ttctaaaaggggttactggattgtgttgggccttcatgtggtgtgtattttagaaccactgaattttaaactatttaagttcctttgtaaggatcctatgataaagtggcttgaaggaaa

SEQ ID NO: 359973 - DNA, 120 bp, Artificial Sequence
  ENSG00000140416_91 (sequence is synthesized)
gagttgagtgaaactcttgagtccgatttctggctgtactgctattgtcttacatggctgagcctgggtaagtcttgtctcagttcacacttcaggcccccagtgagtgaggtggccgtg

SEQ ID NO: 359974 - DNA, 120 bp, Artificial Sequence
  ENSG00000140416_92 (sequence is synthesized)
cagttcacacttcaggcccccagtgagtgaggtggccgtgatgacgctcttgtttaacaggcaagtaaagccagggtgttgaactctacggaagtgggccgggcgcagtggctcacgcct

SEQ ID NO: 359975 - DNA, 120 bp, Artificial Sequence
  ENSG00000140416_93 (sequence is synthesized)
aaaaaatctacggaagaaaggaaccatgtgaaagagcgtttgctaatgatctgtctgtctgatgagaattgtgtgtatagatttgtgtatacacaaatatggatgttcactgtataaatc

SEQ ID NO: 359976 - DNA, 120 bp, Artificial Sequence
  ENSG00000140416_94 (sequence is synthesized)
gaaaggaattaaaatacccacgataaatatttaccacaacctgtgtcaaataaatgggaaattaaacacagattgtacaatgtgagcttgggagttaatggcccagattttactgttagg

SEQ ID NO: 359977 - DNA, 120 bp, Artificial Sequence
  ENSG00000140416_95 (sequence is synthesized)
cagtaagagttggagtaggtagtcttgttatcatgagaagaaccttgaacagatacaactaatttacatattactaaccaaacttaaacattaaactttttctactactttaaattctaa

SEQ ID NO: 359978 - DNA, 120 bp, Artificial Sequence
  ENSG00000140416_96 (sequence is synthesized)
gcgcacctggcgcacctgggccagctggcggcgggctctggggaggggcccggcctgttctcctgagcctttgttttccatctcgctgatccaaagtaaacgctcccaggggaaacgggt

SEQ ID NO: 359979 - DNA, 120 bp, Artificial Sequence
  ENSG00000140416_97 (sequence is synthesized)
ggtgttgagaaggttctggaaggagcattttcccaggaagggtctgtttctggggtggtggctttcagtcgtgtctgtgcgtccccgggaggtgcactttgcgctgctggcttgctttac

SEQ ID NO: 359980 - DNA, 120 bp, Artificial Sequence
  ENSG00000140416_98 (sequence is synthesized)
tctgagagtggagagggaggaggtccttcctcttggagatccgtactttgagaaggggcgccgacaggtcaagtgggagaggcactgtggacttggggcccggggatgctacactccgcc

SEQ ID NO: 359981 - DNA, 120 bp, Artificial Sequence
  ENSG00000140416_99 (sequence is synthesized)
gttcccgtcgaccctgtggtttcccggcggcctgtgtctccgaggcggtagacagacattgacagcttgacagcgccgcgttctgctggaagagctaaactatagtgcaaaacccttaac

SEQ ID NO: 359982 - DNA, 120 bp, Artificial Sequence
  ENSG00000140416_100 (sequence is synthesized)
ccgtcccttttttcagcagtcctcctccccttttctctcatacagatagataatgctttgttaccaagtcttggaaaaagttggcgaaatgtcaacagttattgggtgtattctcttgcg

SEQ ID NO: 359983 - DNA, 120 bp, Artificial Sequence
  ENSG00000140416_101 (sequence is synthesized)
ggcttcccctcccccttgttaaatgtaatacctggcttccttcctttcttctaaggcaaatgtatccagcaaacacgaacaggatttcagagttccctgtgtgtaaagtgtggatagtaa

SEQ ID NO: 359984 - DNA, 120 bp, Artificial Sequence
  ENSG00000140416_102 (sequence is synthesized)
cttaagtagtgtttttagtttaatccttatggttgaataccaacctggcaaaacaattttccaattcaagggcatccacattgatacgctcctttgcacttgcacattcttcctgtgtgt

SEQ ID NO: 359985 - DNA, 120 bp, Artificial Sequence
  ENSG00000140416_103 (sequence is synthesized)
cctctggggtttttctctgtggctcttgaactcatgaacctaagtcttctgctcacgaggtgactagttagccaccagccatagtggcaaatgccatccagcttgacttcatgctcatta

SEQ ID NO: 359986 - DNA, 120 bp, Artificial Sequence
  ENSG00000140443_0 (sequence is synthesized)
agtgtgtggcagcggcggcggcggcgcggcgaggctggggctcttgtttaccagcattaactccgctgagcggaaaaaaaaagggaaaaaacccgaggaggagcgagcgcaccaggcgaa

SEQ ID NO: 359987 - DNA, 120 bp, Artificial Sequence
  ENSG00000140443_1 (sequence is synthesized)
cgaactcgagagaggcgggagagcgagagggacgccgccagcgagcctgcccacggccggcgctcgcagaccctcggccccgctccccggatccccccgcgccctccacgcccctcccgc

SEQ ID NO: 359988 - DNA, 80 bp, Artificial Sequence
  ENSG00000140443_2 (sequence is synthesized)
gggcagctccacggcgcgcctcgcctcggctgtgaccttcagcgagccggagcccccgcgcagagcaggcggcggcgggc

SEQ ID NO: 359989 - DNA, 120 bp, Artificial Sequence
  ENSG00000140443_3 (sequence is synthesized)
gcgggagtgctgagcgcggcgcggccggcccgccgctttgtgtgtgtcctggatttgggaaggagctcgccgcggcggcggcggcgctgagggaggaggcggcggcgagcggagccagga

SEQ ID NO: 359990 - DNA, 120 bp, Artificial Sequence
  ENSG00000140443_4 (sequence is synthesized)
gcgagcggagccaggaggaggaggaggagggggagccgctcattcattttgactccgcgtttctgcccctcgccggcctcgcctgtgacccggacttcggggcgatcttgcgaactgcgt

SEQ ID NO: 359991 - DNA, 120 bp, Artificial Sequence
  ENSG00000140443_5 (sequence is synthesized)
cgcgccctcccgcggcggaagctcgggcgtccggccgcctcccgcgcggccagggccgggcttgtttttcctcgcctaggcagatttgggctttgccccctttctttgcagttttccccc

SEQ ID NO: 359992 - DNA, 120 bp, Artificial Sequence
  ENSG00000140443_6 (sequence is synthesized)
cttcctgcctctccgggtttgaaaatggaggccgacgacgccgacagcccgccccggcgcgcctcgggttcccgactccgccgagccctgggccgctgctgccggcgctgaggggccgcc

SEQ ID NO: 359993 - DNA, 120 bp, Artificial Sequence
  ENSG00000140443_7 (sequence is synthesized)
ccgcgccgcccgccccgtccgcgcacccggagggccccggcggcgccgccttcggagtattgtttccttcgcccttgtttttggagggggagcgaagactgagtttgagacttgtttcct

SEQ ID NO: 359994 - DNA, 120 bp, Artificial Sequence
  ENSG00000140443_8 (sequence is synthesized)
tttttttttttttttttttgagaaaggggaatttcatcccaaataaaaggaatgaagtctggctccggaggagggtccccgacctcgctgtgggggctcctgtttctctccgccgcgctc

SEQ ID NO: 359995 - DNA, 120 bp, Artificial Sequence
  ENSG00000140443_9 (sequence is synthesized)
tgtgggggctcctgtttctctccgccgcgctctcgctctggccgacgagtggagaaatctgcgggccaggcatcgacatccgcaacgactatcagcagctgaagcgcctggagaactgca

SEQ ID NO: 359996 - DNA, 120 bp, Artificial Sequence
  ENSG00000140443_10 (sequence is synthesized)
cggtgatcgagggctacctccacatcctgctcatctccaaggccgaggactaccgcagctaccgcttccccaagctcacggtcattaccgagtacttgctgctgttccgagtggctggcc

SEQ ID NO: 359997 - DNA, 120 bp, Artificial Sequence
  ENSG00000140443_11 (sequence is synthesized)
tcgagagcctcggagacctcttccccaacctcacggtcatccgcggctggaaactcttctacaactacgccctggtcatcttcgagatgaccaatctcaaggatattgggctttacaacc

SEQ ID NO: 359998 - DNA, 120 bp, Artificial Sequence
  ENSG00000140443_12 (sequence is synthesized)
tgaggaacattactcggggggccatcaggattgagaaaaatgctgacctctgttacctctccactgtggactggtccctgatcctggatgcggtgtccaataactacattgtggggaata

SEQ ID NO: 359999 - DNA, 120 bp, Artificial Sequence
  ENSG00000140443_13 (sequence is synthesized)
agcccccaaaggaatgtggggacctgtgtccagggaccatggaggagaagccgatgtgtgagaagaccaccatcaacaatgagtacaactaccgctgctggaccacaaaccgctgccaga

SEQ ID NO: 360000 - DNA, 120 bp, Artificial Sequence
  ENSG00000140443_14 (sequence is synthesized)
aaatgtgcccaagcacgtgtgggaagcgggcgtgcaccgagaacaatgagtgctgccaccccgagtgcctgggcagctgcagcgcgcctgacaacgacacggcctgtgtagcttgccgcc

SEQ ID NO: 360001 - DNA, 120 bp, Artificial Sequence
  ENSG00000140443_15 (sequence is synthesized)
actactactatgccggtgtctgtgtgcctgcctgcccgcccaacacctacaggtttgagggctggcgctgtgtggaccgtgacttctgcgccaacatcctcagcgccgagagcagcgact

SEQ ID NO: 360002 - DNA, 120 bp, Artificial Sequence
  ENSG00000140443_16 (sequence is synthesized)
ccgaggggtttgtgatccacgacggcgagtgcatgcaggagtgcccctcgggcttcatccgcaacggcagccagagcatgtactgcatcccttgtgaaggtccttgcccgaaggtctgtg

SEQ ID NO: 360003 - DNA, 120 bp, Artificial Sequence
  ENSG00000140443_17 (sequence is synthesized)
aggaagaaaagaaaacaaagaccattgattctgttacttctgctcagatgctccaaggatgcaccatcttcaagggcaatttgctcattaacatccgacgggggaataacattgcttcag

SEQ ID NO: 360004 - DNA, 120 bp, Artificial Sequence
  ENSG00000140443_18 (sequence is synthesized)
agctggagaacttcatggggctcatcgaggtggtgacgggctacgtgaagatccgccattctcatgccttggtctccttgtccttcctaaaaaaccttcgcctcatcctaggagaggagc

SEQ ID NO: 360005 - DNA, 120 bp, Artificial Sequence
  ENSG00000140443_19 (sequence is synthesized)
agctagaagggaattactccttctacgtcctcgacaaccagaacttgcagcaactgtgggactgggaccaccgcaacctgaccatcaaagcagggaaaatgtactttgctttcaatccca

SEQ ID NO: 360006 - DNA, 120 bp, Artificial Sequence
  ENSG00000140443_20 (sequence is synthesized)
aattatgtgtttccgaaatttaccgcatggaggaagtgacggggactaaagggcgccaaagcaaaggggacataaacaccaggaacaacggggagagagcctcctgtgaaagtgacgtcc

SEQ ID NO: 360007 - DNA, 120 bp, Artificial Sequence
  ENSG00000140443_21 (sequence is synthesized)
tgcatttcacctccaccaccacgtcgaagaatcgcatcatcataacctggcaccggtaccggccccctgactacagggatctcatcagcttcaccgtttactacaaggaagcacccttta

SEQ ID NO: 360008 - DNA, 120 bp, Artificial Sequence
  ENSG00000140443_22 (sequence is synthesized)
agaatgtcacagagtatgatgggcaggatgcctgcggctccaacagctggaacatggtggacgtggacctcccgcccaacaaggacgtggagcccggcatcttactacatgggctgaagc

SEQ ID NO: 360009 - DNA, 120 bp, Artificial Sequence
  ENSG00000140443_23 (sequence is synthesized)
cctggactcagtacgccgtttacgtcaaggctgtgaccctcaccatggtggagaacgaccatatccgtggggccaagagtgagatcttgtacattcgcaccaatgcttcagttccttcca

SEQ ID NO: 360010 - DNA, 120 bp, Artificial Sequence
  ENSG00000140443_24 (sequence is synthesized)
ttcccttggacgttctttcagcatcgaactcctcttctcagttaatcgtgaagtggaaccctccctctctgcccaacggcaacctgagttactacattgtgcgctggcagcggcagcctc

SEQ ID NO: 360011 - DNA, 120 bp, Artificial Sequence
  ENSG00000140443_25 (sequence is synthesized)
aggacggctacctttaccggcacaattactgctccaaagacaaaatccccatcaggaagtatgccgacggcaccatcgacattgaggaggtcacagagaaccccaagactgaggtgtgtg

SEQ ID NO: 360012 - DNA, 120 bp, Artificial Sequence
  ENSG00000140443_26 (sequence is synthesized)
gtggggagaaagggccttgctgcgcctgccccaaaactgaagccgagaagcaggccgagaaggaggaggctgaataccgcaaagtctttgagaatttcctgcacaactccatcttcgtgc

SEQ ID NO: 360013 - DNA, 120 bp, Artificial Sequence
  ENSG00000140443_27 (sequence is synthesized)
ccagacctgaaaggaagcggagagatgtcatgcaagtggccaacaccaccatgtccagccgaagcaggaacaccacggccgcagacacctacaacatcaccgacccggaagagctggaga

SEQ ID NO: 360014 - DNA, 120 bp, Artificial Sequence
  ENSG00000140443_28 (sequence is synthesized)
cagagtaccctttctttgagagcagagtggataacaaggagagaactgtcatttctaaccttcggcctttcacattgtaccgcatcgatatccacagctgcaaccacgaggctgagaagc

SEQ ID NO: 360015 - DNA, 120 bp, Artificial Sequence
  ENSG00000140443_29 (sequence is synthesized)
tgggctgcagcgcctccaacttcgtctttgcaaggactatgcccgcagaaggagcagatgacattcctgggccagtgacctgggagccaaggcctgaaaactccatctttttaaagtggc

SEQ ID NO: 360016 - DNA, 120 bp, Artificial Sequence
  ENSG00000140443_30 (sequence is synthesized)
cggaacctgagaatcccaatggattgattctaatgtatgaaataaaatacggatcacaagttgaggatcagcgagaatgtgtgtccagacaggaatacaggaagtatggaggggccaagc

SEQ ID NO: 360017 - DNA, 120 bp, Artificial Sequence
  ENSG00000140443_31 (sequence is synthesized)
taaaccggctaaacccggggaactacacagcccggattcaggccacatctctctctgggaatgggtcgtggacagatcctgtgttcttctatgtccaggccaaaacaggatatgaaaact

SEQ ID NO: 360018 - DNA, 120 bp, Artificial Sequence
  ENSG00000140443_32 (sequence is synthesized)
tcatccatctgatcatcgctctgcccgtcgctgtcctgttgatcgtgggagggttggtgattatgctgtacgtcttccatagaaagagaaataacagcaggctggggaatggagtgctgt

SEQ ID NO: 360019 - DNA, 120 bp, Artificial Sequence
  ENSG00000140443_33 (sequence is synthesized)
atgcctctgtgaacccggagtacttcagcgctgctgatgtgtacgttcctgatgagtgggaggtggctcgggagaagatcaccatgagccgggaacttgggcaggggtcgtttgggatgg

SEQ ID NO: 360020 - DNA, 120 bp, Artificial Sequence
  ENSG00000140443_34 (sequence is synthesized)
tctatgaaggagttgccaagggtgtggtgaaagatgaacctgaaaccagagtggccattaaaacagtgaacgaggccgcaagcatgcgtgagaggattgagtttctcaacgaagcttctg

SEQ ID NO: 360021 - DNA, 120 bp, Artificial Sequence
  ENSG00000140443_35 (sequence is synthesized)
tgatgaaggagttcaattgtcaccatgtggtgcgattgctgggtgtggtgtcccaaggccagccaacactggtcatcatggaactgatgacacggggcgatctcaaaagttatctccggt

SEQ ID NO: 360022 - DNA, 120 bp, Artificial Sequence
  ENSG00000140443_36 (sequence is synthesized)
ctctgaggccagaaatggagaataatccagtcctagcacctccaagcctgagcaagatgattcagatggccggagagattgcagacggcatggcatacctcaacgccaataagttcgtcc

SEQ ID NO: 360023 - DNA, 120 bp, Artificial Sequence
  ENSG00000140443_37 (sequence is synthesized)
acagagaccttgctgcccggaattgcatggtagccgaagatttcacagtcaaaatcggagattttggtatgacgcgagatatctatgagacagactattaccggaaaggagggaaagggc

SEQ ID NO: 360024 - DNA, 120 bp, Artificial Sequence
  ENSG00000140443_38 (sequence is synthesized)
tgctgcccgtgcgctggatgtctcctgagtccctcaaggatggagtcttcaccacttactcggacgtctggtccttcggggtcgtcctctgggagatcgccacactggccgagcagccct

SEQ ID NO: 360025 - DNA, 120 bp, Artificial Sequence
  ENSG00000140443_39 (sequence is synthesized)
accagggcttgtccaacgagcaagtccttcgcttcgtcatggagggcggccttctggacaagccagacaactgtcctgacatgctgtttgaactgatgcgcatgtgctggcagtataacc

SEQ ID NO: 360026 - DNA, 120 bp, Artificial Sequence
  ENSG00000140443_40 (sequence is synthesized)
ccaagatgaggccttccttcctggagatcatcagcagcatcaaagaggagatggagcctggcttccgggaggtctccttctactacagcgaggagaacaagctgcccgagccggaggagc

SEQ ID NO: 360027 - DNA, 120 bp, Artificial Sequence
  ENSG00000140443_41 (sequence is synthesized)
tggacctggagccagagaacatggagagcgtccccctggacccctcggcctcctcgtcctccctgccactgcccgacagacactcaggacacaaggccgagaacggccccggccctgggg

SEQ ID NO: 360028 - DNA, 120 bp, Artificial Sequence
  ENSG00000140443_42 (sequence is synthesized)
tgctggtcctccgcgccagcttcgacgagagacagccttacgcccacatgaacgggggccgcaagaacgagcgggccttgccgctgccccagtcttcgacctgctgatccttggatcctg

SEQ ID NO: 360029 - DNA, 120 bp, Artificial Sequence
  ENSG00000140443_43 (sequence is synthesized)
aatctgtgcaaacagtaacgtgtgcgcacgcgcagcggggtggggggggagagagagttttaacaatccattcacaagcctcctgtacctcagtggatcttcagaactgcccttgctgcc

SEQ ID NO: 360030 - DNA, 120 bp, Artificial Sequence
  ENSG00000140443_44 (sequence is synthesized)
cgcgggagacagcttctctgcagtaaaacacatttgggatgttccttttttcaatatgcaagcagctttttattccctgcccaaacccttaactgacatgggcctttaagaaccttaatg

SEQ ID NO: 360031 - DNA, 120 bp, Artificial Sequence
  ENSG00000140443_45 (sequence is synthesized)
acaacacttaatagcaacagagcacttgagaaccagtctcctcactctgtccctgtccttccctgttctccctttctctctcctctctgcttcataacggaaaaataattgccacaagtc

SEQ ID NO: 360032 - DNA, 120 bp, Artificial Sequence
  ENSG00000140443_46 (sequence is synthesized)
cagctgggaagccctttttatcagtttgaggaagtggctgtccctgtggccccatccaaccactgtacacacccgcctgacaccgtgggtcattacaaaaaaacacgtggagatggaaat

SEQ ID NO: 360033 - DNA, 120 bp, Artificial Sequence
  ENSG00000140443_47 (sequence is synthesized)
ttttacctttatctttcacctttctagggacatgaaatttacaaagggccatcgttcatccaaggctgttaccattttaacgctgcctaattttgccaaaatcctgaactttctccctca

SEQ ID NO: 360034 - DNA, 120 bp, Artificial Sequence
  ENSG00000140443_48 (sequence is synthesized)
tcggcccggcgctgattcctcgtgtccggaggcatgggtgagcatggcagctggttgctccatttgagagacacgctggcgacacactccgtccatccgactgcccctgctgtgctgctc

SEQ ID NO: 360035 - DNA, 120 bp, Artificial Sequence
  ENSG00000140443_49 (sequence is synthesized)
aaggccacaggcacacaggtctcattgcttctgactagattattatttgggggaactggacacaataggtctttctctcagtgaaggtggggagaagctgaaccggcttccctgccctgc

SEQ ID NO: 360036 - DNA, 120 bp, Artificial Sequence
  ENSG00000140443_50 (sequence is synthesized)
cccccgcccgcccccaaggacacagatgggaaggggtttccagggactcagccccactgttgatgcaggtttgcaaggaaagaaattcaaacaccacaacagcagtaagaagaaaagcag

SEQ ID NO: 360037 - DNA, 120 bp, Artificial Sequence
  ENSG00000140443_51 (sequence is synthesized)
tcaatggattcaagcattctaagctttgttgacattttctctgttcctaggacttcttcatgggtcttacagttctatgttagaccatgaaacatttgcatacacatcgtctttaatgtc

SEQ ID NO: 360038 - DNA, 120 bp, Artificial Sequence
  ENSG00000140443_52 (sequence is synthesized)
acttttataacttttttacggttcagatattcatctatacgtctgtacagaaaaaaaaaagctgctattttttttgttcttgatctttgtggatttaatctatgaaaaccttcaggtcca

SEQ ID NO: 360039 - DNA, 120 bp, Artificial Sequence
  ENSG00000140443_53 (sequence is synthesized)
ccctctcccctttctgctcactccaagaaacttcttatgctttgtactagagtgcgtgactttcttcctcttttcccggtaatggatacttctatcacataatttgccatgaactgttgg

SEQ ID NO: 360040 - DNA, 120 bp, Artificial Sequence
  ENSG00000140443_54 (sequence is synthesized)
atgcctttttataaatacatcccccatccctgctcccacctgcccctttagttgttttctaacccgtaggctctctgggcacgaggcagaaagcaggccgggcacccatcctgagagggc

SEQ ID NO: 360041 - DNA, 120 bp, Artificial Sequence
  ENSG00000140443_55 (sequence is synthesized)
cgcgctcctctccccagcctgccctcacagcattggagcctgttacagtgcaagacatgatacaaactcaggtcagaaaaacaaaggttaaatatttcacacgtctttgttcagtgtttc

SEQ ID NO: 360042 - DNA, 120 bp, Artificial Sequence
  ENSG00000140443_56 (sequence is synthesized)
cactcaccgtggttgagaagcctcaccctctctttcccttgcctttgcttaggttgtgacacacatatatatatatttttttaattcttgggtacaacagcagtgttaaccgcagacact

SEQ ID NO: 360043 - DNA, 120 bp, Artificial Sequence
  ENSG00000140443_57 (sequence is synthesized)
aggcatttggattactatttttcttaatggctatttaatccttccatcccacgaaaaacagctgctgagtccaagggagcagcagagcgtggtccggcagggcctgttgtggccctcgcc

SEQ ID NO: 360044 - DNA, 120 bp, Artificial Sequence
  ENSG00000140443_58 (sequence is synthesized)
acccccctcaccggaccgactgacctgtctttggaaccagaacatcccaagggaactccttcgcactggcgttgagtgggaccccgggatccaggctggcccagggcggcaccctcaggg

SEQ ID NO: 360045 - DNA, 120 bp, Artificial Sequence
  ENSG00000140443_59 (sequence is synthesized)
ctgtgcccgctggagtgctaggtggaggcagcacagacgccacggtggcccaagagcccctttgcttcttgctgggggaccagggctgtggtgctggcccactttccctcggccaggaat

SEQ ID NO: 360046 - DNA, 120 bp, Artificial Sequence
  ENSG00000140443_60 (sequence is synthesized)
ccaggtccttggggcccaggggtcttgtcttgtttcatttttagcacttctcaccagagagatgacagcacaagagttgcttctgggatagaaatgtttaggagtaagaacaaagctggg

SEQ ID NO: 360047 - DNA, 120 bp, Artificial Sequence
  ENSG00000140443_61 (sequence is synthesized)
atacggtgattgctagttgtgactgaagattcaacacagaaaagaaagtttatacggcttttttgctggtcagcagtttgtcccactgctttctctagtctctatcccatagcgtgttcc

SEQ ID NO: 360048 - DNA, 120 bp, Artificial Sequence
  ENSG00000140443_62 (sequence is synthesized)
ctttaaaaaaaaaaaaaaggtattatatgtaggagttttcttttaatttattttgtgataaattaccagtttcaatcactgtagaaaagccccattatgaatttaaatttcaaggaaagg

SEQ ID NO: 360049 - DNA, 120 bp, Artificial Sequence
  ENSG00000140443_63 (sequence is synthesized)
gtgtgtgtgtgtgtatgtgtggggtgtgtgtgtgtgagagtgatgggacagttcttgattttttgggttttttttcccccaaacatttatctacctcactcttattttttatatgtgtat

SEQ ID NO: 360050 - DNA, 120 bp, Artificial Sequence
  ENSG00000140443_64 (sequence is synthesized)
atagacaaaagaatacatctcacctttctcagcacctgacaataggccgttgatactggtaacctcatccacgccacaggcgccacacccaggtgatgcagggggaagccaggctgtatt

SEQ ID NO: 360051 - DNA, 120 bp, Artificial Sequence
  ENSG00000140443_65 (sequence is synthesized)
ccggggtcaaagcaacactaactcacctctctgctcatttcagacagcttgcctttttctgagatgtcctgttttgtgttgctttttttgttttgttttctatcttggtttccaccaagg

SEQ ID NO: 360052 - DNA, 120 bp, Artificial Sequence
  ENSG00000140443_66 (sequence is synthesized)
tgttagatttctcctcctcctagccaggtggccctgtgaggccaacgagggcaccagagcacacctgggggagccaccaggctgtccctggctggttgtctttggaacaaactgcttctg

SEQ ID NO: 360053 - DNA, 120 bp, Artificial Sequence
  ENSG00000140443_67 (sequence is synthesized)
tgcagatggaatgaccaacacatttcgtccttaagagagcagtggttcctcaggttctgaggagaggaaggtgtccaggcagcaccatctctgtgcgaatccccagggtaaaggcgtggg

SEQ ID NO: 360054 - DNA, 120 bp, Artificial Sequence
  ENSG00000140443_68 (sequence is synthesized)
gcattgggtttgctccccttgctgctgctccatccctgcaggaggctcgcgctgaggcaggaccgtgcggccatggctgctgcattcattgagcacaaaggtgcagctgcagcagcagct

SEQ ID NO: 360055 - DNA, 120 bp, Artificial Sequence
  ENSG00000140443_69 (sequence is synthesized)
ggagagcaagagtcacccagcctgtgcgccagaatgcagaggctcctgacctcacagccagtccctgatagaacacacgcaggagcagagtcccctccccctccaggctgccctctcaac

SEQ ID NO: 360056 - DNA, 120 bp, Artificial Sequence
  ENSG00000140443_70 (sequence is synthesized)
ttctccctcacctccttccctaggggtagacagagatgtaccaaaccttccggctggaaagcccagtggccggcgccgaggctcgtggcgtcacgccccccccgccagggctgtacctcc

SEQ ID NO: 360057 - DNA, 120 bp, Artificial Sequence
  ENSG00000140443_71 (sequence is synthesized)
gtctccctggtcctgctgctcacaggacagacggctcgctcccctcttccagcagctgctcttacaggcactgatgatttcgctgggaagtgtggcgggcagctttgcctaagcgtggat

SEQ ID NO: 360058 - DNA, 120 bp, Artificial Sequence
  ENSG00000140443_72 (sequence is synthesized)
ggctcctcggcaattccagcctaagtgaaggcgctcaggagcctcctgctggaacgcgacccatctctcccaggaccccggggatcttaaggtcattgagaaatactgttggatcagggt

SEQ ID NO: 360059 - DNA, 120 bp, Artificial Sequence
  ENSG00000140443_73 (sequence is synthesized)
tttgttcttccacactgtaggtgaccccttggaataacggcctctcctctcgtgcacatacctaccggtttccacaactggatttctacagatcattcagctggttataagggttttgtt

SEQ ID NO: 360060 - DNA, 120 bp, Artificial Sequence
  ENSG00000140443_74 (sequence is synthesized)
taaactgtccgagttactgatgtcattttgtttttgttttatgtaggtagcttttaagtagaaaacactaacagtgtagtgcccatcatagcaaatgcttcagaaacacctcaataaaag

SEQ ID NO: 360061 - DNA, 120 bp, Artificial Sequence
  ENSG00000140443_75 (sequence is synthesized)
agaaaacttggcttgtgtgatggtgcagtcactttactggaccaacccacccaccttgactataccaaggcatcatctatccacagttctagcctaacttcatgctgatttctctgcctc

SEQ ID NO: 360062 - DNA, 120 bp, Artificial Sequence
  ENSG00000140443_76 (sequence is synthesized)
ttgatttttctctgtgtgttccaaataatcttaagctgagttgtggcattttccatgcaacctccttctgccagcagctcacactgcttgaagtcatatgaaccactgaggcacatcatg

SEQ ID NO: 360063 - DNA, 120 bp, Artificial Sequence
  ENSG00000140443_77 (sequence is synthesized)
gaattgatgtgagcattaagacgttctcccacacagcccttccctgaggcagcaggagctggtgtgtactggagacactgttgaacttgatcaagacccagaccaccccaggtctccttc

SEQ ID NO: 360064 - DNA, 120 bp, Artificial Sequence
  ENSG00000140443_78 (sequence is synthesized)
gtgggatgtcatgacgtttgacatacctttggaacgagcctcctccttggaagatggaagaccgtgttcgtggccgacctggcctctcctggcctgtttcttaagatgcggagtcacatt

SEQ ID NO: 360065 - DNA, 120 bp, Artificial Sequence
  ENSG00000140443_79 (sequence is synthesized)
tcaatggtacgaaaagtggcttcgtaaaatagaagagcagtcactgtggaactaccaaatggcgagatgctcggtgcacattggggtgctttgggataaaagatttatgagccaactatt

SEQ ID NO: 360066 - DNA, 120 bp, Artificial Sequence
  ENSG00000140443_80 (sequence is synthesized)
ctctggcaccagattctaggccagtttgttccactgaagcttttcccacagcagtccacctctgcaggctggcagccgaatggcttgccagtggctctgtggcaagatcacactgagatc

SEQ ID NO: 360067 - DNA, 120 bp, Artificial Sequence
  ENSG00000140443_81 (sequence is synthesized)
gatgggtgagaaggctaggatgcttgtctagtgttcttagctgtcacgttggctccttccagggtggccagacggtgttggccactcccttctaaaacacaggcgccctcctggtgacag

SEQ ID NO: 360068 - DNA, 120 bp, Artificial Sequence
  ENSG00000140443_82 (sequence is synthesized)
tgacccgccgtggtatgccttggcccattccagcagtcccagttatgcatttcaagtttggggtttgttcttttcgttaatgttcctctgtgttgtcagctgtcttcatttcctgggcta

SEQ ID NO: 360069 - DNA, 120 bp, Artificial Sequence
  ENSG00000140443_83 (sequence is synthesized)
agcagcattgggagatgtggaccagagatccactccttaagaaccagtggcgaaagacactttctttcttcactctgaagtagctggtggtacaaatgagaacttcaagagaggatgtta

SEQ ID NO: 360070 - DNA, 120 bp, Artificial Sequence
  ENSG00000140443_84 (sequence is synthesized)
tttagactgaacctctgttgccagagatgctgaagatacagaccttggacaggtcagagggtttcatttttggccttcatcttagatgactggttgcgtcatttggagaagtgagtgctc

SEQ ID NO: 360071 - DNA, 120 bp, Artificial Sequence
  ENSG00000140443_85 (sequence is synthesized)
cttgatggtggaatgaccgggtggtgggtacagaaccattgtcacagggatcctggcacagagaagagttacgagcagcagggtgcagggcttggaaggaatgtgggcaaggttttgaac

SEQ ID NO: 360072 - DNA, 120 bp, Artificial Sequence
  ENSG00000140443_86 (sequence is synthesized)
ttgattgttcttgaagctatcagaccacatcgaggctcagcagtcatccgtgggcatttggtttcaacaaagaaacctaacatcctactctggaaactgatctcggagttaaggcgaatt

SEQ ID NO: 360073 - DNA, 120 bp, Artificial Sequence
  ENSG00000140443_87 (sequence is synthesized)
gttcaagaacacaaactacatcgcactcgtcagttgtcagttctggggcatgactttagcgttttgtttctgcgagaacataacgatcactcatttttatgtcccacgtgtgtgtgtccg

SEQ ID NO: 360074 - DNA, 120 bp, Artificial Sequence
  ENSG00000140443_88 (sequence is synthesized)
catctttctggtcaacattgttttaactagtcactcattagcgttttcaatagggctcttaagtccagtagattacgggtagtcagttgacgaagatctggtttacaagaactaattaaa

SEQ ID NO: 360075 - DNA, 120 bp, Artificial Sequence
  ENSG00000140443_89 (sequence is synthesized)
tgtttcattgcatttttgtaagaacagaataattttataaaatgtttgtagtttataattgccgaaaataatttaaagacactttttttttctctgtgtgtgcaaatgtgtgtttgtgat

SEQ ID NO: 360076 - DNA, 120 bp, Artificial Sequence
  ENSG00000140443_90 (sequence is synthesized)
ccattttttttttttttttttaggacacctgtttactagctagctttacaatatgccaaaaaaggatttctccctgaccccatccgtggttcaccctcttttccccccatgctttttgcc

SEQ ID NO: 360077 - DNA, 120 bp, Artificial Sequence
  ENSG00000140443_91 (sequence is synthesized)
ctagtttataacaaaggaatgatgatgatttaaaaagtagttctgtatcttcagtatcttggtcttccagaaccctctggttgggaaggggatcattttttactggtcatttccctttgg

SEQ ID NO: 360078 - DNA, 120 bp, Artificial Sequence
  ENSG00000140443_92 (sequence is synthesized)
agtgtagctactttaacagatggaaagaacctcattggccatggaaacagccgaggtgttggagcccagcagtgcatggcaccgttcggcatctggcttgattggtctggctgccgtcat

SEQ ID NO: 360079 - DNA, 120 bp, Artificial Sequence
  ENSG00000140443_93 (sequence is synthesized)
tgtcagcacagtgccatggacatgggaagacttgactgcacagccaatggttttcatgatgattacagcatacacagtgatcacataaacgatgacagctatggggcacacaggccattt

SEQ ID NO: 360080 - DNA, 120 bp, Artificial Sequence
  ENSG00000140443_94 (sequence is synthesized)
gcttacatgcctcgtatcatgactgattactgctttgttagaacacagaagagaccctattttatttaaggcagaaccccgaagatacgtatttccaatacagaaaagaatttttaataa

SEQ ID NO: 360081 - DNA, 120 bp, Artificial Sequence
  ENSG00000140443_95 (sequence is synthesized)
aaactataacatacacaaaaattggttttaaagttgactccacttcctctaactccagtggattgttggccatgtctccccaactccacaatatctctatcatgggaaacacctggggtt

SEQ ID NO: 360082 - DNA, 120 bp, Artificial Sequence
  ENSG00000140443_96 (sequence is synthesized)
tttgcgctacataggagaaagatctggaaactatttgggttttgttttcaacttttcatttggatgtttggcgttgcacacacacatccaccggtggaagagacgcccggtgaaaacacc

SEQ ID NO: 360083 - DNA, 120 bp, Artificial Sequence
  ENSG00000140443_97 (sequence is synthesized)
tgtctgctttctaagccagtgaggttgaggtgagaggtttgccagagtttgtctacctctgggtatccctttgtctgggataaaaaaaatcaaaccagaaggcgggatggaatggatgca

SEQ ID NO: 360084 - DNA, 120 bp, Artificial Sequence
  ENSG00000140443_98 (sequence is synthesized)
ccgcaaataatgcattttctgagttttcttgttaaaaaaaaatttttttaagtaagaaaaaaaaaggtaataacatggccaatttgttacataaaatgactttctgtgtataaattattc

SEQ ID NO: 360085 - DNA, 120 bp, Artificial Sequence
  ENSG00000140443_99 (sequence is synthesized)
ctaaaaaatcctgtttatataaaaaatcagtagatgaaaaaaatttcaaaatgtttttgtatattctgttgtaagaatttattcctgttattgcgatatactctggattctttacataat

SEQ ID NO: 360086 - DNA, 120 bp, Artificial Sequence
  ENSG00000140443_100 (sequence is synthesized)
ggaaaaaagaaactgtctattttgaatggctgaagctaaggcaacgttagtttctcttactctgcttttttctagtaaagtactacatggtttaagttaaataaaataattctgtatgca

SEQ ID NO: 360087 - DNA, 87 bp, Artificial Sequence
  ENSG00000140443_101 (sequence is synthesized)
caccaaaaccaagatggtaacgagagtgacctgtgatcgtcctcactgctgcactcccaccagcgccatgagtgtttacatgtcata

SEQ ID NO: 360088 - DNA, 120 bp, Artificial Sequence
  ENSG00000140443_102 (sequence is synthesized)
aagtatcgcaaggccccagttcacggaagtaccacaacataaattggtcttcacttggtcgaagagagcaaatgcacatccctgtgtgcacggccacctggttcctctcctcacttgctg

SEQ ID NO: 360089 - DNA, 120 bp, Artificial Sequence
  ENSG00000140443_103 (sequence is synthesized)
attccatccttgaaaagcacagtgtcctccccactggggaacaccaatccttaaaaaacttctttctcattgcaaatcgaaggaggctgccgctgcacccagccccagactcctcagtca

SEQ ID NO: 360090 - DNA, 120 bp, Artificial Sequence
  ENSG00000140443_104 (sequence is synthesized)
tttggttacttgaatttactgagaagactgagcaaagggaagtttagtgatatcacgttaaaattttatgaagtccaaaagaatgctagatttccaaatttacttgtgagagacaaaagg

SEQ ID NO: 360091 - DNA, 120 bp, Artificial Sequence
  ENSG00000140443_105 (sequence is synthesized)
tgcaatagatggcattcctgataacattgcttcagagctggagaacttcatggggctcatcgaggtggtgacgggctacgtgaagatccgccattctcatgccttggtctccttgtcctt

SEQ ID NO: 360092 - DNA, 90 bp, Artificial Sequence
  ENSG00000140443_106 (sequence is synthesized)
atggagtagccattcttctgttcctttactttcctaatcagcttgctttcagtttacagactcaccctgaattattcttgcgtaagatct

SEQ ID NO: 360093 - DNA, 120 bp, Artificial Sequence
  ENSG00000140443_107 (sequence is synthesized)
gtgtggatgggggggttattctcaggtcagcccagtgttggcctccctccctgggaacccaaatccaactttgtcacctgtttaaattgtacagaaggagcagatgacattcctgggcca

SEQ ID NO: 360094 - DNA, 120 bp, Artificial Sequence
  ENSG00000140443_108 (sequence is synthesized)
cggcctcccaaagtgctgggattatagccttgagccaccacatctggccgagaccagctatcttcttgattaaaggtactgagagctattatttttccttacaagcatgtataacggctt

SEQ ID NO: 360095 - DNA, 120 bp, Artificial Sequence
  ENSG00000140443_109 (sequence is synthesized)
actctgacattcaatgtttagttcaggaggcatttctgctttgccatcgagaatttttctcccttctaagaaaatgttttctcctgagaaaatttttctcccttccaagaaaagagtaga

SEQ ID NO: 360096 - DNA, 120 bp, Artificial Sequence
  ENSG00000140443_110 (sequence is synthesized)
atgaaaggaggcaacttggtttcatagggagtgtcatgttgtccttctgagtttactgatgagcttacctgagaaaggagggttctagcatgggagttctgttgctacaagacatgaaag

SEQ ID NO: 360097 - DNA, 120 bp, Artificial Sequence
  ENSG00000140443_111 (sequence is synthesized)
aatatgcaatatctttctgtggtcacaccaacagaaagggcgatttcttaacctgctgcagttaccatgtgtgtaggtggatgctggctattacagatggtatcctttcaaccctcaaaa

SEQ ID NO: 360098 - DNA, 120 bp, Artificial Sequence
  ENSG00000140443_112 (sequence is synthesized)
gactcagtacgccgtttacgtcaaggctgtgaccctcaccatggtggagaacgaccatatccgtggggccaagagtgagatcttgtacattcgcaccaatgcttcagttaatcgtgaagt

SEQ ID NO: 360099 - DNA, 120 bp, Artificial Sequence
  ENSG00000140450_0 (sequence is synthesized)
gacaggcctctcggcgagccggtgccccatcgggtaccgcacggctgccgcggcggccttaccctgccgcgagcgcctgtgacagcggcgccgctgtgctcgcgaccccggctccgggcc

SEQ ID NO: 360100 - DNA, 120 bp, Artificial Sequence
  ENSG00000140450_1 (sequence is synthesized)
tctgccgacctcaggggcaggaaagagtcgcccggcgggatgggcggggaggctgggtgcgcggcggccgtgggtgccgagggccgcgtgaagagcctgggtctggtgttcgaggacgag

SEQ ID NO: 360101 - DNA, 120 bp, Artificial Sequence
  ENSG00000140450_2 (sequence is synthesized)
cgcaagggctgctattccagcggcgagacagtggccgggcacgtgctgctggaggcgtccgagccggtggccctgcgcgcgctgcgcctggaggcccaggggcgcgccaccgccgcctgg

SEQ ID NO: 360102 - DNA, 120 bp, Artificial Sequence
  ENSG00000140450_3 (sequence is synthesized)
ggcccgagcacctgcccccgcgcctcggccagcaccgcggccctggctgtcttctcggaggtggagtacctgaacgtgcgcctcagcctgcgggagcccccggccggtgaaggcatcatt

SEQ ID NO: 360103 - DNA, 120 bp, Artificial Sequence
  ENSG00000140450_4 (sequence is synthesized)
ttattacagcctggaaaacatgaatttccatttcgctttcaacttccatctgaacctttggtcacctcgtttactgggaaatatggaagcattcagtactgtgtgcgggcagtgttggaa

SEQ ID NO: 360104 - DNA, 120 bp, Artificial Sequence
  ENSG00000140450_5 (sequence is synthesized)
cgacccaaggtacctgatcagagtgtaaagcgggaactccaggttgttagtcatgtcgatgtcaacacaccagcattattaacccctgtattgaaaactcaagagaaaatggttggctgt

SEQ ID NO: 360105 - DNA, 120 bp, Artificial Sequence
  ENSG00000140450_6 (sequence is synthesized)
tggtttttcacttctggtccagtctcgctgagtgccaaaattgaaagaaagggatactgtaatggagaagctattccaatctatgcagaaatagaaaattgttcctctcgtctgattgtt

SEQ ID NO: 360106 - DNA, 120 bp, Artificial Sequence
  ENSG00000140450_7 (sequence is synthesized)
ccaaaggctgctattttccaaacgcagacatatttggctagtggaaaaacaaagaccattcgacacatggtcgccaatgtgcgaggaaaccacatcgcttctgggagcacagacacatgg

SEQ ID NO: 360107 - DNA, 120 bp, Artificial Sequence
  ENSG00000140450_8 (sequence is synthesized)
aatgggaaaacgctaaaaatcccacctgttactccatccatcctggattgctgcattatcagagtggactattccttagctgtatacattcacattcctggtgctaaaaaattgatgctc

SEQ ID NO: 360108 - DNA, 120 bp, Artificial Sequence
  ENSG00000140450_9 (sequence is synthesized)
gaactgccattagtgatcggtacaattccatataatggttttggcagcagaaactccagcattgccagccagttcagtatggatatgagctggttgacactgaccctgccagagcagcct

SEQ ID NO: 360109 - DNA, 120 bp, Artificial Sequence
  ENSG00000140450_10 (sequence is synthesized)
gaagcaccaccaaattatgcagatgtggtatcagaggaagaattctctagacacattcctccttaccctcaaccccctaactgtgagggagaagtgtgctgtcctgtgtttgcctgtata

SEQ ID NO: 360110 - DNA, 120 bp, Artificial Sequence
  ENSG00000140450_11 (sequence is synthesized)
caagaattccggtttcaacccccacctctttattcagaggttgacccacatcctagcgacgtagaagagagccagcctgtttccttcattctctgaacgtatttcagaaatcactgtgtt

SEQ ID NO: 360111 - DNA, 120 bp, Artificial Sequence
  ENSG00000140450_12 (sequence is synthesized)
catcatcaaattagaatgttggttcttttccttctgcctttttgggaaagagacaggaaagattcacttgaaaacataaatgaacgtcaagactgaaggcaatagaaattaaagaatgtg

SEQ ID NO: 360112 - DNA, 120 bp, Artificial Sequence
  ENSG00000140450_13 (sequence is synthesized)
agaaagttctggtgggccggcaggattgccgcacaagtttatatgatggtcgtatatatatccctgttaaaaactgggatgaagatgtgcaaagtcacagaatgtaatggaagtcctgat

SEQ ID NO: 360113 - DNA, 120 bp, Artificial Sequence
  ENSG00000140450_14 (sequence is synthesized)
ggttacagagtaagtgaaagggtgcctgcgctgacgtgagagaaaggaatctgtaaacagtggaaacactgtgggagtttcccatggtgaagagtggaacgaaggcgatatgaactgaag

SEQ ID NO: 360114 - DNA, 120 bp, Artificial Sequence
  ENSG00000140450_15 (sequence is synthesized)
gggtgaagacttgattttggagagggcaacaaaacaagggtgtgtgtgcataggagaatggcccactccaaatacgaagtgagatcctgagtctttgggtgcttcatgatttcctaccat

SEQ ID NO: 360115 - DNA, 120 bp, Artificial Sequence
  ENSG00000140450_16 (sequence is synthesized)
aatatagtttataaatcggcagtacggtattatgaaaccaagaaagggtttcttgaaaagcttgtcggttcaaagaggaaagatgaatttcaatgtgaaaacacgttttgttgagggctg

SEQ ID NO: 360116 - DNA, 120 bp, Artificial Sequence
  ENSG00000140450_17 (sequence is synthesized)
tactttttaccccctttaagtgctttaacaggatatacgtttgattttcctcatatcttatttacctaggagcatgtaagagaaagaagggagagaaaaggttgcatctgcaggatgcct

SEQ ID NO: 360117 - DNA, 120 bp, Artificial Sequence
  ENSG00000140450_18 (sequence is synthesized)
tgataactacacagtcccaaataaaaggcctttttctaacctacctctaatggggttatcagatatgtttttaaatctctcgccctgagtactcttcttgggagttgctgctgtttacag

SEQ ID NO: 360118 - DNA, 120 bp, Artificial Sequence
  ENSG00000140450_19 (sequence is synthesized)
ccacagtctcatctatcactaaatatgaaactgggccaaggggaaaattcagtaagttagcgttaaatggaagtaaatatatgtatacctaagagaatgtcaaaataaacaccaaaccaa

SEQ ID NO: 360119 - DNA, 120 bp, Artificial Sequence
  ENSG00000140450_20 (sequence is synthesized)
aagaaggtaggagtgccatttttagaaaagacacaactttaattcctgtcaagagacctaggtctactgatggcagtcactgcattgtacattattccagttcttcagtaattctgttta

SEQ ID NO: 360120 - DNA, 120 bp, Artificial Sequence
  ENSG00000140450_21 (sequence is synthesized)
aactgtgattttctttattgtgttggtgcaatattttattatcatttaacctcaggatattcagaccaacaggattgtgttgctgctgaaagtctgagcagtgttttaccgtccccagcc

SEQ ID NO: 360121 - DNA, 120 bp, Artificial Sequence
  ENSG00000140450_22 (sequence is synthesized)
cccctcccacatggtcacatgttcacttgcttttccttccatctgttggttttgtgagctgagagcatctctggacacatggaagggagccagggattcctgtgatacagattttgaacc

SEQ ID NO: 360122 - DNA, 120 bp, Artificial Sequence
  ENSG00000140450_23 (sequence is synthesized)
agcagagtactttggttttcttcatgtcctaagggtttgatccagaaaccctggtgcttcccctgcagaatactgtacttcatttaacagaatgattgatttttctttcaatcagcatgt

SEQ ID NO: 360123 - DNA, 120 bp, Artificial Sequence
  ENSG00000140450_24 (sequence is synthesized)
tcaccaaaaatagaaaagttcttctaaggttaaattttgtatttaaaagttagttggccatttgatcagggaattttctacacacattaggcaaatgtatgcttttcatcctctgggctt

SEQ ID NO: 360124 - DNA, 120 bp, Artificial Sequence
  ENSG00000140450_25 (sequence is synthesized)
acctctctcctctgcaatcctggaagcatcgtgcatagttctttcattgtaagccgctatttaaattcccacaatgcaaaactgttagaccagtaattgtgctactgaaattgtcacaaa

SEQ ID NO: 360125 - DNA, 120 bp, Artificial Sequence
  ENSG00000140450_26 (sequence is synthesized)
acgttattccttgatttggtttttaaattttgctttcgtgtgtgtgtctttaaacaggtaatgtgtatttaagtgttgtctaaacagttgatttttactttagaaaagatcatcttcaac

SEQ ID NO: 360126 - DNA, 120 bp, Artificial Sequence
  ENSG00000140450_27 (sequence is synthesized)
tgtttattgacttctgagttatatagttcatgccctgccaaggcattgttcgactccatgatactaaaacataatgaaagaaacaaactccagtatggagaagagaaagtttaattattt

SEQ ID NO: 360127 - DNA, 120 bp, Artificial Sequence
  ENSG00000140450_28 (sequence is synthesized)
ggttccatctagaaaagcaacaacttaaaggaatccttcactaggattgtcttatcacctttattagataaatcatgaagtgtccctgtgaaattgaagtgaaactatctctgtaggact

SEQ ID NO: 360128 - DNA, 120 bp, Artificial Sequence
  ENSG00000140450_29 (sequence is synthesized)
taagagaatagctaaaaggtgtgacttgccttattgaaatgatactggcatatctgactgtaagcagtaggttgaagatatcattttatgaatgtggagaattctacattgaaacagaaa

SEQ ID NO: 360129 - DNA, 120 bp, Artificial Sequence
  ENSG00000140450_30 (sequence is synthesized)
atacctgggaatgaagattaaaaatgtagctgctgttatttgcttggttattcccctcttgctcttctttagtttgaaaaaacaaaaacgtggccttggaattttcattttgatgcagaa

SEQ ID NO: 360130 - DNA, 120 bp, Artificial Sequence
  ENSG00000140450_31 (sequence is synthesized)
attttgaaattgaaaatgtgcatgttttggtgcacaaaatccttctgtgggcaaaactttgtttttgttttgcacagtaagaaacaataggcaagcgttatgtttttggtaagttaacta

SEQ ID NO: 360131 - DNA, 120 bp, Artificial Sequence
  ENSG00000140450_32 (sequence is synthesized)
tgaaagctttcttatttttattattaaaaatgtaacaatttaacccacaggaaaaaaaattactttgtatgcttgtttgaaccctatgggttcgttttattaataaaattattacactaa

SEQ ID NO: 360132 - DNA, 120 bp, Artificial Sequence
  ENSG00000140451_0 (sequence is synthesized)
atttgaaaaatttctagtttcggagcttagccacaggccggctacgatctgcttgttcatctgagtgtcggcacaaaccagcagaggcggtgacgatgctctcgggcatagaggcggcgg

SEQ ID NO: 360133 - DNA, 120 bp, Artificial Sequence
  ENSG00000140451_1 (sequence is synthesized)
caggggaatatgaggactcggagctgcggtgccgcgtggctgtggaggagctgagcccgggcgggcagccgcgaaggcgccaggccctgcgcaccgcggagctgagcctgggtcgcaacg

SEQ ID NO: 360134 - DNA, 120 bp, Artificial Sequence
  ENSG00000140451_2 (sequence is synthesized)
agcgccgcgagttgatgctgcggctgcaagcgccagggcccgcggggcggccgcgctgctttcctctgcgcgccgcgcgcctcttcacgcgtttcgccgaggccgggcgcagcaccctgc

SEQ ID NO: 360135 - DNA, 120 bp, Artificial Sequence
  ENSG00000140451_3 (sequence is synthesized)
ggctccccgcccacgacacccccggggccggcgcagtgcagctgctgctctcggactgccccccagaccgcctgcgccgcttcctgcgcacattgcgcctcaagctggctgcggccccgg

SEQ ID NO: 360136 - DNA, 120 bp, Artificial Sequence
  ENSG00000140451_4 (sequence is synthesized)
cgggccggcctccgcccgagcgcagctgctgggcccgcggccccgcgacttcgtcaccatcagccctgtgcagcccgaggagcggcggctcagggcggccacccgggttccggacactac

SEQ ID NO: 360137 - DNA, 120 bp, Artificial Sequence
  ENSG00000140451_5 (sequence is synthesized)
ctacgctggtgaagcggcctgtggagccccaggctggggccgagcctagcacagaagccccaaggtggcccctgcctgtgaagaggctgagcttgccctccaccaagccacagctttctg

SEQ ID NO: 360138 - DNA, 120 bp, Artificial Sequence
  ENSG00000140451_6 (sequence is synthesized)
aggaacaggctgctgtgctgagggccgtcctgaaaggccagagcatcttcttcactgggagtgcaggaacagggaagtcatatctgctaaagcgaatcctgggctcactgccccccacag

SEQ ID NO: 360139 - DNA, 120 bp, Artificial Sequence
  ENSG00000140451_7 (sequence is synthesized)
gcactgtggccactgccagcactggggtggcagcctgccacatcgggggcaccaccctccatgcctttgcaggcatcggctcaggccaggctcctctagcccagtgtgtggccctggccc

SEQ ID NO: 360140 - DNA, 120 bp, Artificial Sequence
  ENSG00000140451_8 (sequence is synthesized)
aaaggccaggcgtgcggcagggctggctgaactgccagcggttggtcattgacgagatctcaatggtggaggcagacctgtttgacaaactggaggccgtggccagagctgtccggcagc

SEQ ID NO: 360141 - DNA, 120 bp, Artificial Sequence
  ENSG00000140451_9 (sequence is synthesized)
agaacaagccattcggagggatccagctcatcatctgtggggactttctgcagctgccacctgtgaccaagggctcccagcccccacggttctgcttccagtccaagagctggaagaggt

SEQ ID NO: 360142 - DNA, 120 bp, Artificial Sequence
  ENSG00000140451_10 (sequence is synthesized)
gtgtgccagtgaccctggagctgaccaaggtgtggaggcaggcagaccagaccttcatctctctactgcaggccgtgaggctaggcaggtgttcagatgaggtgacccgccagctccagg

SEQ ID NO: 360143 - DNA, 120 bp, Artificial Sequence
  ENSG00000140451_11 (sequence is synthesized)
ctctgcacccaccaggatgatgtggccctcaccaacgagaggcggcttcaggagctgccaggtaaggtacacagatttgaggctatggacagcaaccctgagctggccagtaccctggat

SEQ ID NO: 360144 - DNA, 120 bp, Artificial Sequence
  ENSG00000140451_12 (sequence is synthesized)
gcccagtgtcctgttagccagctccttcaactaaagctgggggcccaggtgatgctggtgaaaaacttatcggtgtctcggggcctggtgaatggtgcccgaggggtggtagttgggttc

SEQ ID NO: 360145 - DNA, 120 bp, Artificial Sequence
  ENSG00000140451_13 (sequence is synthesized)
gaggcagaagggagagggctaccccaggtgcggttcctgtgtggagtcactgaggtcatccacgctgaccgctggacggtgcaggccaccgggggccagctcctcagtcggcagcagctg

SEQ ID NO: 360146 - DNA, 120 bp, Artificial Sequence
  ENSG00000140451_14 (sequence is synthesized)
cccctccagctggcctgggcgatgtccatccacaagagccaaggcatgaccctggattgtgtggagatttctctgggccgtgtgtttgccagtggccaggcctatgtggccctttctcgg

SEQ ID NO: 360147 - DNA, 120 bp, Artificial Sequence
  ENSG00000140451_15 (sequence is synthesized)
gcccgcagcctgcagggcctacgtgtgctggactttgaccccatggcggttcgctgtgacccccgtgtgctgcacttctatgccaccctgcggcggggcaggagcctcagtctggagtcc

SEQ ID NO: 360148 - DNA, 120 bp, Artificial Sequence
  ENSG00000140451_16 (sequence is synthesized)
ccagatgatgatgaggcagcctcagaccaggagaacatggacccaatcctctgagcctcacccacaaagagaagacaaagggtggcctgtggcctccccgtcctcctgctccctagtggc

SEQ ID NO: 360149 - DNA, 120 bp, Artificial Sequence
  ENSG00000140451_17 (sequence is synthesized)
ccagggccccagggaataactggagtaggcaggcagtgtccccttctgtattttttagggactctcagcctcctggcagggttaaagggagagtactttaaacccatataccagctgtgc

SEQ ID NO: 360150 - DNA, 120 bp, Artificial Sequence
  ENSG00000140451_18 (sequence is synthesized)
ttcagtttctctcactttgccctgggtaagctgctgtagggtcagaagtaaccctttctgtgccagttgagaatgagcctgtgtggtagctgatgtcagaggacaaagctctctgcaagg

SEQ ID NO: 360151 - DNA, 120 bp, Artificial Sequence
  ENSG00000140451_19 (sequence is synthesized)
gctggacacagagctgcagagtcctgaacatccctcctttcaggctgcagaagggagaggcaatgaagacaggtgctccggaagcagcatcagggctcttggaggggactggtggggact

SEQ ID NO: 360152 - DNA, 120 bp, Artificial Sequence
  ENSG00000140451_20 (sequence is synthesized)
caggctgggtgcagcctccaaacagagaacggaacttaggtgtgtctctacagctaggcccagcctagcccagcccagaacaaacacccttcagagcctaaccaaagaacataagctgca

SEQ ID NO: 360153 - DNA, 120 bp, Artificial Sequence
  ENSG00000140451_21 (sequence is synthesized)
aaatgtgcacccatattttaagctgctttttcaggggataaatagtgtttggggacattgaaatggatgttctcaggttgtatttatttcggacaaataaactagagaattgtgtaaaaa

SEQ ID NO: 360154 - DNA, 120 bp, Artificial Sequence
  ENSG00000140451_22 (sequence is synthesized)
ggagcttagccacaggccggctacgatctgcttgttcatctgagtgtcggcacaagtgagtgtctgcccgaacccagagaccagcagaggcggtgacgatgctctcgggcatagaggcgg

SEQ ID NO: 360155 - DNA, 120 bp, Artificial Sequence
  ENSG00000140451_23 (sequence is synthesized)
ggcagcctgccacatcgggggcaccaccctccatgcctttgcaggtaagtaggaacccctagggcttgagctaagagcaagcccagcttctgggaagggagagaggggaggtctgcataa

SEQ ID NO: 360156 - DNA, 120 bp, Artificial Sequence
  ENSG00000140451_24 (sequence is synthesized)
agcttctgggaagggagagaggggaggtctgcataaagagggagttttgggggctgggcgccgtggctcactcttgtaatcccaaaactttaggaggccaaggtgggaggatcgcttgag

SEQ ID NO: 360157 - DNA, 74 bp, Artificial Sequence
  ENSG00000140451_25 (sequence is synthesized)
acaaaactggaggttgaggtgggaggatcgcttgagcccatgaggcccaggttacagtgagccaagatcgtgcc

SEQ ID NO: 360158 - DNA, 120 bp, Artificial Sequence
  ENSG00000140451_26 (sequence is synthesized)
cagctgtcttctgtagtatactttataaacaggagacagtcctgattcctccctcaatgttgggggtgggcagaagattttccttagggcacccaaggggaaaatgcaggcacagtgtat

SEQ ID NO: 360159 - DNA, 120 bp, Artificial Sequence
  ENSG00000140451_27 (sequence is synthesized)
ctgagaggggtggcaggacctagaggccatccctcaagatctgtggtccacagatgtacctataaccaagccaatcattttcaaagccctgtgatagaggttgccttattgatcccttac

SEQ ID NO: 360160 - DNA, 120 bp, Artificial Sequence
  ENSG00000140451_28 (sequence is synthesized)
gaaaaattgggaccgaggaagataaggcaacttgccccaggggtcacaggcagccagtggcagagctaaggattgggattcagtgtccccatgacagctccctgccctcagcctctgaga

SEQ ID NO: 360161 - DNA, 120 bp, Artificial Sequence
  ENSG00000140451_29 (sequence is synthesized)
tcctgttagccagctccttcaactaaagctgggggcccaggtgagtgggaagcagggcctagcccctgggagcttgggctgtcccgcatgggccttgctgatccctacccctctgcccag

SEQ ID NO: 360162 - DNA, 120 bp, Artificial Sequence
  ENSG00000140451_30 (sequence is synthesized)
gtagatgtgccattctttaagatggcagagacctagagacccaagtttgaggggaagccggtgtgggtatttgatacccatctgacatctcagtatgacaggggtgtgggaattgtgcct

SEQ ID NO: 360163 - DNA, 120 bp, Artificial Sequence
  ENSG00000140451_31 (sequence is synthesized)
tgtgggaattgtgcctgtggttgttatagtgtaatccctgagatggagtaaatcaaaacaggaaatgggacctggctacattaaaagagaaagcagaggccgggcatggtggctcacgcc

SEQ ID NO: 360164 - DNA, 120 bp, Artificial Sequence
  ENSG00000140451_32 (sequence is synthesized)
gtctgctctgctccttgacccacccccaccctgcccccaccagtccaagagctggaagaggtgtgtgccagtgaccctggagctgaccaaggtgtggaggcaggcagaccagaccttcat

SEQ ID NO: 360165 - DNA, 120 bp, Artificial Sequence
  ENSG00000140451_33 (sequence is synthesized)
ggagagggcatgaccctggattgtgtggagatttctctgggccgtgtgtttgccagtggccaggcctatgtggccctttctcgggcccgcagcctgcagggcctacgtgtgctggacttt

SEQ ID NO: 360166 - DNA, 120 bp, Artificial Sequence
  ENSG00000140455_0 (sequence is synthesized)
ctttctttgacgcaagggctcgagacgcagccgccgtcggccgagcgcccggctagaagcgacaccagacggagcctccggagttcctccgcccccacctcgccgggtcctggagccgca

SEQ ID NO: 360167 - DNA, 120 bp, Artificial Sequence
  ENSG00000140455_1 (sequence is synthesized)
gtcctcccagctgccctcctcgtggccatggagtgtccacacctgagctccagcgtctgcattgctccggactcagccaagttccccaacggctccccgtcgtcctggtgctgcagcgtg

SEQ ID NO: 360168 - DNA, 120 bp, Artificial Sequence
  ENSG00000140455_2 (sequence is synthesized)
tgccggtccaacaaaagcccttgggtctgtttgacttgttcaagtgtccactgtggaaggtatgtgaatggccatgcaaaaaaacattatgaagatgcacaagtacctttaaccaaccat

SEQ ID NO: 360169 - DNA, 120 bp, Artificial Sequence
  ENSG00000140455_3 (sequence is synthesized)
aagaaatcagaaaagcaagataaagttcagcacacagtatgtatggattgcagtagctacagtacatactgttatcgctgtgatgattttgtggttaatgacaccaagctgggactggta

SEQ ID NO: 360170 - DNA, 120 bp, Artificial Sequence
  ENSG00000140455_4 (sequence is synthesized)
cagaaagtcagagaacacttacagaacttggaaaactcagctttcacagctgacaggcataagaaaagaaaacttttggaaaactcaacactaaacagcaagttattaaaagtaaatgga

SEQ ID NO: 360171 - DNA, 120 bp, Artificial Sequence
  ENSG00000140455_5 (sequence is synthesized)
agcaccactgccatttgtgccacaggccttcggaatttggggaacacatgtttcatgaatgccatccttcagtcactcagtaacattgagcagttttgctgttatttcaaagaactgccc

SEQ ID NO: 360172 - DNA, 120 bp, Artificial Sequence
  ENSG00000140455_6 (sequence is synthesized)
gccgtggagttaaggaatgggaaaacagcaggaaggcggacataccacaccaggagccaaggggataacaatgtgtctttggtagaagagtttagaaagacactctgtgctttatggcaa

SEQ ID NO: 360173 - DNA, 120 bp, Artificial Sequence
  ENSG00000140455_7 (sequence is synthesized)
ggcagccagactgcatttagcccagagtccttattttatgttgtttggaagattatgccaaactttaggggctatcaacagcaggacgcccatgaattcatgcgctaccttttggaccac

SEQ ID NO: 360174 - DNA, 120 bp, Artificial Sequence
  ENSG00000140455_8 (sequence is synthesized)
ctacacttggaacttcagggcggtttcaacggtgtttcccgctcagcaattctgcaggagaattctactctgtctgcaagtaacaagtgttgcataaatggagcatctactgttgtcacg

SEQ ID NO: 360175 - DNA, 120 bp, Artificial Sequence
  ENSG00000140455_9 (sequence is synthesized)
gctatattcggaggcattctccaaaatgaggttaactgcctcatatgtgggacagaatctagaaagtttgatccattcctagacctttcattagatattccaagtcagttcagaagtaag

SEQ ID NO: 360176 - DNA, 120 bp, Artificial Sequence
  ENSG00000140455_10 (sequence is synthesized)
cgctctaagaatcaagaaaatggaccagtttgttcgttacgagattgtcttcgcagttttaccgacttagaagaacttgatgagacagagttatatatgtgccataaatgcaaaaagaaa

SEQ ID NO: 360177 - DNA, 120 bp, Artificial Sequence
  ENSG00000140455_11 (sequence is synthesized)
caaaagtccacaaaaaagttttggattcaaaaactacccaaggtgctatgcttacatttgaaaagatttcattggacagcatatttaagaaataaagttgatacatacgtagaatttcca

SEQ ID NO: 360178 - DNA, 120 bp, Artificial Sequence
  ENSG00000140455_12 (sequence is synthesized)
ctgagaggcctagacatgaaatgctacttactagagcctgagaacagtggcccggagagctgcctgtatgacctcgccgctgtggtggtgcaccatggttccggggttggttctggacat

SEQ ID NO: 360179 - DNA, 120 bp, Artificial Sequence
  ENSG00000140455_13 (sequence is synthesized)
tacacagcatacgcaactcacgaaggccgctggttccacttcaatgacagtactgtaacactgactgacgaggagactgtggtgaaggcgaaggcctacatccttttctacgtggaacac

SEQ ID NO: 360180 - DNA, 120 bp, Artificial Sequence
  ENSG00000140455_14 (sequence is synthesized)
caggccaaagctggatcggataaactttaatacctcctccaaatcatcattcaccaaccataccagagaaacatttccagttttccacaaatacttgatacaagatttaatttcattatg

SEQ ID NO: 360181 - DNA, 120 bp, Artificial Sequence
  ENSG00000140455_15 (sequence is synthesized)
cacttttcaatttcctattttggatttagttttgtcaatggtagtgacttactgaacatgggcaccaactaattttgttgttgttctaccagaaaacctcagcagatgttttgatttgct

SEQ ID NO: 360182 - DNA, 120 bp, Artificial Sequence
  ENSG00000140455_16 (sequence is synthesized)
gctttagttgtaataattcaatttttataggtagttgtaagaacttagtcttatttgacttttttattttatgttaatgttttcagttctcactttgaggcacatttacatcaatgcttt

SEQ ID NO: 360183 - DNA, 120 bp, Artificial Sequence
  ENSG00000140455_17 (sequence is synthesized)
tgttcctctcacatgctgaaagcaagatgtgttccttattgtgaagagcgacacaactgcctgctgcctttccacagctataatggacatcaggttgactctaaatcaaggatcatgtgt

SEQ ID NO: 360184 - DNA, 120 bp, Artificial Sequence
  ENSG00000140455_18 (sequence is synthesized)
gcacaatacttgtggcccacaaaatttcacaatgactgctgaggaatcattctttttgcctgtaaaatataacaaagggcatcattaagtagaccaggtaattactgcttgtctctcaag

SEQ ID NO: 360185 - DNA, 120 bp, Artificial Sequence
  ENSG00000140455_19 (sequence is synthesized)
gctgctgtctttatcagcactaactaaataaatttgttggttcagttgtacttgtcctgcaaatacaagaattactctctttgttggtttttttggttttggggcatacttgtttgcggg

SEQ ID NO: 360186 - DNA, 120 bp, Artificial Sequence
  ENSG00000140455_20 (sequence is synthesized)
gaggtaagatgggagtaaagaccaaatacatgtaatgtttaaaaaaaatgctgtgactcactgacatggtataggtgttaccagtgaggtaaagccatggcgtctgcctccttttgaatc

SEQ ID NO: 360187 - DNA, 120 bp, Artificial Sequence
  ENSG00000140455_21 (sequence is synthesized)
agtatctcattcccccttagttgtaccactggaagtcacgacatgtccattatagacttacttactgcttgtgtttggcatctgagtctgaggtgtgaccctctgggatttacttggatc

SEQ ID NO: 360188 - DNA, 120 bp, Artificial Sequence
  ENSG00000140455_22 (sequence is synthesized)
ctggcctatcctgattgataggacaagttgaaaatactgttggagtaagtaagtggagttttcgttttgttttttgggggtttttggagacaagagtctctctctgttgcccaggctgga

SEQ ID NO: 360189 - DNA, 70 bp, Artificial Sequence
  ENSG00000140455_23 (sequence is synthesized)
gctaattttttttttgtatttttagtaaagacgggggtttaccatgttggctagggtggtctcaacctcc

SEQ ID NO: 360190 - DNA, 120 bp, Artificial Sequence
  ENSG00000140455_24 (sequence is synthesized)
aaaaacagatttaactcaaagattcaaatttggaaccagaatcccatttaaagaaagcagttgtggtttctacaagtgttctaagacagtcctgtggtggttttttttttttcttttttt

SEQ ID NO: 360191 - DNA, 120 bp, Artificial Sequence
  ENSG00000140455_25 (sequence is synthesized)
tggttgggggcggtgggggttggtagacatagcctaccaattctccacaagggacaaaatgtatcttgtgttaagccaacgagactttctggcaattttttttttttttttttaatggag

SEQ ID NO: 360192 - DNA, 85 bp, Artificial Sequence
  ENSG00000140455_26 (sequence is synthesized)
gagactttctggcaattttttttttttttttttaatggagtcttactctgtccctcaggctggagtgcagtgtggcatgatcaca

SEQ ID NO: 360193 - DNA, 80 bp, Artificial Sequence
  ENSG00000140455_27 (sequence is synthesized)
tcctcccacttcagcctcgaagtagctggcaccaccacacccagctaatttttaatatttttacactcctgggctcaagt

SEQ ID NO: 360194 - DNA, 120 bp, Artificial Sequence
  ENSG00000140455_28 (sequence is synthesized)
gcatgagccaccacgcccagcctgttctattaaaaacatcttgacctttttttttttttaagtttatgatataaaaacagtctggtggctttccctcaggttggatatctgaagttgtgg

SEQ ID NO: 360195 - DNA, 120 bp, Artificial Sequence
  ENSG00000140455_29 (sequence is synthesized)
gagcagatgtagctccatttccattttaatattaactggataaatcccacatcttcccagaacacatctgctaaacactttaacatgacaaggagcaaattacaattatgtgtaaactta

SEQ ID NO: 360196 - DNA, 120 bp, Artificial Sequence
  ENSG00000140455_30 (sequence is synthesized)
tatcatccagtacaatggcccctagccacatgtgactgaaatttaaattagaaactcagtgccttcagtcacactagccacatttcaagtgctcagcacccacatacggcgtaggacaat

SEQ ID NO: 360197 - DNA, 120 bp, Artificial Sequence
  ENSG00000140455_31 (sequence is synthesized)
gctggtctaaattttcactccaaagaataaaactttgccatcatgtttaggtcttacaactttgagtcctaaaagataatagggagatgtgtgcttaaattaatttacaatgctaaatta

SEQ ID NO: 360198 - DNA, 120 bp, Artificial Sequence
  ENSG00000140455_32 (sequence is synthesized)
tattaggttaaactgtatgaaaccctgctatttgatgagttctgatctacaaaaatgacagctccacctgatctgatgtatcacacattaacatcacatctaattcaacctgaaatgtga

SEQ ID NO: 360199 - DNA, 120 bp, Artificial Sequence
  ENSG00000140455_33 (sequence is synthesized)
gtctcctttgatcttgcaaagtatctcctatgaatccgggctcttttgcttagaaggtagacagctgtaacctctaacattgatacttcgatcttcagtctctctgaatgggcagctgtt

SEQ ID NO: 360200 - DNA, 120 bp, Artificial Sequence
  ENSG00000140455_34 (sequence is synthesized)
aaacagtaaaggcctgggcagagttgatggtgaaaaaaagctgtatttttataccaaatggaacttcagcaacacgttggactactttgtcgggcagagtggtcttcagacaggtgatgc

SEQ ID NO: 360201 - DNA, 120 bp, Artificial Sequence
  ENSG00000140455_35 (sequence is synthesized)
tgttggcttaagagatgaacacgtcttctctctgaatttgtttttattggttggttttacttgaacagaaacgtttgaatggtgtgaagattctttagaaaagtgattggatccatctca

SEQ ID NO: 360202 - DNA, 120 bp, Artificial Sequence
  ENSG00000140455_36 (sequence is synthesized)
attgtgcacttgaacagcagtgatgtaaatgtgcttatttgtgttttcatttttaactgtgcagccttaccacacctattttgaaagctgatcttttgtcctcttcagggcttttccctt

SEQ ID NO: 360203 - DNA, 120 bp, Artificial Sequence
  ENSG00000140455_37 (sequence is synthesized)
gtgccatgttgtctccagcaatatatgtggcttctggctcagagcttctgctgaggcagggcctcgcgctgagtcacatggctccttggaacaagaaaactttctcagaagtccccacac

SEQ ID NO: 360204 - DNA, 120 bp, Artificial Sequence
  ENSG00000140455_38 (sequence is synthesized)
gggtgggtgacagaaacagtttgtggcaacacaaatctctctccatggtggagaaacctttgcttatccactgtattctactcagtgtatagtgatgacagatgtactagaattaaacca

SEQ ID NO: 360205 - DNA, 120 bp, Artificial Sequence
  ENSG00000140455_39 (sequence is synthesized)
gtcaagtgtactggcccggggtgagtgttaaatgtgtatctcgcctgtggaacctactcagcagcttggtttctggggttgggggcatatttatttcttaaagccaaacctctccttcat

SEQ ID NO: 360206 - DNA, 120 bp, Artificial Sequence
  ENSG00000140455_40 (sequence is synthesized)
tggtttagtgtacataagtctatttagatacacttatcccactttaatctccaccagcccctaaactctctcctgtaccctctgttgctgaagtggcctcttcacctgggccctggaaaa

SEQ ID NO: 360207 - DNA, 120 bp, Artificial Sequence
  ENSG00000140455_41 (sequence is synthesized)
gccgatggaaaaagtctgttcctgcagccaaggcctgggtcccaggtgactaggagtagccataggaaggtgaggaaggagaagtgggcatgtggtgtcatctgtagtccaaggtctctg

SEQ ID NO: 360208 - DNA, 120 bp, Artificial Sequence
  ENSG00000140455_42 (sequence is synthesized)
cgtctcgtcagtgggtgcagtgccttccccctcaggtgtgagcgtgatggactctagactgccttccatgagtgttggtcatgctatgatgtcatcatttgccattaaaacccagtttgt

SEQ ID NO: 360209 - DNA, 120 bp, Artificial Sequence
  ENSG00000140455_43 (sequence is synthesized)
atgatgccaagaggattaattgtgcaagtgactgattcatttaaattgtaatcacatcccttttctgcttcaccaacctgaactgtttttaaaaatatcattaaaagtctgttctctttc

SEQ ID NO: 360210 - DNA, 120 bp, Artificial Sequence
  ENSG00000140455_44 (sequence is synthesized)
ctttgtgtgccttcggttctcatctggttttcaggagagttaaatgtttaagtggttttaggaggaagacttgagtctgagacatgttttagaggctggggctcttcccaccctctccat

SEQ ID NO: 360211 - DNA, 120 bp, Artificial Sequence
  ENSG00000140455_45 (sequence is synthesized)
ggcccagcatatgtgatagcttctaccttctggagaatggctctagctcaggagaggatagagcttcttcatctcctccatgcaaaggagccctcctgccatcttgaagagcttgaggct

SEQ ID NO: 360212 - DNA, 120 bp, Artificial Sequence
  ENSG00000140455_46 (sequence is synthesized)
gtgaaaggagcctaccttcaaatgtttatctggtgtgactgtattatgccctcagagagtactgtatgttgcccaggctggcctcgaactctaggctcaagtgattcttctgcctcagcc

SEQ ID NO: 360213 - DNA, 120 bp, Artificial Sequence
  ENSG00000140455_47 (sequence is synthesized)
tgggtctgtttgacttgttcaagtgtccactgtggaaggatttggggaacctgaaaatactttgtacagataacttttttttaaaaaagaagaaaagtagaagcacttaaattctgcagt

SEQ ID NO: 360214 - DNA, 120 bp, Artificial Sequence
  ENSG00000140455_48 (sequence is synthesized)
ttgacagaaaactacaattgaaactttaaattcatcaggaaaccattttatcagaattatccagatgaattatcattaatagtaaaaccaacacaattgatcatcaccagatgtcaggca

SEQ ID NO: 360215 - DNA, 120 bp, Artificial Sequence
  ENSG00000140455_49 (sequence is synthesized)
tgatgccaggtgctctacacattatttctcttccttataatagttcttcaaagtaggtattattttttgtctccagtttgcaattgagaaaggttaacttttctaaggtcgtatagctaa

SEQ ID NO: 360216 - DNA, 120 bp, Artificial Sequence
  ENSG00000140455_50 (sequence is synthesized)
taaagctgagattttaaacctgggtcttttttctacagtacattgcctctacaaaaggcatcttgttttaatgctgccaaaatcaatttgtttagattgtcttcgcagttttaccgactt

SEQ ID NO: 360217 - DNA, 120 bp, Artificial Sequence
  ENSG00000140455_51 (sequence is synthesized)
atttttggagaatgggggaagaatgtaaagatggagatgaccgaatgaggaatattgttttgccattaaataagtgaatagtgcgaaatggaaaataccgagggttatcgctgtgatgat

SEQ ID NO: 360218 - DNA, 120 bp, Artificial Sequence
  ENSG00000140455_52 (sequence is synthesized)
gtagctacagtacatactgatgagtgaagaatggtttgctttgggaatattttcttagttcttcaaggacatgatgtggaagtcatgacttgagtaacttcaatagcactaacaacagga

SEQ ID NO: 360219 - DNA, 120 bp, Artificial Sequence
  ENSG00000140455_53 (sequence is synthesized)
tatttttctctaggattttcagtaaaagctaaaccccttacagaatgaatgcataaggtatgcatggaagaatgattgatagggcagctaaaatgttatttactgaactgatagtagtat

SEQ ID NO: 360220 - DNA, 120 bp, Artificial Sequence
  ENSG00000140455_54 (sequence is synthesized)
gatgtaggacttgggaggctcctgagaacagcatcactctatttgcaagtttggttgtaatgtctgagacttgcttcaggaattgtaatgtcaaaatataatacatcctttcccaggaac

SEQ ID NO: 360221 - DNA, 120 bp, Artificial Sequence
  ENSG00000140455_55 (sequence is synthesized)
aaatgcattcacaaagcacggatttgcaacttcagcattcctacatagccatggaatttataacttaatcacaggaaaatggggagaaattgggaaataacatgatgcaattggtatatt

SEQ ID NO: 360222 - DNA, 120 bp, Artificial Sequence
  ENSG00000140455_56 (sequence is synthesized)
gggttgggaagtgtcaacttaaagctttaggcttaatgctacatgaaaagactcggtgctttttatttcattttccatgtattaggcaccactaaaaagaatgtaacacatgtagcagct

SEQ ID NO: 360223 - DNA, 120 bp, Artificial Sequence
  ENSG00000140455_57 (sequence is synthesized)
tatttcattttcaaaggaggaattgaagagcttttgagtaaaaaacgtgaaaagaagctcatgttcattgcctacgtggcttttaaaaaagactcttgaaaaacattccattgtgaattc

SEQ ID NO: 360224 - DNA, 120 bp, Artificial Sequence
  ENSG00000140455_58 (sequence is synthesized)
accagcagtaactgcctgcagagccatgtgatcatcttggcaacagccagaccttttagtgatttcattactgtggtttcctcaagctctttacacacattgattaatattttccttgca

SEQ ID NO: 360225 - DNA, 120 bp, Artificial Sequence
  ENSG00000140459_0 (sequence is synthesized)
acagtcatcctagcagtccccgctgaagtggagcaggtacagtcacagctgtggggacagcatgctggccaagggtcttcccccacgctcagtcctggtcaaaggctgccagacctttct

SEQ ID NO: 360226 - DNA, 120 bp, Artificial Sequence
  ENSG00000140459_1 (sequence is synthesized)
gagtgcccccagggaggggctggggcgtctcagggtgcccactggcgagggagctggcatctccacccgcagtcctcgccccttcaatgagatcccctctcctggtgacaatggctggct

SEQ ID NO: 360227 - DNA, 120 bp, Artificial Sequence
  ENSG00000140459_2 (sequence is synthesized)
aaacctgtaccatttctggagggagacgggcacacacaaagtccaccttcaccatgtccagaatttccagaagtatggcccgatttacagggagaagctcggcaacgtggagtcggttta

SEQ ID NO: 360228 - DNA, 120 bp, Artificial Sequence
  ENSG00000140459_3 (sequence is synthesized)
tgtcatcgaccctgaagatgtggcccttctctttaagtccgagggccccaacccagaacgattcctcatcccgccctgggtcgcctatcaccagtattaccagagacccataggagtcct

SEQ ID NO: 360229 - DNA, 120 bp, Artificial Sequence
  ENSG00000140459_4 (sequence is synthesized)
gttgaagaagtcggcagcctggaagaaagaccgggtggccctgaaccaggaggtgatggctccagaggccaccaagaactttttgcccctgttggatgcagtgtctcgggacttcgtcag

SEQ ID NO: 360230 - DNA, 120 bp, Artificial Sequence
  ENSG00000140459_5 (sequence is synthesized)
tgtcctgcacaggcgcatcaagaaggcgggctccggaaattactcgggggacatcagtgatgacctgttccgctttgcctttgagtccatcactaacgtcatttttggggagcgccaggg

SEQ ID NO: 360231 - DNA, 120 bp, Artificial Sequence
  ENSG00000140459_6 (sequence is synthesized)
gatgctggaggaagtagtgaaccccgaggcccagcgattcattgatgccatctaccagatgttccacaccagcgtccccatgctcaaccttcccccagacctgttccgtctgttcaggac

SEQ ID NO: 360232 - DNA, 120 bp, Artificial Sequence
  ENSG00000140459_7 (sequence is synthesized)
attttcagtaaagctgacatatacacccagaacttctactgggaattgagacagaaaggaagtgttcaccacgattaccgtggcatcctctacagactcctgggagacagcaagatgtcc

SEQ ID NO: 360233 - DNA, 120 bp, Artificial Sequence
  ENSG00000140459_8 (sequence is synthesized)
ttcgaggacatcaaggccaacgtcacagagatgctggcaggaggggtggacacgacgtccatgaccctgcagtggcacttgtatgagatggcacgcaacctgaaggtgcaggatatgctg

SEQ ID NO: 360234 - DNA, 120 bp, Artificial Sequence
  ENSG00000140459_9 (sequence is synthesized)
cgggcagaggtcttggctgcgcggcaccaggcccagggagacatggccacgatgctacagctggtccccctcctcaaagccagcatcaaggagacactaagacttcaccccatctccgtg

SEQ ID NO: 360235 - DNA, 120 bp, Artificial Sequence
  ENSG00000140459_10 (sequence is synthesized)
accctgcagagatatcttgtaaatgacttggttcttcgagattacatgattcctgccaagacactggtgcaagtggccatctatgctctgggccgagagcccaccttcttcttcgacccg

SEQ ID NO: 360236 - DNA, 120 bp, Artificial Sequence
  ENSG00000140459_11 (sequence is synthesized)
gaaaattttgacccaacccgatggctgagcaaagacaagaacatcacctacttccggaacttgggctttggctggggtgtgcggcagtgtctgggacggcggatcgctgagctagagatg

SEQ ID NO: 360237 - DNA, 120 bp, Artificial Sequence
  ENSG00000140459_12 (sequence is synthesized)
accatcttcctcatcaatatgctggagaacttcagagttgaaatccaacacctcagcgatgtgggcaccacattcaacctcattctgatgcctgaaaagcccatctccttcaccttctgg

SEQ ID NO: 360238 - DNA, 120 bp, Artificial Sequence
  ENSG00000140459_13 (sequence is synthesized)
ccctttaaccaggaagcaacccagcagtgatcagagaggatggcctgcagccacatgggaggaaggcccaggggtggggcccatggggtctctgcatcttcagtcgtctgtcccaagtcc

SEQ ID NO: 360239 - DNA, 120 bp, Artificial Sequence
  ENSG00000140459_14 (sequence is synthesized)
tgctcctttctgcccagcctgctcagcaggttgaatgggttctcagtggtcaccttcctcagctcagctgggccactcctcttcacccaccccatggagacaataaacagctgaaccatg

SEQ ID NO: 360240 - DNA, 120 bp, Artificial Sequence
  ENSG00000140459_15 (sequence is synthesized)
gacagacccagcattcctcccagcgcacgccgccgcccgggccgcgctattccgaaattgggtccgccctagcgtggcccccggcctgctcctgcgctcttcgcgggtcgctcacctccg

SEQ ID NO: 360241 - DNA, 120 bp, Artificial Sequence
  ENSG00000140459_16 (sequence is synthesized)
cctcccctcgacacagcccgagcccatccgccccccgggtcgacccgcgtttacctcagggcgaggtccaggcgctcggccccgcggaggcggcggcggccccaccgcaggtcctaggtc

SEQ ID NO: 360242 - DNA, 120 bp, Artificial Sequence
  ENSG00000140459_17 (sequence is synthesized)
ccagtcactctgccgccaagttccccaacacggactccgtgcgctttgaggtgttacgggggcgctggagcactggcttcgctggccctgccaggaggcggcggcgaagcagggagcgac

SEQ ID NO: 360243 - DNA, 120 bp, Artificial Sequence
  ENSG00000140459_18 (sequence is synthesized)
ccggtatgcgtttctctgcccggcctgcggccctgcagcatccactcctcgcctctgctggcctctgccctcgctcgctgcgttcacccgagctcacccgagcccaccggagccgacagt

SEQ ID NO: 360244 - DNA, 120 bp, Artificial Sequence
  ENSG00000140459_19 (sequence is synthesized)
gcaggaacccttataaccaaatccttcctctccagtgctcagagcatgaaagttttctgctgtttttggaatcttgtctgcaaacagctcaaaggagacgtgacccaagggctcgccgtg

SEQ ID NO: 360245 - DNA, 120 bp, Artificial Sequence
  ENSG00000140459_20 (sequence is synthesized)
aggagacgtgacccaagggctcgccgtgactgcgatgtcaaagaacacggtggggttgaccatggctgatagtacagggctcctggtggcagtgacggcatctgcaaagcgacaggttat

SEQ ID NO: 360246 - DNA, 120 bp, Artificial Sequence
  ENSG00000140459_21 (sequence is synthesized)
aaactattttaaacaatttcagtattagctggtttaacatgaaagtcttttcttgatatgtaattaattttttgttgttgttgttttacgtgggttagtagctttatacaagaaaatttg

SEQ ID NO: 360247 - DNA, 120 bp, Artificial Sequence
  ENSG00000140459_22 (sequence is synthesized)
gatgtcagtgctggggcgcatctacctccagttacttgctctcgctctctcccacagttctctgctgccccctctttcgggctcaaccactcatcacccactgatgcccctggccatcca

SEQ ID NO: 360248 - DNA, 120 bp, Artificial Sequence
  ENSG00000140459_23 (sequence is synthesized)
gtctccattttacagaagaggaaactgagactcagaggggttaagggcctcgactcaggtcccacagtcagcaagttgtggaactgtgaggcagctgtgctgagcctgtatccatagctc

SEQ ID NO: 360249 - DNA, 120 bp, Artificial Sequence
  ENSG00000140463_0 (sequence is synthesized)
gcagcggtgggctgagctaaaatggctgaggagagagtcgcgacgagaactcaatttcctgtatctactgagtctcaaaaaccccggcagaaaaaagctccagagtttcctattttggag

SEQ ID NO: 360250 - DNA, 120 bp, Artificial Sequence
  ENSG00000140463_1 (sequence is synthesized)
aagcagaactggttgattcatcttcattatatccggaaagattatgaagcctgcaaggctgttatcaaagaacagcttcaagagactcagggattgtgtgaatatgctatctatgtccaa

SEQ ID NO: 360251 - DNA, 120 bp, Artificial Sequence
  ENSG00000140463_2 (sequence is synthesized)
gcattgatatttcgcctagaaggaaatatccaagaatccctagaactcttccagacatgtgcagttcttagtcctcagagtgctgataacctcaagcaggtggccagatctttatttctt

SEQ ID NO: 360252 - DNA, 120 bp, Artificial Sequence
  ENSG00000140463_3 (sequence is synthesized)
ttgggaaaacataaagctgccattgaagtatataatgaagcagctaaactcaaccagaaagattgggagatcagccataacctaggagtttgctacatatacctgaagcagttcaacaag

SEQ ID NO: 360253 - DNA, 120 bp, Artificial Sequence
  ENSG00000140463_4 (sequence is synthesized)
gcacaagaccagttgcacaatgccctgaatcttaataggcacgatctgacttatataatgctggggaagatccacttgctggagggagacttggacaaggccattgaagtctacaagaaa

SEQ ID NO: 360254 - DNA, 120 bp, Artificial Sequence
  ENSG00000140463_5 (sequence is synthesized)
gcagtggagttctcaccagaaaatacagagcttcttacaactttaggattactctacttacagctcggcatttaccagaaggcatttgaacatcttggcaatgcactgacttatgaccct

SEQ ID NO: 360255 - DNA, 120 bp, Artificial Sequence
  ENSG00000140463_6 (sequence is synthesized)
accaactacaaggccatcttggcagcaggcagcatgatgcagacccacggggactttgatgttgccctcaccaaatacagagttgtggcttgtgctgttccagaaagtcctccactctgg

SEQ ID NO: 360256 - DNA, 120 bp, Artificial Sequence
  ENSG00000140463_7 (sequence is synthesized)
aataacattggaatgtgtttctttggcaagaagaaatatgtggcggccatcagctgcctgaaacgagccaactacttggcaccctttgattggaagattctgtataatttgggccttgtc

SEQ ID NO: 360257 - DNA, 120 bp, Artificial Sequence
  ENSG00000140463_8 (sequence is synthesized)
catttgaccatgcagcagtatgcatcagcttttcattttctcagtgcggccatcaacttccagccaaagatgggggagctctacatgctcttggcagtggctctgaccaatctggaagat

SEQ ID NO: 360258 - DNA, 120 bp, Artificial Sequence
  ENSG00000140463_9 (sequence is synthesized)
atagaaaatgccaagagagcctacgcagaagcagtccacctggataagtgtaaccctttagtaaacctgaactatgctgtgctgctgtacaaccagggcgagaagaagaacgccctggcc

SEQ ID NO: 360259 - DNA, 120 bp, Artificial Sequence
  ENSG00000140463_10 (sequence is synthesized)
agatggtggagatggctcagaagttgggagctgctctccaggttggggaggcactggtctggaccaaaccagttaaagatcccaaatcaaagcaccagaccacttcaaccagcaaacctg

SEQ ID NO: 360260 - DNA, 120 bp, Artificial Sequence
  ENSG00000140463_11 (sequence is synthesized)
ccagtttccagcagcctctgggctctaatcaagctctaggacaggcaatgtcttcagcagctgcatacaggacgctcccctcaggtgctggaggaacatcccagttcacaaagcccccat

SEQ ID NO: 360261 - DNA, 120 bp, Artificial Sequence
  ENSG00000140463_12 (sequence is synthesized)
ctcttcctctggagccagagcctgcggtggaatcaagtccaactgaaacatcagaacaaataagagagaaataagaatagaatgaatgaccccaaaatagggttttcttgggcgaggatg

SEQ ID NO: 360262 - DNA, 120 bp, Artificial Sequence
  ENSG00000140463_13 (sequence is synthesized)
tgctggattaggaaaggtgacatgacacaggcagagcagagtggcacccaccacagaatacagtgtgtgttattacgaggagccagcagttgagcctaaggtccttctacctacctggta

SEQ ID NO: 360263 - DNA, 120 bp, Artificial Sequence
  ENSG00000140463_14 (sequence is synthesized)
ttggcatttgaggtcggaaaccctctactgccccataagccaggaaaagtgaaaagagaacacagttcctttaagaactggcagcaaggcttgaggccttatgtatgtagctgagtcagc

SEQ ID NO: 360264 - DNA, 120 bp, Artificial Sequence
  ENSG00000140463_15 (sequence is synthesized)
aaggtacatgatgctgtctgctttcaaaaggacttttctctcctagctgactgactccttccttagttcaaggaacagctgagacagacctctgctgagtagctctgtgatgacaaagcc

SEQ ID NO: 360265 - DNA, 120 bp, Artificial Sequence
  ENSG00000140463_16 (sequence is synthesized)
ttggtttaactgaggtgatcctcaggttgtgaggtttattagtccccaaggcaaacacaaatattagattaataatccaactttaatagtatacatttaaaagaaaaaaaacaaaagccc

SEQ ID NO: 360266 - DNA, 120 bp, Artificial Sequence
  ENSG00000140463_17 (sequence is synthesized)
tggaagttgaggccaagcctgctgagtattgcagctgcatttgcccaaagggaatccagaacaagtccctccctgtattttgttcttgagaggggtcagtctagaagctagatcctatca

SEQ ID NO: 360267 - DNA, 120 bp, Artificial Sequence
  ENSG00000140463_18 (sequence is synthesized)
ggatgaggagcagcagcccagggcttgtctggatcagcaccaacgattttaaagaaaaaaggaagagtttcttagatgagtaattgttattgaagatagtcagtgataaccactgaccag

SEQ ID NO: 360268 - DNA, 120 bp, Artificial Sequence
  ENSG00000140463_19 (sequence is synthesized)
atgctatcaatacactatgtgtcctttttagaataaagattacatatcatcattcctttggggaaaattgttattcaggtataaaaacaagagatcataataaaaacctaaaagaaccta

SEQ ID NO: 360269 - DNA, 120 bp, Artificial Sequence
  ENSG00000140463_20 (sequence is synthesized)
cttccaggatttactccgctggcatcttctagacagcagggtagagatccctttttcaaccctggcctaggtagtctctgttgagggctgagatgccagatttggtcccaataccagctt

SEQ ID NO: 360270 - DNA, 120 bp, Artificial Sequence
  ENSG00000140463_21 (sequence is synthesized)
tgcttgttaggccattaactccttgattcttctccacaggtctgcttagcacgtatgtacctaccttgctgcataatggagaaatctctacttaaccagttttgttttgtttttgtgtaa

SEQ ID NO: 360271 - DNA, 120 bp, Artificial Sequence
  ENSG00000140463_22 (sequence is synthesized)
tacagagctccatgaagacctggcaggtacaagccacatgtgtctgtcagcagagattatagctttcagtgaggttctcttcagactcatatgtccaacgtagtattggccacaagggga

SEQ ID NO: 360272 - DNA, 120 bp, Artificial Sequence
  ENSG00000140463_23 (sequence is synthesized)
ccctttttactgtcccgggaactggtcgcctggggcaagtctggatacttagcagcacaggtcctgttctaggactgtagtccctcttggggtgcgctggacggagaagggagacttttc

SEQ ID NO: 360273 - DNA, 120 bp, Artificial Sequence
  ENSG00000140463_24 (sequence is synthesized)
accagtaatggctcttaccgtagtgccatctttttctgtctcgggggtttggaagagaactcaatttcctgtatctactgagtctcaaaaaccccggcagaaaaaagagtttcctatttt

SEQ ID NO: 360274 - DNA, 120 bp, Artificial Sequence
  ENSG00000140463_25 (sequence is synthesized)
acagaactgctaatatagaggaacccgatgaattcaggatgacctagtcgctattttttgaggcatatatctataattggatctaatttcgagaactcaatttcctgtatctactgagtc

SEQ ID NO: 360275 - DNA, 120 bp, Artificial Sequence
  ENSG00000140463_26 (sequence is synthesized)
ctaaactcaaccagaaagattgggcattgctgcatgattttctagcagtttgctgacgagcagtctcttaccagtctgattcttgttgatgacccctagaagctttgggtatttttttcg

SEQ ID NO: 360276 - DNA, 120 bp, Artificial Sequence
  ENSG00000140463_27 (sequence is synthesized)
cctttctttgggtcagggcctttgagtagttctttatttttcccctccccttctctttgtgtcaattgaggattgtgtgtaaatgcaacagaaaatttgactaaacattggctttacaaa

SEQ ID NO: 360277 - DNA, 120 bp, Artificial Sequence
  ENSG00000140463_28 (sequence is synthesized)
gagctaaaatggctgaggagagagtcgcgacggtgagcgccgagattctctttagttgcccggccgcagggcaaggcaagctggcgggtggcttttgtcccatgcagcggttcctggaga

SEQ ID NO: 360278 - DNA, 120 bp, Artificial Sequence
  ENSG00000140463_29 (sequence is synthesized)
gcagcggtgggctgagctaaaatggctgaggagagagtcgcgacgagaactcaatttcctgtatctactgagtctcaaaaaccccggcagaaaaaagggggagttggagtgagcaatgat

SEQ ID NO: 360279 - DNA, 120 bp, Artificial Sequence
  ENSG00000140463_30 (sequence is synthesized)
gcagcggtgggctgagctaaaatggctgaggagagagtcgcgacgagaactcaatttcctgtatctactgagtctcaaaaaccccggcagaaaaaaggtgactttcttctggctttcagt

SEQ ID NO: 360280 - DNA, 120 bp, Artificial Sequence
  ENSG00000140463_31 (sequence is synthesized)
gcagtccacctggataagtatgcactttgttgagaatggtactggcgggggttggactctccaaagccatgaggtggtgccatacatagcattggtgctgcctgtgtcagcccagctgtt

SEQ ID NO: 360281 - DNA, 120 bp, Artificial Sequence
  ENSG00000140463_32 (sequence is synthesized)
cctctatggcattagtacatagcagacctcagtgtggagggatgtgtctcctaagtatgtggtggctcagcaggaattgacactctgagaaaatgtttccagtcctaaactgagtaatca

SEQ ID NO: 360282 - DNA, 120 bp, Artificial Sequence
  ENSG00000140464_0 (sequence is synthesized)
agctcaagggactcagccaactggctcacgcctccccttcagcttctcttcacgcactccaagatctaaaccgagaatcgaaactaagctggggtccatggagcctgcacccgcccgatc

SEQ ID NO: 360283 - DNA, 120 bp, Artificial Sequence
  ENSG00000140464_1 (sequence is synthesized)
tccgaggccccagcaggaccccgcccggccccaggagcccaccatgcctccccccgagaccccctctgaaggccgccagcccagccccagccccagccctacagagcgagcccccgcttc

SEQ ID NO: 360284 - DNA, 120 bp, Artificial Sequence
  ENSG00000140464_2 (sequence is synthesized)
ggaggaggagttccagtttctgcgctgccagcaatgccaggcggaagccaagtgcccgaagctgctgccttgtctgcacacgctgtgctcaggatgcctggaggcgtcgggcatgcagtg

SEQ ID NO: 360285 - DNA, 120 bp, Artificial Sequence
  ENSG00000140464_3 (sequence is synthesized)
ccccatctgccaggcgccctggcccctaggtgcagacacacccgccctggataacgtctttttcgagagtctgcagcggcgcctgtcggtgtaccggcagattgtggatgcgcaggctgt

SEQ ID NO: 360286 - DNA, 120 bp, Artificial Sequence
  ENSG00000140464_4 (sequence is synthesized)
gtgcacccgctgcaaagagtcggccgacttctggtgctttgagtgcgagcagctcctctgcgccaagtgcttcgaggcacaccagtggttcctcaagcacgaggcccggcccctagcaga

SEQ ID NO: 360287 - DNA, 120 bp, Artificial Sequence
  ENSG00000140464_5 (sequence is synthesized)
gctgcgcaaccagtcggtgcgtgagttcctggacggcacccgcaagaccaacaacatcttctgctccaaccccaaccaccgcacccctacgctgaccagcatctactgccgaggatgttc

SEQ ID NO: 360288 - DNA, 120 bp, Artificial Sequence
  ENSG00000140464_6 (sequence is synthesized)
caagccgctgtgctgctcgtgcgcgctccttgacagcagccacagtgagctcaagtgcgacatcagcgcagagatccagcagcgacaggaggagctggacgccatgacgcaggcgctgca

SEQ ID NO: 360289 - DNA, 120 bp, Artificial Sequence
  ENSG00000140464_7 (sequence is synthesized)
ggagcaggatagtgcctttggcgcggttcacgcgcagatgcacgcggccgtcggccagctgggccgcgcgcgtgccgagaccgaggagctgatccgcgagcgcgtgcgccaggtggtagc

SEQ ID NO: 360290 - DNA, 120 bp, Artificial Sequence
  ENSG00000140464_8 (sequence is synthesized)
tcacgtgcgggctcaggagcgcgagctgctggaggctgtggacgcgcggtaccagcgcgactacgaggagatggccagtcggctgggccgcctggatgctgtgctgcagcgcatccgcac

SEQ ID NO: 360291 - DNA, 120 bp, Artificial Sequence
  ENSG00000140464_9 (sequence is synthesized)
gggcagcgcgctggtgcagaggatgaagtgctacgcctcggaccaggaggtgctggacatgcacggtttcctgcgccaggcgctctgccgcctgcgccaggaggagccccagagcctgca

SEQ ID NO: 360292 - DNA, 120 bp, Artificial Sequence
  ENSG00000140464_10 (sequence is synthesized)
agctgccgtgcgcaccgatggcttcgacgagttcaaggtgcgcctgcaggacctcagctcttgcatcacccaggggaaagatgcagctgtatccaagaaagccagcccagaggctgccag

SEQ ID NO: 360293 - DNA, 120 bp, Artificial Sequence
  ENSG00000140464_11 (sequence is synthesized)
cactcccagggaccctattgacgttgacctgcccgaggaggcagagagagtgaaggcccaggttcaggccctggggctggctgaagcccagcctatggctgtggtacagtcagtgcccgg

SEQ ID NO: 360294 - DNA, 120 bp, Artificial Sequence
  ENSG00000140464_12 (sequence is synthesized)
ggcacaccccgtgccagtgtacgccttctccatcaaaggcccttcctatggagaggatgtctccaatacaacgacagcccagaagaggaagtgcagccagacccagtgccccaggaaggt

SEQ ID NO: 360295 - DNA, 120 bp, Artificial Sequence
  ENSG00000140464_13 (sequence is synthesized)
catcaagatggagtctgaggaggggaaggaggcaaggttggctcggagctccccggagcagcccaggcccagcacctccaaggcagtctcaccaccccacctggatggaccgcctagccc

SEQ ID NO: 360296 - DNA, 120 bp, Artificial Sequence
  ENSG00000140464_14 (sequence is synthesized)
caggagccccgtcataggaagtgaggtcttcctgcccaacagcaaccacgtggccagtggcgccggggaggcagaggaacgcgttgtggtgatcagcagctcggaagactcagatgccga

SEQ ID NO: 360297 - DNA, 120 bp, Artificial Sequence
  ENSG00000140464_15 (sequence is synthesized)
aaactcgtcctcccgagagctggatgacagcagcagtgagtccagtgacctccagctggaaggccccagcaccctcagggtcctggacgagaaccttgctgacccccaagcagaagacag

SEQ ID NO: 360298 - DNA, 120 bp, Artificial Sequence
  ENSG00000140464_16 (sequence is synthesized)
acctctggttttctttgacctcaagattgacaatgaaacccagaagattagccagctggctgcggtgaaccgggaaagcaagttccgcgtggtcatccagcctgaagccttcttcagcat

SEQ ID NO: 360299 - DNA, 120 bp, Artificial Sequence
  ENSG00000140464_17 (sequence is synthesized)
ctactccaaggccgtgtccctggaggtggggctgcagcacttcctcagctttctgagctccatgcgccgccctatcttggcctgctacaagctgtgggggcctggcctcccaaacttctt

SEQ ID NO: 360300 - DNA, 120 bp, Artificial Sequence
  ENSG00000140464_18 (sequence is synthesized)
ccgggccctggaggacattaacaggctgtgggaattccaggaggccatctcgggcttcctggctgccctgcctctcatccgggagcgtgtgcccggggccagcagcttcaaactcaagaa

SEQ ID NO: 360301 - DNA, 120 bp, Artificial Sequence
  ENSG00000140464_19 (sequence is synthesized)
cctggcccagacctacctggcgagaaacatgagcgagcgcagcgccatggctgccgtgctggccatgcgtgacctgtgccgcctcctcgaggtctccccgggcccccagctggcccagca

SEQ ID NO: 360302 - DNA, 120 bp, Artificial Sequence
  ENSG00000140464_20 (sequence is synthesized)
tgtctaccccttcagtagcctgcagtgctttgcctccctgcagcccctggtgcaggcagctgtgctgccccgggctgaggcccgcctcctggccctacacaacgtgagcttcatggagct

SEQ ID NO: 360303 - DNA, 120 bp, Artificial Sequence
  ENSG00000140464_21 (sequence is synthesized)
gctgagtgcacaccgccgtgaccggcaggggggcctgaagaagtacagccgctatctaagcctgcagaccaccacgttgccccctgcccagcctgctttcaacctgcaggctctgggcac

SEQ ID NO: 360304 - DNA, 120 bp, Artificial Sequence
  ENSG00000140464_22 (sequence is synthesized)
ctactttgaaggcctgttggagggtccggcgctggcacgggcagaaggagtctccaccccacttgctggccgtggcttggcagagagggcctcccagcagagctgagaggagggggtgac

SEQ ID NO: 360305 - DNA, 120 bp, Artificial Sequence
  ENSG00000140464_23 (sequence is synthesized)
caggccccacccatcacagcattcccaggtcctggtacccagccctcagttgtcatttggttcagaatcagttccctttctctgggaccaaatttcccttctctaaacatcctacagaga

SEQ ID NO: 360306 - DNA, 120 bp, Artificial Sequence
  ENSG00000140464_24 (sequence is synthesized)
aggttccaaagctgagcacccatcaccctaggtgtgcaccagactcctattagcccctccttccaggagctagaaccagggaggtcctgagtgaggaaggcatgacctctgggctctcta

SEQ ID NO: 360307 - DNA, 120 bp, Artificial Sequence
  ENSG00000140464_25 (sequence is synthesized)
ggtggccctggtcttgccccatccatcccacctgccactaccttgggtgtccttacagctctgccctgaccccagcccctgcccctggacacctgctgacagctcccacacagaacagtc

SEQ ID NO: 360308 - DNA, 120 bp, Artificial Sequence
  ENSG00000140464_26 (sequence is synthesized)
tgaggtgatgctggctacagccctggcagcccatggcaactcaaagtgccttccaaaccaaactgcccctcatgaggttagggtcccccaccctccacctgcccagaggccaactctgtt

SEQ ID NO: 360309 - DNA, 120 bp, Artificial Sequence
  ENSG00000140464_27 (sequence is synthesized)
cccttctcctttcatcccagaggggcctcatcagcaaagacagaaactgatgttccatgcatgtccctgcttccaaagcctgaccttccaaagcttgcttccttcctcctggctgcacag

SEQ ID NO: 360310 - DNA, 120 bp, Artificial Sequence
  ENSG00000140464_28 (sequence is synthesized)
acacctctgcttggccacagctttgctctttggtcctcaggccaccagacccctcacagcatggcccttggctcttcctgcactgccctcaccctcagccgtcccaaggagtgcccagca

SEQ ID NO: 360311 - DNA, 120 bp, Artificial Sequence
  ENSG00000140464_29 (sequence is synthesized)
ctactcagcatgtagtccaggacctgcggcatcagcatcccctgggagcttcttagaaatgcagacctgtgggctctaccacaggcctctggaatcagaatcttcagggtggggcccagc

SEQ ID NO: 360312 - DNA, 120 bp, Artificial Sequence
  ENSG00000140464_30 (sequence is synthesized)
agtctgtgttttaacaggttctcccggtgatgctggtgcatgctcaagtttgagaaccgctgctctcatagactgctcctccaaggggaagcagtgtggaacagcagagaaagtcccgtc

SEQ ID NO: 360313 - DNA, 120 bp, Artificial Sequence
  ENSG00000140464_31 (sequence is synthesized)
cctatctctgactgtgcagtgagtgtggcctaggaacaggtcccttcctaagctctagtgtccccatctgtaaaatgggctgattggcctccacggtcagagcggccatctggctgtgcc

SEQ ID NO: 360314 - DNA, 120 bp, Artificial Sequence
  ENSG00000140464_32 (sequence is synthesized)
atcctgcatttttaggaatggaaagcaggcctctgaggcagtggacaggaagacttctcatccttgaattctagctcccattccaaactgttagtccccaaccttgtggtcacatcagag

SEQ ID NO: 360315 - DNA, 120 bp, Artificial Sequence
  ENSG00000140464_33 (sequence is synthesized)
gtcaacagcagaacagaggcaggtcagggttgtccgctctgattagcagaacgacagccccttcctcctcctccctccttcccatccctactcattagctccctgctcctgggatgcttc

SEQ ID NO: 360316 - DNA, 120 bp, Artificial Sequence
  ENSG00000140464_34 (sequence is synthesized)
ccaagcagcccaggcctctagcctccatggctgatgacctcagctttcacactggtgaagtctgtgtacccatactgcagccccatcccatggggcccctgaagacccactgaggaattc

SEQ ID NO: 360317 - DNA, 120 bp, Artificial Sequence
  ENSG00000140464_35 (sequence is synthesized)
cgtagggtcttgttcccacgaccggagtgctggctctcacagtgaattttgatgcatttaaaataagattctgatgccagactgttaaaacaggcgctggttctgaagcaccgatggaaa

SEQ ID NO: 360318 - DNA, 120 bp, Artificial Sequence
  ENSG00000140464_36 (sequence is synthesized)
cagattgatgcagatggaaggaggaagggagactgggcccactgatttccagccccaccatgtgtgctgttttcagatgtgattgaggggtgttctgccctgcctccactgtcacagcct

SEQ ID NO: 360319 - DNA, 120 bp, Artificial Sequence
  ENSG00000140464_37 (sequence is synthesized)
ttaataaagatgtgaatcttgaaagcctgatgctccaatcacagactctgctcagcatccccagaggaaccactgagaagccttttgcctggataggagggggctctcccaggcataggc

SEQ ID NO: 360320 - DNA, 120 bp, Artificial Sequence
  ENSG00000140464_38 (sequence is synthesized)
ttgtggccacttgcccagcacaactgtgttttgtggggcgtcttttaggacttagcagagctgagagccctttgttgctcaatgctgtgagccttaagcatgtgaatccccccacatgac

SEQ ID NO: 360321 - DNA, 120 bp, Artificial Sequence
  ENSG00000140464_39 (sequence is synthesized)
aagtggggagacccagggtaggctttcctttggatcatctccaaatgggagtgccatgtggcaggaaagaagcaccgatttcaagaattacttcctagagaaagtcaggaactagagacc

SEQ ID NO: 360322 - DNA, 120 bp, Artificial Sequence
  ENSG00000140464_40 (sequence is synthesized)
agagtctgcaggaactttgccactgcccttcactggctaatcctgtacttctctctgtgttccttgagtgacaggtggtaaaacccttaaaaagggaggtgtgggaggcccaggactttg

SEQ ID NO: 360323 - DNA, 120 bp, Artificial Sequence
  ENSG00000140464_41 (sequence is synthesized)
gtaacaggtgatgaatgtgttgtcttggccatcacaggtggagcttcagttagtacccgagggattcccctggcacaagcattataggaattagtccaccactggcgtgggtgagcagcc

SEQ ID NO: 360324 - DNA, 120 bp, Artificial Sequence
  ENSG00000140464_42 (sequence is synthesized)
aggtaatgggaattgatcagtgccaccacccttgaccccaactaccatcccagatgcccagattccagtcctggagttttattctctcagcttgatcctttgaccaagaagatccagtcc

SEQ ID NO: 360325 - DNA, 120 bp, Artificial Sequence
  ENSG00000140464_43 (sequence is synthesized)
caatatgtcacctgtgcttcatctttggactatatctcaggtgtttacgtgtcaactaatgggagcttactgggttagaagtcaggacactgagtttcaatcctcacttagtagtctgtg

SEQ ID NO: 360326 - DNA, 120 bp, Artificial Sequence
  ENSG00000140464_44 (sequence is synthesized)
gccctctttggcacattaacctccctccttgatcctcaggctgcacctctggcaaatgggagaatgcggctccttttgacttcaagggatctttgtgggaaccaatgagaaaatgtgtgt

SEQ ID NO: 360327 - DNA, 120 bp, Artificial Sequence
  ENSG00000140464_45 (sequence is synthesized)
gaagatagctttttggtatattttaaaagtgcacaaatttaagatcttactgctttataaagtgctttatgaattataggaaaataaacacattttagatcttagaaaaaaacaaaaaaa

SEQ ID NO: 360328 - DNA, 120 bp, Artificial Sequence
  ENSG00000140464_46 (sequence is synthesized)
cgagccacagtcctcgccagcccactcctcgccagcccactcctcgccagcccactcctcgccagtccagtctctgctgagagcacaaggagcctccagcctgccctgtggcacatacca

SEQ ID NO: 360329 - DNA, 120 bp, Artificial Sequence
  ENSG00000140464_47 (sequence is synthesized)
ccccccagcttggcctccccaccagcccgctgagcaggctgccacccccgatgctgagcctcacagcgagcctcctgatcaccaggagcgccctgccgtccaccgtgggatccgctacct

SEQ ID NO: 360330 - DNA, 120 bp, Artificial Sequence
  ENSG00000140464_48 (sequence is synthesized)
gttgtacagagcacagagagccatccgccttcgccatgccctccgcttgcaccctcaattgcatcgggcccctattcggacttggtctccccatgtggtccaagccagcactcctgccat

SEQ ID NO: 360331 - DNA, 120 bp, Artificial Sequence
  ENSG00000140464_49 (sequence is synthesized)
cacagggcccctcaaccatcctgccaatgcccaggaacatcctgcccagctgcaaaggggcatcagcccaccccaccggatacgaggggctgtgcgatcccgcagccgctccctccgggg

SEQ ID NO: 360332 - DNA, 120 bp, Artificial Sequence
  ENSG00000140464_50 (sequence is synthesized)
ctcctcccatttatcccagtggctcaacaacttttttgccctccccttctcctccatggcttcccagcttgacatgtcttccgtggtgggggcaggggaaagcagagcccagactcttgg

SEQ ID NO: 360333 - DNA, 120 bp, Artificial Sequence
  ENSG00000140464_51 (sequence is synthesized)
agcaggtgttccccctggggactctgtcagaggctccatggaggcctctcaagtccaagtgcctctggaagcctctccaattacattcccaccaccctgtgccccagaaaggccccccat

SEQ ID NO: 360334 - DNA, 120 bp, Artificial Sequence
  ENSG00000140464_52 (sequence is synthesized)
cagcccagtcccaggcgcccgtcaagcaggcctctgagagtgctacccttctcttgtaaccttgcagccaacacccctgcccggcccctgagctgcctcctccagcccatgctcttacag

SEQ ID NO: 360335 - DNA, 120 bp, Artificial Sequence
  ENSG00000140464_53 (sequence is synthesized)
gccctgcacagagtagcactcattaattcttggttaaggaatgaatcaacgaatgaatggctatgcatggacctctgggcagggagacctgggtcttctctggctgagaggggaaggcta

SEQ ID NO: 360336 - DNA, 120 bp, Artificial Sequence
  ENSG00000140464_54 (sequence is synthesized)
aggcatggctgagattcaagccaccattccaggcctctttgcccaagaaagaaacttctgtcacccttgcactctcctgtattctgagtccctggccaatagcacagccttccatgcccc

SEQ ID NO: 360337 - DNA, 120 bp, Artificial Sequence
  ENSG00000140464_55 (sequence is synthesized)
gacccccaccccaagcctctccactaggcctctgccaggatctaagcccatgagcacagggactggctatcccaagacctggcagatgtggctgctcaataaacacttgttgaaccatca

SEQ ID NO: 360338 - DNA, 120 bp, Artificial Sequence
  ENSG00000140464_56 (sequence is synthesized)
tgccaggcccaggagagctctgagctctggccaacaactgcagccaggctgggcagagcactccggctcacctgggctcctggcgtgtcatttgctggcttgaataaagatgtccgcctt

SEQ ID NO: 360339 - DNA, 120 bp, Artificial Sequence
  ENSG00000140464_57 (sequence is synthesized)
agccacagcaggtgactctcagacttgccttgcgcctggggaattttccagtgaggcattgagtcccaagctgtgctgaggacagtctccaaatgacagctgcatgcctggaccacccca

SEQ ID NO: 360340 - DNA, 120 bp, Artificial Sequence
  ENSG00000140464_58 (sequence is synthesized)
gccctcccactacaccagggccaggagctcttctgaaatgctgatagcatgtgtccagagccctgtctcttttctggaatgtccaagacctttgtctggagcttccttatgcattttctg

SEQ ID NO: 360341 - DNA, 120 bp, Artificial Sequence
  ENSG00000140464_59 (sequence is synthesized)
tcctctaagtcctcagtgaggagggctggacaagaatccattccttggtttattacagccagtgggggccagtgaaggggtgtcaggccacagggcagctatataggggccaaacaagtg

SEQ ID NO: 360342 - DNA, 120 bp, Artificial Sequence
  ENSG00000140464_60 (sequence is synthesized)
aggtttgactccatccatgtagaaagatatataaatccattccacagtgaaacaggtggcctcgtgggtagtgacccttctgtccctagaggtttattactagaggctggactatcacct

SEQ ID NO: 360343 - DNA, 120 bp, Artificial Sequence
  ENSG00000140464_61 (sequence is synthesized)
gtccaggggaaaaggggatctgaatagagtgaaaggttggactgggtggcccctgaggtctcttccagccctcagtctgaggttctgtattggaaagtgcatggagcccatggagaccgc

SEQ ID NO: 360344 - DNA, 120 bp, Artificial Sequence
  ENSG00000140464_62 (sequence is synthesized)
ccccgtgccagtgtacgccttctccatcaaaggccctgcacagagtagcactcattaattcttggttaaggaatgaatcaacgaatgaatggctatgcatggacctctgggcagggagac

SEQ ID NO: 360345 - DNA, 120 bp, Artificial Sequence
  ENSG00000140464_63 (sequence is synthesized)
gaaggtggagtctccagccacccagctacaagctaggaagacgccttgtagaaggctccttacagggaggaaaccgagttggaaaggcgagacagcagtgtgggctcacccggagcaaga

SEQ ID NO: 360346 - DNA, 120 bp, Artificial Sequence
  ENSG00000140464_64 (sequence is synthesized)
cgtgtgaaatcagcttttgacagcgtggctgaatgaggatctggagatgcgaggcgctgggcagactctctgactagatccctggatatgaagaggcaaagccagctctagatggattca

SEQ ID NO: 360347 - DNA, 120 bp, Artificial Sequence
  ENSG00000140464_65 (sequence is synthesized)
tgatgtgatggagagtttggaggacttcttgtccccagtgagctcggagctttgagtcagggagcctggacctgtgacttggtgaggccccagggattaggccaaccacaggtctggggt

SEQ ID NO: 360348 - DNA, 120 bp, Artificial Sequence
  ENSG00000140464_66 (sequence is synthesized)
cagggaccctattgacgttgacctggtgagatgggtttgaggtctgaaggggtggtggtggggcccagcaggtcaggcaggttgtgagtcctgctgtccctgtgtgtgcagggagagcgt

SEQ ID NO: 360349 - DNA, 120 bp, Artificial Sequence
  ENSG00000140464_67 (sequence is synthesized)
ctgagtgagggacagcaagtggctggactggaaatttcagtgagaggaagtaaaggaagacattaaagaagggttggctggctagctggctctgactctaggctcctaaatgccaaagtt

SEQ ID NO: 360350 - DNA, 120 bp, Artificial Sequence
  ENSG00000140464_68 (sequence is synthesized)
gctcttgatgggccatgagccaggttcagtgggggttagatgtggggtagacagtcggccacagatcagggctgctgcagagggaattccagcattagatggcatattagtgccttccag

SEQ ID NO: 360351 - DNA, 120 bp, Artificial Sequence
  ENSG00000140464_69 (sequence is synthesized)
ccatgagaaactatggttgtcagatgtatggttagatatagggtcagcagtcctgagggatgtgcagatgtcctctcccctcctacaccctacccccaatgtgggagccttctcttggag

SEQ ID NO: 360352 - DNA, 120 bp, Artificial Sequence
  ENSG00000140464_70 (sequence is synthesized)
tcagaataggtgggccttcccctgctctttccccacagatggttcttggaaaggaacggggaatggtgccaggagtcagatttcgatcccagttgcccgggttctgctggtgtgattcca

SEQ ID NO: 360353 - DNA, 120 bp, Artificial Sequence
  ENSG00000140464_71 (sequence is synthesized)
gggccaccatacatgtaacaaagcagactgtctcagggttcaaggtatccatgtcccatctaatgctggcattccttctgcagcacccctgacctgtggctgtccagctttcatgtacac

SEQ ID NO: 360354 - DNA, 120 bp, Artificial Sequence
  ENSG00000140464_72 (sequence is synthesized)
atctccagggacaggaagcttgctcattctagaggcagctgctcccaactctggactgctctgacttagaaagtgcttttccgagtggaaatgcagtggtgtccctttgacttgccccct

SEQ ID NO: 360355 - DNA, 120 bp, Artificial Sequence
  ENSG00000140464_73 (sequence is synthesized)
ttggcattcacaagtatggctcctttccaccagaataagcatcctcggtttcttcctggacttggcatctggtctcttccctagcctagtcactcaggtttgcatgcgcctagcctatca

SEQ ID NO: 360356 - DNA, 120 bp, Artificial Sequence
  ENSG00000140464_74 (sequence is synthesized)
aggatctggcccaggactggccagtccttcatggacagcaggtcttctggtggtgggtaggggcctagcttttgccatggcatgacccataggagagagagagtgctgtaggttgaggca

SEQ ID NO: 360357 - DNA, 120 bp, Artificial Sequence
  ENSG00000140464_75 (sequence is synthesized)
atcaggagaggcttcctggaagagacaggacttaagagtctcagagttttagagccaggcaagagcatggagtctaaccccctttttttcacagaggacgaagctaagacccagaaagga

SEQ ID NO: 360358 - DNA, 90 bp, Artificial Sequence
  ENSG00000140464_76 (sequence is synthesized)
acacagcaaattaggggcaagattaaaagctgactctgttttttgtttgtttgtttgtttgttttttagatgaaggctcgctctgttgtt

SEQ ID NO: 360359 - DNA, 88 bp, Artificial Sequence
  ENSG00000140464_77 (sequence is synthesized)
gctgactcttaactgccttgggtactgcattcctatatacacaacctcaagtaaaaagaggaattttttaatatatgtgtgcataata

SEQ ID NO: 360360 - DNA, 120 bp, Artificial Sequence
  ENSG00000140464_78 (sequence is synthesized)
aagtaaaaagaggaattttttaatatatgtgtgcataatacaatcacatagtcagaaataaaaacatagaaagtgatcaatagtgtcttactcccactttagcccccagttcttatgccc

SEQ ID NO: 360361 - DNA, 63 bp, Artificial Sequence
  ENSG00000140464_79 (sequence is synthesized)
tagtgtcttactcccactttagcccccagttcttatgcccatataactatcttttaaaaattt

SEQ ID NO: 360362 - DNA, 89 bp, Artificial Sequence
  ENSG00000140464_80 (sequence is synthesized)
tgagtagctgggattataggcacgcactgagagatggggttttgctatgttagccaggatactctcaaactcctggcctcaagtgatct

SEQ ID NO: 360363 - DNA, 120 bp, Artificial Sequence
  ENSG00000140464_81 (sequence is synthesized)
gattacaggcataagccaccgtgccccacctcttttttaaattcttatatatccttccagaatgtatgtaattacaagcaaatattattatagatatttgccttttgcattctgtgtttc

SEQ ID NO: 360364 - DNA, 120 bp, Artificial Sequence
  ENSG00000140464_82 (sequence is synthesized)
aatattattatagatatttgccttttgcattctgtgtttcacaaaggtaggataataccagatacacatggtatcataccagaattcttatcctatcaataggtagagagcttcccgata

SEQ ID NO: 360365 - DNA, 120 bp, Artificial Sequence
  ENSG00000140464_83 (sequence is synthesized)
cctttttgcagctgcataatggaccattaaatggatatggcaggctttatttagccagttccttgttgctgcatatttaggttgttttgctattacaaacaatgctacaatgcatgatgt

SEQ ID NO: 360366 - DNA, 90 bp, Artificial Sequence
  ENSG00000140464_84 (sequence is synthesized)
gttgttttgctattacaaacaatgctacaatgcatgatgtttgcaaataaataatataaaatcaaacccaggaccttgggacactgacgt

SEQ ID NO: 360367 - DNA, 89 bp, Artificial Sequence
  ENSG00000140464_85 (sequence is synthesized)
tgagcccaggaatttgagaccagcctcggcaacatggtgagaccctgtttctacaaaaagtgtataatcccaggtactcagcaggctaa

SEQ ID NO: 360368 - DNA, 88 bp, Artificial Sequence
  ENSG00000140464_86 (sequence is synthesized)
agcgcaaataaacaaataaaatcaaaataataatagggaaatgcccttggtccacagactcagctgtcttccagatgctagtcattgg

SEQ ID NO: 360369 - DNA, 120 bp, Artificial Sequence
  ENSG00000140464_87 (sequence is synthesized)
ggtccacagactcagctgtcttccagatgctagtcattggtgaatgaacaacaagagagcctgcactgtcttgtgtgaaggtctaggtattttgggtctttgtcttgataaaatcagaat

SEQ ID NO: 360370 - DNA, 120 bp, Artificial Sequence
  ENSG00000140464_88 (sequence is synthesized)
agacgtggcctctcactatcagctaggaagcagtttgaacttggagtatcagagggttgctctttttgccaagcctctggcttcaatccttgcctggggatggcagtgctgctgagggaa

SEQ ID NO: 360371 - DNA, 120 bp, Artificial Sequence
  ENSG00000140464_89 (sequence is synthesized)
ggaagtggggaacactgtgagtgcaaggacaggtgaggcaggcacagacggctgtcccaagggaaagtgctccatcagctgtgccaggagagaagcagctcttgggtccgtgtttctgcc

SEQ ID NO: 360372 - DNA, 120 bp, Artificial Sequence
  ENSG00000140464_90 (sequence is synthesized)
ttagaaggcaggagttgggcatctagctccagcactcatccctcttgaaactgctggtttgtttactttcattgcaactatatgcctggaagagatgaagagaaagctcaacaggcttca

SEQ ID NO: 360373 - DNA, 120 bp, Artificial Sequence
  ENSG00000140464_91 (sequence is synthesized)
ctaggattgtttgggtggggtggcagcagctcagatattttccctcctctgtttttcataggctttttgtaatcgtgttataatactttaatggaaaaaaataaatttattattttaaag

SEQ ID NO: 360374 - DNA, 120 bp, Artificial Sequence
  ENSG00000140464_92 (sequence is synthesized)
ctataaaaattataaatcagtcattatgatgtgtttttctctactgagccctctggtgtgttccctgttttattaacgtggatggagggtgtgtcagggaggttgggacagaggcagaga

SEQ ID NO: 360375 - DNA, 120 bp, Artificial Sequence
  ENSG00000140464_93 (sequence is synthesized)
agaggccagcccggccttcggggagttcgtggcctgtctggaaagagggtcttttacataccagcagtttgcagagccagacacagaacgatagagcaggaccttttaaactcctttttc

SEQ ID NO: 360376 - DNA, 120 bp, Artificial Sequence
  ENSG00000140464_94 (sequence is synthesized)
cgccagggtctgggcggtgcccctcttctgtattttggccccatccagaaagcccaaagccaacaggagtcccttattcccactgaataagatagggaaagttcacagtgtgcgtggggg

SEQ ID NO: 360377 - DNA, 120 bp, Artificial Sequence
  ENSG00000140464_95 (sequence is synthesized)
tgagagtggacacagtttaccatgtgttttgccatgattgaggtgtggggagcctgacaggctaaaatgcacagttctatgagtcctttctcccaaacactactgtgcctttgcacaggg

SEQ ID NO: 360378 - DNA, 120 bp, Artificial Sequence
  ENSG00000140464_96 (sequence is synthesized)
caggtctccacaagaagtttgttggctgatgcctagcatactcccagagagggcttgggcataccataacaggaaactggactccccatgaccttaactctgctctctcagtctacaccc

SEQ ID NO: 360379 - DNA, 120 bp, Artificial Sequence
  ENSG00000140464_97 (sequence is synthesized)
atcatttccccaagtgtttctgcaaaggccacctacctaagtatctcatttgtcagagttatcttctatgaacactgccaggcaggtagtcagttgggcaggagttgaggtcaacccaga

SEQ ID NO: 360380 - DNA, 120 bp, Artificial Sequence
  ENSG00000140464_98 (sequence is synthesized)
ggaatctggaacaagagagttctaaggatctgcttcacccagagtacagctttgttcctcattctgactgagccctagccttggtcacacactgagcactgactgatattccttacccac

SEQ ID NO: 360381 - DNA, 120 bp, Artificial Sequence
  ENSG00000140464_99 (sequence is synthesized)
tcccagctcatggagctgagaatggggacagtgtgcttctttaggattgcagaaggttccagaccaggtagcagttgtcaggcctcctgtacagggggcaaattctgaattctgggcaga

SEQ ID NO: 360382 - DNA, 120 bp, Artificial Sequence
  ENSG00000140464_100 (sequence is synthesized)
taacttaattgaatattcatagataaggcacagcaagaaattatggaaacccatttgtgaattactcaaatccaaatgcaaagcagagtcacattggcacacacagtggctgttcccgtc

SEQ ID NO: 360383 - DNA, 120 bp, Artificial Sequence
  ENSG00000140464_101 (sequence is synthesized)
cccctgcagggcatccgtttcccccagccgactggcctgcaaggattcccataggtgcacacccacacccctcccagcatgcatcctaggcagttcataatgcatctccccttccccgtt

SEQ ID NO: 360384 - DNA, 120 bp, Artificial Sequence
  ENSG00000140465_0 (sequence is synthesized)
gaaggtgacagttccttggaaccttccctgatccttgtgatcccaggctccaagagtccacccttcccagctcagctcagtacctcagcagccacctccaagatccctacactgatcatg

SEQ ID NO: 360385 - DNA, 120 bp, Artificial Sequence
  ENSG00000140465_1 (sequence is synthesized)
cttttcccaatctccatgtcggccacggagtttcttctggcctctgtcatcttctgtctggtattctgggtaatcagggcctcaagacctcaggtccccaaaggcctgaagaatccacca

SEQ ID NO: 360386 - DNA, 120 bp, Artificial Sequence
  ENSG00000140465_2 (sequence is synthesized)
gggccatggggctggcctctgattgggcacatgctgaccctgggaaagaacccgcacctggcactgtcaaggatgagccagcagtatggggacgtgctgcagatccgaattggctccaca

SEQ ID NO: 360387 - DNA, 120 bp, Artificial Sequence
  ENSG00000140465_3 (sequence is synthesized)
cccgtggtggtgctgagcggcctggacaccatccggcaggccctggtgcggcagggcgatgatttcaagggccggcccgacctctacaccttcaccctcatcagtaatggtcagagcatg

SEQ ID NO: 360388 - DNA, 120 bp, Artificial Sequence
  ENSG00000140465_4 (sequence is synthesized)
tccttcagcccagactctggaccagtgtgggctgcccgccggcgcctggcccagaatggcctgaaaagtttctccattgcctctgacccagcctcctcaacctcctgctacctggaagag

SEQ ID NO: 360389 - DNA, 120 bp, Artificial Sequence
  ENSG00000140465_5 (sequence is synthesized)
catgtgagcaaggaggctgaggtcctgataagcacgttgcaggagctgatggcagggcctgggcactttaacccctacaggtatgtggtggtatcagtgaccaatgtcatctgtgccatt

SEQ ID NO: 360390 - DNA, 120 bp, Artificial Sequence
  ENSG00000140465_6 (sequence is synthesized)
tgctttggccggcgctatgaccacaaccaccaagaactgcttagcctagtcaacctgaataataatttcggggaggtggttggctctggaaacccagctgacttcatccctattcttcgc

SEQ ID NO: 360391 - DNA, 120 bp, Artificial Sequence
  ENSG00000140465_7 (sequence is synthesized)
tacctacccaacccttccctgaatgccttcaaggacctgaatgagaagttctacagcttcatgcagaagatggtcaaggagcactacaaaacctttgagaagggccacatccgggacatc

SEQ ID NO: 360392 - DNA, 120 bp, Artificial Sequence
  ENSG00000140465_8 (sequence is synthesized)
acagacagcctgattgagcactgtcaggagaagcagctggatgagaacgccaatgtccagctgtcagatgagaagatcattaacatcgtcttggacctctttggagctgggtttgacaca

SEQ ID NO: 360393 - DNA, 120 bp, Artificial Sequence
  ENSG00000140465_9 (sequence is synthesized)
gtcacaactgctatctcctggagcctcatgtatttggtgatgaaccccagggtacagagaaagatccaagaggagctagacacagtgattggcaggtcacggcggccccggctctctgac

SEQ ID NO: 360394 - DNA, 120 bp, Artificial Sequence
  ENSG00000140465_10 (sequence is synthesized)
cacaacaagagacacaagtttgaaaggcttttacatccccaaggggcgttgtgtctttgtaaaccagtggcagatcaaccatgaccagaagctatgggtcaacccatctgagttcctacc

SEQ ID NO: 360395 - DNA, 120 bp, Artificial Sequence
  ENSG00000140465_11 (sequence is synthesized)
tgaacggtttctcacccctgatggtgctatcgacaaggtgttaagtgagaaggtgattatctttggcatgggcaagcggaagtgtatcggtgagaccattgcccgctgggaggtctttct

SEQ ID NO: 360396 - DNA, 120 bp, Artificial Sequence
  ENSG00000140465_12 (sequence is synthesized)
cttcctggctatcctgctgcaacgggtggaattcagcgtgccactgggcgtgaaggtggacatgacccccatctatgggctaaccatgaagcatgcctgctgtgagcacttccaaatgca

SEQ ID NO: 360397 - DNA, 120 bp, Artificial Sequence
  ENSG00000140465_13 (sequence is synthesized)
gctgcgctcttaggtgcttgagagccctgaggcctagactctgtctacctggtctggttgggcagccagaccagcaggctggcctatgtggtctaaggttcagcctgaaactcatagaca

SEQ ID NO: 360398 - DNA, 120 bp, Artificial Sequence
  ENSG00000140465_14 (sequence is synthesized)
ctgatctggctgcagttttgctatctgggctgtgggcaagcctaagggatcctgcctgcccctaccctggacttgcctctgcacaccctccagagacaacaggtaaaacagggccacata

SEQ ID NO: 360399 - DNA, 120 bp, Artificial Sequence
  ENSG00000140465_15 (sequence is synthesized)
gatgctgatggagccttcccaagttgtgcttgagccaggaggcctgctagggttaggaggtccttaggcctctgagaagctctgaagaactctctggaagcccctgggcccagtacctag

SEQ ID NO: 360400 - DNA, 120 bp, Artificial Sequence
  ENSG00000140465_16 (sequence is synthesized)
ctggctctgtgagggtgctgactggcttcagcaagttagaactagccaaaccaggaccctgtccaatctttgacaattgggagctgccaagagtgaagggaagagacagcccaggatact

SEQ ID NO: 360401 - DNA, 120 bp, Artificial Sequence
  ENSG00000140465_17 (sequence is synthesized)
ggcacagaggtagtctcactgcttgaactaggctgagcaatctgaccctatgggtctaggacacagttcctgggaacatcacattcctctgcccttcctgcaggcaggaacaaacagggc

SEQ ID NO: 360402 - DNA, 120 bp, Artificial Sequence
  ENSG00000140465_18 (sequence is synthesized)
tgccttctggccttgtaagacccttattgctgtcctggaggggctggggacttgtgtctgcggggatcagagcgcacagggagtgcacatatccaggcaccaggactagggctggagtga

SEQ ID NO: 360403 - DNA, 120 bp, Artificial Sequence
  ENSG00000140465_19 (sequence is synthesized)
ggggggggtatttcaattaccttctattggtctcccttctctacactcttgtaataaaatgtctatttttaatgtttgtacacaacaatccttctattctagcctgcattgagcttgcat

SEQ ID NO: 360404 - DNA, 120 bp, Artificial Sequence
  ENSG00000140465_20 (sequence is synthesized)
gcttgcataagagcttaagaaccattgatttaatgtaatagggaaaattctaacccaggtatccaaaaatgtgtaagaacaactacctgagctaaataaagatattgttcagaaatccta

SEQ ID NO: 360405 - DNA, 120 bp, Artificial Sequence
  ENSG00000140465_21 (sequence is synthesized)
ctcaccctgaaggtgacagttccttggaaccttccctgatccttgtgatcccaggctccaagagtccacccttcccagctcagctcagtacctcagccacctccaagatccctacactga

SEQ ID NO: 360406 - DNA, 120 bp, Artificial Sequence
  ENSG00000140465_22 (sequence is synthesized)
cttcttaggtagctacctgtctagcacctccaaaaagggaggctcagagtgtttttagtgaccaggcagtctagccccctagtggggaaactgaggccaggggaagaggaggacttgccc

SEQ ID NO: 360407 - DNA, 120 bp, Artificial Sequence
  ENSG00000140465_23 (sequence is synthesized)
cacatccagatgataacagtacaagacgctgtgtgtcaaatgtcccatgagttggggctagcagcattctaaggtagtaggagagagccttgcagaggcagagagaagctgggacaacag

SEQ ID NO: 360408 - DNA, 120 bp, Artificial Sequence
  ENSG00000140465_24 (sequence is synthesized)
cctcagggggcatcacctccagaacaaatgtgctaggaatagtgaaggaccagacctggatggagaggtagctctgggtttgagatcttgctcacctgtggactttccctacctaagggc

SEQ ID NO: 360409 - DNA, 120 bp, Artificial Sequence
  ENSG00000140465_25 (sequence is synthesized)
cagagatgcagaggaaaggctgggtccaccctcttaagctcttatatatgattaatacaatcattgcattgatcctcctgtccatgggctgcttgcctgtcctctatcctttggggctgg

SEQ ID NO: 360410 - DNA, 120 bp, Artificial Sequence
  ENSG00000140465_26 (sequence is synthesized)
agctccactcacttgacacttctgagccctgaactgccacttcagctgtctccctctggttacaggaagctatgggtcaacccatctgagttcctacctgaacggtttctcacccctgat

SEQ ID NO: 360411 - DNA, 120 bp, Artificial Sequence
  ENSG00000140470_0 (sequence is synthesized)
actccggctggcgccgccgcctagcgcgctcctgcttcgccgccacggtccgggggggctgccggtcccgggtaccatgtgtgacggcgccctgctgcctccgctcgtcctgcccgtgct

SEQ ID NO: 360412 - DNA, 120 bp, Artificial Sequence
  ENSG00000140470_1 (sequence is synthesized)
gctgctgctggtttggggactggacccgggcacagctgtcggcgacgcggcggccgacgtggaggtggtgctcccgtggcgggtgcgccccgacgacgtgcacctgccgccgctgcccgc

SEQ ID NO: 360413 - DNA, 120 bp, Artificial Sequence
  ENSG00000140470_2 (sequence is synthesized)
ccagccgccccgcgcgcccggcccggagagcgcgccctgctgctgcacctgccggccttcgggcgcgacctgtaccttcagctgcgccgcgacctgcgcttcctgtcccgaggcttcgag

SEQ ID NO: 360414 - DNA, 120 bp, Artificial Sequence
  ENSG00000140470_3 (sequence is synthesized)
gctgcgccgcgacctgcgcttcctgtcccgaggcttcgaggtggaggaggcgggcgcggcccggcgccgcggccgccccgccgagctgtgcttctactcgggccgtgtgctcggccaccc

SEQ ID NO: 360415 - DNA, 120 bp, Artificial Sequence
  ENSG00000140470_4 (sequence is synthesized)
cggctccctcgtctcgctcagcgcctgcggcgccgccggcggcctggttggcctcattcagcttgggcaggagcaggtgctaatccagcccctcaacaactcccagggcccattcagtgg

SEQ ID NO: 360416 - DNA, 120 bp, Artificial Sequence
  ENSG00000140470_5 (sequence is synthesized)
acgagaacatctgatcaggcgcaaatggtccttgacccccagcccttctgctgaggcccagagacctgagcagctctgcaaggttctaacagaaaagaagaagccgacgtggggcaggcc

SEQ ID NO: 360417 - DNA, 120 bp, Artificial Sequence
  ENSG00000140470_6 (sequence is synthesized)
ttcgcgggactggcgggagcggaggaacgctatccggctcaccagcgagcacacggtggagaccctggtggtggccgacgccgacatggtgcagtaccacggggccgaggccgcccagag

SEQ ID NO: 360418 - DNA, 120 bp, Artificial Sequence
  ENSG00000140470_7 (sequence is synthesized)
gttcatcctgaccgtcatgaacatggtatacaatatgtttcagcaccagagcctggggattaaaattaacattcaagtgaccaagcttgtcctgctacgacaacgtcccgctaagttgtc

SEQ ID NO: 360419 - DNA, 120 bp, Artificial Sequence
  ENSG00000140470_8 (sequence is synthesized)
cattgggcaccatggtgagcggtccctggagagcttctgtcactggcagaacgaggagtatggaggagcgcgatacctcggcaataaccaggttcccggcgggaaggacgacccgcccct

SEQ ID NO: 360420 - DNA, 120 bp, Artificial Sequence
  ENSG00000140470_9 (sequence is synthesized)
ggtggatgctgccgtgtttgtgaccaggacagatttctgtgtacacaaggatgaaccgtgtgacactgttggaattgcttacttaggaggtgtgtgcagtgctaagaggaagtgtgtgct

SEQ ID NO: 360421 - DNA, 120 bp, Artificial Sequence
  ENSG00000140470_10 (sequence is synthesized)
tgccgaagacaatggtctcaatttggcctttaccatcgcccatgagctgggccacaacttgggcatgaaccacgacgatgaccactcatcttgcgctggcaggtcccacatcatgtcagg

SEQ ID NO: 360422 - DNA, 120 bp, Artificial Sequence
  ENSG00000140470_11 (sequence is synthesized)
agagtgggtgaaaggccggaacccaagtgacctctcttggtcctcctgcagccgagatgaccttgaaaacttcctcaagtcaaaagtcagcacctgcttgctagtcacggaccccagaag

SEQ ID NO: 360423 - DNA, 120 bp, Artificial Sequence
  ENSG00000140470_12 (sequence is synthesized)
ccagcacacagtacgcctcccgcacaagctgccgggcatgcactacagtgccaacgagcagtgccagatcctgtttggcatgaatgccaccttctgcagaaacatggagcatctaatgtg

SEQ ID NO: 360424 - DNA, 120 bp, Artificial Sequence
  ENSG00000140470_13 (sequence is synthesized)
tgctggactgtggtgcctggtagaaggagacacatcctgcaagaccaagctggaccctcccctggatggcaccgagtgtggggcagacaagtggtgccgcgcgggggagtgcgtgagcaa

SEQ ID NO: 360425 - DNA, 120 bp, Artificial Sequence
  ENSG00000140470_14 (sequence is synthesized)
gacgcccatcccggagcatgtggacggagactggagcccgtggggcgcctggagcatgtgcagccgaacatgtgggacgggagcccgcttcaggcagaggaaatgtgacaaccccccccc

SEQ ID NO: 360426 - DNA, 120 bp, Artificial Sequence
  ENSG00000140470_15 (sequence is synthesized)
tgggcctggaggcacacactgcccgggtgccagtgtagaacatgcggtctgcgagaacctgccctgccccaagggtctgcccagcttccgggaccagcagtgccaggcacacgaccggct

SEQ ID NO: 360427 - DNA, 120 bp, Artificial Sequence
  ENSG00000140470_16 (sequence is synthesized)
gagccccaagaagaaaggcctgctgacagccgtggtggttgacgataagccatgtgaactctactgctcgcccctcgggaaggagtccccactgctggtggccgacagggtcctggacgg

SEQ ID NO: 360428 - DNA, 120 bp, Artificial Sequence
  ENSG00000140470_17 (sequence is synthesized)
tacaccctgcgggccctacgagactgatctctgcgtgcacggcaagtgccagaaaatcggctgtgacggcatcatcgggtctgcagccaaagaggacagatgcggggtctgcagcgggga

SEQ ID NO: 360429 - DNA, 120 bp, Artificial Sequence
  ENSG00000140470_18 (sequence is synthesized)
cggcaagacctgccacttggtgaagggcgacttcagccacgcccgggggacagctctcaaagactcgggtaaggggtccatcaacagtgactggaagatagagctccccggagagttcca

SEQ ID NO: 360430 - DNA, 120 bp, Artificial Sequence
  ENSG00000140470_19 (sequence is synthesized)
gattgcaggcacaactgttcgctatgtgagaagggggctgtgggagaagatctctgccaagggaccaaccaaactaccgctgcacttgatggtgttgttatttcacgaccaagattatgg

SEQ ID NO: 360431 - DNA, 120 bp, Artificial Sequence
  ENSG00000140470_20 (sequence is synthesized)
aattcattatgaatacactgttcctgtaaaccgcactgcggaaaatcaaagcgaaccagaaaaaccgcaggactctttgttcatctggacccacagcggctgggaagggtgcagtgtgca

SEQ ID NO: 360432 - DNA, 120 bp, Artificial Sequence
  ENSG00000140470_21 (sequence is synthesized)
gtgcggcggaggggagcgcagaaccatcgtctcgtgtacacggattgtcaacaagaccacaactctggtgaacgacagtgactgccctcaagcaagccgcccagagccccaggtccgaag

SEQ ID NO: 360433 - DNA, 120 bp, Artificial Sequence
  ENSG00000140470_22 (sequence is synthesized)
gtgcaacttgcacccctgccagtcacggtgggtggcaggcccgtggagcccctgctcggcgacctgtgagaaaggcttccagcaccgggaggtgacctgcgtgtaccagctgcagaacgg

SEQ ID NO: 360434 - DNA, 120 bp, Artificial Sequence
  ENSG00000140470_23 (sequence is synthesized)
cacacacgtcgctacgcggcccctctactgcccgggcccccggccggcggcagtgcagagctgtgaaggccaggactgcctgtccatctgggaggcgtctgagtggtcacagtgctctgc

SEQ ID NO: 360435 - DNA, 120 bp, Artificial Sequence
  ENSG00000140470_24 (sequence is synthesized)
cagctgtggtaaaggggtgtggaaacggaccgtggcgtgcaccaactcacaagggaaatgcgacgcatccacgaggccgagagccgaggaggcctgcgaggactactcaggctgctacga

SEQ ID NO: 360436 - DNA, 120 bp, Artificial Sequence
  ENSG00000140470_25 (sequence is synthesized)
gtggaaaactggggactggtctacgtgctcgtcgacctgcgggaagggcctgcagtcccgggtggtgcagtgcatgcacaaggtcacagggcgccacggcagcgagtgccccgccctctc

SEQ ID NO: 360437 - DNA, 120 bp, Artificial Sequence
  ENSG00000140470_26 (sequence is synthesized)
tgacctacaaatgcacacgagaccagtggacggtatattgccgggtcatccgagaaaagaacctctgccaggacatgcggtggtaccagcgctgctgccagacctgcagggacttctatg

SEQ ID NO: 360438 - DNA, 120 bp, Artificial Sequence
  ENSG00000140470_27 (sequence is synthesized)
caaacaagatgcgccagccaccgccgaactcgtgacacgcagtcccaagggtcgctcaaagctcagactcaggtctgaaacccacccacccgcaagcctaccagccttgtggccacgccc

SEQ ID NO: 360439 - DNA, 120 bp, Artificial Sequence
  ENSG00000140470_28 (sequence is synthesized)
ccacccggctgccacaagaatccaactacatagaacatgagcgtggacttggcgtttgccattagtgcttccgtacttaatatattgttaacagccactggctggctttctacagtgagg

SEQ ID NO: 360440 - DNA, 120 bp, Artificial Sequence
  ENSG00000140470_29 (sequence is synthesized)
agaaagtaggcatgagtcacaaagtaacttcaatttctaggatttcaggtacctcgaagggaagcacctctggcagacaaccgtcaagagagagacatcatttagtgttcttgtcttgac

SEQ ID NO: 360441 - DNA, 120 bp, Artificial Sequence
  ENSG00000140470_30 (sequence is synthesized)
tcgcttttgacatttgaatttccagtgcttggtatatcatggaggaaacatccccaaaacgagacatgctagaaaaggctttattctgaaagccggcgacaccatggagggaggggcagg

SEQ ID NO: 360442 - DNA, 120 bp, Artificial Sequence
  ENSG00000140470_31 (sequence is synthesized)
tgttggtgagcctctgcccgtggcttctctggggagggccgggctgcttagcacacgtttctctccatctaccttcttgaccacatgagaaccaggacgttgcctccatgcccgtctctg

SEQ ID NO: 360443 - DNA, 120 bp, Artificial Sequence
  ENSG00000140470_32 (sequence is synthesized)
agaacatagtctctaaatcctaggtgttgccttggaagtctcgtgcgtggagtgtaaatctatatatgccagcgaggacagcagtgccacgcagttcataccacccgcatgggaagaatg

SEQ ID NO: 360444 - DNA, 120 bp, Artificial Sequence
  ENSG00000140470_33 (sequence is synthesized)
ttccaagagagtctgggtttggggaagcatctaattttcagagctctgctgtccaccgtgtagggaaacagaagggcctctcttcaaggtgctgtgacataagaaacggtaattgcggtg

SEQ ID NO: 360445 - DNA, 120 bp, Artificial Sequence
  ENSG00000140470_34 (sequence is synthesized)
atggggttgcttcctaaggcaaaggtaagcttgggccagcttcactggggcggatgggcacctgccccgccttccgggaacatccactctggcctgcacttcctaaagctttgtacctta

SEQ ID NO: 360446 - DNA, 120 bp, Artificial Sequence
  ENSG00000140470_35 (sequence is synthesized)
gagatgctgtaccacatcccagtggctttctaccgaccgtggccatttatctgaaggtaagacgacatttgggacctctgaggacacaagcccaggcctaggatctgtagagcaaggcct

SEQ ID NO: 360447 - DNA, 120 bp, Artificial Sequence
  ENSG00000140470_36 (sequence is synthesized)
gactgctctatcctggcacggagcagcctgatgtgccaggaccaggggaggaacgccatctggctggcactgctgcacacccgccgagccttcctgtagccccagactttgtggtaccca

SEQ ID NO: 360448 - DNA, 120 bp, Artificial Sequence
  ENSG00000140470_37 (sequence is synthesized)
ttatcatcacgcctgtcatcattgacccatcttcttggtggggcaaggatgatgcatgatgaaggaaggtccttcccccctgcagcccccttacgcctggcagcagacaagcagagtggc

SEQ ID NO: 360449 - DNA, 120 bp, Artificial Sequence
  ENSG00000140470_38 (sequence is synthesized)
ctctttgagagcacagaggatggtagcaccctacctgcaaggaggccgggcagggaccctagatgccaggaggcctgttttgctcaccaacttggtgggcatttcatgggtgcttatgtt

SEQ ID NO: 360450 - DNA, 120 bp, Artificial Sequence
  ENSG00000140470_39 (sequence is synthesized)
ctaggactttaccgtaaataacacctcctccctgatttcagacggaaggtctcacttggacttccatgggatcatctccctgtgcttcttgatttattggtgctgtgtttctgtgttttg

SEQ ID NO: 360451 - DNA, 120 bp, Artificial Sequence
  ENSG00000140470_40 (sequence is synthesized)
ttttgttacatgtcacaaccgtagagttagcttaaatcagaaagaagcctctctgccttctccaccctgtcttacgagctgtgtttttgtttttactaccctagaggcagagaagcggta

SEQ ID NO: 360452 - DNA, 120 bp, Artificial Sequence
  ENSG00000140470_41 (sequence is synthesized)
gggatgtcagggaatttactcacttccacttgaatcaacgagaagtgttgagaaacttccgtgggtgctctgtggaaagaaccgagggtgtcaggatggagcggcccaccctcgccccgc

SEQ ID NO: 360453 - DNA, 120 bp, Artificial Sequence
  ENSG00000140470_42 (sequence is synthesized)
ggcctgcgcagactgctgtcctccccttcaggcctggccaccagcagactcccatgaattcccattttcacaaagccctcaaaattttgggggcgctgaggttcaattttcttcatcccc

SEQ ID NO: 360454 - DNA, 120 bp, Artificial Sequence
  ENSG00000140470_43 (sequence is synthesized)
aaatgaactgttaattcactgaaagacatttagacttttgcagccaaggagcagagccgggcaagctcactaaggaagccttagcttggtctcctgcatgggccccggggcctccagata

SEQ ID NO: 360455 - DNA, 120 bp, Artificial Sequence
  ENSG00000140470_44 (sequence is synthesized)
tgcccactgtcaccctggcaagggccccacaccctcagaatgaaaaggattgattgggttattgtcagatacccccattagttcccctaaagtctgcatctgcagagctcttttagctca

SEQ ID NO: 360456 - DNA, 60 bp, Artificial Sequence
  ENSG00000140470_45 (sequence is synthesized)
gttcccctaaagtctgcatctgcagagctcttttagctcatctttttgttgtcggtgttg

SEQ ID NO: 360457 - DNA, 120 bp, Artificial Sequence
  ENSG00000140470_46 (sequence is synthesized)
tacaggagtgagccaccgcgcccggccttttagcttatcttgaaatccaccagcctaccttctgttcatggcacgagcagtgatttcagtgaaaccatcataaacattcttgttccacta

SEQ ID NO: 360458 - DNA, 120 bp, Artificial Sequence
  ENSG00000140470_47 (sequence is synthesized)
tgatttcagtgaaaccatcataaacattcttgttccactagatgctgatcacagcagtgatgtttctgtgttaataccctgtactgtccctcgagtactgtacctttgtgcttgcacacg

SEQ ID NO: 360459 - DNA, 120 bp, Artificial Sequence
  ENSG00000140470_48 (sequence is synthesized)
tgtcactaacgcacgtgttaccagagtctcacgaccctacggtgctatttttattggtgcaaaattaaaccctctcagctgaccgttgctggataggatcagaatgcaggaaaagagcct

SEQ ID NO: 360460 - DNA, 120 bp, Artificial Sequence
  ENSG00000140470_49 (sequence is synthesized)
ctatggcaatacgattgtccttttttcgtttcagagtcaaatgtatctattttccattcgttaacttgcattacatactgtacccatggaatttttgttttactttttggggctggtttt

SEQ ID NO: 360461 - DNA, 120 bp, Artificial Sequence
  ENSG00000140470_50 (sequence is synthesized)
gaaaggaaaaaaaacggaagacaaacattggacgccattatacatgaaaattatatagaaaaattaatcatttcattggaagcaagttgaatatgtgtaataaaatgtttttccataaca

SEQ ID NO: 360462 - DNA, 120 bp, Artificial Sequence
  ENSG00000140470_51 (sequence is synthesized)
aacaggtggctaggtggctgccatggaggacgtgagcatgacatgtctagcaggagctgctgagccagaagcggttgaagctgggttttctgcagctgtgtctgggacttggaaggaccc

SEQ ID NO: 360463 - DNA, 120 bp, Artificial Sequence
  ENSG00000140470_52 (sequence is synthesized)
gactgggcctggggtcacacggagcccacacagaagccagggcttagggggcttcagcacctgggggggcttcaccttggcctccacatctgacccagaaagctgagaacgcagagaact

SEQ ID NO: 360464 - DNA, 120 bp, Artificial Sequence
  ENSG00000140470_53 (sequence is synthesized)
cctccctgaagtcgagaactcctcctcgagcctgggcctgtgctctgggtgagagtgcctgggagacaccatagcagacacagctggcccgaagctgcaccaccaggatccctctggcca

SEQ ID NO: 360465 - DNA, 120 bp, Artificial Sequence
  ENSG00000140470_54 (sequence is synthesized)
gaccttcccctccagcataataccatctaactcctcggggcacccttccctttaccttctgccaggggaccctcttgccaggctttgcgcgtggtgaagcctcagcaagtatccatggaa

SEQ ID NO: 360466 - DNA, 120 bp, Artificial Sequence
  ENSG00000140470_55 (sequence is synthesized)
cttgatgttacgctcccaggcttcccacgctcgtgaggccatggctgctgggtagcttgcagggccccttgaaagggtctggaaacgtcagtcaattaataaacgaatgtattaagtccc

SEQ ID NO: 360467 - DNA, 120 bp, Artificial Sequence
  ENSG00000140470_56 (sequence is synthesized)
agcagctctgcaaggttctaacagttccacagtgtctgggcctcacctgggaggacttgaaatctggaggctggagtgatctggaggtgcctcattcatgtgtctggcctggaggtggat

SEQ ID NO: 360468 - DNA, 120 bp, Artificial Sequence
  ENSG00000140470_57 (sequence is synthesized)
gagttcccgcaagcccagcaggagctgtgctgcctttgaggatcagcctcagaaatcctagagcatcactctgaaggtactctgttggctgaagcggttagaaacctacccaggttcaag

SEQ ID NO: 360469 - DNA, 120 bp, Artificial Sequence
  ENSG00000140470_58 (sequence is synthesized)
ggcagagagatagaccccaccgctcaatgtcaaagaatttgggggccttatttaaaacctcttcacacctctataactgtaggtaggtgacaccgctagtgacaaagggctactgtgcag

SEQ ID NO: 360470 - DNA, 120 bp, Artificial Sequence
  ENSG00000140470_59 (sequence is synthesized)
agggatcagagacagctcgaggagagagcatattccatagttcagagacagcataccgggtatggggctcttcagcccagctttggacattggtgtgcatcaactgtgggcattgggcct

SEQ ID NO: 360471 - DNA, 120 bp, Artificial Sequence
  ENSG00000140470_60 (sequence is synthesized)
agagaaggctttggtgtcagagctgtggtgtagtcactctgagtgtccttggtcagttaattgattatagctttacggagataaaattaacatgcaataaactgaatatattcaaatgta

SEQ ID NO: 360472 - DNA, 120 bp, Artificial Sequence
  ENSG00000140470_61 (sequence is synthesized)
agtgtgtgccagtggcggttgtacctctaagacttcagcttttaaattcctgccggagcagacacttctgttgtttagtctgccttgttcatcccgttcgtgtgagctggacattggaca

SEQ ID NO: 360473 - DNA, 120 bp, Artificial Sequence
  ENSG00000140470_62 (sequence is synthesized)
gctggagctcggaggatccgtgtggtggaggataaacctgcccacagctttctgggtaaaacacaaatgacttgactcaccatttatgtgttgagaatcgattttgatgatcagtctggt

SEQ ID NO: 360474 - DNA, 120 bp, Artificial Sequence
  ENSG00000140470_63 (sequence is synthesized)
tgccgaagacaatggtctcaatttggcctttaccatcgcccatgagctgggccacaacactccgcaagaaacagatactgaagacttggagtggctgtagacttccctaaaactgaggaa

SEQ ID NO: 360475 - DNA, 120 bp, Artificial Sequence
  ENSG00000140470_64 (sequence is synthesized)
catgatttttgctacgcactgttagcagcaagttcctcctcgacacctggagggttgactgttagcctggggttttcatcttcaggagcttttagccatctttccatttcctgccctgtc

SEQ ID NO: 360476 - DNA, 120 bp, Artificial Sequence
  ENSG00000140470_65 (sequence is synthesized)
ccagccctgtgtctgcagcaccattagatgaattactctctaggctcagaagcagaaagcatattcttattctcaccaaatcgccctgtttccttcaacaaagttccatgataactgaca

SEQ ID NO: 360477 - DNA, 120 bp, Artificial Sequence
  ENSG00000140470_66 (sequence is synthesized)
gctccctcgtctcgctcagcgcctgcggcgccgccggcggcctggtactgcccgcgccacctccgggtcggcccgtccggttggcctcattcagcttgggcaggagcaggtgctaatcca

SEQ ID NO: 360478 - DNA, 120 bp, Artificial Sequence
  ENSG00000140471_0 (sequence is synthesized)
agagcgggcatttgtgttccctcaaatggcggtgtgaagagagttcgcctgagccagatcccaggtttcactgaagaaacttcttagagattcattgcacttctgagatttaatgtttac

SEQ ID NO: 360479 - DNA, 120 bp, Artificial Sequence
  ENSG00000140471_1 (sequence is synthesized)
aacttggagttgtcgaccttcttataagatacattttggaagtcaaaatgaaagttttctgtgaagttttagaagagttatacaagaaggtacttcttggagccacacttgaaaatgaca

SEQ ID NO: 360480 - DNA, 120 bp, Artificial Sequence
  ENSG00000140471_2 (sequence is synthesized)
gccatgattacatcttttatctcaacccagcagtttcagatcaagattgttctacagccacctccttagaatgggcaaacacctgtggtatccagggcaggcatcagcccatctctgttg

SEQ ID NO: 360481 - DNA, 120 bp, Artificial Sequence
  ENSG00000140471_3 (sequence is synthesized)
gtgtggctcccattgctgtagcacctgtgtgtttgaagaccaactctcagatgagcggttccagagaagtaatgctccttcagttaacagtgatcaaagtgatgacaacccggatattgt

SEQ ID NO: 360482 - DNA, 120 bp, Artificial Sequence
  ENSG00000140471_4 (sequence is synthesized)
ctgtcaaaaccgagttccatgcaaaggagcagtacagagatgtaattaaaattctcttagaatcagccaaagtcgattctaaattaatctgcatgttccaaaattcagataaattgttat

SEQ ID NO: 360483 - DNA, 120 bp, Artificial Sequence
  ENSG00000140471_5 (sequence is synthesized)
ctcacatggctgcacagtgccttgcattgcttctatatttccaattgagagaaaagataaccttaagtaattcctggattgctttttgccagaaaaatctttctgaatactctgagagta

SEQ ID NO: 360484 - DNA, 120 bp, Artificial Sequence
  ENSG00000140471_6 (sequence is synthesized)
ataaagcaatatactgcctctggactcttacagcaataataaaagaaatctttaaagattcatgttcacagaaaacagaaattctaaagcagttcctgactcatttcgacaccatttttg

SEQ ID NO: 360485 - DNA, 120 bp, Artificial Sequence
  ENSG00000140471_7 (sequence is synthesized)
aagtgttttacaattccttattctctcagcattttgaaaactgccgggatacttctaaaatagtaaacatcctgatgtgtttcctggatttgcttgagcttctcatcgcctccagaatcc

SEQ ID NO: 360486 - DNA, 120 bp, Artificial Sequence
  ENSG00000140471_8 (sequence is synthesized)
acctgaagttacatttcacttgccagaggattttatttttgaaaccatcttgcatgctagaagttattacctggcctattcaggcttttgttaaaaggaaggtcatcatattcctcaaaa

SEQ ID NO: 360487 - DNA, 120 bp, Artificial Sequence
  ENSG00000140471_9 (sequence is synthesized)
agtgccttctctgtaaagtgggtgaagacctctgtcgtggatctgtgcctgccttaatgccgccagaccatcatgtagcggtggacatgctggctttagctaatgctgttttgcaagctg

SEQ ID NO: 360488 - DNA, 120 bp, Artificial Sequence
  ENSG00000140471_10 (sequence is synthesized)
tgaattcggggttgttgaagacactgtctgtttatgaaaaacattccttttttggaggtgatgaagttcaacctgaatgtgaacttatcactagtccagatcatgtgatccttagagcag

SEQ ID NO: 360489 - DNA, 120 bp, Artificial Sequence
  ENSG00000140471_11 (sequence is synthesized)
caagcttagttataatgaaatccttagaaatcaagtttcaaaattattcttcagcaagtgaagtgaaagttgacttacagaggttcatgtctgagttactgaccttcttaaagcctcatc

SEQ ID NO: 360490 - DNA, 120 bp, Artificial Sequence
  ENSG00000140471_12 (sequence is synthesized)
ttcagccctctctgcaattacacaatccgtgcaaatggctgtctcgggttttcatagaacaagacgatgacatgctggaggctgccaaggcatcactgggcatctacttaacactgacca

SEQ ID NO: 360491 - DNA, 120 bp, Artificial Sequence
  ENSG00000140471_13 (sequence is synthesized)
gaggatgtgaagccactgaaagcttgactcagggaaaagaaatgtgggaccatcacacacatgaaaatggctataatcctcactgtattttcttgttcttcttgaaaaatataggatttg

SEQ ID NO: 360492 - DNA, 120 bp, Artificial Sequence
  ENSG00000140471_14 (sequence is synthesized)
attccacagttcttcttgactttttgatttcatcagaaacctgttttcttgaatattttgttagatatttaaaattactgcaaaaggactgggataattttttcaccatttgcaataact

SEQ ID NO: 360493 - DNA, 120 bp, Artificial Sequence
  ENSG00000140471_15 (sequence is synthesized)
ttgatgcaactgaatctaaatatgacataagtatttgtggctgtgtcccctcacttgtccaagaccaaagctccaaccaaacaataccccatcgtttgactgctcctcatagtcacagag

SEQ ID NO: 360494 - DNA, 120 bp, Artificial Sequence
  ENSG00000140471_16 (sequence is synthesized)
atgtgtgtgctcggcactcctgggcttccgatgctccctctgaaccactgaaagctgtgatgtccaagggggctcacaccatgtgtgcttctagtctgtcttccccccgggcctctcaaa

SEQ ID NO: 360495 - DNA, 120 bp, Artificial Sequence
  ENSG00000140471_17 (sequence is synthesized)
gtctggtagattacgacagctctgacgattctgacgtggaatccacagagcagtgtttagctaacagtaaacagacatctttacaccagcaagcaactaaggagattcaggatgcagctg

SEQ ID NO: 360496 - DNA, 120 bp, Artificial Sequence
  ENSG00000140471_18 (sequence is synthesized)
ggacaagcagggataaaaaagaatttagccttgagcctccatcaaggcctctggttctgaaagaatttgatactgccttctcctttgattgtgaagtagccccaaatgatgtcgtctctg

SEQ ID NO: 360497 - DNA, 120 bp, Artificial Sequence
  ENSG00000140471_19 (sequence is synthesized)
atcttttcccatataatccaactgcacttttgaagttgttaaaatacatagaggtgataagtaataaaactatgaacactttgtaaaacattgacattttattttccaggtattgttttt

SEQ ID NO: 360498 - DNA, 120 bp, Artificial Sequence
  ENSG00000140471_20 (sequence is synthesized)
aaaacattgacattttattttccaggtattgtttttccttaatataaattatgtctcaatgaggtaatagtataaaatcatcaccataaaagggttttcttttttttttttttttttgag

SEQ ID NO: 360499 - DNA, 120 bp, Artificial Sequence
  ENSG00000140471_21 (sequence is synthesized)
tgggttttctagacaagttcttactttttgccttattggaagcaacctagtgactgaaaaagagacatcaagtgacaagtcactcattatagctatataccactggagatttatggcagt

SEQ ID NO: 360500 - DNA, 120 bp, Artificial Sequence
  ENSG00000140471_22 (sequence is synthesized)
tctaagtgacacaaaatcgggggtggtgattgcgttcctcagctagggctgccgtaacaacttgccacgtgtgccgcagcttcagacacctggaattatcctcatagttttggaggccag

SEQ ID NO: 360501 - DNA, 120 bp, Artificial Sequence
  ENSG00000140471_23 (sequence is synthesized)
aatccaaactcaggcttcagcagggcaatgccctcagggtctggagaagaatcccaccctgcccctttctggcttctggtggcagccagccagccatggtgtcccttgtcttgtagtggc

SEQ ID NO: 360502 - DNA, 120 bp, Artificial Sequence
  ENSG00000140471_24 (sequence is synthesized)
gtcactccagttcctgcctcacatggcattttcctgtgtctgtgtccagtttccctcctacaaggacatcggtcattggactaggacctaccctcatccagtatgatctcaacttgatga

SEQ ID NO: 360503 - DNA, 120 bp, Artificial Sequence
  ENSG00000140471_25 (sequence is synthesized)
cagctgcaaagaccctaatcccagatatggccactttcatgtgtccttgatggacttgaatccaggagagtcactaaccaaatacagttactatttccttctggggtatttacacagaaa

SEQ ID NO: 360504 - DNA, 120 bp, Artificial Sequence
  ENSG00000140471_26 (sequence is synthesized)
gcgatatattacaaatgtaaaatcttagccgtttctttgagaagtgattatacctggcctactgtatgaacatgattctttctaaaaaaaaatttaatcactaattttcctatttaaaat

SEQ ID NO: 360505 - DNA, 120 bp, Artificial Sequence
  ENSG00000140471_27 (sequence is synthesized)
tgtgacatgaataattatgttccatattcttgaggggaagccgtaaattccattgtaatatgtttgtgtaataggagcaatagctatattgtgctgcgaagtctggcattaaggcagtct

SEQ ID NO: 360506 - DNA, 120 bp, Artificial Sequence
  ENSG00000140471_28 (sequence is synthesized)
aaaatattgcctgtacatttttttttaatgatctctttgcagagaaacagaacaaagactaaacctaccgcacattaaaatatatattaaggctatggtattcgaaacagtttagtactt

SEQ ID NO: 360507 - DNA, 120 bp, Artificial Sequence
  ENSG00000140471_29 (sequence is synthesized)
aattcaggtagacatggaaaaatcagtggagctaaatagaaggttgccgattaaaataacagcgaagtaccagtgttagccaaatagcaatgcaaaggtcaaaaggtttgcgttttaaca

SEQ ID NO: 360508 - DNA, 120 bp, Artificial Sequence
  ENSG00000140471_30 (sequence is synthesized)
tgctgtcggtgaggctatgcgttaaggcagtttctaccgtaattgaaaaagcacgtcaaagaatgtgtattcaaggatgccacatagtttgtaaaaaatgttaaggttttagagttttac

SEQ ID NO: 360509 - DNA, 120 bp, Artificial Sequence
  ENSG00000140471_31 (sequence is synthesized)
tagaaatacctggtaaagtaagtcagaatttgtatagtcagtggaatggtagatgcgttctatgcacgtttgtggatgtgaaacatctccagtaaaaaacaagtaaatacatggggcttg

SEQ ID NO: 360510 - DNA, 120 bp, Artificial Sequence
  ENSG00000140471_32 (sequence is synthesized)
caattatttagggaaagaagcagggcgggagtaatacacattcatatatatgcttttgtgcatgtataaaatatgtatgtaagactacataagaaagtcataatagtggttgccttggga

SEQ ID NO: 360511 - DNA, 120 bp, Artificial Sequence
  ENSG00000140471_33 (sequence is synthesized)
gacaggtctgatgtggaagacaaagtctcatctttttgtactatttttagtgggatacatgcagcactgcattaggatgtttcaataacagaccacatagtacagtggtcccataagact

SEQ ID NO: 360512 - DNA, 120 bp, Artificial Sequence
  ENSG00000140471_34 (sequence is synthesized)
ccacatagtacagtggtcccataagactatcaagccgttatttttactgtgactgtcctatgtttaggcatgtttagatacacgcatacttactattgtgttacagttgcctacagtatt

SEQ ID NO: 360513 - DNA, 120 bp, Artificial Sequence
  ENSG00000140471_35 (sequence is synthesized)
tatagcctaggtgtgtagtaggctatgccatctaggtttgttgagtatactctgtgacatacatgacatgacaacaaaattgccttacagctcatttctcagaacatgtccctgtcatgt

SEQ ID NO: 360514 - DNA, 120 bp, Artificial Sequence
  ENSG00000140471_36 (sequence is synthesized)
catttctcagaacatgtccctgtcatgtgacacatggctgttttttgatggaaataactgggaaaaaaaaatcgactcttgttcctaagggtacataaatgttgaatgcattataactca

SEQ ID NO: 360515 - DNA, 120 bp, Artificial Sequence
  ENSG00000140471_37 (sequence is synthesized)
agagcgggcatttgtgttccctcaaatggcggtgtgaagagagttcgcctgagccagatcccaggcaggtttcactgaagaaacttcttagagattcattgcacttctgagatttaatgt

SEQ ID NO: 360516 - DNA, 120 bp, Artificial Sequence
  ENSG00000140471_38 (sequence is synthesized)
aaaggtaattctccaaactccttttgtatgcagtgtgtaattatttacttaagtacagtaattcataattatcaaatctcaggactagtttaaattccagtaatttaagctgtatgttat

SEQ ID NO: 360517 - DNA, 120 bp, Artificial Sequence
  ENSG00000140471_39 (sequence is synthesized)
cctatttgtaacttattacattttcaaaaaaaaaaaaaagaactggatttacctttaagaaacatgtcagctttttgtgcctacaatgaatttgtaaagcataaggaatgatttaggttt

SEQ ID NO: 360518 - DNA, 120 bp, Artificial Sequence
  ENSG00000140471_40 (sequence is synthesized)
ctgcagccctgaccccccttcggcccatgctattcctcctgtcccaacctgggaggtcctagcctgggagatcaaggctacagtgagccgcgacccatcgcacacctgcactccagtcct

SEQ ID NO: 360519 - DNA, 120 bp, Artificial Sequence
  ENSG00000140471_41 (sequence is synthesized)
ggtgcaacagatggagatcctttcagggagagagagagagagagaggagaagacagagagattaaagaaaaatatgttcactcccacttatgtgtttattgttattattgtttgttgtta

SEQ ID NO: 360520 - DNA, 120 bp, Artificial Sequence
  ENSG00000140471_42 (sequence is synthesized)
tttctttgttattgttgtgtttactgtttatttattttgaggcagggtcttgctctgtctcccaggctcactgcagcctcaacgttttgagctgaagtgatcctctcgtctctgtttccc

SEQ ID NO: 360521 - DNA, 120 bp, Artificial Sequence
  ENSG00000140471_43 (sequence is synthesized)
caccccatttgtattaatccttcatacaattagtgtttccactaatgtagattattgaaaattagatattgaattaaagctaatatatgagaagttatattgacaaagaaattgttacat

SEQ ID NO: 360522 - DNA, 120 bp, Artificial Sequence
  ENSG00000140471_44 (sequence is synthesized)
atataatttccagaatagtaactcaggagttcaaagtcttccattttacttgagaaaaatgaatagtaaatgtctctaaacaggcagcatacagattcagtgaaaagtttgaattgtgag

SEQ ID NO: 360523 - DNA, 120 bp, Artificial Sequence
  ENSG00000140471_45 (sequence is synthesized)
caatgacatcactgaattgctttggatataatttagcttttaataactacacattagttataattctgtgcagttttaatttataacactagatggcacctgttatataattcagtttta

SEQ ID NO: 360524 - DNA, 120 bp, Artificial Sequence
  ENSG00000140471_46 (sequence is synthesized)
aattgtagttcaaactacctaaaacgttttttatttttgtgcttaatagtagtacttctatgctttaaacaaacaaaaaatatgtttttctgttattttgaagacaaaattatttttgct

SEQ ID NO: 360525 - DNA, 120 bp, Artificial Sequence
  ENSG00000140471_47 (sequence is synthesized)
tggttgcattcttggacagacagctctggcatccgatgaagtgatcttagttgtctgctcatttatttatctgcttttagcaagaaatcacataacttttatttctaagagacagttgtt

SEQ ID NO: 360526 - DNA, 120 bp, Artificial Sequence
  ENSG00000140471_48 (sequence is synthesized)
aggcagttgttgcaaatagatgatgtagctgtacattttaaatgtatgctctggaatgagtcactttttttccctgagcctcagtgtcctcatttgccaaataaagatgcttcctaactg

SEQ ID NO: 360527 - DNA, 120 bp, Artificial Sequence
  ENSG00000140471_49 (sequence is synthesized)
cggcagttcaaggcgtacctcagccttacagttataatcttccatagctccagcaaaagtcccaggggagacctgattaacccacttgggtcacagagccttgtcagaaccagtcattgt

SEQ ID NO: 360528 - DNA, 120 bp, Artificial Sequence
  ENSG00000140471_50 (sequence is synthesized)
ggccaggagcatggagtgctctgattggtcaatctgggtcacatgcccacccttgttgagggtaaggaaggaggtttaggaattatcttaccacatggaattggttacctataagaatga

SEQ ID NO: 360529 - DNA, 120 bp, Artificial Sequence
  ENSG00000140471_51 (sequence is synthesized)
ttcagccagctcaaacctagaaaaacagaaaccacctcctctacactcaccaacttctccattgaagaaataccccaggcagggccggaccctggtgttcctgatcctcctcggtgcctc

SEQ ID NO: 360530 - DNA, 120 bp, Artificial Sequence
  ENSG00000140471_52 (sequence is synthesized)
acggccccagcccggcgaacatccgaacagccgagaaggcaggaggtggcgatcccggccgccgggcagccttggggcagaggtgcagggaggcagggaggaagtcctggctcgggtggg

SEQ ID NO: 360531 - DNA, 120 bp, Artificial Sequence
  ENSG00000140471_53 (sequence is synthesized)
ggcgaggtcccaggtcatacggggcccgaagtgccagccgtggggtctccggacagggggctttcgggatgcactttgcactgggccacccccgccccctcccttcagcactttggggtc

SEQ ID NO: 360532 - DNA, 120 bp, Artificial Sequence
  ENSG00000140471_54 (sequence is synthesized)
actgggatgggaccaagccttcaacaaccaatcagcgcccgcagtggagcctgagcctggagccgtaaaccaggtttcactgaagaaacttcttagagattcattgcacttctgagattt

SEQ ID NO: 360533 - DNA, 120 bp, Artificial Sequence
  ENSG00000140471_55 (sequence is synthesized)
ggcggtgtgaagagagttcgcctgagccagatcccaggcagttttaacaagggaggcatgagacatcaatcaagatatgtaaaatgaacattggttcagtccagaaaggtgggacaactc

SEQ ID NO: 360534 - DNA, 120 bp, Artificial Sequence
  ENSG00000140471_56 (sequence is synthesized)
aacaacaagaaagaggccaaatcacaagcaacaagacacatgcggacaaaatggaaaaggagaaaacaattttggaagctcaaagtctgctgtggaggatggccaaggcctgcctctagt

SEQ ID NO: 360535 - DNA, 120 bp, Artificial Sequence
  ENSG00000140471_57 (sequence is synthesized)
gaagatgtgtcattccagttgttataggccaatggtgacatacccaatgtgggaggctggattcacaaacacagcagcatgccatttggaatagtgatatgtagaacagacgatgctggg

SEQ ID NO: 360536 - DNA, 120 bp, Artificial Sequence
  ENSG00000140474_0 (sequence is synthesized)
ggaagcgcccgcgcgggcgcaggcggccggaatggcggggcccggctggggtcccccgcgcctggacggcttcatcctcaccgagcgcctgggcagcggcacgtacgccacggtgtacaa

SEQ ID NO: 360537 - DNA, 120 bp, Artificial Sequence
  ENSG00000140474_1 (sequence is synthesized)
acgtacgccacggtgtacaaggcctacgccaagaaggacactcgtgaagtggtagccataaagtgtgtagccaagaaaagtctgaacaaggcatcggtggagaacctcctcacggagatt

SEQ ID NO: 360538 - DNA, 120 bp, Artificial Sequence
  ENSG00000140474_2 (sequence is synthesized)
gagatcctcaagggcattcgacatccccacattgtgcagctgaaagactttcagtgggacagtgacaatatctacctcatcatggagttttgcgcagggggcgacctgtctcgcttcatc

SEQ ID NO: 360539 - DNA, 120 bp, Artificial Sequence
  ENSG00000140474_3 (sequence is synthesized)
catacccgcaggattctgcctgagaaggtggcgcgtgtcttcatgcagcaattagctagcgccctgcaattcctgcatgaacggaatatctctcacctggatctgaagccacagaacatt

SEQ ID NO: 360540 - DNA, 120 bp, Artificial Sequence
  ENSG00000140474_4 (sequence is synthesized)
ctactgagctccttggagaagccccacctaaaactggcagactttggtttcgcacaacacatgtccccgtgggatgagaagcacgtgctccgtggctcccccctctacatggcccccgag

SEQ ID NO: 360541 - DNA, 120 bp, Artificial Sequence
  ENSG00000140474_5 (sequence is synthesized)
atggtgtgccagcggcagtatgacgcccgcgtggacctctggtccatgggggtcatcctgtatgaagccctcttcgggcagcccccctttgcctccaggtcgttctcggagctggaagag

SEQ ID NO: 360542 - DNA, 120 bp, Artificial Sequence
  ENSG00000140474_6 (sequence is synthesized)
aagatccgtagcaaccgggtcatcgagctccccttgcggcccctgctctcccgagactgccgggacctactgcagcggctcctggagcgggaccccagccgtcgcatctccttccaggac

SEQ ID NO: 360543 - DNA, 120 bp, Artificial Sequence
  ENSG00000140474_7 (sequence is synthesized)
ttttttgcgcacccctgggtggacctggagcacatgcccagtggggagagtctggggcgagcaaccgccctggtggtgcaggctgtgaagaaagaccaggagggggattcagcagctgcc

SEQ ID NO: 360544 - DNA, 120 bp, Artificial Sequence
  ENSG00000140474_8 (sequence is synthesized)
ttatcactctactgcaaggctctggacttctttgtacctgccctgcactatgaagtggatgcccagcggaaggaggcaattaaggcaaaggtggggcagtacgtgtcccgggctgaggag

SEQ ID NO: 360545 - DNA, 120 bp, Artificial Sequence
  ENSG00000140474_9 (sequence is synthesized)
ctcaaggccatcgtctcctcttccaatcaggccctgctgaggcaggggacctctgcccgagacctgctcagagagatggcccgggacaagccacgcctcctagctgccctggaagtggct

SEQ ID NO: 360546 - DNA, 120 bp, Artificial Sequence
  ENSG00000140474_10 (sequence is synthesized)
cagcacagcctgggggagctactgctgttgctggcagcggagcccccgggccggaggcgggagctgcttcacactgaggttcagaacctcatggcccgagctgaatacttgaaggagcag

SEQ ID NO: 360547 - DNA, 120 bp, Artificial Sequence
  ENSG00000140474_11 (sequence is synthesized)
gtcaagatgagggaatctcgctgggaagctgacaccctggacaaagagggactgtcggaatctgttcgtagctcttgcacccttcagtgaccctagaagaatgattggacagatgtgagc

SEQ ID NO: 360548 - DNA, 120 bp, Artificial Sequence
  ENSG00000140474_12 (sequence is synthesized)
catctggagcagaggggcactaacccaggctgacgccaagaatgaagtggcccactgcagccctggcgagcaggcttcttggatggacagtgctgagacccccatatcccagagtcccca

SEQ ID NO: 360549 - DNA, 120 bp, Artificial Sequence
  ENSG00000140474_13 (sequence is synthesized)
gcctccctcaggttactctgcaccccacagatggtttgatggctgtgctgtatactggaggggagggcaggactctgggagaacagcacttctttcatgagacctttgttactcggtggt

SEQ ID NO: 360550 - DNA, 120 bp, Artificial Sequence
  ENSG00000140474_14 (sequence is synthesized)
tactgggtcctgtgcctgtccgttttggggcatgcagccctctatcatttttggctccgagaagagggcaaggggcccccgcagggtacttctgtgcttgccctcgccctgccagcaggc

SEQ ID NO: 360551 - DNA, 120 bp, Artificial Sequence
  ENSG00000140474_15 (sequence is synthesized)
agctgtgcccctggcctgcccttcccgggaccccttattccaactcagctcctctttgcactggaatggggcactccaacacccctcagggaccaccctccccacagtatgcactcagcc

SEQ ID NO: 360552 - DNA, 120 bp, Artificial Sequence
  ENSG00000140474_16 (sequence is synthesized)
ccacagaacccaccagtctttctgggaactcacacctgcccgccatcttggtactttaggttaatccctcaagcatgaaagctggatcttttggggtttaagaagcccaagccttgttcc

SEQ ID NO: 360553 - DNA, 120 bp, Artificial Sequence
  ENSG00000140474_17 (sequence is synthesized)
tgccctggcctagggagcactcaggagggttccttggtcctcatctctcccacctccgttccctctgggccccacactagccacagcgcgggccttgtgctggagtttgagcctgggaca

SEQ ID NO: 360554 - DNA, 120 bp, Artificial Sequence
  ENSG00000140474_18 (sequence is synthesized)
gggagagggaggcttggagacagtctgacccagtgccctctaggccacccacttctaggcctgccctgccgccgtggagccctgggcaagctctttcccctttctgggcctgggtctccc

SEQ ID NO: 360555 - DNA, 120 bp, Artificial Sequence
  ENSG00000140474_19 (sequence is synthesized)
catctcttcaatggggctgataccttcacagcccacagcatgggcacttatgaggacaaagtgaatttaacctggaaaagaatgtatttgagagtttcttttaaataatcagcgggtgtt

SEQ ID NO: 360556 - DNA, 120 bp, Artificial Sequence
  ENSG00000140474_20 (sequence is synthesized)
ggtgatttgtagcccttctgcccttaaatgcttccttgggcaagagctgtctgtcctccctgcaggaggctgagtgtaaagagtatcattcattgtttctctattaaattattttctcta

SEQ ID NO: 360557 - DNA, 120 bp, Artificial Sequence
  ENSG00000140474_21 (sequence is synthesized)
agaatgcaaagaaatggatcagctagccgagggttggagaagaccaggctgaggctgtgtcgggaagccaggattccagaatcagcattcctcactggcctcacaagggaaagctgggaa

SEQ ID NO: 360558 - DNA, 120 bp, Artificial Sequence
  ENSG00000140474_22 (sequence is synthesized)
ctgtatggtgagacctcttttccctgcttctcaccctgaggcctacagtttcctcaggcaaggcctctctgggccacttctgaagggttctgatgaaaactgactgctggcccagggccc

SEQ ID NO: 360559 - DNA, 120 bp, Artificial Sequence
  ENSG00000140474_23 (sequence is synthesized)
ctgctgaggggcgtcaggccaggcttgacccattccctcccagcctccgctctgcctcccttccacagaagccctcttcgggcagcccccctttgcctccaggtcgttctcggagctgga

SEQ ID NO: 360560 - DNA, 120 bp, Artificial Sequence
  ENSG00000140474_24 (sequence is synthesized)
ggcctccgtatccccacgtgggccctgcaggaactggcggggcgcgtgacccggcgaggcccagagacaggggaggggcgccgggagccgggcggatccgcgtccccgatgcgcgctgca

SEQ ID NO: 360561 - DNA, 120 bp, Artificial Sequence
  ENSG00000140474_25 (sequence is synthesized)
gcccggtgctggtgtgcagtaggtagacccggggaggggcggggtgggggaacagagggaaccagatagagcctttccagtcagacaagggtcctggccccctcaaggcagagtccccaa

SEQ ID NO: 360562 - DNA, 120 bp, Artificial Sequence
  ENSG00000140474_26 (sequence is synthesized)
gggcattcgacatccccacattgtgcagctgaaagactttcaggtgtgagcctggggcggggccgctgccaaagggagctggagaagggacactctcttcaggccgcctctctgcctcta

SEQ ID NO: 360563 - DNA, 120 bp, Artificial Sequence
  ENSG00000140474_27 (sequence is synthesized)
ggcttcctggaggaaggagcagataagggactcaggaggcaagttgttctgatggggcagagggttctggagagcatcaggggtgaggaggagttccctttgaaaccccaccccccgcca

SEQ ID NO: 360564 - DNA, 120 bp, Artificial Sequence
  ENSG00000140478_0 (sequence is synthesized)
agtcacacagcagccttgtaggtgactggaggtgttcgctgatgtggccccaaccctacctccctccccaccccatgatgttagaagaatctcgacagaataaattggcagcagccaaga

SEQ ID NO: 360565 - DNA, 120 bp, Artificial Sequence
  ENSG00000140478_1 (sequence is synthesized)
aaaagctaaaagaatatcagcaaaggaagagccctggtattccagcaggagcaaagacaaaaaagaaaaaaactgacagtagccctgagacaaccacttccggtggtggccactcacctg

SEQ ID NO: 360566 - DNA, 120 bp, Artificial Sequence
  ENSG00000140478_2 (sequence is synthesized)
gggatagccagtaccaagaactagcagtagccctggagtcaagctcagtgacaatcaatcagctcaatgaaaacatagaatcattgaaacagcagaagaaacaagtggaacatcagctgg

SEQ ID NO: 360567 - DNA, 120 bp, Artificial Sequence
  ENSG00000140478_3 (sequence is synthesized)
aagaagcaaagaaaacaaacaatgaaatacacaaagcacaaatggagcagttagagacaatcaacatcctcacattggaaaaggcagacttgaagaccaccctttaccatactaaacgtg

SEQ ID NO: 360568 - DNA, 120 bp, Artificial Sequence
  ENSG00000140478_4 (sequence is synthesized)
ctgcccgacacttcgaagaagagtccaaggatctggctggccgcctgcaatactccttacagcatattcaagaattggagcgggctctctgtgctgtgtctacacagcagcaggaagagg

SEQ ID NO: 360569 - DNA, 120 bp, Artificial Sequence
  ENSG00000140478_5 (sequence is synthesized)
acaggtcctcgagctgcagagaagcggtcctccagcggcggttacagcagaccataaaggagcgggcgctgctgaacgcacacgtgacacaggtgacagagtcactaaaacaagtccagc

SEQ ID NO: 360570 - DNA, 120 bp, Artificial Sequence
  ENSG00000140478_6 (sequence is synthesized)
tagagcgagacgaatatgctaaacacataaaaggagagagggcccggtggcaggagaggatgtggaaaatgtcggtggaggctcgaacattgaaggaagagaagaagcgtgacatacatc

SEQ ID NO: 360571 - DNA, 120 bp, Artificial Sequence
  ENSG00000140478_7 (sequence is synthesized)
ggatacaggagctggagaggagcttgtccgaactcaaaaaccagatggctgagcccccatccctggcacccccagcagtgacctctgtggtggaacagctacaagatgaggccaaacacc

SEQ ID NO: 360572 - DNA, 120 bp, Artificial Sequence
  ENSG00000140478_8 (sequence is synthesized)
caaaagcagagactccaggagcaggaggagatgctccgagagcaggaggcgcagagagtgcgggagcaggagagactgtgtgaacaaaacgagaggcttcgggagcagcagaagacgcta

SEQ ID NO: 360573 - DNA, 120 bp, Artificial Sequence
  ENSG00000140478_9 (sequence is synthesized)
caggagcagggtgagaggctgcgaaagcaggagcagaggctacgcaaacaggaggagaggctgcgaaaggaggaggagaggctgcaaaagcaggaaaagaggctgtgggaccaggaggag

SEQ ID NO: 360574 - DNA, 120 bp, Artificial Sequence
  ENSG00000140478_10 (sequence is synthesized)
aggctgtggaagaaggaggagaggctacaaaagcaggaggagaggctcgcgctctcccagaaccacaagctcgacaagcagctggccgagccacagtgcagcttcgaggatctgaacaac

SEQ ID NO: 360575 - DNA, 120 bp, Artificial Sequence
  ENSG00000140478_11 (sequence is synthesized)
agtaaaggagctgcaggagaagctagacgaggagcacctagaagctgccagccagcggaaccaacagctagagacccagctaagcctcgtggctctccctggagaaggagatggaggaca

SEQ ID NO: 360576 - DNA, 120 bp, Artificial Sequence
  ENSG00000140478_12 (sequence is synthesized)
gtggctctccctggagaaggagatggaggacaacatctggacagtgaggaggaggaggcgcctcggcccacgccaaacatcccagaggacctggagagccgggaggccacgagcagcttt

SEQ ID NO: 360577 - DNA, 120 bp, Artificial Sequence
  ENSG00000140478_13 (sequence is synthesized)
atggacctcccgaaggagaaggcggacgggacggagcaggtggagagacgagagcttggattcgtccagccttctggagtgacagacggcatgagagagtccttcaccgtatatgaaagc

SEQ ID NO: 360578 - DNA, 120 bp, Artificial Sequence
  ENSG00000140478_14 (sequence is synthesized)
cagggggcagtgccaaacacgcggcaccaggagatggaggatgtcatcaggctggcccagaaggaggaggagatgaaggtgaagctgctggagctgcaagagttggtgttgccccttgtg

SEQ ID NO: 360579 - DNA, 120 bp, Artificial Sequence
  ENSG00000140478_15 (sequence is synthesized)
ggcaaccatgaggggcatggcaaattcctcatcgctgcccagaaccctgctgatgagcccactccaggggccccagccccccaggaacttggggctgccggtgagcaggatgttttttat

SEQ ID NO: 360580 - DNA, 120 bp, Artificial Sequence
  ENSG00000140478_16 (sequence is synthesized)
gaagtgagcctggacaacaacgtggagcctgcaccaggagtggccagggagggttctccccataacaaccccactgtacagcagatcgtgcagctgtctcctgtcatgcaggacacctag

SEQ ID NO: 360581 - DNA, 120 bp, Artificial Sequence
  ENSG00000140478_17 (sequence is synthesized)
ttgcccagcaaaccctgcgtgccattcttctaccaggcagccgagaacagggagataaacatcatcatcttctaagagctggtcaagaaatttaaaacaacaacaacaacaaaaagttac

SEQ ID NO: 360582 - DNA, 120 bp, Artificial Sequence
  ENSG00000140478_18 (sequence is synthesized)
ggggttcatctcctacacaattcatttactccatttgaatgctagagccactcacttttatttgtgtttctaatttaccgtttaaatttatttgtaaaaagttaagggagagttggtctt

SEQ ID NO: 360583 - DNA, 120 bp, Artificial Sequence
  ENSG00000140478_19 (sequence is synthesized)
tccctgatgttctttctggcatcctttagcatttttatttttaatttgataattgtaggtcattagtatgcatatcgagtttgcccttaggtggtgggaattcaaacacacaaagaccca

SEQ ID NO: 360584 - DNA, 80 bp, Artificial Sequence
  ENSG00000140478_20 (sequence is synthesized)
tccagaattcagataaaatgtgcttatgttctgctattacgtttgatcgaatcctaaccacagtgagctcttcattagct

SEQ ID NO: 360585 - DNA, 120 bp, Artificial Sequence
  ENSG00000140478_21 (sequence is synthesized)
tgcttatgttctgctattacgtttgatcgaatcctaaccacagtgagctcttcattagctcaatatgtggtttgccctcaattgagcactgtttattactttgtaatatgccactgtgag

SEQ ID NO: 360586 - DNA, 120 bp, Artificial Sequence
  ENSG00000140478_22 (sequence is synthesized)
atctcacagaagaggaaagtggcctgctctggcaggtgtgtgcaggatagagtgtgtttcatttgttctggtgccaagaatgagcgctgcactatggtagttcccttaggatttgtatgt

SEQ ID NO: 360587 - DNA, 79 bp, Artificial Sequence
  ENSG00000140478_23 (sequence is synthesized)
gttgtaccctttcttgatgacctgactgtggatgtggaaaaccttttctagcttagagcatttatatctacaatacatt

SEQ ID NO: 360588 - DNA, 75 bp, Artificial Sequence
  ENSG00000140478_24 (sequence is synthesized)
tgagtagtatttagtgaagatcataagaaatcctttaagagtttaaatgtccctggaagaggcatacaggctcta

SEQ ID NO: 360589 - DNA, 76 bp, Artificial Sequence
  ENSG00000140478_25 (sequence is synthesized)
cttcctctatgttcatggagcttctttgaggctagaagattgattttatcatctagacctctctggctaataccta

SEQ ID NO: 360590 - DNA, 120 bp, Artificial Sequence
  ENSG00000140478_26 (sequence is synthesized)
agattgattttatcatctagacctctctggctaatacctattcttcaaccacactagttactctgacataggaatttacttcttttctttgaatggaaaacactttaaaaataataacaa

SEQ ID NO: 360591 - DNA, 80 bp, Artificial Sequence
  ENSG00000140479_0 (sequence is synthesized)
ccgcgtccctggcgctggctgctgctgctggcgctgcctgccgcctgctccgcgcccccgccgcgccccgtctacaccaa

SEQ ID NO: 360592 - DNA, 120 bp, Artificial Sequence
  ENSG00000140479_1 (sequence is synthesized)
cgtctacaccaaccactgggcggtgcaagtgctgggcggcccggccgaggcggaccgcgtggcggcggcgcacgggtacctcaacttgggccagattggaaacctggaagattactacca

SEQ ID NO: 360593 - DNA, 120 bp, Artificial Sequence
  ENSG00000140479_2 (sequence is synthesized)
tttttatcacagcaaaacctttaaaagatcaaccttgagtagcagaggccctcacaccttcctcagaatggacccccaggtgaaatggctccagcaacaggaagtgaaacgaagggtgaa

SEQ ID NO: 360594 - DNA, 120 bp, Artificial Sequence
  ENSG00000140479_3 (sequence is synthesized)
gagacaggtgcgaagtgacccgcaggccctttacttcaacgaccccatttggtccaacatgtggtacctgcattgtggcgacaagaacagtcgctgccggtcggaaatgaatgtccaggc

SEQ ID NO: 360595 - DNA, 120 bp, Artificial Sequence
  ENSG00000140479_4 (sequence is synthesized)
agcgtggaagaggggctacacaggaaaaaacgtggtggtcaccatccttgatgatggcatagagagaaatcaccctgacctggccccaaattatgattcctacgccagctacgacgtgaa

SEQ ID NO: 360596 - DNA, 120 bp, Artificial Sequence
  ENSG00000140479_5 (sequence is synthesized)
cggcaatgattatgacccatctccacgatatgatgccagcaatgaaaataaacacggcactcgttgtgcgggagaagttgctgcttcagcaaacaattcctactgcatcgtgggcatagc

SEQ ID NO: 360597 - DNA, 120 bp, Artificial Sequence
  ENSG00000140479_6 (sequence is synthesized)
gtacaatgccaaaataggaggcatccgcatgctggacggcgatgtcacagatgtggtcgaggcaaagtcgctgggcatcagacccaactacatcgacatttacagtgccagctgggggcc

SEQ ID NO: 360598 - DNA, 120 bp, Artificial Sequence
  ENSG00000140479_7 (sequence is synthesized)
ggacgacgacggcaagacggtggacgggcccggccgactggctaagcaggctttcgagtatggcattaaaaagggccggcagggcctgggctccattttcgtctgggcatctgggaatgg

SEQ ID NO: 360599 - DNA, 120 bp, Artificial Sequence
  ENSG00000140479_8 (sequence is synthesized)
cgggagagagggggactactgctcgtgcgatggctacaccaacagcatctacaccatctccgtcagcagcgccaccgagaatggctacaagccctggtacctggaagagtgtgcctccac

SEQ ID NO: 360600 - DNA, 120 bp, Artificial Sequence
  ENSG00000140479_9 (sequence is synthesized)
cctggccaccacctacagcagtggggccttttatgagcgaaaaatcgtcaccacggatctgcgtcagcgctgtaccgatggccacactgggacctcagtctctgcccccatggtggcggg

SEQ ID NO: 360601 - DNA, 120 bp, Artificial Sequence
  ENSG00000140479_10 (sequence is synthesized)
catcatcgccttggctctagaagcaaacagccagttaacctggagggacgtccagcacctgctagtgaagacatcccggccggcccacctgaaagcgagcgactggaaagtgaacggcgc

SEQ ID NO: 360602 - DNA, 120 bp, Artificial Sequence
  ENSG00000140479_11 (sequence is synthesized)
gggtcataaagttagccatttctatggatttggtttggtggacgcagaagctctcgttgtggaggcaaagaagtggacagcagtgccatcgcagcacatgtgtgtggccgcctcggacaa

SEQ ID NO: 360603 - DNA, 120 bp, Artificial Sequence
  ENSG00000140479_12 (sequence is synthesized)
gagacccaggagcatccccttagtgcaggtgctgcggactacggccctgaccagcgcctgcgcggagcactcggaccagcgggtggtctacttggagcacgtggtggttcgcacctccat

SEQ ID NO: 360604 - DNA, 120 bp, Artificial Sequence
  ENSG00000140479_13 (sequence is synthesized)
ctcacacccacgccgaggagacctccagatctacctggtttctccctcgggaaccaagtctcaacttctggcaaagaggttgctggatctttccaatgaagggtttacaaactgggaatt

SEQ ID NO: 360605 - DNA, 120 bp, Artificial Sequence
  ENSG00000140479_14 (sequence is synthesized)
catgactgtccactgctggggagaaaaggctgaagggcagtggaccttggaaatccaagatctgccatcccaggtccgcaacccggagaagcaagggaagttgaaagaatggagcctcat

SEQ ID NO: 360606 - DNA, 120 bp, Artificial Sequence
  ENSG00000140479_15 (sequence is synthesized)
actgtatggcacagcagagcacccgtaccacaccttcagtgcccatcagtcccgctcgcggatgctggagctctcagccccagagctggagccacccaaggctgccctgtcaccctccca

SEQ ID NO: 360607 - DNA, 120 bp, Artificial Sequence
  ENSG00000140479_16 (sequence is synthesized)
cagtgtgtgccatccggagtgtggtgacaaaggctgtgatggccccaatgcagaccagtgcttgaactgcgtccacttcagcctggggagtgtcaagaccagcaggaagtgcgtgagtgt

SEQ ID NO: 360608 - DNA, 120 bp, Artificial Sequence
  ENSG00000140479_17 (sequence is synthesized)
gtgccccttgggctactttggggacacagcagcaagacgctgtcgccggtgccacaaggggtgtgagacctgctccagcagagctgcgacgcagtgcctgtcttgccgccgcgggttcta

SEQ ID NO: 360609 - DNA, 120 bp, Artificial Sequence
  ENSG00000140479_18 (sequence is synthesized)
tcaccaccaggagatgaacacctgtgtgaccctctgtcctgcaggattttatgctgatgaaagtcagaaaaattgccttaaatgccacccaagctgtaaaaagtgcgtggatgaacctga

SEQ ID NO: 360610 - DNA, 120 bp, Artificial Sequence
  ENSG00000140479_19 (sequence is synthesized)
gaaatgtactgtctgtaaagaaggattcagccttgcacggggcagctgcattcctgactgtgagccaggcacctactttgactcagagctgatcagatgtggggaatgccatcacacctg

SEQ ID NO: 360611 - DNA, 120 bp, Artificial Sequence
  ENSG00000140479_20 (sequence is synthesized)
cggaacctgcgtggggccaggcagagaagagtgcattcactgtgcgaaaaacttccacttccacgactggaagtgtgtgccagcctgtggtgagggcttctacccagaagagatgccggg

SEQ ID NO: 360612 - DNA, 120 bp, Artificial Sequence
  ENSG00000140479_21 (sequence is synthesized)
cttgccccacaaagtgtgtcgaaggtgtgacgagaactgcttgagctgtgcaggctccagcaggaactgtagcaggtgtaagacgggcttcacacagctggggacctcctgcatcaccaa

SEQ ID NO: 360613 - DNA, 120 bp, Artificial Sequence
  ENSG00000140479_22 (sequence is synthesized)
ccacacgtgcagcaacgctgacgagacattctgcgagatggtgaagtccaaccggctgtgcgaacggaagctcttcattcagttctgctgccgcacgtgcctcctggccgggtaagggtg

SEQ ID NO: 360614 - DNA, 120 bp, Artificial Sequence
  ENSG00000140479_23 (sequence is synthesized)
cctagctgcccacagagggcaggcactcccatccatccatccgtccaccttcctccagactgtcggccagagtctgtttcaggagcggcgccctgcacctgacagctttatctccccagg

SEQ ID NO: 360615 - DNA, 120 bp, Artificial Sequence
  ENSG00000140479_24 (sequence is synthesized)
agcagcatctctgagcacccaagccaggtgggtggtggctcttaaggaggtgttcctaaaatggtgatatcctctcaaatgctgcttgttggctccagtcttccgacaaactaacaggaa

SEQ ID NO: 360616 - DNA, 120 bp, Artificial Sequence
  ENSG00000140479_25 (sequence is synthesized)
caaaatgaattctgggaatccacagctctggctttggagcagcttctgggaccataagtttactgaatcttcaagaccaaagcagaaaagaaaggcgcttggcatcacacatcactcttc

SEQ ID NO: 360617 - DNA, 120 bp, Artificial Sequence
  ENSG00000140479_26 (sequence is synthesized)
tccccgtgcttttctgcggctgtgtagtaaatctccccggcccagctggcgaaccctgggccatcctcacatgtgacaaagggccagcagtctacctgctcgttgcctgccactgagcag

SEQ ID NO: 360618 - DNA, 120 bp, Artificial Sequence
  ENSG00000140479_27 (sequence is synthesized)
tctggggacggtttggtcagactataaataagataggtttgagggcataaaatgtatgaccactggggccggagtatctatttctacatagtcagctacttctgaaactgcagcagtggc

SEQ ID NO: 360619 - DNA, 120 bp, Artificial Sequence
  ENSG00000140479_28 (sequence is synthesized)
ttagaaagtccaattccaaagccagaccagaagattctatcccccgcagcgctctcctttgagcaagccgagctctccttgttaccgtgttctgtctgtgtcttcaggagtctcatggcc

SEQ ID NO: 360620 - DNA, 120 bp, Artificial Sequence
  ENSG00000140479_29 (sequence is synthesized)
tgaacgaccacctcgacctgatgcagagccttctgaggagaggcaacaggaggcattctgtggccagccaaaaggtaccccgatggccaagcaattcctctgaacaaaatgtaaagccag

SEQ ID NO: 360621 - DNA, 120 bp, Artificial Sequence
  ENSG00000140479_30 (sequence is synthesized)
ccatgcattgttaatcatccatcacttcccattttatggaattgcttttaaaatacatttggcctctgcccttcagaagactcgtttttaaggtggaaactcctgtgtctgtgtatatta

SEQ ID NO: 360622 - DNA, 120 bp, Artificial Sequence
  ENSG00000140479_31 (sequence is synthesized)
caagcctacatgacacagttggatttattctgccaaacctgtgtaggcattttataagctacatgttctaatttttaccgatgttaattattttgacaaatatttcatatattttcattg

SEQ ID NO: 360623 - DNA, 120 bp, Artificial Sequence
  ENSG00000140479_32 (sequence is synthesized)
aaatgcacagatctgcttgatcaattcccttgaatagggaagtaacatttgccttaaattttttcgacctcgtctttctccatattgtcctgctcccctgtttgacgacagtgcatttgc

SEQ ID NO: 360624 - DNA, 120 bp, Artificial Sequence
  ENSG00000140479_33 (sequence is synthesized)
cttgtcacctgtgagctggagagaacccagatgttgtttattgaatctacaactctgaaagagaaatcaatgaagcaagtacaatgttaaccctaaattaataaaagagttaacatccca

SEQ ID NO: 360625 - DNA, 80 bp, Artificial Sequence
  ENSG00000140479_34 (sequence is synthesized)
gagcggctttaaaaggcggcactccaccccccggcgcactcgcagctcgggcgccgcgcgagcctgtcgccgctatgcct

SEQ ID NO: 360626 - DNA, 120 bp, Artificial Sequence
  ENSG00000140479_35 (sequence is synthesized)
ggtacggtcctcctggcggggaacggcaggcagctgtgtccagcaaaggagtgcctggagggcagagtctggcagcatcttccccaggggccggggagggcatgttgcatcaccccactg

SEQ ID NO: 360627 - DNA, 120 bp, Artificial Sequence
  ENSG00000140479_36 (sequence is synthesized)
tggacaggagcccatttacagagctgctgaggggccttcgtccctttgttcactggatgcatatttgttgggtccctgctgtgggcagacaccgtgcagcagcgggataagatgggaagc

SEQ ID NO: 360628 - DNA, 120 bp, Artificial Sequence
  ENSG00000140479_37 (sequence is synthesized)
agaatagcaaggtgctcacaccccattggtggactacgcgggacgtccctgcccatgtcgcgctcagcatgcatcctttgcactgtcgataatcagagaaaccatgttttgggttaaaaa

SEQ ID NO: 360629 - DNA, 120 bp, Artificial Sequence
  ENSG00000140479_38 (sequence is synthesized)
ttacctctgggccttatttaactacggagtctctgataattctttgttttgtgttttagaggtagaattcccataacagaaaattcaccattttaattatttttaagtggacagttcagt

SEQ ID NO: 360630 - DNA, 120 bp, Artificial Sequence
  ENSG00000140479_39 (sequence is synthesized)
ggcttttagtacatccacgatgtcatgtaaacgtcagcactatctaattccagaatgttttcatccccacaaaaagaaaccccatacccatgaagcagccactccccattccctcctccc

SEQ ID NO: 360631 - DNA, 120 bp, Artificial Sequence
  ENSG00000140479_40 (sequence is synthesized)
ctcccagctcctggcaacctctaatccacttaccatttctttggatttgcctctcctggacatttcatatagatgaaataatacaacacctggccttttgtgtctggcttctttcactta

SEQ ID NO: 360632 - DNA, 120 bp, Artificial Sequence
  ENSG00000140479_41 (sequence is synthesized)
ggacagatgaccaaagccaccacatttagaactttggctgcctttggaagtccagagctggatctctcagctcccgcccccagaggctcagcactttggacatggctcacaaacagttgt

SEQ ID NO: 360633 - DNA, 120 bp, Artificial Sequence
  ENSG00000140479_42 (sequence is synthesized)
tgattgactgcatgaatgcgtgtgcgtgcaagcatgaaccttgtttaaatcaagagcttacataattttaaccagttctgtcttcagctgtacatactcagtaaaatgtttaatgaaggg

SEQ ID NO: 360634 - DNA, 120 bp, Artificial Sequence
  ENSG00000140479_43 (sequence is synthesized)
gaagagattagtctcttctgtgtgaccatgttttccctttattcatcctaaaaagttccatgaattcttgatttcctttcagtggccctttcaacaatgtcttttttcccaagagcataa

SEQ ID NO: 360635 - DNA, 120 bp, Artificial Sequence
  ENSG00000140479_44 (sequence is synthesized)
ctgttctcattttattgctagccatcttgatctgtgttttattgacatctcttttgagctaatcttcatttctaagataagagttgagattttgcaatctgtgttcgatggctcaatcta

SEQ ID NO: 360636 - DNA, 120 bp, Artificial Sequence
  ENSG00000140479_45 (sequence is synthesized)
tcctgtgcttgatgctagaaaggaagacagatttaaagcacatgccttctgtgccggctttcaagtttgtcactaaactctcatttctggaaagtgcaattatagagtatcactcccact

SEQ ID NO: 360637 - DNA, 120 bp, Artificial Sequence
  ENSG00000140479_46 (sequence is synthesized)
tccttggaaacagagctgaagaacttggcacactctccaaacagtcaccatacacactgttgtcaaaaagttccatttttaaccccatttgcattaatattgcagtcaatctctttacct

SEQ ID NO: 360638 - DNA, 120 bp, Artificial Sequence
  ENSG00000140479_47 (sequence is synthesized)
ccttttctctttcacggggccgtgacagtgacgcctttccccaaaactctcctcgtttgagaaaaaaagaagtatgtatccccacttatctcggggagaaatgcaaccaactgctgctgt

SEQ ID NO: 360639 - DNA, 120 bp, Artificial Sequence
  ENSG00000140479_48 (sequence is synthesized)
gcacatttatgaatcacagtattgtttagtcggttctgtatctccagtagaaagcataacaaaaagatgacctttgtctcacctcatagctaatttttgcaaataaaatactaaacattg

SEQ ID NO: 360640 - DNA, 120 bp, Artificial Sequence
  ENSG00000140479_49 (sequence is synthesized)
gtggcctgggggcactgggcccctgggtcctccagaccactgacatctctttaaatgactcagctcggccctggttctcgtctcaccagtggcattgtctgtgtgacgagaactgcttga

SEQ ID NO: 360641 - DNA, 120 bp, Artificial Sequence
  ENSG00000140479_50 (sequence is synthesized)
caatgcacagcagcccccatgacaaagaactgtccagaccaaaatgtcaatagtgccgaggttgagaaattccggccaaaagaaatggaatcaaaaaagaaaattgtttgcaacttcata

SEQ ID NO: 360642 - DNA, 120 bp, Artificial Sequence
  ENSG00000140479_51 (sequence is synthesized)
gagataccctcaatgaataaaaccacatatggtttgacttctgtccctgttcctatgctgaagggaaacttgtacaactttccctttttaaagtaaagagataccaccccactctttttt

SEQ ID NO: 360643 - DNA, 120 bp, Artificial Sequence
  ENSG00000140479_52 (sequence is synthesized)
ttttttaaacacagcaacagaagggccccaagttaaaaccagctctccagcctaaggactccacctggtggtcctctctggaattaaatgaagttgaggttttattttgtttaatttttt

SEQ ID NO: 360644 - DNA, 120 bp, Artificial Sequence
  ENSG00000140479_53 (sequence is synthesized)
ttttaactttttaaagttattttaattctttagttattttgtttaacttttttagtttttttagttaaacaaaagttgcagtgaccggggcaggtgtgatggctcaggcctgtaatccca

SEQ ID NO: 360645 - DNA, 82 bp, Artificial Sequence
  ENSG00000140479_54 (sequence is synthesized)
cccagcactttgggaggccgaggcagggacagggggcaggggaaatcacttcttaggtcaggagctcaagaccagcctggca

SEQ ID NO: 360646 - DNA, 120 bp, Artificial Sequence
  ENSG00000140479_55 (sequence is synthesized)
caacagagcgagactccatctcagaaaacaaagaagttccaagtacaatacaaagaaattccctcccaatttgagagtaagttgccgatataccctatgaccgccccccccccgccaata

SEQ ID NO: 360647 - DNA, 120 bp, Artificial Sequence
  ENSG00000140479_56 (sequence is synthesized)
cccccccccgccaatacttcagtgggtatttcctatgaacaacgacattctccggcacagccatcagactcaggaaattaacatcggtatgttattaccatcaaccctctgactgaattc

SEQ ID NO: 360648 - DNA, 120 bp, Artificial Sequence
  ENSG00000140479_57 (sequence is synthesized)
tagttctgccagttgtcccaataaagttcttagcaaaatggtctggtttagaaacacacttttcacttagtcatcatgtctctttaatgttcttccatctggaacagttcctcagtctcc

SEQ ID NO: 360649 - DNA, 120 bp, Artificial Sequence
  ENSG00000140479_58 (sequence is synthesized)
ttgcctcatgatgtggaagcttttaaagactataggccagttatttgtaggctgcccttcgctgtgcacttgtctgagggttcctcacgttttgagtcaagtcatgcatctttgacacga

SEQ ID NO: 360650 - DNA, 120 bp, Artificial Sequence
  ENSG00000140479_59 (sequence is synthesized)
atctcacaggctgattctgtgttctgtctgcattctagcagggagtacacgatctgttccattattggtgatgttaacgatcattggttagagttttcttccgggctatgaagtgatgcc

SEQ ID NO: 360651 - DNA, 120 bp, Artificial Sequence
  ENSG00000140479_60 (sequence is synthesized)
tgccaaagcatatccactaccaccgctgttcaacattgtgctaaagatcccagccagtgtaacagggcaaaaaatacagaaccagtataataattggaaaggaggaaataaaactatctt

SEQ ID NO: 360652 - DNA, 120 bp, Artificial Sequence
  ENSG00000140479_61 (sequence is synthesized)
aggcgtgagccaccacgcccagccaactatcattattctcaaatagcatggttatgtatgtagaaaatccacaagaatggttacagataaacttaagtaaatttcacaagatcgctggat

SEQ ID NO: 360653 - DNA, 120 bp, Artificial Sequence
  ENSG00000140479_62 (sequence is synthesized)
cacaagatcgctggatgtaacgccaatatacaaaaatctgctgtatttaaatatatcaaactaatgattagaaaatggagtttttaaacaaaaggtactatttacagtagcatcaaaatc

SEQ ID NO: 360654 - DNA, 120 bp, Artificial Sequence
  ENSG00000140479_63 (sequence is synthesized)
tatcaaatatctagacaatctagtaaaggatatacaaggccttgacacaaaatctgcaggatgctgctgaaattaaagagtgcctcaataaatgtagggctataatatgcccattgattg

SEQ ID NO: 360655 - DNA, 120 bp, Artificial Sequence
  ENSG00000140479_64 (sequence is synthesized)
gaatacttcatattgtaaagatattaattctctccaaattcttctacagatccaacacactacaaatcaaatcatgggtgctttttcacatatatctataatttatgttcacatgcaaag

SEQ ID NO: 360656 - DNA, 120 bp, Artificial Sequence
  ENSG00000140479_65 (sequence is synthesized)
gattagaataatcagataactactagataatctgagaaaaaaatgggagctttttttgagggacaaataccaagtctttttctaaagcttgtattctgcaaggatagctgactaaaccca

SEQ ID NO: 360657 - DNA, 120 bp, Artificial Sequence
  ENSG00000140479_66 (sequence is synthesized)
tggaaaagaacagctagttcagaagcagaggccctcacatatttggacacttgatttttgaaaagagctgctctgcagagcagtgggggagaagatggtcttttcaataaatggtgctgg

SEQ ID NO: 360658 - DNA, 120 bp, Artificial Sequence
  ENSG00000140479_67 (sequence is synthesized)
gtccaccaaatatccatatggggaaaaatatatcttcttccctaccttagactatgcacaaaaatctaggccagagagactgcagatctaaatggacaaggtggaagaagaaagctttta

SEQ ID NO: 360659 - DNA, 120 bp, Artificial Sequence
  ENSG00000140479_68 (sequence is synthesized)
gaagaaaatataattttggagtaggcaaaagtttctcacagcgtactcgaaaactattagctgtatagggaacggttcataaatcagactgtattaaaatgaagaacctctattcatcaa

SEQ ID NO: 360660 - DNA, 120 bp, Artificial Sequence
  ENSG00000140479_69 (sequence is synthesized)
aagataccattaagagagtgaaaacccaagccacagggggaagatactcactacagacatagctcacaaggttcctattgaaaaaatataaagagctcctacaaatcagtttaaaaataa

SEQ ID NO: 360661 - DNA, 120 bp, Artificial Sequence
  ENSG00000140479_70 (sequence is synthesized)
agcccaatagaaaaatgggcaaaacacctaagcagacacttcattaaagaggttatccaaacaaacataaatatattttttaaagttctcaattgtgttagtaattagggaaatacagtt

SEQ ID NO: 360662 - DNA, 120 bp, Artificial Sequence
  ENSG00000140479_71 (sequence is synthesized)
aaaaccacaatttcataccattacctatctaccagaatggctaagattaaaaagacaatactaaacgttagcaaggagtttaagttggcaaccactttggaaaactatgtcctacttaag

SEQ ID NO: 360663 - DNA, 120 bp, Artificial Sequence
  ENSG00000140479_72 (sequence is synthesized)
ctgaacataagtaagccctatgacccagtaattccatccctgggagtatatcagtatatgtgttcacataaagatatatattattgagtttgtaggtacactatttataatataaaagag

SEQ ID NO: 360664 - DNA, 120 bp, Artificial Sequence
  ENSG00000140479_73 (sequence is synthesized)
tgaaaattacccaaatgttcatcaacagcagaatggataagtaaattgtaaaacatccacaatgaaataccatattacagtgagaatagattaactacatctacacacaaacataatgtt

SEQ ID NO: 360665 - DNA, 120 bp, Artificial Sequence
  ENSG00000140479_74 (sequence is synthesized)
tagcaaaaaatatgcaaggtacttcatttgcataaatacaaaactagataaagcaaatctatacaagatggcaggataatggttacccttggggcaagggtggtgactagatgaagacag

SEQ ID NO: 360666 - DNA, 120 bp, Artificial Sequence
  ENSG00000140479_75 (sequence is synthesized)
gaggagggcttctggaatgtggcaatgtcctgttcttacgaggatgctagttggttgggtgtgttcagtttgcattcttctatatgtatatcatacttcaataaaagttcaaggagaatc

SEQ ID NO: 360667 - DNA, 120 bp, Artificial Sequence
  ENSG00000140479_76 (sequence is synthesized)
tttccacactctcgattctgttccattggtctgtatatctatcttggagtcagtaccatattgttttgatcactgtagctttgtagtaagttttgaaataagaaagtgcgagtcctccaa

SEQ ID NO: 360668 - DNA, 120 bp, Artificial Sequence
  ENSG00000140479_77 (sequence is synthesized)
gaagactttggcactggatttccaagtgttcagggagcagaggtgggcctaggcctgttggaaacagggcccatcatcgtggcacggccagtgggcaggtgtgctccctctgagatcatc

SEQ ID NO: 360669 - DNA, 120 bp, Artificial Sequence
  ENSG00000140479_78 (sequence is synthesized)
tcatgcctcgatgtccccgtctgtgaaatggtgatggcgatgcccacctcctgggagtgggtgaggacggcccagctcacagaacctgggaaatggcagctgtggtggtggcctgggggc

SEQ ID NO: 360670 - DNA, 120 bp, Artificial Sequence
  ENSG00000140479_79 (sequence is synthesized)
aaaatgacagatctgaggaagagggagagctctcttgaaacccctttcccagatttgccctcagttttaggaatgaggtacgcttgggcattcctgttgcctgcatggttcggcattctg

SEQ ID NO: 360671 - DNA, 120 bp, Artificial Sequence
  ENSG00000140479_80 (sequence is synthesized)
gcagccaggttcgccccagaatagataagtgtgtttgattttcgaacatttgactttattacctatttccagaaacacttcgtgttcaaactacgtctctacaggcatttctacttggtc

SEQ ID NO: 360672 - DNA, 120 bp, Artificial Sequence
  ENSG00000140479_81 (sequence is synthesized)
tttttctcccctgacatttcacagagtcctaactgtgctgcatgtataacttgttctttctttttgttacttgcatagcaagcatgtttctatgtcattaaatatcctttgtaagcagca

SEQ ID NO: 360673 - DNA, 120 bp, Artificial Sequence
  ENSG00000140479_82 (sequence is synthesized)
cagctgctgagtgtgtggcaacctggttagagcaatggaaaaccgaggcccctgccatcctgctgagctgggtgaggttgtatttgaagaagcaagcaagccgtaacctcctggctgtcc

SEQ ID NO: 360674 - DNA, 120 bp, Artificial Sequence
  ENSG00000140479_83 (sequence is synthesized)
accgcagcgcgctcctcaccacagttcttcactgatgaagcagccctcagccgtggcctgggggcactgggcccctgggtcctccagaccactgacatctctttaaatgactcagctcgg

SEQ ID NO: 360675 - DNA, 120 bp, Artificial Sequence
  ENSG00000140479_84 (sequence is synthesized)
ccctggttctcgtctcaccagtggcattgtctgtaagagaaaccagagggtctgtggggaaagtcataacctgtactggggcatcagggtttggtggctgggccaccagaatgtgcaagg

SEQ ID NO: 360676 - DNA, 120 bp, Artificial Sequence
  ENSG00000140479_85 (sequence is synthesized)
gcaggtgtggggagggggcagcatgatgggggcagacccatggggcttcccacaagtgcacaaccccctctggcaagtcctctaaccccatcctttcctctggggcggcctggatgggaa

SEQ ID NO: 360677 - DNA, 120 bp, Artificial Sequence
  ENSG00000140479_86 (sequence is synthesized)
tattagaaaggctcgtgggtgtgagtttgcctgtggggtttacacatttacaattacagaccaagggcttgagctctaggctcagcatcctcagacacactaggaataaaacccacctcc

SEQ ID NO: 360678 - DNA, 120 bp, Artificial Sequence
  ENSG00000140479_87 (sequence is synthesized)
cacccaggctgaagcgatgctgcacctggggctccagagcagcggagtccgtggtgagaccagaccccatcagagggctgctctgcaaagagccccacgaggaggcctggtgtctgagcg

SEQ ID NO: 360679 - DNA, 120 bp, Artificial Sequence
  ENSG00000140479_88 (sequence is synthesized)
tgggaaggcttcacacagcagggaggggacatctgtataaagcaaagaactgccccccagggaggcccaggcatgagcacaacaaagctccaagccctgcctatggggcctgttccaccc

SEQ ID NO: 360680 - DNA, 120 bp, Artificial Sequence
  ENSG00000140479_89 (sequence is synthesized)
ttaactggcaacaatggggaggtgggcagctgatgcaagcactgtggagaccgagtcaccgggctctggactcaggacaggcagcagcatagccggggtgcactcacggccccaggatgg

SEQ ID NO: 360681 - DNA, 120 bp, Artificial Sequence
  ENSG00000140479_90 (sequence is synthesized)
gaaacgtgctccttcaagcactcggcccgcatcggcaagtgctttctgtagagggcacaatggtcagtcgttcaggcttttggggccacactgcctctgtcacagctactcagctcagcc

SEQ ID NO: 360682 - DNA, 120 bp, Artificial Sequence
  ENSG00000140479_91 (sequence is synthesized)
actgctacacaaaagattgtcaatgaatgagtgtgactgtggtccaggataaatgctggatgtggcccttgggctgtagtgcaccaaccgtcccctgaggtcacgtttaccctgcattag

SEQ ID NO: 360683 - DNA, 120 bp, Artificial Sequence
  ENSG00000140479_92 (sequence is synthesized)
aaatagccctggctggtgtccatctctgcgcaggctgggccaggaccgtccgagaggggcaggaattgtggggcatctctcccactccccgagggtaagcaggcatggccacatataggt

SEQ ID NO: 360684 - DNA, 120 bp, Artificial Sequence
  ENSG00000140479_93 (sequence is synthesized)
gacagcagccttctggtcagctcgagtcaggtgtgtcacatccctgggtggagtctggcctggaccccaagcctacagccatcgcagcccggcagccgctggagagagaagactgacaca

SEQ ID NO: 360685 - DNA, 120 bp, Artificial Sequence
  ENSG00000140479_94 (sequence is synthesized)
gctctgggagccgtgtggtggggtgggggctgggtgccagggcccaggagggtgtccaggtgagctgcgggaagcctcggaggcctggcccctgatcctgggcttgctcctgccaactgg

SEQ ID NO: 360686 - DNA, 120 bp, Artificial Sequence
  ENSG00000140479_95 (sequence is synthesized)
tggtgggcgacacagcctctccacagaggaccgaggctgagggggtgggaaggaggtgcagggaggtgagggttctgggaagggagcccggagtggtggagcctcttccccagacttcag

SEQ ID NO: 360687 - DNA, 120 bp, Artificial Sequence
  ENSG00000140479_96 (sequence is synthesized)
acaaatgggagtatggagtgacaagttagaagctatgtccacagataaataaacagcacagattgcaagacagagaagcgcaatcaagaggcagttattcttcgtccatgagaaaaatga

SEQ ID NO: 360688 - DNA, 120 bp, Artificial Sequence
  ENSG00000140479_97 (sequence is synthesized)
aagtgtgtcgaagagtcaccattcttatttgatggccctggacccttctgttgttggacatgagctgttaaaggaggagctgtttgctctggtctcctcttttctggctgaatattgccc

SEQ ID NO: 360689 - DNA, 120 bp, Artificial Sequence
  ENSG00000140479_98 (sequence is synthesized)
tatgttgggagatcatgaactcaggacccagaacagggcagggcaacctgtcttattcagggtgggagcaacattgaggagtttgaagggacctgtgagggtgtgacgatggggtgtgac

SEQ ID NO: 360690 - DNA, 120 bp, Artificial Sequence
  ENSG00000140479_99 (sequence is synthesized)
gggccgaggacgcctctggggcggcaccgcgtcccgagagccccagaagtcggcggggaagttcccccggtggggggcgtttcgggcctcccggacggctctcggccccggagcccggtc

SEQ ID NO: 360691 - DNA, 80 bp, Artificial Sequence
  ENSG00000140479_100 (sequence is synthesized)
gcccgcggcggtgttggcggcggcggtggcggcggcggcggcgcttccccggcgcggagcggctttaaaaggcggcactc

SEQ ID NO: 360692 - DNA, 120 bp, Artificial Sequence
  ENSG00000140481_0 (sequence is synthesized)
attgttttccaggcctgggcagagacagggcccccctgccccatctctccaccgtcctaggtgtgccaagagtcaattgcctcattgctgaccctgtccagctggccatggccctcaacc

SEQ ID NO: 360693 - DNA, 120 bp, Artificial Sequence
  ENSG00000140481_1 (sequence is synthesized)
cccaaggcccttccacccacagaccatctcgctgctgagagatccaggacctgctcccacctggccaccctccccctccccccacatccaggccccagggctggtgtgtggcacccctga

SEQ ID NO: 360694 - DNA, 120 bp, Artificial Sequence
  ENSG00000140481_2 (sequence is synthesized)
gaccacattgacctccatactgtctactacccataaggactccaagacgcccaggccagctgtctgggcaggactgattcctgatcacccactgataccaagtactcatccccaagattg

SEQ ID NO: 360695 - DNA, 120 bp, Artificial Sequence
  ENSG00000140481_3 (sequence is synthesized)
ttaaacaaggccagacactcctggcctcaagaggatgggactgaaaaacaaaaagaacactgaagacccagaggagcccctgatcgcctcccagagcacggaacctgagatcggtcacct

SEQ ID NO: 360696 - DNA, 120 bp, Artificial Sequence
  ENSG00000140481_4 (sequence is synthesized)
gtctccctctaagaaggagaccatcatggtcaccctccatggggctaccaacctgcctgcctgcaaggatggctccgagccgtggccctatgtggtggtgaaaagcacatctgaggaaaa

SEQ ID NO: 360697 - DNA, 120 bp, Artificial Sequence
  ENSG00000140481_5 (sequence is synthesized)
gaacaatcagagctccaaggcagtcacatctgtgacctcagagcccaccagagcccctatctggggggacacggtgaatgtggagatccaagctgaggatgcagggcaagaagatgtgat

SEQ ID NO: 360698 - DNA, 120 bp, Artificial Sequence
  ENSG00000140481_6 (sequence is synthesized)
cctcaaggtggtggacaacagaaagaaacaggagttgttgtcctacaaaatccccatcaagtacctgcgtgtcttccacccctaccactttgagctggtgaagcccactgagtctgggaa

SEQ ID NO: 360699 - DNA, 120 bp, Artificial Sequence
  ENSG00000140481_7 (sequence is synthesized)
agccgatgaagccactgccaagacccagttgtacgcaacagtcgttcggaagagcagcttcataccccgctacatcggctgcaaccacatggctctggagatctttctccggggagtcaa

SEQ ID NO: 360700 - DNA, 120 bp, Artificial Sequence
  ENSG00000140481_8 (sequence is synthesized)
cgagcccctggccaacaaccccaaccccatagtggtgattgcccgggtcgttcccaactacaaggaatttaaggtcagccaggctaacagggacctggcctctgtggggctgcccatcac

SEQ ID NO: 360701 - DNA, 120 bp, Artificial Sequence
  ENSG00000140481_9 (sequence is synthesized)
cccactgtccttccctatcccgtccatgatgaactttgacgtgcctcgcgtcagccagaacggatgccctcagctgtccaagcctgggggacccccagagcagcccctgtggaatcagtc

SEQ ID NO: 360702 - DNA, 120 bp, Artificial Sequence
  ENSG00000140481_10 (sequence is synthesized)
cttcctcttccaaggccgagatggagctaccagcttctcagaagacacagccctggtgctggagtactactcctcaacttcaatgaaaggcagccagccgtggaccctcaaccagcccct

SEQ ID NO: 360703 - DNA, 120 bp, Artificial Sequence
  ENSG00000140481_11 (sequence is synthesized)
aaactatcaatgatgaggcccccacagtggctctctccttccagctgctttcctctgagagaccagaaaacttcttgacaccaaacaacagcaaggctcttcctaccttggaccccaaga

SEQ ID NO: 360704 - DNA, 120 bp, Artificial Sequence
  ENSG00000140481_12 (sequence is synthesized)
tcctggataagaagctgagaaccatccaagagtcctggtccaaggacacagtgagctccacaatggacttgagcacgtccactccacgagaagcagaggaggaacctctggtgcctgaga

SEQ ID NO: 360705 - DNA, 120 bp, Artificial Sequence
  ENSG00000140481_13 (sequence is synthesized)
tgtcccatgacacagagatgaacaactaccggcgggccatgcagaagatggcagaggacatcctgtctctgcggagacaggccagcatcctggaaggagagaaccgcatactgaggagcc

SEQ ID NO: 360706 - DNA, 120 bp, Artificial Sequence
  ENSG00000140481_14 (sequence is synthesized)
gcctggcccagcaggaggaggaagaggggcagggcaaagccagtgaggcccagaacacggtgtccatgaagcagaaactgctgctgagtgagctggatatgaagaaactgagggacaggg

SEQ ID NO: 360707 - DNA, 120 bp, Artificial Sequence
  ENSG00000140481_15 (sequence is synthesized)
tgcagcatttgcagaatgagctgattcgaaagaatgatcgagagaaggagctgctccttctgtatcaggcccagcagccacaggccgctctgctgaagcagtaccagggcaagctgcaga

SEQ ID NO: 360708 - DNA, 120 bp, Artificial Sequence
  ENSG00000140481_16 (sequence is synthesized)
agatgaaggcgctggaggagactgtgcggcaccaagagaaggtgatcgagaagatggagcgggtgctggaggacaggctgcaggacaggagcaagccccctcctctgaacaggcagcagg

SEQ ID NO: 360709 - DNA, 120 bp, Artificial Sequence
  ENSG00000140481_17 (sequence is synthesized)
gaaagccctacacgggcttccctatgctctcagcctctggccttcccttgggttctatgggagagaacctgccggttgaactttactcggtgctgctggcagaaaacgcgaagctgcgga

SEQ ID NO: 360710 - DNA, 120 bp, Artificial Sequence
  ENSG00000140481_18 (sequence is synthesized)
cggagctggataagaaccgccaccagcaggcccccatcattctgcagcaacaggccctgccggatctcctctctggtacttcagacaagttcaacctcctggccaagctggaacacgctc

SEQ ID NO: 360711 - DNA, 120 bp, Artificial Sequence
  ENSG00000140481_19 (sequence is synthesized)
agagccggatcctgtccctggaaagccagttagaggactcagctcgacgctggggacgagagaagcaggatctggccacacggctgcaggagcaagaaaaaggtttcaggcacccctcga

SEQ ID NO: 360712 - DNA, 120 bp, Artificial Sequence
  ENSG00000140481_20 (sequence is synthesized)
actccatcatcatagaacagcctagtgccctcacccactccatggacctcaagcagccctcagagctggagcccctgctgcccagctcagactctaagctcaacaagcccttgagccccc

SEQ ID NO: 360713 - DNA, 120 bp, Artificial Sequence
  ENSG00000140481_21 (sequence is synthesized)
agaaggagaccgctaactctcagcagacctgagccccagagcaggcctccttccctgtgtgctggggagtctcatcaccgccccctaaaaatgacgttattaaatgttgtagctctgtga

SEQ ID NO: 360714 - DNA, 120 bp, Artificial Sequence
  ENSG00000140481_22 (sequence is synthesized)
aacagtccctggggacccatcctggggaacaggactgctagcagtaaagatgggggagccagggcccccatcccctccagcccccaaggctgccccaggcctcattgacagcttctctga

SEQ ID NO: 360715 - DNA, 120 bp, Artificial Sequence
  ENSG00000140481_23 (sequence is synthesized)
agaggcccttgacctgggcctgcctatgccggtcactgggtgcccagaaatcacccatggtacaacccaagttgaagatcaagaccaggagctaagcttcccagggtctccagtctgcct

SEQ ID NO: 360716 - DNA, 120 bp, Artificial Sequence
  ENSG00000140481_24 (sequence is synthesized)
gggggctcctggaatcagctctcaggccttggtctttttctcctgcggaatgtgtgtccccgaacacttcacctttaacctcatctagcatcccaggagaaagcaagccccttgttgacc

SEQ ID NO: 360717 - DNA, 120 bp, Artificial Sequence
  ENSG00000140481_25 (sequence is synthesized)
cttggtccctgaaccctgacccctttttcacctggctggcctccacctggaccctacacaggcctctcaaaactcccttctggagcattccctggtcttggtgcagccttggagagccct

SEQ ID NO: 360718 - DNA, 120 bp, Artificial Sequence
  ENSG00000140481_26 (sequence is synthesized)
tttccatcccaggtggaccccggggagttgggagcaggaggagacttgacagagaggctacaagagacgcatggcccaggccactcagagtgcacagagaccctgcccgcacaggatctc

SEQ ID NO: 360719 - DNA, 120 bp, Artificial Sequence
  ENSG00000140481_27 (sequence is synthesized)
cctccttacagcctcccgcctgccccaggagccagcatctttggaaagccaagggccacagtggacccaggagggtggagagaagaggccttccaaagcaggggccagggagacgggccc

SEQ ID NO: 360720 - DNA, 120 bp, Artificial Sequence
  ENSG00000140481_28 (sequence is synthesized)
cttccagacccggagaagaagcaaggccaccagagaccagctctgttgggaaatacgagggaggcttgtccttttcatctgccccaaaacatctatcatgtctgatattccttctttcaa

SEQ ID NO: 360721 - DNA, 120 bp, Artificial Sequence
  ENSG00000140481_29 (sequence is synthesized)
agtgacccccctggagtagctcccaggggttcaggtggtggagcaggaagccaccgcacccccaaagtcactgggccctgagaaaagccattgtggagccaactccagggctgggggtca

SEQ ID NO: 360722 - DNA, 120 bp, Artificial Sequence
  ENSG00000140481_30 (sequence is synthesized)
ggagtcctaggctcccattcctgctccattaccaaccgaaggctcggtcttaattcccccacctgtctaaggggaacagaaaacccctgccaaaactaccctttcccccatggggtgctg

SEQ ID NO: 360723 - DNA, 120 bp, Artificial Sequence
  ENSG00000140481_31 (sequence is synthesized)
tgaaactcaaggagatgactgtggatgaggggtccatgcaggcatctccaggatgccctgacactgtgctttaggactggctccactttgccaacttcccgagaacaaacaggcctgctc

SEQ ID NO: 360724 - DNA, 120 bp, Artificial Sequence
  ENSG00000140481_32 (sequence is synthesized)
acaactgcccctcaagttcaaccccgggaccgcccagccccgcaaagcaaagaccctgacttctcctgctcttgagccagctgtgctttgcccgtggccagaagctcagcagcggctcct

SEQ ID NO: 360725 - DNA, 120 bp, Artificial Sequence
  ENSG00000140481_33 (sequence is synthesized)
gggcagagtagcttgtggccctacccccctgaatccatagagcctaagattctcaaattagcacacccttctcagatggccacgatgtaggctccactttgccaacttcccgagaacaaa

SEQ ID NO: 360726 - DNA, 120 bp, Artificial Sequence
  ENSG00000140481_34 (sequence is synthesized)
aaaatgggtttagaaatctttgccaggtcatggcccactggattctggatactctgaggcctggtttgtcaggcaatatgcccttgagcaggtcaccccctgggaatggggggtactcac

SEQ ID NO: 360727 - DNA, 120 bp, Artificial Sequence
  ENSG00000140481_35 (sequence is synthesized)
agactgggtccaggctgggctgtgggtgagagggtgcagtgctcagcctggcagttggtctctcagtggccatggcattcagggggcctgaaccctgggtctctgcatccctgctgagac

SEQ ID NO: 360728 - DNA, 120 bp, Artificial Sequence
  ENSG00000140481_36 (sequence is synthesized)
agaggctgaaggccgaggagaagacgctggatctggagttcgaagttttgagcgtggggtttaatgaggcgggtagatacgccctgagactgtcagcagagaaccccctgcaggtttctg

SEQ ID NO: 360729 - DNA, 120 bp, Artificial Sequence
  ENSG00000140481_37 (sequence is synthesized)
aggctggacgaacccttgggacgggcagcccagcgggtgggtgaggccatcttccccatctacccgaggccagaccaaccccgcatgaacccaaaggctcaggatcacgaggacctgtac

SEQ ID NO: 360730 - DNA, 120 bp, Artificial Sequence
  ENSG00000140481_38 (sequence is synthesized)
cgctactgtggcaacctggctctgctccgggctagcacggaccccacagcccgacactgtgggagcctggcctacagtgtggccttccacgtccaccggggccctcagcctccagtctca

SEQ ID NO: 360731 - DNA, 120 bp, Artificial Sequence
  ENSG00000140481_39 (sequence is synthesized)
cagcgcctgccccagagctcccaagcccctgcccgccacatctgcagtgccgcacacagacaggagaccagcattacagcaacaaccgaggggccactgcctgatgaattgccagagggg

SEQ ID NO: 360732 - DNA, 120 bp, Artificial Sequence
  ENSG00000140481_40 (sequence is synthesized)
aaccaccagctcggctcttaataaccggatctgcatcctgctgctgcccagctgggctgagggccctgaccacagctaaggggagtcatcacagggcttcagggctggaattccagtgct

SEQ ID NO: 360733 - DNA, 120 bp, Artificial Sequence
  ENSG00000140481_41 (sequence is synthesized)
tgggcacatgaagacaaaggtcagacctccattccagaaagtcctgccccatacccacacccagaaggaagaaatgcatgctcagaggggccaggaagaaatccagagagacaggccttg

SEQ ID NO: 360734 - DNA, 120 bp, Artificial Sequence
  ENSG00000140481_42 (sequence is synthesized)
ctgggtgtccccactccgtctattcacattcgatcattgccctttttgtccagtcatatcgctacacagctgtccatgtgtccttgaaactcagcataaaagtggacaattttccctgta

SEQ ID NO: 360735 - DNA, 120 bp, Artificial Sequence
  ENSG00000140481_43 (sequence is synthesized)
ctggggctggggtgcagttgcaagtgaatgatggggaccccttccctgcctgctctgctatcactgatgtcattgagcagcaggagcctggccagagcctcaccctcaccaggagcaagt

SEQ ID NO: 360736 - DNA, 120 bp, Artificial Sequence
  ENSG00000140481_44 (sequence is synthesized)
cagggccctgggcttggacaccgtctcaggggtttgtgccttcagagcctggtggagcagccaagcaactgggcacatgaagacaaagtgcttggtgctggagcccggagcaggaggcca

SEQ ID NO: 360737 - DNA, 120 bp, Artificial Sequence
  ENSG00000140481_45 (sequence is synthesized)
aaggaagagacgaggcttctaattttgtttttactacttactagctgagtgaccacaaatgcagcctgttggaactcagaaaataacacccgaaaatgaaagcctcagaagcaaaagtga

SEQ ID NO: 360738 - DNA, 120 bp, Artificial Sequence
  ENSG00000140481_46 (sequence is synthesized)
ccttctagccttctcctgccctcctgtgtctcaggcccgttttcccccaaggacggacatagaaaagagaatccctcctcctcaaggcgggttatagaaatcaaaaccccttttccccaa

SEQ ID NO: 360739 - DNA, 120 bp, Artificial Sequence
  ENSG00000140481_47 (sequence is synthesized)
ttccccaaagctagccataaagcctacaaactctaactttccccaatttctgtgtaaaaactggccacaaataaattctcaggcctaggtggggcatggtggctcacacctataatccca

SEQ ID NO: 360740 - DNA, 120 bp, Artificial Sequence
  ENSG00000140481_48 (sequence is synthesized)
agacacaccagaagggaggcccagggaggaaggagttgcagagatgaaagggtaggcagcccacggccagctccgcactgcctgcctgggccctcccagctgggctcccttgagcccctc

SEQ ID NO: 360741 - DNA, 120 bp, Artificial Sequence
  ENSG00000140481_49 (sequence is synthesized)
ccccagcctcagcctgcccctttctggcccctttgggcctcggtgatggaaatacaccataatccttgacaaagcccccctcctgggggaggaggccccagcaccattggcggcctgagc

SEQ ID NO: 360742 - DNA, 120 bp, Artificial Sequence
  ENSG00000140481_50 (sequence is synthesized)
ccagccagaactgatgtcaccatgcccagagccccagctccccatactgcagaactgatgatggtcatggggggcagtggagcaggggcaggagagcaggatgagcaggaatgcaataat

SEQ ID NO: 360743 - DNA, 120 bp, Artificial Sequence
  ENSG00000140481_51 (sequence is synthesized)
caagatgatccagaatgagaaggaagcggaagacaaggctcagtgtgagaccagggtcagagctcagcaaacttccacgactggctttgaatcagaatcattttgcttctcagccacggc

SEQ ID NO: 360744 - DNA, 120 bp, Artificial Sequence
  ENSG00000140481_52 (sequence is synthesized)
ccctgggttacacagccttaaatggccctgccaatgctggtcacagcattccctagtcctggagactcgggaactaaaacaatcaattcccctgagcaataaaattatggacagtgaaca

SEQ ID NO: 360745 - DNA, 120 bp, Artificial Sequence
  ENSG00000140481_53 (sequence is synthesized)
ctgggaatagatgagagtggagaagaggaggtctatgcctctctgtgcaatgctgcctgctgcccctggccctgcctgtcccatccccatggctcactaagcccactgtggctccctgtc

SEQ ID NO: 360746 - DNA, 80 bp, Artificial Sequence
  ENSG00000140488_0 (sequence is synthesized)
gagctcgggcgggagcccagagagagccgcacggggacctcaagccagaccccagcgttcagccgccacctcggcccggg

SEQ ID NO: 360747 - DNA, 80 bp, Artificial Sequence
  ENSG00000140488_1 (sequence is synthesized)
tctccgcccgggctccgccccctccccctggccctcgccaccggtccagggaggggacggcgggacaggcgggaccagtg

SEQ ID NO: 360748 - DNA, 120 bp, Artificial Sequence
  ENSG00000140488_2 (sequence is synthesized)
gacatggccgcggcgccgggagggtcagcgcagcccgctggccccggcccgcgcctgggtttcagcaccgcggacagcggcgtcggcatgagcgggctaaaccccggtcccgccgtaccc

SEQ ID NO: 360749 - DNA, 120 bp, Artificial Sequence
  ENSG00000140488_3 (sequence is synthesized)
cgtcggcatgagcgggctaaaccccggtcccgccgtacccatgaaggaccacgacgccatcaagctcttcgtggggcagatcccgcggggcttggacgagcaggacctcaagccgctgtt

SEQ ID NO: 360750 - DNA, 120 bp, Artificial Sequence
  ENSG00000140488_4 (sequence is synthesized)
cgaggagttcggccgcatctacgagctgacggtgctgaaggaccggctcaccggcctccacaaaggctgtgccttcctcacctactgcgcccgggactctgctctcaaggcccagagtgc

SEQ ID NO: 360751 - DNA, 120 bp, Artificial Sequence
  ENSG00000140488_5 (sequence is synthesized)
actgcacgagcagaagaccctgccagggatgaatcgtccgatccaagtgaagccagctgccagtgagggccgaggagaggaccgaaagctgtttgtggggatgctgggcaagcagcaggg

SEQ ID NO: 360752 - DNA, 120 bp, Artificial Sequence
  ENSG00000140488_6 (sequence is synthesized)
tgaggaggacgtcagacgcctgttccagccctttggccacatcgaggagtgcacggtcctgcggagtcctgacggcaccagtaaaggctgtgcctttgtgaagttcgggagtcaagggga

SEQ ID NO: 360753 - DNA, 120 bp, Artificial Sequence
  ENSG00000140488_7 (sequence is synthesized)
agctcaggcggccatccggggtctgcacggcagccggaccatggcgggcgcctcgtccagcctcgtggtcaagctggcggacaccgaccgggagcgcgcgctgcggcggatgcagcagat

SEQ ID NO: 360754 - DNA, 120 bp, Artificial Sequence
  ENSG00000140488_8 (sequence is synthesized)
cagcagatggccggccacctgggcgccttccaccccgcgccactgccgctaggggcctgcggcgcctacaccacggcgatcctgcagcaccaggcggccctgctggcggcggcacagggc

SEQ ID NO: 360755 - DNA, 120 bp, Artificial Sequence
  ENSG00000140488_9 (sequence is synthesized)
aggcccggtggcggcagtggcggcccagatgcaacacgtggcggcctttagcctggtagctgcgcctctgttgcccgcggcagcagccaactccccgcctggcagcggccctggcaccct

SEQ ID NO: 360756 - DNA, 120 bp, Artificial Sequence
  ENSG00000140488_10 (sequence is synthesized)
cccaggtcttccggcgcccatcggggtcaatggattcggccctctgaccccccagaccaatggccagccgggctccgacacgctctacaataacgggctctccccttatccagcccagag

SEQ ID NO: 360757 - DNA, 120 bp, Artificial Sequence
  ENSG00000140488_11 (sequence is synthesized)
ccccggcgtggctgaccccctgcagcaggcctacgctgggatgcaccactacgcagcagcctatccgtcggcctatgccccagtgagcacagcttttccccagcagccttcagccctgcc

SEQ ID NO: 360758 - DNA, 120 bp, Artificial Sequence
  ENSG00000140488_12 (sequence is synthesized)
ccagcagcagagagaaggccccgaaggctgtaacctcttcatctatcacctgcctcaggagtttggtgatgcggaactcatacagacattcctgccctttggagccgttgtctctgctaa

SEQ ID NO: 360759 - DNA, 120 bp, Artificial Sequence
  ENSG00000140488_13 (sequence is synthesized)
agtctttgtggatcgagccaccaaccagagcaagtgttttgggtttgttagttttgacaatccaactagtgcccagactgctattcaggcgatgaatggctttcaaattggcatgaagag

SEQ ID NO: 360760 - DNA, 120 bp, Artificial Sequence
  ENSG00000140488_14 (sequence is synthesized)
ctaaagcggcccaaggatgccaaccggccttactgacctgctttcactgaccagccacagaaagaaacagaagagtgagaagaaaggagaggaaaagcacagaaacgcttgagcagccct

SEQ ID NO: 360761 - DNA, 120 bp, Artificial Sequence
  ENSG00000140488_15 (sequence is synthesized)
tcccgaaggagcagctgcggacggaggtggatcggacccaaggctggtgcctggggctaaggccactctaaggattgtttttatcaagtgggttgttctgtgcctgcagcatagagcgca

SEQ ID NO: 360762 - DNA, 120 bp, Artificial Sequence
  ENSG00000140488_16 (sequence is synthesized)
ggctggcagagcaaatagggctggtgaggagtgactgtccaggggaaccagcagagggcgttgggggtgccaagggcttctccgcaagggaagcccagatttacttctttcaaaatcata

SEQ ID NO: 360763 - DNA, 120 bp, Artificial Sequence
  ENSG00000140488_17 (sequence is synthesized)
tcattccttagagtttagggaccaaaggactattgcttttttaagaatatatatatctatataaattaaaacaaagaaacaaacaaacaaaaaacaagacaaacaactacaaaaaaagac

SEQ ID NO: 360764 - DNA, 120 bp, Artificial Sequence
  ENSG00000140488_18 (sequence is synthesized)
agtatagagtctcataaaagctgcctttaaatatccctaggagacagggtgaaggagacccttgacagccccagcctaggcagatgggggctgtggaaagattgttctgtgtctcattcc

SEQ ID NO: 360765 - DNA, 120 bp, Artificial Sequence
  ENSG00000140488_19 (sequence is synthesized)
ctcttaagccactcccccaccctgcccttttaaaaataattaaggatttgaggtctaggctcacatgcaggtaatgagaacgttatggaagcagtgaacccacaatccacaatccccaaa

SEQ ID NO: 360766 - DNA, 120 bp, Artificial Sequence
  ENSG00000140488_20 (sequence is synthesized)
ctcagagtgcatcccagaagaggccccaggcagagctcaggttggccctggcctttgccatcccgggaggccccctagccagcaagagtgggattgcctttcctgtggaaccactgcttc

SEQ ID NO: 360767 - DNA, 120 bp, Artificial Sequence
  ENSG00000140488_21 (sequence is synthesized)
cccaggcgggaagaaagagggagttctggccacctgagcctttcccttgccaatccaggtagacagaggccctgcctttggctgagctgagacacctcctgtttcccttccccttgaacc

SEQ ID NO: 360768 - DNA, 120 bp, Artificial Sequence
  ENSG00000140488_22 (sequence is synthesized)
agtcccagtgtccccttgctccaggctaccttctgtctcttagtctaagtttgcccacctgtaaagtagattcaggatatctgtagagggctgtgacaacagacttggaaggtttgctac

SEQ ID NO: 360769 - DNA, 120 bp, Artificial Sequence
  ENSG00000140488_23 (sequence is synthesized)
tgtatatactgccattgagaaggggaaatttttcaatatgtagaagcttcagaattagaggtccctctttaccccagacctgggagggaagtagatgttttgccaaaatacttcttcatt

SEQ ID NO: 360770 - DNA, 120 bp, Artificial Sequence
  ENSG00000140488_24 (sequence is synthesized)
cctttaaaaactacatctttcctatgcaagagtgtctcacatgtgcttaaccgaggtgcttctagttggtgagcagtgttgagcttagaagtggtgtgtgctctgtctgtctgtctttgt

SEQ ID NO: 360771 - DNA, 120 bp, Artificial Sequence
  ENSG00000140488_25 (sequence is synthesized)
ctgtctgttgtatacagtgggtgccatataaagctgatcaatggtggtgcttcctgcctgcttctgtgagatgggcaaaagattcagcttagaacaccatgactcaccttgccttggtca

SEQ ID NO: 360772 - DNA, 120 bp, Artificial Sequence
  ENSG00000140488_26 (sequence is synthesized)
gcctttcctgggcctgtagggccttgcacatatttttcccaggaggatttcccctccaccccacaggcatggatcagcttggtctgaggccccagctgtgtggggtccctctaatcccca

SEQ ID NO: 360773 - DNA, 120 bp, Artificial Sequence
  ENSG00000140488_27 (sequence is synthesized)
gatgttgctgaggctgaaggcctctgatctgataacatgtcagatagtaaaagatgtgggggtgggggtggagggctcctccttcataacagtttctaagaaaacttgttcccacctgtt

SEQ ID NO: 360774 - DNA, 120 bp, Artificial Sequence
  ENSG00000140488_28 (sequence is synthesized)
atcagtaccccttcctccatgaacgggaaggccgctgtttttccctcctggcactcagctgcctgccccccaacaataattcctcacctcccacgcacccagctcttggcagtttacaaa

SEQ ID NO: 360775 - DNA, 120 bp, Artificial Sequence
  ENSG00000140488_29 (sequence is synthesized)
catgtgatccccacaacacccatgagaggaagatgaatcgtccgatccaagtgaagccagctgccagtgagggccgaggaggctcctgaacaggatgatctcagatcccccctcaaacaa

SEQ ID NO: 360776 - DNA, 120 bp, Artificial Sequence
  ENSG00000140497_0 (sequence is synthesized)
agaaccgctgcctcgctcccggaagtggagggtctacacgaagcgccgctgggtctgggtgcccggaggcagcagcgttcgcggagttcgcccgctggcccccgatcaccatgtcggctt

SEQ ID NO: 360777 - DNA, 120 bp, Artificial Sequence
  ENSG00000140497_1 (sequence is synthesized)
tcgacaccaaccccttcgcggacccagtggatgtaaaccccttccaggatccctctgtgacccagctgaccaacgccccgcagggcggcctggcggaattcaaccccttctcagagacaa

SEQ ID NO: 360778 - DNA, 120 bp, Artificial Sequence
  ENSG00000140497_2 (sequence is synthesized)
atgcagcgacaacagttcctgtcacccaactccctgggtcctcacagccagcggttctccagccatcagtggaaccaacccagccgaccccccaggccgtggtgtctgcagcccaggcag

SEQ ID NO: 360779 - DNA, 120 bp, Artificial Sequence
  ENSG00000140497_3 (sequence is synthesized)
gcctgctccggcagcaggaagaactggacaggaaagctgccgagctggaacgcaaggagcgggagctgcagaacactgtagccaacttgcatgtgagacagaacaactggccccctctgc

SEQ ID NO: 360780 - DNA, 120 bp, Artificial Sequence
  ENSG00000140497_4 (sequence is synthesized)
cctcgtggtgccctgtgaagccctgcttctatcaggatttctccacagagatccctgccgactaccagcggatatgcaagatgctctactatctgtggatgttgcattcagtgactctgt

SEQ ID NO: 360781 - DNA, 120 bp, Artificial Sequence
  ENSG00000140497_5 (sequence is synthesized)
ttctgaacctgcttgcctgcctggcctggttctcgggcaacagctccaagggagtggactttggcctctccatcctgtggtttctgatcttcactccctgtgccttcctttgttggtacc

SEQ ID NO: 360782 - DNA, 120 bp, Artificial Sequence
  ENSG00000140497_6 (sequence is synthesized)
gacccatctataaggcctttaggtccgacaactctttcagcttctttgtgttcttctttgtatttttttgtcaaatagggatctacatcatccagttggttggcatccctggcctggggg

SEQ ID NO: 360783 - DNA, 120 bp, Artificial Sequence
  ENSG00000140497_7 (sequence is synthesized)
acagcggttggattgcagccctgtctacactggataatcattccctggccatatcagtcatcatgatggtggtggctggcttcttcaccctctgtgccgtgctctcagtcttcctcctgc

SEQ ID NO: 360784 - DNA, 120 bp, Artificial Sequence
  ENSG00000140497_8 (sequence is synthesized)
agcgggtgcactccctctaccgacggacaggggccagcttccagcaggcccaggaggagttttcccagggcatcttcagcagcagaaccttccacagagctgcttcatctgctgcccaag

SEQ ID NO: 360785 - DNA, 120 bp, Artificial Sequence
  ENSG00000140497_9 (sequence is synthesized)
gagccttccaggggaattagtcctcctctcttctctccccctcagcctttctctcgcctgccttctgagctgcactttccgtgggtgccttatgtggtggtggttgtgcccagcacagac

SEQ ID NO: 360786 - DNA, 120 bp, Artificial Sequence
  ENSG00000140497_10 (sequence is synthesized)
tggaacgggagggacagggaattttttccccctctatgtacaaaaaaaaacaaagctctctttccttctctggtgatggtttggtaggattcttttgtctctggaagcagtgggactgaa

SEQ ID NO: 360787 - DNA, 120 bp, Artificial Sequence
  ENSG00000140497_11 (sequence is synthesized)
gttctcttcgtcctgtgcacacacagacacccccacacagttgggatcacaggctgacctgggcccatcccagctggagctttctgccagggtcctgggccttgactcccccaccctgca

SEQ ID NO: 360788 - DNA, 120 bp, Artificial Sequence
  ENSG00000140497_12 (sequence is synthesized)
ggcctggcctgaatctggcttcttagacacagcccagtccttcctgcctgggctgggaataagcctctcacaggttctggtggacagatctgttccccaggtcactccagtggtctccag

SEQ ID NO: 360789 - DNA, 120 bp, Artificial Sequence
  ENSG00000140497_13 (sequence is synthesized)
gcttccagagaaggctggttgcctcaagctcttctctgcctcataaacggatccagagaaggctggttgccttaagctcttccctgcctcgtgttcctgagaaacggattaatagccctt

SEQ ID NO: 360790 - DNA, 120 bp, Artificial Sequence
  ENSG00000140497_14 (sequence is synthesized)
tatccccctgcaccctcctgcaggggatggcactttgagccctctggagccctccccttgctgagccttactctcttcagactttctgaatgtacaatgccgttggttgggatttgggga

SEQ ID NO: 360791 - DNA, 120 bp, Artificial Sequence
  ENSG00000140497_15 (sequence is synthesized)
ctggaagggaccaaggacactgaccccaagctgtcctgcctagcgtccagcgtcttctaggagggtggggtctgcctgtcctggtgtggttggtttggccctgtttgctgtgactacccc

SEQ ID NO: 360792 - DNA, 120 bp, Artificial Sequence
  ENSG00000140497_16 (sequence is synthesized)
cccccctccccgaaccgagggacggctgcctttgtctctgcctcagatgccacctgccccgcccatgctccccatcagcagcatccagactttcaggaagggcagggccagccagtccag

SEQ ID NO: 360793 - DNA, 120 bp, Artificial Sequence
  ENSG00000140497_17 (sequence is synthesized)
aaccgcatccctcagcagggactgataagccatctctcggagggccccctaatacccagtggagtctggttcacaccctggggggtgtgtcactgtgatgggacacgtaggagtccaccc

SEQ ID NO: 360794 - DNA, 120 bp, Artificial Sequence
  ENSG00000140497_18 (sequence is synthesized)
ttaaaaccagcaccctgtccctcgaggctgccgagtgggtgtgtggactggggtgccttcccacaaaactagcctccggctctgggcccgagacagccgcaggccccagccactgaatga

SEQ ID NO: 360795 - DNA, 120 bp, Artificial Sequence
  ENSG00000140497_19 (sequence is synthesized)
tactggcagcggctggggttttatgaactcctttctggtattttttcccctctatgtacaaatgtatatgttacgtctcaatttttgtgcttaagtaaaaataaaaacattttcagacaa

SEQ ID NO: 360796 - DNA, 120 bp, Artificial Sequence
  ENSG00000140497_20 (sequence is synthesized)
cccaaaggtccagtacctttctccagggatctgggtggggggtcaggcagtgccaggcttctggtgacccctttgggagtataacctggatggctggcttcctggtgggcccaaaggaca

SEQ ID NO: 360797 - DNA, 120 bp, Artificial Sequence
  ENSG00000140497_21 (sequence is synthesized)
ggggcgcgactagcagcaggtggaactgcagaggaggcggggcgctgaagtgttggagacagtggggtcttctagcacccggaggctgggctgtgctagggaaggggactggagcaggat

SEQ ID NO: 360798 - DNA, 120 bp, Artificial Sequence
  ENSG00000140497_22 (sequence is synthesized)
ttttctctccagtgagggaatcatccagaccagtagctgagccctgaggctgggggcaagcagagagctttcagccttggccccctaagggccctcttgctaatttgttcggagctggtc

SEQ ID NO: 360799 - DNA, 120 bp, Artificial Sequence
  ENSG00000140497_23 (sequence is synthesized)
acctacaagtagaggggctgctctgccaattaatatccttactccctccatcccacccaccaccaccactgagaaataagctctactcaccaggccgggctcctcggtgcctccagagag

SEQ ID NO: 360800 - DNA, 120 bp, Artificial Sequence
  ENSG00000140497_24 (sequence is synthesized)
ggcatttgtccctgttgtacccctccaggtcctcctcgggcctttggcttgttctctcttccttggggcccagaatctctctcttttttttaacttcattaattctcaccttccttcctg

SEQ ID NO: 360801 - DNA, 120 bp, Artificial Sequence
  ENSG00000140497_25 (sequence is synthesized)
tcttcctttgtcccttcaccaaatactgtgaatcttgcctgctttgtgcctggtgctccactgcgccgcctcactgccctcccgctgcacccctcgctgcccctatgagcgtgacccatg

SEQ ID NO: 360802 - DNA, 120 bp, Artificial Sequence
  ENSG00000140497_26 (sequence is synthesized)
gtggagttgtgtgttgcagctcctgcttagacaggccagcaagttcccgcctgcccaattcctggcagtgagcgagctctcagagaggcagatgctcctaggaggagaaagtattctcag

SEQ ID NO: 360803 - DNA, 120 bp, Artificial Sequence
  ENSG00000140497_27 (sequence is synthesized)
agacagctacatgcgaaagcttccgaaggtaggcctaatgtagatgagcaggaggaagggcagggcacccggagcctgccccacacccctcccaggccccagagccctgtggaggtgagg

SEQ ID NO: 360804 - DNA, 120 bp, Artificial Sequence
  ENSG00000140497_28 (sequence is synthesized)
caggccttacatgcggagttgcctttctgtgcagctgggtggtgggctgtagggagctgggtccttctcagctggcgtcacagacttggaggaggtcaagacccccagcgtggcacagcg

SEQ ID NO: 360805 - DNA, 120 bp, Artificial Sequence
  ENSG00000140497_29 (sequence is synthesized)
gggtcagttctgctcctgcttccgcccccagtgcctgaaacttggctctccacgtcagccttaggtctttgaagagcttttggagaggttggtgtgtgtatacatgtgtgtgtgtacaca

SEQ ID NO: 360806 - DNA, 120 bp, Artificial Sequence
  ENSG00000140497_30 (sequence is synthesized)
tgtgcctggtttgtcatcctgtgaaatgaccagtttgagatctctccctaaaaaggactgtagtctcatccttcaggaggaacctggcccaaatggcagcagctgccagcaggtgcaggg

SEQ ID NO: 360807 - DNA, 120 bp, Artificial Sequence
  ENSG00000140497_31 (sequence is synthesized)
ccccggggccaggtctgttcagcctcacatacagtcagtcccttactgttactcagaggctctaccccgcctggagaggagataagtgtggactctgcatgccactaaagccaggcaggg

SEQ ID NO: 360808 - DNA, 120 bp, Artificial Sequence
  ENSG00000140497_32 (sequence is synthesized)
cagtttagggggacctcaggaggcagctcctgggggcaggccatggggcagggtgcttgtacagatcctgaggctcaggcacacgccatctgccttcacgtgtctcccctttccactcac

SEQ ID NO: 360809 - DNA, 120 bp, Artificial Sequence
  ENSG00000140497_33 (sequence is synthesized)
tgttagcaggcttgcactgttttccttctcacacatccaccaggctcttcaaatgaggcttgggtctgtgggtttcttattatagtttagtttcttgtgaggtctttttcccaaaggtca

SEQ ID NO: 360810 - DNA, 120 bp, Artificial Sequence
  ENSG00000140497_34 (sequence is synthesized)
caatcactgagcgctgccttgacccagtatggggaagaggtggagaagccaatgggggtagttttcccaactcaagcttagggatgaggggagaggacagcttagtcatggccaaggggt

SEQ ID NO: 360811 - DNA, 120 bp, Artificial Sequence
  ENSG00000140497_35 (sequence is synthesized)
caggaaggtgtgggggcagtggaagacaggttggcctctctaaggtggtctctggtacctaagacactctgtggggcggggactgcttctgggactccttgatggctgtccctgcctggg

SEQ ID NO: 360812 - DNA, 120 bp, Artificial Sequence
  ENSG00000140497_36 (sequence is synthesized)
agagtgtcctgaaacctgtgcggagggcctcccagcattcaccctgagctgccttagagttttgtggggctcttctcatcacaggatgctggtcctgggaagagcagtaagttgcaagtc

SEQ ID NO: 360813 - DNA, 120 bp, Artificial Sequence
  ENSG00000140497_37 (sequence is synthesized)
tcttgccctgttttctagctcccacagagccccgccagtgccctgcttttcccatggcggggagtgggtgagtgggccagctcggatctgctttgggccttctctccagttcttcatcag

SEQ ID NO: 360814 - DNA, 120 bp, Artificial Sequence
  ENSG00000140505_0 (sequence is synthesized)
agctccacaccagccattacaaccctgccaatctcaagcacctgcctctacagttggtacagatggcattgtcccagtctgttcccttctcggccacagagcttctcctggcctctgcca

SEQ ID NO: 360815 - DNA, 120 bp, Artificial Sequence
  ENSG00000140505_1 (sequence is synthesized)
tcttctgcctggtattctgggtgctcaagggtttgaggcctcgggtccccaaaggcctgaaaagtccaccagagccatggggctggcccttgctcgggcatgtgctgaccctggggaaga

SEQ ID NO: 360816 - DNA, 120 bp, Artificial Sequence
  ENSG00000140505_2 (sequence is synthesized)
acccgcacctggcactgtcaaggatgagccagcgctacggggacgtcctgcagatccgcattggctccacgcccgtgctggtgctgagccgcctggacaccatccggcaggccctggtgc

SEQ ID NO: 360817 - DNA, 120 bp, Artificial Sequence
  ENSG00000140505_3 (sequence is synthesized)
ggcagggcgacgatttcaagggccggcctgacctctacacctccaccctcatcactgatggccagagcttgaccttcagcacagactctggaccggtgtgggctgcccgccggcgcctgg

SEQ ID NO: 360818 - DNA, 120 bp, Artificial Sequence
  ENSG00000140505_4 (sequence is synthesized)
cccagaatgccctcaacaccttctccatcgcctctgacccagcttcctcatcctcctgctacctggaggagcatgtgagcaaggaggctaaggccctgatcagcaggttgcaggagctga

SEQ ID NO: 360819 - DNA, 120 bp, Artificial Sequence
  ENSG00000140505_5 (sequence is synthesized)
tggcagggcctgggcacttcgacccttacaatcaggtggtggtgtcagtggccaacgtcattggtgccatgtgcttcggacagcacttccctgagagtagcgatgagatgctcagcctcg

SEQ ID NO: 360820 - DNA, 120 bp, Artificial Sequence
  ENSG00000140505_6 (sequence is synthesized)
tgaagaacactcatgagttcgtggagactgcctcctccgggaaccccctggacttcttccccatccttcgctacctgcctaaccctgccctgcagaggttcaaggccttcaaccagaggt

SEQ ID NO: 360821 - DNA, 120 bp, Artificial Sequence
  ENSG00000140505_7 (sequence is synthesized)
tcctgtggttcctgcagaaaacagtccaggagcactatcaggactttgacaagaacagtgtccgggacatcacgggtgccctgttcaagcacagcaagaaggggcctagagccagcggca

SEQ ID NO: 360822 - DNA, 120 bp, Artificial Sequence
  ENSG00000140505_8 (sequence is synthesized)
acctcatcccacaggagaagattgtcaaccttgtcaatgacatctttggagcaggatttgacacagtcaccacagccatctcctggagcctcatgtaccttgtgaccaagcctgagatac

SEQ ID NO: 360823 - DNA, 120 bp, Artificial Sequence
  ENSG00000140505_9 (sequence is synthesized)
agaggaagatccagaaggagctggacactgtgattggcagggagcggcggccccggctctctgacagaccccagctgccctacttggaggccttcatcctggagaccttccgacactcct

SEQ ID NO: 360824 - DNA, 120 bp, Artificial Sequence
  ENSG00000140505_10 (sequence is synthesized)
ccttcttgcccttcaccatcccccacagcacaacaagggacacaacgctgaatggcttctacatccccaagaaatgctgtgtcttcgtaaaccagtggcaggtcaaccatgacccagagc

SEQ ID NO: 360825 - DNA, 120 bp, Artificial Sequence
  ENSG00000140505_11 (sequence is synthesized)
tgtgggaggacccctctgagttccggcctgagcggttcctcaccgccgatggcactgccattaacaagcccttgagtgagaagatgatgctgtttggcatgggcaagcgccggtgtatcg

SEQ ID NO: 360826 - DNA, 120 bp, Artificial Sequence
  ENSG00000140505_12 (sequence is synthesized)
gggaagtcctggccaagtgggagatcttcctcttcctggccatcctgctacagcaactggagttcagcgtgccgccgggcgtgaaagtcgacctgacccccatctacgggctgaccatga

SEQ ID NO: 360827 - DNA, 120 bp, Artificial Sequence
  ENSG00000140505_13 (sequence is synthesized)
gtgaacatgtccaggcgcggctgcgcttctccatcaattgaagaagacaccaccattctgaggccagggagcgagtgggggccagccacggggactcagcccttgtttctcttcctttct

SEQ ID NO: 360828 - DNA, 120 bp, Artificial Sequence
  ENSG00000140505_14 (sequence is synthesized)
ttttttaaaaaatagcagctttagccaagtgcagggcctgtaatcccagcattttaggaggccaaggttggaggatcatttgagcccaggaattggaaagcagcctggccaacatagtgg

SEQ ID NO: 360829 - DNA, 88 bp, Artificial Sequence
  ENSG00000140505_15 (sequence is synthesized)
tgagcccaggaattggaaagcagcctggccaacatagtgggaccctgtctctacaaaaaaaaaatttgccaagagcctgagtcaaaca

SEQ ID NO: 360830 - DNA, 120 bp, Artificial Sequence
  ENSG00000140505_16 (sequence is synthesized)
tatacatatatatatagcagctttatggagatataattcttatgccatataattcaccttctttttttttttttgtctgagacagaatctcagtctgtcacccaggttggagtgcagtgg

SEQ ID NO: 360831 - DNA, 89 bp, Artificial Sequence
  ENSG00000140505_17 (sequence is synthesized)
ccacctcgcaggtcacctgggattacaagcatgagtcactacgcctggctgatttttgtagttttagtggagatggggtttcaccatgt

SEQ ID NO: 360832 - DNA, 76 bp, Artificial Sequence
  ENSG00000140505_18 (sequence is synthesized)
tccacctgccttggcttaacttacattcttaaagtgtcgaatgacttctagtgtagaattgtgcaaccatcaccag

SEQ ID NO: 360833 - DNA, 120 bp, Artificial Sequence
  ENSG00000140505_19 (sequence is synthesized)
ccacatccagcctaacttacattcttaaagtgtcgaatgacttctagtgtagaattgtgcaaccatcaccagaattaattttattattcttattatttttgagacagagtcttactctgt

SEQ ID NO: 360834 - DNA, 120 bp, Artificial Sequence
  ENSG00000140505_20 (sequence is synthesized)
aagtgctggcattacaggtgtgagccacggtgcccggcccacaattaattttagaacattttcatcacccctaaaagaaaccctgcacccattagcagtccctccacatttccccctagc

SEQ ID NO: 360835 - DNA, 120 bp, Artificial Sequence
  ENSG00000140505_21 (sequence is synthesized)
tttccccctagcctgcctcccctgcctcaccagccctggcaactgctaatctactttctgtgtctatggatttgccttctctaaacatttcatataaatggaattacacaatgagtggtc

SEQ ID NO: 360836 - DNA, 120 bp, Artificial Sequence
  ENSG00000140506_0 (sequence is synthesized)
agacttcaggcgccttcacgatgccggcggtcagtggtccaggtcccttattctgccttctcctcctgctcctggacccccacagccctgagacggggtgtcctcctctacgcaggtttg

SEQ ID NO: 360837 - DNA, 120 bp, Artificial Sequence
  ENSG00000140506_1 (sequence is synthesized)
agtacaagctcagcttcaaaggcccaaggctggcattgcctggggctggaatacccttctggagccatcatggagacgccatcctgggcctggaggaagtgcggctgacgccatccatga

SEQ ID NO: 360838 - DNA, 120 bp, Artificial Sequence
  ENSG00000140506_2 (sequence is synthesized)
ggaaccggagtggcgccgtgtggagcagggcctctgtccccttctctgcctgggaagtagaggtgcagatgagggtgacgggactggggcgccggggagcccagggcatggccgtgtggt

SEQ ID NO: 360839 - DNA, 120 bp, Artificial Sequence
  ENSG00000140506_3 (sequence is synthesized)
acacccggggcaggggccatgtaggctctgtccttggggggctggcttcgtgggacggcatcgggatcttctttgactctccggcagaggatactcaggacagtcctgccatccgtgtgc

SEQ ID NO: 360840 - DNA, 120 bp, Artificial Sequence
  ENSG00000140506_4 (sequence is synthesized)
tggccagcgacgggcacatcccctctgagcagcctggggatggagctagccaagggctgggctcctgtcattgggacttccggaaccggccacaccccttcagagcacggatcacctact

SEQ ID NO: 360841 - DNA, 120 bp, Artificial Sequence
  ENSG00000140506_5 (sequence is synthesized)
gggggcagaggctgcgcatgtccttgaacagtggcctcactcccagtgatccaggtgagttctgtgtggatgtggggcccctgcttttggtccctggaggtttctttggggtctcagcag

SEQ ID NO: 360842 - DNA, 120 bp, Artificial Sequence
  ENSG00000140506_6 (sequence is synthesized)
ccaccggcaccctggcagatgatcatgatgtcctgtccttcctgaccttcagcctgagtgagcccagcccagaggttccccctcagcccttcctggagatgcagcagctccgcctggcga

SEQ ID NO: 360843 - DNA, 120 bp, Artificial Sequence
  ENSG00000140506_7 (sequence is synthesized)
tgaagctcaaggagaaggggaaaggctctttgacctggaggagacgctgggcagacaccgccggatcctgcaggctctgcggggtctctccaagcagctggcccaggctgagagacaatg

SEQ ID NO: 360844 - DNA, 120 bp, Artificial Sequence
  ENSG00000140506_8 (sequence is synthesized)
gaagaagcagctggggcccccaggccaagccaggcctgacggaggctgggccctggatgcttcctgccagattccatccaccccagggaggggtggccacctctccatgtcactcaataa

SEQ ID NO: 360845 - DNA, 120 bp, Artificial Sequence
  ENSG00000140506_9 (sequence is synthesized)
ggactctgccaaggtcggtgccctgctccatggacagtggactctgctccaggccctgcaagagatgagggatgcagctgtccgcatggctgcagaagcccaggtctcctacctgcctgt

SEQ ID NO: 360846 - DNA, 120 bp, Artificial Sequence
  ENSG00000140506_10 (sequence is synthesized)
gggcattgagcatcatttcttagagctggaccacatcctgggcctcctgcaggaggagcttcggggcccggcgaaggcagcagccaaggccccccgcccacctggccagcccccaagggc

SEQ ID NO: 360847 - DNA, 120 bp, Artificial Sequence
  ENSG00000140506_11 (sequence is synthesized)
ctcctcgtgcctgcagcctggcatcttcctgttctacctcctcattcagactgtaggcttcttcggctacgtgcacttcaggcaggagctgaacaagagccttcaggagtgtctgtccac

SEQ ID NO: 360848 - DNA, 120 bp, Artificial Sequence
  ENSG00000140506_12 (sequence is synthesized)
aggcagccttcctctgggtcctgcaccacacacccccagggccctggggattctgaggaggcagcctctccctgccagcatgcctgcctgacccacctcagagcctgctttgcatcactg

SEQ ID NO: 360849 - DNA, 120 bp, Artificial Sequence
  ENSG00000140506_13 (sequence is synthesized)
ggaagcaggcagtgtcttgggtgggggcttggtcagtatcctctccgtctgggtgcccagctcccacgcacacctgagctttcggcatgctcccacctcgttaaaggtgatttccctctc

SEQ ID NO: 360850 - DNA, 120 bp, Artificial Sequence
  ENSG00000140506_14 (sequence is synthesized)
agatagagggagaggacagtgccaaaacccagctcctggccagtccccagctcctccctgcctggccctatcccaggatcccctccccggcctcccagctatgatctaccccggggccca

SEQ ID NO: 360851 - DNA, 120 bp, Artificial Sequence
  ENSG00000140506_15 (sequence is synthesized)
cagaagggcagtgatgaataaatcaccctcagcacaccttctaaagagcactggggtggcgtcagccacttcaccacatgacctgggcttctgtgacccttgggagaagtcatgtctgcc

SEQ ID NO: 360852 - DNA, 120 bp, Artificial Sequence
  ENSG00000140506_16 (sequence is synthesized)
ttgagacttgcaagtctcaaatgggataaaacaagagaagctttgatttcagtgctggccacataagtgcccctagctgtgagttgcgggacaagtggaagacagacagcaaagaggggc

SEQ ID NO: 360853 - DNA, 120 bp, Artificial Sequence
  ENSG00000140506_17 (sequence is synthesized)
atttaggaaaatggagcaaagaaatgtgacaccatggagagtccacggagggtcccacagcgggaaagctgagggcaaccagagcgtgggagtccttgaatgccaggaccttggtctggt

SEQ ID NO: 360854 - DNA, 120 bp, Artificial Sequence
  ENSG00000140506_18 (sequence is synthesized)
ttctgaggaggagagtgacatggtcagagctatgctggaaaggtggccactgtgcagttgctactaccagtagcagctgtgctctgggggcctaagagtgtcagatggtctgctgccatg

SEQ ID NO: 360855 - DNA, 120 bp, Artificial Sequence
  ENSG00000140506_19 (sequence is synthesized)
gctctagcccaggatgttttgggatcgtccagttctgccacaggggcctgcctctgactgagtgtgaggttcaaccctcaccacccacccgtctacctgtcaaccctcacacctttccta

SEQ ID NO: 360856 - DNA, 120 bp, Artificial Sequence
  ENSG00000140506_20 (sequence is synthesized)
gaggcagctttgtacactgccccctctccaagttccctggatgagagccaggacgccccaagcctggggaaaggaaacggagcatgcacatggcctagattccaggtcccccactccttc

SEQ ID NO: 360857 - DNA, 120 bp, Artificial Sequence
  ENSG00000140506_21 (sequence is synthesized)
gctgacagagcggggtgggtcagggaggcgggtgatgagccccggggtcccagtatcccacacggttccctgagctgaggggctggggacctgcaggccgtgtggtacacccggggcagg

SEQ ID NO: 360858 - DNA, 120 bp, Artificial Sequence
  ENSG00000140506_22 (sequence is synthesized)
ttgcctcggtgggatatcatggcggttagggtgaaggctgagcgagggggttgctgggtggaggggtcttacttctccttcatctgtccccttccagatgatcatgatgtcctgtccttc

SEQ ID NO: 360859 - DNA, 120 bp, Artificial Sequence
  ENSG00000140506_23 (sequence is synthesized)
ctgaccttcagcctgagtgagcccagcccagaggtgatgccagccctggcctacctgggaatggcagcccagggaccctgccctcacccatgtcatggtgccctcagacctgccattcca

SEQ ID NO: 360860 - DNA, 120 bp, Artificial Sequence
  ENSG00000140506_24 (sequence is synthesized)
gcccttacctccacctggcctctgagctctgctcaggccagaccttgtgcagggcagtgctgcgggccagggccggtgtgtgaggtctcgcaggctggctggctcaggctgtgacattac

SEQ ID NO: 360861 - DNA, 120 bp, Artificial Sequence
  ENSG00000140506_25 (sequence is synthesized)
agttcagagcgatcagtgccaggtctcaaaaggtgcagggggctgtgggagcacagaggaggagtcccaaccagccagggggtcaaggaaggctgcctggaggagatgagcttaaaggag

SEQ ID NO: 360862 - DNA, 120 bp, Artificial Sequence
  ENSG00000140506_26 (sequence is synthesized)
cctcggaccagcacatataggcttgaggccacagcagggagggaagatggtggggatctgcgtgaaggcagaactcagagggctggaaactgcagggccagctggccagggaggaaggct

SEQ ID NO: 360863 - DNA, 120 bp, Artificial Sequence
  ENSG00000140506_27 (sequence is synthesized)
gggctcgtggggaagcctgtgggaaggctccccttgcttctggatctcccatgggtttggggcccgactttctgtcttcctcccctaggttccccctcagcccttcctggagatgcagca

SEQ ID NO: 360864 - DNA, 120 bp, Artificial Sequence
  ENSG00000140506_28 (sequence is synthesized)
cggtgaggggaaagtagtgggcagcatggggtccccaaccttgacgtctgggctcagccacccttcttccagcacttcagcagccccaagccctcctgcctttgccctcccctcccagga

SEQ ID NO: 360865 - DNA, 120 bp, Artificial Sequence
  ENSG00000140506_29 (sequence is synthesized)
ctgctggcaagcacatctgtgcctgcgtcagtgtctgtgtgtccgtgcatacgtgccaccacacatctcatcttttctctgtcctctctcctctctgaagagtcccacagactcagcagc

SEQ ID NO: 360866 - DNA, 120 bp, Artificial Sequence
  ENSG00000140506_30 (sequence is synthesized)
agcagggccctggacacccctcgatccaatatccaatgaccagaggggaaacagggtgggctgtgtccaagatcactgagtccagtggtagtcagcgcttccccatgccctgtcccatcc

SEQ ID NO: 360867 - DNA, 120 bp, Artificial Sequence
  ENSG00000140506_31 (sequence is synthesized)
tcgttccctcgccctcaccctgctcaccctgtctttggctctttacttctctcttctcttctcttgaaccctgggccccttgatgatcccaggccccaggccttcccagctgttcccaca

SEQ ID NO: 360868 - DNA, 120 bp, Artificial Sequence
  ENSG00000140506_32 (sequence is synthesized)
tcatggagacacatgctcacacactaagtcccaggcacacagaaggcaatgtggaccagcacaaacctccactctcccggctccatcccagcgggcctgtggctggccatgagaactggg

SEQ ID NO: 360869 - DNA, 120 bp, Artificial Sequence
  ENSG00000140511_0 (sequence is synthesized)
aaaggtgcgcgtgttcctttaaggggctggtctggcgggagcgcgggggtttttctgctgccgcttcctttctgcccttttaatttccccgaaatcagactgctgccttggaccgggaca

SEQ ID NO: 360870 - DNA, 120 bp, Artificial Sequence
  ENSG00000140511_1 (sequence is synthesized)
gctcgcggcccccgagagctctagccgtcgaggagctgcctggggacgtttgccctggggccccagcctggcccgggtcaccctggcatgaggagatgggcctgttgctcctggtcccgt

SEQ ID NO: 360871 - DNA, 120 bp, Artificial Sequence
  ENSG00000140511_2 (sequence is synthesized)
tgctcctgctgcccggctcctacggactgcccttctacaacggcttctactactccaacagcgccaacgaccagaacctaggcaacggtcatggcaaagacctccttaatggagtgaagc

SEQ ID NO: 360872 - DNA, 120 bp, Artificial Sequence
  ENSG00000140511_3 (sequence is synthesized)
tggtggtggagacacccgaggagaccctgttcacctaccaaggggccagtgtgatcctgccctgccgctaccgctacgagccggccctggtctccccgcggcgtgtgcgtgtcaaatggt

SEQ ID NO: 360873 - DNA, 120 bp, Artificial Sequence
  ENSG00000140511_4 (sequence is synthesized)
ggaagctgtcggagaacggggccccagagaaggacgtgctggtggccatcgggctgaggcaccgctcctttggggactaccaaggccgcgtgcacctgcggcaggacaaagagcatgacg

SEQ ID NO: 360874 - DNA, 120 bp, Artificial Sequence
  ENSG00000140511_5 (sequence is synthesized)
tctcgctggagatccaggatctgcggctggaggactatgggcgttaccgctgtgaggtcattgacgggctggaggatgaaagcggtctggtggagctggagctgcggggtgtggtctttc

SEQ ID NO: 360875 - DNA, 120 bp, Artificial Sequence
  ENSG00000140511_6 (sequence is synthesized)
cttaccagtcccccaacgggcgctaccagttcaacttccacgagggccagcaggtctgtgcagagcaggctgcggtggtggcctcctttgagcagctcttccgggcctgggaggagggcc

SEQ ID NO: 360876 - DNA, 120 bp, Artificial Sequence
  ENSG00000140511_7 (sequence is synthesized)
tggactggtgcaacgcgggctggctgcaggatgccacggtgcagtaccccatcatgttgccccggcagccctgcggtggcccgggcctggcacctggcgtgcgaagctacggcccccgcc

SEQ ID NO: 360877 - DNA, 120 bp, Artificial Sequence
  ENSG00000140511_8 (sequence is synthesized)
actacctggagcaccctgagaagctgacgctgacagaggcaagggaggcctgccaggaagatgatgccacgatcgccaaggtgggacagctctttgccgcctggaagttccatggcctgg

SEQ ID NO: 360878 - DNA, 120 bp, Artificial Sequence
  ENSG00000140511_9 (sequence is synthesized)
accgctgcgacgctggctggctggcagatggtagcgtccgctaccctgtggttcacccgcatcctaactgtgggcccccagagcctggggtccgaagctttggcttccccgacccgcaga

SEQ ID NO: 360879 - DNA, 120 bp, Artificial Sequence
  ENSG00000140511_10 (sequence is synthesized)
gccgcttgtacggtgtttactgctaccgccagcactaggacctggggccctcccctgccgcattccctcactggctgtgtatttattgagtggttcgttttcccttgtgggttggagcca

SEQ ID NO: 360880 - DNA, 120 bp, Artificial Sequence
  ENSG00000140511_11 (sequence is synthesized)
ttttaactgtttttatacttctcaatttaaattttctttaaacatttttttactattttttgtaaagcaaacagaacccaatgcctccctttgctcctggatgccccactccaggaatca

SEQ ID NO: 360881 - DNA, 120 bp, Artificial Sequence
  ENSG00000140511_12 (sequence is synthesized)
tgcttgctcccctgggccatttgcggttttgtgggcttctggagggttccccgccatccaggctggtctccctcccttaaggaggttggtgcccagagtgggcggtggcctgtctagaat

SEQ ID NO: 360882 - DNA, 120 bp, Artificial Sequence
  ENSG00000140511_13 (sequence is synthesized)
gccgccgggagtccgggcatggtgggcacagttctccctgcccctcagcctgggggaagaagagggcctcgggggcctccggagctgggctttgggcctctcctgcccacctctacttct

SEQ ID NO: 360883 - DNA, 120 bp, Artificial Sequence
  ENSG00000140511_14 (sequence is synthesized)
ctgtgaagccgctgaccccagtctgcccactgaggggctagggctggaagccagttctaggcttccaggcgaaagctgagggaaggaagaaactcccctccccgttccccttcccctctc

SEQ ID NO: 360884 - DNA, 120 bp, Artificial Sequence
  ENSG00000140511_15 (sequence is synthesized)
ggttccaaagaatctgttttgttgtcatttgtttctcctgtttccctgtgtggggaggggccctcaggtgtgtgtactttggacaataaatggtgctatgactgccttccgccatcccca

SEQ ID NO: 360885 - DNA, 120 bp, Artificial Sequence
  ENSG00000140511_16 (sequence is synthesized)
gaggagctgcctggggacgatgaggaaatggaggcacagagaggtgaacttgcccgaagtcactcagcaggatgcagtgtgtccagctccaataccgagcccaggtctgagtgcccagac

SEQ ID NO: 360886 - DNA, 120 bp, Artificial Sequence
  ENSG00000140511_17 (sequence is synthesized)
ttaaaagtacttaattctcaaaacaacccacatggaagctactgttgtgacccccattttacaggtgagaaaactgaggcacagagaggtcaagtaacttacctaaggtcacacagcttg

SEQ ID NO: 360887 - DNA, 120 bp, Artificial Sequence
  ENSG00000140511_18 (sequence is synthesized)
ggtaaatgcctcatcccccttagagccctgggcctctcaggtgtaaaatggggtatcacaatctttcctcctttacctccctcagaggcaatgaggataagatgtatgtccttaaaatgc

SEQ ID NO: 360888 - DNA, 120 bp, Artificial Sequence
  ENSG00000140511_19 (sequence is synthesized)
gttctctgtctttgccaccagtgtccacatggcttacatggtggctcagaggggccgcattcctcattcttgaagttggggtggcagtggagttggggagaacctgcaagagtcattggt

SEQ ID NO: 360889 - DNA, 120 bp, Artificial Sequence
  ENSG00000140511_20 (sequence is synthesized)
ctggggtctgcaggggcagcctagagaaacagggagccctcaccccattcccggggcttcaagggctaggaatttggggtggaaccaggcatgaaatagtccccctgcaaacacacgtag

SEQ ID NO: 360890 - DNA, 120 bp, Artificial Sequence
  ENSG00000140511_21 (sequence is synthesized)
aggctgcaagctgactgtcagggcccatgggcttctctgccgcccaacctggctttgcccaggtgcctggcttccggccctggtgagatcggaggtttggggctcaggctgttcctgggt

SEQ ID NO: 360891 - DNA, 120 bp, Artificial Sequence
  ENSG00000140511_22 (sequence is synthesized)
ccttggccacacggaggagattccaaagtgtccttcccagacccctagggtcacctccactccctaaggtttcattgacttggtagagactacatctcagaagtttaaaaactttttatt

SEQ ID NO: 360892 - DNA, 120 bp, Artificial Sequence
  ENSG00000140511_23 (sequence is synthesized)
agagtaaaatttcaaacacgaacatatcttttcagggcctgtggcctctatcagaccctgaccacaaggagagaaaccgcctgccccagacctccctgcccttgagcctcctttatggaa

SEQ ID NO: 360893 - DNA, 120 bp, Artificial Sequence
  ENSG00000140511_24 (sequence is synthesized)
gaaagttccttgcattttcctaggaaatttccacattcataataacgtagacgatcgggtcccagctaacgagtggggagctgggagtcaaacctggcccctagagcccaaagcccgggc

SEQ ID NO: 360894 - DNA, 120 bp, Artificial Sequence
  ENSG00000140511_25 (sequence is synthesized)
ctgtctggagaagatggcacagcctcactgggggtctggcgacagccttgcggattaggttggggacattgttggggacattaatggactaattaattaccttaactcatggatgttttc

SEQ ID NO: 360895 - DNA, 120 bp, Artificial Sequence
  ENSG00000140519_0 (sequence is synthesized)
gaaccgcccgctgccagcccggccaggcacccctgcagcatggcctggaacaccaacctccgctggcggctgccgctcacctgcctgctcctgcaggtgattatggtgattctcttcggg

SEQ ID NO: 360896 - DNA, 120 bp, Artificial Sequence
  ENSG00000140519_1 (sequence is synthesized)
gtgttcgtgcgctacgacttcgaggccgacgcccactggtggtcagagaggacgcacaagaacttgagcgacatggagaacgaattctactatcgctacccaagcttccaggacgtgcac

SEQ ID NO: 360897 - DNA, 120 bp, Artificial Sequence
  ENSG00000140519_2 (sequence is synthesized)
gtgatggtcttcgtgggcttcggcttcctcatgactttcctgcagcgctacggcttcagcgccgtgggcttcaacttcctgttggcagccttcggcatccagtgggcgctgctcatgcag

SEQ ID NO: 360898 - DNA, 120 bp, Artificial Sequence
  ENSG00000140519_3 (sequence is synthesized)
ggctggttccacttcttacaagaccgctacatcgtcgtgggcgtggagaacctcatcaacgctgacttctgcgtggcctctgtctgcgtggcctttggggcagttctgggtaaagtcagc

SEQ ID NO: 360899 - DNA, 120 bp, Artificial Sequence
  ENSG00000140519_4 (sequence is synthesized)
cccattcagctgctcatcatgactttcttccaagtgaccctcttcgctgtgaatgagttcattctccttaacctgctaaaggtgaaggatgcaggaggctccatgaccatccacacattt

SEQ ID NO: 360900 - DNA, 120 bp, Artificial Sequence
  ENSG00000140519_5 (sequence is synthesized)
ggcgcctactttgggctcacagtgacccggatcctctaccgacgcaacctagagcagagcaaggagagacagaattctgtgtaccagtcggacctctttgccatgattggcaccctcttc

SEQ ID NO: 360901 - DNA, 120 bp, Artificial Sequence
  ENSG00000140519_6 (sequence is synthesized)
ctgtggatgtactggcccagcttcaactcagccatatcctaccatggggacagccagcaccgagccgccatcaacacctactgctccttggcagcctgcgtgcttacctcggtggcaata

SEQ ID NO: 360902 - DNA, 120 bp, Artificial Sequence
  ENSG00000140519_7 (sequence is synthesized)
tccagtgccctgcacaagaagggcaagctggacatggtgcacatccagaatgccacgctcgcaggaggggtggccgtgggtaccgctgctgagatgatgctcatgccttacggtgccctc

SEQ ID NO: 360903 - DNA, 120 bp, Artificial Sequence
  ENSG00000140519_8 (sequence is synthesized)
cctgggttttgtatacctgaccccattcctggagtcccggctgcacatccaggacacatgtggcattaacaatctgcatggcattcctggcatcataggcggcatcgtgggtgctgtgac

SEQ ID NO: 360904 - DNA, 120 bp, Artificial Sequence
  ENSG00000140519_9 (sequence is synthesized)
agcggcctccgccagccttgaagtctatggaaaagaagggcttgtccattcctttgactttcaaggtttcaacggggactggaccgcaagaacacagggaaagttccagatttatggtct

SEQ ID NO: 360905 - DNA, 120 bp, Artificial Sequence
  ENSG00000140519_10 (sequence is synthesized)
cttggtgaccctggccatggccctgatgggtggcatcattgtggggctcattttgagattaccattctggggacaaccttcagatgagaactgctttgaggatgcggtctactgggagat

SEQ ID NO: 360906 - DNA, 120 bp, Artificial Sequence
  ENSG00000140519_11 (sequence is synthesized)
gcctgaagggaacagcactgtctacatccctgaggaccccaccttcaagccctcaggaccctcagtaccctcagtacccatggtgtccccactacccatggcttcctcggtacccttggt

SEQ ID NO: 360907 - DNA, 120 bp, Artificial Sequence
  ENSG00000140519_12 (sequence is synthesized)
accctaggctcccagggcaggtgaggagcaggctccacagactgtcctggggcccagaggagctggtgctgacctagctagggatgcaagagtgagcaagcagcacccccacctgctggc

SEQ ID NO: 360908 - DNA, 120 bp, Artificial Sequence
  ENSG00000140519_13 (sequence is synthesized)
ttggcctcaaggtgcctccacccctgccctccccttcatcccagggggtctgactgagaatggagaaggagaagctacaaagtgggcatccaagccgggttctggctgcagaagttctgc

SEQ ID NO: 360909 - DNA, 120 bp, Artificial Sequence
  ENSG00000140519_14 (sequence is synthesized)
ctctgcctggggtcttggccacattggagaaaaacaggctcaaagtggggctgggacctggtgggtgaacctgagctctcccaggagacaacttagctgccagtcaccacctatgaggct

SEQ ID NO: 360910 - DNA, 120 bp, Artificial Sequence
  ENSG00000140519_15 (sequence is synthesized)
cttctaccccgtgcctgcacctcggccagcatctcctatgctccctgggtcccccagacctctctgtgttgtgtgcgtggcagcctccaggaataaacattcttgttgtcctttgtaaaa

SEQ ID NO: 360911 - DNA, 120 bp, Artificial Sequence
  ENSG00000140519_16 (sequence is synthesized)
tgggggcatttagcccagaaatgggggtcagggtagacttcctggagtggtgtggaaggctaagtggggggtaaggaaggcagggagggccttccaggaagagcccctgcatgactaaag

SEQ ID NO: 360912 - DNA, 120 bp, Artificial Sequence
  ENSG00000140519_17 (sequence is synthesized)
ctgcagaggtggaaacagctgggtgtggggtcatctctagagctaaaggacaggatgcctgcctgagctgtggggctgtatctaatgcctctcctcccgggcccattgggcctgtctggt

SEQ ID NO: 360913 - DNA, 120 bp, Artificial Sequence
  ENSG00000140519_18 (sequence is synthesized)
aaggctgcagggacttgaggctagactttcctctgggggcagggtccgaccgggcccggcacatcaaaatcgcccagccctgtgtcctgagagaccgcagcccacgggactctggtggga

SEQ ID NO: 360914 - DNA, 120 bp, Artificial Sequence
  ENSG00000140519_19 (sequence is synthesized)
tatacctgaccgtaagtgccccaggcaaggggctgggggctagagaatgctgaggtctttgtgttcctgacagtgagctgagggttcctagggagggggctgagggctagagaatcctgg

SEQ ID NO: 360915 - DNA, 120 bp, Artificial Sequence
  ENSG00000140521_0 (sequence is synthesized)
gcggaccggccgggtggaggccacacgctaccccgaggctgcgtaggccgcgcgaagggggacgccgtgccgtgggcctggggtcgggggagcagcagaccgggaagcaccgtgaggacc

SEQ ID NO: 360916 - DNA, 120 bp, Artificial Sequence
  ENSG00000140521_1 (sequence is synthesized)
gaggatttggggtggaaggcaggcatggtcaaacccatttcactgacaggagagcagagacaggacgtgtctctctccacgtcttccagccagtaaaagaagccaagctggagcccaaag

SEQ ID NO: 360917 - DNA, 120 bp, Artificial Sequence
  ENSG00000140521_2 (sequence is synthesized)
ccaggtgttctgactcccagcgtgggggtccctgcaccaaccatgagccgcctgctctggaggaaggtggccggcgccaccgtcgggccagggccggttccagctccggggcgctgggtc

SEQ ID NO: 360918 - DNA, 87 bp, Artificial Sequence
  ENSG00000140521_3 (sequence is synthesized)
cgtcgggccagggccggttccagctccggggcgctgggtctccagctccgtccccgcgtccgaccccagcgacgggcagcggcggcg

SEQ ID NO: 360919 - DNA, 120 bp, Artificial Sequence
  ENSG00000140521_4 (sequence is synthesized)
gggcagctgcggcacaacccattggacatccagatgctctcgagagggctgcacgagcaaatcttcgggcaaggaggggagatgcctggcgaggccgcggtgcgccgcagcgtcgagcac

SEQ ID NO: 360920 - DNA, 120 bp, Artificial Sequence
  ENSG00000140521_5 (sequence is synthesized)
ctgcagaagcacgggctctgggggcagccagccgtgcccttgcccgacgtggagctgcgcctgccgcccctctacggggacaacctggaccagcacttccgcctcctggcccagaagcag

SEQ ID NO: 360921 - DNA, 120 bp, Artificial Sequence
  ENSG00000140521_6 (sequence is synthesized)
agcctgccctacctggaggcggccaacttgctgttgcaggcccagctgcccccgaagcccccggcttgggcctgggcggagggctggacccggtacggccccgagggggaggccgtaccc

SEQ ID NO: 360922 - DNA, 120 bp, Artificial Sequence
  ENSG00000140521_7 (sequence is synthesized)
gtggccatccccgaggagcgggccctggtgttcgacgtggaggtctgcttggcagagggaacttgccccacattggcggtggccatatccccctcggcctggtattcctggtgcagccag

SEQ ID NO: 360923 - DNA, 120 bp, Artificial Sequence
  ENSG00000140521_8 (sequence is synthesized)
cggctggtggaagagcgttactcttggaccagccagctgtcgccggctgacctcatccccctggaggtccctactggtgccagcagccccacccagagagactggcaggagcagttagtg

SEQ ID NO: 360924 - DNA, 120 bp, Artificial Sequence
  ENSG00000140521_9 (sequence is synthesized)
gtggggcacaatgtttcctttgaccgagctcatatcagggagcagtacctgatccagggttcccgcatgcgtttcctggacaccatgagcatgcacatggccatctcagggctaagcagc

SEQ ID NO: 360925 - DNA, 120 bp, Artificial Sequence
  ENSG00000140521_10 (sequence is synthesized)
ttccagcgcagtctgtggatagcagccaagcagggcaaacacaaggtccagccccccacaaagcaaggccagaagtcccagaggaaagccagaagaggcccagcgatctcatcctgggac

SEQ ID NO: 360926 - DNA, 120 bp, Artificial Sequence
  ENSG00000140521_11 (sequence is synthesized)
tggctggacatcagcagtgtcaacagtctggcagaggtgcacagactttatgtaggggggcctcccttagagaaggagcctcgagaactgtttgtgaagggcaccatgaaggacattcgt

SEQ ID NO: 360927 - DNA, 120 bp, Artificial Sequence
  ENSG00000140521_12 (sequence is synthesized)
gagaacttccaggacctgatgcagtactgtgcccaggacgtgtgggccacccatgaggttttccagcagcagctaccgctcttcttggagaggtgtccccacccagtgactctggccggc

SEQ ID NO: 360928 - DNA, 120 bp, Artificial Sequence
  ENSG00000140521_13 (sequence is synthesized)
atgctggagatgggtgtctcctacctgcctgtcaaccagaactgggagcgttacctggcagaggcacagggcacttatgaggagctccagcgggagatgaagaagtcgttgatggatctg

SEQ ID NO: 360929 - DNA, 120 bp, Artificial Sequence
  ENSG00000140521_14 (sequence is synthesized)
gccaatgatgcctgccagctgctctcaggagagaggtacaaagaagacccctggctctgggacctggagtgggacctgcaagaatttaagcagaagaaagctaagaaggtgaagaaggaa

SEQ ID NO: 360930 - DNA, 120 bp, Artificial Sequence
  ENSG00000140521_15 (sequence is synthesized)
ccagccacagccagcaagttgcccatcgagggggctggggcccctggtgatcccatggatcaggaagacctcggcccctgcagtgaggaggaggagtttcaacaagatgtcatggcccgc

SEQ ID NO: 360931 - DNA, 120 bp, Artificial Sequence
  ENSG00000140521_16 (sequence is synthesized)
gcctgcttgcagaagctgaaggggaccacagagctcctgcccaagcggccccagcaccttcctggacaccctggatggtaccggaagctctgcccccggctagacgaccctgcatggacc

SEQ ID NO: 360932 - DNA, 120 bp, Artificial Sequence
  ENSG00000140521_17 (sequence is synthesized)
ccgggccccagcctcctcagcctgcagatgcgggtcacacctaaactcatggcacttacctgggatggcttccctctgcactactcagagcgtcatggctggggctacttggtgcctggg

SEQ ID NO: 360933 - DNA, 120 bp, Artificial Sequence
  ENSG00000140521_18 (sequence is synthesized)
caacctggccaagctgccgacaggtaccaccctggagtcagctggggtggtctgcccctacagagccatcgagtccctgtacaggaagcactgtctcgaacaggggaagcagcagctgat

SEQ ID NO: 360934 - DNA, 120 bp, Artificial Sequence
  ENSG00000140521_19 (sequence is synthesized)
gccccaggaggccggcctggcggaggagttcctgctcactgacaatagtgccatatggcaaacggtagaagaactggattacttagaagtggaggctgaggccaagatggagaacttgcg

SEQ ID NO: 360935 - DNA, 120 bp, Artificial Sequence
  ENSG00000140521_20 (sequence is synthesized)
agctgcagtgccaggtcaacccctagctctgactgcccgtggtggccccaaggacacccagcccagctatcaccatggcaatggaccttacaacgacgtggacatccctggctgctggtt

SEQ ID NO: 360936 - DNA, 120 bp, Artificial Sequence
  ENSG00000140521_21 (sequence is synthesized)
tttcaagctgcctcacaaggatggtaatagctgtaatgtgggaagcccctttgccaaggacttcctgcccaagatggaggatggcaccctgcaggctggcccaggaggtgccagtgggcc

SEQ ID NO: 360937 - DNA, 120 bp, Artificial Sequence
  ENSG00000140521_22 (sequence is synthesized)
ccgtgctctggaaatcaacaaaatgatttctttctggaggaacgcccataaacgtatcagctcccagatggtggtgtggctgcccaggtcagctctgccccgtgctgtgatcaggcaccc

SEQ ID NO: 360938 - DNA, 120 bp, Artificial Sequence
  ENSG00000140521_23 (sequence is synthesized)
cgactatgatgaggaaggcctctatggggccatcctgccccaagtggtgactgccggcaccatcactcgccgggctgtggagcccacatggctcaccgccagcaatgcccggcctgaccg

SEQ ID NO: 360939 - DNA, 120 bp, Artificial Sequence
  ENSG00000140521_24 (sequence is synthesized)
agtaggcagtgagttgaaagccatggtgcaggccccacctggctacacccttgtgggtgctgatgtggactcccaagagctgtggattgcagctgtgcttggagacgcccactttgccgg

SEQ ID NO: 360940 - DNA, 120 bp, Artificial Sequence
  ENSG00000140521_25 (sequence is synthesized)
catgcatggctgcacagcctttgggtggatgacactgcagggcaggaagagcaggggcactgatctacacagtaagacagccactactgtgggcatcagccgtgagcatgccaaaatctt

SEQ ID NO: 360941 - DNA, 120 bp, Artificial Sequence
  ENSG00000140521_26 (sequence is synthesized)
caactacggccgcatctatggtgctgggcagccctttgctgagcgcttactaatgcagtttaaccaccggctcacacagcaggaggcagctgagaaggcccagcagatgtacgctgccac

SEQ ID NO: 360942 - DNA, 120 bp, Artificial Sequence
  ENSG00000140521_27 (sequence is synthesized)
caagggcctccgctggtatcggctgtcggatgagggcgagtggctggtgagggagttgaacctcccagtggacaggactgagggtggctggatttccctgcaggatctgcgcaaggtcca

SEQ ID NO: 360943 - DNA, 120 bp, Artificial Sequence
  ENSG00000140521_28 (sequence is synthesized)
gagagaaactgcaaggaagtcacagtggaagaagtgggaggtggttgctgaacgggcatggaaggggggcacagagtcagaaatgttcaataagcttgagagcattgctacgtctgacat

SEQ ID NO: 360944 - DNA, 120 bp, Artificial Sequence
  ENSG00000140521_29 (sequence is synthesized)
accacgtaccccggtgctgggctgctgcatcagccgagccctggagccctcggctgtccaggaagagtttatgaccagccgtgtgaattgggtggtacagagctctgctgttgactactt

SEQ ID NO: 360945 - DNA, 120 bp, Artificial Sequence
  ENSG00000140521_30 (sequence is synthesized)
acacctcatgcttgtggccatgaagtggctgtttgaagagtttgccatagatgggcgcttctgcatcagcatccatgacgaggttcgctacctggtgcgggaggaggaccgctaccgcgc

SEQ ID NO: 360946 - DNA, 120 bp, Artificial Sequence
  ENSG00000140521_31 (sequence is synthesized)
tgccctggccttgcagatcaccaacctcttgaccaggtgcatgtttgcctacaagctgggtctgaatgacttgccccagtcagtcgcctttttcagtgcagtcgatattgaccggtgcct

SEQ ID NO: 360947 - DNA, 120 bp, Artificial Sequence
  ENSG00000140521_32 (sequence is synthesized)
caggaaggaagtgaccatggattgtaaaaccccttccaacccaactgggatggaaaggagatacgggattccccagggtgaagcgctggatatttaccagataattgaactcaccaaagg

SEQ ID NO: 360948 - DNA, 120 bp, Artificial Sequence
  ENSG00000140521_33 (sequence is synthesized)
ctccttggaaaaacgaagccagcctggaccatagcactgcctggaggctctgtatttgctcccgtggagcttcatcggggtggtgcaggctcccaaactcaggctttcagctgtgctttt

SEQ ID NO: 360949 - DNA, 120 bp, Artificial Sequence
  ENSG00000140521_34 (sequence is synthesized)
tgcaaaagggcttgcctaaggccagccatttttcagtagcaggacctgccaagaagattccttctaactgaaggtgcagttgaattcagtgggttcagaaccaagatgccaacatcggtg

SEQ ID NO: 360950 - DNA, 120 bp, Artificial Sequence
  ENSG00000140521_35 (sequence is synthesized)
tggactacaggacaaggggcattgttgcttgttgggtaaaaatgaagcagaagccccaaagttcacattaactcaggcatttcatttattttttccttttcttcttggctggttctttgt

SEQ ID NO: 360951 - DNA, 120 bp, Artificial Sequence
  ENSG00000140521_36 (sequence is synthesized)
tctgtcccccatgctctgatgcagtgccctagaaggggaaagaattaatgctctaacgtgataaacctgctccaaggcagtggaaataaaaagaaggaaaaaaaagactctatcttctca

SEQ ID NO: 360952 - DNA, 120 bp, Artificial Sequence
  ENSG00000140521_37 (sequence is synthesized)
gttcatatggatgaattaaatattaccgttccatgttgatctgccactcagaaccagtttgggaaccatgatctatcctgattattgggtgcatgtttgcctacaagctgggtctgaatg

SEQ ID NO: 360953 - DNA, 120 bp, Artificial Sequence
  ENSG00000140521_38 (sequence is synthesized)
cagtagagctgggatttaatgccgtctgacttttgagctgtgccatgtcagtggctgggttgaggcttgctaaaccagctcagggattgggccagtcttgcctcctgtggtcatttatgg

SEQ ID NO: 360954 - DNA, 120 bp, Artificial Sequence
  ENSG00000140521_39 (sequence is synthesized)
tctggcccaattggaagtgatttcgtatattaattaataaagtgtaccaaactgggaaaaaaaaaaaaagtatgttgagtccataattgcatttcagtatctcagtgggaggttaggctg

SEQ ID NO: 360955 - DNA, 120 bp, Artificial Sequence
  ENSG00000140521_40 (sequence is synthesized)
ctggatggaaaacagtgctggaccttcacctttcttgacttagctaagtgaacagatggggtgttggtccaggggaagccctgctctaaggggtgtggggtcattgctccaggagtgatg

SEQ ID NO: 360956 - DNA, 120 bp, Artificial Sequence
  ENSG00000140521_41 (sequence is synthesized)
ggtcagttttgacttttcatccccctagaagtgaatgtttcagcttatttatttatttctaatttttaaaaagttgtagaagtcctaaaaagactagcctcaattcgtaaaaaaagagtt

SEQ ID NO: 360957 - DNA, 120 bp, Artificial Sequence
  ENSG00000140521_42 (sequence is synthesized)
attgggtttgaaaatgtgaaataccaagactgatcattgagggaagcagtgaggttaggggaattgttccgaagggtggtactcacgcttttctatttggaaaatcaaatgacagaagcc

SEQ ID NO: 360958 - DNA, 120 bp, Artificial Sequence
  ENSG00000140521_43 (sequence is synthesized)
ttttctcatttcatagaaaattgagatgtttgtttttctttctcccataaatgttttctttcttaagtaagtgccaaaagtttgttatttgactgctaacagaaaacactgttaatgggg

SEQ ID NO: 360959 - DNA, 120 bp, Artificial Sequence
  ENSG00000140521_44 (sequence is synthesized)
cccacctagttcttcccagccagagttccctaggtcttaagggggttggagatgccaccctgcccctgggaggccccacacgtgttggagcaaggagaaagcctgggtgagacctcatgg

SEQ ID NO: 360960 - DNA, 120 bp, Artificial Sequence
  ENSG00000140521_45 (sequence is synthesized)
ccatcttgtcatttcccagctgatgacgacagtttcaggcccttttcccaccccctaccccatggcccttgctgaatgcaggtgctggagcagggcctgatataggtgtgtggccctcac

SEQ ID NO: 360961 - DNA, 120 bp, Artificial Sequence
  ENSG00000140521_46 (sequence is synthesized)
tgcgggttcgaatccgggcgctggcacctctcgacgctaggcccgcgccggtcgcggatttggggtggaaggcaggcatggtcaaacccatttcactgacaggagagcagagacaggacg

SEQ ID NO: 360962 - DNA, 120 bp, Artificial Sequence
  ENSG00000140521_47 (sequence is synthesized)
gggactggcaggtgggcggcctagccttcggcttagccttagccctgccctagtggactggctctgtaggtacaaagaagacccctggctctgggacctggagtgggacctgcaagaatt

SEQ ID NO: 360963 - DNA, 120 bp, Artificial Sequence
  ENSG00000140521_48 (sequence is synthesized)
gctgcctggcccagagtgggcatctggtaatcagcggctgctgctgctactgttctctgcccagagccatcgagtccctgtacaggaagcactgtctcgaacaggggaagcagcagctga

SEQ ID NO: 360964 - DNA, 120 bp, Artificial Sequence
  ENSG00000140521_49 (sequence is synthesized)
ctggattaaaatactatttacaaccttaatgctttcaggcatggccagcaaaaaagttggcagtttctttattcctattggaagctacatctttgtaaagaaagctgcgaaatgttaaat

SEQ ID NO: 360965 - DNA, 120 bp, Artificial Sequence
  ENSG00000140521_50 (sequence is synthesized)
tcccagatggtggtgtggctgcccaggtcagctctgccccgtgctgtgatcaggtatggtctgctgagtggttgtagggataggagaactgaggtgaggtggtaggtcctaaggccaaag

SEQ ID NO: 360966 - DNA, 120 bp, Artificial Sequence
  ENSG00000140521_51 (sequence is synthesized)
caccctgctaagacccatttccttcccctgcaccccaccaggcaccccgactatgatgaggaaggcctctatggggccatcctgccccaagtggtgactgccggcaccatcactcgccgg

SEQ ID NO: 360967 - DNA, 120 bp, Artificial Sequence
  ENSG00000140522_0 (sequence is synthesized)
attcaggtaccaggtagccccaaggaggagctgccgacctggcagggaacaaccaagactggggttaaatctcacagcctgcaagtggaagagaagaacttgaacccaggtccaactttt

SEQ ID NO: 360968 - DNA, 120 bp, Artificial Sequence
  ENSG00000140522_1 (sequence is synthesized)
gcgccacagcaggctgcctcttggtcctgacaggaagtcacaacttggccctgacttcctatcctagggaaggggccggctggagaggccaggacagagaaagcagatcccttctttttc

SEQ ID NO: 360969 - DNA, 120 bp, Artificial Sequence
  ENSG00000140522_2 (sequence is synthesized)
caaggactctgtgtcttccataggcaacatgtcagaaggggtgggcacgttccgcatggtacctgaagaggaacaggagctccgtgcccaactggagcagctcacaaccaaggaccatgg

SEQ ID NO: 360970 - DNA, 120 bp, Artificial Sequence
  ENSG00000140522_3 (sequence is synthesized)
acctgtctttggcccgtgcagccagctgccccgccacaccttgcagaaggccaaggatgagctgaacgagagagaggagacccgggaggaggcagtgcgagagctgcaggagatggtgca

SEQ ID NO: 360971 - DNA, 120 bp, Artificial Sequence
  ENSG00000140522_4 (sequence is synthesized)
ggcgcaggcggcctcgggggaggagctggcggtggccgtggcggagagggtgcaagagaaggacagcggcttcttcctgcgcttcatccgcgcacggaagttcaacgtgggccgtgccta

SEQ ID NO: 360972 - DNA, 120 bp, Artificial Sequence
  ENSG00000140522_5 (sequence is synthesized)
tgagctgctcagaggctatgtgaatttccggctgcagtaccctgagctctttgacagcctgtccccagaggctgtccgctgcaccattgaagctggctaccctggtgtcctctctagtcg

SEQ ID NO: 360973 - DNA, 120 bp, Artificial Sequence
  ENSG00000140522_6 (sequence is synthesized)
gcaggcatattgcttcatcctggagaagctgctggagaatgaggaaactcaaatcaatggcttctgcatcattgagaacttcaagggctttaccatgcagcaggctgctagtctccggac

SEQ ID NO: 360974 - DNA, 120 bp, Artificial Sequence
  ENSG00000140522_7 (sequence is synthesized)
ttcagatctcaggaagatggtggacatgctccaggattccttcccagcccggttcaaagccatccacttcatccaccagccatggtacttcaccacgacctacaatgtggtcaagccctt

SEQ ID NO: 360975 - DNA, 120 bp, Artificial Sequence
  ENSG00000140522_8 (sequence is synthesized)
cttgaagagcaagctgcttgagagggtctttgtccacggggatgacctttctggtttctaccaggagatcgatgagaacatcctgccctctgacttcgggggcacgctgcccaagtatga

SEQ ID NO: 360976 - DNA, 120 bp, Artificial Sequence
  ENSG00000140522_9 (sequence is synthesized)
tggcaaggccgttgctgagcagctctttggcccccaggcccaagctgagaacacagccttctgaaaacatctcctgccagctgaactgtagttagaatctctgggcctctcctcaactgt

SEQ ID NO: 360977 - DNA, 120 bp, Artificial Sequence
  ENSG00000140522_10 (sequence is synthesized)
cctggacccaaggctaggaaagggctgcttgagatgactgtggtccccccttagactccctaagcccgagtgagctcaggtgtcaccctgttctcaagttgggggatgggtaataaagga

SEQ ID NO: 360978 - DNA, 120 bp, Artificial Sequence
  ENSG00000140522_11 (sequence is synthesized)
gggggaattcccttgaacaagaagaactggggatagttatatttccacctgcccttgaagctttaagacagtgatttttgtgtaaggttgtatttcaaagactcgaattcattttctcag

SEQ ID NO: 360979 - DNA, 120 bp, Artificial Sequence
  ENSG00000140522_12 (sequence is synthesized)
tcatttcctttgtaacagagttttacgacttagagtctgtgaaaacaggcaaggagcccgggttaaaatatccccctattcgcccccaaaatgcaataaaagaagataaaagagagagga

SEQ ID NO: 360980 - DNA, 120 bp, Artificial Sequence
  ENSG00000140522_13 (sequence is synthesized)
tcaatggcttctgcatcattgagaacttcaagggctttaccatgcagcaggctgctagtctccggacttcagatctcaggaagatggtggacatgctccagccatggtacttcaccacga

SEQ ID NO: 360981 - DNA, 120 bp, Artificial Sequence
  ENSG00000140522_14 (sequence is synthesized)
tattcctcctcccgtttcctcctatgtaaaatggaaataataatgttgaccctgggtctgagagagtggatttgaaagtacttagtgcatcacaaagcacagaacacacttccagtctcg

SEQ ID NO: 360982 - DNA, 120 bp, Artificial Sequence
  ENSG00000140525_0 (sequence is synthesized)
gccgcgggggcggatcttgttgttacgggtaacggaagtgtggcggcgttgggttgagcgggctttttggaagtttgtggcggagttctgtgatatgagcaacaatggaccagaagattt

SEQ ID NO: 360983 - DNA, 120 bp, Artificial Sequence
  ENSG00000140525_1 (sequence is synthesized)
tatctctagcagcagaaaaaacagcagacaaactgcaagaatttcttcaaaccctgagagaaggtgatttgactaatctccttcagaatcaagcagtgaaaggaaaagttgctggagcac

SEQ ID NO: 360984 - DNA, 120 bp, Artificial Sequence
  ENSG00000140525_2 (sequence is synthesized)
tcctgagagccatcttcaaaggttccccctgctctgaggaagctggaacacttaggagacgtaagatatacacttgttgtatccagttggtggaatcgggggatttgcagaaagaaatag

SEQ ID NO: 360985 - DNA, 120 bp, Artificial Sequence
  ENSG00000140525_3 (sequence is synthesized)
cgtctgagatcataggattactgatgctggaggctcaccattttccaggaccattattggttgaattagccaatgagtttattagtgctgtcagagaaggcagcctagtgaatggaaaat

SEQ ID NO: 360986 - DNA, 120 bp, Artificial Sequence
  ENSG00000140525_4 (sequence is synthesized)
ctttggagttactacctatcattctcactgccctggctacgaaaaaggaaaatctggcttatggaaaaggtgtactgagtggggaagaatgtaagaaacagttgattaacaccctgtgtt

SEQ ID NO: 360987 - DNA, 120 bp, Artificial Sequence
  ENSG00000140525_5 (sequence is synthesized)
ctggcaggtgggatcagcaatatgtaatccaactcacctccatgttcaaggatgtccctctgactgcagaagaggtggaatttgtggtggaaaaagcattgagcatgttctccaagatga

SEQ ID NO: 360988 - DNA, 120 bp, Artificial Sequence
  ENSG00000140525_6 (sequence is synthesized)
atcttcaagaaataccacctttggtctatcagcttctggttctctcctccaagggaagcagaaagagtgttttggaaggaatcatagccttcttcagtgcactagataagcagcacaatg

SEQ ID NO: 360989 - DNA, 120 bp, Artificial Sequence
  ENSG00000140525_7 (sequence is synthesized)
aggaacagagtggtgacgagctattggatgttgtcactgtgccatcaggtgaacttcgtcatgtggaaggcaccattattctacacattgtgtttgccatcaaattggactatgaactag

SEQ ID NO: 360990 - DNA, 120 bp, Artificial Sequence
  ENSG00000140525_8 (sequence is synthesized)
gcagagaactcgtgaaacacttaaaggtaggacagcaaggagattccaataataacttaagtcccttcagcattgctcttcttctgtctgtaacaagaatacaaagatttcaggaccagg

SEQ ID NO: 360991 - DNA, 120 bp, Artificial Sequence
  ENSG00000140525_9 (sequence is synthesized)
tgcttgatcttttaaagacttcggttgtaaagagctttaaggatcttcaactcctccaaggctcaaaatttcttcagaatctagttcctcatagatcttatgtttcaaccatgatcttgg

SEQ ID NO: 360992 - DNA, 120 bp, Artificial Sequence
  ENSG00000140525_10 (sequence is synthesized)
aagtagtgaagaatagcgttcatagctgggaccatgttactcagggcctcgtagaacttggtttcattttgatggattcatatgggccaaagaaggttcttgatggaaaaactattgaaa

SEQ ID NO: 360993 - DNA, 120 bp, Artificial Sequence
  ENSG00000140525_11 (sequence is synthesized)
ccagcccaagtctttctagaatgccaaaccagcatgcatgtaagctcggagctaatatcctgttggaaacttttaagatccatgagatgatcagacaagaaattttggagcaggtcctca

SEQ ID NO: 360994 - DNA, 120 bp, Artificial Sequence
  ENSG00000140525_12 (sequence is synthesized)
acagggttgttaccagagcatcttctcccatcagtcatttcttagacctgctttcaaatatcgtcatgtatgcacccttagttcttcaaagttgttcttctaaagtcacagaagcttttg

SEQ ID NO: 360995 - DNA, 120 bp, Artificial Sequence
  ENSG00000140525_13 (sequence is synthesized)
actatttgtcctttctgccccttcagactgtacaaaggctgcttaaggcagtgcagccccttctcaaagtcagcatgtcaatgagagactgcttgatacttgtccttcggaaagctatgt

SEQ ID NO: 360996 - DNA, 120 bp, Artificial Sequence
  ENSG00000140525_14 (sequence is synthesized)
ttgccaaccagcttgatgcccgaaaatctgcagttgctgggtttttgctgctcctgaagaactttaaagttttaggcagcctgtcatcctctcagtgcagtcagtctctcagtgtcagtc

SEQ ID NO: 360997 - DNA, 120 bp, Artificial Sequence
  ENSG00000140525_15 (sequence is synthesized)
aggttcatgtggatgttcacagccattacaattctgtcgccaatgaaactttttgccttgagatcatggatagtttgaggagatgcttaagccagcaagctgatgttcgactcatgcttt

SEQ ID NO: 360998 - DNA, 120 bp, Artificial Sequence
  ENSG00000140525_16 (sequence is synthesized)
atgaggggttttatgatgttcttcgaaggaactctcagctggctaattcagtcatgcaaactctgctctcacagttaaaacagttctatgagccaaaacctgatctgctgcctcctctga

SEQ ID NO: 360999 - DNA, 120 bp, Artificial Sequence
  ENSG00000140525_17 (sequence is synthesized)
aattagaagcttgtattctgacccaaggagataagatctctctacaagaaccactggattatctgctgtgttgtattcagcattgtttggcctggtataagaatacagtcatacccttac

SEQ ID NO: 361000 - DNA, 120 bp, Artificial Sequence
  ENSG00000140525_18 (sequence is synthesized)
agcagggagaggaggaagaggaggaggaagaggcattctacgaagacctagatgatatattggagtccattactaatagaatgattaagagtgagctggaagactttgaactggataaat

SEQ ID NO: 361001 - DNA, 120 bp, Artificial Sequence
  ENSG00000140525_19 (sequence is synthesized)
taaaaaataatatctgtgcttttcttgtgatgggagtttgtgaggttttaatagaatacaatttctccataagtagtttcagtaagaataggtttgaggacattctgagcttatttatgt

SEQ ID NO: 361002 - DNA, 120 bp, Artificial Sequence
  ENSG00000140525_20 (sequence is synthesized)
gttacaaaaaactctctgacattcttaatgaaaaagcgggtaaagccaaaactaaaatggccaacaagacaagtgatagtcttttgtccatgaaatttgtgtccagtcttctcactgctc

SEQ ID NO: 361003 - DNA, 120 bp, Artificial Sequence
  ENSG00000140525_21 (sequence is synthesized)
ttttcagagtcttgctatggagatacacttcaattcctacttcagtggaagagtcgggaaagaaagagaaaggaaagagcatctcactgctgtgcttggagggtttacagaaaatattca

SEQ ID NO: 361004 - DNA, 120 bp, Artificial Sequence
  ENSG00000140525_22 (sequence is synthesized)
gtgctgtgcaacagttctatcagcccaagattcagcagtttctcagagctctggatgtcacagataaggaaggagaagagagagaagatgcagatgtcagtgtcactcagagaacagcat

SEQ ID NO: 361005 - DNA, 120 bp, Artificial Sequence
  ENSG00000140525_23 (sequence is synthesized)
tccagatccggcaatttcagaggtccttgttgaatttacttagcagtcaagaggaagattttaatagcaaagaagccctcctgctagtcacggttcttaccagtttgtccaagttactgg

SEQ ID NO: 361006 - DNA, 120 bp, Artificial Sequence
  ENSG00000140525_24 (sequence is synthesized)
agccctcctctcctcagtttgtgcagatgttatcctggacatcaaagatttgcaaggaaaacagccgggaggatgccttgttttgcaagagcttgatgaacttgctcttcagcctgcatg

SEQ ID NO: 361007 - DNA, 120 bp, Artificial Sequence
  ENSG00000140525_25 (sequence is synthesized)
tttcgtataagagtcctgtcattctgctgcgtgacttgtcccaggatatccacgggcatctgggagatatagaccaggatgtagaggtggagaaaacaaaccactttgcaatagtgaatt

SEQ ID NO: 361008 - DNA, 120 bp, Artificial Sequence
  ENSG00000140525_26 (sequence is synthesized)
tgagaacggctgcccccactgtctgtttacttgttctgagtcaggccgagaaggttctagaagaagtggactggctaatcaccaagcttaagggacaagtgagccaagaaaccttatcag

SEQ ID NO: 361009 - DNA, 120 bp, Artificial Sequence
  ENSG00000140525_27 (sequence is synthesized)
aagaggcctcttctcaggcaaccctaccaaatcagcctgttgagaaagctatcatcatgcaactgggaactctgcttacatttttccacgagctggtgcagacagctctgccatcaggca

SEQ ID NO: 361010 - DNA, 120 bp, Artificial Sequence
  ENSG00000140525_28 (sequence is synthesized)
gctgtgtggacaccttgttaaaggacttgtgcaaaatgtacaccacacttacagcccttgtcagatattatctccaggtgtgtcagagctccggaggaattccaaaaaatatggaaaagc

SEQ ID NO: 361011 - DNA, 120 bp, Artificial Sequence
  ENSG00000140525_29 (sequence is synthesized)
tggtgaagctgtctggttctcatctgacccccctgtgttattctttcatttcttacgtacagaataagagtaagagcctgaactatacgggagagaaaaaggagaaacctgctgccgttg

SEQ ID NO: 361012 - DNA, 120 bp, Artificial Sequence
  ENSG00000140525_30 (sequence is synthesized)
ccacagccatggccagagttcttcgggaaaccaagccaatccctaacctcatctttgccatagaacagtatgaaaaatttctcatccacctttctaagaagtccaaggtgaacctgatgc

SEQ ID NO: 361013 - DNA, 120 bp, Artificial Sequence
  ENSG00000140525_31 (sequence is synthesized)
agcacatgaagctcagcacctcacgagacttcaagatcaaaggaaacatcctagacatggttcttcgagaggatggtgaagatgaaaatgaagagggcactgcatcagagcatgggggac

SEQ ID NO: 361014 - DNA, 120 bp, Artificial Sequence
  ENSG00000140525_32 (sequence is synthesized)
agaacaaagaaccagccaagaagaaaaggaaaaaataaatgaaatgcctgagttaatgtgaactttggggcttctgcttcatttttacccaacaagcaacaatgccccttgtcctgtagt

SEQ ID NO: 361015 - DNA, 120 bp, Artificial Sequence
  ENSG00000140525_33 (sequence is synthesized)
ccacaccgatgttggcatcttggttctgaacccactgaattcaactgcaccttcagttagaaggaatcttcttggcaggtcctgctactgaaaaatggctggccttaggcaagccctttt

SEQ ID NO: 361016 - DNA, 120 bp, Artificial Sequence
  ENSG00000140525_34 (sequence is synthesized)
gcaaaaagcacagctgaaagcctgagtttgggagcctgcaccaccccgatgaagctccacgggagcaaatacagagcctccaggcagtgctatggtccaggctggcttcgtttttccaag

SEQ ID NO: 361017 - DNA, 120 bp, Artificial Sequence
  ENSG00000140525_35 (sequence is synthesized)
gagcctttggtgagttcaattatctggtaaatatccagcgcttcacctgaaagatagtgcaaattggttaggatgccacctcaagaactgtaactgagagctcagaagtgagcaaaggag

SEQ ID NO: 361018 - DNA, 120 bp, Artificial Sequence
  ENSG00000140525_36 (sequence is synthesized)
cttaatgctaaggtcaaaaggagagtgaaaggttgagaacaattgccacgaacggtaatgttacatgttaggagggtctgttttctttttatataagtgtgtcttagatatattttaaat

SEQ ID NO: 361019 - DNA, 120 bp, Artificial Sequence
  ENSG00000140525_37 (sequence is synthesized)
agaaaataagctttctgatttacttgtttggtatttaaagcacagtttgtttttctgtcacctatagagtgcaagaatgcactctatagaataaattatctttaaacatttcttctgtgg

SEQ ID NO: 361020 - DNA, 120 bp, Artificial Sequence
  ENSG00000140525_38 (sequence is synthesized)
ttgaagtaggggacaggtacaggtagaatatttgaagctctgctgccttcatttctgaaacatcatatcacattcactctggacacagggcaccttataaactgaaattagcctagaata

SEQ ID NO: 361021 - DNA, 120 bp, Artificial Sequence
  ENSG00000140525_39 (sequence is synthesized)
ggtccagcaatgagtttatgcgctatgcagtgaatgtagctctgcagaaagtacagcagctaaaggaaacagggcatgtgagtggccctgatggccaaaacccagaaaagatctttcaga

SEQ ID NO: 361022 - DNA, 120 bp, Artificial Sequence
  ENSG00000140525_40 (sequence is synthesized)
caaaccctgagagaagaataagagtaagagcctgaactatacgggagagaaaaaggagaaacctgctgccgttgccacagccatggccagagttcttcgggaaaccaagccaatccctaa

SEQ ID NO: 361023 - DNA, 120 bp, Artificial Sequence
  ENSG00000140525_41 (sequence is synthesized)
tgaaacacttaaaggtagcatcaaacttgtaaggtgatctgggtctcttttgaatgaaagtgtttgaacttaagccactgttatgccagttaatgacaggaaataaatactgtaaaatga

SEQ ID NO: 361024 - DNA, 120 bp, Artificial Sequence
  ENSG00000140525_42 (sequence is synthesized)
tgtttagttttcgtacttttcttacggtttgaagccccactggaacattttccatgttttgaggattctacagaatcaactacagcagcagtttcctgtctagtggacttaagtaatttt

SEQ ID NO: 361025 - DNA, 120 bp, Artificial Sequence
  ENSG00000140525_43 (sequence is synthesized)
actgaagggagtttgaagtggctacctgagattgcgttgctgatttgggggcctataattacagaatgtgcttttcgtaaaatctgctttggtttacttgtgcttttaagattgtggaga

SEQ ID NO: 361026 - DNA, 120 bp, Artificial Sequence
  ENSG00000140525_44 (sequence is synthesized)
gtacataaattcactttgttttgctctacgcttcattgtttatacatatgccttctctgtatgcaactagctggatttttctgacccagaagcatattcctgtgaaatagtactgtttgt

SEQ ID NO: 361027 - DNA, 120 bp, Artificial Sequence
  ENSG00000140525_45 (sequence is synthesized)
cctttcaaaatataaaataattcccaactagtacattagtactttgtgaacatgctgtgggtatgttatgctgttctgggttgtcttatctcggtcaccacttacctgtctgccataata

SEQ ID NO: 361028 - DNA, 120 bp, Artificial Sequence
  ENSG00000140525_46 (sequence is synthesized)
ccatcatctagcagttatccttgtgaattaacagtctgtatcctaagtcagaaggacattttgaagaaccatttatataaggaccattgcaactgtatccattatgttatatttctgaaa

SEQ ID NO: 361029 - DNA, 120 bp, Artificial Sequence
  ENSG00000140525_47 (sequence is synthesized)
tcagcctcacaagtagctgggactacagggttttggactgataaagcaatggaagccactgaagagctttaagatgaggatggcatggagggaagataagtcacataatcagttctgtga

SEQ ID NO: 361030 - DNA, 120 bp, Artificial Sequence
  ENSG00000140525_48 (sequence is synthesized)
aaaactgtttcacttaatttggagaaaggaagcatatatgtttgcatttggagcaaggaaggaacaagcatgctcaggctcaaggacttggtttattcctgggtgactgaaagtccatgc

SEQ ID NO: 361031 - DNA, 120 bp, Artificial Sequence
  ENSG00000140525_49 (sequence is synthesized)
catgaggcatcctctgggaatgtgagcagagtagcagcaagcacatgaagaagggttgtgatgagacggcagtgcagtgagggcactttcagggaagtggaaggacgtggctttaataag

SEQ ID NO: 361032 - DNA, 120 bp, Artificial Sequence
  ENSG00000140525_50 (sequence is synthesized)
ggcaagtaacctctggggtttaatgaaatggggtatcttaaggtgccttatatagagattcttcatgcccgctgagacgtatttgttttcttgtcttgaacaagggctagtttaaattgt

SEQ ID NO: 361033 - DNA, 120 bp, Artificial Sequence
  ENSG00000140525_51 (sequence is synthesized)
tgcagattgtgatttatagtggttttataaattctggtaggataaaattttacaaggcaaaaattaaaagtgtctttggactcttaattaggtatgttaacttggtttatttttcttccc

SEQ ID NO: 361034 - DNA, 120 bp, Artificial Sequence
  ENSG00000140525_52 (sequence is synthesized)
tctcctagtaccacctgttcacagtgatcatgagaattcctagccccgcagagcaatttcatcaaataaggcattttgctaagtgctttatgtgcttttttcatttagtcttcagagcaa

SEQ ID NO: 361035 - DNA, 120 bp, Artificial Sequence
  ENSG00000140525_53 (sequence is synthesized)
ccctatgaagtaagaattattgcaattcccattttacagataagaaaagttaggcttagagaagatgagtgactttccaaaagtaaaacagtagttggtggtggagcaaggattcaaagt

SEQ ID NO: 361036 - DNA, 120 bp, Artificial Sequence
  ENSG00000140525_54 (sequence is synthesized)
caggtctaacatcagagcttgtgatgtcaagtactttgctctactacattagaataatcttcagggtaatgttctagtgtcaaatactctgaaacctgagctggcagcagttccaaaggg

SEQ ID NO: 361037 - DNA, 120 bp, Artificial Sequence
  ENSG00000140525_55 (sequence is synthesized)
gaaagtaccttagtcaagaagattatacttaagaatctcattttagtgaacatctgaattatgatctagaggctagtagatcaaattaattgttgaggggaatgagttttatttgtagct

SEQ ID NO: 361038 - DNA, 120 bp, Artificial Sequence
  ENSG00000140525_56 (sequence is synthesized)
tagccagtccctcctaacatctcttcctttatttcttagtatataagctagagatgatcttgccatctcctaaaaatataagacagtaatatgtgaaaagcatttggtactttgaggata

SEQ ID NO: 361039 - DNA, 120 bp, Artificial Sequence
  ENSG00000140525_57 (sequence is synthesized)
agatgcccaattaatatcacattggccatattataatatattcatgggtgtccagaggaacaactaagccatatgctattatctttgttctagaattaaaagtttttgttactcctcacc

SEQ ID NO: 361040 - DNA, 120 bp, Artificial Sequence
  ENSG00000140525_58 (sequence is synthesized)
caaaggcatagcgaatagactgagatattacgttgtaacatctttaacatgaattaatcattgcgcctcagtgagaagacaagtgtgacattttctggatggacagtttacatggcatca

SEQ ID NO: 361041 - DNA, 120 bp, Artificial Sequence
  ENSG00000140525_59 (sequence is synthesized)
aatattacattatcctatgatgaaagagagcatatgaagggaagcactccttcaaacatggcaaaatcagcaatttcttacatttgagtaaccagccaattttacagtctctcagcagtc

SEQ ID NO: 361042 - DNA, 120 bp, Artificial Sequence
  ENSG00000140525_60 (sequence is synthesized)
ttcttattcctcacatagacttgagagcaggatagaaggaagtagagtatcatgagttaagtattgaaaaaagtcagttgaatttctgtactataaattgctttgaacagctgatacctt

SEQ ID NO: 361043 - DNA, 120 bp, Artificial Sequence
  ENSG00000140525_61 (sequence is synthesized)
gggtaacggaagtgtggcggcgttgggttgagcgggctttttggaagtttgtggcggaggtgaggccgaggtgactgcagagcggctcgcgagttctgtgatatgagcaacaatggacca

SEQ ID NO: 361044 - DNA, 120 bp, Artificial Sequence
  ENSG00000140526_0 (sequence is synthesized)
gcactggccaggggttccggctgtatatccatgagcgccgctggcagccggggagctgcaggaaccagactgggggcgagctgagcacctgtagtcaatcacacgcagcttttaggtttg

SEQ ID NO: 361045 - DNA, 120 bp, Artificial Sequence
  ENSG00000140526_1 (sequence is synthesized)
tttgaataagagatctgacctgaccggcccaactgtacaactcttcaaggaaaattcgtatttgcagtgggaagaataagtaacattgatcaagatgaatgccatgctggagactcccga

SEQ ID NO: 361046 - DNA, 120 bp, Artificial Sequence
  ENSG00000140526_2 (sequence is synthesized)
actcccagccgtgtttgatggagtgaagctggctgcagtggctgctgtgctgtacgtgatcgtccggtgtttgaacctgaagagccccacagccccacctgacctctacttccaggactc

SEQ ID NO: 361047 - DNA, 120 bp, Artificial Sequence
  ENSG00000140526_3 (sequence is synthesized)
ggggctctcacgctttctgctcaagtcctgtcctcttctgaccaaagaatacattccaccgttgatctgggggaaaagtggacacatccagacagccttgtatgggaagatgggaagggt

SEQ ID NO: 361048 - DNA, 120 bp, Artificial Sequence
  ENSG00000140526_4 (sequence is synthesized)
gaggtcgccacatccttatgggcaccggaagttcatcactatgtctgatggagccacttctacattcgacctcttcgagcccttggctgagcactgtgttggagatgatatcaccatggt

SEQ ID NO: 361049 - DNA, 120 bp, Artificial Sequence
  ENSG00000140526_5 (sequence is synthesized)
catctgccctggaattgccaatcacagcgagaagcaatacatccgcactttcgttgactacgcccagaaaaatggctatcggtgcgccgtgctgaaccacctgggtgccctgcccaacat

SEQ ID NO: 361050 - DNA, 120 bp, Artificial Sequence
  ENSG00000140526_6 (sequence is synthesized)
tgaattgacctcgccacgcatgttcacctatggctgcacgtgggaatttggagccatggtgaactacatcaagaagacatatcccctgacccagctggtcgtcgtgggcttcagcctggg

SEQ ID NO: 361051 - DNA, 120 bp, Artificial Sequence
  ENSG00000140526_7 (sequence is synthesized)
tggtaacattgtgtgcaaatacttgggggagactcaggcaaaccaagagaaggtcctgtgctgcgtcagcgtgtgccaggggtacagtgcactgagggcccaggaaaccttcatgcaatg

SEQ ID NO: 361052 - DNA, 120 bp, Artificial Sequence
  ENSG00000140526_8 (sequence is synthesized)
ggatcagtgccggcggttctacaacttcctcatggctgacaacatgaagaagatcatcctctcgcacaggcaagctctttttggagaccatgttaagaaaccccagagcctggaagacac

SEQ ID NO: 361053 - DNA, 120 bp, Artificial Sequence
  ENSG00000140526_9 (sequence is synthesized)
ggacttgagccggctctacacagcaacatccctgatgcagattgatgacaatgtgatgaggaagtttcacggctataactccctgaaggaatactatgaggaagaaagttgcatgcggta

SEQ ID NO: 361054 - DNA, 120 bp, Artificial Sequence
  ENSG00000140526_10 (sequence is synthesized)
cctgcacaggatttatgttcctctcatgctggttaatgcagctgacgatccgttggtgcatgaaagtcttctaaccattccaaaatctctttcagagaaacgagagaacgtcatgtttgt

SEQ ID NO: 361055 - DNA, 120 bp, Artificial Sequence
  ENSG00000140526_11 (sequence is synthesized)
gctgcctctgcatgggggccacttgggcttctttgagggctctgtgctgttccccgagcccctgacatggatggataagctggtggtggagtacgccaacgccatttgccaatgggagcg

SEQ ID NO: 361056 - DNA, 120 bp, Artificial Sequence
  ENSG00000140526_12 (sequence is synthesized)
taacaagttgcagtgctctgacacggagcaggtggaggccgacctggagtgaggcctccggactctggcacgctccagcagccctcctctggaagctgcgtcccctcaccccctgtttca

SEQ ID NO: 361057 - DNA, 120 bp, Artificial Sequence
  ENSG00000140526_13 (sequence is synthesized)
ggtctcccatctccctcagtgacctggatctgacctcacaccatcagcagggggcacccaccatgcacacctgtctcggagtaggcagctcttcctgggagctccaggctatttttgtgc

SEQ ID NO: 361058 - DNA, 120 bp, Artificial Sequence
  ENSG00000140526_14 (sequence is synthesized)
ttagttactggttttctccattgcattgttaggcatggtgacaagtgacagagttcttgccctctgtccagtttcagcatctggttgcttttaagccaagtacatctagtttccctatta

SEQ ID NO: 361059 - DNA, 120 bp, Artificial Sequence
  ENSG00000140526_15 (sequence is synthesized)
aaaatgtgtctgaatagcgattttgctttgccaccaaaaggcttttccctgagaacagtgaaggatgtatgtcattttgtggtggttgtatgtgtccttacatagaccttaaaaagagct

SEQ ID NO: 361060 - DNA, 120 bp, Artificial Sequence
  ENSG00000140526_16 (sequence is synthesized)
cacccttccaggccaatgctgaagacacagctccgcttgggagcctgagaacccaggcttcccaggccagagtgtggcttcttaaacggcaaaggaaattcctttgagtcacaagccaag

SEQ ID NO: 361061 - DNA, 120 bp, Artificial Sequence
  ENSG00000140526_17 (sequence is synthesized)
ttttcgccctgtctcctgagaccatttccctacgctttgctgctgctgagagttacgtgaggcacttgttaaaaattcagcctcccaggtccctcccctcggagaggctgattcactggg

SEQ ID NO: 361062 - DNA, 120 bp, Artificial Sequence
  ENSG00000140526_18 (sequence is synthesized)
tctgggaaggagcctggggattttaatttttcacaagtgccccagatgattctcatcaccaagcaaattttggaaatgctgttcaacagcgcccttaaattggaaacatctttgcagctc

SEQ ID NO: 361063 - DNA, 120 bp, Artificial Sequence
  ENSG00000140526_19 (sequence is synthesized)
gttttattgaaattcataatcaggggtgtcctctagctcccacggtctccagagcagcaaggccggctatggagctgccgtcgtgtgaccacagtgtgatgtctcagaagggctctgggt

SEQ ID NO: 361064 - DNA, 120 bp, Artificial Sequence
  ENSG00000140526_20 (sequence is synthesized)
gggctgagcatctgggctgtgccctggctctgcttttcaccctggacaaagtcgctgtggacttcaatttcttcacctctaaaatgggggacttggaccaggtagattgctgagctcact

SEQ ID NO: 361065 - DNA, 120 bp, Artificial Sequence
  ENSG00000140526_21 (sequence is synthesized)
accaggttcaaagttcaatgacaaactcagtttactgaggtttgagagaacatccctccaggggagcctgggagctgctctcccagtctaagcatgtagatatcatcgtttgccttttgt

SEQ ID NO: 361066 - DNA, 120 bp, Artificial Sequence
  ENSG00000140526_22 (sequence is synthesized)
gtgtgtgtgtcccttatttgataaaaagatgttttgagttgttttttttttaagcactcacttgtaattttagtttttaaacccaagtccctctaactttgcctttgataccaaacaatt

SEQ ID NO: 361067 - DNA, 120 bp, Artificial Sequence
  ENSG00000140526_23 (sequence is synthesized)
caaaagttggatctgagtttggagaaagatatttccaacctaagtgggtattattttgaaaccagatttttaatttaatagcctatatttgtagtctgttggataggtgtttccaaagtg

SEQ ID NO: 361068 - DNA, 120 bp, Artificial Sequence
  ENSG00000140526_24 (sequence is synthesized)
tgtcttctcaagtgaaaacgcaactctaggtttcaagtactccttttctccgatcctgtggtacttgaatatccaaaaaccctgcactttgaacaatcagctgttgctatctggaactaa

SEQ ID NO: 361069 - DNA, 120 bp, Artificial Sequence
  ENSG00000140526_25 (sequence is synthesized)
acagaactatgagtaaaattgcctggatactttaaaaagatatttttcctccttcatctcctttgactccaggacagactggaatataagtagtgggtctgcatggatgtttcagggatc

SEQ ID NO: 361070 - DNA, 120 bp, Artificial Sequence
  ENSG00000140526_26 (sequence is synthesized)
aaaggagccacctgggcgcctgagtgccaaccctcagggccacaggtgggtgtggtttgggcacgggtccaagtgactgtgacgggacccgtgggcatgggtccaggtctgtaacctgaa

SEQ ID NO: 361071 - DNA, 120 bp, Artificial Sequence
  ENSG00000140526_27 (sequence is synthesized)
gaagttgttttctgacaatcaccaaatcatccgaatgacatcaaaagcagcccttatctcagagactgagatttctgtggtctcaacttcgctttggtataatttctggcactcaccagc

SEQ ID NO: 361072 - DNA, 120 bp, Artificial Sequence
  ENSG00000140526_28 (sequence is synthesized)
ctctatcattatgactttccccccagtgtattatttctctaataggtttccttttcacgttcttttagcacagactggcactttaccctctcagtttggaagttagcccctctcctctgt

SEQ ID NO: 361073 - DNA, 120 bp, Artificial Sequence
  ENSG00000140526_29 (sequence is synthesized)
tacttttcccttcacccaactacagctgtgatctagaacattcatagtcatatttctgctactactaccttcatttatcaagactttttatgagaataggtaaaccaagcaataacttcc

SEQ ID NO: 361074 - DNA, 120 bp, Artificial Sequence
  ENSG00000140526_30 (sequence is synthesized)
taggactgaatcaccaccccagaagagcgagaggctcctttcatatgcctgaggccacaccccttaacctgttctgacaaaatagtggctggcccatgtaccagctccattcagaaattc

SEQ ID NO: 361075 - DNA, 120 bp, Artificial Sequence
  ENSG00000140526_31 (sequence is synthesized)
aggaagagaaaagacagccctgttgtcacacaaaccggtgtgggggagggtggagcctggtctgcacggcagtcctggtggcccctgtggaggacaggcagggctggcagcatagccttt

SEQ ID NO: 361076 - DNA, 120 bp, Artificial Sequence
  ENSG00000140526_32 (sequence is synthesized)
gttgccacacaaccggaatttgctcccccaggactgtgggagccagtgtcccagctgaaatctttttagtgtgtggctctgaatggcactcacattccattttggctcacatgaaactaa

SEQ ID NO: 361077 - DNA, 120 bp, Artificial Sequence
  ENSG00000140526_33 (sequence is synthesized)
ctgaagccctttgttcaagcttcaggctcttaggcatggaaatgagaatgtgactgtggctgtcttacaggaaaattcttgtttgtccctgaatgagagcacagaggcattgaattcaca

SEQ ID NO: 361078 - DNA, 120 bp, Artificial Sequence
  ENSG00000140526_34 (sequence is synthesized)
gagctgcaaacttgcctgataaatgagggagtggcagtttatagataggtcatcttttttccttcctccaggtgtccttgcctttcttcccaaagtcattcatttctgatgagtatatga

SEQ ID NO: 361079 - DNA, 120 bp, Artificial Sequence
  ENSG00000140526_35 (sequence is synthesized)
tatttgggctaaaacaaggctgaatttttaaagagtatttgaatatattttagaatcaaattgaggctataaattgcatcaatctggacaattccattgcaggaataatatgttaaaaac

SEQ ID NO: 361080 - DNA, 120 bp, Artificial Sequence
  ENSG00000140526_36 (sequence is synthesized)
caatggggagaagcacccacatctctcctgtagcactccgtgtctcataagcaatttgaagacacttacaagtaactgattccagtcaaattaggattaactgactcaaaaaatggtgtc

SEQ ID NO: 361081 - DNA, 120 bp, Artificial Sequence
  ENSG00000140526_37 (sequence is synthesized)
aagtttctttaatgtttttatgttagaagtgagtttaacagacttgaagaaaactgttatcttttcctgctgtgagtttacacaaatgattccagagcagaatgaaagcagaaagctgtt

SEQ ID NO: 361082 - DNA, 120 bp, Artificial Sequence
  ENSG00000140526_38 (sequence is synthesized)
ggttacaatattcttttaacctctctgcagcattttacacttactgggaaccttatgattcaccgtaagagtggaaatatacctgagttcgtgtcctaatggtctctaattcacattgga

SEQ ID NO: 361083 - DNA, 120 bp, Artificial Sequence
  ENSG00000140526_39 (sequence is synthesized)
tcgtgggcaaatcacctcacctctctgagcctgttccctcctcttagaccatctctaagaccacttcatctatttacacatcatttgcttgaacattgctgaacatctgcgtgaacttgg

SEQ ID NO: 361084 - DNA, 120 bp, Artificial Sequence
  ENSG00000140526_40 (sequence is synthesized)
cctctccagcccttgcaggtggaaacagctgtgtcaaggctcaaggctcacgctgaggggacttggagggagggggcttctgcattaagctttcctggtgaagacccttgatcttgtcca

SEQ ID NO: 361085 - DNA, 120 bp, Artificial Sequence
  ENSG00000140526_41 (sequence is synthesized)
aagccctgtgtctttgactggcttctcttcagagtccccgttgtcatcgtaagacccttgctgtttggagggtggtcttgtgactgtggcagctgctggccgctggaatgaggagcctat

SEQ ID NO: 361086 - DNA, 120 bp, Artificial Sequence
  ENSG00000140526_42 (sequence is synthesized)
ctccatcctccagtgtgactcaggcagagcattgagaattcccagggcagaaatccttcctgctcaggctttcattctaaaactacagtcttcattaaagctgaactttctgggtagctg

SEQ ID NO: 361087 - DNA, 120 bp, Artificial Sequence
  ENSG00000140526_43 (sequence is synthesized)
agcttatatgcccggcatctgaatgagagctctctttgtaactgtgtgacttgagatctagtttgccagctcctgggaaacaatacatgtgttcttgtttgtgtttgctcagcaagcaga

SEQ ID NO: 361088 - DNA, 120 bp, Artificial Sequence
  ENSG00000140526_44 (sequence is synthesized)
tgtctgagatgtaagaagcttttcttttcctgtggcattgattctgacttagagctgaagtaaaagatcactgaaacatcacgtcaagttgaagtcactcataggtctttgtcctttagg

SEQ ID NO: 361089 - DNA, 120 bp, Artificial Sequence
  ENSG00000140526_45 (sequence is synthesized)
caggacaggagagtcattaagaagcatttcactgtagcattctatcacaatatcatctggaattgttttctttgcccagaaagccttaacttgcctctagagaatccctggtattacaac

SEQ ID NO: 361090 - DNA, 120 bp, Artificial Sequence
  ENSG00000140526_46 (sequence is synthesized)
gatattgcggcattagaattccaactcttctgctgtggaagtttgaagcgaagctgcagcaaaaccagagaatttcctcaagtggcctgtaggctccttgttatcttatgcccccacccc

SEQ ID NO: 361091 - DNA, 120 bp, Artificial Sequence
  ENSG00000140526_47 (sequence is synthesized)
tccctcaacaatatgagtgatccagaactggcccaaacacctcagctctggtccctttttgcccttcttggccttactctgttgttcaaagccactttggattgcttggatgcttcgaac

SEQ ID NO: 361092 - DNA, 120 bp, Artificial Sequence
  ENSG00000140526_48 (sequence is synthesized)
agccatgaaaagtagcctgcctgtggcatttagaggccaagcaattgacagaaagggtttcttctacctctgttatctaagcagagggaagtaaacctctcaccgccccccacccctcac

SEQ ID NO: 361093 - DNA, 120 bp, Artificial Sequence
  ENSG00000140526_49 (sequence is synthesized)
tgcccccgattaccctagaattgctttcgccaaattgtagttgaagctaaggaaggggaatctggcccctgctgggagagggaactggaatgccacacaaggcaaggcctgcttccttcc

SEQ ID NO: 361094 - DNA, 120 bp, Artificial Sequence
  ENSG00000140526_50 (sequence is synthesized)
ttcccctctgctgctgctgcctcggaacgctgcagcccaggcttcctcccacagtggcccttggaagcaggccgcagagtagacagctgctccttttggaagagtcagtcccctgtgttt

SEQ ID NO: 361095 - DNA, 120 bp, Artificial Sequence
  ENSG00000140526_51 (sequence is synthesized)
tctgaactgtttttcctagcatgtatgtgggtagagctttcatgcatctctagtaataataagctgaaattagttttttttttaattctccaatttaaaacttttaattaaaaagtaaat

SEQ ID NO: 361096 - DNA, 79 bp, Artificial Sequence
  ENSG00000140526_52 (sequence is synthesized)
agatcacacacaaggctgtcacttcatacttgcaggattgcacagcggcagcagagacgcacctcacttcctagacagt

SEQ ID NO: 361097 - DNA, 120 bp, Artificial Sequence
  ENSG00000140526_53 (sequence is synthesized)
gcgggcagcagagacgcacctcacttcctagacagtgcggcagccaggcacaggcacacctcacttcccagacagttgggcggccaggcaagcgctcctcacttcccagatggggcggct

SEQ ID NO: 361098 - DNA, 120 bp, Artificial Sequence
  ENSG00000140526_54 (sequence is synthesized)
cccgggaagcggggctcctcacttcccagacagggtggccaggcagaggtgctcctcacttcccagaacaattctttatgaatttgataaaggactgaagtgcaactgaaagctgctagt

SEQ ID NO: 361099 - DNA, 120 bp, Artificial Sequence
  ENSG00000140526_55 (sequence is synthesized)
gatgatctggtaatatacaatttgtccagtagccagtttgtttttattgtgttttctaaccataagagatcattaaaggcaaagcctgtatgacgctgtacacacacaaaaaaatggtca

SEQ ID NO: 361100 - DNA, 120 bp, Artificial Sequence
  ENSG00000140526_56 (sequence is synthesized)
ccgcaggccatactaccaatgaaatggtaggtaaacaaatcttctggtcaagagaaaaaaaaaagaaatagcactctgcatgctttgctctacaagacgaatttccctagaaagaatcca

SEQ ID NO: 361101 - DNA, 120 bp, Artificial Sequence
  ENSG00000140526_57 (sequence is synthesized)
tgggcaacaagagtgagactccgtctccaaaaaaagaaaaggaatccagtgaaaatggctgcaattacaacaagaagtgaaggaagaagactggtgacatctctgaaggatgcagttgag

SEQ ID NO: 361102 - DNA, 120 bp, Artificial Sequence
  ENSG00000140526_58 (sequence is synthesized)
ctctgaaggatgcagttgaggttgatccaggtttatccgaatatgctacctttctgagccttaaaccttcatctctcaggtgttgatttgcttctgatagcttcatcatttctccctgaa

SEQ ID NO: 361103 - DNA, 120 bp, Artificial Sequence
  ENSG00000140526_59 (sequence is synthesized)
gtcttttacactcttctgttagtttccttgtttcagtatcatgaagtgaagcactgtgtggttgtggcgtgggcccgtcttgcttagatgcattcagtgggacagctttgctgggttcca

SEQ ID NO: 361104 - DNA, 120 bp, Artificial Sequence
  ENSG00000140526_60 (sequence is synthesized)
tgtcattcaatttatcattttcattggggatctccatttggaatccattaattcatgaggttttgcctcattccacacagcttccatatctgaagtgtttagtggagcaaaaattgtacc

SEQ ID NO: 361105 - DNA, 120 bp, Artificial Sequence
  ENSG00000140526_61 (sequence is synthesized)
ataaacttgtgtttactcttttcattcggatcatagtcaaagggctgtagcattactgaaacagtcacagttgaccctgggtcaataattccactgttgggcctcacacagtaccggtga

SEQ ID NO: 361106 - DNA, 120 bp, Artificial Sequence
  ENSG00000140526_62 (sequence is synthesized)
ggcacggtagtcttcactttgaaacacacttttctatccgatggatttcgcaatttaagatttgtagtgactacatctgtgaaggggcctttgaatttgaggtctatgggcgggtcgagg

SEQ ID NO: 361107 - DNA, 120 bp, Artificial Sequence
  ENSG00000140526_63 (sequence is synthesized)
accaggatctgctcgtgcttcgccgtggccccggaggcagacgccattggagagacagcgcagagcagggggcggcttgctcgctgggggcgggggacgatggcgagaggggagggggag

SEQ ID NO: 361108 - DNA, 120 bp, Artificial Sequence
  ENSG00000140526_64 (sequence is synthesized)
cgagttcgcatctctccttttcctggttagactctgttcaaccacattcttatgttggcagatctgcttccagattgatttttagagcaccatcactttcacattcctgattctgatttt

SEQ ID NO: 361109 - DNA, 120 bp, Artificial Sequence
  ENSG00000140526_65 (sequence is synthesized)
gttttgttttgtttgggttttctgaaacttaaaatgctgccccgaaaatactatatttttgagtttgtgttctgaaagcctccgtgctgctggatctttggggggaaatacaggatcctt

SEQ ID NO: 361110 - DNA, 120 bp, Artificial Sequence
  ENSG00000140526_66 (sequence is synthesized)
cagcactgaggtgtttaagatttgcaactagcaatgcaattttttctaaatatggggatatttacctttattaagaaattatactaaacattgatgtccttgatcattttatgttctcat

SEQ ID NO: 361111 - DNA, 120 bp, Artificial Sequence
  ENSG00000140526_67 (sequence is synthesized)
attacttttgattctactatgattgtgtggtggtgaacaaagatcattacaaacaaaaactgtaattttgttatatttgattcaatggaatttacctaaaaaataaagactaaaaatgtg

SEQ ID NO: 361112 - DNA, 120 bp, Artificial Sequence
  ENSG00000140526_68 (sequence is synthesized)
gggcggggccggtagcggcgggagctgcactggccaggggttccggctgtatatccatgagcgccgctggcagccggggagctgcaggaaccagactgggggcgagctgagcacctgtag

SEQ ID NO: 361113 - DNA, 120 bp, Artificial Sequence
  ENSG00000140526_69 (sequence is synthesized)
tcaatcacacgcagaaataataatgatacttatgttagaagattgttttgagaagtgcatggagttactacatctgaagcatttagaacagtacctggcacaggaggttagagtgatgtc

SEQ ID NO: 361114 - DNA, 120 bp, Artificial Sequence
  ENSG00000140526_70 (sequence is synthesized)
tttcgtccctgtggggagtgaggtggaatgtcaggagggcgtagtttgcaaaacatccctcccagtggtactgatgccttttcgcaggttctgtcctcttcatttgcaagccactgcttt

SEQ ID NO: 361115 - DNA, 120 bp, Artificial Sequence
  ENSG00000140526_71 (sequence is synthesized)
atccacgagggtgctccctacttatgccagtgaattaatttttggcacagatgaatccttcatatttatctggatttagctggtagcatttgtctcctaagacttggtcacagaggaatc

SEQ ID NO: 361116 - DNA, 120 bp, Artificial Sequence
  ENSG00000140526_72 (sequence is synthesized)
catgtgaccttcaggccttctgctctaaactggcaggagatcctgtttctactcacagcgtccgagggtctggtggccgagccctgaggggcgctgttgctcccaggtggcagaattcag

SEQ ID NO: 361117 - DNA, 120 bp, Artificial Sequence
  ENSG00000140526_73 (sequence is synthesized)
gctgcaggaaccagactgggggcgagctgagcacctgtagtcaatcacacgcaggaaaaaccagctctcacacctgctcctctgtaaagcgtcttccccaagcccacacgtaattttgtt

SEQ ID NO: 361118 - DNA, 120 bp, Artificial Sequence
  ENSG00000140526_74 (sequence is synthesized)
gctgtccttgaaagtatttcccaagatctccaaaccgctttaaacttccaaggtctgagcctgacctggcctcgctaacaaagggttccactgatgccgactctaagaagaaagttttca

SEQ ID NO: 361119 - DNA, 120 bp, Artificial Sequence
  ENSG00000140526_75 (sequence is synthesized)
aggttcttcgtatttgaactttctatggctaggcttatgtttaaaataaccacactgatttaaacatggtcttatagtcttcagtggctcccaggtcttgcctctcgggttttttttcct

SEQ ID NO: 361120 - DNA, 120 bp, Artificial Sequence
  ENSG00000140526_76 (sequence is synthesized)
ctggaaattgaatggaatctttagtctattagtctaatctagagtccttaccttctggcctttgctcattgcagagcccccacattattagtcagttgtaccacagatactgtgttacat

SEQ ID NO: 361121 - DNA, 120 bp, Artificial Sequence
  ENSG00000140526_77 (sequence is synthesized)
ccacagatactgtgttacataaggtgaggagagggaggtggtgttatcagttccactttttccaggctagagtgcagtggcccgatctcggtgcactgcaacctctgcttcccgggttca

SEQ ID NO: 361122 - DNA, 120 bp, Artificial Sequence
  ENSG00000140526_78 (sequence is synthesized)
ctctcattttatcttggataaaagagaagctttgaaagattgcctccctatgtgtacagtcactgtaggcatgtatttgtgtactgtttacttagtcatgtcaatgagggcaataaaaaa

SEQ ID NO: 361123 - DNA, 120 bp, Artificial Sequence
  ENSG00000140526_79 (sequence is synthesized)
ctgctgccctctcaacagctcagcaagttgccacagtaaattctgtcaccttcaccatgctgtcatctcctggagaccaccctctttagggaaagacatctcatagcagtcagtgttctt

SEQ ID NO: 361124 - DNA, 120 bp, Artificial Sequence
  ENSG00000140526_80 (sequence is synthesized)
ttccacagaaccctctgtgggaggacacgtggtcctagaccaacaccgatttgctaaaaggtttgtttgaataagagatctgacctgaccggcccaactgtacaactcttcaaggaaaat

SEQ ID NO: 361125 - DNA, 120 bp, Artificial Sequence
  ENSG00000140527_0 (sequence is synthesized)
aagccggaagttgtggttaccaaggcgacgcaacgccgcccggccagcttttcagtttcatagaggttcccagtgccaccttctgtgatgtcattcccaagaggaagtcagacccagaaa

SEQ ID NO: 361126 - DNA, 120 bp, Artificial Sequence
  ENSG00000140527_1 (sequence is synthesized)
ataaagcaccccattggtacacgaaagggaccattggaggtgccacccccaacagagaaggactggcctaaagacgatgaacaggatcatgtcctcgtggatccagatgaggagctggat

SEQ ID NO: 361127 - DNA, 120 bp, Artificial Sequence
  ENSG00000140527_2 (sequence is synthesized)
tccttgcctcagccttatcgaatgatcaacaagctggtgaaccttctgtttgaccagtcttgggaaattattgaagagagaaacgcactgagggaagctgagagcagccagatccagccc

SEQ ID NO: 361128 - DNA, 120 bp, Artificial Sequence
  ENSG00000140527_3 (sequence is synthesized)
accgtctaccctccacttggagaaatccagctcaacaaaatgccaaattgtatggctgtttcccaagactatgtgtttattggaggagccaaaggattctcaatttataatctgtacagt

SEQ ID NO: 361129 - DNA, 120 bp, Artificial Sequence
  ENSG00000140527_4 (sequence is synthesized)
gctaaacaaatatatgcgtgggagaagcttaaggttgatgtcacttccatctgggccacagatttagggaatgaaatactcattgctcctgtggatgaaatgggtatcattagactcttt

SEQ ID NO: 361130 - DNA, 120 bp, Artificial Sequence
  ENSG00000140527_5 (sequence is synthesized)
tatttttataaggaaggactttacctagtcaaagccatcaatgaagtggatgataccagcaagcaaactacctgtataaagatggagatctctcaaggaggggactttgcagccttcctc

SEQ ID NO: 361131 - DNA, 120 bp, Artificial Sequence
  ENSG00000140527_6 (sequence is synthesized)
ctacaaggagccggagatatttggctggatgtgtataaattgcccaaggagacttggctcaagaaactagagcacccccaactcacttcaaatccaaagaaaaaagtcagacagccgcaa

SEQ ID NO: 361132 - DNA, 120 bp, Artificial Sequence
  ENSG00000140527_7 (sequence is synthesized)
ctgaactcccttggtcccatttctgcagatcctttagaaatggatgcaaatgttagttttaaaggagacattaaattgagtcttccagtttacataatgaagatcaaaccacctaagcct

SEQ ID NO: 361133 - DNA, 120 bp, Artificial Sequence
  ENSG00000140527_8 (sequence is synthesized)
gttacaggcaccacattcaaaagccccctggaagtctttgcaaagatcaaggactgctacggactgggctccgggcagaatcatttcatcaaggacagtcagtgggagcagcaagctgag

SEQ ID NO: 361134 - DNA, 120 bp, Artificial Sequence
  ENSG00000140527_9 (sequence is synthesized)
tcaagggcccctcaggaatggcctgtgtccttggtatacactggaccagaagtcacaatttcttcctgtattcactaaaccgaactctaaaggataaagctgaccccgagggtgtgtggc

SEQ ID NO: 361135 - DNA, 120 bp, Artificial Sequence
  ENSG00000140527_10 (sequence is synthesized)
cctgtgctgcgcccattgcagtctctcagctcagctgctcctcctcctacctggtgctggcctgcgaggatggtgtgctcacgctgtgggacctggccaaaggattccctcttggggtcg

SEQ ID NO: 361136 - DNA, 120 bp, Artificial Sequence
  ENSG00000140527_11 (sequence is synthesized)
ctgctcttcctcagggatgtttctgccaaagcattcacttcctaaaatatttctcggtccacaaaggacagaatatgtatcctgaaggtcaagtgaaatcccaaatgaaatgtgtggtgc

SEQ ID NO: 361137 - DNA, 120 bp, Artificial Sequence
  ENSG00000140527_12 (sequence is synthesized)
tgtgcacagacgcctccctccatctggtggaggctagcgggacccaaggacccaccatcagtgtgcttgttgagaggcctgtaaagcacctggataaaaccatctgtgccgtggccccag

SEQ ID NO: 361138 - DNA, 120 bp, Artificial Sequence
  ENSG00000140527_13 (sequence is synthesized)
tcccagccttacctggcatggtgctcatcttttccaagaatggctctgtgtgccttatggatgtggccaagcgtgaaatcatctgtgcctttgcccctccgggagcctttcctctggagg

SEQ ID NO: 361139 - DNA, 120 bp, Artificial Sequence
  ENSG00000140527_14 (sequence is synthesized)
tcccctggaagccagtgtttgctgtgtctccagaccatccatgtttcctgctccgaggagactattcacatgaaactgcgtccaccgacgatgctggaatccaatattctgttttctatt

SEQ ID NO: 361140 - DNA, 120 bp, Artificial Sequence
  ENSG00000140527_15 (sequence is synthesized)
ttaattttgaggcctgcccactcctggaaaatatctcaaaaaattgtaccattcctcaaagggacttggataacatggccttcccccaagcactgccactggagaagagatgtgagcgtt

SEQ ID NO: 361141 - DNA, 120 bp, Artificial Sequence
  ENSG00000140527_16 (sequence is synthesized)
tcctccagaagagctatcggaagctggagaagaacccagagaaggaggaggagcactgggcccggcttcagaggtactccttgtcgctccagagagagaacttcaagaagtgaggctgcc

SEQ ID NO: 361142 - DNA, 120 bp, Artificial Sequence
  ENSG00000140527_17 (sequence is synthesized)
accgccctgggatctctgaaaaggaggtttcagccacgaggcagctgctcccaggacactgaggccaagagaaatgtaacagagccacagctccacaggcctgcactcggagtctggggc

SEQ ID NO: 361143 - DNA, 120 bp, Artificial Sequence
  ENSG00000140527_18 (sequence is synthesized)
ctctgcagagccagcaaggggaaaagtataatctgggggaccttcaaccactaagcctcttgtcagagccctcaggcaggcagatgtgtcacccaaataaacagtgatattgtctccaga

SEQ ID NO: 361144 - DNA, 120 bp, Artificial Sequence
  ENSG00000140527_19 (sequence is synthesized)
tgttgtcaatttaatctccttttgaggtattggtggggccaggcatggagacttctccctggtcatgtaatagtaactatatgtacagaacaggtatggtgggtcagatactgttctacc

SEQ ID NO: 361145 - DNA, 120 bp, Artificial Sequence
  ENSG00000140527_20 (sequence is synthesized)
atttcacatgtgctagcccatttaatcctcatggcagccttaggggggaagtaaaattttttattcctgttcagaagaggcaactgacttatggaagctaaataacttatttgaggtaac

SEQ ID NO: 361146 - DNA, 120 bp, Artificial Sequence
  ENSG00000140527_21 (sequence is synthesized)
cttgctctttttccctcagcctgaggatgaaccaggcctccatgaggagtatggtatcgaaaactgtagacagtgtcctagataggtgagctgttactcttggttgccccccaaaagcta

SEQ ID NO: 361147 - DNA, 120 bp, Artificial Sequence
  ENSG00000140527_22 (sequence is synthesized)
ggctccctctagcctgtccttatgtttgggtgaaacagactgttacctctggatttgaggagctttcctactttgtggaggatgagaaggcaaatgtcagcattggctggaagtgagtga

SEQ ID NO: 361148 - DNA, 120 bp, Artificial Sequence
  ENSG00000140527_23 (sequence is synthesized)
ggtggctgtgtcatattgtggcaggcagagcggaaagtgcctgctcacttggagatcatctgtgaaggcatgcatctctctagacctcaggctctgctcaaccagcacaggcacactgaa

SEQ ID NO: 361149 - DNA, 120 bp, Artificial Sequence
  ENSG00000140527_24 (sequence is synthesized)
gaactttctgcaggagagtgacctgaccagactggcatttaagaagggcactctagcaggagtttgaaaaaggcaaaatgagaggcagaaaaactatgcagtcattaaggagagaaaatt

SEQ ID NO: 361150 - DNA, 80 bp, Artificial Sequence
  ENSG00000140527_25 (sequence is synthesized)
agaggcagaaaaactatgcagtcattaaggagagaaaattctgaacatctgaaccaagacaggggctgttaaaatgaaaa

SEQ ID NO: 361151 - DNA, 75 bp, Artificial Sequence
  ENSG00000140527_26 (sequence is synthesized)
gatcgcaccattgcactccagcaagtgtactatggttatgtaagatgttaacattaggggaagcaagacaaggga

SEQ ID NO: 361152 - DNA, 120 bp, Artificial Sequence
  ENSG00000140527_27 (sequence is synthesized)
ttatgtaagatgttaacattaggggaagcaagacaagggatacaaagaaactctgtactatttttgtaacttttttataagtctaaaattagttcaaaataaaaagcttaaaaaatgaaa

SEQ ID NO: 361153 - DNA, 120 bp, Artificial Sequence
  ENSG00000140527_28 (sequence is synthesized)
gtcaaatactaatatggccacccaagctttcttttgattcattttagcaagatatatctttttctgtacttttattcttaacatgtttgtgtcattatatttaatataacgagtttcttc

SEQ ID NO: 361154 - DNA, 120 bp, Artificial Sequence
  ENSG00000140527_29 (sequence is synthesized)
tttttccctatggtttcagatagtgtttcataaaatgagtttcttggccacatgtggtggctcacacctgtaatcccattactttgggaggcagaagcaggaggatcacaggagcccagg

SEQ ID NO: 361155 - DNA, 120 bp, Artificial Sequence
  ENSG00000140534_0 (sequence is synthesized)
agcctttcgaccagggtcccaaaggaaagcagtgagtggtgctgtttccctgaaggaagggactaagggacggtggcgcgggcccggaccggggccccggggcggcggcacggccgatat

SEQ ID NO: 361156 - DNA, 120 bp, Artificial Sequence
  ENSG00000140534_1 (sequence is synthesized)
ggcatgctgtcacaaagtaatgctgctgctggacaccgcgggcggcgccgcccgccacagccgggtccggcgggccgccctgcgcctcctcacctatctgagttgccgattcggcctggc

SEQ ID NO: 361157 - DNA, 120 bp, Artificial Sequence
  ENSG00000140534_2 (sequence is synthesized)
cagggtccactgggccttcaagttctttgactcgcagggggcgcggagccggccgtcccgcgtgtctgacttccgcgagctggggtcccgctcgtgggaggactttgaggaggagctgga

SEQ ID NO: 361158 - DNA, 120 bp, Artificial Sequence
  ENSG00000140534_3 (sequence is synthesized)
ggccaggctcgaggatcgcgcccacctgcccggcccggcgcccagggccacccacacgcacggcgccctgatggagacgctgctagactaccagtgggaccggcccgagatcacgtcgcc

SEQ ID NO: 361159 - DNA, 120 bp, Artificial Sequence
  ENSG00000140534_4 (sequence is synthesized)
cacgaagccgatcctgcggagcagcgggaggagactgctggacgtggagagcgaggccaaggaggccgaggccgcgctcgggggcttggtgaacgccgtcttcctcctggccccctgtcc

SEQ ID NO: 361160 - DNA, 120 bp, Artificial Sequence
  ENSG00000140534_5 (sequence is synthesized)
gcactcgcagagggagctgctgcagttcgtgtctgggtgcgaggcccaggcccagcgcctgccgcccacccctaagcaggtgatggagaagttgttgcccaagagagtccgggaagtcat

SEQ ID NO: 361161 - DNA, 120 bp, Artificial Sequence
  ENSG00000140534_6 (sequence is synthesized)
ggtcgcccgaaaaatcaccttctactgggtggataccaccgaatggtctaagttgtgggaatccccagaccaccttggatactggactgtttgtgaactgctccaccacggaggtggcac

SEQ ID NO: 361162 - DNA, 120 bp, Artificial Sequence
  ENSG00000140534_7 (sequence is synthesized)
tgtcttgccatctgaatctttcagctgggattttgctcaagctggggaaatgctgctcaggagtggaataaagctgtcaagtgaacctcatctttctccgtggatttcaatgctgccaac

SEQ ID NO: 361163 - DNA, 120 bp, Artificial Sequence
  ENSG00000140534_8 (sequence is synthesized)
tgatgccactttaaaccgtttgctctacaattctcctgagtatgaggcctcgtttccacgaatggaaggaatgttatttctccctgttgaagcaggcaaagagattcaagaaacatggac

SEQ ID NO: 361164 - DNA, 120 bp, Artificial Sequence
  ENSG00000140534_9 (sequence is synthesized)
agtcaccctagagcccttggccatgcatcagagacattttcagaaaccagtcagaatttttctaaaaggctcagtggcccagtggtctctcccaacgagcagcactttgggcactgacag

SEQ ID NO: 361165 - DNA, 120 bp, Artificial Sequence
  ENSG00000140534_10 (sequence is synthesized)
ctggatgctaggaagtccagaggagagcacagcaactcaaaggctgttatttcagcagttggtaagcaggctgactgctgaagagttacacctggttgctgatgtggaccctggtgaagg

SEQ ID NO: 361166 - DNA, 120 bp, Artificial Sequence
  ENSG00000140534_11 (sequence is synthesized)
ccggccccccatcactggagttatttccccactctctgccagtgctatgatcctcactgtgtgccgcaccaaggaggctgaatttcaacgacatgttctccaaacagctgtggctgacag

SEQ ID NO: 361167 - DNA, 120 bp, Artificial Sequence
  ENSG00000140534_12 (sequence is synthesized)
cccccgggacacagcttcccttttctcagatgttgtggatagtatattgaatcagactcatgattcgcttgcagatactgcttctgctgcttctcctgttccagagtgggcccagcagga

SEQ ID NO: 361168 - DNA, 120 bp, Artificial Sequence
  ENSG00000140534_13 (sequence is synthesized)
gcttggccacaccactccctggagtccagctgttgtggaaaagtggtttcctttctgtaacatcagtggtgccagttccgatttgatggagtcatttgggttactacaggctgcctcagc

SEQ ID NO: 361169 - DNA, 120 bp, Artificial Sequence
  ENSG00000140534_14 (sequence is synthesized)
taataaggaagagtcttccaaaactgaaggcgaattaatacattgccttgccgagctctaccagagaaaatctcgtgaagaatccactatagctcatcaagaagacagcaaaaagaaacg

SEQ ID NO: 361170 - DNA, 120 bp, Artificial Sequence
  ENSG00000140534_15 (sequence is synthesized)
aggggtccctcgtactccagtgagacagaagatgaataccatgtgccgttccttaaagatgttgaatgtcgcaaggctgaatgtgaaggcccagaagttacatccagatggcagtccgga

SEQ ID NO: 361171 - DNA, 120 bp, Artificial Sequence
  ENSG00000140534_16 (sequence is synthesized)
tgtggctggggagaaaggaatccaaaagatacctagtgggagaacagtggataaattggaagacagaggaagaacactaagaagttctaaacctaaagattttaaaactgaggaagagct

SEQ ID NO: 361172 - DNA, 120 bp, Artificial Sequence
  ENSG00000140534_17 (sequence is synthesized)
gctatcatatatacgtgaaaattaccaaaagactgtggccacaggagaaatcatgttgtatgcatgtgctcgaaacatgatctcaaccgttaaaatgttcctaaaatcaaaaggcaccaa

SEQ ID NO: 361173 - DNA, 120 bp, Artificial Sequence
  ENSG00000140534_18 (sequence is synthesized)
ggaattagaagtgaactgcctgaatcaagtaaaaagtagtctcttaaaaactagtaaaagtcttcgacagaatctaggaaaaaaactggataaggaagacaaagttagagagtgccagct

SEQ ID NO: 361174 - DNA, 120 bp, Artificial Sequence
  ENSG00000140534_19 (sequence is synthesized)
tcaggtatttcttcgtttggagatgtgtctgcaatgcccttcaataaatgaaagtacagatgatatggaacaagtagtggaggaggtgacagatttgctgcgcatggtgtgtttaactga

SEQ ID NO: 361175 - DNA, 120 bp, Artificial Sequence
  ENSG00000140534_20 (sequence is synthesized)
ggattcagcgtacctagcagagtttctggaggaaattttgagattgtatattgactctatcccaaagacacttggaaatctttacaacagcctagggtttgtgattcctcagaagctggc

SEQ ID NO: 361176 - DNA, 120 bp, Artificial Sequence
  ENSG00000140534_21 (sequence is synthesized)
tggtgtccttcctacagattttttcagtgatgactccatgacacaagagaacaaatcaccacttctttctgtgccttttttgtcaagtgctcgtagatcagtgtcaggcagccctgaatc

SEQ ID NO: 361177 - DNA, 120 bp, Artificial Sequence
  ENSG00000140534_22 (sequence is synthesized)
tgatgaactgcaggaacttcgtaccagatcagccaagaagagaaggaaaaatgcattaataagacataaaagcattgctgaggtttcacagaatcttcgacaaattgaaattcctaaagt

SEQ ID NO: 361178 - DNA, 120 bp, Artificial Sequence
  ENSG00000140534_23 (sequence is synthesized)
gtcaaagagagctacgaaaaaagagaactctcaccctgctcctcagcagccttcccagccagtgaaagatacagtgcaagaagtgaccaaagttcgaagaaatcttttcaaccaggaatt

SEQ ID NO: 361179 - DNA, 120 bp, Artificial Sequence
  ENSG00000140534_24 (sequence is synthesized)
gctttccccttcaaagagatcactaaagcgggggttgcctagaagccattctgtgtcagctgtggatggtctagaggataaacttgacaacttcaagaagaacaaaggttatcacaaact

SEQ ID NO: 361180 - DNA, 120 bp, Artificial Sequence
  ENSG00000140534_25 (sequence is synthesized)
gctgactaagagtgtggccgagactccagtgcataagcagatctccaaaaggctgctgcacagacaaatcaagggcaggtcctctgatcctggtcctgatattggtgttgttgaagagtc

SEQ ID NO: 361181 - DNA, 120 bp, Artificial Sequence
  ENSG00000140534_26 (sequence is synthesized)
ccctgaaaaaggagatgaaataagtctgagacgaagtcctcgaatcaagcagttgtcatttagcaggacacattctgcctccttctattctgtgtctcagccgaagtctcgaagtgtgca

SEQ ID NO: 361182 - DNA, 120 bp, Artificial Sequence
  ENSG00000140534_27 (sequence is synthesized)
aagagtccactctttccagcaagataagtcagaccaaagagaaaattctccagtccaaagtattcggtctcccaagagtcttctttttggggcaatgtctgagatgatcagcccctcaga

SEQ ID NO: 361183 - DNA, 120 bp, Artificial Sequence
  ENSG00000140534_28 (sequence is synthesized)
agactcccaagaagagtcaccagaaatctctgagcttttctaaaactacaccaagaaggatctctcatacaccacaaactccgttgtatactccagaaaggctgcagaagtcccctgcaa

SEQ ID NO: 361184 - DNA, 120 bp, Artificial Sequence
  ENSG00000140534_29 (sequence is synthesized)
aaatgacccctacaaagcaggcagcttttaaggagtccttaaaagactcctcctcacccggccatgactcaccattggattcaaaaatcactcctcaaaaacgacatacccaggcaggag

SEQ ID NO: 361185 - DNA, 120 bp, Artificial Sequence
  ENSG00000140534_30 (sequence is synthesized)
aaggtacctctcttgaaacgaagacaccaagaactcctaagaggcaaggtactcagccgcctgggtttttgccaaactgtacttggccacattcagtgaattccagtccagaaagcccct

SEQ ID NO: 361186 - DNA, 120 bp, Artificial Sequence
  ENSG00000140534_31 (sequence is synthesized)
cctgtccagcccctccaacttcatcgactgcccagcccaggagagagtgtctcactcccatcagagaccctctcagaacacctccgagagcagcagccttcatgggcacgcctcagaatc

SEQ ID NO: 361187 - DNA, 120 bp, Artificial Sequence
  ENSG00000140534_32 (sequence is synthesized)
aaacacaccaacagccccatgtcctcagagctgctcgggcagaggaaccagcccagaaactaaaggataaagctatcaaaactccaaaaagaccagggaattcaactgtgacttcttccc

SEQ ID NO: 361188 - DNA, 120 bp, Artificial Sequence
  ENSG00000140534_33 (sequence is synthesized)
cacctgttacgccaaagaaactgtttacctctcctttatgtgatgtctccaagaagagtccatttaggaaatctaaaatagagtgtccttccccaggagaactggatcagaaagagcccc

SEQ ID NO: 361189 - DNA, 120 bp, Artificial Sequence
  ENSG00000140534_34 (sequence is synthesized)
agatgtcacccagcgtagctgcatctctctcctgccctgttccctcaactccccctgaactctcacagagagctacattggacaccgtccctcctccacccccttctaaagttgggaaac

SEQ ID NO: 361190 - DNA, 120 bp, Artificial Sequence
  ENSG00000140534_35 (sequence is synthesized)
ggtgtagaaagacctctgatcccagaaggagcatcgtggagtgtcagcctgatgcctccgctactcctggggttggcacagctgacagcccagctgcccccacagactctagagatgacc

SEQ ID NO: 361191 - DNA, 120 bp, Artificial Sequence
  ENSG00000140534_36 (sequence is synthesized)
agaagggactgagcctctctcctcagtctcctcctgaaagacggggctacccaggccctggtctcaggagtgattggcatgcatcctctcctctgctcattacaagtgacacagagcatg

SEQ ID NO: 361192 - DNA, 120 bp, Artificial Sequence
  ENSG00000140534_37 (sequence is synthesized)
tcactctcctcagtgaagccgaacaccatggcattggtgacttgaaaagtaacgtcttatcagtggaagagggtgaggggctaaggacagcagatgctgagaagtcttctctgtctcacc

SEQ ID NO: 361193 - DNA, 120 bp, Artificial Sequence
  ENSG00000140534_38 (sequence is synthesized)
ctgggattcccccatctcctccttcctgtgggcctggctctcctctgatgccttcccgtgacgtgcactgtaccacagatgggagacagtgccaggcttcggcacaactagacaacctgc

SEQ ID NO: 361194 - DNA, 120 bp, Artificial Sequence
  ENSG00000140534_39 (sequence is synthesized)
cagcatcagcttggcattccacagactctgccagcccacagacctatgaggttgagctggagatgcaagcttctggccttcccaaacttcgaattaagaagatagaccccagctcttcat

SEQ ID NO: 361195 - DNA, 120 bp, Artificial Sequence
  ENSG00000140534_40 (sequence is synthesized)
tagaggctgagcccctcagcaaggaggagagctctctgggagaagagagcttcctccctgctctcagcatgcccagggccagcaggtccttaagcaaacctgaacccacctatgtgtcac

SEQ ID NO: 361196 - DNA, 120 bp, Artificial Sequence
  ENSG00000140534_41 (sequence is synthesized)
ccccctgcccccgcctctcccacagcacacctggcaagagcagggggcaaacctacatctgccaggcctgtacccccacccacggcccttctagtaccccctctccatttcaaacagatg

SEQ ID NO: 361197 - DNA, 120 bp, Artificial Sequence
  ENSG00000140534_42 (sequence is synthesized)
gggttccttggacaccatcccccaagcacagtgggaagacaactccagacataattaaagactggcccaggaggaagagggcggtgggctgtggcgccggctcctcttccgggaggggcg

SEQ ID NO: 361198 - DNA, 120 bp, Artificial Sequence
  ENSG00000140534_43 (sequence is synthesized)
aggtcggtgcagaccttcctgggagcctgtcactgcttgagtcagagggcaaggaccacggccttgaactcagcatccacaggacgcccatcttggaggattttgagctcgagggagtgt

SEQ ID NO: 361199 - DNA, 120 bp, Artificial Sequence
  ENSG00000140534_44 (sequence is synthesized)
gccagctcccagaccagtcgcctcccaggaacagcatgcctaaggccgaggaagcctcttcctggggacagtttgggttgagttccaggaagagagtcctgttggccaaggaagaagctg

SEQ ID NO: 361200 - DNA, 120 bp, Artificial Sequence
  ENSG00000140534_45 (sequence is synthesized)
accgtggagccaaaaggatctgtgacctgagagaagattcagaagttagtaagagtaaagaggggtctccaagttggagtgcatggcagctaccctccacgggagacgaagaggtgtttg

SEQ ID NO: 361201 - DNA, 120 bp, Artificial Sequence
  ENSG00000140534_46 (sequence is synthesized)
tttccggctccaccccacctcccagctgtgccgtgcggagctgcctctctgccagtgccctccaggctctgacccagtctccgctgctgttccaggggaaaacaccttcctctcagagca

SEQ ID NO: 361202 - DNA, 120 bp, Artificial Sequence
  ENSG00000140534_47 (sequence is synthesized)
aagaccccagagatgaggatgtggatgttcttccctccactgtagaagactctcctttcagtcgcgctttctccaggaggcgccccatcagcagaacttatacacggaagaagctcatgg

SEQ ID NO: 361203 - DNA, 120 bp, Artificial Sequence
  ENSG00000140534_48 (sequence is synthesized)
gaacctggctggaggacttatagccacaaacattactgagcccaaaagatcaaggagtcagccaggaccctgtggacataaagaagttggatgcctggtcccaagcctcttttgccatgg

SEQ ID NO: 361204 - DNA, 120 bp, Artificial Sequence
  ENSG00000140534_49 (sequence is synthesized)
tcagtgttcagattgccattagaatgccttagggttttctaattccccttatggatccaatccatctcctggccctgccccttgttggggaagttgcaggaggagaggtggatggcaatg

SEQ ID NO: 361205 - DNA, 120 bp, Artificial Sequence
  ENSG00000140534_50 (sequence is synthesized)
tgattggtgctataactcaggcagcctgggagtcaggaacccagacaaggaatcccattccagcctcaccccaaccatgaccttggcaagtcagggggccactctgcctcatttatgcaa

SEQ ID NO: 361206 - DNA, 120 bp, Artificial Sequence
  ENSG00000140534_51 (sequence is synthesized)
atggagaaaggcgccctccctggggtcccttgagctgctgtaaggctgggctgctgcgacacaggcagcgctttgtaaactgtgaagccatatacgtgaaactgaagagtgcattgggca

SEQ ID NO: 361207 - DNA, 120 bp, Artificial Sequence
  ENSG00000140534_52 (sequence is synthesized)
gtggaagctattttttgccttccctgtgtaacagtaaaatcatctctagtgactgagcactcagtacatttttgtttaatgttgggcctgaggttaactgtgaccatggtccagcttgag

SEQ ID NO: 361208 - DNA, 120 bp, Artificial Sequence
  ENSG00000140534_53 (sequence is synthesized)
tggcttctggagcagccacattttcaaggactgtccaagagccagccagttcagggctcaggcctcacccattgcccactcctggggagaccatcacctggctcatcgtttccaccaaga

SEQ ID NO: 361209 - DNA, 120 bp, Artificial Sequence
  ENSG00000140534_54 (sequence is synthesized)
gtgccccacaggagtgccccacagacccgctggaccagcctgctgcgggtcctggccaggggtctggctaacggtgagggctgactctgaactgtctctcagtctccagaaagtgttcaa

SEQ ID NO: 361210 - DNA, 120 bp, Artificial Sequence
  ENSG00000140534_55 (sequence is synthesized)
gcctgttgtgttcccaaatctgattcctcctattgtcttgtaaatcaaactctaagtgaaaacttcccatttgtcccttcaaagatttttttttattaaatggttttttaagatcctaaa

SEQ ID NO: 361211 - DNA, 120 bp, Artificial Sequence
  ENSG00000140534_56 (sequence is synthesized)
aaggcaatctgctgctggtgctgctcctctcggagcgtcaccacctgtcccaagacccagccaggctcagccctcatcatgacccctcttcatccagctaatcctcaatcacagacacag

SEQ ID NO: 361212 - DNA, 120 bp, Artificial Sequence
  ENSG00000140534_57 (sequence is synthesized)
tattggcacacttgccaccacggcactaagaaatcaccagggtcttccctgctgagccaagactcagcctcagacacctcagcagtgctctagttatcttccaacgatcagagctggctc

SEQ ID NO: 361213 - DNA, 120 bp, Artificial Sequence
  ENSG00000140534_58 (sequence is synthesized)
agaccaacctcagcactatggacatctgggaccagataattcttggttgtgggggcctgtcctgtgtgttataggatgtttagtaacatccctggcctccacccccaccactgtgacaac

SEQ ID NO: 361214 - DNA, 120 bp, Artificial Sequence
  ENSG00000140534_59 (sequence is synthesized)
caaaagtatctccagccatggccaaatgtcacaaaagggcaaaaacttcccctactgagagctactattgtggccatggaccaccctgaggttagccaatcagagcagaagtggggggcg

SEQ ID NO: 361215 - DNA, 120 bp, Artificial Sequence
  ENSG00000140534_60 (sequence is synthesized)
ggtaggaaactgggtcttagtttcacaagtaaaataggctttaaggtcaggcggccctgcagatgagttggtcctgattctgtcccccagtctgggaggaaacgggatatccgctggagc

SEQ ID NO: 361216 - DNA, 120 bp, Artificial Sequence
  ENSG00000140534_61 (sequence is synthesized)
agctgccatgagacacctccccacacgtgccgctgaggaggagctggggggccatgggctgctggcccaccttgtcaaaatacttgcagaggagggctctggtctctgaggatgagaggt

SEQ ID NO: 361217 - DNA, 120 bp, Artificial Sequence
  ENSG00000140534_62 (sequence is synthesized)
agctgagcttggccatgaggttcatctcgcactgggacagcaacgaggctgaggcccgaagcacccgctggcggcatgtgatggcctcattcttatactcaatggcagcatccagggcct

SEQ ID NO: 361218 - DNA, 120 bp, Artificial Sequence
  ENSG00000140534_63 (sequence is synthesized)
cgatggcctcatccaactggaacagcgtccgctcctcctgcagagacgggcacgcgtggaggaacagcacccactgcctgaatgctgaagtcctgggcagacatgcaacagccaacacgt

SEQ ID NO: 361219 - DNA, 120 bp, Artificial Sequence
  ENSG00000140534_64 (sequence is synthesized)
agccacaactgggccttaagggtcccctcgtcccaagggccaagtcagcccatcgagagaggtgccccctgctcactgtcacagccccaaccccagggtgagctgggggcactgctcaga

SEQ ID NO: 361220 - DNA, 120 bp, Artificial Sequence
  ENSG00000140534_65 (sequence is synthesized)
ggtggcctgctcaactgcaagcctctgtgaatgatctacattcaggaagttcagagcaccctaaccaaacaaaaggcatggttgggacagccacggaggcaccacggtgtctgctgggta

SEQ ID NO: 361221 - DNA, 120 bp, Artificial Sequence
  ENSG00000140534_66 (sequence is synthesized)
agcttctacagatggggatacgttctaagaaatgcatcattaggcgttttcgacgtcgtgcaaacatcagaatatactcacacaaacctagatggtatagcccaccacacacctaggcta

SEQ ID NO: 361222 - DNA, 120 bp, Artificial Sequence
  ENSG00000140534_67 (sequence is synthesized)
caagcctggacagcatgtgactgtactgaatactgtaggcagttgttaaccatggtgagtatttgtgtatctaaacatagaaaacgcacagtaaaaatgcggtgttataattttctggga

SEQ ID NO: 361223 - DNA, 120 bp, Artificial Sequence
  ENSG00000140538_0 (sequence is synthesized)
ggctcggagcacttgtacatttctgcagccgcgcggcgagccattcgcggcggctgctgcagctcctactgcatcttccttctcttcctttcctcgggctccggtctcggagtcggagag

SEQ ID NO: 361224 - DNA, 120 bp, Artificial Sequence
  ENSG00000140538_1 (sequence is synthesized)
tcggagagcgcgcctcgcttccagagcccccggacccggcgagtcagcgatcgccgagccggccaccatgcccggcagaccgcgccactaggcgctcctcgcggctcccacccggcggcg

SEQ ID NO: 361225 - DNA, 120 bp, Artificial Sequence
  ENSG00000140538_2 (sequence is synthesized)
ggcggcggcgtccgcgatggtttcagacgctgaaggattttgcatctgatcgctcggcgtttcaaagaagcagcgatcggagatggatgtctctctttgcccagccaagtgtagtttctg

SEQ ID NO: 361226 - DNA, 120 bp, Artificial Sequence
  ENSG00000140538_3 (sequence is synthesized)
gcggattttcttgctgggaagcgtctggctggactatgtgggctccgtgctggcttgccctgcaaattgtgtctgcagcaagactgagatcaattgccggcggccggacgatgggaacct

SEQ ID NO: 361227 - DNA, 120 bp, Artificial Sequence
  ENSG00000140538_4 (sequence is synthesized)
cttccccctcctggaagggcaggattcagggaacagcaatgggaacgccagtatcaacatcacggacatctcaaggaatatcacttccatacacatagagaactggcgcagtcttcacac

SEQ ID NO: 361228 - DNA, 120 bp, Artificial Sequence
  ENSG00000140538_5 (sequence is synthesized)
gctcaacgccgtggacatggagctctacaccggacttcaaaagctgaccatcaagaactcaggacttcggagcattcagcccagagcctttgccaagaacccccatttgcgttatataaa

SEQ ID NO: 361229 - DNA, 120 bp, Artificial Sequence
  ENSG00000140538_6 (sequence is synthesized)
cctgtcaagtaaccggctcaccacactctcgtggcagctcttccagacgctgagtcttcgggaattgcagttggagcagaactttttcaactgcagctgtgacatccgctggatgcagct

SEQ ID NO: 361230 - DNA, 120 bp, Artificial Sequence
  ENSG00000140538_7 (sequence is synthesized)
ctggcaggagcagggggaggccaagctcaacagccagaacctctactgcatcaacgctgatggctcccagcttcctctcttccgcatgaacatcagtcagtgtgaccttcctgagatcag

SEQ ID NO: 361231 - DNA, 120 bp, Artificial Sequence
  ENSG00000140538_8 (sequence is synthesized)
cgtgagccacgtcaacctgaccgtacgagagggtgacaacgctgttatcacttgcaatggctctggatcaccccttcctgatgtggactggatagtcactgggctgcagtccatcaacac

SEQ ID NO: 361232 - DNA, 120 bp, Artificial Sequence
  ENSG00000140538_9 (sequence is synthesized)
tcaccagaccaatctgaactggaccaatgttcatgccatcaacttgacgctggtgaatgtgacgagtgaggacaatggcttcaccctgacgtgcattgcagagaacgtggtgggcatgag

SEQ ID NO: 361233 - DNA, 120 bp, Artificial Sequence
  ENSG00000140538_10 (sequence is synthesized)
caatgccagtgttgccctcactgtctactatcccccacgtgtggtgagcctggaggagcctgagctgcgcctggagcactgcatcgagtttgtggtgcgtggcaaccccccaccaacgct

SEQ ID NO: 361234 - DNA, 120 bp, Artificial Sequence
  ENSG00000140538_11 (sequence is synthesized)
gcactggctgcacaatgggcagcctctgcgggagtccaagatcatccatgtggaatactaccaagagggagagatttccgagggctgcctgctcttcaacaagcccacccactacaacaa

SEQ ID NO: 361235 - DNA, 120 bp, Artificial Sequence
  ENSG00000140538_12 (sequence is synthesized)
tggcaactataccctcattgccaaaaacccactgggcacagccaaccagaccatcaatggccacttcctcaaggagccctttccagagagcacggataactttatcttgtttgacgaagt

SEQ ID NO: 361236 - DNA, 120 bp, Artificial Sequence
  ENSG00000140538_13 (sequence is synthesized)
gagtcccacacctcctatcactgtgacccacaaaccagaagaagacacttttggggtatccatagcagttggacttgctgcttttgcctgtgtcctgttggtggttctcttcgtcatgat

SEQ ID NO: 361237 - DNA, 120 bp, Artificial Sequence
  ENSG00000140538_14 (sequence is synthesized)
caacaaatatggtcgacggtccaaatttggaatgaagggtcccgtggctgtcatcagtggtgaggaggactcagccagcccactgcaccacatcaaccacggcatcaccacgccctcgtc

SEQ ID NO: 361238 - DNA, 120 bp, Artificial Sequence
  ENSG00000140538_15 (sequence is synthesized)
actggatgccgggcccgacactgtggtcattggcatgactcgcatccctgtcattgagaacccccagtacttccgtcagggacacaactgccacaagccggacacgtatgtgcagcacat

SEQ ID NO: 361239 - DNA, 120 bp, Artificial Sequence
  ENSG00000140538_16 (sequence is synthesized)
taagaggagagacatcgtgctgaagcgagaactgggtgagggagcctttggaaaggtcttcctggccgagtgctacaacctcagcccgaccaaggacaagatgcttgtggctgtgaaggc

SEQ ID NO: 361240 - DNA, 120 bp, Artificial Sequence
  ENSG00000140538_17 (sequence is synthesized)
cctgaaggatcccaccctggctgcccggaaggatttccagagggaggccgagctgctcaccaacctgcagcatgagcacattgtcaagttctatggagtgtgcggcgatggggaccccct

SEQ ID NO: 361241 - DNA, 120 bp, Artificial Sequence
  ENSG00000140538_18 (sequence is synthesized)
catcatggtctttgaatacatgaagcatggagacctgaataagttcctcagggcccatgggccagatgcaatgatccttgtggatggacagccacgccaggccaagggtgagctggggct

SEQ ID NO: 361242 - DNA, 120 bp, Artificial Sequence
  ENSG00000140538_19 (sequence is synthesized)
ctcccaaatgctccacattgccagtcagatcgcctcgggtatggtgtacctggcctcccagcactttgtgcaccgagacctggccaccaggaactgcctggttggagcgaatctgctagt

SEQ ID NO: 361243 - DNA, 120 bp, Artificial Sequence
  ENSG00000140538_20 (sequence is synthesized)
gaagattggggacttcggcatgtccagagatgtctacagcacggattattacagggtgggaggacacaccatgctccccattcgctggatgcctcctgaaagcatcatgtaccggaagtt

SEQ ID NO: 361244 - DNA, 120 bp, Artificial Sequence
  ENSG00000140538_21 (sequence is synthesized)
cactacagagagtgatgtatggagcttcggggtgatcctctgggagatcttcacctatggaaagcagccatggttccaactctcaaacacggaggtcattgagtgcattacccaaggtcg

SEQ ID NO: 361245 - DNA, 120 bp, Artificial Sequence
  ENSG00000140538_22 (sequence is synthesized)
tgttttggagcggccccgagtctgccccaaagaggtgtacgatgtcatgctggggtgctggcagagggaaccacagcagcggttgaacatcaaggagatctacaaaatcctccatgcttt

SEQ ID NO: 361246 - DNA, 120 bp, Artificial Sequence
  ENSG00000140538_23 (sequence is synthesized)
ggggaaggccaccccaatctacctggacattcttggctagtggtggctggtggtcatgaattcatactctgttgcctcctctctccctgcctcacatctcccttccacctcacaactcct

SEQ ID NO: 361247 - DNA, 120 bp, Artificial Sequence
  ENSG00000140538_24 (sequence is synthesized)
cacatctcccttccacctcacaactccttccatccttgactgaagcgaacatcttcatataaactcaagtgcctgctacacatacaacactgaaaaaaggaaaaaaaaagaaagaaaaaa

SEQ ID NO: 361248 - DNA, 120 bp, Artificial Sequence
  ENSG00000140538_25 (sequence is synthesized)
atatatatatatatatatttatatatctaactatctatcaatctatatctacagagagttaccttctctagtacacagagaagctgctgatacagaaaaccacaagactttaacaactca

SEQ ID NO: 361249 - DNA, 120 bp, Artificial Sequence
  ENSG00000140538_26 (sequence is synthesized)
gaaactctaaaatattaataatacaaaggaaaattccctttgacttaagctgtggcccatgcttctaatgctacggctctttggagcagaagacctggaccatgcagagagacaatcttt

SEQ ID NO: 361250 - DNA, 120 bp, Artificial Sequence
  ENSG00000140538_27 (sequence is synthesized)
gggatgagagctctgggacgggaggagttaaggtggtgctcagtcgctgctgtgtgtgtctgttaccccggaagctcaccacaggcacatgtggggactgcatggctgtgctcagcaaag

SEQ ID NO: 361251 - DNA, 120 bp, Artificial Sequence
  ENSG00000140538_28 (sequence is synthesized)
aaatgatgcctgagcagggtccttgcctccacttcttccccatttcctccacttcaggacaatgttctaatttgtccattctaaaaagtgtaatcttgatgcttttgggaatcaatgatg

SEQ ID NO: 361252 - DNA, 120 bp, Artificial Sequence
  ENSG00000140538_29 (sequence is synthesized)
gcacctacgggtaaacacagaacagacaaccccacaacacaaaaccatgacaagagctgacagcatccatcctgggtgtaagcttcttgctggagttgcaaaggatgtgtctttctattc

SEQ ID NO: 361253 - DNA, 120 bp, Artificial Sequence
  ENSG00000140538_30 (sequence is synthesized)
tcagaacttaaagaactggactttctggagtaaaagaaccacagaagaaaaaatagctgaaacctgaaccctgccaagacactgccacctgtcttttccatcattgcaaagattccttgg

SEQ ID NO: 361254 - DNA, 120 bp, Artificial Sequence
  ENSG00000140538_31 (sequence is synthesized)
cctcacctcccactttcaggcccctgggaagcttagggggttaggaaacaggtccccatgttatctttgaatgtagacacagcacgctttagggttgcaatagcaagagacttggttgct

SEQ ID NO: 361255 - DNA, 120 bp, Artificial Sequence
  ENSG00000140538_32 (sequence is synthesized)
tgtaggtcattataacgaatgccccctggtcctctcagtttctcatcctgcttccctagatcctagaccccacttcctgggtctctactgagtcccaggtaaaccccactgccaaggaag

SEQ ID NO: 361256 - DNA, 120 bp, Artificial Sequence
  ENSG00000140538_33 (sequence is synthesized)
ggagccaggtctagtgagaggctgcagcagtgagtgtttcaggaaagcaagcagtggagtgggtgagagccagcaggggagaatctacttggcacctgtgccaggccccttggcattctc

SEQ ID NO: 361257 - DNA, 120 bp, Artificial Sequence
  ENSG00000140538_34 (sequence is synthesized)
ctcacgtttccagcccctgggaggattgatgcatctgcctttgagctgttgtgaaaacgcaggggctgagaaatcacttttgtgggctggggtagggggaagggctgaggcttctctggg

SEQ ID NO: 361258 - DNA, 120 bp, Artificial Sequence
  ENSG00000140538_35 (sequence is synthesized)
agatgtccaatgagcggccagtgctgcaggcttggaatcttaatgaggcctgagccctgaccggagagagggaaggaaacatctgtgctggggcctgctccctctgccccagcactgggg

SEQ ID NO: 361259 - DNA, 120 bp, Artificial Sequence
  ENSG00000140538_36 (sequence is synthesized)
aatcactgccttcctggctgctgccacataccacagtggggccgacctctgggcctccctgtcacatgaaacatggaagccaacagcctggccccacagatctcctctgctggagaggag

SEQ ID NO: 361260 - DNA, 120 bp, Artificial Sequence
  ENSG00000140538_37 (sequence is synthesized)
aggatgtgttcctcccaggccacggggcccctctgccttgccccaagcacagagctacctaagggactgacctttgccacactggagctcacctcccgggggcctctggcctaccctttt

SEQ ID NO: 361261 - DNA, 120 bp, Artificial Sequence
  ENSG00000140538_38 (sequence is synthesized)
ccctgccagctgaagagactgccggcagcctggacgtcctggttagctgaaggcagctgaaatgtgggcctccctatgtggggtttagtactgaattatgtgtttgtggttttgcttctt

SEQ ID NO: 361262 - DNA, 120 bp, Artificial Sequence
  ENSG00000140538_39 (sequence is synthesized)
tttgtagacccacaaatatttttatttgaatagtaaagagctgtgctcagattgtagccatggttgggatttgggatcaacgaggctggttagctggactgggaggggaggcaggtgaga

SEQ ID NO: 361263 - DNA, 120 bp, Artificial Sequence
  ENSG00000140538_40 (sequence is synthesized)
tgggaatttggtgttggttttctcactgtgctgtgctcctagcccctgaggactttgcaggaaagctgtttggattgaccacctcaaggaactcctttgctgtcctatgacaattactcc

SEQ ID NO: 361264 - DNA, 120 bp, Artificial Sequence
  ENSG00000140538_41 (sequence is synthesized)
tcttgtctttccacctagaggaccgttatgccggggctgtgagttctggctgaagctgcacaatctggctttgatctgggtagctaagaacaggtgttcagggagggcatggtctggagg

SEQ ID NO: 361265 - DNA, 120 bp, Artificial Sequence
  ENSG00000140538_42 (sequence is synthesized)
cgcctgagggaaaagtatcttctggttagaagtgaagcaccaatgctcctgttgcttcccttctcccatatcctctcctgaacaaacactgtgtggcttctgtcttcttggctgtgtgtt

SEQ ID NO: 361266 - DNA, 120 bp, Artificial Sequence
  ENSG00000140538_43 (sequence is synthesized)
tcaaaactgatagtcactgatgggctgggaagaagcaggagaagaactgggttggagatgggtggaaaactgggaataaggaccatgctatggttttatcttcagggcactgattcatca

SEQ ID NO: 361267 - DNA, 120 bp, Artificial Sequence
  ENSG00000140538_44 (sequence is synthesized)
tggcctaatgaaagaaggtgattccttgggggaacaagaagcactgaaggagaccgcagttgtcagattgctgccaccttaggcccacgggctttcacgctgatcttggggtcatgttct

SEQ ID NO: 361268 - DNA, 120 bp, Artificial Sequence
  ENSG00000140538_45 (sequence is synthesized)
tactgtgtccattgtaagcagctggctgtggaagagtgccagagagagaggggcagagcagggaagggtagcgagggaagatatattactttgatatattagccttggcagattaaaaaa

SEQ ID NO: 361269 - DNA, 120 bp, Artificial Sequence
  ENSG00000140538_46 (sequence is synthesized)
aaaagatttattttggagagtaaaggaggcagaaaatagggccatggaaattgcagggtacactatggctctggggagtgtggcatgtactgggacacacctgtccctcctatattggga

SEQ ID NO: 361270 - DNA, 120 bp, Artificial Sequence
  ENSG00000140538_47 (sequence is synthesized)
caggactgataaggcttagtacactgtatcttaatttccccatctgcagaataaggggtacacctgctaatctctggccccttctagctctgagttcttagattctgacaacgttgtgtc

SEQ ID NO: 361271 - DNA, 120 bp, Artificial Sequence
  ENSG00000140538_48 (sequence is synthesized)
actgtgccatttttctcaataccattctggaatggcaggacagccttgcataggtggggggcagttgccgctgaaggctcactgggcctgggcaaggctgagttccaataagacactcct

SEQ ID NO: 361272 - DNA, 120 bp, Artificial Sequence
  ENSG00000140538_49 (sequence is synthesized)
ctccttctttgccccttgtctcaacatttcggagtctgaagtgtctgagacgactgtaagccaggaggggagcatttggtcggcttcccatcctggcattcctacataccagaaaagcac

SEQ ID NO: 361273 - DNA, 120 bp, Artificial Sequence
  ENSG00000140538_50 (sequence is synthesized)
tgtcgacggtccatttatttatttatttatgaagagcctaatgtgatgaaatgtgttgtgaaatgacatcctattagccaatatggccactccagttcatttcaccctcattttcccata

SEQ ID NO: 361274 - DNA, 120 bp, Artificial Sequence
  ENSG00000140538_51 (sequence is synthesized)
ccaaagtccaccttttagaagaccatgtcacatcgcctctgagagcttagctttgaagtgagctcttttgtgtcttttgatgaacgctccagggcacccaggctggtctctctgccatgc

SEQ ID NO: 361275 - DNA, 120 bp, Artificial Sequence
  ENSG00000140538_52 (sequence is synthesized)
caacctcaccggatcctctcctggactgagtgagagtgacctgctgttgggtgtccaccttggagtagggtgttgtggccatgggacctcccaattcttctttctttggatgtgaaccta

SEQ ID NO: 361276 - DNA, 120 bp, Artificial Sequence
  ENSG00000140538_53 (sequence is synthesized)
actctgccctctaatgatatccctgaactctgaggggaccttgggcatcactgaacctcctctagtcaagagacaagaaaaaggaggtgctgcttcctccattcagcagatcatgcacaa

SEQ ID NO: 361277 - DNA, 120 bp, Artificial Sequence
  ENSG00000140538_54 (sequence is synthesized)
attactcctagacagaggcttcccacttgaggcaaaggatctttggtccttctgggttcaggttgaacattaatgttcttctctagtgatgcctactttgcggaatacactagtgcaagt

SEQ ID NO: 361278 - DNA, 120 bp, Artificial Sequence
  ENSG00000140538_55 (sequence is synthesized)
cattttggtgctaaatactgcagaaaccaacaccaacgggagagctgtcagccagcttctggggctgcacgagactcaactcagaagtagaagtgagtcagccatgccgggagagtacag

SEQ ID NO: 361279 - DNA, 120 bp, Artificial Sequence
  ENSG00000140538_56 (sequence is synthesized)
ggtgcattggaagttaagtagaaaagtggcagggtgaaaagaccagcaaaatttctgattttgctattagttatccacgtggccttggccaaatcagcttatttctcatttgagacgttt

SEQ ID NO: 361280 - DNA, 120 bp, Artificial Sequence
  ENSG00000140538_57 (sequence is synthesized)
aagaggtttgtatagatatttttagagtccttttcatttttttaaagctaggttctggtcccacctgatatatatgtacttgcttgttaaaaataagagatgaagtgaaagataaggaag

SEQ ID NO: 361281 - DNA, 120 bp, Artificial Sequence
  ENSG00000140538_58 (sequence is synthesized)
gagacgaagaaaagttaccaatggcaaaggattgattatagaagacaatgaaagaaggcctggtgactggtagatttgaggaatattgtacagggagccaggcagacaagccagagactt

SEQ ID NO: 361282 - DNA, 120 bp, Artificial Sequence
  ENSG00000140538_59 (sequence is synthesized)
catttttatgctcttcacaggaggtcactggcctagccacttgcctgcgtttcaccaggctgttcccctcagctagtcaaccttccctgttcaaaaccaacatgctaacacttggcagaa

SEQ ID NO: 361283 - DNA, 120 bp, Artificial Sequence
  ENSG00000140538_60 (sequence is synthesized)
actattccaagatatggagagaggcctgcccatctctcatgcaggccactggaaatcaactctgggtcaaaaccgacaagatttttatcttttaatgcttattgtaagaggccgggatgt

SEQ ID NO: 361284 - DNA, 120 bp, Artificial Sequence
  ENSG00000140538_61 (sequence is synthesized)
ttgaaagagggcagcgtcttaagttgcagactattcaccaaagtccttttctattcaggaatgactaatgactttctttgttccccttttccaaaccaaacagcagcagtattaccttga

SEQ ID NO: 361285 - DNA, 120 bp, Artificial Sequence
  ENSG00000140538_62 (sequence is synthesized)
ctccaaagtacagtgattgcaatggacagtcttgagattaagggtctttttagtgctttgctcggaatctggagcaaggaaatgtctagggatgtttgttgaatgaacccacctgccagc

SEQ ID NO: 361286 - DNA, 120 bp, Artificial Sequence
  ENSG00000140538_63 (sequence is synthesized)
agtccagagagctgtcccaaaggcccctgagatgtctattgtctgctttggtagggagccaacctgctagaagactcaagggcatttgccttagagagaaaaaaaaatggcacatttagt

SEQ ID NO: 361287 - DNA, 120 bp, Artificial Sequence
  ENSG00000140538_64 (sequence is synthesized)
tccgggcttgggtgctgaagtcactgtgtttttggctcctgaagctccactttcttttttcataccaaataaattgttttggccaatatttaaggatttaaatatttaaggttttgaagg

SEQ ID NO: 361288 - DNA, 120 bp, Artificial Sequence
  ENSG00000140538_65 (sequence is synthesized)
aaaattccaagtttatgcatcattattaagacatcaatatgggcttgggaaaatgttttggtgttgcttaataatactgggagtgtcttctaaagaaagtatacatatatgtacgttgtg

SEQ ID NO: 361289 - DNA, 120 bp, Artificial Sequence
  ENSG00000140538_66 (sequence is synthesized)
tgtttatttctatatattggattggaatggcttcaaagaaggcctgtttgaagtcagcaaattgatttcaatttgggattctcttttagccttaccgttcttggggataagaaatctgga

SEQ ID NO: 361290 - DNA, 120 bp, Artificial Sequence
  ENSG00000140538_67 (sequence is synthesized)
gatgaactggcctcagaaacattcaggaagattacgatgggaaatctgtcatcttgtaaagttggatcatttggtgctctctgaactaaattatgctgactaacattctgagcatctgaa

SEQ ID NO: 361291 - DNA, 120 bp, Artificial Sequence
  ENSG00000140538_68 (sequence is synthesized)
aatcattcttcctggttgcctgatagatgaccacacaggagtcatttctatcacatcttatttgggggttggtatagacgccaccagcactgcagggaaaaccaccccctaggaggggtg

SEQ ID NO: 361292 - DNA, 120 bp, Artificial Sequence
  ENSG00000140538_69 (sequence is synthesized)
agacagagagaatgtgagattttgatcattgattgctctttctgaaaggcactgctgaccatagtaggtgtggtgaatgtttgtgtcactgcattgggtattagaacttttgctctgagc

SEQ ID NO: 361293 - DNA, 120 bp, Artificial Sequence
  ENSG00000140538_70 (sequence is synthesized)
atgggctgccctaccctgaagagctgaatcttggcttctgacagaagctctgcatgactcattctcctcaagcatattttccttattttcctatgaaagtatctatagtttgcaacaaga

SEQ ID NO: 361294 - DNA, 120 bp, Artificial Sequence
  ENSG00000140538_71 (sequence is synthesized)
actgtctttggttcaagtgtcagtgtactagaatagatgcttttctgtgagacctgtggaggttggattggggtggggggtgttccttcaaagtacttggaattctttatcaaagaaata

SEQ ID NO: 361295 - DNA, 120 bp, Artificial Sequence
  ENSG00000140538_72 (sequence is synthesized)
aaactcagattctcttctttctagtttacttctaagttccaaatttaaaacaagacccagtttgacatttgcagtaggagataatgtcttgaaccagtgagcttggctatctttctttca

SEQ ID NO: 361296 - DNA, 120 bp, Artificial Sequence
  ENSG00000140538_73 (sequence is synthesized)
tcatagggaggcagggcagtaagttgtattaatttttcctaatcacccaggcaaatattgctttttgttcagtgtcgtgacccacattcatagcttgcaggggatacttctagctgacaa

SEQ ID NO: 361297 - DNA, 120 bp, Artificial Sequence
  ENSG00000140538_74 (sequence is synthesized)
agctggaagtttctaatagaagatgtatcaagataacagaggtgaggaaaggcctgttgaacatctacttctgagaatcattgaggcactcaggtcttgcttttcagtttagtatcttac

SEQ ID NO: 361298 - DNA, 120 bp, Artificial Sequence
  ENSG00000140538_75 (sequence is synthesized)
aaaaggagttggtttcttctcattttagcaatgataaatttagacatcttttttgaaaggccaaaggtagattgagagctcaaatacttacggtgtactctgacagtcttttattctatt

SEQ ID NO: 361299 - DNA, 120 bp, Artificial Sequence
  ENSG00000140538_76 (sequence is synthesized)
gtgtactctgacagtcttttattctatttttcaagacttattttatatatacatattttttatttccataggttattggggaacaggtagtgtttggttacatgagtaagttctttggtg

SEQ ID NO: 361300 - DNA, 120 bp, Artificial Sequence
  ENSG00000140538_77 (sequence is synthesized)
gtcttttatccctcactcccttcccacactttccccctgagtccgcagagtccattgtgtcattcttataccttgacatcctcacagcttagctcccacatatcagtgagaacgtacgat

SEQ ID NO: 361301 - DNA, 120 bp, Artificial Sequence
  ENSG00000140538_78 (sequence is synthesized)
ctcccacatatcagtgagaacgtacgatgtttggttttctattcctgaattgcttcacttagaatagtggtctccaatctcacccaggccgcttcgaatgccattaattcattccttttt

SEQ ID NO: 361302 - DNA, 82 bp, Artificial Sequence
  ENSG00000140538_79 (sequence is synthesized)
agtttctttatctgctcattgattgatgggcatttgggttgattccactttttgcaattgcaaattgtgctgctataaacat

SEQ ID NO: 361303 - DNA, 120 bp, Artificial Sequence
  ENSG00000140538_80 (sequence is synthesized)
ttccactttttgcaattgcaaattgtgctgctataaacatatgtgtgcaagtatctctatctcttatgtataatgacttcttttcctctgggcagatacccagtaatagggctgcgggat

SEQ ID NO: 361304 - DNA, 120 bp, Artificial Sequence
  ENSG00000140538_81 (sequence is synthesized)
tactgacattcttttacatgcaacatccctaaaacccaacaagacgtgtaaacactgaagtccaagtctgataattattctttcatttaagaagaacacatgggagtttcacatattatt

SEQ ID NO: 361305 - DNA, 120 bp, Artificial Sequence
  ENSG00000140538_82 (sequence is synthesized)
tttaaaaactaattttgtaatatgttaaatggtaggacacattcaattttttttcctcattggagatctgtccatgttctgtctcaatttaatagctacctggcatgtaactgatgcctc

SEQ ID NO: 361306 - DNA, 120 bp, Artificial Sequence
  ENSG00000140538_83 (sequence is synthesized)
tggagaagtaaatctcagtgaagaagattttttttcatatttcttcttttttctttttcttttggcttctatcctcctgcttccatgggactgacaatccagcttctcaaactccacgaa

SEQ ID NO: 361307 - DNA, 120 bp, Artificial Sequence
  ENSG00000140538_84 (sequence is synthesized)
agtcttaatacaaggtgaatcccagagccacaaacagtttggacttcaaacagtgagaaaattggaccgaatgattcggcacacaaagcagaaaactttcatttcctgtaggcaggatgg

SEQ ID NO: 361308 - DNA, 120 bp, Artificial Sequence
  ENSG00000140538_85 (sequence is synthesized)
aattgactgttatattaagacttctgaagaagccctgccctggagtaatttcagtgctgtcagacgatgttgacatctagattaacctctgtgcagtgaattttactgcaaagctcattg

SEQ ID NO: 361309 - DNA, 120 bp, Artificial Sequence
  ENSG00000140538_86 (sequence is synthesized)
agatgcatgtgatgtgtctccacaaatcccatctggaacccgtggtggcccaccctcagcaaccctcctctccccactgactctgctttctctgtccataaacttttagcctccaggagc

SEQ ID NO: 361310 - DNA, 120 bp, Artificial Sequence
  ENSG00000140538_87 (sequence is synthesized)
agaggagccgtggctgagatctgaccctaggagagggagtttgggccttctctgaccatgatgctgagccaggctttctgcttagagtgacagagattgtcattgtattgggtttcccct

SEQ ID NO: 361311 - DNA, 120 bp, Artificial Sequence
  ENSG00000140538_88 (sequence is synthesized)
gagggaactgcaaattaaggcatgaaaaacactctgctgatgacagtttcacagcatatcttaatgctgcacaaagtgaaatggtttaaaaggaattagtgtgtcctaagtcattgagcc

SEQ ID NO: 361312 - DNA, 120 bp, Artificial Sequence
  ENSG00000140538_89 (sequence is synthesized)
ctgctctgggctctgcaatcctctagggattcaagatcccattgcaacaaggtcatgactgcgtctaggccggacagacggattctgaaggacaaggtgtttgtcttttgtgcaggtctt

SEQ ID NO: 361313 - DNA, 120 bp, Artificial Sequence
  ENSG00000140538_90 (sequence is synthesized)
tcctatggtccttacaagagaggcagccacagctcctgtttctcccaactgggacaaaagatgtagctgttttctaagcactggtttgtcatctctttaaggagtggttggctccagaat

SEQ ID NO: 361314 - DNA, 120 bp, Artificial Sequence
  ENSG00000140538_91 (sequence is synthesized)
gagccagactcactctataattccacattgtggcacaacagccacatagaacctcaaagctgaaattgcaacttttctgcaaaatagggccattgattacatccaaagttttgagaaaag

SEQ ID NO: 361315 - DNA, 120 bp, Artificial Sequence
  ENSG00000140538_92 (sequence is synthesized)
gccttcaggttagattcagtcaccttcagactccacagagttgctcagcatggttgcaggcgtctttggaaacttacctcagggttttagaatacgttaccctgaagtctggataacaat

SEQ ID NO: 361316 - DNA, 120 bp, Artificial Sequence
  ENSG00000140538_93 (sequence is synthesized)
tttctctgagattttactgattctaattccctttgaaattgtttttcctacttgcctcttgtctttcatttaaataataagaatctccttgcatattcttaggtatttctttaggagaat

SEQ ID NO: 361317 - DNA, 120 bp, Artificial Sequence
  ENSG00000140538_94 (sequence is synthesized)
tggaagtttccagccaaggacactgtgtttatgaattggaaagatatctttctgggctgaaaaaggtaaaaatcatacggaggcaatcttgatgactttatttaaaagcaattatcagca

SEQ ID NO: 361318 - DNA, 120 bp, Artificial Sequence
  ENSG00000140538_95 (sequence is synthesized)
ttgtgttttattctaggtgctcgtgctcatagtgcaaactacattcacgtttttaattatttatgttatgatacttattcgtgtgtacatatatgcgcacacacacacacaaaagcctcc

SEQ ID NO: 361319 - DNA, 120 bp, Artificial Sequence
  ENSG00000140538_96 (sequence is synthesized)
acaatcctactggtatacaaatccatatgccccatttgtgtcgcttccgttgatctttgtgtgcatgcatttgcaatgaagtgtgcatcacatgtgtgatttcttaaagtcatctatagc

SEQ ID NO: 361320 - DNA, 120 bp, Artificial Sequence
  ENSG00000140538_97 (sequence is synthesized)
tcatctttcctcttattatcgacacataccctttgactttctgcactttggagctcatgaaattaaggctttttcaagggagactacatcttgagtttctttaaaccttcatatttaaag

SEQ ID NO: 361321 - DNA, 120 bp, Artificial Sequence
  ENSG00000140538_98 (sequence is synthesized)
ataggactggttttcttcgagaaacaaaaacttgattcagattttatttaattaattaattttctgggggaaatggtactgaatttgttcctgagtaacaaatagtagtaagtgcaaata

SEQ ID NO: 361322 - DNA, 120 bp, Artificial Sequence
  ENSG00000140538_99 (sequence is synthesized)
taaatgtgaagtagtttaagcaggttattgaacctatcttgtggctgaaacaagtagtcagatatgaagctcagacactcaaattgaattagaacgtgaaccaaaacggttagcatgggg

SEQ ID NO: 361323 - DNA, 120 bp, Artificial Sequence
  ENSG00000140538_100 (sequence is synthesized)
caggagaagagcactgggctaggagcaagcctgctagattgtcacttgagtgtccttagcttaatgtgggcatctgacaactagttgcagtcctgtgcccctctaattccagagatgggg

SEQ ID NO: 361324 - DNA, 120 bp, Artificial Sequence
  ENSG00000140538_101 (sequence is synthesized)
caagccaatctgtttctcatccattgctcaagttggttatcactgaaatattatataccatctcaagatcctgccctgaacaagtttgcaaacatcccccccacactgaggagtcagtcc

SEQ ID NO: 361325 - DNA, 120 bp, Artificial Sequence
  ENSG00000140538_102 (sequence is synthesized)
catttttgttttatggcagtttatctcttgtgaccctcctttggaagctgtccaaactctgaacacttgctgtccattccctgctccccaccccaccctttaaggccagggaaaagccag

SEQ ID NO: 361326 - DNA, 120 bp, Artificial Sequence
  ENSG00000140538_103 (sequence is synthesized)
ggaaagccctattggctcatctccctctttcctagcctgcacatcaaccaagcttgggatttagcctaggttttcagagaggaaaacaagtgcgttctcccagccatcagtatctttcca

SEQ ID NO: 361327 - DNA, 120 bp, Artificial Sequence
  ENSG00000140538_104 (sequence is synthesized)
gccccctggaccaagtgattagtgcctcattagcgcctcatcagttgcttttgcacaagagactctgggacaacaagcctattataatgcctcagtctgtctttttgaagtcaaaccatc

SEQ ID NO: 361328 - DNA, 120 bp, Artificial Sequence
  ENSG00000140538_105 (sequence is synthesized)
cttctggcttggttaggaaaggggagcctttctccaaacacgttttcttttaatttcctctgttgttttctggctgttaactatatggataaatggtaaaacataattttcattttttct

SEQ ID NO: 361329 - DNA, 120 bp, Artificial Sequence
  ENSG00000140538_106 (sequence is synthesized)
aggcccctatgagagtggatatgctatatttctatagatgaggagttccacatgtcagcaaagcatttatttatttagtgaagtgactataatattgacacacagatttgcagcagcatc

SEQ ID NO: 361330 - DNA, 120 bp, Artificial Sequence
  ENSG00000140538_107 (sequence is synthesized)
caaatcttgagggggaaaaaaaagcctttttcaatcaaatgaaaccttttctgtgatggcaccagagaggtttatatcttaagcacagaactgaacctgataatatgcttcctttctaga

SEQ ID NO: 361331 - DNA, 120 bp, Artificial Sequence
  ENSG00000140538_108 (sequence is synthesized)
aacaaagagatagaagaaattgctgaaggagctggaagaccaaaccatctattccccaaatcattatgtatcaatagatacttcaactctgttccttaaatggctctgaaaaacacaaat

SEQ ID NO: 361332 - DNA, 120 bp, Artificial Sequence
  ENSG00000140538_109 (sequence is synthesized)
tccttaaatggctctgaaaaacacaaataaccatatttactattaaaaacaaattcataatgtctaacccaatcccttattttaatatatatacatattaaaataatcccatgtatatat

SEQ ID NO: 361333 - DNA, 120 bp, Artificial Sequence
  ENSG00000140538_110 (sequence is synthesized)
ttacatatatataggggtgtgtgtgtatatatatatatatatttacatatatatgtaaatgtatactttttaatgctggggatagttccatattgtttcttttcttgattccttctaata

SEQ ID NO: 361334 - DNA, 120 bp, Artificial Sequence
  ENSG00000140538_111 (sequence is synthesized)
tattcaatgagatttataatttttttcacttttatttctttaggaaagagttggggtctattatgaatgctttctaggataaaatggcaaaacagatggaaagtgtggtagagggaggat

SEQ ID NO: 361335 - DNA, 120 bp, Artificial Sequence
  ENSG00000140538_112 (sequence is synthesized)
aatgggaataggaggcagagaacttgcacatttctatttcctgctgagagatcttggaaaaacattgtctgccctttacctcagtttcttaacatacaaaatagaactactatcaacccc

SEQ ID NO: 361336 - DNA, 120 bp, Artificial Sequence
  ENSG00000140538_113 (sequence is synthesized)
ctgcatgccacagagggttatttgagccctaaatgagatcataactgttaacatactctgtgaactgtacagggccagacaaatagagcccactctctgggcagttgcatacagtcttgc

SEQ ID NO: 361337 - DNA, 120 bp, Artificial Sequence
  ENSG00000140538_114 (sequence is synthesized)
tgggtgctgagctgagtgactgagagccgcttttgagacacattttgaggcatatcttccctaaatttttgctggtgtctgttttttagaagttttgccattagcattttttgctttgag

SEQ ID NO: 361338 - DNA, 120 bp, Artificial Sequence
  ENSG00000140538_115 (sequence is synthesized)
tatctagtgatggagaatgctctaaaaaatacaaggagacagggggattctttatctatttggcttagtcactggaaagggacaattagagtttgttttcaggcttggaactctgacatt

SEQ ID NO: 361339 - DNA, 120 bp, Artificial Sequence
  ENSG00000140538_116 (sequence is synthesized)
ttgtagcaaaatggcatcttctgctgcatttaattccttgccatcaactcttgctttcataaggttctgtcaatttcaacataatgctttgtaaaaataggactctgtgaaactttctct

SEQ ID NO: 361340 - DNA, 120 bp, Artificial Sequence
  ENSG00000140538_117 (sequence is synthesized)
ataaatttggtggtataactaatttttcagggagcatctgaagggataatgatttttaagtggtaccctgttcatgccaggaccagcatttgtacatgggaaaataatcttaagatgagt

SEQ ID NO: 361341 - DNA, 120 bp, Artificial Sequence
  ENSG00000140538_118 (sequence is synthesized)
gaagagcaaatgctagaccacacctttaataggcccaagtgccaacaaaaatacgtgtgagtgggattcccacggagaaatgtttctgaatgaaaatgaaacccttgataatgaatcctg

SEQ ID NO: 361342 - DNA, 120 bp, Artificial Sequence
  ENSG00000140538_119 (sequence is synthesized)
aggccagaatgccaaagtcacagtattctgtcatttacagcccctaaaaaatcccaggtgtttgtgatgacaagccactattataagtactctgtattagtgactacttggcaagtaaaa

SEQ ID NO: 361343 - DNA, 120 bp, Artificial Sequence
  ENSG00000140538_120 (sequence is synthesized)
ttttctcaaatgttatttttcatagatctccaagcaacaatcacttgcagtgtatctgacaaaatgctatacatgattttctaaaagtattttgatcactccagaaagaaatcagaataa

SEQ ID NO: 361344 - DNA, 120 bp, Artificial Sequence
  ENSG00000140538_121 (sequence is synthesized)
agctgcataccccaaatcctagaaaattcacaaatattttgctcaagttcaggctctctcagcttctcttttctctttaacttttgcctcatacagaggcaatcttgatgacaaaagatt

SEQ ID NO: 361345 - DNA, 120 bp, Artificial Sequence
  ENSG00000140538_122 (sequence is synthesized)
gggctcaatttttgtttttcttgtgtagaaaagcaacacctctgtttcggactactgttcagtagacaaaaagcatcccagctttcgaaatgagagtccaaattgggttaccactgagat

SEQ ID NO: 361346 - DNA, 120 bp, Artificial Sequence
  ENSG00000140538_123 (sequence is synthesized)
tttaaattatgatgtgaaattggagaaggtgaactgtacagggccagacaaataatagagcccactctctgggcagttgcatgcagtcttgctgggtgctgagctgagagactgagagcc

SEQ ID NO: 361347 - DNA, 120 bp, Artificial Sequence
  ENSG00000140538_124 (sequence is synthesized)
gcttttgagacgtgttttgaggcatatcttccttaaatttttgctggtgtctgttttttagaagttttgccattagcatttttcactttgagtatctagccatggagaatgctctaaaaa

SEQ ID NO: 361348 - DNA, 120 bp, Artificial Sequence
  ENSG00000140538_125 (sequence is synthesized)
atacaaggagacagggggatgctttatctatttggcttagtcactggttcagggtgaagtttcataatttattctgataatctggaggggatgacctccttcacagtactgttaaagcct

SEQ ID NO: 361349 - DNA, 120 bp, Artificial Sequence
  ENSG00000140538_126 (sequence is synthesized)
tccttgaacaagctcatttcactatataacttcctaaagacaaggctgattatttaaggatttcagagatatcatttggggaataactcaccaggtagagaaagtttgacctgatatgtt

SEQ ID NO: 361350 - DNA, 120 bp, Artificial Sequence
  ENSG00000140538_127 (sequence is synthesized)
aacaggcacaacaagaacttatttcaatgctttctcaccatctgccccttctctgagagtttagcctttcttaggatacttccttttccaggctagaaaagattgattgtattcatatcc

SEQ ID NO: 361351 - DNA, 120 bp, Artificial Sequence
  ENSG00000140538_128 (sequence is synthesized)
caaagtaaaggctcctccaattctatcagatgtggaggcaacagaaaatgactcatgttatttttctctcacttcacagcatcaagaactcttcttgtttatgtgggggccatggtggat

SEQ ID NO: 361352 - DNA, 120 bp, Artificial Sequence
  ENSG00000140538_129 (sequence is synthesized)
tagcttgaggaactgtcaaattaaaatgaaaggaaagcaagttggggcaagaaaattctcactctgaatgtgaaagaaaatagcagtgttcttctctctggcaaagatttgtgtactgtt

SEQ ID NO: 361353 - DNA, 85 bp, Artificial Sequence
  ENSG00000140538_130 (sequence is synthesized)
tagcagtgttcttctctctggcaaagatttgtgtactgttgggggaagattcatgttatttctcaggtagactttactttttgag

SEQ ID NO: 361354 - DNA, 120 bp, Artificial Sequence
  ENSG00000140538_131 (sequence is synthesized)
gcagatagaatgtagttgtttatgagtttatactttctctttagcataatagatgccctgtttattttctcagaatgtgacaataaaattaggaaaggagaggaattcagaggcccatgt

SEQ ID NO: 361355 - DNA, 120 bp, Artificial Sequence
  ENSG00000140538_132 (sequence is synthesized)
tgcagttcatggcaaagttttacccaaatatttccttcagaaacatttagtcatagcaagccatataaattattgtctgcaactggtatcagaaaaagaaatcagtaggtggggactgta

SEQ ID NO: 361356 - DNA, 120 bp, Artificial Sequence
  ENSG00000140538_133 (sequence is synthesized)
gaccccaatggtgcatctgtttacaatctttcttttccaaggttttaaggttcatgaataacatgagggaattttgggagagctaccacatcagtactttggcacgcattaactgttcca

SEQ ID NO: 361357 - DNA, 120 bp, Artificial Sequence
  ENSG00000140538_134 (sequence is synthesized)
caggaaaactagggttgcttcagggctatttttgtttgaaatgacacacatacaaaaaaaaaaaaagacttttggaacatgttttgaggcctgtcacctgaaatcagcctttgctgaaag

SEQ ID NO: 361358 - DNA, 120 bp, Artificial Sequence
  ENSG00000140538_135 (sequence is synthesized)
agtatttagtttgataagcgggatttcttgcttctcgcatcccagagtgtaaattctgcagcgaagcctgggtgtatgttttcagcaccagggacagcaaacaaccccctgaattgaagg

SEQ ID NO: 361359 - DNA, 120 bp, Artificial Sequence
  ENSG00000140538_136 (sequence is synthesized)
ggcccgctatcctgattgacctcccagactaggaagggcagttgttttgttttcctttatttcctatctaccggagcctcaacttggaagactttattcttaaggttcttacatctttca

SEQ ID NO: 361360 - DNA, 120 bp, Artificial Sequence
  ENSG00000140538_137 (sequence is synthesized)
tttattaccaagcctagcttagctgtctctgtcacattcttgacctcctaacaaatgggtttggagtaacactcccagctctcctggctcagagaagtagaaagaaacacactagacttc

SEQ ID NO: 361361 - DNA, 120 bp, Artificial Sequence
  ENSG00000140538_138 (sequence is synthesized)
atttgaagggcatgctttagagtaggctccccctacacaagtctttataacataccactgacttgtaaacccctaaatgaaggactgcttatacacaatcattttccttttaacatttct

SEQ ID NO: 361362 - DNA, 120 bp, Artificial Sequence
  ENSG00000140538_139 (sequence is synthesized)
gcacatttctcacaatgtacaagtctatgtttgactcagtgtgcatctggaggcaatgtttcacagcagttgagcagaagctatgaagtttggggacagaaaaggtcccagtgatgctgc

SEQ ID NO: 361363 - DNA, 120 bp, Artificial Sequence
  ENSG00000140538_140 (sequence is synthesized)
tgttattcattttggagactcattgggggcacttctctgattctcagcatccacccttcaaccctgagtgctctttaacagctgtttttgccttaaacaatcacaataagaatgcaaatg

SEQ ID NO: 361364 - DNA, 120 bp, Artificial Sequence
  ENSG00000140538_141 (sequence is synthesized)
actccttgtggcattcttcaggccagactgaagggtgtactgagaaaacaagggtagcagaagcacatgttgtcacattgctttgtgattggccagtttttatatagcacaatgacacac

SEQ ID NO: 361365 - DNA, 120 bp, Artificial Sequence
  ENSG00000140538_142 (sequence is synthesized)
agatatcatcttagagtcatcattgtctactcttaactaattgtcagcatcttctccactcatgtcaggatgaatcctgtgttgggaaggcaagtcagtcactgcaggtttcatcataaa

SEQ ID NO: 361366 - DNA, 120 bp, Artificial Sequence
  ENSG00000140538_143 (sequence is synthesized)
tattgccttctatctgacagatgttagaaaacctccattttgaatgcctctgtaccatccaaggctctgaatttcccctatatcttatccctttctttccattccctttccatgttgctt

SEQ ID NO: 361367 - DNA, 120 bp, Artificial Sequence
  ENSG00000140538_144 (sequence is synthesized)
atcataacatccataacatttagtggtgtaagaaaataaggggtttcttttaggaataaatgaggtggaaaaagtaggacagagccagatctcagaggagcaagttcagtggaacgatga

SEQ ID NO: 361368 - DNA, 120 bp, Artificial Sequence
  ENSG00000140538_145 (sequence is synthesized)
tttctaacttgggagtgggtctaagatgtagccatccattccttccattccttgtcctcttgagtgaatctcattccagtgctcacacttgccctgcaaaaaaggccatggcacaagatt

SEQ ID NO: 361369 - DNA, 120 bp, Artificial Sequence
  ENSG00000140538_146 (sequence is synthesized)
ctctagattatttgtatgaagactggaggtgagcagcatccaacacctctgttagagttctttagaatagaggagttttgtcttatattttaatccaggaaccttcccatatttaaaaag

SEQ ID NO: 361370 - DNA, 120 bp, Artificial Sequence
  ENSG00000140538_147 (sequence is synthesized)
tttagaaataatatgtacagaaaggacctatggggataggaaagcttaataatacaagttattttcccttagaacagaggggaaggagctgcaaagtgactgctaatggaggaacgatct

SEQ ID NO: 361371 - DNA, 120 bp, Artificial Sequence
  ENSG00000140538_148 (sequence is synthesized)
gctggctgggggaaatgtggcctgagactagagatgcagagcaggcatctctagaaggagagatgatgccaatagaagccccaggagggaactggccagcgaatacaattttataaagat

SEQ ID NO: 361372 - DNA, 120 bp, Artificial Sequence
  ENSG00000140538_149 (sequence is synthesized)
tctcagtactttttctgaaaaaattcctaaaattttcaagggcgcgtctagccctctgcctctttagaggtgagctcagtgctacttctgggttcttaaggcaaatgccctacaaacacc

SEQ ID NO: 361373 - DNA, 120 bp, Artificial Sequence
  ENSG00000140538_150 (sequence is synthesized)
aaagtcttgtattttccactctcagccggcactggctaagtgggattttttttttcccttccctaagtgaaagggacttgttttcaggagaagtgtcctttaaacatccagctaaaactg

SEQ ID NO: 361374 - DNA, 120 bp, Artificial Sequence
  ENSG00000140538_151 (sequence is synthesized)
gaagtaattttttgcatgaatggctttttacagctaggtctacagcagaacaaaacttgtattaaactaagtgctactttacatatcttatttcaagggaaatgaaggatttattgtcgt

SEQ ID NO: 361375 - DNA, 120 bp, Artificial Sequence
  ENSG00000140538_152 (sequence is synthesized)
gtaaatgatatacactgatttgtttcctactggacattacatgtccctttatctctaggctgatgttgtgcagcaaactttcaatatctggaaaatcagctggtacctacttcagtgcat

SEQ ID NO: 361376 - DNA, 120 bp, Artificial Sequence
  ENSG00000140538_153 (sequence is synthesized)
tattaggatattacgttccctgagaggaattttgccaatgaagtttaggtactgttgtaactgatttccatcccccctccctaagcttctgtactaagtatatgtaaagctattatatct

SEQ ID NO: 361377 - DNA, 120 bp, Artificial Sequence
  ENSG00000140538_154 (sequence is synthesized)
tgtctgatcccatgtgttcatgtgtgtttcccaatgtttgcataaatatattggcaatctgaagggttagctggcttatggcaactgctgaacaatggtatgtttggcatgtgggacacc

SEQ ID NO: 361378 - DNA, 120 bp, Artificial Sequence
  ENSG00000140538_155 (sequence is synthesized)
tgatacctgggcacacctgttctgaggccaagctaattttacagattttggaaaagaaaaaacagcagcaacaacaacagtgtggcttgaattaaggaaagtttaacaatgaatacagta

SEQ ID NO: 361379 - DNA, 120 bp, Artificial Sequence
  ENSG00000140538_156 (sequence is synthesized)
ttgccaagtcatcatttatgggtggagacgttgaccacagcagttgaggtgctttcaactggatcttatgccctttattttaatcccaattgatagttcctcatttgtattttatgactt

SEQ ID NO: 361380 - DNA, 120 bp, Artificial Sequence
  ENSG00000140538_157 (sequence is synthesized)
agaaatactcctacgtgatgctcgtttgtttttctcccaggcttctggaaagtgctgatcatgattgcttcctatcatttggatcccaaagttgataacttaacataagtgactgaggtt

SEQ ID NO: 361381 - DNA, 120 bp, Artificial Sequence
  ENSG00000140538_158 (sequence is synthesized)
ttagtagaactgggttttactaatcgtatctcctccttgaggtgctgttcccttcattcctttcctttatgacaggtgaatgcattggctatgctgattttatttgcatcctggcgagtc

SEQ ID NO: 361382 - DNA, 120 bp, Artificial Sequence
  ENSG00000140538_159 (sequence is synthesized)
ttggagaatcaatctcgttaaaatgatgactgcatttgcctttggagaagaggtttattgtctaagtaaaactcttatgtgaaggtgtcatttatgtaaaaaaaaaaaaaaattctaact

SEQ ID NO: 361383 - DNA, 120 bp, Artificial Sequence
  ENSG00000140538_160 (sequence is synthesized)
tgataagatggccacaggttagaggggtgtgttctcagttgatattaagggatatgttgaaaaggcaagtgcccaccctctattcttcatctcacccttcctttctccccaacctcaaaa

SEQ ID NO: 361384 - DNA, 120 bp, Artificial Sequence
  ENSG00000140538_161 (sequence is synthesized)
gaaaacaaaaaattatttttttaaattgtattagtaatttatgtttaatacaaaaggatgatttaatggtatcaccaaaggttgtttctcccattgtgcatgtccttcagtctcggcccc

SEQ ID NO: 361385 - DNA, 120 bp, Artificial Sequence
  ENSG00000140538_162 (sequence is synthesized)
atacccatcaccccattcttcaccctcatgcttccatcccaaggcaaacatgtgtcttcatcggaatctatgggtgttgaagttaaatgtgggggcagagatttaacaccatgacactaa

SEQ ID NO: 361386 - DNA, 120 bp, Artificial Sequence
  ENSG00000140538_163 (sequence is synthesized)
tacaaatcaaccattcttcactttcaaatggttaatcactacaggaaggcgaactcttttcttggtttttgtttaaaaacattttatacatatatatgtatatatgtgtgtgtatgtatg

SEQ ID NO: 361387 - DNA, 120 bp, Artificial Sequence
  ENSG00000140538_164 (sequence is synthesized)
gacataggtatgtatatgcacatgtacatgtatatatgtatatatccatcttcaatataaatatatcataagtgagagttgtaaatactccttggtcatatgtctgtctttctcatagta

SEQ ID NO: 361388 - DNA, 120 bp, Artificial Sequence
  ENSG00000140538_165 (sequence is synthesized)
tcatatcttcaatgttatgttaacaactccatttattgattgatgaaatcgtgtgtagacctgtatcctcctgacatagtttatgtagggtctcttctcaaataaagtataaaacaacaa

SEQ ID NO: 361389 - DNA, 120 bp, Artificial Sequence
  ENSG00000140538_166 (sequence is synthesized)
tgtccagagatgtctacagcacggattattacaggctctttaatccatctggaaatgatttttgtatatggtgtgaggtgggaggacacaccatgctccccattcgctggatgcctcctg

SEQ ID NO: 361390 - DNA, 120 bp, Artificial Sequence
  ENSG00000140538_167 (sequence is synthesized)
ctccacattttgacggctttccctggttctgtgaattccttccaagttgctgccatctttctactaataagctgcccaatacactgtaccggtcacctccctggagcctctcacagcctc

SEQ ID NO: 361391 - DNA, 120 bp, Artificial Sequence
  ENSG00000140538_168 (sequence is synthesized)
ctggatgatcttcagcctctattctggaaaaaccaaggcttacacaccacccactacaatgctctttcagccctgtgctctccaggtggccttggctgttacatcttgtcgttcatcacc

SEQ ID NO: 361392 - DNA, 120 bp, Artificial Sequence
  ENSG00000140538_169 (sequence is synthesized)
ggggccctctgctcaagaaaagaaactgcattttatcataagttctgttgtttaccgtctcctgatggcctggagcttttggctgtcttgcttaaatgtgactcaaagcagttaaaaaat

SEQ ID NO: 361393 - DNA, 120 bp, Artificial Sequence
  ENSG00000140538_170 (sequence is synthesized)
aaagaaggaaataaaatgaaaaacaacaacggaaagaagaaaagggcaacctcagcctgatgaaagacttggaagagtgagacctctccctctccggaataaattgctagttgcctttca

SEQ ID NO: 361394 - DNA, 120 bp, Artificial Sequence
  ENSG00000140538_171 (sequence is synthesized)
actcagccacagagctagcgccttgcttacatgtctttttcattgtccattaaccctgtcactctggcacacacatatacacacccatgcccagacatgcactcaacagttatcttttgg

SEQ ID NO: 361395 - DNA, 120 bp, Artificial Sequence
  ENSG00000140538_172 (sequence is synthesized)
ttgtgttcttacgtgcttcaatactcattcttcatgtaaacatactcatacatgtatatgtatgtgcccaaacacacacacagacacacccaacttgatactacatttaatgtctcccta

SEQ ID NO: 361396 - DNA, 120 bp, Artificial Sequence
  ENSG00000140538_173 (sequence is synthesized)
cccagtcccagatctagcctcacccatgacacattttattctctgaaattatcttgtgattatgtaagaattatcttgtttccaaaagtagatcttgatgagaagaggaaacctaagtaa

SEQ ID NO: 361397 - DNA, 120 bp, Artificial Sequence
  ENSG00000140538_174 (sequence is synthesized)
agtaacaaagatggctaatatattgctgagcattatccaaatgggctggaacagatgaggaaaggaagcatgttatctgttgccaactttggagagaggacaggttagatcttagaaaag

SEQ ID NO: 361398 - DNA, 120 bp, Artificial Sequence
  ENSG00000140538_175 (sequence is synthesized)
ctttctgattgtgagaagatccatcctgctcagttttaccttcatatagtcatctgctttacattaacaagagtcttattttgctcctagaatctttttttttccctaagtctttgggaa

SEQ ID NO: 361399 - DNA, 120 bp, Artificial Sequence
  ENSG00000140538_176 (sequence is synthesized)
tctttttttccatggattattgactgattctgatagtgttattatttccagggaaaggatgaatggccatgagtgtcacttatctcagcaaggggaagtatgagtgcaacctgagacaca

SEQ ID NO: 361400 - DNA, 120 bp, Artificial Sequence
  ENSG00000140538_177 (sequence is synthesized)
tcagcaaggggaagtatgagtgcaacctgagacacagagataacttctgcaaactgagtgagggcagattgctaaaaaatacagaagatccaaggctgggagtggtggctcatgcctgta

SEQ ID NO: 361401 - DNA, 120 bp, Artificial Sequence
  ENSG00000140538_178 (sequence is synthesized)
acaaaaaatctatttttgggacatcaaaggaaagaggagtttggatagacattataaggagagtgtgggacaatgttttggaggtcaagggatgtcatattccttttcagctgttataac

SEQ ID NO: 361402 - DNA, 120 bp, Artificial Sequence
  ENSG00000140538_179 (sequence is synthesized)
aaataccgcagatgggataggttacaaaaaactgaagtttatttctcatggttctggaggatgggaattccaagatcaaggtgcaaacaaattaattgtctggtaaaggtctgcttcctc

SEQ ID NO: 361403 - DNA, 120 bp, Artificial Sequence
  ENSG00000140538_180 (sequence is synthesized)
atttatagatggccatctgcttgctgtgtcttctccatatggcagaagggttaacagatctctctggcatctcttccatatgaatgcattgccctcataacctagtaacttcccaaaggc

SEQ ID NO: 361404 - DNA, 120 bp, Artificial Sequence
  ENSG00000140538_181 (sequence is synthesized)
ctcacgtcctaacaccattaccttggggctgtttcaacatatgaatttggggggtacacaaacattcagtgtattgccaggatcatggcagccaattgtctcatctttggagaaatgagt

SEQ ID NO: 361405 - DNA, 120 bp, Artificial Sequence
  ENSG00000140538_182 (sequence is synthesized)
gatcataccgtgagtcaaatagatatgattgtcctgttgacctgagcatagtggaccagaggctgggaatttgaggtgtgtgcaggtcagttctatcttgatgttcctgatggcctaaat

SEQ ID NO: 361406 - DNA, 120 bp, Artificial Sequence
  ENSG00000140538_183 (sequence is synthesized)
gagatcactcagacgttaaaacagatcagtcaagatacttcattttagcaataggttggagaaaaatggaatgtttgagaaatgaccttggttgttagaaaatgacttgtttgttgtgca

SEQ ID NO: 361407 - DNA, 120 bp, Artificial Sequence
  ENSG00000140538_184 (sequence is synthesized)
accaaagaatggcagatgatgtaccgttgtgagagaatataagacaaagcatacagtgtccacagcaagctgggtagcctcactagccacctgtcctatccagtattcccaggtatggaa

SEQ ID NO: 361408 - DNA, 120 bp, Artificial Sequence
  ENSG00000140538_185 (sequence is synthesized)
aaggagacatgatgtggcagtagtcatagaccgatggccagggcagacctgccagaaaatatcaaagaggagtctttctttagtgtctagaccatattttttattcatttccaagagagg

SEQ ID NO: 361409 - DNA, 120 bp, Artificial Sequence
  ENSG00000140538_186 (sequence is synthesized)
cattggtgtggttactaagagggggatgggtcatagatttcttagagtggggctggagctggcatcatttaattgcctttccactttgtttaatggggtttgctggtctgtctgactgtg

SEQ ID NO: 361410 - DNA, 120 bp, Artificial Sequence
  ENSG00000140538_187 (sequence is synthesized)
ctcagatctatgtaggtgttgatgaaaacaagggatggctcattgtttttctctgtgaaaggcagatgtttgattatgccaagctgataactactgacttcactggagtctcaggaaact

SEQ ID NO: 361411 - DNA, 120 bp, Artificial Sequence
  ENSG00000140538_188 (sequence is synthesized)
atgtctgaccagaatgtgctaactggcccttcaaacttgcttctagatgtgctgttaatatttattgaaactagtttaaaagaggaaaaacaaaaaataaaaagatcacatccccaattg

SEQ ID NO: 361412 - DNA, 120 bp, Artificial Sequence
  ENSG00000140538_189 (sequence is synthesized)
gttggacttgctgcttttgcctgtgtcctgttggtggttctcttcgtcatgatcaacaaatatggtcgacggtccaaatttggaatgaagggtgagctgtcttgactgggctgatgctgg

SEQ ID NO: 361413 - DNA, 120 bp, Artificial Sequence
  ENSG00000140538_190 (sequence is synthesized)
ccatgatggcttcctgctgtggcccagccagcactgcccgctttccctctcttgctcctcagcctggcagtccttattagcctctcccccaaaagccaggttgccaaacctctcagcctt

SEQ ID NO: 361414 - DNA, 120 bp, Artificial Sequence
  ENSG00000140538_191 (sequence is synthesized)
caagtgcccatcatacctctgccctcttggtacaacttccctgaattcttcaaaccaagggtgtctcatcaaattgtgcattaactgtgttacaataagaataaactgtgtttatttcta

SEQ ID NO: 361415 - DNA, 120 bp, Artificial Sequence
  ENSG00000140538_192 (sequence is synthesized)
gaacctgaggtccagagtggggaagtgtcttacccaaggtcacatggtttcagagaaattatgttgaatccaataagccttcccggacattccaagcctcttaaccatggcatctatgtt

SEQ ID NO: 361416 - DNA, 120 bp, Artificial Sequence
  ENSG00000140538_193 (sequence is synthesized)
tggaagctctaggcattgttctctttggatccagggatgctaagtagaaactgcatgagccaccagtgccccggcaccctttaacaccaccagatgggtgttttcccccatccaccactg

SEQ ID NO: 361417 - DNA, 120 bp, Artificial Sequence
  ENSG00000140538_194 (sequence is synthesized)
gcagggttgccccttccctccaatcatcactgtgctccttttttcccggcctacgaggcagctcctgccactatctttagagccaataaagagaattaaaaacctgtgcaccaggagcat

SEQ ID NO: 361418 - DNA, 120 bp, Artificial Sequence
  ENSG00000140538_195 (sequence is synthesized)
cttttaaatacactagccattctcttgctttacaaaaacaacctaaccatcacaagaaagcctgatgaagtccagccgtgctccagcctcactttccctgcttggaagcgtggggtctcc

SEQ ID NO: 361419 - DNA, 120 bp, Artificial Sequence
  ENSG00000140538_196 (sequence is synthesized)
ctggctctcccaggataccatgctgtcctcttagtgacctcgtcgccctgcaacctccagtggggaagagtcacagagagcacctaagcagaggtggagacggcgcggtaagaggagggg

SEQ ID NO: 361420 - DNA, 120 bp, Artificial Sequence
  ENSG00000140538_197 (sequence is synthesized)
gagccaggctcaagtattggcaccaagttaggtctcagaggaaagaatggaaaccaatcactttacatttttatttttattttcggtggaaaaatcatccttttttgggacatacttgcc

SEQ ID NO: 361421 - DNA, 120 bp, Artificial Sequence
  ENSG00000140538_198 (sequence is synthesized)
ccctacttcctcttctctctggaacggctcacaatgagtgtgacattagaaaactccttgcagaggagagtttctccaggctcttcctgggcccttagatctgcagttccgacaagcttt

SEQ ID NO: 361422 - DNA, 120 bp, Artificial Sequence
  ENSG00000140538_199 (sequence is synthesized)
ggctgcaggaggttttacccatgaactggccatcctactaggaccacaagggaccaagggaatcagggacaaaggcccttcctgccagcccatgatcccgggattggctctcttccccta

SEQ ID NO: 361423 - DNA, 120 bp, Artificial Sequence
  ENSG00000140538_200 (sequence is synthesized)
cttccacttattcttgactctgagaacttttggaacccaatggaatcagcatttcaaggtcaagatgaactgaaggggaagagaagtaaaacttggcctcctccagcccctctcatggca

SEQ ID NO: 361424 - DNA, 120 bp, Artificial Sequence
  ENSG00000140538_201 (sequence is synthesized)
ccaatggaagtgtcctcctgttctctggtcaatatgtgtgtttactttgcttgctttgactcatgccttactccatggccaccctctcccaaagagggggctcgcttcccccattttcaa

SEQ ID NO: 361425 - DNA, 120 bp, Artificial Sequence
  ENSG00000140538_202 (sequence is synthesized)
cttgatccactgaggagagggaagggggtgactttcccttcttcagtaggaaaggcacatttgtagggcctgaaactctcccgtatttgctgactcattggtggagtagacttctggctc

SEQ ID NO: 361426 - DNA, 120 bp, Artificial Sequence
  ENSG00000140538_203 (sequence is synthesized)
ccagctccactggcccatggggcctccattgtatgaagtcagcataggctgcccacctaatggtggagagcatgaaactgggagcatcctgtggggggcttgtgggggaaaaaggtggtt

SEQ ID NO: 361427 - DNA, 120 bp, Artificial Sequence
  ENSG00000140538_204 (sequence is synthesized)
gttttaacccaccgttgttttggggtggtgttgcacactagtagagaatagagtctatgcctttggcaaatttaactgggagtttggattcccacttaagggttttacttcttgggtcct

SEQ ID NO: 361428 - DNA, 120 bp, Artificial Sequence
  ENSG00000140538_205 (sequence is synthesized)
gtggatggtggttcttcgtgtcaggatcccagcccgattctgcaaatgcctccatggggtttaaaaacatgaggctttccaagttcttgcccagtatctggggcagcctccagagtatca

SEQ ID NO: 361429 - DNA, 120 bp, Artificial Sequence
  ENSG00000140538_206 (sequence is synthesized)
cctgggagttcaggttctctccagggctccaggtgtgtgtttatctcgccccctccagctctcctcatcctgctccccattgctccatgtcaggctgttccccattgtgccctgctgatg

SEQ ID NO: 361430 - DNA, 120 bp, Artificial Sequence
  ENSG00000140538_207 (sequence is synthesized)
ctttgggtccagggcctcctcccaagtgtggctttaaggagtaagcttgaggatgatgttttttaattattgtaaatcattacctcatttccagcctcccaggctccatccatcccagca

SEQ ID NO: 361431 - DNA, 120 bp, Artificial Sequence
  ENSG00000140538_208 (sequence is synthesized)
tcttttattctgccattttcctcaccttgtgctatgacaatggggcgttgtgtttccacagagacttataggagtgttcagtgtatagtttcttaataaacactttattttctaatgaaa

SEQ ID NO: 361432 - DNA, 120 bp, Artificial Sequence
  ENSG00000140538_209 (sequence is synthesized)
attaagctgtccacattcataaggcacactccaggtctgcaggagggagcatgagggattcaggggacgcccttgtcccctgtacacacctaggggccggttcgactacagtagacacat

SEQ ID NO: 361433 - DNA, 120 bp, Artificial Sequence
  ENSG00000140538_210 (sequence is synthesized)
gccccataagaaaattctgagacgttgaagcatgcttatattggattctgtcctcgggaaaggagaggaaaaggctgaaggagaccattgaatctggtgttgagtcattcacgtctctct

SEQ ID NO: 361434 - DNA, 120 bp, Artificial Sequence
  ENSG00000140538_211 (sequence is synthesized)
actcctgtggagggcccttacggatgtgtcataacaggatctccttttccttcctcaagtgcaaaaggccttttttttttttttcctgagacaaactgaatatataacataaaaagatac

SEQ ID NO: 361435 - DNA, 120 bp, Artificial Sequence
  ENSG00000140538_212 (sequence is synthesized)
tcaatggccacttcctcaaggagccctttccaggttgtggtgaagattaatttacagaaggggcgcttcttgaagagttatggtctgggactgtaggagacatgtgtattcccttcatgg

SEQ ID NO: 361436 - DNA, 120 bp, Artificial Sequence
  ENSG00000140538_213 (sequence is synthesized)
aaagaaagctcctaggtgcctctgcactactgtcatacatgataaaagggaagagaaagaagatagtaggagggaaataaagagtgagagcctagagtaaagataaggagtggaagaagc

SEQ ID NO: 361437 - DNA, 120 bp, Artificial Sequence
  ENSG00000140538_214 (sequence is synthesized)
gctttgctaggccaggcctacctggggctgggttggagtggtatggtctttagctgttagaaagaagatgaagtgggagaggatggcatggctggaccagcaccatgaggacacatagaa

SEQ ID NO: 361438 - DNA, 120 bp, Artificial Sequence
  ENSG00000140538_215 (sequence is synthesized)
gagggtatttacagctggatgtgacctgccgggtggcctccccagatcctatgtggacagtgtctgtactgcattggctggcaagatagagtttgaagacacatagagaactggcgcagt

SEQ ID NO: 361439 - DNA, 120 bp, Artificial Sequence
  ENSG00000140543_0 (sequence is synthesized)
ggtggctggcggaaacgggaacgtgcagccgcgggtgcaggagtcctggggcatggcgggggcggggcagggggaggcgcgcacagaacaggctggggcatccctcgccctggctctttg

SEQ ID NO: 361440 - DNA, 120 bp, Artificial Sequence
  ENSG00000140543_1 (sequence is synthesized)
agcccggaccagacagagatgtgataatggatcatcatgtttctaccatcaagcctcgaagaatccaaaaccaaaatgtcattcaccgcttggaacgccggcggatcagttcaggcaagg

SEQ ID NO: 361441 - DNA, 120 bp, Artificial Sequence
  ENSG00000140543_2 (sequence is synthesized)
caggtacccactggcaccaagtccgagtgttccatcagaatgtcttccccaacttcacagttgtcaacgttgaaaagcctccttgtttcttgcgtaaattctcacctgatggacgctact

SEQ ID NO: 361442 - DNA, 120 bp, Artificial Sequence
  ENSG00000140543_3 (sequence is synthesized)
ttattgctttttcttcagaccagacatctcttgaaatctatgagtaccagggctgccaggcagcagaggacctactgcagggatacgaaggagaaatcctgtccaatggcaatgaccagc

SEQ ID NO: 361443 - DNA, 120 bp, Artificial Sequence
  ENSG00000140543_4 (sequence is synthesized)
ggtcagtgaatatccggggccggctctttgaacgcttttttgtcctgctgcacattaccaatgttgcggccaatggtgagcacctgaaccgggagtgtagtctcttcactgatgactgcc

SEQ ID NO: 361444 - DNA, 120 bp, Artificial Sequence
  ENSG00000140543_5 (sequence is synthesized)
gctgtgtcatcgtgggctcagctgcctacctcccagatgagcctcaccctccattttttgaggtatatcggaacagtgaatcagtgacccccaacccacggtcccctctagaagactatt

SEQ ID NO: 361445 - DNA, 120 bp, Artificial Sequence
  ENSG00000140543_6 (sequence is synthesized)
ccctccatatcattgaccttcacaccggccgcttatgtgatacacgcacgttcaagtgtgacaaggtggtcttgtcacacaaccaagggctgtacttgtacaaaaacatcctggccatct

SEQ ID NO: 361446 - DNA, 120 bp, Artificial Sequence
  ENSG00000140543_7 (sequence is synthesized)
tgtctgtgcaacaacagaccatccatgtcttccaggtgactcctgaaggcactttcattgatgtgcggaccattggccgcttttgctatgaggatgacctgctcactgtgtcagctgttt

SEQ ID NO: 361447 - DNA, 120 bp, Artificial Sequence
  ENSG00000140543_8 (sequence is synthesized)
tccctgaggtacagcgggacagtcagacaggcatggccaatccctttagggatcctttcatcaattccctcaaacaccggttgctggtatatttgtggcgccgggcagaacaggatggta

SEQ ID NO: 361448 - DNA, 120 bp, Artificial Sequence
  ENSG00000140543_9 (sequence is synthesized)
agtgaggatgtagtaacactgcgagtcacagatccatcacaggcatctttctttgtggtgtacaatatggtgacgacagaggtgattgctgtgtttgagaatacatcagatgagcttttg

SEQ ID NO: 361449 - DNA, 120 bp, Artificial Sequence
  ENSG00000140543_10 (sequence is synthesized)
gagctctttgagaacttctgtgacctttttcgtaatgctaccctgcacagtgaagttcagtttccctgctcagcttctagcaacaattttgcaaggcagatccagcgccggttcaaagac

SEQ ID NO: 361450 - DNA, 120 bp, Artificial Sequence
  ENSG00000140543_11 (sequence is synthesized)
actattataaatgccaagtatggagggcacacagaggcagtacgccggctgctgggtcagctccccatcagtgctcagtcttacagcggtagcccctatctggatttgtctctcttcagt

SEQ ID NO: 361451 - DNA, 120 bp, Artificial Sequence
  ENSG00000140543_12 (sequence is synthesized)
tatgatgacaagtgggtatctgtcatggagcggcccaagacttgtggagatcacccaatcaggttctatgcccgggactcgggcctgctcaagtttgagatccaggcggggttattgggc

SEQ ID NO: 361452 - DNA, 120 bp, Artificial Sequence
  ENSG00000140543_13 (sequence is synthesized)
cgccccatcaaccacacagtgcgacgccttgttgccttcacctttcacccttttgagcctttcgctatttctgtgcagaggactaatgctgagtatgttgtcaacttccatatgcgacac

SEQ ID NO: 361453 - DNA, 120 bp, Artificial Sequence
  ENSG00000140543_14 (sequence is synthesized)
tgctgcacgtaggtgcctcaccagagccagattatctggtcttccaagactttgccactcacttatctcagtggactccaaagcaaaagctcccgactactagctctgttagttccagcc

SEQ ID NO: 361454 - DNA, 120 bp, Artificial Sequence
  ENSG00000140543_15 (sequence is synthesized)
tgctatacctcagatgggagagagccagagagaggagtgagggtggctcaacctaatggaatttttaaattgtatacaatactgctactgattgttataatatcctcttgcgttttccct

SEQ ID NO: 361455 - DNA, 120 bp, Artificial Sequence
  ENSG00000140543_16 (sequence is synthesized)
gtgggaatgcccagcattaattaagtccatttcatttttgctttactttgcatttgattgctgtgaagatgaaagcattagacttttatccccttcatgtcacttcttcggcattatggt

SEQ ID NO: 361456 - DNA, 120 bp, Artificial Sequence
  ENSG00000140543_17 (sequence is synthesized)
ttgcatctgaaagcagttaaatcttgtttactgatgagaatgacatacatcctttccatttagctcataagcacggctatctttttaagagaaaaataaagccatggtattttcatactt

SEQ ID NO: 361457 - DNA, 120 bp, Artificial Sequence
  ENSG00000140543_18 (sequence is synthesized)
tactatgggccagatgctatgccaagcaccttatataggaaagtatttgcatttcatgaattttgagatgcagtttttgaaactggagtgtatcttaaagttggtgtcttctcagtgtca

SEQ ID NO: 361458 - DNA, 120 bp, Artificial Sequence
  ENSG00000140543_19 (sequence is synthesized)
gcaaggcagcagttgcaacattgctgttctcgtcgcctgtggatgtgcaaactgggtgtgctcttcccattgtcatcatttttgttgagtaatgtgcattgttgataaccacatgtgttc

SEQ ID NO: 361459 - DNA, 120 bp, Artificial Sequence
  ENSG00000140543_20 (sequence is synthesized)
agtgtaagcgctttttaagatgccttcaaaaacattatactgtgatttggtattataataaaaggtggttttatactcagaaaggcagagcagtggggttaatttgatattagtaaagca

SEQ ID NO: 361460 - DNA, 120 bp, Artificial Sequence
  ENSG00000140543_21 (sequence is synthesized)
cagatttgccattggaggaatgaacatgattttttacaaagcaggaggtgtttttttggaactaagaaagaaagatacccactagtaaatgaagttttactgacatgctgagattcatgc

SEQ ID NO: 361461 - DNA, 120 bp, Artificial Sequence
  ENSG00000140543_22 (sequence is synthesized)
gaaaggattgcctatcaaacagcaaacaaggcgcaactaaaggagaagttgacccatcctttggaataaatggaagaagttttaatgtagtgagagacaccaattcatgcagagcacagg

SEQ ID NO: 361462 - DNA, 120 bp, Artificial Sequence
  ENSG00000140543_23 (sequence is synthesized)
actaatcattgagatgtgaatcgatttgttagatgcttcctgctgactttgaacaggagctgattaatttccagggacatgtgattcaatatagaaagaagtgaaactagaggttaagtc

SEQ ID NO: 361463 - DNA, 120 bp, Artificial Sequence
  ENSG00000140543_24 (sequence is synthesized)
gaataagaaacaaaatctgaaaaaggccaaaagcgctttttgaatacgtatatcttaaaggtactggcatttgtcttaatcaactatgggaaggcacacgcgaaatgactgtcatgaaga

SEQ ID NO: 361464 - DNA, 120 bp, Artificial Sequence
  ENSG00000140543_25 (sequence is synthesized)
aagaaatttgttatacgcataggtccctagaaattgaaggcgtggtatgcatgcagggccatgggtaagcacctggattggtcaggaggcagagggaacaggcgaaaacatggataagag

SEQ ID NO: 361465 - DNA, 120 bp, Artificial Sequence
  ENSG00000140543_26 (sequence is synthesized)
cctgtgttgtggtttctgcagaaattaatgtgccagacagcaggtaagcaggtttgggattgactaatttgaattttgatgggccctggggtctaggtgctatccctggttgtctggtac

SEQ ID NO: 361466 - DNA, 120 bp, Artificial Sequence
  ENSG00000140543_27 (sequence is synthesized)
ctggccctggggtgattagggctgagtgtgagagccctataaaaaggtgcttgaggtgtgggctctggattggttggtttgcatatgaaagacgtgttctcaggcaagttgtttgctatc

SEQ ID NO: 361467 - DNA, 120 bp, Artificial Sequence
  ENSG00000140543_28 (sequence is synthesized)
tccaggaattagcaaactctgggaggggcagtccagggtcagtacagccccaagatgtcaagtcatcagaaaacaaaaggcatggttaatataatataaaaatgattccaagcaataagc

SEQ ID NO: 361468 - DNA, 120 bp, Artificial Sequence
  ENSG00000140543_29 (sequence is synthesized)
attgtcatggtttaatttgttcttagagtgacagattgtggtagtcagcctctaagatggcctacagtgaccctaccttctatattcatgccctcccacatcgtatcatggttgattggc

SEQ ID NO: 361469 - DNA, 120 bp, Artificial Sequence
  ENSG00000140543_30 (sequence is synthesized)
atgaccaataaaacacagtagaagtgatgatgtgccactttcaaggcttatttataaaagacatttcaaggctaggcttttgcaccccgcccgcacccctggaatcattcagccgccata

SEQ ID NO: 361470 - DNA, 120 bp, Artificial Sequence
  ENSG00000140543_31 (sequence is synthesized)
tcacaagaacacacaggcaagctcctggagagatctccttgctgaggaactgaggcttcctgctgatagccatgtgaatgaaatatcctggaatccagtcctcccgcttcattcaagcct

SEQ ID NO: 361471 - DNA, 120 bp, Artificial Sequence
  ENSG00000140543_32 (sequence is synthesized)
atagatgacagcaacctcatgagaaactctgagccagaactgcccagctaagccactcccagattattgattctcagaaattgtgtaagataataaatgatttttttttttttaagacag

SEQ ID NO: 361472 - DNA, 120 bp, Artificial Sequence
  ENSG00000140543_33 (sequence is synthesized)
ggtctccttctgttgcccaggctggagtgtggtggcatgatcatggctcactgtagacctcctgggctcaaacgatcctcccgtctcagcctcctgagtggttgggaccacaggtacatg

SEQ ID NO: 361473 - DNA, 90 bp, Artificial Sequence
  ENSG00000140543_34 (sequence is synthesized)
ctcagcctcctgagtggttgggaccacaggtacatgtcaccatgcctggctaattgtttttaattttttgtagaaacagggccttcaggt

SEQ ID NO: 361474 - DNA, 120 bp, Artificial Sequence
  ENSG00000140543_35 (sequence is synthesized)
ttacaagcatgagccactgcgcctggccaataaatgctttaagctgctgaattttggaggtaatttgttgtgtagcaatatatagccaacacatacataaataaaggtgtctttttgcaa

SEQ ID NO: 361475 - DNA, 120 bp, Artificial Sequence
  ENSG00000140543_36 (sequence is synthesized)
tatggcatcctctgaaaaatgcagtattcctattttgtagataaggaaactgaccttagagagatcaagcaatttgctaaaagtaacattactggttaatgtcaagtaaactttaacctg

SEQ ID NO: 361476 - DNA, 120 bp, Artificial Sequence
  ENSG00000140543_37 (sequence is synthesized)
gcctatgtcagaattcatttaaatctctgaatttatttaggtctaaactggttattttactgatttctaaaaatattaatagggaaatttgatatttttgtgtctttgtatccatcttct

SEQ ID NO: 361477 - DNA, 120 bp, Artificial Sequence
  ENSG00000140543_38 (sequence is synthesized)
tccttgtaggtggatggcttagcaaagtattttttattaaaggttgacaatatatcccacataatttctctttctcctgtttttttctttaaatttattttattttattttttatttttt

SEQ ID NO: 361478 - DNA, 120 bp, Artificial Sequence
  ENSG00000140543_39 (sequence is synthesized)
tgagacagagtctcagtttgttgcccaggctggagtgtagtggtgagatctcagctcttgcaaccgccgcctcccagacttaagcgattctcatgccccagtctcccaagtagctgggat

SEQ ID NO: 361479 - DNA, 63 bp, Artificial Sequence
  ENSG00000140543_40 (sequence is synthesized)
taagcgattctcatgccatatttttagtagatactgggttttgccatgctggccaggctggtc

SEQ ID NO: 361480 - DNA, 120 bp, Artificial Sequence
  ENSG00000140543_41 (sequence is synthesized)
ccaaagtgctgggattacaggtgtgaccctggcctctttctccttcttaacactagtgtgttagttgacttgtgtgtttattcatatgttatacatttattgaggacctgctaagggcca

SEQ ID NO: 361481 - DNA, 120 bp, Artificial Sequence
  ENSG00000140543_42 (sequence is synthesized)
gggactaggaatagaagaatgtgtaaatcacagctctaacctttgcctttctagtctggtaatgtctctgaatgccgatctctctctctcttagaaagaggtgccttgtcctctctctca

SEQ ID NO: 361482 - DNA, 120 bp, Artificial Sequence
  ENSG00000140543_43 (sequence is synthesized)
actgtcccaccatcagtaagggaaccaggaaaccagtctttgagtatggagttaacaagaaagctgagtgttgggcggcttttttgtggaagctcactgcttatccatgtaatgtttcat

SEQ ID NO: 361483 - DNA, 120 bp, Artificial Sequence
  ENSG00000140543_44 (sequence is synthesized)
taattctttgatgctgaagtttcacctcctgcagggagcatttgcagcaccccaggcgagttgtcagcagttgctgcctggcagtagcacacattaactctagtgagcagaagtggagct

SEQ ID NO: 361484 - DNA, 120 bp, Artificial Sequence
  ENSG00000140543_45 (sequence is synthesized)
cgaaggctccccacactgctgcaccttgagctgctcttcctggcccagcctgttctgcttcctgggaccccagatctggtctccaagtactgtttctcttctaagtgtagtcattaactt

SEQ ID NO: 361485 - DNA, 120 bp, Artificial Sequence
  ENSG00000140543_46 (sequence is synthesized)
cccagagtgagaagaagagactaaaaaaaaagagagacagactgtctcttagttttaattaattgttgaaagaatagagaggggccatatttctactgaaagaaaggagaagttggggaa

SEQ ID NO: 361486 - DNA, 120 bp, Artificial Sequence
  ENSG00000140543_47 (sequence is synthesized)
tgggaatattctgaaccggaatgaaaaagtgaatgaaaggtaatctttagattcagtctctttgccctagtctttaaaagtttctgttgggggttatttgccctagtctttaaaagtttc

SEQ ID NO: 361487 - DNA, 120 bp, Artificial Sequence
  ENSG00000140543_48 (sequence is synthesized)
tgttgggggttacaaagtttgaaatctgtcttaaggagggatgtattactcaaaataaattgcctctatcattcagtgtgatatgatggacttggaaggggcaggattagaggaggtgag

SEQ ID NO: 361488 - DNA, 120 bp, Artificial Sequence
  ENSG00000140543_49 (sequence is synthesized)
ggataaaaatctacatattgtgtacagtgtatactactccagtgatagatgcactaaaatctcagccttcaccacagttcatgcatgtaaccaaaaccactgctaccccaaaagctgctg

SEQ ID NO: 361489 - DNA, 120 bp, Artificial Sequence
  ENSG00000140543_50 (sequence is synthesized)
gtgcagccgcgggtgcaggagtcctggggcatggcgggggcggggcagggggaggcgcgcacagaacaggctggggcatccctcgccctggctctttgagcccggaccagacaggtgctg

SEQ ID NO: 361490 - DNA, 120 bp, Artificial Sequence
  ENSG00000140543_51 (sequence is synthesized)
cttctcccatagggaaactgagacccagcaagggtaaaggacttagtaccacacagtgatgaactagatccttcccttagacctgtttctagacttagaaatgttaggaccacttactca

SEQ ID NO: 361491 - DNA, 120 bp, Artificial Sequence
  ENSG00000140543_52 (sequence is synthesized)
tttatgttcctatcatactcaatgctttcaagtacttgggttccaggaaggactgtgaaagagatgagaggccatggatgcagcagctgttcctgggagaactaagtgggacagtggaga

SEQ ID NO: 361492 - DNA, 120 bp, Artificial Sequence
  ENSG00000140543_53 (sequence is synthesized)
cagatgaaggaagggcagaaaaagaaaaatatactgtggaagagcactggagttggatcaatgggaatgtgttgtatgaccaagagttgaagatgtttcaaggagaggcccagcatatac

SEQ ID NO: 361493 - DNA, 120 bp, Artificial Sequence
  ENSG00000140543_54 (sequence is synthesized)
aaaggcatggaagtatgaaaatgggtctccttctgttgcccaggctggagtgtggtggcatgatcatggctcactgtagacctcctgggctcaaacgatcctcccgtctcagcctcctga

SEQ ID NO: 361494 - DNA, 120 bp, Artificial Sequence
  ENSG00000140543_55 (sequence is synthesized)
gtggttgggaccacagataaggaattcaggcacagagaaagtaagtaatcttctgaaagtcacaaagctggagccagaattcaaacttagacttcaggccaggcgtggtggctcatgcct

SEQ ID NO: 361495 - DNA, 120 bp, Artificial Sequence
  ENSG00000140545_0 (sequence is synthesized)
cagcccagcgtgcccattccagcgcccgcgtccccgcagcatgccgcgcccccgcctgctggccgcgctgtgcggcgcgctgctctgcgcccccagcctcctcgtcgccctggatatctg

SEQ ID NO: 361496 - DNA, 120 bp, Artificial Sequence
  ENSG00000140545_1 (sequence is synthesized)
ctcgtcgccctggatatctgttccaaaaacccctgccacaacggtggtttatgcgaggagatttcccaagaagtgcgaggagatgtcttcccctcgtacacctgcacgtgccttaagggc

SEQ ID NO: 361497 - DNA, 120 bp, Artificial Sequence
  ENSG00000140545_2 (sequence is synthesized)
tacgcgggcaaccactgtgagacgaaatgtgtcgagccactgggcctggagaatgggaacattgccaactcacagatcgccgcctcgtctgtgcgtgtgaccttcttgggtttgcagcat

SEQ ID NO: 361498 - DNA, 120 bp, Artificial Sequence
  ENSG00000140545_3 (sequence is synthesized)
tgggtcccggagctggcccgcctgaaccgcgcaggcatggtcaatgcctggacacccagcagcaatgacgataacccctggatccaggtgaacctgctgcggaggatgtgggtaacaggt

SEQ ID NO: 361499 - DNA, 120 bp, Artificial Sequence
  ENSG00000140545_4 (sequence is synthesized)
gtggtgacgcagggtgccagccgcttggccagtcatgagtacctgaaggccttcaaggtggcctacagccttaatggacacgaattcgatttcatccatgatgttaataaaaaacacaag

SEQ ID NO: 361500 - DNA, 120 bp, Artificial Sequence
  ENSG00000140545_5 (sequence is synthesized)
gagtttgtgggtaactggaacaaaaacgcggtgcatgtcaacctgtttgagacccctgtggaggctcagtacgtgagattgtaccccacgagctgccacacggcctgcactctgcgcttt

SEQ ID NO: 361501 - DNA, 120 bp, Artificial Sequence
  ENSG00000140545_6 (sequence is synthesized)
gagctactgggctgtgagctgaacggatgcgccaatcccctgggcctgaagaataacagcatccctgacaagcagatcacggcctccagcagctacaagacctggggcttgcatctcttc

SEQ ID NO: 361502 - DNA, 120 bp, Artificial Sequence
  ENSG00000140545_7 (sequence is synthesized)
agctggaacccctcctatgcacggctggacaagcagggcaacttcaacgcctgggttgcggggagctacggtaacgatcagtggctgcaggtggacctgggctcctcgaaggaggtgaca

SEQ ID NO: 361503 - DNA, 120 bp, Artificial Sequence
  ENSG00000140545_8 (sequence is synthesized)
gggcccgtaactttggctctgtccagtttgtggcatcctacaaggttgcctacagtaatgacagtgcgaactggactgagtaccaggaccccaggactggcagcagtaagatcttccctg

SEQ ID NO: 361504 - DNA, 120 bp, Artificial Sequence
  ENSG00000140545_9 (sequence is synthesized)
gcaactgggacaaccactcccacaagaagaacttgtttgagacgcccatcctggctcgctatgtgcgcatcctgcctgtagcctggcacaaccgcatcgccctgcgcctggagctgctgg

SEQ ID NO: 361505 - DNA, 120 bp, Artificial Sequence
  ENSG00000140545_10 (sequence is synthesized)
gctgttagtggccacctgccacccccaggtcttcctgctttccatgggcccgctgcctcttggcttctcagcccctttaaatcaccatagggctggggactggggaaggggagggtgttc

SEQ ID NO: 361506 - DNA, 120 bp, Artificial Sequence
  ENSG00000140545_11 (sequence is synthesized)
agaggcagcaccaccacacagtcacccctccctccctctttcccaccctccacctctcacgggccctgccccagcccctaagccccgtcccctaacccccagtcctcactgtcctgtttt

SEQ ID NO: 361507 - DNA, 120 bp, Artificial Sequence
  ENSG00000140545_12 (sequence is synthesized)
cttaggcactgagggatctgagtaggtctgggatggacaggaaagggcaaagtagggcgtgtggtttccctgcccctgtccggaccgccgatcccaggtgcgtgtgtctctgtctctcct

SEQ ID NO: 361508 - DNA, 120 bp, Artificial Sequence
  ENSG00000140545_13 (sequence is synthesized)
agcccctctctcacacatcacattcccatggtggcctcaagaaaggcccggaagcgccaggctggagataacagcctcttgcccgtcggccctgcgtcggccctggggtaccatgtggcc

SEQ ID NO: 361509 - DNA, 120 bp, Artificial Sequence
  ENSG00000140545_14 (sequence is synthesized)
acaactgctgtggccccctgtccccaagacacttccccttgtctccctggttgcctctcttgccccttgtcctgaagcccagcgacacagaagggggtggggcgggtctatggggagaaa

SEQ ID NO: 361510 - DNA, 120 bp, Artificial Sequence
  ENSG00000140545_15 (sequence is synthesized)
gggagcgaggtcagaggagggcatgggttggcagggtgggcgtttggggccctctatgctggcttttcaccccagaggacacaggcagcttccaaaatatatttatcttcttcacgggaa

SEQ ID NO: 361511 - DNA, 120 bp, Artificial Sequence
  ENSG00000140545_16 (sequence is synthesized)
tgcctgcctctccagaccccagctgccagctcttccaccagtgggcagtggtccccagcaccactgccattgtcagccagcacttttctggacactcccaggccacttggaaagctgggc

SEQ ID NO: 361512 - DNA, 120 bp, Artificial Sequence
  ENSG00000140545_17 (sequence is synthesized)
gcgggtaggggggcactgttggccaatcctaggaggtggccctccctgctgcctcttttctcagccaaactgagctaggtagggcagcaacaaggcacggggaccaggcttcactcgggc

SEQ ID NO: 361513 - DNA, 120 bp, Artificial Sequence
  ENSG00000140545_18 (sequence is synthesized)
aacgcactctagggggtcacctggccatagcagccccacccaggtgtttgctgtctgccaacccatgacccagggcattctgattgatagagaaaaagacatcagttttcaaagtatttt

SEQ ID NO: 361514 - DNA, 120 bp, Artificial Sequence
  ENSG00000140545_19 (sequence is synthesized)
cccttcttctggttggctcctctcctgtagcttctagaacatgtagcgttaggtgtgtttggcagatgtcagctttacgagggcagagaatctgtctgttttgtttgcttcggtattccc

SEQ ID NO: 361515 - DNA, 120 bp, Artificial Sequence
  ENSG00000140545_20 (sequence is synthesized)
gctggccatcagtggaactgtagggctcgctaagcagagctgcagagtggagacaccacccaaatacccctcagagctgagttcagtgcctggctgggttcagtgtttttagtatgaact

SEQ ID NO: 361516 - DNA, 120 bp, Artificial Sequence
  ENSG00000140545_21 (sequence is synthesized)
tgagtagcaaggaaggcagacttgaggcgaggagcagatgacagagagcagtaacagctctgaagaaaagctagaggctgatgagatgaccatgacttggggtgaggggagagagcaaga

SEQ ID NO: 361517 - DNA, 120 bp, Artificial Sequence
  ENSG00000140545_22 (sequence is synthesized)
aggcctttgactgggggcctgaatgatggagagccagccacatgaaaaacttaaaaacagcactgcaaaaagagcactgcaggcaaggaattggtaaatgcaaaggccctggggcatgtt

SEQ ID NO: 361518 - DNA, 120 bp, Artificial Sequence
  ENSG00000140545_23 (sequence is synthesized)
gaagggtggaaggaaggccagtggagctggagccaagagatggaggggcagcttggtgggtgaagagccccagggacccgcagtgtcatcacctaggagcttcttagaaatgcagactga

SEQ ID NO: 361519 - DNA, 120 bp, Artificial Sequence
  ENSG00000140545_24 (sequence is synthesized)
tgggccgattcgcctacacatggacttccttggctctaggcggactcaggctccatccagcacacgggggaagagggagaggaagagataatgggcgagtttgagtggagggtccttttg

SEQ ID NO: 361520 - DNA, 120 bp, Artificial Sequence
  ENSG00000140545_25 (sequence is synthesized)
gccgcgcccccgcctgctggccgcgctgtgcggcgcgctgctctgcgcccccagcctcctcgtcgccctggacccagctcaaatattccctcctctggggaacttctaattccccagcag

SEQ ID NO: 361521 - DNA, 120 bp, Artificial Sequence
  ENSG00000140545_26 (sequence is synthesized)
aaatcatgcctccagtgacggtccatgcaggcttctggagcgttgggcaatcttcctcatctgtggacttgctggcctctttccccttggcttcttgaggcctgcgctgcatctgatttc

SEQ ID NO: 361522 - DNA, 120 bp, Artificial Sequence
  ENSG00000140545_27 (sequence is synthesized)
catcgtgctgttcctgagtcagggctgccattggaggtgacatctgtgactgcaacctgtgcctgaattggtgggcggaacctgctcaatgggccagaacaatgcttccttccactgccc

SEQ ID NO: 361523 - DNA, 120 bp, Artificial Sequence
  ENSG00000140545_28 (sequence is synthesized)
ctgcctgaaagtcctcatgggcctcctttgcaatcaaactgctgccaagagacctgccctggaccttgcctgcctctccagaccccagctgccagctcttccaccagtgggcagtggtcc

SEQ ID NO: 361524 - DNA, 120 bp, Artificial Sequence
  ENSG00000140545_29 (sequence is synthesized)
ttgccttctgctagaaggaaatgtaggctactgggaaaggacagagccaggtctgtgtgcctctccctggagtccctgacacttgctgttttggcttgaagcctttggccattaaagttg

SEQ ID NO: 361525 - DNA, 120 bp, Artificial Sequence
  ENSG00000140545_30 (sequence is synthesized)
cctgtatccaggcatgactggcccctgctcagggccaagagagggtgagtcttgcaaaccaaggaagcccaggtaccctgtctgcttccttcagggtctggaccactcctttccctatag

SEQ ID NO: 361526 - DNA, 120 bp, Artificial Sequence
  ENSG00000140545_31 (sequence is synthesized)
gccttccagtcggctggagagtgttggtgcatgtgtgcatgtgtgcacgtgtgcatgtgtgtgggtggggctgaggtctgggggtacctgggattccacaagggattcctctttgcagac

SEQ ID NO: 361527 - DNA, 120 bp, Artificial Sequence
  ENSG00000140545_32 (sequence is synthesized)
atatggtgtctttggtaaattaattatttaattcgatggatgtttattaagatattgattaagcccctcctgggtgcttggctctagggaatgattccttgacctcatgtaatttgcatt

SEQ ID NO: 361528 - DNA, 84 bp, Artificial Sequence
  ENSG00000140545_33 (sequence is synthesized)
gggtgacagagcgagactgtgtctcagactgaaagccccagcctagacttgctgaaacataagctttttttttttatatcaaga

SEQ ID NO: 361529 - DNA, 120 bp, Artificial Sequence
  ENSG00000140545_34 (sequence is synthesized)
ctcccctagtatctcattttatagatggggagactgagagccagagagaggaagggacttcctagagtgctggagctgacagtcctgtccctgccctggtgccccttccaactgcatttt

SEQ ID NO: 361530 - DNA, 120 bp, Artificial Sequence
  ENSG00000140545_35 (sequence is synthesized)
accagaaaggctgtctgacttcctggggaggctgagagtgaggagggtatgaaccactagaagcagatgatctgtagaggggtctgcgttgagcacattgtgcagaattggtgtcctctg

SEQ ID NO: 361531 - DNA, 120 bp, Artificial Sequence
  ENSG00000140545_36 (sequence is synthesized)
caaagctgcccaggttttagcctgcctcaggcctctcctcttctggggccaagggacaaccagctctcagcccgggagcctctctttgagggggaaggtggtggttccctggtgcatcac

SEQ ID NO: 361532 - DNA, 120 bp, Artificial Sequence
  ENSG00000140545_37 (sequence is synthesized)
catcaggagatgatggtaccatcagcaggcattgtcaacacaccctggaggcaaatgtcttgagtggtgagagtacaggtgggcagtgatataacttagctggctcccagtactcttgag

SEQ ID NO: 361533 - DNA, 120 bp, Artificial Sequence
  ENSG00000140545_38 (sequence is synthesized)
tggtgagagtattggagggcagtgatataacttagctggctcccagagggcagggggctctccagtcccaccgtccactcctgcctccctcaattccccagagggatagacacttgtgga

SEQ ID NO: 361534 - DNA, 120 bp, Artificial Sequence
  ENSG00000140545_39 (sequence is synthesized)
gtgaggattcttccaggtgggagacacccccatcattctcttgggagttgtatctcttgcccatccccaactgttctatccatatgcaggtgcagatacaagtgcaaggcagcccggcac

SEQ ID NO: 361535 - DNA, 120 bp, Artificial Sequence
  ENSG00000140545_40 (sequence is synthesized)
attcctgagtgtttggggcagggctgagtgaaacaaaggccagcttcccgggccagccctcacaggcctgtgtgacagcatccccagaacatttgagtgtgcgaaggccctctgggagac

SEQ ID NO: 361536 - DNA, 120 bp, Artificial Sequence
  ENSG00000140545_41 (sequence is synthesized)
actaagtcagggggcttctggggaatggaaatagagatgttcctgtgccccaggagttgtctgatttctctaactgccagctgctggagggcagggatgttgtcctgttcatcactgggt

SEQ ID NO: 361537 - DNA, 120 bp, Artificial Sequence
  ENSG00000140545_42 (sequence is synthesized)
cgtcactaggcaggccttcatcatctagctgggatgtgtagctggtagaggtgacgtcatagtgtgacattaggagtttgtatgtgacttgagcatgatgcttaatgtctttcagttttc

SEQ ID NO: 361538 - DNA, 120 bp, Artificial Sequence
  ENSG00000140545_43 (sequence is synthesized)
tcatctatagaatgggcttactaatttctacttcatttagtgtttttttttctttttttttttggtggcaggttaaatgactgaagtaagcactgaataaacaatgtggttgttattaaa

SEQ ID NO: 361539 - DNA, 120 bp, Artificial Sequence
  ENSG00000140545_44 (sequence is synthesized)
ctgtgaggagctgagcccggctggttgaggtgaggaggtggtggggtcggcagtgagaaggtcgcacagttggccctgcaaggcggatggagctgctttctgttgcccaagagcatgaca

SEQ ID NO: 361540 - DNA, 120 bp, Artificial Sequence
  ENSG00000140545_45 (sequence is synthesized)
ggggctggtcaggatccacagagttctttctgcttcatcgccttgtgctcctgcccctgggagctgtggatcccagatccagatgacagcccaccttgctggcaggatgcgccaatcccc

SEQ ID NO: 361541 - DNA, 120 bp, Artificial Sequence
  ENSG00000140545_46 (sequence is synthesized)
cagagaaccctaggtgattggctatgatgtgggtcttcgggtgcatcttggcttctagaaattgggaaacccagactgtgtccatgttctgtggtttataagcaatagtcccactttaga

SEQ ID NO: 361542 - DNA, 120 bp, Artificial Sequence
  ENSG00000140545_47 (sequence is synthesized)
gatgagactagtgagattcaaaatggcacagtgacctgttgagggtgatagtggtggtggagctgggtttcattctgagccttcatgggtacatgtacagttgtgtaggttgtacactgc

SEQ ID NO: 361543 - DNA, 120 bp, Artificial Sequence
  ENSG00000140545_48 (sequence is synthesized)
tcaaggatgtcattgctaagcaggcaccattcacagtacaggcattgtacatttgtggaactctgtcagaaaattgtcataataaactatttgagaaaggagtgccttttcctaatttgc

SEQ ID NO: 361544 - DNA, 120 bp, Artificial Sequence
  ENSG00000140545_49 (sequence is synthesized)
aaagaggtaccctgtaggttacaggtggccctgtgtcagctataggggtttatgcccaggctccatgatgattaaggaaagtgagaggagaatctttgtggagggccgtggggtggccaa

SEQ ID NO: 361545 - DNA, 120 bp, Artificial Sequence
  ENSG00000140545_50 (sequence is synthesized)
cagcgtgcccattccagcgcccgcgtccccgcagcatgccgcgcccccgcctgctggccgcgctgtgcggcgcgctgctctgcgcccccagcctcctcgtcgccctggtgggatttctgc

SEQ ID NO: 361546 - DNA, 120 bp, Artificial Sequence
  ENSG00000140545_51 (sequence is synthesized)
catgtctgcacatgggccttttcagccttcttcatcccgcaattggaactgactttcccactcccatctcacacttgagaatctctgtttcttgtttcttgttttttattttatttttat

SEQ ID NO: 361547 - DNA, 120 bp, Artificial Sequence
  ENSG00000140545_52 (sequence is synthesized)
tctcccccctggtggacaatggtgaggagggtgaaggaaggttaaaagccactgctctacgggatgaaaaactaaacttgtcattcttcagatccctcccagtctggccccagcctaccc

SEQ ID NO: 361548 - DNA, 120 bp, Artificial Sequence
  ENSG00000140548_0 (sequence is synthesized)
cctctgcgagctggcttaggaggagctgttttgcatcccttcacgtcagccctgcctcattcccttcttccagggagggagagagcgcgagcgagagagcgagcgagaggaggggggaga

SEQ ID NO: 361549 - DNA, 120 bp, Artificial Sequence
  ENSG00000140548_1 (sequence is synthesized)
gagaggaggggggagagagagaaagagaggagccggagggagggcggcaggagcaggcggcgggcgcgcgtggaggcgggcggcgggcgcacagcagcagcccgggcggtgggcagccag

SEQ ID NO: 361550 - DNA, 120 bp, Artificial Sequence
  ENSG00000140548_2 (sequence is synthesized)
ccggcccggcccgccgagggccccagcgcaggagccgcgcccggacccaggcgatgccctcctagctagccgtcacgggatggagggcttcatggactcagggacacagacggacgccgt

SEQ ID NO: 361551 - DNA, 120 bp, Artificial Sequence
  ENSG00000140548_3 (sequence is synthesized)
ggtggtgctgtccttggctcaggccgccgtgcttggcctggtctccgaaaatgagctctttggagctaccataagcgccgaggccttctacccggacctggggcccgagctttcaggggc

SEQ ID NO: 361552 - DNA, 120 bp, Artificial Sequence
  ENSG00000140548_4 (sequence is synthesized)
agccatgggagagcccgagccaccaggccccgacgtctaccagctggcctgcaacgggagggccttggaggagccggcggaggaggaggtgctggaggtggaggcagcctgtgagaagca

SEQ ID NO: 361553 - DNA, 120 bp, Artificial Sequence
  ENSG00000140548_5 (sequence is synthesized)
cacccggcggaagacgcggccacctgtgcggttggtgcccaaggtcaagttcgagaaggtggaggaggaggaacaggaggtctatgaggtttctgtgccaggtgacgacaaggacgcagg

SEQ ID NO: 361554 - DNA, 120 bp, Artificial Sequence
  ENSG00000140548_6 (sequence is synthesized)
gccagcagaagcccccgccgaggcggccagtggcggctgcgacgccctggtgcagagcagcgccgtcaagatgatcgacctcagcgccttcagccgcaagccccggacgctccggcatct

SEQ ID NO: 361555 - DNA, 120 bp, Artificial Sequence
  ENSG00000140548_7 (sequence is synthesized)
gccccgaaccccgaggccggagctgaacgtggccccatatgaccctcacttcccggccccggcccgggatggcttccccgagcccagcatggcgctgcctgggccagaggccttgcccac

SEQ ID NO: 361556 - DNA, 120 bp, Artificial Sequence
  ENSG00000140548_8 (sequence is synthesized)
agagtgtgggttcgagccaccccacctggcccccctgagtgaccccgaggcccccagcatggagtccccggagcctgtcaagccggaacagggcttcgtgtggcaggaggccagtgagtt

SEQ ID NO: 361557 - DNA, 120 bp, Artificial Sequence
  ENSG00000140548_9 (sequence is synthesized)
cgaggctgacacggcgggttcgaccgtggaacgccacaagaaggcccagctggatcggctggacatcaacgtgcagattgacgactcctatctggtggaggcgggcgaccgccagaagcg

SEQ ID NO: 361558 - DNA, 120 bp, Artificial Sequence
  ENSG00000140548_10 (sequence is synthesized)
ctggcagtgccgcatgtgcgagaagtcctacacgtccaagtacaacctggtgacgcacatcctgggccacaacggcatcaagccacactcgtgcccacactgcagcaagctcttcaagca

SEQ ID NO: 361559 - DNA, 120 bp, Artificial Sequence
  ENSG00000140548_11 (sequence is synthesized)
gcccagccacctgcagacgcacctgctgacgcaccagggcacccggccccacaagtgccaggtatgccacaaggccttcacgcagaccagccacctcaagcgccacatgctgctgcactc

SEQ ID NO: 361560 - DNA, 120 bp, Artificial Sequence
  ENSG00000140548_12 (sequence is synthesized)
ggaggtcaagccctacagctgccacttctgcggccgcggcttcgcctaccccagcgagctcaaggcccacgaagtgaagcatgagagtggccgctgccatgtctgcgtcgagtgcggcct

SEQ ID NO: 361561 - DNA, 120 bp, Artificial Sequence
  ENSG00000140548_13 (sequence is synthesized)
ggacttctccaccctgacccagctcaagcgccacctggcctcccaccagggccccaccctctaccagtgcctcgagtgtgacaagtccttccactaccgcagccagttgcagaaccacat

SEQ ID NO: 361562 - DNA, 120 bp, Artificial Sequence
  ENSG00000140548_14 (sequence is synthesized)
gctcaagcaccagaacgtgcgacccttcgtgtgcactgaatgcggcatggagttcagccagattcaccacctcaagcagcactccctcacccacaagggcgtgaaggagttcaagtgcga

SEQ ID NO: 361563 - DNA, 120 bp, Artificial Sequence
  ENSG00000140548_15 (sequence is synthesized)
ggtgtgtggccgggagttcaccctacaggcgaacatgaagcggcacatgctgatccacaccagcgtccggccctaccagtgccacatctgcttcaagacctttgtacagaagcagactct

SEQ ID NO: 361564 - DNA, 120 bp, Artificial Sequence
  ENSG00000140548_16 (sequence is synthesized)
caagacccacatgattgtacactcgcccgtgaagccattcaaatgcaaggtgtgcgggaagtccttcaaccgcatgtacaacctgctgggccacatgcacctgcacgccggcagcaagcc

SEQ ID NO: 361565 - DNA, 120 bp, Artificial Sequence
  ENSG00000140548_17 (sequence is synthesized)
cttcaagtgcccctactgctccagcaagtttaatctcaagggcaacctgagccggcacatgaaggtcaagcatggcgtcatggacatcggcctggacagccaagaccccatgatggagct

SEQ ID NO: 361566 - DNA, 120 bp, Artificial Sequence
  ENSG00000140548_18 (sequence is synthesized)
gacaggcactgacccttcagagctcgacggccagcaggagatggaggacttcgaggagaacgcctacagctatgcgagcgtggacagcagcgccgaggccagtgtcctcactgaacaggc

SEQ ID NO: 361567 - DNA, 120 bp, Artificial Sequence
  ENSG00000140548_19 (sequence is synthesized)
gccgagaaacaagctactgccccactgttctgagccctccctccccgagtcatttgcaccactagggacctttagaccaaatggagactgtactactggccccggctgtgagccagcaca

SEQ ID NO: 361568 - DNA, 120 bp, Artificial Sequence
  ENSG00000140548_20 (sequence is synthesized)
ggcccaggcatcccagcaagggaaggagaacacgcgaggcccagatctgggtctccctggcctgcttccgtggggagtgggagaagtggggccactggggacaggtcacaagggcaccgg

SEQ ID NO: 361569 - DNA, 120 bp, Artificial Sequence
  ENSG00000140548_21 (sequence is synthesized)
ccctcggggtctctccaggcccagcagagctcttcaggggtcctgacactggaagaagagaccacttgagccatgtctttttcacggccaactcctgcctctaaggatgtctgagctccc

SEQ ID NO: 361570 - DNA, 120 bp, Artificial Sequence
  ENSG00000140548_22 (sequence is synthesized)
ctctggccagtactgcccacctctaccttgtccaggcccccttccccgccctgtcgacggaccgccaggcagggcactctgccttctacctcccggggtctcccatgcgctcctcaagcc

SEQ ID NO: 361571 - DNA, 120 bp, Artificial Sequence
  ENSG00000140548_23 (sequence is synthesized)
aggtgtgcacgtggccctggccctggcctgcaggacagctggggggcacccagcccccagaagacccctgtcctacatccctttctggaagtgagtgtccctacagtggattgcaacaca

SEQ ID NO: 361572 - DNA, 120 bp, Artificial Sequence
  ENSG00000140548_24 (sequence is synthesized)
tgtcgtccacttcgaccctagctggagtgcctcaccagggggccccactaggaacaaagccaggacaggccccgcgtcaggcacacactaacaaaaccagaagcatggggcagggcaggg

SEQ ID NO: 361573 - DNA, 120 bp, Artificial Sequence
  ENSG00000140548_25 (sequence is synthesized)
cggagtgagggcatcacaggggaccaagaagggctgtccttgggggaggcccaggaccacctgtcggggagggggaccgcagtcatttctcattcctcagtgtccaccttgcgacgggga

SEQ ID NO: 361574 - DNA, 120 bp, Artificial Sequence
  ENSG00000140548_26 (sequence is synthesized)
tagccacgagtcagcagcttcccggaaagagcaacgtattttaaaaaggaaagtaaagcccacagagggaaatcaagggtttttttgagcaaagggggtcttctgaaggtaacttattat

SEQ ID NO: 361575 - DNA, 120 bp, Artificial Sequence
  ENSG00000140548_27 (sequence is synthesized)
ttttttctttccaactgtgtgtcacctatgaccttttctgatggagatgcattttctttttccaagcgtaagcttcctaatgtgctgtgcgtgcttcctacccacccaccccgagcagcc

SEQ ID NO: 361576 - DNA, 120 bp, Artificial Sequence
  ENSG00000140548_28 (sequence is synthesized)
tggccgggcaggactggggctccatggggactgtcaccctggccctggaggtgcagccgctggcagcagcctcagcaggctggggtgggaggcaggagaaggcagagctgggaagccctc

SEQ ID NO: 361577 - DNA, 120 bp, Artificial Sequence
  ENSG00000140548_29 (sequence is synthesized)
cacccctgcctggctcctgcagtcgctgacttgctctgtcccatgtcccatcctcggctgtcagggctgctgactctgctcagccaacagctagctccctcgctcgcctgctctcttccc

SEQ ID NO: 361578 - DNA, 120 bp, Artificial Sequence
  ENSG00000140548_30 (sequence is synthesized)
ctctgttcccacgccagctcctgcccctggaaccagagatgacaggcccagggcagtgaaatagcacattcaggaactctagggcacccggacccccccacccacttgcctcctgaggcc

SEQ ID NO: 361579 - DNA, 120 bp, Artificial Sequence
  ENSG00000140548_31 (sequence is synthesized)
tcagtggggaggggcaagcaggggtcttccccaaaggcacagatgaagccactagcttcagcctagaaacccggagaagggaacagcctgcggtgggaggaaccaatctgcagcgcagcc

SEQ ID NO: 361580 - DNA, 120 bp, Artificial Sequence
  ENSG00000140548_32 (sequence is synthesized)
acccccaaggctggatccttaagtgaaggaccaagccaggcctcagggtgactgtgatcaggactgaggggtggacaaggtggcccaagtatggcttccagaccccgaagccccacgacc

SEQ ID NO: 361581 - DNA, 120 bp, Artificial Sequence
  ENSG00000140548_33 (sequence is synthesized)
tcccaggtgcccgccatgatgaccctcaggtggcagtgaccccgtcactgtataagacattttctcctgctgagcagaaggcatcatcccctgcaactacctcttcccacgtctttctcc

SEQ ID NO: 361582 - DNA, 120 bp, Artificial Sequence
  ENSG00000140548_34 (sequence is synthesized)
cctggtaccaaaaagaaccctgtacctctcctcctcctcctccctcctgccagtgcagtggccttggtcttggaaactgaagggagaaggtctggcccccagggtggggctctcctttcc

SEQ ID NO: 361583 - DNA, 120 bp, Artificial Sequence
  ENSG00000140548_35 (sequence is synthesized)
ctcccccagccccgccgtcagcactggccctctgtgaggttcgatacttgaacgccccctgccctgtgccttggacctgggcaaagctaggaggaggaaacagcacaactcacagtttga

SEQ ID NO: 361584 - DNA, 120 bp, Artificial Sequence
  ENSG00000140548_36 (sequence is synthesized)
gctggggggtggtcttggcaaggctcctgtctgtacccctccctaaccttctcaaaagaggtgcacagcctctcgggtgacttggaaactcctggacaaattccattctaacttattttg

SEQ ID NO: 361585 - DNA, 120 bp, Artificial Sequence
  ENSG00000140548_37 (sequence is synthesized)
acatgtatacaaaccaactgtttagagattccacttgtgcaaagccctactgtgtttttatgttcctgtttaaaagagaagtttacttagcaataattataaataaatgaatattcttta

SEQ ID NO: 361586 - DNA, 120 bp, Artificial Sequence
  ENSG00000140548_38 (sequence is synthesized)
gggtgggccaagcgcaatggacagagcaggaatgataccaacatgacgcactcaggagcctcctgcccagttagaggagtggggaggctggccaaggctgagacttcgttggggtgggct

SEQ ID NO: 361587 - DNA, 120 bp, Artificial Sequence
  ENSG00000140548_39 (sequence is synthesized)
caggtctggaaggggggtaccctggaaggccatgatgacaataacgatgggatatttatgtcttcttcaaaggacttaaatgagatcacgtaaacaatataataaaaatcataactaaca

SEQ ID NO: 361588 - DNA, 120 bp, Artificial Sequence
  ENSG00000140548_40 (sequence is synthesized)
cagcgcagccacccccaaggctggatccttaagtgaaggaccaagccaggcctcagggtgactgtgatcaggactgaggggtggacaagtggccttggtcttggaaactgaagggagaag

SEQ ID NO: 361589 - DNA, 120 bp, Artificial Sequence
  ENSG00000140553_0 (sequence is synthesized)
agagactgcgcctgcgcgggcacgagacaacctctccgcgatgactgtgagtggtccagggacccccgagccccggccggccacccccggggccagctcagtggagcagctgcggaagga

SEQ ID NO: 361590 - DNA, 120 bp, Artificial Sequence
  ENSG00000140553_1 (sequence is synthesized)
gggcaatgagctgttcaaatgtggagactacgggggcgccctggcggcctacactcaggccctgggtctggacgcgacgccccaggaccaggccgttctgcaccggaaccgggccgcctg

SEQ ID NO: 361591 - DNA, 120 bp, Artificial Sequence
  ENSG00000140553_2 (sequence is synthesized)
ccacctcaagctggaagattacgacaaagcagaaacagaggcatccaaagccattgaaaaggatggtggggatgtcaaagcactctaccggcggagccaagccctagagaagctgggccg

SEQ ID NO: 361592 - DNA, 120 bp, Artificial Sequence
  ENSG00000140553_3 (sequence is synthesized)
cctggaccaggctgtccttgacctgcagagatgtgtgagcttggagcccaagaacaaagttttccaggaggccttgcggaacatcgggggccagattcaggagaaggtgcgatacatgtc

SEQ ID NO: 361593 - DNA, 120 bp, Artificial Sequence
  ENSG00000140553_4 (sequence is synthesized)
ctcgacggatgccaaagtggaacagatgtttcagatactgttggacccagaagagaagggcactgagaaaaagcaaaaggcttctcagaacctggtggtgctggccagggaggatgctgg

SEQ ID NO: 361594 - DNA, 120 bp, Artificial Sequence
  ENSG00000140553_5 (sequence is synthesized)
agcggagaagatcttccggagtaatggggttcagctcttgcaacgtttactggacatgggagagactgacctcatgctggcggctctgcgtacgctggttggcatttgctctgagcatca

SEQ ID NO: 361595 - DNA, 120 bp, Artificial Sequence
  ENSG00000140553_6 (sequence is synthesized)
gtcacggacagtggcaaccctgagcatactgggaactcggcgagtagtctccatcctgggcgtggaaagccaggctgtgtccctggctgcctgccacctgctgcaggttatgtttgatgc

SEQ ID NO: 361596 - DNA, 120 bp, Artificial Sequence
  ENSG00000140553_7 (sequence is synthesized)
cctcaaggaaggtgtcaaaaaaggcttccgaggcaaagaaggtgccatcattgtggatcctgcccgggagctgaaggtcctcatcagtaacctcttagatctgctgacagaggtgggggt

SEQ ID NO: 361597 - DNA, 120 bp, Artificial Sequence
  ENSG00000140553_8 (sequence is synthesized)
ctctggccaaggccgagacaatgccctgaccctcctgattaaagcggtgccccggaagtctctcaaggaccccaacaacagcctcaccctctgggtcatcgaccaaggtctgaaaaagat

SEQ ID NO: 361598 - DNA, 120 bp, Artificial Sequence
  ENSG00000140553_9 (sequence is synthesized)
tttggaagtggggggctctctacaggaccctcctggggagctcgcagtgaccgcaaacagccgcatgagcgcctctattctcctcagcaagctctttgatgacctcaagtgtgatgcgga

SEQ ID NO: 361599 - DNA, 120 bp, Artificial Sequence
  ENSG00000140553_10 (sequence is synthesized)
gagggagaatttccacagactttgtgaaaactacatcaagagctggtttgagggccaagggctggccgggaagctacgggccatccagacggtgtcctgcctcctgcagggcccatgtga

SEQ ID NO: 361600 - DNA, 120 bp, Artificial Sequence
  ENSG00000140553_11 (sequence is synthesized)
cgctggcaaccgggccttggagctgagcggtgtcatggagagtgtgattgctctgtgtgcctctgagcaggaggaggagcagctggtggccgtggaggctctgatccatgcagccggcaa

SEQ ID NO: 361601 - DNA, 120 bp, Artificial Sequence
  ENSG00000140553_12 (sequence is synthesized)
ggctaagcgggcctcattcatcactgccaatggtgtctcgctgctgaaggacctatataagtgcagcgagaaggacagcatccgcatccgggcgctagtgggactctgtaagctcggttc

SEQ ID NO: 361602 - DNA, 120 bp, Artificial Sequence
  ENSG00000140553_13 (sequence is synthesized)
tgacttcagcatgaagcagtttgctgaaggctccactctcaaactggctaagcagtgtcgaaagtggctgtgcaatgaccagatcgacgcaggcactcggcgctgggcagtggagggcct

SEQ ID NO: 361603 - DNA, 120 bp, Artificial Sequence
  ENSG00000140553_14 (sequence is synthesized)
ggcttacctgacctttgatgccgacgtgaaggaagagtttgtggaggatgcggctgctctgaaagctctgttccagctcagcaggttggaggagaggtcagtgctctttgcggtggcctc

SEQ ID NO: 361604 - DNA, 120 bp, Artificial Sequence
  ENSG00000140553_15 (sequence is synthesized)
agcgctggtgaactgcaccaacagctatgactacgaggagcccgaccccaagatggtggagctggccaagtatgccaagcagcatgtgcccgagcagcaccccaaggacaagccaagctt

SEQ ID NO: 361605 - DNA, 120 bp, Artificial Sequence
  ENSG00000140553_16 (sequence is synthesized)
cgtgcgggctcgggtgaagaagctgctggcagcgggtgtggtgtcggccatggtgtgcatggtgaagacggagagccctgtgctgaccagttcctgcagagagctgctctccagggtctt

SEQ ID NO: 361606 - DNA, 120 bp, Artificial Sequence
  ENSG00000140553_17 (sequence is synthesized)
cttggctttagtggaagaggtagaggaccgaggcactgtggttgcccagggaggcggcagggcgctgatcccgctggccctggaaggcacggacgtggggcagacaaaggcagcccaggc

SEQ ID NO: 361607 - DNA, 120 bp, Artificial Sequence
  ENSG00000140553_18 (sequence is synthesized)
ccttgccaagctcaccatcacctccaacccggagatgaccttccctggcgagcggatctatgaggtggtccggcccctcgtctccctgttgcacctcaactgctcaggcctgcagaactt

SEQ ID NO: 361608 - DNA, 120 bp, Artificial Sequence
  ENSG00000140553_19 (sequence is synthesized)
cgaggcgctcatggccctaacaaacctggctgggatcagcgagaggctccggcagaagatcctgaaggagaaggctgtgcccatgatagaaggctacatgtttgaggagcatgagatgat

SEQ ID NO: 361609 - DNA, 120 bp, Artificial Sequence
  ENSG00000140553_20 (sequence is synthesized)
ccgccgggcagccacggagtgcatgtgtaacttggccatgagcaaggaggtgcaggacctcttcgaagcccagggcaatgaccgactgaagctgctggtgctgtacagtggagaggatga

SEQ ID NO: 361610 - DNA, 120 bp, Artificial Sequence
  ENSG00000140553_21 (sequence is synthesized)
tgagctgctacagcgggcagctgccgggggcttggccatgcttacctccatgcggcccacgctctgcagccgcattccccaagtgaccacacactggctggagatcctgcaggccctgct

SEQ ID NO: 361611 - DNA, 120 bp, Artificial Sequence
  ENSG00000140553_22 (sequence is synthesized)
tctgagctccaaccaggagctgcagcaccggggtgctgtggtggtgctgaacatggtggaggcctcgagggagattgccagcaccctgatggagagtgagatgatggagatcttgtcagt

SEQ ID NO: 361612 - DNA, 120 bp, Artificial Sequence
  ENSG00000140553_23 (sequence is synthesized)
gctagctaagggtgaccacagccctgtcacaagggctgctgcagcctgcctggacaaagcagtggaatatgggcttatccaacccaaccaagatggagagtgagggggttgtccctgggc

SEQ ID NO: 361613 - DNA, 120 bp, Artificial Sequence
  ENSG00000140553_24 (sequence is synthesized)
ccaaggctcatgcacacgctacctattgtggcacggagagtaaggacggaagcagctttggctggtggtggctggcatgcccaatactcttgcccatcctcgcttgctgccctaggatgt

SEQ ID NO: 361614 - DNA, 120 bp, Artificial Sequence
  ENSG00000140553_25 (sequence is synthesized)
cctctgttctgagtcagcggccacgttcagtcacacagccctgcttggccagcactgcctgcagcctcactcagaggggccctttttctgtactactgtagtcagctgggaatggggaag

SEQ ID NO: 361615 - DNA, 120 bp, Artificial Sequence
  ENSG00000140553_26 (sequence is synthesized)
gtgcatcccaacacagcctgtggatcctggggcatctggaagggcgcacacatcagcagcctcaccagctgtgagcctgctatcaggcctgcccctccaataaaagtgtgtagaactcca

SEQ ID NO: 361616 - DNA, 120 bp, Artificial Sequence
  ENSG00000140553_27 (sequence is synthesized)
acttaacaaccgaagtaacccgcaatgcggaagggcgaggggattgcgagtcaccgagtttcccgcgcggcttgagtcacggcctagaaagagagatgttggggttcccaggaccaggac

SEQ ID NO: 361617 - DNA, 120 bp, Artificial Sequence
  ENSG00000140553_28 (sequence is synthesized)
agaggtggtagtgaactctcatgggcatccagagaaggtcaggccccttgctgacaggcctatctgtggggctactgctgctcttcagctgggtgacccttgtccagccaacctctctct

SEQ ID NO: 361618 - DNA, 120 bp, Artificial Sequence
  ENSG00000140553_29 (sequence is synthesized)
cagctctggtccaccaccctcacttgtgccagaccacccgggatgtccatggccgtcactaccctggtttcttttgccctcgtctgtctgattctccagaggaagcctactgctgccacc

SEQ ID NO: 361619 - DNA, 120 bp, Artificial Sequence
  ENSG00000140553_30 (sequence is synthesized)
tgcaggctgcagggggctcctgctgcacccgggctgaatttgaggccctgtaccaagtcaatctgtccgctcttccgcccccgcccatcctcaggggcccaggcccgctcctagtgctgg

SEQ ID NO: 361620 - DNA, 120 bp, Artificial Sequence
  ENSG00000140553_31 (sequence is synthesized)
gcctctacaacctactggttgtgaccctgatgaccgtagacctcgtgcacttctgctgcggtcggggccggagtctgggctggagccaccgcaggcctccctctgggtcctccgccgcga

SEQ ID NO: 361621 - DNA, 120 bp, Artificial Sequence
  ENSG00000140553_32 (sequence is synthesized)
gctccctgcaggtctctgcggggacagcttaggtgcgcccggagcttgcctgcacctgcgatccagagccaagcgccccgcccctgcccgggcgcgctccctccttagccctgcccctct

SEQ ID NO: 361622 - DNA, 120 bp, Artificial Sequence
  ENSG00000140553_33 (sequence is synthesized)
ctgaccccacctccgacgcaagagtggggcggggcagctgccggtggcgtcccgaacccagactcgccccgccccagagactgcgcctgcgcgggcacgagacaacctctccgcgatgac

SEQ ID NO: 361623 - DNA, 120 bp, Artificial Sequence
  ENSG00000140553_34 (sequence is synthesized)
ggggattgcgagtcaccgagtttcccgcgcggcttgagaacgtgttaggaactagtacttaaataatctcaagtccctgaggggccagagatcccaccatgcaaaatagcaaacagaccc

SEQ ID NO: 361624 - DNA, 120 bp, Artificial Sequence
  ENSG00000140553_35 (sequence is synthesized)
aagacttggggagaggcggtgagtgcatcagaaatggatgggtacatctgattcccaccacgcggggctcagcttagttagcaggagaccttcagactgagaaaaaatgcaagtcttttt

SEQ ID NO: 361625 - DNA, 120 bp, Artificial Sequence
  ENSG00000140553_36 (sequence is synthesized)
cctgtccggcctgaacgaggctggagttgtgcctctggatagcttcaagcactgatcagattgtcagcccccgctgcttgaacagatgctttagagcctcttccagttgccggtttgttc

SEQ ID NO: 361626 - DNA, 120 bp, Artificial Sequence
  ENSG00000140553_37 (sequence is synthesized)
cctgaagccccttcaccacctgcgctgcccactcgaagtattcctggactcgatgttctgaccatcctgcataagagtcgacagaaacttgctagcgtgatgtcaaggaaagcactgcct

SEQ ID NO: 361627 - DNA, 120 bp, Artificial Sequence
  ENSG00000140553_38 (sequence is synthesized)
tttccccacttcctggcaagcttggttcaaggccatgagttcctgatggaatgagctgtcctgaaaacttccccttggcccagctattgtatttttactgtatgaaagaagatcaaagag

SEQ ID NO: 361628 - DNA, 120 bp, Artificial Sequence
  ENSG00000140553_39 (sequence is synthesized)
catccgggcgctagtggtgagacggtgggcctggggtgggtgggcaggcagccaggcaggggtcctggtccagccggtgttgcagggtgtggccccagcacactccagatgaaaataagg

SEQ ID NO: 361629 - DNA, 120 bp, Artificial Sequence
  ENSG00000140553_40 (sequence is synthesized)
tgcagggtgtggccccagcacactccagatgaaaataaggaatactgtaatgccaaaaaaattagctaggcttggtggtgcatgcctataggtccagctacttgggaggctgaggcagga

SEQ ID NO: 361630 - DNA, 120 bp, Artificial Sequence
  ENSG00000140553_41 (sequence is synthesized)
atcggcatggctcctccctccatggggcttaagactgggcctgcaggggtcatgcagtgttcctgggagctggtggtttgggggtttggggactacctggccctccatgagcctgttgtg

SEQ ID NO: 361631 - DNA, 120 bp, Artificial Sequence
  ENSG00000140553_42 (sequence is synthesized)
gctgtgcaccctgtggaagctggtcttcctccctggggcactcagtcctggatttctccatcccataaggatttggctgtggctgaagcacctgtcctctccccacatgcctctcaactc

SEQ ID NO: 361632 - DNA, 120 bp, Artificial Sequence
  ENSG00000140553_43 (sequence is synthesized)
cacctgcagagggcttctttgtgcgacatggaaggaaacagagccattctcagtgtggcctgggaaggggtggggcccacgactgtccagcggccagcgcatcagtgtctgcagatgctg

SEQ ID NO: 361633 - DNA, 120 bp, Artificial Sequence
  ENSG00000140553_44 (sequence is synthesized)
tgtcatgcggccaccccagtagctgattttcttgccacatgctctaggtggtggtctggagggagagggtgctgatttgtctgtgtagcttccagggggccatggcagagtgccagggag

SEQ ID NO: 361634 - DNA, 120 bp, Artificial Sequence
  ENSG00000140553_45 (sequence is synthesized)
attagaccttaccaggctttctcggcagggcttggccaatggggtcttttgaccccagggaagagggctggtggctgagtggctgctctgtgtagtgtgggcatgttggccagcaccagt

SEQ ID NO: 361635 - DNA, 120 bp, Artificial Sequence
  ENSG00000140553_46 (sequence is synthesized)
ggtgttagcaaggacgttcttcttggaggagctggggaggtcaagtttgtaagctcccaaagtctggggcctgggagtttcccgaattcatcctgtacccaagggtcccagctgagggtg

SEQ ID NO: 361636 - DNA, 120 bp, Artificial Sequence
  ENSG00000140553_47 (sequence is synthesized)
gaattgggggcctgggcctgggcagcatttatctgagtactgctctgccccgggatgcccatgtgaattcctctgtgtcctggcagttggaggagaggtcagtgctctttgcggtggcct

SEQ ID NO: 361637 - DNA, 120 bp, Artificial Sequence
  ENSG00000140553_48 (sequence is synthesized)
caaaggtaggggaatggtgggccctggtgtggagctgtagggcttctgtggtgggcaaggactctgggaccgctgcaccgtcacattctcctcctttggccccagagacacatctgcctt

SEQ ID NO: 361638 - DNA, 120 bp, Artificial Sequence
  ENSG00000140553_49 (sequence is synthesized)
ttttctgaggctgaagcaccgagccccacattcgtcccccccaccttcttctggcctttcctcgagatctttccctactgctcttgcctggagacagtggcctcatgggtgctgacagcg

SEQ ID NO: 361639 - DNA, 120 bp, Artificial Sequence
  ENSG00000140553_50 (sequence is synthesized)
aggaccgaggcactgtggttgcccagggaggcggcagggtaagctggtttacacaccccttcctgatggctgagccatcagcctataaaacatgactcagcagctgccacgccagagctg

SEQ ID NO: 361640 - DNA, 120 bp, Artificial Sequence
  ENSG00000140553_51 (sequence is synthesized)
ggtgttagatatggaacagaaaaacattaatggccagaggaacaccgtcccgctgagagagtgacgcggaagcaggcaagctccttggcccctccacactggtgcctgtgaaggtcctag

SEQ ID NO: 361641 - DNA, 120 bp, Artificial Sequence
  ENSG00000140553_52 (sequence is synthesized)
gctctactgttcctttgtctcatttacccccatggccctggtgctcagcacaatccatgtccagcccttattaggtgtttcaggaagtgtttggatgcagagggtctgcacagggagtca

SEQ ID NO: 361642 - DNA, 120 bp, Artificial Sequence
  ENSG00000140553_53 (sequence is synthesized)
agcctggggagagggaggaaggtgagggtggcacggtcagggctggggagcccgatggtcggggtcttactcccagggatgtcctgagcagtgacgggcttgttcctacaggcgctgatc

SEQ ID NO: 361643 - DNA, 120 bp, Artificial Sequence
  ENSG00000140553_54 (sequence is synthesized)
atccctggcctccttctccccatccatgaggctcgccccgatccctcctctcctctccccttagctcccgggctctgccccgaaccccctccgacgtttccgccccctttctctctacag

SEQ ID NO: 361644 - DNA, 120 bp, Artificial Sequence
  ENSG00000140553_55 (sequence is synthesized)
tacagcttcagtccctttgtctgtctgtccatccattcctccatccacccatctgtccatccgcccatctgcccgtccatccatccatccactcttccaccctctaccccttaccttatt

SEQ ID NO: 361645 - DNA, 62 bp, Artificial Sequence
  ENSG00000140553_56 (sequence is synthesized)
ccatccatccactcttccaccctctaccccttaccttattctaaaaagaacttaggtaggtt

SEQ ID NO: 361646 - DNA, 120 bp, Artificial Sequence
  ENSG00000140553_57 (sequence is synthesized)
gtcaaaaaaggcttccgaggcaaagaaggtgccatcattgtgggtgagtggaagcaggtctggggtcttttggacgttactgtcatggaagggatggggctgagccagccaggccagttt

SEQ ID NO: 361647 - DNA, 120 bp, Artificial Sequence
  ENSG00000140553_58 (sequence is synthesized)
tttggggaccagacttgcagctgcaggttgtttggaatacggtttggtgacattattttactctagattctcagcaaccaaggtgcctcaggacaaagctggagctcagtctggagcctg

SEQ ID NO: 361648 - DNA, 120 bp, Artificial Sequence
  ENSG00000140553_59 (sequence is synthesized)
ggatgcggatccccccttccctgtgtctccctggtttgttggagaagttgaagggtcaaactgggctgggctgctgtggagcccactgatgtcttcttgttgttgccagatcctgcccgg

SEQ ID NO: 361649 - DNA, 80 bp, Artificial Sequence
  ENSG00000140557_0 (sequence is synthesized)
gagcaacccctgcctgtcgctgccgctgccgctgccgctgccgccgccggcccggactcgtccggagcgcagggtgtctg

SEQ ID NO: 361650 - DNA, 120 bp, Artificial Sequence
  ENSG00000140557_1 (sequence is synthesized)
ctgcgccctccggcccctgctcctcgcgccggcccgcgtgggtcccggcgggcgcgaacccaccatgcagctgcagttccggagctggatgctggccgcgctcacgctgctcgtggtctt

SEQ ID NO: 361651 - DNA, 120 bp, Artificial Sequence
  ENSG00000140557_2 (sequence is synthesized)
cctcatcttcgcagacatctcagagatcgaagaagaaatcgggaattcgggaggcagaggtacaatcagatcagctgtgaacagcttacatagcaaatctaatagagctgaagttgtaat

SEQ ID NO: 361652 - DNA, 120 bp, Artificial Sequence
  ENSG00000140557_3 (sequence is synthesized)
aaacggctcctcatcaccagctgttgttgacagaagtaatgaaagcatcaagcacaacatccagccagcctcgtccaaatggagacataaccagacgctctctctgaggatcaggaagca

SEQ ID NO: 361653 - DNA, 120 bp, Artificial Sequence
  ENSG00000140557_4 (sequence is synthesized)
gattttaaagttcttggatgctgaaaaggacatttctgtcctaaagggaaccctgaagcctggagatattattcattacatcttcgatcgagacagcaccatgaatgtgtcccagaacct

SEQ ID NO: 361654 - DNA, 120 bp, Artificial Sequence
  ENSG00000140557_5 (sequence is synthesized)
ctacgagctcctccccaggacttcgccactgaagaataagcactttgggacttgtgccatcgtgggcaactcgggggtcttgctgaacagcggctgtgggcaggagattgacgcccacag

SEQ ID NO: 361655 - DNA, 120 bp, Artificial Sequence
  ENSG00000140557_6 (sequence is synthesized)
cttcgtcatcaggtgcaacctggccccagtacaggagtatgcccgggatgtggggctcaagacagacctggtaaccatgaacccctcggtcatccagcgggcctttgaggacttggtcaa

SEQ ID NO: 361656 - DNA, 120 bp, Artificial Sequence
  ENSG00000140557_7 (sequence is synthesized)
tgccacgtggcgggagaagctgctgcaacggctgcacagcctcaatggcagcatcctgtggatccctgccttcatggcccggggcggcaaggagcgtgttgagtgggtcaacgagcttat

SEQ ID NO: 361657 - DNA, 120 bp, Artificial Sequence
  ENSG00000140557_8 (sequence is synthesized)
cctgaagcaccacgtcaacgtgcgcactgcatacccctcgctgcgcctgctgcacgccgttcgcggatactggctgaccaacaaagtccacatcaaaagacccaccaccggcctcttgat

SEQ ID NO: 361658 - DNA, 120 bp, Artificial Sequence
  ENSG00000140557_9 (sequence is synthesized)
gtataccctggccacacgtttctgcaaacaaatctacctctacggcttctggccctttccgctggatcagaaccagaacccagtcaagtaccactattatgacagcctcaagtatggcta

SEQ ID NO: 361659 - DNA, 120 bp, Artificial Sequence
  ENSG00000140557_10 (sequence is synthesized)
cacctcccaggccagcccgcataccatgcccttggagtttaaggccctcaagagcctacatgagcagggggctttgaaactgactgtcggccagtgcgatggggccacgtagggtgggca

SEQ ID NO: 361660 - DNA, 120 bp, Artificial Sequence
  ENSG00000140557_11 (sequence is synthesized)
ccccatgggactcagtggctcacatttcctgccagctacaccacaggcagatgggagtcggggtggcacaaacaatagaacaagcaggctagtggttttctttgttaaagtgtaaaacag

SEQ ID NO: 361661 - DNA, 120 bp, Artificial Sequence
  ENSG00000140557_12 (sequence is synthesized)
tgaccagaatatatatatctatacctgcatatatatattgacctgagtatttataactgtgtggtgttcatctagcattaggcagataggccacaggaagaaggtgtggagaacccacct

SEQ ID NO: 361662 - DNA, 120 bp, Artificial Sequence
  ENSG00000140557_13 (sequence is synthesized)
gaaccagattgagactcaatccatctttgggggtggaaggacttgacatgaaaagaagccagtcccatgactttggatgacaaactgcctcctggcttggagggatctttgggctcatgg

SEQ ID NO: 361663 - DNA, 120 bp, Artificial Sequence
  ENSG00000140557_14 (sequence is synthesized)
atgaatggcgagccacctgttgtcagctgccccaagcctctgggatatgtggattcggagaaagctgaggcccagaggggacactcgacccagtctaaagtgggtgccattcacggagga

SEQ ID NO: 361664 - DNA, 120 bp, Artificial Sequence
  ENSG00000140557_15 (sequence is synthesized)
gagggaggttggagacttcaaccgggcaaaggagcacaaggaaaccaagcagcagaggccccatcagcacagagggcctcgttccacgaacgtagagtttgactgcctaagggacagcac

SEQ ID NO: 361665 - DNA, 120 bp, Artificial Sequence
  ENSG00000140557_16 (sequence is synthesized)
gaatgactcacatgtttcagacaggcctccacggctatggagagaaggctggaggagacacaatggatggttcatgttctggcttagcaagagccaccaagaactttgggtgaagcaagc

SEQ ID NO: 361666 - DNA, 120 bp, Artificial Sequence
  ENSG00000140557_17 (sequence is synthesized)
agatgacaatgaagaggagtaatgttccgaatcatgtttttgaaaaatcaagacctcctgttaagggcccacttgaccctagaataaggcaggagagtgtctaaaatctagctgctttgg

SEQ ID NO: 361667 - DNA, 120 bp, Artificial Sequence
  ENSG00000140557_18 (sequence is synthesized)
gtgttttttaaagcaatgtgagtccactgaggaggaagagaccctgggatttcaccctctgggttagtctctgtctcaccctgttagaatgtcacgagggactgtactgtcccctctgtc

SEQ ID NO: 361668 - DNA, 120 bp, Artificial Sequence
  ENSG00000140557_19 (sequence is synthesized)
accagggaagccacaatgagagcttgaaagggtgctgtcaagataaatgtcatccttcttaaaatacatatgattgcctttttgggtgcctcacagagccccagagtgtgagacctgaaa

SEQ ID NO: 361669 - DNA, 120 bp, Artificial Sequence
  ENSG00000140557_20 (sequence is synthesized)
gaatgttcagcatctagctccatgtccctgcaaccactctctgtttgccttctgcattctgcactctgcggggcctttgcagccagactgctgtgtcaatgttactttcttgtcactttc

SEQ ID NO: 361670 - DNA, 120 bp, Artificial Sequence
  ENSG00000140557_21 (sequence is synthesized)
ctaccctgatggtcacactagcccaccccaagctccgacattgaggttttcatctctgcagggagaggttccaatgtccaccccacccccaggtacccgcctcttcccacagaagcaatt

SEQ ID NO: 361671 - DNA, 120 bp, Artificial Sequence
  ENSG00000140557_22 (sequence is synthesized)
ttagaattttgcaaaattcttttccccttattgagattaatatttaagattaaaaaaaaaatacccaaagccaaatgcagttccaaatagtggacataatctcccagggaaatctgggct

SEQ ID NO: 361672 - DNA, 120 bp, Artificial Sequence
  ENSG00000140557_23 (sequence is synthesized)
aggggctggaatcacaggtctcacatagagaaatagccagcttgaatttgttagtcgtattccttcacctgatgaataacagtgttttaaaacatatttgaaaggtaagtaaaaaactac

SEQ ID NO: 361673 - DNA, 120 bp, Artificial Sequence
  ENSG00000140557_24 (sequence is synthesized)
catcttgaaggtgaagggagttaagaaaagtaatcaagacctgctcctaagcatatgagaccagatgtaattaatcaatggcaatgcagaacaggaccttggctctaaattaatggttga

SEQ ID NO: 361674 - DNA, 120 bp, Artificial Sequence
  ENSG00000140557_25 (sequence is synthesized)
ccggaagggattggaggcggcagaaccattaaccctacacaagaacactccagcccaaaaccgtgaggaaggtgatatatctctgcattttcccttgttgttgcttgaagtctgtgattg

SEQ ID NO: 361675 - DNA, 120 bp, Artificial Sequence
  ENSG00000140557_26 (sequence is synthesized)
gggatttgcgttataaaatgaatattttaaaaagcaacagccctaatagcctctgtgggaactgagtggtttcggactcctcacaggcggtggaaataattaataccatattttatacat

SEQ ID NO: 361676 - DNA, 120 bp, Artificial Sequence
  ENSG00000140557_27 (sequence is synthesized)
ctccagagcctttcatcttgaggatctcaaagaccgtagaagacatttaatttctaaagcttgaagtgccccgaggagcaggtagaatttccagcagggccttggtggattaaccaaggc

SEQ ID NO: 361677 - DNA, 120 bp, Artificial Sequence
  ENSG00000140557_28 (sequence is synthesized)
cttggattccagaatgtttcatggtaagcactgtggagaacctacatgtcaggttctggagttggccctgagctctatccaccaagccagcaccccaccatccctttgcaggggagtcaa

SEQ ID NO: 361678 - DNA, 120 bp, Artificial Sequence
  ENSG00000140557_29 (sequence is synthesized)
agggccagaactccttgggggaccagaacatggttttccttctgcctatcttagtcatggctcctaaaattgaagctgatatgagctggagtgcaaggagtccttccaccctgccttcag

SEQ ID NO: 361679 - DNA, 120 bp, Artificial Sequence
  ENSG00000140557_30 (sequence is synthesized)
gttctctctggagaaaggttagagaccccaggacaatcaacatgtgcaccgttcccctcctcggcttgagtcctgcactaccaaaatggcctggccatttgatggcggagctccaggggc

SEQ ID NO: 361680 - DNA, 120 bp, Artificial Sequence
  ENSG00000140557_31 (sequence is synthesized)
cttggctttctctggctcattgtccttctccatctgggccaattgtccttccctgcccattcagagttcaatttgagcctccactgcagttcctggtgtgggccagctggtgttgggtgg

SEQ ID NO: 361681 - DNA, 120 bp, Artificial Sequence
  ENSG00000140557_32 (sequence is synthesized)
ccccagggagtcacacagtctgtacccggccccgagatcctctgctgtaactgcagggtcacaggcatcccgggagaatgggcctccaccctcagccagccctcactgctgacaggcacc

SEQ ID NO: 361682 - DNA, 120 bp, Artificial Sequence
  ENSG00000140557_33 (sequence is synthesized)
cctctgtcacctcctgccacctgtcagatacccagcctgcccgccatcagccacccgagtggttccgacctccattcacctcaagccccaacaggcccctgtcattccacttcatggaag

SEQ ID NO: 361683 - DNA, 120 bp, Artificial Sequence
  ENSG00000140557_34 (sequence is synthesized)
agacggagccttctgaaatgagatctaccctgaaaatctcttctccttcccctttctgagaaacgtcatccccaccagttaacgtttcctgtacaccctcaccctctctcgtccatctct

SEQ ID NO: 361684 - DNA, 120 bp, Artificial Sequence
  ENSG00000140557_35 (sequence is synthesized)
gttgcctctgcacatcagcacacactgactccacctgggctggctcctgccgcctcttccctacctcctccactagccgcaggaagggcctccagcacccacaactgcccttcctcttga

SEQ ID NO: 361685 - DNA, 120 bp, Artificial Sequence
  ENSG00000140557_36 (sequence is synthesized)
tgcccctcggcttccccccagcctggcagcagcgtcccagcgcctccacattgcccctctcacctcccagctctccacgccacttggctctgcagcgacccctcctagacgctccctggc

SEQ ID NO: 361686 - DNA, 120 bp, Artificial Sequence
  ENSG00000140557_37 (sequence is synthesized)
ccctcggcacccagaatgccacattcttgtgtttttttcctccttctttcccaatccctctcaaccatgtatttatttatatatgtatgtatttttttatttattatttatttattgaaa

SEQ ID NO: 361687 - DNA, 120 bp, Artificial Sequence
  ENSG00000140557_38 (sequence is synthesized)
cccctactttgattgacaaaggaatcaaggtagatctgaccagtattcccctctcttctccttgtcccaccacatggacatgccttacactggcgtcctctcctgagtccctccgcactc

SEQ ID NO: 361688 - DNA, 120 bp, Artificial Sequence
  ENSG00000140557_39 (sequence is synthesized)
tccatcagcaacctcacacctgccttcagacccggctgcaacttcctaagctgcccctgccccagctcctctctgcaacccagccctctcctgagctctaggctgggattacacccgctg

SEQ ID NO: 361689 - DNA, 120 bp, Artificial Sequence
  ENSG00000140557_40 (sequence is synthesized)
gagggacactcaccccatctgctcccacggcagcaccatcaactcaacaagtcagaagccaagtggatcatctgtgtccccttcccccacaatccctcctttttctagtaaaagacccgt

SEQ ID NO: 361690 - DNA, 120 bp, Artificial Sequence
  ENSG00000140557_41 (sequence is synthesized)
gatcccgtcagccacccagtctgagatgctgacgttatcttcgactattcttccctgtcctgccttgctaattcttcccactagcactaatctcgactctttgtcacttggactatttca

SEQ ID NO: 361691 - DNA, 120 bp, Artificial Sequence
  ENSG00000140557_42 (sequence is synthesized)
gcaacagtctcatctcccagattacctctgtgcacactgacacgtggtcccgtccatcctgaacatgcacagtgattttcctctcccgttgcacacaaacctttaaaagttccccggccc

SEQ ID NO: 361692 - DNA, 120 bp, Artificial Sequence
  ENSG00000140557_43 (sequence is synthesized)
gtgaacaaatgtacaattctctattctgacattacagaccaccggataaggccccattcttcctttacaccctcccctggtcagcctaggagagttgtttttcctggaaagggtgcctgc

SEQ ID NO: 361693 - DNA, 120 bp, Artificial Sequence
  ENSG00000140557_44 (sequence is synthesized)
gttttactgtctctgtgcctttggtcttgctatccccatcccctggaatgctcccttttcttcccttcaaagcccatgcggaaaccacgtccttcatgaagccctccctgatgtaccaac

SEQ ID NO: 361694 - DNA, 120 bp, Artificial Sequence
  ENSG00000140557_45 (sequence is synthesized)
cactgggatctctccctctgctgaaccaccgtagcactttatttgtacctttctcatggcacttaccatattctgccttgtattatagttatttgtgcacttgtcctttgactgttctta

SEQ ID NO: 361695 - DNA, 120 bp, Artificial Sequence
  ENSG00000140557_46 (sequence is synthesized)
gactgtaagcttgccaagggcagggactgtgttttattcatctgtatccatcacagcactaggcgtggtgcatagcacacagcagttgctcaataaatgtttgttggattaaatccttaa

SEQ ID NO: 361696 - DNA, 120 bp, Artificial Sequence
  ENSG00000140557_47 (sequence is synthesized)
gcgcactgcatacccctcgctgcgcctgctgcacgccgttcgcgggtgagcggcctccctacaggccagtaggaccgtcactaagtgtgggagattcttggtaggcagtatccctttccc

SEQ ID NO: 361697 - DNA, 120 bp, Artificial Sequence
  ENSG00000140557_48 (sequence is synthesized)
aggtgcatttccatcccagctccaccactcatttgctggatggcctcagcaagtcacctggcctttctgagcctccattccttgagagatgagggggtttggcaagtgggtttcatctgg

SEQ ID NO: 361698 - DNA, 120 bp, Artificial Sequence
  ENSG00000140563_0 (sequence is synthesized)
gtgccaaccttatcatctcattcttcgttttaatgtttctacagttgctctgataaaattcttttaaaaagttctttaaaaatgctttccccaatatttatacaagttaccaatcaaatg

SEQ ID NO: 361699 - DNA, 120 bp, Artificial Sequence
  ENSG00000140563_1 (sequence is synthesized)
aatgttgcagtcttaatcatttattggaaactgtaagatttttgagtcgtgtttctcactttgatgtgccttactgccaccaagaaggttcatgttttttttttttgtttgtttgttttt

SEQ ID NO: 361700 - DNA, 120 bp, Artificial Sequence
  ENSG00000140563_2 (sequence is synthesized)
gtttttttctgttttataggagtcattgcagttttcagtagaggtgtacttctgagaagtggcttcttgggtcttcatgcagccatggatctggataaaccatctgtttggggctcatta

SEQ ID NO: 361701 - DNA, 120 bp, Artificial Sequence
  ENSG00000140563_3 (sequence is synthesized)
aaacagcggaccaggccattgttgatcaacttgagcaagaagaaggtgaaaaagaacccaagtaagcccccagatctacgggcaaggcatcacttggaccgccgtctcagcctctctgtg

SEQ ID NO: 361702 - DNA, 120 bp, Artificial Sequence
  ENSG00000140563_4 (sequence is synthesized)
cctgatctcctggaggctgaggccttggccccagagggccggccttactccgggccacagtcttcctacacctcggtgcccagcagtctgtccactgcagggatctttcccaagagcagc

SEQ ID NO: 361703 - DNA, 120 bp, Artificial Sequence
  ENSG00000140563_5 (sequence is synthesized)
agtagctccttgaaacagtctgaagaagaattggattggagccaggaagaagccagtcacctccatgtggtggaaacagactcagaggaggcctatgcctctcctgctgagcggagacgg

SEQ ID NO: 361704 - DNA, 120 bp, Artificial Sequence
  ENSG00000140563_6 (sequence is synthesized)
gtgtccagcaacggcatctttgatcttcagaaaacttcccttggaggggatgcaccagaagagccagagaagctatgtggaagcagtgacctgaatgcttctatgacatctcaacatttt

SEQ ID NO: 361705 - DNA, 120 bp, Artificial Sequence
  ENSG00000140563_7 (sequence is synthesized)
gaagaacaatctgtaccgggggaagccagtgatggcttgagtaacctccccagcccttttgcgtacctcctcaccatacacctgaaggaaggccggaacctggttgtccgagatcgctgt

SEQ ID NO: 361706 - DNA, 120 bp, Artificial Sequence
  ENSG00000140563_8 (sequence is synthesized)
ggcacaagtgatccttatgtgaaatttaagctgaatgggaagacgctgtacaaaagtaaagtcatatataagaacttgaacccagtatgggatgagatagttgtattgccaatccaaagc

SEQ ID NO: 361707 - DNA, 120 bp, Artificial Sequence
  ENSG00000140563_9 (sequence is synthesized)
cttgatcaaaagctacgtgtgaaggtatatgatcgagatttaaccacatctgatttcatgggttctgcatttgtcattctcagtgatcttgagcttaacagaacaactgaacatatttta

SEQ ID NO: 361708 - DNA, 120 bp, Artificial Sequence
  ENSG00000140563_10 (sequence is synthesized)
aaactggaagatccaaacagtttagaagatgacatgggagtgatcgtgttaaatttgaacctagtggtaaaacagggtgatttcaagagacaccgttggtcaaatcggaagcgattaagt

SEQ ID NO: 361709 - DNA, 120 bp, Artificial Sequence
  ENSG00000140563_11 (sequence is synthesized)
gccagcaagtcctctttgatacgcaacctacggctctctgagtccttgaaaaagaaccaactctggaacgggattataagtataactttgttggaagggaagaatgtctcaggaggaagc

SEQ ID NO: 361710 - DNA, 120 bp, Artificial Sequence
  ENSG00000140563_12 (sequence is synthesized)
atgacagagatgtttgtccagttaaaactgggagatcagaggtataaaagtaagacactgtgtaagagtgcaaatccgcagtggcaggaacagtttgactttcactacttctctgacagg

SEQ ID NO: 361711 - DNA, 120 bp, Artificial Sequence
  ENSG00000140563_13 (sequence is synthesized)
atgggcattttggacattgaagtgtggggaaaggacaacaaaaagcatgaggaacgtctgggcacgtgtaaagtggatatctcggcactccctctgaagcaagccaactgcctggagctg

SEQ ID NO: 361712 - DNA, 120 bp, Artificial Sequence
  ENSG00000140563_14 (sequence is synthesized)
ccactggacagctgtctgggggctctccttatgttggtcacacttacaccctgtgcgggggtctccgtctctgatctgtgtgtctgccccttagcagacctcagcgaaagaaagcagatt

SEQ ID NO: 361713 - DNA, 120 bp, Artificial Sequence
  ENSG00000140563_15 (sequence is synthesized)
acccagcgatattgcttacagaactccctgaaagatgtgaaagacgtcggcattctacaagtgaaggttttaaaggcagcagatctcttagcggcagatttctcagggaagagtgaccca

SEQ ID NO: 361714 - DNA, 120 bp, Artificial Sequence
  ENSG00000140563_16 (sequence is synthesized)
ttttgcttgttggagttaggcaatgaccgacttcagacgcataccgtctacaaaaacctcaaccctgaatggaacaaagtttttacatttcccattaaagatatccatgatgttttggaa

SEQ ID NO: 361715 - DNA, 120 bp, Artificial Sequence
  ENSG00000140563_17 (sequence is synthesized)
gtgacagtgtttgatgaagatggagataaacccccagattttcttggaaaagttgccattcccttgctgtccattagagatggacaaccgaattgttatgtactaaagaataaagattta

SEQ ID NO: 361716 - DNA, 120 bp, Artificial Sequence
  ENSG00000140563_18 (sequence is synthesized)
gaacaagcttttaaaggagttatttacttagagatggaccttatatataatccggtgaaagcaagtattaggacttttactccccgggaaaagcgctttgttgaagacagccgcaagctg

SEQ ID NO: 361717 - DNA, 120 bp, Artificial Sequence
  ENSG00000140563_19 (sequence is synthesized)
tccaaaaagatcttatcaagagatgtggaccgtgtgaaaagaatcactatggcaatatggaatacaatgcagttccttaaaagctgcttccagtgggaatccacattaagaagtacaata

SEQ ID NO: 361718 - DNA, 120 bp, Artificial Sequence
  ENSG00000140563_20 (sequence is synthesized)
gcattcgcggtatttttgatcactgtctggaattttgaactatatatgatccccttggcattgttgctgatctttgtctacaatttcatcagacctgtgaaaggcaaggtcagcagcatc

SEQ ID NO: 361719 - DNA, 120 bp, Artificial Sequence
  ENSG00000140563_21 (sequence is synthesized)
caggacagccaggagagcacagacatagatgacgaggaggatgaagatgacaaggaatctgagaaaaaggggttgattgaaagaatctatatggtacaggatattgtttcaactgttcaa

SEQ ID NO: 361720 - DNA, 120 bp, Artificial Sequence
  ENSG00000140563_22 (sequence is synthesized)
aacgtcttggaggaaatagcttcttttggagaaaggattaagaacacatttaactggacggtccccttcctttcatctctggcctgtttgattctggcagcagccaccatcattttgtat

SEQ ID NO: 361721 - DNA, 120 bp, Artificial Sequence
  ENSG00000140563_23 (sequence is synthesized)
ttcattccactgcggtacatcattttaatctggggcataaataaatttactaagaagcttcgaaatccctattccatcgacaataatgagctactagacttcctctctagggtaccgtct

SEQ ID NO: 361722 - DNA, 120 bp, Artificial Sequence
  ENSG00000140563_24 (sequence is synthesized)
gatgttcaaaaggtgcagtatgcagaattgaaactctgcagcagccacagccccctgcggaagaagcgcagcgctctctagggcacacaccgactttggacagcagcacccaatattgtg

SEQ ID NO: 361723 - DNA, 120 bp, Artificial Sequence
  ENSG00000140563_25 (sequence is synthesized)
tttggttgagtagaccaatgttatggctgtttcagtggtacccaaggtgtccttctgaaatgcatgccctgtggcaccctctgtatacttcctcctccttcacgtgcacagacatacaca

SEQ ID NO: 361724 - DNA, 120 bp, Artificial Sequence
  ENSG00000140563_26 (sequence is synthesized)
catgtgcacacaccctcatgcatgggtgtcctagttgcgtagagggtcagcccagcgaaaagcaacaaccccaagactgtgaaagactaacatccattctgaaataggagataacaaggc

SEQ ID NO: 361725 - DNA, 120 bp, Artificial Sequence
  ENSG00000140563_27 (sequence is synthesized)
tgccatggatctgaacaccaccttccttgagaacagccaggagcccacttggattcaagagtgactttgaacttgttttcacacctccaacagactctcattaagattcagttatttccg

SEQ ID NO: 361726 - DNA, 120 bp, Artificial Sequence
  ENSG00000140563_28 (sequence is synthesized)
ctccccagccccacactcctttcagattatcgttcatgggcgtaagtctcttctcagagttaacaagtctttggtagtcatcctctgtccaaatattgtatattattaaaaggcattttt

SEQ ID NO: 361727 - DNA, 120 bp, Artificial Sequence
  ENSG00000140563_29 (sequence is synthesized)
aataattaccagaattagctcaaacctttagggatctttcagccatgattattaaggatatgtatgtgaatttttgggaaacctctcggtgctggatgccagcctacagcagggtccatt

SEQ ID NO: 361728 - DNA, 120 bp, Artificial Sequence
  ENSG00000140563_30 (sequence is synthesized)
gctggcaatggatggcccaggaaggtccctagagatcactcacttgaaaaatgagggtcccatgaaagtatttggttgccttctgatgccacttcttctcactttactttttgcttattt

SEQ ID NO: 361729 - DNA, 120 bp, Artificial Sequence
  ENSG00000140563_31 (sequence is synthesized)
tcaaaatattataaaatgtcaacatataatttcagaaaggcaggtgggggtaggggagaaatgaatgaataaattctctaggtatttagaaagataagaaactgaagaccgagagactaa

SEQ ID NO: 361730 - DNA, 120 bp, Artificial Sequence
  ENSG00000140563_32 (sequence is synthesized)
caaatgtatcttttgttcctcttagaagtaaaataagctacatacaataaaaatttatttcagaaccccatttctagaaaataccaccccagagtcctcatttgatagcatctgtctcct

SEQ ID NO: 361731 - DNA, 120 bp, Artificial Sequence
  ENSG00000140563_33 (sequence is synthesized)
gcagacctcatcattccacagtatttccctgccatgtaaaaatcctgactttgtgcgtatataaaatgtatgcaattaagtctgtttaaatgatatttaagttttaaagactgtattttg

SEQ ID NO: 361732 - DNA, 120 bp, Artificial Sequence
  ENSG00000140563_34 (sequence is synthesized)
ttgacacatactttgtgcagtttttatgtatgtatgtattataaaaaaagttaaggttaaaaagatctcatttaatagtgagttcactatttttttttttttgtctctgggttgtaattt

SEQ ID NO: 361733 - DNA, 120 bp, Artificial Sequence
  ENSG00000140563_35 (sequence is synthesized)
aataatcttcaaacaaaatgtttacgaaaaatgccaaagattctaaatcttatcatcccgtgtctgtttttcttcatgttgtatctcactgggttgctttctggctgagccagaattctg

SEQ ID NO: 361734 - DNA, 120 bp, Artificial Sequence
  ENSG00000140563_36 (sequence is synthesized)
catgatttgatttacttcaagttaatgaagctggctggaaaagagccttgcagaaattataaaagctccagtaaatctcgtagttgtacatacaatagatacccaagaacctcttttgtt

SEQ ID NO: 361735 - DNA, 120 bp, Artificial Sequence
  ENSG00000140563_37 (sequence is synthesized)
aaaccagttactcaatcttctgtgtaaacaatgcctcattgtcttgcttctaactatcatctagtttatcatagtctgtcattttgtaacgacctaagtcagacatttttaaacagacat

SEQ ID NO: 361736 - DNA, 120 bp, Artificial Sequence
  ENSG00000140563_38 (sequence is synthesized)
gtgagatctgatcagtcatttgaatgaaaactttcagcagcaaaataaccccttatttatttaaaagtggaaccaatactttattgttgttcttttgctatagaatttcaaaatgaaatt

SEQ ID NO: 361737 - DNA, 120 bp, Artificial Sequence
  ENSG00000140563_39 (sequence is synthesized)
atttgcccgacaagaaggcatcattagttagacttgtttcctctgtagcccgattgaaattctcagtgttaagtttaggacccaaacaccagctgggacgtaagagcaggaccgaatcaa

SEQ ID NO: 361738 - DNA, 120 bp, Artificial Sequence
  ENSG00000140563_40 (sequence is synthesized)
ccttgaataaactgtatatagaaaacaattgttagttgattaagtagacattggatgtttgttagaaaggaatgttagttgtaagtgacatgttaagatttatacaattgtcaaaaactt

SEQ ID NO: 361739 - DNA, 120 bp, Artificial Sequence
  ENSG00000140563_41 (sequence is synthesized)
ttaggaaagattccagaatgcttttgataaaatttatcgattgtggattcacagtgtgataattaagtagggatgttgaagtcttgccaagttttcctggttcccttctcaaactttatc

SEQ ID NO: 361740 - DNA, 120 bp, Artificial Sequence
  ENSG00000140563_42 (sequence is synthesized)
ttcccatttctagccctgtctctctatcttacaggcatctacacctcagcaagtcagaaactaaacatcatctgtctctccctgtcttcagaaccccaaccctcataatctccttccagc

SEQ ID NO: 361741 - DNA, 120 bp, Artificial Sequence
  ENSG00000140563_43 (sequence is synthesized)
ttccttatttcccttaccaggactggcattttctgggcttggaatttctcggtcatcctctttttttttgttcctcgtgctgttgtcctcgtctcccaacccctaaagcctagtaggtcc

SEQ ID NO: 361742 - DNA, 120 bp, Artificial Sequence
  ENSG00000140563_44 (sequence is synthesized)
agtgtcaatgcattaaccacttctgttctgatttccaccacccaagtggaggccttcataacctctcagacgtcacggccatgatgccagttacattatgcctagttaatcttcattcag

SEQ ID NO: 361743 - DNA, 120 bp, Artificial Sequence
  ENSG00000140563_45 (sequence is synthesized)
actggaaggacctgcccccagttgtttctttctgaatagattctactctccttcaacacttccaaagtctcctgccccaaagaggcttagttagtcctgtggctggatgtgactccaact

SEQ ID NO: 361744 - DNA, 120 bp, Artificial Sequence
  ENSG00000140563_46 (sequence is synthesized)
tccttttttgtaccatcacatctttcatatctttctggcatctgccatacatcataagaggctttgaccactgtcctccactgaatagcccattacagctagcacctaatagttactcag

SEQ ID NO: 361745 - DNA, 120 bp, Artificial Sequence
  ENSG00000140563_47 (sequence is synthesized)
gaaataaatacatgtttaacaggccaggtcgtagagattatttttctttctctgccttttcatgtgctgctttcagaacagagggctggattggatagattagtatgatctatcctggag

SEQ ID NO: 361746 - DNA, 120 bp, Artificial Sequence
  ENSG00000140563_48 (sequence is synthesized)
attcatttcttgcattaagagcttattttgtgtgatattatttataatccctgactatgtcaattataaacttttaaattatgtcttatatttgaagttcttacctacatatcagaggaa

SEQ ID NO: 361747 - DNA, 120 bp, Artificial Sequence
  ENSG00000140563_49 (sequence is synthesized)
aatataatgtttatttctaggtggtaaaacaatcttctggattcttttttctttacttgtaaattatcatttaacaagtctatattgaatgccgataattttctggaacaaaacagacta

SEQ ID NO: 361748 - DNA, 120 bp, Artificial Sequence
  ENSG00000140563_50 (sequence is synthesized)
cattcccttggtaaagccagacattaaacagatactttcaagcaacagcatgccatgctcagatttaagtttgaaaaatattctagctgcaatggatagcctagcaattttcaaagttta

SEQ ID NO: 361749 - DNA, 120 bp, Artificial Sequence
  ENSG00000140563_51 (sequence is synthesized)
gagaagttattaatattagccctttgtagtactcctgataaatgaataacaccctggactttcaaatagtggcactgggaaaaaagtaagtagaattgagagatggtgaagagataaagt

SEQ ID NO: 361750 - DNA, 120 bp, Artificial Sequence
  ENSG00000140563_52 (sequence is synthesized)
gagcaggacttaacaattgctggactatgggatgagggagcgtagagtcaaggatggctctcagtccctaggtctccaggtctaggaagatggtgttacctttcactaagggagagaact

SEQ ID NO: 361751 - DNA, 120 bp, Artificial Sequence
  ENSG00000140563_53 (sequence is synthesized)
gtaagaactgctgtgagaggaccacaggagtccagttttagcgctgaatctcaggtgactgaaaagcatccaaataggaatgtcagcaaggtaatggaatatatagttctcagagaagta

SEQ ID NO: 361752 - DNA, 120 bp, Artificial Sequence
  ENSG00000140563_54 (sequence is synthesized)
acacactgtacttgagatgtacacaagttaaaggcaaacattgtatatgaaaagtgatcaaaactacatgcttcaagaaattaaaccttgaagaactcaacagttaatgtcatatataga

SEQ ID NO: 361753 - DNA, 120 bp, Artificial Sequence
  ENSG00000140563_55 (sequence is synthesized)
aaggcaagtcagttaagagtgtaaatagaaacgggtaaatacagaggagaaaaacagtaagcatggactgtcctagaattcagtggcagagcatactgcaagaaagctgatgtggtcaat

SEQ ID NO: 361754 - DNA, 120 bp, Artificial Sequence
  ENSG00000140563_56 (sequence is synthesized)
aatatcaaatgccgctgagatcacataagtacagaatcatgaccttaatggtttgacagtttggaagcaccctggcaacaagccatttcagtggaatggtagaaatggaaaccacgctgg

SEQ ID NO: 361755 - DNA, 120 bp, Artificial Sequence
  ENSG00000140563_57 (sequence is synthesized)
gttgagaagtgagtggatgtgaaaatatggggcctctgaatggaggtaacccttgaaaaattccactgtggagaagaaaggagagagagagggctggaatttggaatgaaaggagatatt

SEQ ID NO: 361756 - DNA, 120 bp, Artificial Sequence
  ENSG00000140563_58 (sequence is synthesized)
tgggattattttagtaagaaaacagaggtgtcatgacctcagtgtaaccctattagctgcaaaaaattcttcatgggcttgagatggagttagccatattcattattgaaaactatgttc

SEQ ID NO: 361757 - DNA, 120 bp, Artificial Sequence
  ENSG00000140563_59 (sequence is synthesized)
cattattgaaaactatgttctgcacttatacattgttggttggagtgtaaattagttcaaccgctgtggaagacagggtgggtgtttcctcaaaaacctaaagacagaaataccatttga

SEQ ID NO: 361758 - DNA, 120 bp, Artificial Sequence
  ENSG00000140563_60 (sequence is synthesized)
gtatgtacccaaaggaatataaattgttctactataaaaacacatgcacacacatgttcactgcaacactatttacaatagcaaagacactggatcagtctaaatgcccatcattgatag

SEQ ID NO: 361759 - DNA, 66 bp, Artificial Sequence
  ENSG00000140563_61 (sequence is synthesized)
gcaaagacactggatcagtctaaatgcccatcattgatagaatggataaagaaaatgtggtagagc

SEQ ID NO: 361760 - DNA, 120 bp, Artificial Sequence
  ENSG00000140563_62 (sequence is synthesized)
cagaaaaccaaataccacatgttctcatttataggtaggagttaaatgatgagaacacatggacatgtagaagggaacaaaatacactgggggctattggagggtgaagggtgaaaggag

SEQ ID NO: 361761 - DNA, 120 bp, Artificial Sequence
  ENSG00000140563_63 (sequence is synthesized)
gggtgaaaggaggaagaggatcaggaaaaataatgagtaccaggcttaatacatgggcgatgaaataatctgtatgacaagcctctctgacacagtttacctatgtaacaaacctgcaca

SEQ ID NO: 361762 - DNA, 120 bp, Artificial Sequence
  ENSG00000140563_64 (sequence is synthesized)
gttacccctgaactttaaaaaaaactatgttctatcaaaacctgcctctcatttatgtattaggaatcttgtgacaacggaacagttgaaaaattaaaataaaaattgcctgaaaatgca

SEQ ID NO: 361763 - DNA, 120 bp, Artificial Sequence
  ENSG00000140563_65 (sequence is synthesized)
gtaatgggattttcacagctgaagaaggcagagcccctcttcaccagcccctgcttcctgccttcaggaaaaggcatttgtgaatgattctacatgacagcaacatgtgcttgacttgag

SEQ ID NO: 361764 - DNA, 120 bp, Artificial Sequence
  ENSG00000140563_66 (sequence is synthesized)
ctgcgcttccgagtggcgactgcagcgggtccggtgcaggtgaggggcgcgcgcctgcccagctttgcagcccccgaacgcggcctcgcacagcaatcaaaatggtattggaatagttac

SEQ ID NO: 361765 - DNA, 120 bp, Artificial Sequence
  ENSG00000140563_67 (sequence is synthesized)
tagcagatgactgatgtttttgcaattattttagggggggtgcaacattttatggagtcttaaaatatctgttttttaatacaatgctcttctttgaggaaccggaaaggaaatttgtta

SEQ ID NO: 361766 - DNA, 120 bp, Artificial Sequence
  ENSG00000140563_68 (sequence is synthesized)
aggaattatttcttttgtgttattaagatgatcaggcatacatttgcagcattttggtttcttctttcttcttttacttttagctaccaagttttccattgggagttcttttgggaagat

SEQ ID NO: 361767 - DNA, 120 bp, Artificial Sequence
  ENSG00000140563_69 (sequence is synthesized)
acaaattttaatgttctctagtctagtacatgcaaatttctagttgatacagtacctatcaaagatgtctgtaacatcagtgaagcattagactttgtcacaatatgattgggactcttc

SEQ ID NO: 361768 - DNA, 120 bp, Artificial Sequence
  ENSG00000140563_70 (sequence is synthesized)
ttttgagcaaaaatgtggatacaaatcataatcttattttatttgggattatattttataattctaaggctatattagaacaaaagcatctttgatgatgacttatttgaaaagtatttt

SEQ ID NO: 361769 - DNA, 120 bp, Artificial Sequence
  ENSG00000140563_71 (sequence is synthesized)
taaagccaattgaagtacctgctttttaagatgtgttataatttagcatgtttataatccaatataaaaatataaagcctatttataattaggtctccagtaatgcttcttgaattgagg

SEQ ID NO: 361770 - DNA, 120 bp, Artificial Sequence
  ENSG00000140563_72 (sequence is synthesized)
cagtggggtgggtgaggagaatatttttcttttgacatcacttatgcttctagttgtagctttttatgatgaaaaccgtgattgatttactagtaaactcagagaagatagcttaaagca

SEQ ID NO: 361771 - DNA, 120 bp, Artificial Sequence
  ENSG00000140563_73 (sequence is synthesized)
gtaggaaaactgtagtgtgacttttcagttaccttttcaaagattcaactaaatatctgctatttttaacttgagttccttttattacttctttttaaaaagtggccctgttgacacttg

SEQ ID NO: 361772 - DNA, 120 bp, Artificial Sequence
  ENSG00000140563_74 (sequence is synthesized)
aataaaagtattttttctcatcccacctaaagaaggagggattttctttagcttcttcttgatcttgacagcattgctgctgcatccgtgactctggattcagtgtcagtgatacagtag

SEQ ID NO: 361773 - DNA, 120 bp, Artificial Sequence
  ENSG00000140563_75 (sequence is synthesized)
gtgaccggtgacttgagctgggggctaggttatagcatgcaatgtaaatagttatttgtcacgtggttgacaacttgccagctgatatcgtcaaaaaatttcttatatattcaagtgggg

SEQ ID NO: 361774 - DNA, 120 bp, Artificial Sequence
  ENSG00000140563_76 (sequence is synthesized)
cttgtaaaggtagttgatttctccatgaaaatagctgcatattcaaatgactgcctttgtgaagttttctatagcatattagattatgtttagcagtaatattggcacttaaaagatatt

SEQ ID NO: 361775 - DNA, 120 bp, Artificial Sequence
  ENSG00000140563_77 (sequence is synthesized)
taatattgtcaaaatttagagttttaacataatgccattttagtttcaatttatttcaaattgcagaacagttaatactagactcagcttggagctgtttttgtaaaagatctcaaagag

SEQ ID NO: 361776 - DNA, 120 bp, Artificial Sequence
  ENSG00000140563_78 (sequence is synthesized)
actatgttttcagggctcaagaatagccatatttcctcttagtgtaggcctggtttcctctgactccccacctcccatgttgaagactttgtcagaatgtctgtccgctcactcatgtgc

SEQ ID NO: 361777 - DNA, 120 bp, Artificial Sequence
  ENSG00000140563_79 (sequence is synthesized)
ttccttattttcttttgtctttgtctggcagaagcctagtgtacactatattgattatatatacacacacaaatatatttttatccccatatatacacacacacacacatatatatttat

SEQ ID NO: 361778 - DNA, 120 bp, Artificial Sequence
  ENSG00000140563_80 (sequence is synthesized)
ttatatatacacacacatatatatctccatatatatacacacacatacatatatatttatctccatatccatatttattcaagttgggtttgtaaaggtagttgatttctccatgaaaat

SEQ ID NO: 361779 - DNA, 120 bp, Artificial Sequence
  ENSG00000140563_81 (sequence is synthesized)
atttctccatgaaaatagctgcatattcaaatagctatctttgtgaatttttatatccatatttatgtatatggagatatatatgtatgtgtgtgtatatatatatggatacatgtatat

SEQ ID NO: 361780 - DNA, 120 bp, Artificial Sequence
  ENSG00000140563_82 (sequence is synthesized)
tcttatctcttctgattggtagtttttttccatttatatatttgatcaaagaaaattaattgaggaataatttattctgggccatgtgtggttattcagctaacagtgcatattgggagc

SEQ ID NO: 361781 - DNA, 120 bp, Artificial Sequence
  ENSG00000140563_83 (sequence is synthesized)
cttggggtaaaatagattatcagaatctttgttcttttcattgagtttgagttaatatttaaagagatttttatattgggattttaagtgggaataactagcacttgggactggaaatca

SEQ ID NO: 361782 - DNA, 120 bp, Artificial Sequence
  ENSG00000140563_84 (sequence is synthesized)
gtagattatttgggtgagataatttgtttataaatttccattttaatttaaactctgatggagagatttcagtttaaattctcagttttttacccctttttcttccagtcatctttgagg

SEQ ID NO: 361783 - DNA, 120 bp, Artificial Sequence
  ENSG00000140563_85 (sequence is synthesized)
tagcctttgttgctttagaaccaagctgacaaaaatctcagtatgtacaaaatgtttatgaatttactcttgtgtccagggacttaaatgtatatgagaatggtgcaggcagaagggaag

SEQ ID NO: 361784 - DNA, 120 bp, Artificial Sequence
  ENSG00000140563_86 (sequence is synthesized)
acactggctgcaaggctgacaaacatactctgtgttctttttttgtggcaaaaaacaggaaaaaaatagtagctaaaattaggagctctgttctcagactgcctgggtctgaatcctaga

SEQ ID NO: 361785 - DNA, 120 bp, Artificial Sequence
  ENSG00000140563_87 (sequence is synthesized)
tccaccagtggtctggttaactcaaagaattatttaacctctctaagctataatttcctcatatgtgaaacaaggataaaaagagtgtctgttttatagggttgtgaagattgaaattat

SEQ ID NO: 361786 - DNA, 120 bp, Artificial Sequence
  ENSG00000140563_88 (sequence is synthesized)
caaatatggtgcttggaattgggtagagacactcaatatatggtagttggtagcattgtaggaagtgaatagtaatagtcattttccattaatttatttacatgctttatcttgtgtaat

SEQ ID NO: 361787 - DNA, 120 bp, Artificial Sequence
  ENSG00000140563_89 (sequence is synthesized)
tgttaaaaaatatcaaatgcgttcctatgtgtcaaaaggcctaaatagccctgtgtacctaaaagatggtaattaattttggtggttggtttgggtgaaaatatctgtcactatttcagg

SEQ ID NO: 361788 - DNA, 120 bp, Artificial Sequence
  ENSG00000140563_90 (sequence is synthesized)
tttcataaactggaaattgttattcacatgcagacatttttggtagaagcttaactcaaaaggatttcagaaggaagttttatcttttacggacgttagtttgaaaaattcatgaacctc

SEQ ID NO: 361789 - DNA, 120 bp, Artificial Sequence
  ENSG00000140563_91 (sequence is synthesized)
aatctctgcagtggttgaaaatacccccaaggaatgagcaaagtggagacagtacccttctagactcaatctgacccatgccagggactcttatcaaatgagacctccagaaacatgtac

SEQ ID NO: 361790 - DNA, 120 bp, Artificial Sequence
  ENSG00000140563_92 (sequence is synthesized)
gatgcccccgcccccgccgcgtcagggttgctccctgcgcttccgagtggcgactgcagcgggtccggtgcaggtgaggggcgcgcgcctgcccagctttgcagcccccgaacgcggcct

SEQ ID NO: 361791 - DNA, 120 bp, Artificial Sequence
  ENSG00000140563_93 (sequence is synthesized)
gcctgggggtgggcgtcttctctcaaccgaagctgggagttggggagctggagggtccaggatgagaattcagtggcgctactaccccggagctgcttgtggttcagagatcagaaaggt

SEQ ID NO: 361792 - DNA, 120 bp, Artificial Sequence
  ENSG00000140563_94 (sequence is synthesized)
gtcctgaggactggaggcagaaatccaggcgtggcgtactggaaggcgcactaggggagggcagcctggcccagaatttctttgcattttaaaggccacacattcagtctccccggggcg

SEQ ID NO: 361793 - DNA, 120 bp, Artificial Sequence
  ENSG00000140563_95 (sequence is synthesized)
ctgtgacagcaggtttgcaaaaccaatgaaaaaaacagttttccccaggcagggaggaattttttttataattaaatactgaaagttggaattcctatgatcatcaaagtcactctcagg

SEQ ID NO: 361794 - DNA, 120 bp, Artificial Sequence
  ENSG00000140563_96 (sequence is synthesized)
cccatccttatgagcataataaaatcgcagaatcaaagcgctgcaagagatcttaaaaccacctaagtctaccactgagagcccaagaatcttggaaggacttcacagctggcctcatgc

SEQ ID NO: 361795 - DNA, 120 bp, Artificial Sequence
  ENSG00000140563_97 (sequence is synthesized)
cttcactttatatctcagggcattttctctcatttgtaaagggacttgtccttgatcaaattggtaatgtcagccatgggaggagaaatcaagtctcccgactgcaaatctttgtatatt

SEQ ID NO: 361796 - DNA, 120 bp, Artificial Sequence
  ENSG00000140563_98 (sequence is synthesized)
tggtatcatgccattcatttctgtcctgtgcaaagatcactataaaaactaatacgaggtatgagtggtctaagagtgtgaatatcagtcatgatcattggtgaatctgatttctgaatg

SEQ ID NO: 361797 - DNA, 120 bp, Artificial Sequence
  ENSG00000140563_99 (sequence is synthesized)
ttatgtggttctgcttctgttttctactgccaatatatgctgaatgttctctcttagccaacaggcatagcctcatataaaaaatgggggaaaaaaaacatttattagcccaagaagcca

SEQ ID NO: 361798 - DNA, 120 bp, Artificial Sequence
  ENSG00000140563_100 (sequence is synthesized)
atgggttcaaggtcactcccaacatttttatgccatcaagtatatcagctccaaaagaggcttttcctttgccattggggggtattttgtttgctgtcgtttattttagttctccactgc

SEQ ID NO: 361799 - DNA, 120 bp, Artificial Sequence
  ENSG00000140563_101 (sequence is synthesized)
ttcggtgtagaggacctatgctgcctgtaggcttgacctttcctatactttttctgctgtctgaagttgctaaaacatttggccttaataaaaacactaataaaggttttattaatctgt

SEQ ID NO: 361800 - DNA, 120 bp, Artificial Sequence
  ENSG00000140563_102 (sequence is synthesized)
ctgcgcttccgagtggcgactgcagcgggtccggtgcaggtgaggggcgcgcgcctgcccagctttgcagcccccgaacgcggcctcgcacagatacccagacaaatggattctaaaatt

SEQ ID NO: 361801 - DNA, 120 bp, Artificial Sequence
  ENSG00000140564_0 (sequence is synthesized)
agccagaactggaagggccccgccctgtgaagggataggagcctgactgttgcagctgcagtgagtggcggggaagcagcagcggccaggatgaatcccaggtgctctggagctggatgg

SEQ ID NO: 361802 - DNA, 120 bp, Artificial Sequence
  ENSG00000140564_1 (sequence is synthesized)
tgaaggtcggcactcttcaccctcccgagccctgcccgtctcggccccatgcccccaccagtcagccccgggccacaggcagtgagcaggcacctgggagccgaggccctgtgaccaggc

SEQ ID NO: 361803 - DNA, 120 bp, Artificial Sequence
  ENSG00000140564_2 (sequence is synthesized)
caaggagacgggcgctccagggtcccagccacctgtcccccccatggagctgaggccctggttgctatgggtggtagcagcaacaggaaccttggtcctgctagcagctgatgctcaggg

SEQ ID NO: 361804 - DNA, 120 bp, Artificial Sequence
  ENSG00000140564_3 (sequence is synthesized)
ccagaaggtcttcaccaacacgtgggctgtgcgcatccctggaggcccagcggtggccaacagtgtggcacggaagcatgggttcctcaacctgggccagatcttcggggactattacca

SEQ ID NO: 361805 - DNA, 120 bp, Artificial Sequence
  ENSG00000140564_4 (sequence is synthesized)
cttctggcatcgaggagtgacgaagcggtccctgtcgcctcaccgcccgcggcacagccggctgcagagggagcctcaagtacagtggctggaacagcaggtggcaaagcgacggactaa

SEQ ID NO: 361806 - DNA, 120 bp, Artificial Sequence
  ENSG00000140564_5 (sequence is synthesized)
acgggacgtgtaccaggagcccacagaccccaagtttcctcagcagtggtacctgtctggtgtcactcagcgggacctgaatgtgaaggcggcctgggcgcagggctacacagggcacgg

SEQ ID NO: 361807 - DNA, 120 bp, Artificial Sequence
  ENSG00000140564_6 (sequence is synthesized)
cattgtggtctccattctggacgatggcatcgagaagaaccacccggacttggcaggcaattatgatcctggggccagttttgatgtcaatgaccaggaccctgacccccagcctcggta

SEQ ID NO: 361808 - DNA, 120 bp, Artificial Sequence
  ENSG00000140564_7 (sequence is synthesized)
cacacagatgaatgacaacaggcacggcacacggtgtgcgggggaagtggctgcggtggccaacaacggtgtctgtggtgtaggtgtggcctacaacgcccgcattggaggggtgcgcat

SEQ ID NO: 361809 - DNA, 120 bp, Artificial Sequence
  ENSG00000140564_8 (sequence is synthesized)
gctggatggcgaggtgacagatgcagtggaggcacgctcgctgggcctgaaccccaaccacatccacatctacagtgccagctggggccccgaggatgacggcaagacagtggatgggcc

SEQ ID NO: 361810 - DNA, 120 bp, Artificial Sequence
  ENSG00000140564_9 (sequence is synthesized)
agcccgcctcgccgaggaggccttcttccgtggggttagccagggccgaggggggctgggctccatctttgtctgggcctcggggaacgggggccgggaacatgacagctgcaactgcga

SEQ ID NO: 361811 - DNA, 120 bp, Artificial Sequence
  ENSG00000140564_10 (sequence is synthesized)
cggctacaccaacagtatctacacgctgtccatcagcagcgccacgcagtttggcaacgtgccgtggtacagcgaggcctgctcgtccacactggccacgacctacagcagtggcaacca

SEQ ID NO: 361812 - DNA, 120 bp, Artificial Sequence
  ENSG00000140564_11 (sequence is synthesized)
gaatgagaagcagatcgtgacgactgacttgcggcagaagtgcacggagtctcacacgggcacctcagcctctgcccccttagcagccggcatcattgctctcaccctggaggccaataa

SEQ ID NO: 361813 - DNA, 120 bp, Artificial Sequence
  ENSG00000140564_12 (sequence is synthesized)
gaacctcacatggcgggacatgcaacacctggtggtacagacctcgaagccagcccacctcaatgccaacgactgggccaccaatggtgtgggccggaaagtgagccactcatatggcta

SEQ ID NO: 361814 - DNA, 120 bp, Artificial Sequence
  ENSG00000140564_13 (sequence is synthesized)
cgggcttttggacgcaggcgccatggtggccctggcccagaattggaccacagtggccccccagcggaagtgcatcatcgacatcctcaccgagcccaaagacatcgggaaacggctcga

SEQ ID NO: 361815 - DNA, 120 bp, Artificial Sequence
  ENSG00000140564_14 (sequence is synthesized)
ggtgcggaagaccgtgaccgcgtgcctgggcgagcccaaccacatcactcggctggagcacgctcaggcgcggctcaccctgtcctataatcgccgtggcgacctggccatccacctggt

SEQ ID NO: 361816 - DNA, 120 bp, Artificial Sequence
  ENSG00000140564_15 (sequence is synthesized)
cagccccatgggcacccgctccaccctgctggcagccaggccacatgactactccgcagatgggtttaatgactgggccttcatgacaactcattcctgggatgaggatccctctggcga

SEQ ID NO: 361817 - DNA, 120 bp, Artificial Sequence
  ENSG00000140564_16 (sequence is synthesized)
gtgggtcctagagattgaaaacaccagcgaagccaacaactatgggacgctgaccaagttcaccctcgtactctatggcaccgcccctgaggggctgcccgtacctccagaaagcagtgg

SEQ ID NO: 361818 - DNA, 120 bp, Artificial Sequence
  ENSG00000140564_17 (sequence is synthesized)
gcttctccctgcaccagaagagctgtgtccagcactgccctccagggttcgccccccaagtcctcgatacgcactatagcaccgagaatgacgtggagaccatccgggccagcgtctgcg

SEQ ID NO: 361819 - DNA, 120 bp, Artificial Sequence
  ENSG00000140564_18 (sequence is synthesized)
ccccctgccacgcctcatgtgccacatgccaggggccggccctgacagactgcctcagctgccccagccacgcctccttggaccctgtggagcagacttgctcccggcaaagccagagca

SEQ ID NO: 361820 - DNA, 120 bp, Artificial Sequence
  ENSG00000140564_19 (sequence is synthesized)
gccgagagtccccgccacagcagcagccacctcggctgcccccggaggtggaggcggggcaacggctgcgggcagggctgctgccctcacacctgcctgaggtggtggccggcctcagct

SEQ ID NO: 361821 - DNA, 120 bp, Artificial Sequence
  ENSG00000140564_20 (sequence is synthesized)
gcgccttcatcgtgctggtcttcgtcactgtcttcctggtcctgcagctgcgctctggctttagttttcggggggtgaaggtgtacaccatggaccgtggcctcatctcctacaaggggc

SEQ ID NO: 361822 - DNA, 120 bp, Artificial Sequence
  ENSG00000140564_21 (sequence is synthesized)
tgccccctgaagcctggcaggaggagtgcccgtctgactcagaagaggacgagggccggggcgagaggaccgcctttatcaaagaccagagcgccctctgatgagcccactgcccacccc

SEQ ID NO: 361823 - DNA, 120 bp, Artificial Sequence
  ENSG00000140564_22 (sequence is synthesized)
ctcaagccaatcccctccttgggcactttttaattcaccaaagtatttttttatcttgggactgggtttggaccccagctgggaggcaagaggggtggagactgcttcccatcctaccct

SEQ ID NO: 361824 - DNA, 120 bp, Artificial Sequence
  ENSG00000140564_23 (sequence is synthesized)
cgggcccacctggccacctgaggtgggcccaggaccagctggggcgtggggagggccgtaccccaccctcagcaccccttccatgtggagaaaggagtgaaacctttagggcagcttgcc

SEQ ID NO: 361825 - DNA, 120 bp, Artificial Sequence
  ENSG00000140564_24 (sequence is synthesized)
ccggccccggccccagccagagttcctgcggagtgaagaggggcagcccttgcttgttgggattcctgacccaggccgcagctcttgcccttccctgtccctctaaagcaataatggtcc

SEQ ID NO: 361826 - DNA, 120 bp, Artificial Sequence
  ENSG00000140564_25 (sequence is synthesized)
catccaggcagtcgggggctggcctaggagatatctgagggaggaggccacctctccaagggcttctgcaccctccaccctgtcccccagctctggtgagtcttggcggcagcagccatc

SEQ ID NO: 361827 - DNA, 120 bp, Artificial Sequence
  ENSG00000140564_26 (sequence is synthesized)
ataggaagggaccaaggcaaggcaggtgcctccaggtgtgcacgtggcatgtggcctgtggcctgtgtcccatgacccacccctgtgctccgtgcctccaccaccactggccaccaggct

SEQ ID NO: 361828 - DNA, 120 bp, Artificial Sequence
  ENSG00000140564_27 (sequence is synthesized)
ggcgcagccaaggccgaagctctggctgaaccctgtgctggtgtcctgaccaccctcccctctcttgcacccgcctctcccgtcagggcccaagtccctgttttctgagcccgggctgcc

SEQ ID NO: 361829 - DNA, 120 bp, Artificial Sequence
  ENSG00000140564_28 (sequence is synthesized)
tgggctgttggcactcacagacctggagcccctgggtgggtggtggggaggggcgctggcccagccggcctctctggcctcccacccgatgctgctttcccctgtggggatctcaggggc

SEQ ID NO: 361830 - DNA, 120 bp, Artificial Sequence
  ENSG00000140564_29 (sequence is synthesized)
tgtttgaggatatattttcactttgtgattatttcactttagatgctgatgatttgtttttgtatttttaatgggggtagcagctggactacccacgttctcacacccaccgtccgccct

SEQ ID NO: 361831 - DNA, 120 bp, Artificial Sequence
  ENSG00000140564_30 (sequence is synthesized)
gctcctccctggctgccctggccctgaggtgtgggggctgcagcatgttgctgaggagtgaggaatagttgagccccaagtcctgaagaggcgggccagccaggcgggctcaaggaaagg

SEQ ID NO: 361832 - DNA, 120 bp, Artificial Sequence
  ENSG00000140564_31 (sequence is synthesized)
gggtcccagtgggaggggcaggctgacatctgtgtttcaagtggggctcgccatgccgggggttcataggtcactggctctccaagtgccagaggtgggcaggtggtggcactgagcccc

SEQ ID NO: 361833 - DNA, 120 bp, Artificial Sequence
  ENSG00000140564_32 (sequence is synthesized)
cccaacactgtgccctggtggagaaagcactgacctgtcatgcccccctcaaacctcctcttctgacgtgccttttgcacccctcccattaggacaatcagtcccctcccatctgggagt

SEQ ID NO: 361834 - DNA, 120 bp, Artificial Sequence
  ENSG00000140564_33 (sequence is synthesized)
ccccttttcttttctaccctagccattcctggtacccagccatctgcccaggggtgccccctcctctcccatccccctgccctcgtggccagcccggctggttttgtaagatgctgggtt

SEQ ID NO: 361835 - DNA, 120 bp, Artificial Sequence
  ENSG00000140564_34 (sequence is synthesized)
ggtgcacagtgatttttttcttgtaatttaaacaggcccagcattgctggttctatttaatggacatgagataatgttagaggttttaaagtgattaaacgtgcagactatgcaaaccag

SEQ ID NO: 361836 - DNA, 120 bp, Artificial Sequence
  ENSG00000140564_35 (sequence is synthesized)
aaacagcagtcggtcctggggtgaggcgcaatttgagtggcccagagtggctctctgtgtcaggaggttctggtgctggagaaaagggctttgcccaagaacacagccaggaagagcacc

SEQ ID NO: 361837 - DNA, 120 bp, Artificial Sequence
  ENSG00000140564_36 (sequence is synthesized)
gagcccaagtgagggctggacccaggctgggagggggccagtgggacctgagagtcgcagggggtgcccgctggtccctctgggccaggctgaccatcatggtgctctcctgcacagaga

SEQ ID NO: 361838 - DNA, 120 bp, Artificial Sequence
  ENSG00000140575_0 (sequence is synthesized)
gaccccggcaagcccgcgcacttggcaggagctgtagctaccgccgtccgcgcctccaaggtttcacggcttcctcagcagagactcgggctcgtccgccatgtccgccgcagacgaggt

SEQ ID NO: 361839 - DNA, 120 bp, Artificial Sequence
  ENSG00000140575_1 (sequence is synthesized)
tgacgggctgggcgtggcccggccgcactatggctctgtcctggataatgaaagacttactgcagaggagatggatgaaaggagacgtcagaacgtggcttatgagtacctttgtcattt

SEQ ID NO: 361840 - DNA, 120 bp, Artificial Sequence
  ENSG00000140575_2 (sequence is synthesized)
ggaagaagcgaagaggtggatggaagcatgcctaggggaagatctgcctcccaccacagaactggaggaggggcttaggaatggggtctaccttgccaaactggggaacttcttctctcc

SEQ ID NO: 361841 - DNA, 120 bp, Artificial Sequence
  ENSG00000140575_3 (sequence is synthesized)
caaagtagtgtccctgaaaaaaatctatgatcgagaacagaccagatacaaggcgactggcctccactttagacacactgataatgtgattcagtggttgaatgccatggatgagattgg

SEQ ID NO: 361842 - DNA, 120 bp, Artificial Sequence
  ENSG00000140575_4 (sequence is synthesized)
attgcctaagattttttacccagaaactacagatatctatgatcgaaagaacatgccaagatgtatctactgtatccatgcactcagtttgtacctgttcaagctaggcctggcccctca

SEQ ID NO: 361843 - DNA, 120 bp, Artificial Sequence
  ENSG00000140575_5 (sequence is synthesized)
gattcaagacctatatggaaaggttgacttcacagaagaagaaatcaacaacatgaagactgagttggagaagtatggcatccagatgcctgcctttagcaagattgggggcatcttggc

SEQ ID NO: 361844 - DNA, 120 bp, Artificial Sequence
  ENSG00000140575_6 (sequence is synthesized)
taatgaactgtcagtggatgaagccgcattacatgctgctgttattgctattaatgaagctattgaccgtagaattccagccgacacatttgcagctttgaaaaatccgaatgccatgct

SEQ ID NO: 361845 - DNA, 120 bp, Artificial Sequence
  ENSG00000140575_7 (sequence is synthesized)
tgtaaatcttgaagagcccttggcatccacttaccaggatatactttaccaggctaagcaggacaaaatgacaaatgctaaaaacaggacagaaaactcagagagagaaagagatgttta

SEQ ID NO: 361846 - DNA, 120 bp, Artificial Sequence
  ENSG00000140575_8 (sequence is synthesized)
tgaggagctgctcacgcaagctgaaattcaaggcaatataaacaaagtcaatacattttctgcattagcaaatatcgacctggctttagaacaaggagatgcactggccttgttcagggc

SEQ ID NO: 361847 - DNA, 120 bp, Artificial Sequence
  ENSG00000140575_9 (sequence is synthesized)
tctgcagtcaccagccctggggcttcgaggactgcagcaacagaatagcgactggtacttgaagcagctcctgagtgataaacagcagaagagacagagtggtcagactgaccccctgca

SEQ ID NO: 361848 - DNA, 120 bp, Artificial Sequence
  ENSG00000140575_10 (sequence is synthesized)
gaaggaggagctgcagtctggagtggatgctgcaaacagtgctgcccagcaatatcagagaagattggcagcagtagcactgattaatgctgcaatccagaagggtgttgctgagaagac

SEQ ID NO: 361849 - DNA, 120 bp, Artificial Sequence
  ENSG00000140575_11 (sequence is synthesized)
tgttttggaactgatgaatcccgaagcccagctgccccaggtgtatccatttgccgccgatctctatcagaaggagctggctaccctgcagcgacaaagtcctgaacataatctcaccca

SEQ ID NO: 361850 - DNA, 120 bp, Artificial Sequence
  ENSG00000140575_12 (sequence is synthesized)
cccagagctctctgtcgcagtggagatgttgtcatcggtggccctgatcaacagggcattggaatcaggagatgtgaatacagtgtggaagcaattgagcagttcagttactggtcttac

SEQ ID NO: 361851 - DNA, 120 bp, Artificial Sequence
  ENSG00000140575_13 (sequence is synthesized)
caatattgaggaagaaaactgtcagaggtatctcgatgagttgatgaaactgaaggctcaggcacatgcagagaataatgaattcattacatggaatgatatccaagcttgcgtggacca

SEQ ID NO: 361852 - DNA, 120 bp, Artificial Sequence
  ENSG00000140575_14 (sequence is synthesized)
tgtgaacctggtggtgcaagaggaacatgagaggattttagccattggtttaattaatgaagccctggatgaaggtgatgcccaaaagactctgcaggccctacagattcctgcagctaa

SEQ ID NO: 361853 - DNA, 120 bp, Artificial Sequence
  ENSG00000140575_15 (sequence is synthesized)
acttgagggagtccttgcagaagtggcccagcattaccaagacacgctgattagagcgaagagagagaaagcccaggaaatccaggatgagtcagctgtgttatggttggatgaaattca

SEQ ID NO: 361854 - DNA, 120 bp, Artificial Sequence
  ENSG00000140575_16 (sequence is synthesized)
aggtggaatctggcagtccaacaaagacacccaagaagcacagaagtttgccttaggaatctttgccattaatgaggcagtagaaagtggtgatgttggcaaaacactgagtgcccttcg

SEQ ID NO: 361855 - DNA, 120 bp, Artificial Sequence
  ENSG00000140575_17 (sequence is synthesized)
ctcccctgatgttggcttgtatggagtcatccctgagtgtggtgaaacttaccacagtgatcttgctgaagccaagaagaaaaaactggcagtaggagataataacagcaagtgggtgaa

SEQ ID NO: 361856 - DNA, 120 bp, Artificial Sequence
  ENSG00000140575_18 (sequence is synthesized)
gcactgggtaaaaggtggatattattattaccacaatctggagacccaggaaggaggatgggatgaacctccaaattttgtgcaaaattctatgcagctttctcgggaggagatccagag

SEQ ID NO: 361857 - DNA, 120 bp, Artificial Sequence
  ENSG00000140575_19 (sequence is synthesized)
ttctatctctggggtgactgccgcatataaccgagaacagctgtggctggccaatgaaggcctgatcaccaggctgcaggctcgctgccgtggatacttagttcgacaggaattccgatc

SEQ ID NO: 361858 - DNA, 120 bp, Artificial Sequence
  ENSG00000140575_20 (sequence is synthesized)
caggatgaatttcctgaagaaacaaatccctgccatcacctgcattcagtcacagtggagaggatacaagcagaagaaggcatatcaagatcggttagcttacctgcgctcccacaaaga

SEQ ID NO: 361859 - DNA, 120 bp, Artificial Sequence
  ENSG00000140575_21 (sequence is synthesized)
tgaagttgtaaagattcagtccctggcaaggatgcaccaagctcgaaagcgctatcgagatcgcctgcagtacttccgggaccatataaatgacattatcaaaatccaggcttttattcg

SEQ ID NO: 361860 - DNA, 120 bp, Artificial Sequence
  ENSG00000140575_22 (sequence is synthesized)
ggcaaacaaagctcgggatgactacaagactctcatcaatgctgaggatcctcctatggttgtggtccgaaaatttgtccacctgctggaccaaagtgaccaggattttcaggaggagct

SEQ ID NO: 361861 - DNA, 120 bp, Artificial Sequence
  ENSG00000140575_23 (sequence is synthesized)
tgaccttatgaagatgcgggaagaggttatcaccctcattcgttctaaccagcagctggagaatgacctcaatctcatggatatcaaaattggactgctagtgaaaaataagattacgtt

SEQ ID NO: 361862 - DNA, 120 bp, Artificial Sequence
  ENSG00000140575_24 (sequence is synthesized)
gcaggatgtggtttcccacagtaaaaaacttaccaaaaaaaataaggaacagttgtctgatatgatgatgataaataaacagaagggaggtctcaaggctttgagcaaggagaagagaga

SEQ ID NO: 361863 - DNA, 120 bp, Artificial Sequence
  ENSG00000140575_25 (sequence is synthesized)
gaagttggaagcttaccagcacctgttttatttattgcaaaccaatcccacctatctggccaagctcatttttcagatgccccagaacaagtccaccaagttcatggactctgtaatctt

SEQ ID NO: 361864 - DNA, 120 bp, Artificial Sequence
  ENSG00000140575_26 (sequence is synthesized)
cacactctacaactacgcgtccaaccagcgagaggagtacctgctcctgcggctctttaagacagcactccaagaggaaatcaagtcgaaggtagatcagattcaagagattgtgacagg

SEQ ID NO: 361865 - DNA, 120 bp, Artificial Sequence
  ENSG00000140575_27 (sequence is synthesized)
aaatcctacggttattaaaatggttgtaagtttcaaccgtggtgcccgtggccagaatgccctgagacagatcttggccccagtcgtgaaggaaattatggatgacaaatctctcaacat

SEQ ID NO: 361866 - DNA, 120 bp, Artificial Sequence
  ENSG00000140575_28 (sequence is synthesized)
caaaactgaccctgtggatatttacaaatcttgggttaatcagatggagtctcagacaggagaggcaagcaaactgccctatgatgtgacccctgagcaggcgctagctcatgaagaagt

SEQ ID NO: 361867 - DNA, 120 bp, Artificial Sequence
  ENSG00000140575_29 (sequence is synthesized)
gaagacacggctagacagctccatcaggaacatgcgggctgtgacagacaagtttctctcagccattgtcagctctgtggacaaaatcccttatgggatgcgcttcattgccaaagtgct

SEQ ID NO: 361868 - DNA, 120 bp, Artificial Sequence
  ENSG00000140575_30 (sequence is synthesized)
actcgttgcatgagaagttccctgatgctggtgaggatgagctgctgaagattattggtaacttgctttattatcgatacatgaatccagccattgttgctcctgatgcctttgacatca

SEQ ID NO: 361869 - DNA, 120 bp, Artificial Sequence
  ENSG00000140575_31 (sequence is synthesized)
ttgacctgtcagcaggaggccagcttaccacagaccaacgccgaaatctgggctccattgcaaaaatgcttcagcatgctgcttccaataagatgtttctgggagataatgcccacttaa

SEQ ID NO: 361870 - DNA, 120 bp, Artificial Sequence
  ENSG00000140575_32 (sequence is synthesized)
gcatcattaatgaatatctttcccagtcctaccagaaattcagacggtttttccaaactgcttgtgatgtcccagagcttcaggataaatttaatgtggatgagtactctgatttagtaa

SEQ ID NO: 361871 - DNA, 120 bp, Artificial Sequence
  ENSG00000140575_33 (sequence is synthesized)
ccctcaccaaaccagtaatctacatttccattggtgaaatcatcaacacccacactctcctgttggatcaccaggatgccattgctccggagcacaatgatccaatccacgaactgctgg

SEQ ID NO: 361872 - DNA, 120 bp, Artificial Sequence
  ENSG00000140575_34 (sequence is synthesized)
acgacctcggcgaggtgcccaccatcgagtccctgataggggaaagctctggcaatttaaatgacccaaataaggaggcactggctaagacggaagtgtctctcaccctgaccaacaagt

SEQ ID NO: 361873 - DNA, 120 bp, Artificial Sequence
  ENSG00000140575_35 (sequence is synthesized)
tcgacgtgcctggagatgagaatgcagaaatggatgctcgaaccatcttactgaatacaaaacgtttaattgtggatgtcatccggttccagccaggagagaccttgactgaaatcctag

SEQ ID NO: 361874 - DNA, 120 bp, Artificial Sequence
  ENSG00000140575_36 (sequence is synthesized)
aaacaccagccaccagtgaacaggaagcagaacatcagagagccatgcagagacgtgctatccgtgatgccaaaacacctgacaagatgaaaaagtcaaaatctgtaaaggaagacagca

SEQ ID NO: 361875 - DNA, 120 bp, Artificial Sequence
  ENSG00000140575_37 (sequence is synthesized)
acctcactcttcaagagaagaaagagaagatccagacaggtttaaagaagctaacagagcttggaaccgtggacccaaagaacaaataccaggaactgatcaacgacattgccagggata

SEQ ID NO: 361876 - DNA, 120 bp, Artificial Sequence
  ENSG00000140575_38 (sequence is synthesized)
ttcggaatcagcggaggtaccgacagaggagaaaggccgaactagtgaaactgcaacagacatacgctgctctgaactctaaggccaccttttatggggagcaggtggattactataaaa

SEQ ID NO: 361877 - DNA, 120 bp, Artificial Sequence
  ENSG00000140575_39 (sequence is synthesized)
gctatatcaaaacctgcttggataacttagccagcaagggcaaagtctccaaaaagcctagggaaatgaaaggaaagaaaagcaaaaagatttctctgaaatatacagcagcaagactac

SEQ ID NO: 361878 - DNA, 120 bp, Artificial Sequence
  ENSG00000140575_40 (sequence is synthesized)
atgaaaaaggagttcttctggaaattgaggacctgcaagtgaatcagtttaaaaatgttatatttgaaatcagtccaacagaagaagttggagacttcgaagtgaaagccaaattcatgg

SEQ ID NO: 361879 - DNA, 120 bp, Artificial Sequence
  ENSG00000140575_41 (sequence is synthesized)
gagttcaaatggagacttttatgttacattatcaggacctgctgcagctacagtatgaaggagttgcagtcatgaaattatttgatagagctaaagtaaatgtcaacctcctgatcttcc

SEQ ID NO: 361880 - DNA, 120 bp, Artificial Sequence
  ENSG00000140575_42 (sequence is synthesized)
ttctcaacaaaaagttctacgggaagtaattgatcgtttgctgccagcccagaaggatgaaggaaagaagcacctcacagctcctttctaggtccttctttcctcattggaagcaaagac

SEQ ID NO: 361881 - DNA, 120 bp, Artificial Sequence
  ENSG00000140575_43 (sequence is synthesized)
ctagccaacaacagcacctcaatctgatacactcccgatgccacatttttaactcctctcgctctgatgggacatttgttacccttttttcatagtgaaattgtgtttcaggcttagtct

SEQ ID NO: 361882 - DNA, 120 bp, Artificial Sequence
  ENSG00000140575_44 (sequence is synthesized)
gacctttctggtttcttcattttcttccattacttaggaaagagtggaaactccactaaaatttctctgtgttgttacagtcttagaggttgcagtactatattgtaagctttggtgttt

SEQ ID NO: 361883 - DNA, 120 bp, Artificial Sequence
  ENSG00000140575_45 (sequence is synthesized)
gtttaattagcaatagggatggtaggattcaaatgtgtgtcatttagaagtggaagctattagcaccaatgacataaatacatacaagacacacaactaaaatgtcatgttattaacagt

SEQ ID NO: 361884 - DNA, 120 bp, Artificial Sequence
  ENSG00000140575_46 (sequence is synthesized)
tattaggttgtcatttaaaaataaagttcctttatatttctgtcccatcaggaaaactgaaggatatggggaatcattggttatcttccattgtgtttttctttatggacaggagctaat

SEQ ID NO: 361885 - DNA, 120 bp, Artificial Sequence
  ENSG00000140575_47 (sequence is synthesized)
ggaagtgacagtcatgttcaaaggaagcatttctagaaaaaaggagataatgtttttaaatttcattatcaaacttgggcaattctgtttgtgtaactccccgactagtggatgggagag

SEQ ID NO: 361886 - DNA, 120 bp, Artificial Sequence
  ENSG00000140575_48 (sequence is synthesized)
tcccattgctaaaattcagctactcagataaattcagaatgggtcaaggcacctgcctgtttttgttggtgcacagagattgacttgattcagagagacaattcactccatccctatggc

SEQ ID NO: 361887 - DNA, 120 bp, Artificial Sequence
  ENSG00000140575_49 (sequence is synthesized)
agaggaatgggttagccctaatgtagaatgtcattgtttttaaaactgttttatatcttaagagtgccttattaaagtatagatgtatgtcttaaaatgtgggtgataggaattttaaag

SEQ ID NO: 361888 - DNA, 120 bp, Artificial Sequence
  ENSG00000140575_50 (sequence is synthesized)
atttatataatgcatcaaaagccttagaataagaaaagctttttttaaattgctttatctgtatatctgaactcttgaaacttatagctaaaacactaggatttatctgcagtgttcagg

SEQ ID NO: 361889 - DNA, 120 bp, Artificial Sequence
  ENSG00000140575_51 (sequence is synthesized)
gagataattctgcctttaattgtctaaaacaaaaacaaaaccagccaacctatgttacacgtgagattaaaaccaattttttccccattttttctccttttttctcttgctgcccacatt

SEQ ID NO: 361890 - DNA, 120 bp, Artificial Sequence
  ENSG00000140575_52 (sequence is synthesized)
gtgcctttattttatgagccccagttttctgggcttagtttaaaaaaaaaatcaagtctaaacattgcatttagaaagcttttgttcttggataaaaagtcatacactttaaaaaaaaaa

SEQ ID NO: 361891 - DNA, 120 bp, Artificial Sequence
  ENSG00000140575_53 (sequence is synthesized)
aaaactttttccaggaaaatatattgaaatcatgctgctgagcctctattttctttctttgatgttttgattcagtattcttttatcataaatttttagcatttaaaaattcactgatgt

SEQ ID NO: 361892 - DNA, 120 bp, Artificial Sequence
  ENSG00000140575_54 (sequence is synthesized)
acattaagccaataaactgctttaatgaataacaaactatgtagtgtgtccctattataaatgcattggagaagtatttttatgagactctttactcaggtgcatggttacagcccacag

SEQ ID NO: 361893 - DNA, 120 bp, Artificial Sequence
  ENSG00000140575_55 (sequence is synthesized)
ggaggcatggagtgccatggaaggattcgccactacccagaccttgttttttgttgtattttggaagacaggttttttaaagaaacattttcctcagattaaaagatgatgctattacaa

SEQ ID NO: 361894 - DNA, 120 bp, Artificial Sequence
  ENSG00000140575_56 (sequence is synthesized)
ctagcattgcctcaaaaactgggaccaaccaaagtgtgtcaaccctgtttccttaaaagaggctatgaatcccaaaggccacatccaagacaggcaataatgagcagagtttacagctcc

SEQ ID NO: 361895 - DNA, 120 bp, Artificial Sequence
  ENSG00000140575_57 (sequence is synthesized)
tttaataaaatgtgtcagtaattttaaggtttatagttccctcaacacaattgctaatgcagaatagtgtaaaatgcgcttcaagaatgttgatgatgatgatatagaattgtggcttta

SEQ ID NO: 361896 - DNA, 120 bp, Artificial Sequence
  ENSG00000140575_58 (sequence is synthesized)
gtagcacagaggatgccccaacaaactcatggcgttgaaaccacacagttctcattactgttatttattagctgtagcattctctgtctcctctctctcctcctttgaccttctcctcga

SEQ ID NO: 361897 - DNA, 120 bp, Artificial Sequence
  ENSG00000140575_59 (sequence is synthesized)
ccagccatcatgacatttaccatgaatttacttcctcccaagagtttggactgcccgtcagattgttgctgcacatagttgcctttgtatctctgtatgaaataaaaggtcatttgttca

SEQ ID NO: 361898 - DNA, 120 bp, Artificial Sequence
  ENSG00000140575_60 (sequence is synthesized)
tggagggatggcccgtgcccttgttcccctgtcactgctggaagtggtccttcctaaaacttcatcatgaaattgcacttggatcatgtatcaagatgaaagtttttttttaacttccat

SEQ ID NO: 361899 - DNA, 120 bp, Artificial Sequence
  ENSG00000140575_61 (sequence is synthesized)
tgatgcttgggaagtaatatgtcttctgtaacatttgactgtttcagtcacagtggagaggatacaagcagaagaaggcatatcaagatcggttagcttacctgcgctcccacaaagatg

SEQ ID NO: 361900 - DNA, 120 bp, Artificial Sequence
  ENSG00000140575_62 (sequence is synthesized)
ctacaagactctcagtgagtaactggctccgcatgaagagttgaggcagtggctgggagccaccaagttcagggtattctccacagacctcttttgttatcctgaaggcaaggcttgggg

SEQ ID NO: 361901 - DNA, 120 bp, Artificial Sequence
  ENSG00000140575_63 (sequence is synthesized)
ctcctctattttttgcactataccaaactctggatatacattgagaaataaaatagatgtgatcctgatagtttcataagagagaaaacaacaacaacaacaaaagcccagatgtgatca

SEQ ID NO: 361902 - DNA, 120 bp, Artificial Sequence
  ENSG00000140575_64 (sequence is synthesized)
atatctataaggaactggagtcagaggaaaagatcattttaaacgcagatacatactgccagcttgtgtttttttaaaaaaattgcagatacataaattaaaagtcctctaaaggaaaga

SEQ ID NO: 361903 - DNA, 89 bp, Artificial Sequence
  ENSG00000140575_65 (sequence is synthesized)
aattgcagatacataaattaaaagtcctctaaaggaaagaatttttttgtttgtttgttataagtacagtggtgcagtcatagctcact

SEQ ID NO: 361904 - DNA, 120 bp, Artificial Sequence
  ENSG00000140575_66 (sequence is synthesized)
ttaatgctgcatattattccattatgcagatagatataacagttgacttcagcagttctccattgatggacatttaagttgtttccagttgtttgttattattttttaaattctgcagca

SEQ ID NO: 361905 - DNA, 120 bp, Artificial Sequence
  ENSG00000140575_67 (sequence is synthesized)
aataacctcttgtacatatgtcattttgcaaatgtgggcatatttctgaagttagcacttcttgccttgattatcctaatagcctcctaacctgtttctttttccttattttcattcatc

SEQ ID NO: 361906 - DNA, 120 bp, Artificial Sequence
  ENSG00000140575_68 (sequence is synthesized)
tgtaattgctgtgctggcttaaacgcttttaaaaagtatttgatgacattttaattttttccctacacagctgaggggcgtagagtaactccttcactcctgggattcagtaccattccc

SEQ ID NO: 361907 - DNA, 120 bp, Artificial Sequence
  ENSG00000140575_69 (sequence is synthesized)
tcagctggcatacgaagctctcctagttacttgttaggtacttaagttcccagaaggacatgggaggattaagacactgttaaattcatgggagtgttctcaaatataatttaaactaaa

SEQ ID NO: 361908 - DNA, 120 bp, Artificial Sequence
  ENSG00000140575_70 (sequence is synthesized)
aatagaagcaatttagtaatatttcccctgttttgcagagatattgcttaggctaattctaacatttgtttgccattttagagttggtatgttacttatgcttatgtctggaagtttggt

SEQ ID NO: 361909 - DNA, 120 bp, Artificial Sequence
  ENSG00000140575_71 (sequence is synthesized)
ttctgacatgtttccttcagttaccaatgatgaagattcagagtagatggttacttatagaaagtgacatgatgtgatttttacagagtctccaaaaagcctagggaaatgaaaggaaag

SEQ ID NO: 361910 - DNA, 120 bp, Artificial Sequence
  ENSG00000140575_72 (sequence is synthesized)
taacatagcaatagcctgacacagaagactgcacctgatagttgtcttagcacatctcaaaattaaatgtttatgaatagactactttttcaagacaatgctatttcctgagacgtagta

SEQ ID NO: 361911 - DNA, 120 bp, Artificial Sequence
  ENSG00000140575_73 (sequence is synthesized)
ttctcaaacatttatggagttattatggatcccttgcctttatcatttggcataacattttatttctcagtaaaagttgttctcgtcacactgtatgtgttaggtgattcaagtattatc

SEQ ID NO: 361912 - DNA, 120 bp, Artificial Sequence
  ENSG00000140575_74 (sequence is synthesized)
ttagacttgcatcatcttatatttgtattatttccccccaatatctcctctctttattacgctgactctttccaccctcccaaaacttcaggggaaagctctggcaatttaaatgaccca

SEQ ID NO: 361913 - DNA, 120 bp, Artificial Sequence
  ENSG00000140575_75 (sequence is synthesized)
ctgccataagagctttttttttttcttttgactgagtctcactctgttgcccaggttgcagtgagccaagattgcatgactgcactccggactgggtgacagagtgaaactctatctcca

SEQ ID NO: 361914 - DNA, 120 bp, Artificial Sequence
  ENSG00000140575_76 (sequence is synthesized)
gtgtgtatatgtgcatgcatgcgtgtgtatatgtattttttatttattttttcctcataggactgcattttctgcttttctttgctagcaaagtcatttatagcttccttggtggtatgt

SEQ ID NO: 361915 - DNA, 120 bp, Artificial Sequence
  ENSG00000140575_77 (sequence is synthesized)
ttatctttggtaatactgagtgtgcttatatacacagcacctactctttctagaaaacctcctcccttggtgctttttatacggacccccttttgtttatttacttctcccagtcctcaa

SEQ ID NO: 361916 - DNA, 120 bp, Artificial Sequence
  ENSG00000140575_78 (sequence is synthesized)
acatgcatgtattcaaacacatacaccctctccttccccagtgtcctccgttttctccttttatcattaggtttcctttttggccatgtggaagtgaagagaattcctatgatgtcatcc

SEQ ID NO: 361917 - DNA, 120 bp, Artificial Sequence
  ENSG00000140575_79 (sequence is synthesized)
cttcacacgccacttgtggaactcctcagtggttcctctttgataggatgtaagtgctgcaggcagagagaggttgccattcctctctccaagtcccagagcagatggtacttgggcttg

SEQ ID NO: 361918 - DNA, 120 bp, Artificial Sequence
  ENSG00000140575_80 (sequence is synthesized)
gcaatctgtgctgcttcagctgcagaagtacttttgacctgtattttctgcagcccttttcactcttgaagacttggttcatctcctttccccatttcacagaatatttttatatgagaa

SEQ ID NO: 361919 - DNA, 120 bp, Artificial Sequence
  ENSG00000140575_81 (sequence is synthesized)
gcctgtaatcccaacacgttgggaggccgaggtgggggggaatcacttgaacccagctgtttgagaccagattgggcaacatagtgacaccccatctctacaaaaaaattttaaaaatta

SEQ ID NO: 361920 - DNA, 120 bp, Artificial Sequence
  ENSG00000140575_82 (sequence is synthesized)
gccaggcatggtggtgcatgccagtagtcctagctactcgggagcctgaggagggaggatcacttgagtccgggaggtcgaggcagcagtgagccgtgctctcaccactgtgctctagcc

SEQ ID NO: 361921 - DNA, 120 bp, Artificial Sequence
  ENSG00000140575_83 (sequence is synthesized)
tgggtgacaaaactcctgtttttggtggggggaaaaaaaagaaaagatttatttgagtatgttatagatgtaactgggaagctggtggttgagggaataagtataggtagggtatttatt

SEQ ID NO: 361922 - DNA, 120 bp, Artificial Sequence
  ENSG00000140575_84 (sequence is synthesized)
atggcaataagtagccttgatgagagtttatcatgaatcactgtgatgggcatttaagtgtactgaacggttttccaggtttctattgttcagtcttatgcttattgtgcatgttttggg

SEQ ID NO: 361923 - DNA, 120 bp, Artificial Sequence
  ENSG00000140575_85 (sequence is synthesized)
cgttaccaactgtggggtggaaatagcatttttaggatttgaagttattggctttaatgtttcacttatgcttcatgaattttgatttatatatgaattgagtctcctcctcctatgacc

SEQ ID NO: 361924 - DNA, 120 bp, Artificial Sequence
  ENSG00000140575_86 (sequence is synthesized)
tgcggagtggctgcttggtttgggaggcttagaagcgtggtgctgttggtgtaggtccatctgtttggcaatattcagagtcagcatcctctgcattctttgtgaagtgaatgtaaagct

SEQ ID NO: 361925 - DNA, 120 bp, Artificial Sequence
  ENSG00000140575_87 (sequence is synthesized)
gctcttttcctttttcagatgccccacaaccttgtggtcttaattttagagtgtcattttgttatcagtgattcatttcttttgttctggtgcttgtgttcttttgcagagtcccagggt

SEQ ID NO: 361926 - DNA, 120 bp, Artificial Sequence
  ENSG00000140575_88 (sequence is synthesized)
agatgtaattatagatcatgtattctataagtgagctttggtggaaaagtcaagtgagggataatgaaatatttgtaattaacgtttaataaaaagggtgtttgaagtggtgctaataaa

SEQ ID NO: 361927 - DNA, 120 bp, Artificial Sequence
  ENSG00000140575_89 (sequence is synthesized)
cctgttctcattctacctgtaaaattattctcagaatctttggtgtttttttaaatactaaaagatgtctttctttttgacttaggaaatagttttgttctttttcttttataatcctca

SEQ ID NO: 361928 - DNA, 120 bp, Artificial Sequence
  ENSG00000140575_90 (sequence is synthesized)
cattcgggggacagaggggacccggccttgttcaaagctgagaggctcgagagacagtagctgttcacataacagcatagcttcagttcatgggcaaattagtgccctcctctatgagaa

SEQ ID NO: 361929 - DNA, 120 bp, Artificial Sequence
  ENSG00000140577_0 (sequence is synthesized)
gacgactggcttcgggcggcggccccggcggcctgtggacggacgggtgggccgaggtacaggccccacggccgccgtctcccgcttctgcccgcgcagagtccgcgccatggccgcctc

SEQ ID NO: 361930 - DNA, 120 bp, Artificial Sequence
  ENSG00000140577_1 (sequence is synthesized)
cccgcttctgcccgcgcagagtccgcgccatggccgcctcgccgggctcgggcagcgccaacccgcggaagttcagtgagaagatcgcgctgcacacgcagagacaggccgaggagacgc

SEQ ID NO: 361931 - DNA, 120 bp, Artificial Sequence
  ENSG00000140577_2 (sequence is synthesized)
gggccttcgagcagctcatgaccgacctcaccctgtcgcgggttcaatttcagaagcttcagcaactgcgccttacacagtaccatggaggatccttaccaaatgtgagccagctgcgga

SEQ ID NO: 361932 - DNA, 120 bp, Artificial Sequence
  ENSG00000140577_3 (sequence is synthesized)
gcagtgcgtcagagtttcagccgtcatttcaccaagctgataatgttcggggaacccgccatcacgggctggtggagaggccatccaggaaccgcttccaccccctccaccgaaggtctg

SEQ ID NO: 361933 - DNA, 120 bp, Artificial Sequence
  ENSG00000140577_4 (sequence is synthesized)
gggacaagccagggcgacaatttgatggtagtgcttttggagccaattattcctcacagcctctggatgagagttggccaaggcagcagcctccttggaaagacgaaaagcatcctgggt

SEQ ID NO: 361934 - DNA, 120 bp, Artificial Sequence
  ENSG00000140577_5 (sequence is synthesized)
tcaggctgacatctgcacttaacaggaccaattctgattctgctcttcacacgagtgctctgagtaccaagccccaggacccctatggaggagggggccagtcggcctggcctgccccat

SEQ ID NO: 361935 - DNA, 120 bp, Artificial Sequence
  ENSG00000140577_6 (sequence is synthesized)
acatgggtttctgtgatggtgagaataatggacatggggaagtagcatctttccctggcccattgaaagaagagaatctgttaaatgttccgaagccactgccaaaacaactgtgggaga

SEQ ID NO: 361936 - DNA, 120 bp, Artificial Sequence
  ENSG00000140577_7 (sequence is synthesized)
ccaaggagattcagtccctgtcaggacgccctcgatcctgtgatgttggaggtggcaatgcttttccacataatggtcaaaacctaggcctctcacccttcttggggaccttgaacactg

SEQ ID NO: 361937 - DNA, 120 bp, Artificial Sequence
  ENSG00000140577_8 (sequence is synthesized)
gagggtcattgccagatctaaccaacctccactactcgacacccctgccagcctccctggacaccaccgaccaccactttggcagtatgagtgtggggaatagtgtgaacaacatcccag

SEQ ID NO: 361938 - DNA, 120 bp, Artificial Sequence
  ENSG00000140577_9 (sequence is synthesized)
ctgctatgacccacctgggtataagaagctcctctggtctccagagttctcggagtaacccctccatccaagccacgctcaataagactgtgctttcctcttccttaaataaccacccac

SEQ ID NO: 361939 - DNA, 120 bp, Artificial Sequence
  ENSG00000140577_10 (sequence is synthesized)
agacatctgttcccaacgcatctgctcttcacccttcgctccgtctgttttcccttagcaacccatctctttccaccacaaacctgagcggcccgtctcggcgtcggcagcctcccgtca

SEQ ID NO: 361940 - DNA, 120 bp, Artificial Sequence
  ENSG00000140577_11 (sequence is synthesized)
gccctctcacgctttctcctggccctgaagcacatcaaggtttcagcagacagctgtcttcaaccagcccactggccccatatcctacctcccagatggtgtcctcagaccgaagccaac

SEQ ID NO: 361941 - DNA, 120 bp, Artificial Sequence
  ENSG00000140577_12 (sequence is synthesized)
tttcctttctgcccacagaagctcaagcccaggtgtcgccgccacccccttaccctgcaccccaggagctcacccagcccctcctgcagcagccccgcgcccctgaggcccctgcccagc

SEQ ID NO: 361942 - DNA, 120 bp, Artificial Sequence
  ENSG00000140577_13 (sequence is synthesized)
agccccaggcagcctcctcactgccacagtcagactttcagcttctcccggcccagggctcatctttgaccaacttcttcccagatgtgggttttgaccagcagtccatgaggccaggcc

SEQ ID NO: 361943 - DNA, 120 bp, Artificial Sequence
  ENSG00000140577_14 (sequence is synthesized)
ctgcctttcctcaacaggtgcctctggtgcaacaaggttcccgagaactgcaggactcttttcatttgagaccaagcccgtattccaactgcgggagtctcccgaacaccatcctgccag

SEQ ID NO: 361944 - DNA, 120 bp, Artificial Sequence
  ENSG00000140577_15 (sequence is synthesized)
aagactccagcaccagcctgttcaaagacctcaacagtgcgctggcaggcctgcctgaggtcagcctgaacgtggacactccatttccactggaagaggagctgcagattgaacccctga

SEQ ID NO: 361945 - DNA, 120 bp, Artificial Sequence
  ENSG00000140577_16 (sequence is synthesized)
gcctggacggactcaacatgttaagtgactccagcatgggcctgctggacccctctgttgaagagacgtttcgagctgacagactgtgaacagaaggcagtggaacagaagaatgttttt

SEQ ID NO: 361946 - DNA, 120 bp, Artificial Sequence
  ENSG00000140577_17 (sequence is synthesized)
ctgcaacagccaaaatagaatggaatagaatgaagccagctgataccacgggctttcgttatcttgacatagaaggaagcaatgccacggctccagggtttcagatgagatcccatctca

SEQ ID NO: 361947 - DNA, 120 bp, Artificial Sequence
  ENSG00000140577_18 (sequence is synthesized)
gacactgtggcttcctccagatcacacagctttgtactgcctctcccgcctgtggccaaagtcgtgttgcagcaggcaggctgcttggagcttcccatgaactggaaagctcacctccac

SEQ ID NO: 361948 - DNA, 120 bp, Artificial Sequence
  ENSG00000140577_19 (sequence is synthesized)
tgcatctttttactggccatccagtcagccgatgtgtaagagtaggaaatactgtgtcactggaggcctccgtagcattgtgtagtgtgctcagaaccactgatctccgtccgcaccgaa

SEQ ID NO: 361949 - DNA, 120 bp, Artificial Sequence
  ENSG00000140577_20 (sequence is synthesized)
ggcgggcccggagtgggaggctcggcctggggcggcggcaccggagagggcacctcgatgcctgctctgacctgacccagagggcgaggccctccagcgggggacattcccaggctgagt

SEQ ID NO: 361950 - DNA, 120 bp, Artificial Sequence
  ENSG00000140577_21 (sequence is synthesized)
gcccgagggcaggcttgagttaggcagactgaaggctaattttcattttctcccagctggtttctgctgcttcagaaaagtacaccttttccttatggaccagaggaagaggaagaccat

SEQ ID NO: 361951 - DNA, 120 bp, Artificial Sequence
  ENSG00000140577_22 (sequence is synthesized)
tttatcagtcactgaaaagagtcccctggcactgatgagcctgaagagaactgtgctcctcctcgggggctggggaaggaagacagggactgcaggtgtctcatactcagtggcctccag

SEQ ID NO: 361952 - DNA, 120 bp, Artificial Sequence
  ENSG00000140577_23 (sequence is synthesized)
acaaactccagacaagcacagacctccccactaagagcagccagagggagctggtgaggccctaaccccacccaccgagcaactgagcttccccatccctccccagagctgtgtctctgt

SEQ ID NO: 361953 - DNA, 120 bp, Artificial Sequence
  ENSG00000140577_24 (sequence is synthesized)
gggctgggagtctaatgtcacccccctagaccgtaagctccttgagggcagggacagtgccttatcattgttgaacccgtagcacctaacacgtgcgtggcagcacagtcgtgtgctgga

SEQ ID NO: 361954 - DNA, 120 bp, Artificial Sequence
  ENSG00000140577_25 (sequence is synthesized)
gtgagtgctgcagaaccgtgcgtgcagcgcatgatgaatgagtgcgtccgccatgccgtaaggcaggctcacctgtagctatccccttccctgccagatcttctcagagctttagctttt

SEQ ID NO: 361955 - DNA, 120 bp, Artificial Sequence
  ENSG00000140577_26 (sequence is synthesized)
ctagcactcgtgcctatggtgaagcatgcactttaatatgcttttaacactaggtgaccaaatcacagtgaagccgggcactgcattctccttgggctgtgctccacgcgggtgggtggg

SEQ ID NO: 361956 - DNA, 120 bp, Artificial Sequence
  ENSG00000140577_27 (sequence is synthesized)
agctgtcttctgagtacatccggaagggctgagcaggtgagtgccctgagcatcctggctgggccccacccaggaagatcttccttctcagatccacgtttggctctaaattgcttcaag

SEQ ID NO: 361957 - DNA, 120 bp, Artificial Sequence
  ENSG00000140577_28 (sequence is synthesized)
tagagattcattctttgaggttgaaaaaatagtttatagtaaaacgaaggcctaattcatggaagcatcattagtcatcaataccttctcataaaatagatgggccagatttccaccacc

SEQ ID NO: 361958 - DNA, 120 bp, Artificial Sequence
  ENSG00000140577_29 (sequence is synthesized)
gcctgcctcctctaacttgggtgatgccagtaggtttgaagggggcagagcactgcagggggaggggggggtctaggctgtgagaggacagggtggagaggaggagaaccctgaaggaga

SEQ ID NO: 361959 - DNA, 120 bp, Artificial Sequence
  ENSG00000140577_30 (sequence is synthesized)
gacggaagatgccaggacctttgcttggacagccattgcccttccaggagaccctggagtgtactgagggttgctggactgttccacccagaggagcaaggctgtacaatgagggtctga

SEQ ID NO: 361960 - DNA, 120 bp, Artificial Sequence
  ENSG00000140577_31 (sequence is synthesized)
atctggcacacctgtcccttatgtaaaaggagtcgtggtcacaagaccctgggctggttagcctctcccgacctcattccatttctatcttctgaccttgcctctcatctttaaaataac

SEQ ID NO: 361961 - DNA, 120 bp, Artificial Sequence
  ENSG00000140577_32 (sequence is synthesized)
cctcatggggtgcccctccaccttcctctggaatccaagtattcctgtttcacatttgccccaaatctttgctgtggaattgggaaatcaaaccagagtcctcctcgcctgatttccagc

SEQ ID NO: 361962 - DNA, 120 bp, Artificial Sequence
  ENSG00000140577_33 (sequence is synthesized)
tcaggaagggcctgctggcctgccctgttcccagttacactttcagatccctttgtgctcaagatctcagagggggtggctttttgttaaagagccttcagtcgcaatgctacccagcac

SEQ ID NO: 361963 - DNA, 120 bp, Artificial Sequence
  ENSG00000140577_34 (sequence is synthesized)
cccatgtgccaaaagaaaccagctcctgtgtcaaagggcttccaaacctgatctcactctcaacaggcgatggtgctgatgtttcaagaattgtgtttttataaaacagaggtctcagca

SEQ ID NO: 361964 - DNA, 120 bp, Artificial Sequence
  ENSG00000140577_35 (sequence is synthesized)
tagtcactcttcacatagtgccttacccatgggtatcgtcatatccgggtcccagttcagtttgtctgcacagcagccaccctgcctggcaacagagaccccaagacctacacagtgaac

SEQ ID NO: 361965 - DNA, 120 bp, Artificial Sequence
  ENSG00000140577_36 (sequence is synthesized)
cctactgccccaaaggcgttctccaggtgacttgtgaaaacagacctccggggaagtgatttattgggggtgtacactgggggcaatatggtttagcactgaattcaatttgtccttagg

SEQ ID NO: 361966 - DNA, 120 bp, Artificial Sequence
  ENSG00000140577_37 (sequence is synthesized)
tctatgagtgagtccgatcttttcttgtgaaaggttttgggcatcgtacaacccactctgcctagaaggtgtggaggactcaccacgggcagggtcgccctggcccacagcacgtgagcc

SEQ ID NO: 361967 - DNA, 120 bp, Artificial Sequence
  ENSG00000140577_38 (sequence is synthesized)
tgcactcactgcggcctttgtaacaaaaccagttgtggtcctcagcatttgaagcagctgcatacttcagagtaaactatttttcattatttagttttgtcacaagaaatcgaccattgt

SEQ ID NO: 361968 - DNA, 120 bp, Artificial Sequence
  ENSG00000140577_39 (sequence is synthesized)
actactctcacttacagcagttaaacagcatagaactaaaaacctgtctgcatttccattttttctttctgtatggttgtgggttttaggacatagggggttaggagaaggggtttcttg

SEQ ID NO: 361969 - DNA, 120 bp, Artificial Sequence
  ENSG00000140577_40 (sequence is synthesized)
atcatgtcatgaattctcctttgtcctgtttctcctgtttcatttctcctccgcctgctgtatattacctgagctggtgttgtatcttcaagtccatatgcgtatttgcagacctttcct

SEQ ID NO: 361970 - DNA, 120 bp, Artificial Sequence
  ENSG00000140577_41 (sequence is synthesized)
gttcccactcttgttggctcttctgatttatgcacagatggttcccagcatgtgtccagtgcttcatggatgggaccatcccagcaactaatcagacttcctgccagtgtcctaaccccc

SEQ ID NO: 361971 - DNA, 120 bp, Artificial Sequence
  ENSG00000140577_42 (sequence is synthesized)
agggcaccctgttcaaccatatttaaaaattggaatttgtataaagttgcttccaagttttataatgcatcattttacatcttttgtaattaaaagcatcacaatgaggttgtctctgca

SEQ ID NO: 361972 - DNA, 120 bp, Artificial Sequence
  ENSG00000140577_43 (sequence is synthesized)
gatagctatgtgcgtactgcagtacagaacagaactagggggaagagaaggggacgtggactgagggccaggctgtctccctgtgcattctggcacagaactccaagaagtctgagaatt

SEQ ID NO: 361973 - DNA, 120 bp, Artificial Sequence
  ENSG00000140577_44 (sequence is synthesized)
ctcttatagcctccatccttcccagaacactccaggtactattttctattttctgggggcatttggcatagttcactgtttcctgagaggcagcatagcttagcggagagctctcaggct

SEQ ID NO: 361974 - DNA, 120 bp, Artificial Sequence
  ENSG00000140577_45 (sequence is synthesized)
ttggtgtcagtgatttgtgggtctgacccctgatccaccaggcgtgctatctgatcttggatttctcagctcttctagaactgagcctcagtttcttcagctataaaatggggaaaatat

SEQ ID NO: 361975 - DNA, 120 bp, Artificial Sequence
  ENSG00000140577_46 (sequence is synthesized)
ataaatgcaaggactcaaaaagatgccactcatatcctcccttacagtttcactttaagatgtcttctagtgggacatagttagaggttgagaggaacagcagtccctgtgttgatggat

SEQ ID NO: 361976 - DNA, 120 bp, Artificial Sequence
  ENSG00000140577_47 (sequence is synthesized)
tgaggcagtaactcgaggaggaagattttcctgcacagaactgcagaggcttggggagagagagaacacactgggatgactctgagatcctaacatgagtgtcttggtggacggtggcct

SEQ ID NO: 361977 - DNA, 120 bp, Artificial Sequence
  ENSG00000140577_48 (sequence is synthesized)
gaatttgagctgtcttgggtacttttggcagagaacttgagtaggcagttggaagtatgcacttggagttcacaaaagaactgttgggagctggaggtgtcgatttatgagttactggac

SEQ ID NO: 361978 - DNA, 120 bp, Artificial Sequence
  ENSG00000140577_49 (sequence is synthesized)
tgtgggtgacagtggggccgagggaaggatgcgattggccaaggcgagcatggaggacaggggctctctaccaggaagacgggcactggccctgaggctcttaggaagcgcctcctaaag

SEQ ID NO: 361979 - DNA, 120 bp, Artificial Sequence
  ENSG00000140577_50 (sequence is synthesized)
ccactggtaaactggccaactgatgtcctctcttatcagaagaagaagagctgctccccttcctttggtgaagaattctgtatttatttgagctgcccagcccaggcctgcaggataggg

SEQ ID NO: 361980 - DNA, 120 bp, Artificial Sequence
  ENSG00000140577_51 (sequence is synthesized)
gcaaacagctcggaggccggccgggtggcgcggcgcggcttctggtcgctccgaacatcccccaccatcgagccctgctgttctgccggcgtggaaggccgcgggcaccccagggtccca

SEQ ID NO: 361981 - DNA, 120 bp, Artificial Sequence
  ENSG00000140577_52 (sequence is synthesized)
cgcgctcgtggggggagctctgtgcacaagtccatccagggcccggccctggggtggctcgggttgttggaaccacgacgggattccgtgtcgagtgttcaatttcagaagcttcagcaa

SEQ ID NO: 361982 - DNA, 120 bp, Artificial Sequence
  ENSG00000140577_53 (sequence is synthesized)
catctaaaatgtaagtaagctatacttaaaggcttagaactttataataatgtatcctgattctgtactgaaaacttatttggtatatttgattgctcttaagggaatgctaagatatta

SEQ ID NO: 361983 - DNA, 120 bp, Artificial Sequence
  ENSG00000140577_54 (sequence is synthesized)
cattcttggcacggttctttagttttagcttagagcaataggaaatactatgctttgtcatctgcagtataatttatggattaaaaatacttcattcagccagaatttattccaagtcaa

SEQ ID NO: 361984 - DNA, 120 bp, Artificial Sequence
  ENSG00000140577_55 (sequence is synthesized)
tatgatcacagctatgcagttcttaccataaatgtaaacggaggctggaaaagagcatgaagaagggaaaacagctaatgtgttagggttgtggatagtagcttagtttttctttcagaa

SEQ ID NO: 361985 - DNA, 120 bp, Artificial Sequence
  ENSG00000140577_56 (sequence is synthesized)
attcttttattgttgttaaagattatgccagtgtatccaaacatacacactcaaagaccttgcaagaggacgttactatcatggtatatgggacatttggaacatgggtaagctctttcc

SEQ ID NO: 361986 - DNA, 120 bp, Artificial Sequence
  ENSG00000140577_57 (sequence is synthesized)
gaaaatagagtaatcaaaacccagaaagcaccggaaaccttgagggtgtgatcacttacgtcgagaagaaattgaaacaagactttcattcttgaaccgttcccctacaaaatactatac

SEQ ID NO: 361987 - DNA, 120 bp, Artificial Sequence
  ENSG00000140577_58 (sequence is synthesized)
ctcctttggcctcagaatcttcatttatctgatgaaaggaggcaatacaaataaatgagttggaaactagaaacatctctgcagtcaacatttggaaacatcattgtaggtgtttatgaa

SEQ ID NO: 361988 - DNA, 120 bp, Artificial Sequence
  ENSG00000140577_59 (sequence is synthesized)
agcatcaataaagttcagtttaatgaaataacaacaaaaacaacctgtaattcggtcccattgcagggtgttctgagcattttctccagaaattggccacgttagagttaaacctgactt

SEQ ID NO: 361989 - DNA, 120 bp, Artificial Sequence
  ENSG00000140577_60 (sequence is synthesized)
tgaatcaggttagagagccttagtctctttagcaaaaatggacatagagatatgtgatttatttgtacttcttttgatctgctgacctgcttttggaacttacagacaaaatttcatatt

SEQ ID NO: 361990 - DNA, 120 bp, Artificial Sequence
  ENSG00000140577_61 (sequence is synthesized)
attttctatttgtgatgtttcaaactcagtaagtgataactaaaataaacctagaatataggaaaatctcatgcagtgatgtacagtcacaccaaactctgctgttaagtagaaataaag

SEQ ID NO: 361991 - DNA, 120 bp, Artificial Sequence
  ENSG00000140577_62 (sequence is synthesized)
ggtgggtgcagctgtgtgaccagcattgtgccgaaggctttggggaacagaactgagctggattttttgggagaggacacagaagtgtgccaggagggcccgtgctctcacttcattctt

SEQ ID NO: 361992 - DNA, 120 bp, Artificial Sequence
  ENSG00000140577_63 (sequence is synthesized)
ctcagtactcgggcgcaggggtggaggaaggagaagaaaggcggggtgggtctcgctgcggagagctgaattcctggcagtgatggtagagttggcttcacaagcctagaaaccaggaag

SEQ ID NO: 361993 - DNA, 120 bp, Artificial Sequence
  ENSG00000140577_64 (sequence is synthesized)
tgggggcagggcactcatgtttactgagcacctacccatgccaggcgctgtgctgggtaatttatgtgtcacttagtcctcaaaaactcactgagtcgttaatttttttaaccctcattt

SEQ ID NO: 361994 - DNA, 120 bp, Artificial Sequence
  ENSG00000140577_65 (sequence is synthesized)
tctgatgaggaaactgagtgtgtggtgaagtaacccaggattcagaccaggccccgctgatggcccagcctgtgctctcccctccctatgccacctgcgaccattcgcagtgatgaggac

SEQ ID NO: 361995 - DNA, 120 bp, Artificial Sequence
  ENSG00000140577_66 (sequence is synthesized)
cttgtacaagggagccaggagttgtgggggcactctagggaaaccccaacttttcttgccttcaagcttcttgcagtttttagtctatttggaggcaaggataatgaccccagggaatgt

SEQ ID NO: 361996 - DNA, 120 bp, Artificial Sequence
  ENSG00000140577_67 (sequence is synthesized)
ttttctctcccctttctcccgcccccaggaacacaccacatttggtccacagaaggactgacttctgattttgtatattatgtggctgttatcaaggaaagtaaagatgataaatgatct

SEQ ID NO: 361997 - DNA, 120 bp, Artificial Sequence
  ENSG00000140577_68 (sequence is synthesized)
tgagaatctattctggaatgtgtgataactttgacattgaatgaaaaaggcaaaaggaaatggaggcaattcatcagcaaatttgtacatgtcaggatggagtggtacatcaaaccgttg

SEQ ID NO: 361998 - DNA, 120 bp, Artificial Sequence
  ENSG00000140577_69 (sequence is synthesized)
atggagtggtacatcaaaccgttgtccaaattgccaagaatattcaggcaaaagacttggagtgtttctttgattgatttaacaatgtattttttttggctgggcatggtggctcacgcc

SEQ ID NO: 361999 - DNA, 120 bp, Artificial Sequence
  ENSG00000140577_70 (sequence is synthesized)
aggtgggtgaacagtactcagctatgtttgttgtcactgaatgtttgtacttagaggtcattgaaaaatcctgcagaggtgaaagcaagaggaactgggggaaaaggagaagatttgtct

SEQ ID NO: 362000 - DNA, 120 bp, Artificial Sequence
  ENSG00000140577_71 (sequence is synthesized)
gagaacagagataagaatatacaagggaaggacgtttcaagtaaaaattatcgcgcttgtgtcaatgaattagcacattgatctcttggcttactaattttcatatgaattgacttattt

SEQ ID NO: 362001 - DNA, 120 bp, Artificial Sequence
  ENSG00000140577_72 (sequence is synthesized)
ctcctggtttttcctcactgccagcctagcatcgggttttctcagctctgctaagccagctgccaccgggccatctgctgctcattttccagcttttgttgccattttcttctctcccgt

SEQ ID NO: 362002 - DNA, 120 bp, Artificial Sequence
  ENSG00000140577_73 (sequence is synthesized)
tatctttgtcctcgtgttgtttgttatcatttagtgttctgtgctgttgtttagtgttttttattaatgcttattgcttgttaatgttgtagtgtcttgttttaacaggatttggggatg

SEQ ID NO: 362003 - DNA, 120 bp, Artificial Sequence
  ENSG00000140577_74 (sequence is synthesized)
cggagaaaactgaaaggaaattggttaaattggctgttttcttgtttagttcttttaagacaatagaacttgtcattgaatggaacatgctttgtggggaagtaaaatttgagatatact

SEQ ID NO: 362004 - DNA, 120 bp, Artificial Sequence
  ENSG00000140577_75 (sequence is synthesized)
ttgaaggatgagaaacgggcttctcacagcattgcacagaacaccgcgatggtgtcctcagaccgaagccaactttcctttctgcccacagaagctcaagcccaggtgtcgccgccaccc

SEQ ID NO: 362005 - DNA, 120 bp, Artificial Sequence
  ENSG00000140577_76 (sequence is synthesized)
atatcctcccttacagtttcactttaagatgtcttctagtgggacatagttagaggtaaagggacaaaaagaagtagaatgacaataaacacatggctgagcaatcaggaaggagccaaa

SEQ ID NO: 362006 - DNA, 120 bp, Artificial Sequence
  ENSG00000140577_77 (sequence is synthesized)
ttgtggccagttttatatattaaatctgaccctgaaacttgtcttggtaggtgggttctgttaaccagactccgagcccacttaccccaccagctacatggaaggtctcaggcctgcccc

SEQ ID NO: 362007 - DNA, 120 bp, Artificial Sequence
  ENSG00000140577_78 (sequence is synthesized)
accccctccacctgctcacactctgcctggtgcccagggatcctgagagcatcctttgcctctcagagcaatgcaggcaggtgtggcctgaggctgcgaggccacaggaccccagggaac

SEQ ID NO: 362008 - DNA, 120 bp, Artificial Sequence
  ENSG00000140577_79 (sequence is synthesized)
atcaggacggaaggcaaaggggcggaaaggagtgcacagagggataagaaaagatccatgtgagtgtggggatttttttttttaactttaatttttgtttccatccattgcagccacctc

SEQ ID NO: 362009 - DNA, 120 bp, Artificial Sequence
  ENSG00000140577_80 (sequence is synthesized)
ttctttgtttatctttttcatcatccctcctccctgccttccttttttaatgtggaaatcttccttgagccaaaggcttcactaagcttaactaaggaagcaatggaggaggcgctgatg

SEQ ID NO: 362010 - DNA, 120 bp, Artificial Sequence
  ENSG00000140577_81 (sequence is synthesized)
tggttgttaaaagccctgtgacctgtgctgcccttccgctggcacgctggcacctggcagggatgccagaaatgtttcttgagtaaatggtaaattcaagtttataaataagagtgtttc

SEQ ID NO: 362011 - DNA, 120 bp, Artificial Sequence
  ENSG00000140577_82 (sequence is synthesized)
ctttgtctcgaggttgttacttagggcatgtcagtgttgtggagtagtttaaagccacctgaatgaagttttctgaagttttccaaagaacaaataaacttcttctagattttccttgca

SEQ ID NO: 362012 - DNA, 120 bp, Artificial Sequence
  ENSG00000140598_0 (sequence is synthesized)
agccggccccgccccctggcgcgcgggcgtgtcggacccgcagagctctcggactttcggaagctctcggtgtgggtgcgacccgagagaaggagcggggctggtggggctgctgcagcc

SEQ ID NO: 362013 - DNA, 120 bp, Artificial Sequence
  ENSG00000140598_1 (sequence is synthesized)
gtcacaggaaataagtaatcatggtgctcaacagtttggataagatgattcaactccagaaaaacactgccaacatcaggaatatttgtgttttggctcatgttgaccatggaaaaacta

SEQ ID NO: 362014 - DNA, 120 bp, Artificial Sequence
  ENSG00000140598_2 (sequence is synthesized)
ctctggctgactgtcttatatctagcaatggaatcatctccagccgcctagcaggcaagttaaggtacatggacagcagagaagatgaacagatccgagggatcactatgaaatccagtg

SEQ ID NO: 362015 - DNA, 120 bp, Artificial Sequence
  ENSG00000140598_3 (sequence is synthesized)
ccatttccctacattatgcaacaggtaatgaggagtacctgatcaatctgatagactctccaggacacgtggacttttcctcagaagtatcaaccgctgttcgcatttgtgatggatgca

SEQ ID NO: 362016 - DNA, 120 bp, Artificial Sequence
  ENSG00000140598_4 (sequence is synthesized)
tcattgtggtagatgctgtggaaggagtctgtccacagacacaggcagttctgcgacaagcttggcttgaaaacatccgtccggttttagtgattaataagattgatcgcttgatagtgg

SEQ ID NO: 362017 - DNA, 120 bp, Artificial Sequence
  ENSG00000140598_5 (sequence is synthesized)
aactgaaattcaccccacaagaggcctattctcacctcaagaatattttagaacagattaatgcgctcacagggactctttttacttctaaagtcctagaagaaagagcagagagggaga

SEQ ID NO: 362018 - DNA, 120 bp, Artificial Sequence
  ENSG00000140598_6 (sequence is synthesized)
ctgaatcccaagtgaatccaaattctgaacaaggagagcaagtatatgactggagcactggcttggaggacacagatgattctcacctttacttctctccagaacagggaaatgtggtgt

SEQ ID NO: 362019 - DNA, 120 bp, Artificial Sequence
  ENSG00000140598_7 (sequence is synthesized)
ttaccagtgcaatagatgggtggggctttggaattgagcacttcgccagaatctacagtcaaaaaattggcatcaaaaaggaagttcttatgaaaaccttgtggggagattactatataa

SEQ ID NO: 362020 - DNA, 120 bp, Artificial Sequence
  ENSG00000140598_8 (sequence is synthesized)
atatgaaggctaaaaagatcatgaagggtgatcaggccaaaggaaagaaacctttatttgtacagttgatcctggaaaatatatggagtttgtatgatgctgttttgaaaaaggacaaag

SEQ ID NO: 362021 - DNA, 120 bp, Artificial Sequence
  ENSG00000140598_9 (sequence is synthesized)
acaaaattgataaaatagtgacttctttaggattaaaaattggagcccgggaggcacgacattcagaccctaaagttcagatcaacgccatttgcagtcagtggctacccatatcccatg

SEQ ID NO: 362022 - DNA, 120 bp, Artificial Sequence
  ENSG00000140598_10 (sequence is synthesized)
ctgttcttgctatggtgtgtcagaaacttcctagtccccttgatattacagctgagagagtggagagactgatgtgcacaggatcacaaacttttgactcttttccaccagaaactcaag

SEQ ID NO: 362023 - DNA, 120 bp, Artificial Sequence
  ENSG00000140598_11 (sequence is synthesized)
cactgaaagcagcttttatgaaatgtggaagtgaggacactgctccagttattatatttgtttccaaaatgtttgcagttgatgctaaggccttgcctcagaataagccaaggcctctca

SEQ ID NO: 362024 - DNA, 120 bp, Artificial Sequence
  ENSG00000140598_12 (sequence is synthesized)
ctcaagaagaaattgctcagagacgtgagcgtgcaagacaaaggcatgcagagaagcttgcagcagcacagggacaggcacccttggagcccacccaagatgggagtgccattgaaacat

SEQ ID NO: 362025 - DNA, 120 bp, Artificial Sequence
  ENSG00000140598_13 (sequence is synthesized)
gtccaaaaggagaggagccaagaggtgacgagcaacaggtggaaagtatgacccctaaacctgtgctccaggaagaaaacaaccaagagtcttttattgcatttgctcgggtgttcagtg

SEQ ID NO: 362026 - DNA, 120 bp, Artificial Sequence
  ENSG00000140598_14 (sequence is synthesized)
gtgtggctcgaagaggaaagaaaatttttgtcttggggcccaaatacagtcctcttgagtttttacgaagggtaccattaggcttctcagctccaccagatggcctcccccaagtccccc

SEQ ID NO: 362027 - DNA, 120 bp, Artificial Sequence
  ENSG00000140598_15 (sequence is synthesized)
aagggaactggaatatctagaggaggtacctccaggaaatgtgctaggaataggaggccttcaagattttgtgctgaaatctgcaacactgtgtagcctgccatcctgcccaccatttat

SEQ ID NO: 362028 - DNA, 120 bp, Artificial Sequence
  ENSG00000140598_16 (sequence is synthesized)
accactcaacttcgaagccactcctattgtgagagttgctgttgaaccaaaacatccaagtgaaatgcctcagctcgtaaaaggaatgaaactgttaaaccaggctgatccctgtgtcca

SEQ ID NO: 362029 - DNA, 120 bp, Artificial Sequence
  ENSG00000140598_17 (sequence is synthesized)
gattttaattcaggaaacgggagagcacgttttagtcacagcaggagaagtccaccttcagcgatgcctggatgacttaaaagaaaggtttgcaaagattcatatcagtgtatctgaacc

SEQ ID NO: 362030 - DNA, 120 bp, Artificial Sequence
  ENSG00000140598_18 (sequence is synthesized)
tattattccattcagagaaacaatcacaaaacccccaaaagttgacatggtcaatgaagaaataggcaaacagcaaaaagttgcagtcatacaccaaatgaaagaagatcaaagcaaaat

SEQ ID NO: 362031 - DNA, 120 bp, Artificial Sequence
  ENSG00000140598_19 (sequence is synthesized)
ccctgaaggaatccaagttgactctgacgggctaatcaccataacaactcccaataaacttgccacgctcagtgttcgagccatgccccttccagaagaagtcacccagattctggaaga

SEQ ID NO: 362032 - DNA, 120 bp, Artificial Sequence
  ENSG00000140598_20 (sequence is synthesized)
aaatagtgatttgattcgttctatggagcagttgacatcctctttgaatgagggtgaaaatactcacatgattcatcagaagacccaagagaaaatttgggaattcaaaggaaaactgga

SEQ ID NO: 362033 - DNA, 120 bp, Artificial Sequence
  ENSG00000140598_21 (sequence is synthesized)
gcaacacctaacagggagaagatggaggaacattgttgaccaaatctggtcatttggcccaagaaaatgtgggcccaacatactagtcaataaaagtgaagattttcagaactcagtatg

SEQ ID NO: 362034 - DNA, 120 bp, Artificial Sequence
  ENSG00000140598_22 (sequence is synthesized)
gacaggtccagctgacaaagcttcaaaagaagccagtagataccgagatttgggcaatagcattgtgagtggcttccaactagcaaccctctctggccccatgtgtgaggagcctctcat

SEQ ID NO: 362035 - DNA, 120 bp, Artificial Sequence
  ENSG00000140598_23 (sequence is synthesized)
gggtgtctgttttgttctggaaaaatgggacctaagtaaatttgaggaacaaggagcaagtgatctggcaaaagagggacaggaggaaaatgaaacctgttctggtggaaatgaaaacca

SEQ ID NO: 362036 - DNA, 120 bp, Artificial Sequence
  ENSG00000140598_24 (sequence is synthesized)
agagctacaagatggctgctctgaggcctttgagaagaggacatcacagaaaggagaatctccactcactgactgctatggacctttctcaggacagctaattgccaccatgaaagaagc

SEQ ID NO: 362037 - DNA, 120 bp, Artificial Sequence
  ENSG00000140598_25 (sequence is synthesized)
atgtcgctatgcactgcaagtgaaacctcagcgcctgatggcagctatgtacacatgtgacatcatggccactggtgatgttctcggtcgagtctatgctgtcttgtcaaagagagaagg

SEQ ID NO: 362038 - DNA, 120 bp, Artificial Sequence
  ENSG00000140598_26 (sequence is synthesized)
tcgggtacttcaagaagaaatgaaagaagggacagacatgttcatcatcaaggctgtgctgcctgttgctgaaagctttggttttgctgatgaaatcaggaagaggacaagtggcctggc

SEQ ID NO: 362039 - DNA, 120 bp, Artificial Sequence
  ENSG00000140598_27 (sequence is synthesized)
cagcccacaactagtattcagccattgggagatcattcccagtgaccccttctgggtgccaactactgaggaggaatacttgcactttggggagaaggctgactctgagaaccaagcccg

SEQ ID NO: 362040 - DNA, 120 bp, Artificial Sequence
  ENSG00000140598_28 (sequence is synthesized)
gaagtacatgaacgcagtacgaaagcggaaggggctttatgtggaagaaaagattgtggagcatgcagaaaagcagaggacactcagcaaaaataagtagctacctactactggtggatt

SEQ ID NO: 362041 - DNA, 120 bp, Artificial Sequence
  ENSG00000140598_29 (sequence is synthesized)
cttttccttatagtgaatttaaaagtatcatcaagggtttaatattgggaaaatttctttttgccacattatctctgtttattcactttcaataaagttgatccatataaatattttaaa

SEQ ID NO: 362042 - DNA, 120 bp, Artificial Sequence
  ENSG00000140598_30 (sequence is synthesized)
ctgttggagagagctgcacaggaatgtgaatatcaggaggcaaggatgattggagccatcttggaggctggctaccacaataatgcttccttctttttgaaggtcttgcctgaacacttt

SEQ ID NO: 362043 - DNA, 120 bp, Artificial Sequence
  ENSG00000140598_31 (sequence is synthesized)
gaaaatgatagcgatggagaaatgatagctctcaatcaatgggatgttttagtgtttcctaaaccagttgaacttagactgcggcttatttttggagaaaaatgaaatgccctcaattca

SEQ ID NO: 362044 - DNA, 120 bp, Artificial Sequence
  ENSG00000140598_32 (sequence is synthesized)
gacatgaacagttattcgattgtagacttattttttaataactgaaaaatggcattcactgcctacacttgaataattttgcatttttagcttaagtcataaaatgtttttctgtgtatg

SEQ ID NO: 362045 - DNA, 120 bp, Artificial Sequence
  ENSG00000140598_33 (sequence is synthesized)
gtctggggccggggcggtcgcctgtctgtgtggacccaggatcctcaaagagaacgaatctgggaccctgcagaaatgaagggcatgtagtgtagaggtttttcctttttatttagaaag

SEQ ID NO: 362046 - DNA, 120 bp, Artificial Sequence
  ENSG00000140598_34 (sequence is synthesized)
gaatgaaagaccggcagtgcacctgcttggataataagcacgtgacccaaaactttgttcgggctccatgggcaggaataaagctgggtatttgacctcgcgcgaggacgagcgagaatg

SEQ ID NO: 362047 - DNA, 120 bp, Artificial Sequence
  ENSG00000140598_35 (sequence is synthesized)
tctccctcctggatgcaacccttcctgtacgtggtcattggcctggagatgtttactggagtactcctccaccggcagggttactggtgtcactgtgcacccagtcccctcgagctgcgt

SEQ ID NO: 362048 - DNA, 120 bp, Artificial Sequence
  ENSG00000140598_36 (sequence is synthesized)
gattcatcgcagcctttggatccggaaggatgagcaaactccttaagtgtaatcgtggaaataagtaatcatggtgctcaacagtttggataagatgattcaactccagaaaaacactgc

SEQ ID NO: 362049 - DNA, 120 bp, Artificial Sequence
  ENSG00000140598_37 (sequence is synthesized)
ggttggttggttaattgaaatgccttctggatacttgcatttatatggtaccattaggcttctcagctccaccagatggcctcccccaagtcccccacatggcatactgtgctctggaaa

SEQ ID NO: 362050 - DNA, 120 bp, Artificial Sequence
  ENSG00000140598_38 (sequence is synthesized)
aagaagtgtgactagaggctgaacctaggtcttctcccgaaatctatcctgttaattgatgttaatctgggagagtctgctctgaaaagcagaagcatattgacttggatggaattgagc

SEQ ID NO: 362051 - DNA, 120 bp, Artificial Sequence
  ENSG00000140598_39 (sequence is synthesized)
tgtaatcgtgtcacaggaaataagtaatcatggtgctcaacagtttggataagatgattcaactccagaaaaacactgccaacatcaggaatatttgtgttttggctcatgttgaccatg

SEQ ID NO: 362052 - DNA, 80 bp, Artificial Sequence
  ENSG00000140600_0 (sequence is synthesized)
agtgttgccatcggcgtgcgcgcgtgtgtgcgagtgtgacagcggctgtggctgtggccgtggccgtgggaggcgggccc

SEQ ID NO: 362053 - DNA, 120 bp, Artificial Sequence
  ENSG00000140600_1 (sequence is synthesized)
tccccgagcgcgtcgcggccgcgtggcccagccgagccttgagaccaccccgcccctgccggtcgcagtcgcgatgtcggtggccgggctgaagaagcagttccacaaagccagccagct

SEQ ID NO: 362054 - DNA, 120 bp, Artificial Sequence
  ENSG00000140600_2 (sequence is synthesized)
atttagtgaaaaaataagtggtgctgaaggaactaaactagacgatgaatttcttgacatggaaaggaaaatagatgttaccaataaagttgttgcagaaattctttcaaaaaccactga

SEQ ID NO: 362055 - DNA, 120 bp, Artificial Sequence
  ENSG00000140600_3 (sequence is synthesized)
atatcttcagccaaatccagcatacagagctaagctaggaatgctgaacactgtgtcgaagatccgagggcaggtgaagaccacaggatacccgcagacggaaggcttgctgggggactg

SEQ ID NO: 362056 - DNA, 120 bp, Artificial Sequence
  ENSG00000140600_4 (sequence is synthesized)
tatgctgaaatacgggaaggagctcggggaagactccacctttggcaatgcattgatagaagttggtgaatccatgaagctaatggctgaggtgaaagactctcttgatattaatgtaaa

SEQ ID NO: 362057 - DNA, 120 bp, Artificial Sequence
  ENSG00000140600_5 (sequence is synthesized)
gcaaacttttattgatccacttcagttactacaagataaagatttaaaagagatcgggcatcacctgaaaaagctggaaggccgccgcctggattacgattataaaaagaaacgagtagg

SEQ ID NO: 362058 - DNA, 120 bp, Artificial Sequence
  ENSG00000140600_6 (sequence is synthesized)
taagataccagacgaagaagtcagacaagcggtagaaaaatttgaagagtcaaaggagttggctgaaagaagcatgtttaactttttagaaaatgatgtagaacaagtcagccagttggc

SEQ ID NO: 362059 - DNA, 120 bp, Artificial Sequence
  ENSG00000140600_7 (sequence is synthesized)
gcagcattagactatcacagacagtccacagagattctgcaggagctgcagagcaagctacagatgcgaatatcagctgcatccagtgtccccagacgagaatacaagccaaggcctgtg

SEQ ID NO: 362060 - DNA, 120 bp, Artificial Sequence
  ENSG00000140600_8 (sequence is synthesized)
aaaaggagttctagtgagctcaatggagtttccaccacctctgtagtgaagacgacaggttctaacattcccatggaccagccctgctgtcgtggtctctatgactttgagccagaaaac

SEQ ID NO: 362061 - DNA, 120 bp, Artificial Sequence
  ENSG00000140600_9 (sequence is synthesized)
caaggagaattaggatttaaagaaggggacatcattacattaaccaatcaaatagatgaaaactggtatgaaggaatgatacacggagaatcgggattcttccccattaattacgtggaa

SEQ ID NO: 362062 - DNA, 120 bp, Artificial Sequence
  ENSG00000140600_10 (sequence is synthesized)
gtgatcgtgcctttacctcagtaaatgtgtaacacaaactctggacatactttcgtaactgaaatgaattcacaccagtgtgctctcagtgcggtgttctgtgacatcctttgctctctg

SEQ ID NO: 362063 - DNA, 120 bp, Artificial Sequence
  ENSG00000140600_11 (sequence is synthesized)
accaacttaatgacttttgtatgtgtgctctctttataatgtattttatatcactttaatttgtataaatgattttcttgtccttgctacatgaaaatattttcttttttgcttcctgtc

SEQ ID NO: 362064 - DNA, 120 bp, Artificial Sequence
  ENSG00000140600_12 (sequence is synthesized)
ctaaaagtcattggttaaatgtatttgcttcctgtggctaaaaataagtctcacccattgcagttatgtcaacgaatggcctatattcctcagctgcaatgaaatggtaacatttgaaac

SEQ ID NO: 362065 - DNA, 120 bp, Artificial Sequence
  ENSG00000140600_13 (sequence is synthesized)
taagaaatgctaaatattttgtttctcgacattcctgatgacgtctggtcttttcttttcattgtattttaagcttacctgtgaatagcccaataaacatgacacactgtgttggcaaaa

SEQ ID NO: 362066 - DNA, 120 bp, Artificial Sequence
  ENSG00000140600_14 (sequence is synthesized)
ggtgtgagccactgtgcccagcctcttctctcactatccgtttctgacaaatgaaaaaaatggatgtgggtcctgcagaacctgaggccagctctaaccagtctttcatggatgcataca

SEQ ID NO: 362067 - DNA, 120 bp, Artificial Sequence
  ENSG00000140600_15 (sequence is synthesized)
gtctttcatggatgcatacacctgcctgcaggcgctgctcccaggttatgaggctggttcttgggtttgactctgggaatcatgctcattgatctgcttttcctaatcatgtcagtgaat

SEQ ID NO: 362068 - DNA, 120 bp, Artificial Sequence
  ENSG00000140600_16 (sequence is synthesized)
acctacacgtgaagaaaactcaagctgcaccataaagctaaaggaagaaggagcttttaagtgaataagaccattttcccaatgagcagtgtcataaacattgaggactctcttaaatca

SEQ ID NO: 362069 - DNA, 120 bp, Artificial Sequence
  ENSG00000140600_17 (sequence is synthesized)
cctacagcagactggaaccagcagattaggaaggcccaagggactgcttcgggaaggccattgacagcaggaaaaagtgacaggtcgcagccagactacaagggaggcaagagaaaaact

SEQ ID NO: 362070 - DNA, 120 bp, Artificial Sequence
  ENSG00000140600_18 (sequence is synthesized)
ataaaaagcaggaacaaaaacactcaaaagacacagcagtctgggggatttactaaaagacaaagagccctactcaggttctaacattcccatggaccagccctgctgtcgtggtctcta

SEQ ID NO: 362071 - DNA, 120 bp, Artificial Sequence
  ENSG00000140600_19 (sequence is synthesized)
taatgtagaaacaatgtcgtctgtgtcccaataatgaaattcagtttttaaagctgagtctccagtgaccaaaggtagttgcattcggtcctactgatgagaaagagaacagctattttt

SEQ ID NO: 362072 - DNA, 120 bp, Artificial Sequence
  ENSG00000140600_20 (sequence is synthesized)
gtgaatttcagttgacatcatccgaatggagtgctggtcatagcaacaagagagcactgagcaaaggttttatgagttgcttcagaaagccactaaacatttggcaaatattttcttcct

SEQ ID NO: 362073 - DNA, 120 bp, Artificial Sequence
  ENSG00000140600_21 (sequence is synthesized)
tatttcctctttataatttttttaaaaattctgcccttgtgtactatatacataaaggtatatgttaatttgaaaaagctttctctttgtggcttaaatgctggagaaacaagatgtggt

SEQ ID NO: 362074 - DNA, 120 bp, Artificial Sequence
  ENSG00000140600_22 (sequence is synthesized)
gaatacgaaaggctgcttaaatccagtgtcacatcagcttctccactgaaggtctgggtttctaggtccccaagcagcatctattgatgagattttcccaggttgtaaattataggaacc

SEQ ID NO: 362075 - DNA, 120 bp, Artificial Sequence
  ENSG00000140600_23 (sequence is synthesized)
aatagagggcgcccaagctttgagttctgtggatttctaaagccacctttcctttttaggaatttattatctgcgtagagttcctgtgattcccttgactgtaggaatcagcacaaacct

SEQ ID NO: 362076 - DNA, 120 bp, Artificial Sequence
  ENSG00000140600_24 (sequence is synthesized)
acaaaaacactcaaaagacacagcagtctgggggatttactaaaagacaaagagccctactcaggtctcaggagtaagagaaaatcaacacaaggccacttggggagggcagtgctggct

SEQ ID NO: 362077 - DNA, 120 bp, Artificial Sequence
  ENSG00000140612_0 (sequence is synthesized)
agtagttccgcccgctggtcatcgcgccctttcccctgccggtgtcctgctcgccgtccccgccatgctgtctctagactttttggacgatgtgcggcggatgaacaagcggcagctcta

SEQ ID NO: 362078 - DNA, 120 bp, Artificial Sequence
  ENSG00000140612_1 (sequence is synthesized)
ttatcaagtcctaaattttggaatgattgtctcatcggcactaatgatctggaaggggttaatggtaataactggaagtgaaagtccgattgtagtggtgctcagtggcagcatggaacc

SEQ ID NO: 362079 - DNA, 120 bp, Artificial Sequence
  ENSG00000140612_2 (sequence is synthesized)
tgcatttcatagaggagatcttctctttctaacaaatcgagttgaagatcccatacgagtgggagaaattgttgtttttaggatagaaggaagagagattcctatagttcaccgagtctt

SEQ ID NO: 362080 - DNA, 120 bp, Artificial Sequence
  ENSG00000140612_3 (sequence is synthesized)
gaagattcatgaaaagcaaaatgggcatatcaagtttttgaccaaaggagataataatgcggttgatgaccgaggcctctataaacaaggacaacattggctagagaaaaaagatgttgt

SEQ ID NO: 362081 - DNA, 120 bp, Artificial Sequence
  ENSG00000140612_4 (sequence is synthesized)
agtaagaagcctgccttgctgttcctgggaagatgccatagttttcgttactggatgtttggagtagatactggtctgtgattggtggaatggagaacacacgtgttggtgcttctgggt

SEQ ID NO: 362082 - DNA, 120 bp, Artificial Sequence
  ENSG00000140612_5 (sequence is synthesized)
agcactggtttgcattagtttatgtttccatgccagagtttgtgtgggcgggcgcatgtgcaccacagagtgcactcgaggggactttcagtcacaggatttcataattgtcattgtcac

SEQ ID NO: 362083 - DNA, 120 bp, Artificial Sequence
  ENSG00000140612_6 (sequence is synthesized)
actttcaaatttttgtacatcagtgaatttttttatattaaaaggttgagccaaagcccccagtgtttgtattttgaagccaagcttcacttctaaagtgcctacagagacttgtaaatg

SEQ ID NO: 362084 - DNA, 120 bp, Artificial Sequence
  ENSG00000140612_7 (sequence is synthesized)
aaaatgcagctctgcacgagtttgaaaccgtcatacctccttctattaggaatggcatatactgaggtggtcgtaagtcttaacttctaaaattttaaataaaagactttgcacattgaa

SEQ ID NO: 362085 - DNA, 120 bp, Artificial Sequence
  ENSG00000140612_8 (sequence is synthesized)
acagaggcccgccttccgaaggtggcagagcagcctccccaactaagcctgggtcgccgcctcggtgaagggccgcggggccgagcgcgggaagtggcgtccagtcggtttttggcaggc

SEQ ID NO: 362086 - DNA, 120 bp, Artificial Sequence
  ENSG00000140612_9 (sequence is synthesized)
gagagccagagcgtgagaaccctcccacggcgaggccaagccctgagactggactagcaaggtcgtgagtctctctgtcagctctccgcagcgaaggggcgcggggggcggggaccgtgc

SEQ ID NO: 362087 - DNA, 120 bp, Artificial Sequence
  ENSG00000140612_10 (sequence is synthesized)
ctatgtgtaaggcactatgttgaccttgaggatacagggggaacaagataggcatcattgttgcctttatagagcttctagtttggtaggggagacacacatgtatcgaatctgttgtac

SEQ ID NO: 362088 - DNA, 120 bp, Artificial Sequence
  ENSG00000140612_11 (sequence is synthesized)
aactaattatttaagtaaaagtatgataattattataaagacctcaaaggaaatgtatcaggtgctgtaagataatttaacaggtggttttgcttagtttgaggggaaaaactttagggg

SEQ ID NO: 362089 - DNA, 120 bp, Artificial Sequence
  ENSG00000140612_12 (sequence is synthesized)
catgaggaattagaaagagctagtgaaaagaaagtgtagcagccaaagagttaggtgaagaaacaaatctgtggtacattaagaaaccaagaaggaggaatttccagagcatatttgtgg

SEQ ID NO: 362090 - DNA, 120 bp, Artificial Sequence
  ENSG00000140612_13 (sequence is synthesized)
tcatgaaagtcaaatgctgccaagatggaaaggaagatgggagttgagactggtttgctacatatggtgatgaaaactgttctagaaaagtttcaagttaataggaccaaacacagctta

SEQ ID NO: 362091 - DNA, 120 bp, Artificial Sequence
  ENSG00000140612_14 (sequence is synthesized)
caggtgattaaaaaatgagaaggtggtgaaatcctaagtactataatgagctcttacactcactttttggccacttaacatgaagtactttgtaatattctggctgtgcttgctttgtct

SEQ ID NO: 362092 - DNA, 120 bp, Artificial Sequence
  ENSG00000140612_15 (sequence is synthesized)
ccccagctagattgacagcttcctgaaggttatgatgataaacctagcccctagcactgtatcaacatgtagcattagagtcaccacctggagatctaagaccttggctctatctggtgc

SEQ ID NO: 362093 - DNA, 120 bp, Artificial Sequence
  ENSG00000140612_16 (sequence is synthesized)
tggttctgccacacagaaaccatgtaccttgggcatgatcatctgtttcctcatctctaaaatggtgatattcctaactttcctatcacttgggcttttgcaaggatcaaatagggcagt

SEQ ID NO: 362094 - DNA, 120 bp, Artificial Sequence
  ENSG00000140612_17 (sequence is synthesized)
atatagaaatggactttgtgaattgaaaattagtattctatagaagatattgataatattcagtgagtgacaacagctgctttacatcggaaattctgtgataatcagttttttgtttgt

SEQ ID NO: 362095 - DNA, 120 bp, Artificial Sequence
  ENSG00000140612_18 (sequence is synthesized)
tttagatttgttccttatattggaattgtgacgatcctcatgaatgactatcctaaatttaaggtaagagtctgtattatttgttttattaaaaaatgtaatcttttgggccaggcacag

SEQ ID NO: 362096 - DNA, 63 bp, Artificial Sequence
  ENSG00000140612_19 (sequence is synthesized)
gaggtggtctctattaaaaaaaaaaaaaaattattagcctgggcgcagtggctcacgcctgta

SEQ ID NO: 362097 - DNA, 62 bp, Artificial Sequence
  ENSG00000140612_20 (sequence is synthesized)
gaggctgaggcacgagaattgcttgaatatgataggtggaggttgctgttatttaaagaaat

SEQ ID NO: 362098 - DNA, 120 bp, Artificial Sequence
  ENSG00000140612_21 (sequence is synthesized)
aaaaagaaaattatttaaagaaatgtgatattttgcttagtattggaaacttttaaatggattatagttaaaagatgaaagaataattgggtagtttagcgatatattcacaaagaccaa

SEQ ID NO: 362099 - DNA, 120 bp, Artificial Sequence
  ENSG00000140612_22 (sequence is synthesized)
tttgttaattaactcttagaacctctgaacttttcaacgcttctctgacttgtggttctgtgtttattttctagtatgcagttctctttttgctgggtttattcgtgctggttcatcgtg

SEQ ID NO: 362100 - DNA, 62 bp, Artificial Sequence
  ENSG00000140612_23 (sequence is synthesized)
tctagactttttggacgatgtgcggcggatgaacaagcggtgagcaagagcgaggctccatc

SEQ ID NO: 362101 - DNA, 120 bp, Artificial Sequence
  ENSG00000140612_24 (sequence is synthesized)
gtggaggacaggaattatttgttccttatattggaattgtgacgatcctcatgaatgactatcctaaatttaagtatgcagttctctttttgctgggtttattcgtgctggttcatcgtg

SEQ ID NO: 362102 - DNA, 77 bp, Artificial Sequence
  ENSG00000140612_25 (sequence is synthesized)
tctgcatttttaacaagccatcaagcggttgtgacagaggaggtctaggctttaagaaacaccagtgtatggaatgg

SEQ ID NO: 362103 - DNA, 120 bp, Artificial Sequence
  ENSG00000140612_26 (sequence is synthesized)
aggaggtctaggctttaagaaacaccagtgtatggaatgggagtttggggatggggcaagagagacaggtctcagtgatcctgctagaagggagaggacagagaggggtgaagacaagag

SEQ ID NO: 362104 - DNA, 64 bp, Artificial Sequence
  ENSG00000140612_27 (sequence is synthesized)
ctgctagaagggagaggacagagaggggtgaagacaagagacaggaagtgaggggagttctttt

SEQ ID NO: 362105 - DNA, 68 bp, Artificial Sequence
  ENSG00000140612_28 (sequence is synthesized)
cggacggaggggctcctcacttctcagatggggtggctgccgggcggagggactcctcacttctcaga

SEQ ID NO: 362106 - DNA, 64 bp, Artificial Sequence
  ENSG00000140612_29 (sequence is synthesized)
gagatggcagcagcacagtccagcttcgacagaggcaggggcaggggcatggtcaggggcagag

SEQ ID NO: 362107 - DNA, 120 bp, Artificial Sequence
  ENSG00000140612_30 (sequence is synthesized)
agaggcagaggcaggggcaggggcatggtcaggggcagaggcagaggcagaggcgagttcttaaagggaagtgaaatgtgtcaaaaacaaaatgtgtgttcttcaagtttgcctgaggct

SEQ ID NO: 362108 - DNA, 120 bp, Artificial Sequence
  ENSG00000140612_31 (sequence is synthesized)
ttgatggtgtagatattatgtgggaggtaatttctgtttgtgctgtctttggcatggtctgggctgttttaaagtgtgcaaaggtcagcctccacttcagctcagcgtccctatgacagg

SEQ ID NO: 362109 - DNA, 120 bp, Artificial Sequence
  ENSG00000140612_32 (sequence is synthesized)
ccgctctggagtccagcgatagaagaggaggataaagaagaaagttttacatttgctaaccacctattccgcccacatcgatggtaccctgctaattttctctttctgccgtgaatgctt

SEQ ID NO: 362110 - DNA, 120 bp, Artificial Sequence
  ENSG00000140612_33 (sequence is synthesized)
atgatgtcaaagtagtcttttgcatggagaggaatttaagccctgggagaaaataggatttccccaagagaaagcaaaaagaaaaggcccggacattcagacattcaatcaggcaggatg

SEQ ID NO: 362111 - DNA, 120 bp, Artificial Sequence
  ENSG00000140623_0 (sequence is synthesized)
cttgggcccctggttctacttggggattattgtattattaggctggggtcattgtggggattagaagggtaacagctcctgctcctgctgcagagaagcctccaggtgggggtcacagca

SEQ ID NO: 362112 - DNA, 120 bp, Artificial Sequence
  ENSG00000140623_1 (sequence is synthesized)
agtgcagatggagctcagattcttcggttaactgtcaccctctcccctcccccatcacacacaccaggccctgccaggacaaggcagctcctggaagctccaccaggacccacgtccacc

SEQ ID NO: 362113 - DNA, 120 bp, Artificial Sequence
  ENSG00000140623_2 (sequence is synthesized)
aggcatctcgaacccttggcccccatggaccccctgaggcgctccccctctccctgcctgtcctcgcagccctccagccccagcaccccaccctgcgagatgcttggtcctgtgggcatt

SEQ ID NO: 362114 - DNA, 120 bp, Artificial Sequence
  ENSG00000140623_3 (sequence is synthesized)
gaggctgtgctggaccagctgaagatcaaggctatgaagatggggtttgagttcaacatcatggtggtggggcaaagcgggctgggcaagtccacgatggtgaacacgctgttcaagtcc

SEQ ID NO: 362115 - DNA, 120 bp, Artificial Sequence
  ENSG00000140623_4 (sequence is synthesized)
aaagtgtggaagtcaaacccaccgggcttgggggtgcccacaccccagacgctgcagctgcattcactgacccatgtcatagaggagaagggtgtgaagctgaagctgacggtgacggac

SEQ ID NO: 362116 - DNA, 120 bp, Artificial Sequence
  ENSG00000140623_5 (sequence is synthesized)
acgcccggcttcggggaccagatcaacaatgacaactgctgggaccccatcctgggctacatcaacgagcaatacgagcagtacctgcaggaggagatcctcatcacccgccagcgccac

SEQ ID NO: 362117 - DNA, 120 bp, Artificial Sequence
  ENSG00000140623_6 (sequence is synthesized)
gtactttgtaccacccactgggcactgcctgcggcccctggacattgagttcctgcagcggctgtgccggactgtgaatgtggtgcccgtgattgccagggccgacagcctgaccatgga

SEQ ID NO: 362118 - DNA, 120 bp, Artificial Sequence
  ENSG00000140623_7 (sequence is synthesized)
ggagcgagaggccttcaggcgcaggatccagcagaacctgaggacccactgcatcgacgtctacccccagatgtgctttgacgaggacatcaatgacaaaatcctcaacagcaagttacg

SEQ ID NO: 362119 - DNA, 120 bp, Artificial Sequence
  ENSG00000140623_8 (sequence is synthesized)
ggaccgaatcccttttgccgtggtaggggctgaccaagagcacctggtgaacgggaggtgtgtcctgggccggaagaccaagtggggcatcattgaagtggagaacatggcgcactgtga

SEQ ID NO: 362120 - DNA, 120 bp, Artificial Sequence
  ENSG00000140623_9 (sequence is synthesized)
atttcctctcctgagagacctgcttatccgctcccacctccaagacctgaaggacataacccacaacatccactatgagaactaccgcgtcatcagactcaatgaaagccacctgctgcc

SEQ ID NO: 362121 - DNA, 120 bp, Artificial Sequence
  ENSG00000140623_10 (sequence is synthesized)
ccgcgggcccggctgggtgaacctggccccggcctccccaggacagctgaccaccccccggaccttcaaggtctgcaggggggcccatgacgattctgatgatgagttctgaccaccggc

SEQ ID NO: 362122 - DNA, 120 bp, Artificial Sequence
  ENSG00000140623_11 (sequence is synthesized)
ggatcccggggctgctgggcttcctgagtccccagcggctctcaacacacacctatgtaccagagcatctattaaatgtgagccttgctttttatgaaaagctgtgctttgaaaacaaaa

SEQ ID NO: 362123 - DNA, 120 bp, Artificial Sequence
  ENSG00000140623_12 (sequence is synthesized)
ctctctgccccccgtgggctcttcgcaccgctccctcccagccatcttccctgcctgaccttggtctctctctctctgtctccgtcaccttcatgcctgtgccgtctttctcgctctcta

SEQ ID NO: 362124 - DNA, 120 bp, Artificial Sequence
  ENSG00000140623_13 (sequence is synthesized)
tcaactctgctgtgtgtccccctggggaaagtgggggcacctcctcctgagccccctgcccaagtttcctgctgggacgggagccacttcaccccatacacactccctgaagcccctcca

SEQ ID NO: 362125 - DNA, 120 bp, Artificial Sequence
  ENSG00000140623_14 (sequence is synthesized)
aggcgggcgaggtgatttccttcccacacatcctttccatccaaagactcatctttctctacatctcagggaaatgtgcacatattcctagcagatatgattctctactcatccacaagc

SEQ ID NO: 362126 - DNA, 120 bp, Artificial Sequence
  ENSG00000140623_15 (sequence is synthesized)
aagctgaagctgacggtgacggacacgcccggcttcggggaccagatcaacaatgacaactggtaggttctctctctttttttttttttttaggcagagtttcactcttgtcacccaggc

SEQ ID NO: 362127 - DNA, 120 bp, Artificial Sequence
  ENSG00000140632_0 (sequence is synthesized)
gtcggcggtggttgggtggtaagatggcggctgtgagtctgcggctcggcgacttggtgtgggggaaactcggccgatatcctccttggccaggaaagattgttaatccaccaaaggact

SEQ ID NO: 362128 - DNA, 120 bp, Artificial Sequence
  ENSG00000140632_1 (sequence is synthesized)
tgaagaaacctcgcggaaagaaatgcttctttgtgaaattttttggaacagaagatcatgcctggatcaaagtggaacagctgaagccatatcatgctcataaagaggaaatgataaaaa

SEQ ID NO: 362129 - DNA, 120 bp, Artificial Sequence
  ENSG00000140632_2 (sequence is synthesized)
ttaacaagggtaaacgattccagcaagcggtagatgctgtcgaagagttcctcaggagagccaaagggaaagaccagacgtcatcccacaattcttctgatgacaagaatcgacgtaatt

SEQ ID NO: 362130 - DNA, 120 bp, Artificial Sequence
  ENSG00000140632_3 (sequence is synthesized)
ccagtgaggagagaagtaggccaaactcaggtgatgagaagcgcaaacttagcctgtctgaagggaaggtgaagaagaacatgggagaaggaaagaagagggtgtcttcaggctcttcag

SEQ ID NO: 362131 - DNA, 120 bp, Artificial Sequence
  ENSG00000140632_4 (sequence is synthesized)
agagaggctccaaatcccctctgaaaagagcccaagagcaaagtccccggaagcggggtcggcccccaaaggatgagaaggatctcaccatcccggagtctagtaccgtgaaggggatga

SEQ ID NO: 362132 - DNA, 120 bp, Artificial Sequence
  ENSG00000140632_5 (sequence is synthesized)
tggccggaccgatggccgcgtttaaatggcagccaaccgcaagcgagcctgttaaagatgcagatcctcatttccatcatttcctgctaagccaaacagagaagccagctgtctgttacc

SEQ ID NO: 362133 - DNA, 120 bp, Artificial Sequence
  ENSG00000140632_6 (sequence is synthesized)
aggcaatcacgaagaagttgaaaatatgtgaagaggaaactggctccacctccatccaggcagctgacagcacagccgtgaatggcagcatcacacccacagacaaaaagataggatttt

SEQ ID NO: 362134 - DNA, 120 bp, Artificial Sequence
  ENSG00000140632_7 (sequence is synthesized)
tgggccttggtctcatgggaagtggaatcgtctccaacttgctaaaaatgggtcacacagtgactgtctggaaccgcactgcagagaaatgtgatttgttcatccaggagggggcccgtc

SEQ ID NO: 362135 - DNA, 120 bp, Artificial Sequence
  ENSG00000140632_8 (sequence is synthesized)
tgggaagaacccccgctgaagtcgtctcaacctgcgacatcactttcgcctgcgtgtcggatcccaaggcggccaaggacctggtgctgggccccagtggtgtgctgcaagggatccgcc

SEQ ID NO: 362136 - DNA, 120 bp, Artificial Sequence
  ENSG00000140632_9 (sequence is synthesized)
ctgggaagtgctacgtggacatgtcaacagtggacgctgacaccgtcactgagctggcccaggtgattgtgtccaggggggggcgctttctggaagcccccgtctcagggaatcagcagc

SEQ ID NO: 362137 - DNA, 120 bp, Artificial Sequence
  ENSG00000140632_10 (sequence is synthesized)
tgtctaatgacgggatgttggtgatcttagcggctggagacaggggcttatatgaggactgcagcagctgcttccaggcgatggggaagacctccttcttcctaggtgaagtgggcaatg

SEQ ID NO: 362138 - DNA, 120 bp, Artificial Sequence
  ENSG00000140632_11 (sequence is synthesized)
cagccaagatgatgctgatcgtgaacatggtccaagggagcttcatggccactattgccgaggggctgaccctggcccaggtgacaggccagtcccagcagacactcttggacatcctca

SEQ ID NO: 362139 - DNA, 120 bp, Artificial Sequence
  ENSG00000140632_12 (sequence is synthesized)
atcagggacagttggccagcatcttcctggaccagaagtgccaaaatatcctgcaaggaaactttaagcctgatttctacctgaaatacattcagaaggatctccgcttagccattgcgc

SEQ ID NO: 362140 - DNA, 120 bp, Artificial Sequence
  ENSG00000140632_13 (sequence is synthesized)
tgggtgatgcggtcaaccatccgactcccatggcagctgcagcaaatgaggtgtacaaaagagccaaggcgctggaccagtctgacaacgatatgtccgccgtgtaccgagcctacatac

SEQ ID NO: 362141 - DNA, 120 bp, Artificial Sequence
  ENSG00000140632_14 (sequence is synthesized)
actaagctgtcgacaccccgccctcacccctccaatcccccctctgaccccctcttcctcacatggggtcgggggcctgggagttcattctggaccagcccacctatctccatttccttt

SEQ ID NO: 362142 - DNA, 87 bp, Artificial Sequence
  ENSG00000140632_15 (sequence is synthesized)
ctcgccccaggatagaagctgcccagaaactgctgcctggctttttttcttccgagcttgtcttatctcaaaccccttccagtcaag

SEQ ID NO: 362143 - DNA, 120 bp, Artificial Sequence
  ENSG00000140632_16 (sequence is synthesized)
tcttccgagcttgtcttatctcaaaccccttccagtcaaggaactagaatcagcaacgagagttggaagccttcccacagcttcccccagagcgaagaggctgtagtcatgtccccatcc

SEQ ID NO: 362144 - DNA, 120 bp, Artificial Sequence
  ENSG00000140632_17 (sequence is synthesized)
cccactggattccctacaaggagaggccttgggcccagatgagccagtacagactccagacagaggggcccttggggccctccaacctcaggtgatgagctgagaaagatgttcacgtct

SEQ ID NO: 362145 - DNA, 120 bp, Artificial Sequence
  ENSG00000140632_18 (sequence is synthesized)
aagcgtccagtgtgcacccagcgctccatagacgcctttgtgaactgaaaagagactggcagagtcccgagaagatggggccctggctttccagggagtgcagcaagcagccggcctgca

SEQ ID NO: 362146 - DNA, 120 bp, Artificial Sequence
  ENSG00000140632_19 (sequence is synthesized)
ggtgagcatggaggcccggccctcaccgcctcgaagccatgccccagatgccactgccacagcgggcgctcgctcctccctaggctgttttagtatttggatttgcattccatcccttgg

SEQ ID NO: 362147 - DNA, 120 bp, Artificial Sequence
  ENSG00000140632_20 (sequence is synthesized)
gagggagtcctcagggccactagtgatgagccaagaggagtgggggttgggggcgctcctttctgtttccgttaggccacagactcttcacctggctctgaagagccactcttacctcgg

SEQ ID NO: 362148 - DNA, 120 bp, Artificial Sequence
  ENSG00000140632_21 (sequence is synthesized)
tcccctcccagtggtcccaccttctccaccctgccctgccaagtcccctgcatgcccaccgctctccatcctccctcctctccctcttcctcccgtggagacagtatttctttctgtctg

SEQ ID NO: 362149 - DNA, 120 bp, Artificial Sequence
  ENSG00000140632_22 (sequence is synthesized)
tccctttggcccagacccagcctgaccaacgatgagcatttcttaggctcagctcttgatacggaaacgagtgtcttcactccagccagcatcatggtcttcggtgcttcccgggcccgg

SEQ ID NO: 362150 - DNA, 120 bp, Artificial Sequence
  ENSG00000140632_23 (sequence is synthesized)
ggtctgtcgggagggaagagaactgggcctgacctacctgaactgactggccctccgaggtgggtctgggacatcctagaggccctacatttgtccttggataggggaccggggggggct

SEQ ID NO: 362151 - DNA, 120 bp, Artificial Sequence
  ENSG00000140632_24 (sequence is synthesized)
tggaatgttgcaaaaaaaaaagttacccaagggatgtcagttttttatccctctgcatgggttggattttccaaaatcataatttgcagaaggaaggccagcatttacgatgcaatatgt

SEQ ID NO: 362152 - DNA, 120 bp, Artificial Sequence
  ENSG00000140632_25 (sequence is synthesized)
aattatatatagggtggccacactagggcggggtccttcccccctcacagctttggcccctttcagagattagaaactgggttagaggattgcagaagacgagtggggggagggcaggga

SEQ ID NO: 362153 - DNA, 120 bp, Artificial Sequence
  ENSG00000140632_26 (sequence is synthesized)
agatgcctgtcgggtttttagcacagttcatttcactgggattttgaagcatttctgtctgaacacaaagcctgttctagtcctggcggaacacactgggggtgggggcgggggaagatg

SEQ ID NO: 362154 - DNA, 120 bp, Artificial Sequence
  ENSG00000140632_27 (sequence is synthesized)
cggtaatgaaaccggttagtcaattttgtcttaatattgttgacaattctgtaaagttcctttttatgaatatttctgtttaagctatttcacctttcttttgaaatccttcccttttaa

SEQ ID NO: 362155 - DNA, 120 bp, Artificial Sequence
  ENSG00000140632_28 (sequence is synthesized)
ggagaaaatgtgacacttgtgaaaaagcttgtaagaaagcccctcccttttttctttaaacctttaaatgacaaatctaggtaattaaggttgtgaatttttatttttgctttgttttta

SEQ ID NO: 362156 - DNA, 120 bp, Artificial Sequence
  ENSG00000140632_29 (sequence is synthesized)
atgaacatttgtctttcagaataggattgtgtgataatgtttaaatggcaaaaacaaaacatgattttgtgcaattaacaaagctactgcaagaaaaataaaacacttcttggtaacaca

SEQ ID NO: 362157 - DNA, 120 bp, Artificial Sequence
  ENSG00000140632_30 (sequence is synthesized)
ctgtcgaagagttcctcaggagagccaaagggaaagaccaggtgagagacacaatgttcactttctaccaatgccagactggtgatttttgcatagcaactaacagattaaatgtcaccc

SEQ ID NO: 362158 - DNA, 120 bp, Artificial Sequence
  ENSG00000140632_31 (sequence is synthesized)
aaacgcaaacctttgttcttctgaaatgctactggagaaagctacttcagttctaaggtgtcagcgttttgcttatcagtttgaaactccatgcagctaacctttctggagtaggttgtt

SEQ ID NO: 362159 - DNA, 120 bp, Artificial Sequence
  ENSG00000140632_32 (sequence is synthesized)
gcttttaggaaaattgcttggacccaggagaaatatctcagcatttgagtctagcacaggccatttcttcctttcatagcacacagattaggagcatagcctctgaaatacatatactgc

SEQ ID NO: 362160 - DNA, 120 bp, Artificial Sequence
  ENSG00000140632_33 (sequence is synthesized)
acgattgtggaaataaataatctgcaacacagtgctttcactggaggaacttgatttgtggttgctgcagtggtggtgatgtgcctggatcaaagtggaacagctgaagccatatcatgc

SEQ ID NO: 362161 - DNA, 65 bp, Artificial Sequence
  ENSG00000140632_34 (sequence is synthesized)
ccccccacggtttgatttctttaagtagttgtatttctatttattattcttataggaaaatacag

SEQ ID NO: 362162 - DNA, 120 bp, Artificial Sequence
  ENSG00000140632_35 (sequence is synthesized)
tgtatttctatttattattcttataggaaaatacagccttagatttgaaaaaaatgtctgtggcttctctggtaaatctaattctgacggttaaagtatttctacttagaaagcgatata

SEQ ID NO: 362163 - DNA, 120 bp, Artificial Sequence
  ENSG00000140632_36 (sequence is synthesized)
cagccccatttctctatcacaagccagcttagcagcctgtggtggcagtatttcaaggagatcgctggcctggagctgtggagccagagcttctggaagagggaatgttcttagaactcc

SEQ ID NO: 362164 - DNA, 120 bp, Artificial Sequence
  ENSG00000140632_37 (sequence is synthesized)
atggatttaaaaagaagatttggccgggcatggtgcctcaggcctgcaatcccagtactttgggaggccaagtgcctggatcaaagtggaacagctgaagccatatcatgctcataaaga

SEQ ID NO: 362165 - DNA, 120 bp, Artificial Sequence
  ENSG00000140632_38 (sequence is synthesized)
tcaaaatgcctgtttacatcctgggacagctttagaccatggcataagagaagacccatgtgcatgacgcccctggctctgcaggtagattggccactgctgtttctggcagtctgaatt

SEQ ID NO: 362166 - DNA, 120 bp, Artificial Sequence
  ENSG00000140632_39 (sequence is synthesized)
gccttgtgctgcatggaatcatcatcaccgtgaccctccctttccaccctgaactcatcagtctctctctgtttcaggataggatttttgggccttggtctcatgggaagtggaatcgtc

SEQ ID NO: 362167 - DNA, 120 bp, Artificial Sequence
  ENSG00000140632_40 (sequence is synthesized)
gggattattatgaagactggttaagcctgcagtagcacaagtagtctctttcctcctccttcattagccagctgtctgttaccaggcaatcacgaagaagttgaaaatatgtgaagaggt

SEQ ID NO: 362168 - DNA, 120 bp, Artificial Sequence
  ENSG00000140632_41 (sequence is synthesized)
tcctgtccgtaggaaactggctccacctccatccaggcagctgacagcacagccgtgaatggcagcatcacacccacagacaaaaagataggatttttgggccttggtctcatgggaagt

SEQ ID NO: 362169 - DNA, 120 bp, Artificial Sequence
  ENSG00000140632_42 (sequence is synthesized)
gagggggcccgtctgggaagaacccccgctgaagtcgtctcaacctgcgacatcactttcgcctgcgtgtcggatcccaaggcggccaaggacctgatagaaatcaggaaatgagccaaa

SEQ ID NO: 362170 - DNA, 120 bp, Artificial Sequence
  ENSG00000140632_43 (sequence is synthesized)
acagcagcaggattctgatctgaggtctgtagggctcctgagcatctgcccgggagcctgggctattgcttctcccttgtgtccccacagctggtgctgggccccagtggtgtgctgcaa

SEQ ID NO: 362171 - DNA, 120 bp, Artificial Sequence
  ENSG00000140632_44 (sequence is synthesized)
aaggtgaccccaggggggttctttaagggttgtgtcccagccattgctggcattgaatggaaaaggtggggggatgttgtaactcttatcgataaagacaggagtcaaaagctgtgtaaa

SEQ ID NO: 362172 - DNA, 120 bp, Artificial Sequence
  ENSG00000140650_0 (sequence is synthesized)
ctcgtgccaacgtgtcttgtaaggtgcggctagaaactggggacatggcagcgcctggcccagcgctctgcctcttcgacgtggatgggaccctcaccgccccgcggcagaaaattacca

SEQ ID NO: 362173 - DNA, 120 bp, Artificial Sequence
  ENSG00000140650_1 (sequence is synthesized)
aagaaatggatgacttcctacaaaaattgaggcagaagatcaaaatcggagtggtaggcggatcggactttgagaaagtgcaggagcaactgggaaatgatgtggttgaaaaatacgatt

SEQ ID NO: 362174 - DNA, 120 bp, Artificial Sequence
  ENSG00000140650_2 (sequence is synthesized)
atgtgtttccagaaaatggcttggtagcatacaaagatgggaaactcttgtgtagacagaatattcaaagtcatctgggtgaggccctaatccaagatttaatcaactactgtctgagct

SEQ ID NO: 362175 - DNA, 120 bp, Artificial Sequence
  ENSG00000140650_3 (sequence is synthesized)
acattgcgaaaattaaactcccgaagaagaggggtactttcattgaattccgaaatgggatgttaaacgtgtcccctattggaagaagctgcagccaagaagaacgcattgagttctacg

SEQ ID NO: 362176 - DNA, 120 bp, Artificial Sequence
  ENSG00000140650_4 (sequence is synthesized)
aactcgataaaaaagaaaatataagacaaaagtttgtagcagatctacggaaagagtttgctggaaaaggcctcacgttttccataggaggccagatcagctttgatgtctttcctgatg

SEQ ID NO: 362177 - DNA, 120 bp, Artificial Sequence
  ENSG00000140650_5 (sequence is synthesized)
gatgggacaagagatactgtctgcgacatgtggaaaatgacggttataagaccatttatttctttggagacaaaactatgccaggtggcaatgaccatgagatcttcacagaccccagaa

SEQ ID NO: 362178 - DNA, 120 bp, Artificial Sequence
  ENSG00000140650_6 (sequence is synthesized)
ccatgggctactccgtgacagcgcctgaggacacgcgcaggatctgtgaactgctgttctcctaacgtgggagcgggaggggcggggtcccggctgacaagccagcatagggcattcggt

SEQ ID NO: 362179 - DNA, 120 bp, Artificial Sequence
  ENSG00000140650_7 (sequence is synthesized)
ggccagagccgagggtcctcccacacgtgctcacccacccgcagcctaggcaggctctgcatgctatgccaggcatgtgcagtctggacttccacctccagtgccagaaacttccagaag

SEQ ID NO: 362180 - DNA, 120 bp, Artificial Sequence
  ENSG00000140650_8 (sequence is synthesized)
gaaggagaaaactcttgtcaagaatggcccagaggaatgcctcgcacaaaaggtcttccccacccacccccagccccctagtctaatacccaccctgatacgtgcaatcatgtagttttg

SEQ ID NO: 362181 - DNA, 120 bp, Artificial Sequence
  ENSG00000140650_9 (sequence is synthesized)
aatttccccatcattctaggatgatacagaaagaaaaactgtgcctggaccctccctcttggtgggtctgtggaaacataagcggtttttttaatgggcccctgcatcaataccaaacat

SEQ ID NO: 362182 - DNA, 120 bp, Artificial Sequence
  ENSG00000140650_10 (sequence is synthesized)
gggggtttggtaatgagaaaccaggacaggccatctgcagtgacccagcccaggacgaagtttacaaacacctcctggaacgaagctcccgcctgcatgtcaccttgatgggggctgtga

SEQ ID NO: 362183 - DNA, 120 bp, Artificial Sequence
  ENSG00000140650_11 (sequence is synthesized)
gtggggcagtgtgatacccagtgactagacgcactctgcgttttcccgtgtttggggctgaggcctgctggacagatggctggccaagtgggagcagaccctagggagtttgcacctcgg

SEQ ID NO: 362184 - DNA, 120 bp, Artificial Sequence
  ENSG00000140650_12 (sequence is synthesized)
ctgggccggattcggaccggctctgtgttcactacactcagaatagcctggctgcttctctgtctccgagaccggaggtagtgggaaccaacagctgggctggagagttggtgctggcaa

SEQ ID NO: 362185 - DNA, 120 bp, Artificial Sequence
  ENSG00000140650_13 (sequence is synthesized)
aacagtccttgccctggggccggttcttacccaggtccagagaaaccaacgcgggatgtcagacttcaccaaaaggactttctggttgcccctggctggcttcctggaggcgttcgcctc

SEQ ID NO: 362186 - DNA, 120 bp, Artificial Sequence
  ENSG00000140650_14 (sequence is synthesized)
tagtttctcagggatggagcgagagcccagccagagaacagtaagaggagctgctctcctatctgcactcacccaggccttcacccagactttaccacggaggcggctgagtgcagctac

SEQ ID NO: 362187 - DNA, 120 bp, Artificial Sequence
  ENSG00000140650_15 (sequence is synthesized)
agctaggtccgcgtccctcactcttttcatcttctgcacgttcttcgtgaaactggaaggatcccgggtctcagctagaacacggtggaagagaactttcctaggaaacggttcatgtgt

SEQ ID NO: 362188 - DNA, 120 bp, Artificial Sequence
  ENSG00000140650_16 (sequence is synthesized)
cacttttcaggatgtggaaacactgagccatacaccctccattgcttggtgctggggttgtgtggcctccactgggcacttgccgacctgagtctggggccaggggagcccaggctgccc

SEQ ID NO: 362189 - DNA, 120 bp, Artificial Sequence
  ENSG00000140650_17 (sequence is synthesized)
tgcactcctgcctcccagcccacagccaggtgctttcatcacagctaaacctggttccctccaaacctcccagccactcgggcttgtaactgtctgagccccggatccggtggggtgaaa

SEQ ID NO: 362190 - DNA, 120 bp, Artificial Sequence
  ENSG00000140650_18 (sequence is synthesized)
gcagccagctcatcccagtgactcacaggacacagccatccagcggcatctttccttgtcgaatgatactgtaatgaccttccaaagtgaagagtagcacattaaagtgattttattgtt

SEQ ID NO: 362191 - DNA, 73 bp, Artificial Sequence
  ENSG00000140650_19 (sequence is synthesized)
tgcctgactaattttttaattttttgtagagatagggtcttgccgtatggcccaggctggtctccaactcctg

SEQ ID NO: 362192 - DNA, 120 bp, Artificial Sequence
  ENSG00000140650_20 (sequence is synthesized)
aggctggtctccaactcctggcctcaagcgatcctcccacttcactctcccaaaatgttgggattacaggcattagccactgcccctggctttcataaatgtttggtttggggacctacc

SEQ ID NO: 362193 - DNA, 120 bp, Artificial Sequence
  ENSG00000140650_21 (sequence is synthesized)
gtttggtttggggacctaccttctgccatgggtacaattatctcagttccatttttaaaataatagtaataataataatgatgaacataaatgccgacagtaaatttaaagactggcagg

SEQ ID NO: 362194 - DNA, 120 bp, Artificial Sequence
  ENSG00000140650_22 (sequence is synthesized)
aaatagacccaaatgttaacagtggctatttcttgatggtgaggttgcaagtgatttctttgaaatccttctcatttttacccccagttttcaacacttactatgtaacaccttaatcat

SEQ ID NO: 362195 - DNA, 120 bp, Artificial Sequence
  ENSG00000140650_23 (sequence is synthesized)
cagggttggaattaagtggcaattcaatttcagggctgggtgtacttcagaggctgcttcacactattaggattcataacctgagcgcctcctgctcagcatctccagccagagtgcagg

SEQ ID NO: 362196 - DNA, 120 bp, Artificial Sequence
  ENSG00000140650_24 (sequence is synthesized)
aatgtcccttagccgagggggaggcctgcatgagacaggctggacatggacttggttattgttgcagctgggtaatgagcacatgaggacttatcctattctgtttacttttgtgtgtgt

SEQ ID NO: 362197 - DNA, 120 bp, Artificial Sequence
  ENSG00000140650_25 (sequence is synthesized)
tagaaattttccatggcgaaaagataaaatatacaaatatcccaggtcagttccatttttactttgggctgagcactaagggaggatttaaaaaaaaaaaaggcataatcctgtcctcaa

SEQ ID NO: 362198 - DNA, 120 bp, Artificial Sequence
  ENSG00000140650_26 (sequence is synthesized)
agagcgtatcatttagcgagggagagggatgtggagagccataattccagaacagtagaagagacctggtgaatccaggaggcagaactgagacccaccttgatccacatttgtccacat

SEQ ID NO: 362199 - DNA, 120 bp, Artificial Sequence
  ENSG00000140650_27 (sequence is synthesized)
ttgcctgacaacactaactacatgccccacaacggccaggcagatgcagtaagacttcagagagcccaggtctttagggcggaactgattgcttagtaaaccaccttcagccttgttttg

SEQ ID NO: 362200 - DNA, 120 bp, Artificial Sequence
  ENSG00000140650_28 (sequence is synthesized)
gggaaggctttctaaactgcatcaacttctctctgtgccttggaaatgagaagaagaatatgtccttgagtgggggggcattaattgagctctttttctgatcattaggacctttagccc

SEQ ID NO: 362201 - DNA, 120 bp, Artificial Sequence
  ENSG00000140650_29 (sequence is synthesized)
tagggtcacccggggcacggtcacccgtcccctagtgcctcagtgctcatacacacgtggtagaggacaggctgggcctctgccaactccgggacggcctggacatgggattattgagag

SEQ ID NO: 362202 - DNA, 120 bp, Artificial Sequence
  ENSG00000140650_30 (sequence is synthesized)
agatttttaggctcgcatattttgttacatcatttgcctctttctctgcaagttgagcaaaataggagagaggatccagacgattgagattttgctgtttttactttaatgagtattcat

SEQ ID NO: 362203 - DNA, 120 bp, Artificial Sequence
  ENSG00000140650_31 (sequence is synthesized)
tgcttcccagtttacaaagtacctttacataactggcatgtttgatttttaacaaggccctttggaggtaaccagagcaagtgccattagcctttctgtaggtgaataagaggaggcttg

SEQ ID NO: 362204 - DNA, 120 bp, Artificial Sequence
  ENSG00000140650_32 (sequence is synthesized)
gagaggtgcccagagccacacagcctcctaagaggccacactgacatggaatcaggtcatcagccctgcacgtggcatgtggtctctcggtatttccaatggccagtgccaggacatcag

SEQ ID NO: 362205 - DNA, 120 bp, Artificial Sequence
  ENSG00000140650_33 (sequence is synthesized)
gtctgtgagattaaaatagtagaaaaagatgagggaaaatgtttcatagggttcccaggcatcagcgtttagaactggaagacacttttcactgcatagtttgtcagaaaatgcttaaat

SEQ ID NO: 362206 - DNA, 120 bp, Artificial Sequence
  ENSG00000140650_34 (sequence is synthesized)
ttcattggtcagaatgatatctagcttacaagttatctgaacttttaagaaactgggtggttttctttttttggttgtggggtttttgtttgtttgcttgttttgttttttttgagacag

SEQ ID NO: 362207 - DNA, 74 bp, Artificial Sequence
  ENSG00000140650_35 (sequence is synthesized)
ggtttttgtttgtttgcttgttttgttttttttgagacagagtctgtctcccagactggagtgcaatggcatgc

SEQ ID NO: 362208 - DNA, 84 bp, Artificial Sequence
  ENSG00000140650_36 (sequence is synthesized)
ccctcttgttggccaggctggtcttgactcctgacctcaaggaatccgcccgccgcagcatcccaaagtgctgggattacaggt

SEQ ID NO: 362209 - DNA, 87 bp, Artificial Sequence
  ENSG00000140650_37 (sequence is synthesized)
aaagtgctgggattacaggtgtgagccaaagaaactgttttcagactcaaactggaaaccgtggaaaaaaaccgtttgttttttgag

SEQ ID NO: 362210 - DNA, 120 bp, Artificial Sequence
  ENSG00000140650_38 (sequence is synthesized)
tttttgagacggggtctccctctgttacccaggctgtagtgcagtggtacgatcttggttcactgcagcttccactgcccgggcccaagcaatcctcctgtctcagtctcccaagtagct

SEQ ID NO: 362211 - DNA, 84 bp, Artificial Sequence
  ENSG00000140650_39 (sequence is synthesized)
tattttttgtagaaacggggttttgccatattgcctaggctgctctcaaactcctgagctcaagccataggtgtgaggtaccgc

SEQ ID NO: 362212 - DNA, 120 bp, Artificial Sequence
  ENSG00000140650_40 (sequence is synthesized)
taataggtgtgaggtaccgcgcccagccaaaagaacatctttaaacatcgtcatttgaagtgactaaactaatgttagcttctcattttctgtgatcaaatcaaacatttaggagctgtc

SEQ ID NO: 362213 - DNA, 120 bp, Artificial Sequence
  ENSG00000140650_41 (sequence is synthesized)
gtaaattgaatttcctcagttattactgaggctcgttggacaattctcagagcctttttctgtgtagctttgcttggtactatcagtctgttcagaagctccgtagcaaaatagatgtct

SEQ ID NO: 362214 - DNA, 120 bp, Artificial Sequence
  ENSG00000140650_42 (sequence is synthesized)
ggtacatgtattttcaaactcttctaggaaatgactgctgttgccagtgctggaaatcattttcatagctctttattaaccacaaaattatctgcccagtagcagcactgtgcaacagaa

SEQ ID NO: 362215 - DNA, 120 bp, Artificial Sequence
  ENSG00000140650_43 (sequence is synthesized)
atagaaagtgagctatgtataattttaaattttctgtagccacattttgaaagaatgaaaaggaagaggtgaaatgaattttaataatatattttatttagcctgatatttctaaaatat

SEQ ID NO: 362216 - DNA, 80 bp, Artificial Sequence
  ENSG00000140650_44 (sequence is synthesized)
tgccaggctatccaggctcaaaatatgagcattttaacacaaagtcaatatacaacatgattgatgcaattacattcctt

SEQ ID NO: 362217 - DNA, 120 bp, Artificial Sequence
  ENSG00000140650_45 (sequence is synthesized)
aaagtcaatatacaacatgattgatgcaattacattcctttttcatactaaatctttcaaatctaatctcaattcatattagccacatttcaagtcttaatagtcacagtagttcatggc

SEQ ID NO: 362218 - DNA, 120 bp, Artificial Sequence
  ENSG00000140650_46 (sequence is synthesized)
taccatattacatagcacagagctgagaaacattgaccacactagcctctgctttttagaatttcccaagattttaggctgtttatctatgttgcccaaatgaataacgtgtttttggag

SEQ ID NO: 362219 - DNA, 120 bp, Artificial Sequence
  ENSG00000140650_47 (sequence is synthesized)
gaactcacgagtcttgcagtcataaagcagcaacataaagcaagctcccaactctagttctccaggcaattcatccaggctgtcccctgcaagctgctcagcccaccagatctgctttgg

SEQ ID NO: 362220 - DNA, 120 bp, Artificial Sequence
  ENSG00000140650_48 (sequence is synthesized)
gtggctgtatctgcacatgataatctctctgcctggaatacttcttgcttgtacccgttgacagcccttctagccccagtcagaccggtcttcatattgtccctctgacagcccccctca

SEQ ID NO: 362221 - DNA, 120 bp, Artificial Sequence
  ENSG00000140650_49 (sequence is synthesized)
cctccccatcactgaaacagaatctccagcacaggaccccgaaaaaccagagaggcttattgaccccttcactggagagtctgacttgataggtctgtggagcctgggaatcctatttca

SEQ ID NO: 362222 - DNA, 120 bp, Artificial Sequence
  ENSG00000140650_50 (sequence is synthesized)
ttctggttcagaaagcctgagagccgagcttggaaatccacattttctctggctgccctggtgctgctggttcacagcagggttcagtagccaccatgggccagcgaatttaaatccgaa

SEQ ID NO: 362223 - DNA, 120 bp, Artificial Sequence
  ENSG00000140650_51 (sequence is synthesized)
tcccagcacttagtaaggaataattggaaacagtccacaaagccaacagtacaagaatgattacgtaaatgatggcttatccacatgatggaaatttatacaaccattgaagaccatatg

SEQ ID NO: 362224 - DNA, 120 bp, Artificial Sequence
  ENSG00000140650_52 (sequence is synthesized)
ctttcaaaggctgtcagtgagaggaaacagcagtgaagcagcatgtacaaaaagcaacagaaaccctagatcgggaagtctgagacaggaagccttcgggccagatccacgtaaaaccca

SEQ ID NO: 362225 - DNA, 120 bp, Artificial Sequence
  ENSG00000140650_53 (sequence is synthesized)
aatctggttggcctgcagtgttaaagaaaatcggattaattgccatcatgtaaaagtctgattttatgtttgttttatttatttatgaatttatttttgagaccgagtctcactctgtgg

SEQ ID NO: 362226 - DNA, 120 bp, Artificial Sequence
  ENSG00000140650_54 (sequence is synthesized)
acctagaaagaatctccagcacaggaccccgaaaaaccagagaggcttattgaccccttcactggagagtctgacttgataggtctgtggagcctgggaatcctatttcagggtactttc

SEQ ID NO: 362227 - DNA, 120 bp, Artificial Sequence
  ENSG00000140650_55 (sequence is synthesized)
gttatgcaatgattgggtggcggatgccatagacatctggccctatgacaagggccatccaaagcaagagcctctagacctctgggtggtgaacaaatctcaactggggtttcgtgccta

SEQ ID NO: 362228 - DNA, 120 bp, Artificial Sequence
  ENSG00000140650_56 (sequence is synthesized)
tgtagttaacatcctgacagacccttctgccgctggatatgtgaggggcacagcacagggctctggaagtccctgctgactgctcgaagcctttctccctgctaaaacctctgaccaaat

SEQ ID NO: 362229 - DNA, 120 bp, Artificial Sequence
  ENSG00000140650_57 (sequence is synthesized)
gcttaataatatctgctgtaggctgttgagtctgccacacgtttgacatttattgtttattcccacacccatcccatgaaacaagcaggactttccattttacagatgtgaaaaccaaga

SEQ ID NO: 362230 - DNA, 120 bp, Artificial Sequence
  ENSG00000140650_58 (sequence is synthesized)
ttcaaagagactcaataacctgctccaggacaaatgacagaactgagacttctgactccaaatcttacgctcccccgccacacctctttgcctttctctttcacaccaatggactctatg

SEQ ID NO: 362231 - DNA, 61 bp, Artificial Sequence
  ENSG00000140650_59 (sequence is synthesized)
taggtaacagatgaggatgaaatttgagctttggagggggatacctgatatcctttggaga

SEQ ID NO: 362232 - DNA, 120 bp, Artificial Sequence
  ENSG00000140675_0 (sequence is synthesized)
agatcctggggagaatggaggagcacacagaggcaggctcggcaccagagatgggggcccagaaggccctgattgacaatcctgctgacatcctagtcattgctgcatatttcctgctgg

SEQ ID NO: 362233 - DNA, 120 bp, Artificial Sequence
  ENSG00000140675_1 (sequence is synthesized)
tcattggcgttggcttgtggtccatgtgcagaaccaacagaggcactgtgggcggctacttcctggcaggacgcagcatggtgtggtggccggttggggcctctctcttcgccagcaaca

SEQ ID NO: 362234 - DNA, 120 bp, Artificial Sequence
  ENSG00000140675_2 (sequence is synthesized)
tcggcagtggccactttgtgggcctggcagggactggcgctgcaagtggcttggctgttgctggattcgagtggaatgcgctcttcgtggtgctgctactgggctggctgtttgcacccg

SEQ ID NO: 362235 - DNA, 120 bp, Artificial Sequence
  ENSG00000140675_3 (sequence is synthesized)
tgtacctgacagcgggggtcatcacgatgccacagtacctgcgcaagcgcttcggcggccgccgcatccgcctctacctgtctgtgctctcccttttcctgtacatcttcaccaagatct

SEQ ID NO: 362236 - DNA, 120 bp, Artificial Sequence
  ENSG00000140675_4 (sequence is synthesized)
cagtggacatgttctccggagctgtattcatccagcaggctctgggctggaacatctatgcctccgtcatcgcgcttctgggcatcaccatgatttacacggtgacaggagggctggccg

SEQ ID NO: 362237 - DNA, 120 bp, Artificial Sequence
  ENSG00000140675_5 (sequence is synthesized)
cgctgatgtacacggacacggtacagaccttcgtcattctggggggcgcctgcatcctcatgggttacgccttccacgaggtgggcgggtattcgggtctcttcgacaaatacctgggag

SEQ ID NO: 362238 - DNA, 120 bp, Artificial Sequence
  ENSG00000140675_6 (sequence is synthesized)
cagcgacttcgctgacggtgtccgaggatccagccgtgggaaacatctccagcttctgctatcgaccccggcccgactcctaccacctgctccggcaccccgtgaccggggatctgccgt

SEQ ID NO: 362239 - DNA, 120 bp, Artificial Sequence
  ENSG00000140675_7 (sequence is synthesized)
ggcccgcgctgctcctcggactcacaatcgtctcgggctggtactggtgcagcgaccaggtcatcgtgcagcgctgcctggccgggaagagcctgacccacatcaaggcgggctgcatcc

SEQ ID NO: 362240 - DNA, 120 bp, Artificial Sequence
  ENSG00000140675_8 (sequence is synthesized)
tgtgtgggtacctgaagctgacgcccatgtttctcatggtcatgccaggcatgatcagccgcattctgtacccagacgaggtggcgtgcgtggtgcctgaggtgtgcaggcgcgtgtgcg

SEQ ID NO: 362241 - DNA, 120 bp, Artificial Sequence
  ENSG00000140675_9 (sequence is synthesized)
tcctcgctggcctccatcttcaacagcagcagcacgctcttcaccatggacatctacacgcgcctgcggccacgcgccggcgaccgcgagctgctgctggtgggacggctctgggtggtg

SEQ ID NO: 362242 - DNA, 120 bp, Artificial Sequence
  ENSG00000140675_10 (sequence is synthesized)
ttcatcgtggtagtgtcggtggcctggcttcccgtggtgcaggcggcacagggcgggcagctcttcgattacatccaggcagtctctagctacctggcaccgcccgtgtccgccgtcttc

SEQ ID NO: 362243 - DNA, 120 bp, Artificial Sequence
  ENSG00000140675_11 (sequence is synthesized)
gtgctggcgctcttcgtgccgcgcgttaatgagcagggcgccttctggggactcatcgggggcctgctgatgggcctggcacgcctgattcccgagttctccttcggctcgggcagctgt

SEQ ID NO: 362244 - DNA, 120 bp, Artificial Sequence
  ENSG00000140675_12 (sequence is synthesized)
gtgcagccctcggcgtgcccagctttcctctgcggcgtgcactacctctacttcgccattgtgctgttcttctgctctggcctcctcaccctcacggtctccctgtgcaccgcgcccatc

SEQ ID NO: 362245 - DNA, 120 bp, Artificial Sequence
  ENSG00000140675_13 (sequence is synthesized)
cccagaaagcacctccaccgcctggtcttcagtctccggcatagcaaggaggaacgggaggacctggatgctgatgagcagcaaggctcctcactccctgtacagaatgggtgcccagag

SEQ ID NO: 362246 - DNA, 120 bp, Artificial Sequence
  ENSG00000140675_14 (sequence is synthesized)
agtgccatggagatgaatgagccccaggccccggcaccaagcctcttccgccagtgcctgctctggttttgtggaatgagcagaggtggggtgggcagtcctccgccccttacccaggag

SEQ ID NO: 362247 - DNA, 120 bp, Artificial Sequence
  ENSG00000140675_15 (sequence is synthesized)
gaggcagcggcagcagccaggcggctggaggacatcagcgaggacccgagctgggcccgtgtggtcaacctcaatgccctgctcatgatggcagtggccgtgttcctctggggcttctat

SEQ ID NO: 362248 - DNA, 120 bp, Artificial Sequence
  ENSG00000140675_16 (sequence is synthesized)
gcctaagaccaactgcgttggacaccataagccacagcctcacaggaagtgggggtgaggagcctgcggtgctccccagaaaaggggaaggggcagtggggtgagaaggtcctggctccc

SEQ ID NO: 362249 - DNA, 120 bp, Artificial Sequence
  ENSG00000140675_17 (sequence is synthesized)
cttctcccggccttcctctgcctggggcccactgcatctgattggcagtcacttcccatgagggcctggcccacccgctgcagttgccctaaggaaaaataaagctgcctttcccctgtc

SEQ ID NO: 362250 - DNA, 120 bp, Artificial Sequence
  ENSG00000140675_18 (sequence is synthesized)
tttttatttaaatacatttatttgaaccggcctgggggaggcttgatgttgatgggttggtgattaaagcctcccaaagccaatccttggcatggcctttgggactcaaaacacaggatc

SEQ ID NO: 362251 - DNA, 120 bp, Artificial Sequence
  ENSG00000140675_19 (sequence is synthesized)
tgactggtgggcacaataccatcttgaacgcccacaaaaaggtttggttttgttgccaaagggcaggtggctccaggcagggctgatggtggcaggtgggggtgaggagcctgcggtgct

SEQ ID NO: 362252 - DNA, 120 bp, Artificial Sequence
  ENSG00000140675_20 (sequence is synthesized)
accgggcgcccgtcgcccagttccgtcaccctcctaagactcggcagtttgggcccggagtcccgcctccctccgggggtcgcacgcctcctctgctaggattcccagtccccacctcct

SEQ ID NO: 362253 - DNA, 120 bp, Artificial Sequence
  ENSG00000140675_21 (sequence is synthesized)
gggattcccagaccaggccccgtcctaacggcgcggtggcctctctctggcagacgaggtggcgtgcgtggtgcctgaggtgtgcaggcgcgtgtgcggcacggaggtgggctgctccaa

SEQ ID NO: 362254 - DNA, 120 bp, Artificial Sequence
  ENSG00000140675_22 (sequence is synthesized)
accttggggaaactccaggaaagggggaatgagactggcagtgggacttcccaactgcggggtgtgactgggctgggagtggaggtcatacatctagccaggaagcagaggggtgcaggg

SEQ ID NO: 362255 - DNA, 120 bp, Artificial Sequence
  ENSG00000140675_23 (sequence is synthesized)
tgagccagcctgcaccagccactgcctctgggagcttccatttattcctctctgagtggggtgagcagcctcaaagccagggaagcacctgctcagatgcgctccgaagctgtggtctgt

SEQ ID NO: 362256 - DNA, 120 bp, Artificial Sequence
  ENSG00000140675_24 (sequence is synthesized)
gaggaatttggggccaagttaaagccctttgcagaagagaggagcagagacaaagctctgggactgaggctcctgttggaggggagattgggctttgagctcagggcttcctggaggagg

SEQ ID NO: 362257 - DNA, 120 bp, Artificial Sequence
  ENSG00000140675_25 (sequence is synthesized)
agactgctgagctgatccttgagggacacaaggtttgggtggctttggctcaggtcagtctgaggggtctatgctggggttcatatctagatgatcatagggacaacattgggaaaaacg

SEQ ID NO: 362258 - DNA, 120 bp, Artificial Sequence
  ENSG00000140675_26 (sequence is synthesized)
ggccagaagtgatagcctggggagacaaggagggctccagttaagagcccaggagggtgtcagctctgttccttggtgcccagggccccggggccatcacctgcagttgtcctctgggcc

SEQ ID NO: 362259 - DNA, 120 bp, Artificial Sequence
  ENSG00000140675_27 (sequence is synthesized)
gtcgtgaagctcatgcccaacggtaagggcagccccgggccacaggcgcaagctcgctgcggagcccgctgctgggaggggtcgtccctcgcgcagctgcagccgccctggacccccagt

SEQ ID NO: 362260 - DNA, 120 bp, Artificial Sequence
  ENSG00000140675_28 (sequence is synthesized)
gctgatggtggcagggtggggtgaggacaggacaagagatctgggtgtggaaggatggccgggtttctgcagcagcaggaggaaagggtgggagcacacaggcacagaacactgtgagca

SEQ ID NO: 362261 - DNA, 120 bp, Artificial Sequence
  ENSG00000140675_29 (sequence is synthesized)
ggactgccaggccagtgtcacaagcgctaccatctgggtgtagacagacctgagctgacaaagctgggggagcaaggccaacggctttaaacacaagctcaggggcttggggtttatccc

SEQ ID NO: 362262 - DNA, 120 bp, Artificial Sequence
  ENSG00000140675_30 (sequence is synthesized)
gagggcacagggcagccatgtagggtggagttggcatgagttaagcctgggctgggtgtgtagactggacagaggtgggtagggcaggcagtgacgagctggtgtgcaagagactttagg

SEQ ID NO: 362263 - DNA, 120 bp, Artificial Sequence
  ENSG00000140678_0 (sequence is synthesized)
atgctgacaatcttcttccttcccctggccacctctctgcccacttgcttcctcagtaccttggtccagctcttcctgcaacggcccaggagctcagagctccacatctgaccttctagt

SEQ ID NO: 362264 - DNA, 120 bp, Artificial Sequence
  ENSG00000140678_1 (sequence is synthesized)
catgaccaggaccagggcagcactcctcctgttcacagccttagcaacttctctaggtttcaacttggacacagaggagctgacagccttccgtgtggacagcgctgggtttggagacag

SEQ ID NO: 362265 - DNA, 120 bp, Artificial Sequence
  ENSG00000140678_2 (sequence is synthesized)
cgtggtccagtatgccaactcctgggtggtggttggagccccccaaaagataacagctgccaaccaaacgggtggcctctaccagtgtggctacagcactggtgcctgtgagcccatcgg

SEQ ID NO: 362266 - DNA, 120 bp, Artificial Sequence
  ENSG00000140678_3 (sequence is synthesized)
cctgcaggtgcccccggaggccgtgaacatgtccctgggcctgtccctggcgtctaccaccagcccttcccagctgctggcctgcggccccaccgtgcaccacgagtgcgggaggaacat

SEQ ID NO: 362267 - DNA, 120 bp, Artificial Sequence
  ENSG00000140678_4 (sequence is synthesized)
gtacctcaccggactctgcttcctcctgggccccacccagctcacccagaggctcccggtgtccaggcaggagtgcccaagacaggagcaggacattgtgttcctgatcgatggctcagg

SEQ ID NO: 362268 - DNA, 120 bp, Artificial Sequence
  ENSG00000140678_5 (sequence is synthesized)
cagcatctcctcccgcaactttgccacgatgatgaacttcgtgagagctgtgataagccagttccagagacccagcacccagttttccctgatgcagttctccaacaaattccaaacaca

SEQ ID NO: 362269 - DNA, 120 bp, Artificial Sequence
  ENSG00000140678_6 (sequence is synthesized)
cttcactttcgaggaattcaggcgcagctcaaaccccctcagcctgttggcttctgttcaccagctgcaagggtttacatacacggccaccgccatccaaaatgtcgtgcaccgattgtt

SEQ ID NO: 362270 - DNA, 120 bp, Artificial Sequence
  ENSG00000140678_7 (sequence is synthesized)
ccatgcctcatatggggcccgtagggatgccgccaaaattctcattgtcatcactgatgggaagaaagaaggcgacagcctggattataaggatgtcatccccatggctgatgcagcagg

SEQ ID NO: 362271 - DNA, 120 bp, Artificial Sequence
  ENSG00000140678_8 (sequence is synthesized)
catcatccgctatgcaattggggttggattagcttttcaaaacagaaattcttggaaagaattaaatgacattgcatcgaagccctcccaggaacacatatttaaagtggaggactttga

SEQ ID NO: 362272 - DNA, 120 bp, Artificial Sequence
  ENSG00000140678_9 (sequence is synthesized)
tgctctgaaagatattcaaaaccaactgaaggagaagatctttgccattgagggtacggagaccacaagcagtagctccttcgaattggagatggcacaggagggcttcagcgctgtgtt

SEQ ID NO: 362273 - DNA, 120 bp, Artificial Sequence
  ENSG00000140678_10 (sequence is synthesized)
cacacctgatggccccgttctgggggctgtggggagcttcacctggtctggaggtgccttcctgtaccccccaaatatgagccctaccttcatcaacatgtctcaggagaatgtggacat

SEQ ID NO: 362274 - DNA, 120 bp, Artificial Sequence
  ENSG00000140678_11 (sequence is synthesized)
gagggactcttacctgggttactccaccgagctggccctctggaaaggggtgcagagcctggtcctgggggccccccgctaccagcacaccgggaaggctgtcatcttcacccaggtgtc

SEQ ID NO: 362275 - DNA, 120 bp, Artificial Sequence
  ENSG00000140678_12 (sequence is synthesized)
caggcaatggaggatgaaggccgaagtcacggggactcagatcggctcctacttcggggcctccctctgctccgtggacgtagacagcgacggcagcaccgacctggtcctcatcggggc

SEQ ID NO: 362276 - DNA, 120 bp, Artificial Sequence
  ENSG00000140678_13 (sequence is synthesized)
cccccattactacgagcagacccgagggggccaggtgtctgtgtgtcccttgcccagggggtggagaaggtggtggtgtgatgctgttctctacggggagcagggccacccctggggtcg

SEQ ID NO: 362277 - DNA, 120 bp, Artificial Sequence
  ENSG00000140678_14 (sequence is synthesized)
ctttggggcggctctgacagtgctgggggatgtgaatggggacaagctgacagacgtggtcatcggggccccaggagaggaggagaaccggggtgctgtctacctgtttcacggagtctt

SEQ ID NO: 362278 - DNA, 120 bp, Artificial Sequence
  ENSG00000140678_15 (sequence is synthesized)
gggacccagcatcagcccctcccacagccagcggatcgcgggctcccagctctcctccaggctgcagtattttgggcaggcactgagcgggggtcaagacctcacccaggatggactggt

SEQ ID NO: 362279 - DNA, 120 bp, Artificial Sequence
  ENSG00000140678_16 (sequence is synthesized)
ggacctggctgtgggggcccggggccaggtgctcctgctcaggaccagacctgtgctctgggtgggggtgagcatgcagttcatacctgccgagatccccaggtctgcgtttgagtgtcg

SEQ ID NO: 362280 - DNA, 120 bp, Artificial Sequence
  ENSG00000140678_17 (sequence is synthesized)
ggagcaggtggtctctgagcagaccctggtacagtccaacatctgcctttacattgacaaacgttctaagaacctgcttgggagccgtgacctccaaagctctgtgaccttggacctggc

SEQ ID NO: 362281 - DNA, 120 bp, Artificial Sequence
  ENSG00000140678_18 (sequence is synthesized)
cctcgaccctggccgcctgagtccccgtgccaccttccaggaaacaaagaaccggagtctgagccgagtccgagtcctcgggctgaaggcacactgtgaaaacttcaacctgctgctccc

SEQ ID NO: 362282 - DNA, 120 bp, Artificial Sequence
  ENSG00000140678_19 (sequence is synthesized)
cccccattaccttgcgtctgaacttcacgctggtgggcaagcccctccttgccttcagaaacctgcggcctatgctggccgccgatgctcagagatacttcacggcctccctaccctttg

SEQ ID NO: 362283 - DNA, 120 bp, Artificial Sequence
  ENSG00000140678_20 (sequence is synthesized)
agaagaactgtggagccgaccatatctgccaggacaatctcggcatctccttcagcttcccaggcttgaagtccctgctggtggggagtaacctggagctgaacgcagaagtgatggtgt

SEQ ID NO: 362284 - DNA, 120 bp, Artificial Sequence
  ENSG00000140678_21 (sequence is synthesized)
ggaatgacggggaagactcctacggaaccaccatcaccttctcccaccccgcaggactgtcctaccgctacgtggcagagggccagaaacaagggcagctgcgttccctgcacctgacat

SEQ ID NO: 362285 - DNA, 120 bp, Artificial Sequence
  ENSG00000140678_22 (sequence is synthesized)
gtgacagcgccccagttgggagccagggcacctggagcaccagctgcagaatcaaccacctcatcttccgtggcggcgcccagatcaccttcttggctacctttgacgtctcccccaagg

SEQ ID NO: 362286 - DNA, 120 bp, Artificial Sequence
  ENSG00000140678_23 (sequence is synthesized)
ctgtcctgggagaccggctgcttctgacagccaatgtgagcagtgagaacaacactcccaggaccagcaagaccaccttccagctggagctcccggtgaagtatgctgtctacactgtgg

SEQ ID NO: 362287 - DNA, 120 bp, Artificial Sequence
  ENSG00000140678_24 (sequence is synthesized)
ttagcagccacgaacaattcaccaaatacctcaacttctcagagtctgaggagaaggaaagccatgtggccatgcacagataccaggtcaataacctgggacagagggacctgcctgtca

SEQ ID NO: 362288 - DNA, 120 bp, Artificial Sequence
  ENSG00000140678_25 (sequence is synthesized)
gcatcaacttctgggtgcctgtggagctgaaccaggaggctgtgtggatggatgtggaggtctcccacccccagaacccatcccttcggtgctcctcagagaaaatcgcacccccagcat

SEQ ID NO: 362289 - DNA, 120 bp, Artificial Sequence
  ENSG00000140678_26 (sequence is synthesized)
ctgacttcctggcgcacattcagaagaatcccgtgctggactgctccattgctggctgcctgcggttccgctgtgacgtcccctccttcagcgtccaggaggagctggatttcaccctga

SEQ ID NO: 362290 - DNA, 120 bp, Artificial Sequence
  ENSG00000140678_27 (sequence is synthesized)
agggcaacctcagctttggctgggtccgccagatattgcagaagaaggtgtcggtcgtgagtgtggctgaaattacgttcgacacatccgtgtactcccagcttccaggacaggaggcat

SEQ ID NO: 362291 - DNA, 120 bp, Artificial Sequence
  ENSG00000140678_28 (sequence is synthesized)
ttatgagagctcagacgacaacggtgctggagaagtacaaggtccacaaccccacccccctcatcgtaggcagctccattgggggtctgttgctgctggcactcatcacagcggtactgt

SEQ ID NO: 362292 - DNA, 120 bp, Artificial Sequence
  ENSG00000140678_29 (sequence is synthesized)
acaaagttggcttcttcaagcgtcagtacaaggaaatgatggaggaggcaaatggacaaattgccccagaaaacgggacacagacccccagcccgcccagtgagaaatgatcccctcttt

SEQ ID NO: 362293 - DNA, 120 bp, Artificial Sequence
  ENSG00000140678_30 (sequence is synthesized)
gccttggacttcttctcccccgcgagttttccccacttacttaccctcacctgtcaggcctgacggggaggaaccactgcaccaccgagagaggctgggatgggcctgcttcctgtcttt

SEQ ID NO: 362294 - DNA, 120 bp, Artificial Sequence
  ENSG00000140678_31 (sequence is synthesized)
gggagaaaacgtcttgcttgggaaggggcctttgtcttgtcaaggttccaactggaaacccttaggacagggtccctgctgtgttccccaaaggacttgacttgcaatttctacctagaa

SEQ ID NO: 362295 - DNA, 120 bp, Artificial Sequence
  ENSG00000140678_32 (sequence is synthesized)
tccccaaaggacttgacttgcaatttctacctagaaatacatggacaatacccccaggcctcagtctcccttctcccatgaggcacgaatgatctttctttcctttcttttttttttttt

SEQ ID NO: 362296 - DNA, 120 bp, Artificial Sequence
  ENSG00000140678_33 (sequence is synthesized)
acctcgcccggcccgatctttctaaaatacagttctgaatatgctgctcatccccacctgtcttcaacagctccccattaccctcaggacaatgtctgaactctccagcttcgcgtgaga

SEQ ID NO: 362297 - DNA, 120 bp, Artificial Sequence
  ENSG00000140678_34 (sequence is synthesized)
agtccccttccatcccagagggtgggcttcagggcgcacagcatgagaggctctgtgcccccatcaccctcgtttccagtgaattagtgtcatgtcagcatcagctcagggcttcatcgt

SEQ ID NO: 362298 - DNA, 120 bp, Artificial Sequence
  ENSG00000140678_35 (sequence is synthesized)
ggggctctcagttccgatttcccaggctgaattgggagtgagatgcctgcatgctgggttctgcacagctggcctcccgcgttgggcaacattgctggctggaagggaggagcgccctct

SEQ ID NO: 362299 - DNA, 120 bp, Artificial Sequence
  ENSG00000140678_36 (sequence is synthesized)
agggagggacatggccccggtgcggctgcagctcacccagccccaggggcagaagagacccaaccacttctattttttgaggctatgaatatagtacctgaaaaaatgccaagacatgat

SEQ ID NO: 362300 - DNA, 120 bp, Artificial Sequence
  ENSG00000140678_37 (sequence is synthesized)
tatttttttaaaaagcgtactttaaatgtttgtgttaataaattaaaacatgcacaaaaagatgcatctaccgctcttgggaaatatgtcaaaggtctaaaaataaaaaagccttctgtg

SEQ ID NO: 362301 - DNA, 120 bp, Artificial Sequence
  ENSG00000140678_38 (sequence is synthesized)
gttctaagaacctgcttgggagccgtgagtcccctcccctccaacccaggacaccctgacctctggagtcccccatcccaggcccctgtctcccaccctgctcattgtccacccaaggag

SEQ ID NO: 362302 - DNA, 120 bp, Artificial Sequence
  ENSG00000140678_39 (sequence is synthesized)
tctccctgctcagggccccatgcccccggccctgccctgttatttgcaaactctcctctctgtctggtgtagcgactgccctggctaatgaagatttgccttgaaggcaggcacggtctc

SEQ ID NO: 362303 - DNA, 120 bp, Artificial Sequence
  ENSG00000140678_40 (sequence is synthesized)
acagctaacatttacagagcagtaagtgcagtgccaggctcatcacaggtggatgctgatttagtccacacgacagcctgtgagtaggaatcagtcgtgcaacaaacacttatttgtttt

SEQ ID NO: 362304 - DNA, 120 bp, Artificial Sequence
  ENSG00000140678_41 (sequence is synthesized)
taccaccagcccttcccagctgctggtgagtggccctgggtcacaggaggcttctgagggagggagggaggagccggggccgcggggggctgggagtctcctgtagggtggaggttccgg

SEQ ID NO: 362305 - DNA, 120 bp, Artificial Sequence
  ENSG00000140678_42 (sequence is synthesized)
ccaccgtgcaccacgagtgcgggaggaacatgtacctcaccggactctgcttcctcctgggccccacccagctcacccagaggctcccggtgtccaggcagggtgagtgtcgggaccacc

SEQ ID NO: 362306 - DNA, 120 bp, Artificial Sequence
  ENSG00000140678_43 (sequence is synthesized)
aaggctttgaggagctcacgcacatccaattgggggtgcggtgggctagagacagtcttgccagagtggatcagaaagaagggatctggaaaaagagttaccacgtgttgcagtggttcc

SEQ ID NO: 362307 - DNA, 120 bp, Artificial Sequence
  ENSG00000140678_44 (sequence is synthesized)
tgacgctgctgcccgcacatcctgccgatcgcccgcacgctgccggacctttcctgtgaccttaacctctccaagcctcagtttcttcatctgttggatggggataataacacacccagc

SEQ ID NO: 362308 - DNA, 120 bp, Artificial Sequence
  ENSG00000140678_45 (sequence is synthesized)
actgaaagcaacacaggatgattcatggccaggggttagcacagcagctagcaccaggcgacagccccatgaaggccagctgttgttatttttagaggagaggatctattttcatccaat

SEQ ID NO: 362309 - DNA, 120 bp, Artificial Sequence
  ENSG00000140678_46 (sequence is synthesized)
gggtcctgggatatgaccaattggtttgtgccgtagtttaggaaaggtcagtgaaagtgcagtgtgagcaacgtgtgtgtgtgtacatgtgtgtatatgtatgcatgtgtatacatgtgc

SEQ ID NO: 362310 - DNA, 89 bp, Artificial Sequence
  ENSG00000140678_47 (sequence is synthesized)
gcaatcccagtgatcctcccaccccagcctccccagtagctgggaccacaggtgtgtgccatcaagcctggctattttctttttggttg

SEQ ID NO: 362311 - DNA, 77 bp, Artificial Sequence
  ENSG00000140678_48 (sequence is synthesized)
gtgatcctcccaccccagcctccccagtagctgggaccacaggtgtgtgccatcaagcctggctattttctttttgg

SEQ ID NO: 362312 - DNA, 120 bp, Artificial Sequence
  ENSG00000140678_49 (sequence is synthesized)
acagggattacaggcgtgaaccaccgccaacaacatccctttcaaggatagaaacaccagctctctcggctcttactgccttaaggatgaaaactctgccccagactggagaccatgatc

SEQ ID NO: 362313 - DNA, 120 bp, Artificial Sequence
  ENSG00000140678_50 (sequence is synthesized)
ctttctcctaaactccctgatgctgtccgggcttcgtgtttctcctgtgtccaccgggtgtgatcatgttgatcttgtggggttattggaagatgttgcacccagtgcacacaggcacat

SEQ ID NO: 362314 - DNA, 120 bp, Artificial Sequence
  ENSG00000140678_51 (sequence is synthesized)
agcaaaacagtgggctttggcaggctgaggcctccccctggtttcacatttgctctcaagcctttggtgagactgacatctggctgcaaatagggtgtgccttccagcacctccgtgggt

SEQ ID NO: 362315 - DNA, 120 bp, Artificial Sequence
  ENSG00000140678_52 (sequence is synthesized)
ccagactccatccacaggggcctgggcacccatcagaatgcccaggacacctgtctctccggtggaggcctctggggcagaggggatgcttgagaggtcacatggaagggggtttcctct

SEQ ID NO: 362316 - DNA, 120 bp, Artificial Sequence
  ENSG00000140678_53 (sequence is synthesized)
ccaggtgctggaagatcgtctcttctcaggacagatgctaacttcacacaggaggggagtgggggcctgtatttaagctgagaacagaacaggcccagtgtgtggctgttgcctgggatg

SEQ ID NO: 362317 - DNA, 87 bp, Artificial Sequence
  ENSG00000140678_54 (sequence is synthesized)
agaacagaacaggcccagtgtgtggctgttgcctgggatgatttgtttaaaatattaacaatcaaggcaagagggttgtttgaggcc

SEQ ID NO: 362318 - DNA, 120 bp, Artificial Sequence
  ENSG00000140682_0 (sequence is synthesized)
ggggccggatccccggatgccctgctctctgacctggagactaccacctcgcacatgccaaggtcaggggctcccaaagagcgccctgcggagcctctcacccctcccccatcctatggc

SEQ ID NO: 362319 - DNA, 120 bp, Artificial Sequence
  ENSG00000140682_1 (sequence is synthesized)
caccagccacagacagggtctggggagtcttcaggagcctcgggggacaaggaccacctgtacagcacggtatgcaagcctcggtccccaaagcctgcagccccggcggcccctccattc

SEQ ID NO: 362320 - DNA, 120 bp, Artificial Sequence
  ENSG00000140682_2 (sequence is synthesized)
tcctcttccagcggtgtcttgggtaccgggctctgtgagctagatcggttgcttcaggaacttaatgccactcagttcaacatcacagatgaaatcatgtctcagttcccatctagcaag

SEQ ID NO: 362321 - DNA, 120 bp, Artificial Sequence
  ENSG00000140682_3 (sequence is synthesized)
gtggcttcaggagagcagaaggaggaccagtctgaagataagaaaagacccagcctcccttccagcccgtctcctggcctcccaaaggcttctgccacctcagccactctggagctggat

SEQ ID NO: 362322 - DNA, 120 bp, Artificial Sequence
  ENSG00000140682_4 (sequence is synthesized)
agactgatggcctcactctctgacttccgcgttcaaaaccatcttccagcctctgggccaactcagccaccggtggtgagctccacaaatgagggctccccatccccaccagagccgact

SEQ ID NO: 362323 - DNA, 120 bp, Artificial Sequence
  ENSG00000140682_5 (sequence is synthesized)
ggcaagggcagcctagacaccatgctggggctgctgcagtccgacctcagccgccggggtgttcccacccaggccaaaggcctctgtggctcctgcaataaacctattgctgggcaagtg

SEQ ID NO: 362324 - DNA, 120 bp, Artificial Sequence
  ENSG00000140682_6 (sequence is synthesized)
gtgacggctctgggccgcgcctggcaccccgagcacttcgtttgcggaggctgttccaccgccctgggaggcagcagcttcttcgagaaggatggagcccccttctgccccgagtgctac

SEQ ID NO: 362325 - DNA, 120 bp, Artificial Sequence
  ENSG00000140682_7 (sequence is synthesized)
ttctgctgcgtcagttgcggggagcccttcggagatgagggtttccacgagcgcgagggccgcccctactgccgccgggacttcctgcagctgttcgccccgcgctgccagggctgccag

SEQ ID NO: 362326 - DNA, 120 bp, Artificial Sequence
  ENSG00000140682_8 (sequence is synthesized)
ggccccatcctggataactacatctcggcgctcagcgcgctctggcacccggactgtttcgtctgcagggaatgcttcgcgcccttctcgggaggcagctttttcgagcacgagggccgc

SEQ ID NO: 362327 - DNA, 120 bp, Artificial Sequence
  ENSG00000140682_9 (sequence is synthesized)
ccgttgtgcgagaaccacttccacgcacgacgcggctcgctgtgcgccacgtgtggcctccctgtgaccggccgctgcgtgtcggccctgggtcgccgcttccacccggaccacttcaca

SEQ ID NO: 362328 - DNA, 120 bp, Artificial Sequence
  ENSG00000140682_10 (sequence is synthesized)
tgcaccttctgcctgcgcccgctcaccaaggggtccttccaggagcgcgccggcaagccctactgccagccctgcttcctgaagctcttcggctgacagcccgctcggctcgccctctcc

SEQ ID NO: 362329 - DNA, 120 bp, Artificial Sequence
  ENSG00000140682_11 (sequence is synthesized)
cccggaggccgcgccctcccggaaaagccgggtcctccagaccccgaggccttgctctcagagcgggaggccccacccactggagagccccgcccctaaggtactatgagtcctcagggg

SEQ ID NO: 362330 - DNA, 120 bp, Artificial Sequence
  ENSG00000140682_12 (sequence is synthesized)
tcaagttcagaaacggcccagccagacctaaacccacacgcccacaaagtggattgcacacagacaagaactcccgtgcgggcctccactctattcccacccttgagggagcccccttac

SEQ ID NO: 362331 - DNA, 120 bp, Artificial Sequence
  ENSG00000140682_13 (sequence is synthesized)
tgggggagggtccttgcaattccagcgaatcggaggccaggccaggacgtccttgctccctgcaccctcactgttctgtgcactttttctacctacataaacacacgcattccacctctc

SEQ ID NO: 362332 - DNA, 120 bp, Artificial Sequence
  ENSG00000140682_14 (sequence is synthesized)
accagcccatccgacacgtgagccccgcccggccgcaccgagcccgccctatctcaccaggagagctgtgggacgggcctccaccgcatgggtcccgccccacccgcgataccccactcc

SEQ ID NO: 362333 - DNA, 120 bp, Artificial Sequence
  ENSG00000140682_15 (sequence is synthesized)
tcaggagcctcgggggacaaggaccacctgtacaggtgaggggcctggaaaccagggcatgggggccaactgagtctcaggtgaggaggcttggattccccacccctgaacccaggctcc

SEQ ID NO: 362334 - DNA, 120 bp, Artificial Sequence
  ENSG00000140682_16 (sequence is synthesized)
ccagggtgactgagagaggccttgatgcgataggggcaggggagggaagggtggggcagagactaagaggaatacacttcccagagtagcagttaaagggacctaaagcctcaagtgtga

SEQ ID NO: 362335 - DNA, 120 bp, Artificial Sequence
  ENSG00000140682_17 (sequence is synthesized)
accggcccgcgccccgccatggaggacctgggtgagtggggccggatccccgggtccgtggcccctcaccgctgcccagagctgcctccccgccgtcgctctcccgcatctccccatccc

SEQ ID NO: 362336 - DNA, 120 bp, Artificial Sequence
  ENSG00000140682_18 (sequence is synthesized)
tgtcttcttacttctgcttttcgcctctgcccgcgcctcctttccaactccacgtcccccttcctgcctctcccttcctgcctttcctgggccggccgctccctcccttcttccctcgct

SEQ ID NO: 362337 - DNA, 120 bp, Artificial Sequence
  ENSG00000140682_19 (sequence is synthesized)
gtgctcctccatcccaggctgcggcagatggaacgggaggtgcggcgcccgcgggcgcccgggcgcggggctctggggagggaggggttaaaggggcctcggcccggggaccgggaaagt

SEQ ID NO: 362338 - DNA, 120 bp, Artificial Sequence
  ENSG00000140682_20 (sequence is synthesized)
agagggcacgggaaagtctggcatcaagttttggagaaaaaaagcgggcctgcctgcaccagagttttgggagaggaggagttaagggctcctgagcacagtgagggtcaggtccttgag

SEQ ID NO: 362339 - DNA, 120 bp, Artificial Sequence
  ENSG00000140682_21 (sequence is synthesized)
gcaaggaagagaatagtaactcaggagtgcctaggcgcccgcgaaggcttcagggtttcacgcgggtgctcagagacgaagactgagggcaggacttctgggttctggaagtgaaagggc

SEQ ID NO: 362340 - DNA, 120 bp, Artificial Sequence
  ENSG00000140682_22 (sequence is synthesized)
tcaaaagacccggatctggggatgcagggatggagagaggtgtcttgtccggaagggggacccaggtatctcgtcctccctgcgaagcctggggctggaaggctgtgcgctccacgggag

SEQ ID NO: 362341 - DNA, 120 bp, Artificial Sequence
  ENSG00000140682_23 (sequence is synthesized)
agaggggcttccggcccctggcggtagagggcgctgctcggtaggggtaactgacgctgtaccgcagataaacagccaatcagaaggcaggtcccagcgaagcgccagtgaggagcccag

SEQ ID NO: 362342 - DNA, 120 bp, Artificial Sequence
  ENSG00000140682_24 (sequence is synthesized)
ggcgggactcaggggcctgggagtggccaggctgggcggggcctgtgtaggtagagggaggagttaaccagcatggaagagagagcgtccaatcagaaagctgagggccaggcactgggc

SEQ ID NO: 362343 - DNA, 120 bp, Artificial Sequence
  ENSG00000140682_25 (sequence is synthesized)
caatggagcaatttggaggggagccaaatttggcttgggtgaagagcccattttgactgcatcagagaagatggggagaataaaataatcaggaggctgggtttgtgcttggctccaagc

SEQ ID NO: 362344 - DNA, 120 bp, Artificial Sequence
  ENSG00000140682_26 (sequence is synthesized)
gtgagcaactgggatattctggtcataaatattccttgctacccttcgagcagtgctctgcctggctctggccctgtgacctcttctcttaatactggcttctgtccttctccagtactg

SEQ ID NO: 362345 - DNA, 120 bp, Artificial Sequence
  ENSG00000140682_27 (sequence is synthesized)
agttaatctgggaagtgggtatcattattacttatgttttatggatgaggaaactgaagctctgaaccacacagcaggttagtggtagggtgaaaattccaaccatgttaccatttattg

SEQ ID NO: 362346 - DNA, 120 bp, Artificial Sequence
  ENSG00000140682_28 (sequence is synthesized)
tggtcctactgtgtgccaggcactgtgccagctcctttacaaaccctcatctcatctgatcttcacaaaacactctgtggctccacccaatatctctcaggcatctacaaaggctctctc

SEQ ID NO: 362347 - DNA, 120 bp, Artificial Sequence
  ENSG00000140682_29 (sequence is synthesized)
cagatgtgattgacaacagctgtgcctaggggttaacctagtgccccctgctagatcaagtacctgactcccagcccagaattgcccatctcagcaaaggagggtggcattgtgactttt

SEQ ID NO: 362348 - DNA, 120 bp, Artificial Sequence
  ENSG00000140682_30 (sequence is synthesized)
gtggatcataggcactttcatcttcatgagtcccttcgtccattaaaataaatagatttttatgtctgtgttggtgtaaagatgggtatgttattattgtgtattacagcattttcttct

SEQ ID NO: 362349 - DNA, 120 bp, Artificial Sequence
  ENSG00000140682_31 (sequence is synthesized)
agttcatttttttattctgaatttttaaaaacggatttttcacttcctccctcttatttattttgaggcaaattctcactcttgtgacccaagctggagtgcagtggtgcgattgtggct

SEQ ID NO: 362350 - DNA, 62 bp, Artificial Sequence
  ENSG00000140682_32 (sequence is synthesized)
gtgatcctcccaatttatttattgtagagatggggcttcgccatgttgcccaggctggtctc

SEQ ID NO: 362351 - DNA, 90 bp, Artificial Sequence
  ENSG00000140682_33 (sequence is synthesized)
atgctaggattagaggcacgagccacccagcctgatcgtattttgattttaaaaaaattaaaacgtttttatgggcccctaaatgtattg

SEQ ID NO: 362352 - DNA, 120 bp, Artificial Sequence
  ENSG00000140682_34 (sequence is synthesized)
aaaaaaattaaaacgtttttatgggcccctaaatgtattgtgggctccaggcgctgtgcctgctgtgcctcatgtataggtcaatcctggagcgcagctggaagacggaacacgggagct

SEQ ID NO: 362353 - DNA, 120 bp, Artificial Sequence
  ENSG00000140682_35 (sequence is synthesized)
agatctccatcgcttacaggctgcgtgatctcgaacactggattctttattctgatcgctcagagaggactcgaaaaacgccgcgtaaatcttgcctcactgggcatgtggttgtcagag

SEQ ID NO: 362354 - DNA, 120 bp, Artificial Sequence
  ENSG00000140682_36 (sequence is synthesized)
tcctttctgacccccacgttcctagttagatcttctccccctccccccacgcatgccttagtccagtcacccgggttccgcgcgggagaggaaggcgcgaaggcacggaggccgcgctga

SEQ ID NO: 362355 - DNA, 120 bp, Artificial Sequence
  ENSG00000140682_37 (sequence is synthesized)
gtgccctctccctccctgcagaagatggtgaccgccttgggcactcactggcacccagagcatttctgctgcgtcagttgcggggagcccttcggagatgagggtgagagtgaactcgac

SEQ ID NO: 362356 - DNA, 120 bp, Artificial Sequence
  ENSG00000140682_38 (sequence is synthesized)
tcccatcttaaaagctgcgggtcccctcgacgtctcgccccagcccctccgacctccggagtcctcagggccatggttttccttctgctctcttctggccctgccctctcctacacagac

SEQ ID NO: 362357 - DNA, 120 bp, Artificial Sequence
  ENSG00000140682_39 (sequence is synthesized)
tccggacccgagccctccccgctctgtcccgccatagacccggctcctccttccccaaggctccctcggactgcccctccttcggccccagatctcaggtcttgtgggtcccccgtcccg

SEQ ID NO: 362358 - DNA, 120 bp, Artificial Sequence
  ENSG00000140682_40 (sequence is synthesized)
gttcccccgttcatcgcccccccatccccatctcagcgggtcccggcttccttacatggtcacggccgggcttccagctcccggacgtcccccgccccccgcccccaccggacacggccc

SEQ ID NO: 362359 - DNA, 120 bp, Artificial Sequence
  ENSG00000140688_0 (sequence is synthesized)
gggatccaaaagctcggcatggctgacgacgcgggtttggagaccccgctgtgttccgagcagttcggctccggggaggcacggggctgccgcgccgccgcggacgggagcctgcagtgg

SEQ ID NO: 362360 - DNA, 120 bp, Artificial Sequence
  ENSG00000140688_1 (sequence is synthesized)
gaggtcgggggctggcgctggtgggggctctccagggccttcacggtcaaacctgaaggacgagatgcgggcgaagtgggggcttccggggccccctcaccgcccctctccgggctccag

SEQ ID NO: 362361 - DNA, 120 bp, Artificial Sequence
  ENSG00000140688_2 (sequence is synthesized)
gccgtgttcctgcctcagggcttccctgatagcgtcagcccggactacttgccctaccagctgtgggattccgtgcaggcgtttgcttccagcctctccggctccctagccacccaggca

SEQ ID NO: 362362 - DNA, 120 bp, Artificial Sequence
  ENSG00000140688_3 (sequence is synthesized)
gtcttgctgggcataggggtggggaacgcaaaagccactgtttcagctgccacggccacctggctcgtgaaagattcaactggcatgctgggccgcatcgtctttgcctggtggaaaggg

SEQ ID NO: 362363 - DNA, 120 bp, Artificial Sequence
  ENSG00000140688_4 (sequence is synthesized)
agcaaactggactgcaatgccaagcagtggaggctttttgcggacatcctcaatgacgtagccatgttccttgagattatggctcctgtatacccaatctgtttcaccatgaccgtctcc

SEQ ID NO: 362364 - DNA, 120 bp, Artificial Sequence
  ENSG00000140688_5 (sequence is synthesized)
accagcaacctagccaagtgcatcgtgagtgttgctggtggggccactcgggctgccctgaccgtgcaccaggctcggaggaacaacatggctgacgtgtcagccaaggacagcagccag

SEQ ID NO: 362365 - DNA, 120 bp, Artificial Sequence
  ENSG00000140688_6 (sequence is synthesized)
gagacgctggtgaacctggcggggctcttggtcagcctcctgatgctccctctggtgtcaggttgccctggcttcagccttggatgtttcttcttcctcactgccctccacatctacgcc

SEQ ID NO: 362366 - DNA, 120 bp, Artificial Sequence
  ENSG00000140688_7 (sequence is synthesized)
aactaccgcgcggtccgagccctggtcatggagaccttgaacgaaggccggctccggctggtcctgaagcactaccttcagaggggagaggtactcgacccaactgcagccaatcgcatg

SEQ ID NO: 362367 - DNA, 120 bp, Artificial Sequence
  ENSG00000140688_8 (sequence is synthesized)
gagccgctgtggacaggtttctggccagctccgtctctatccctgggggtccccttacaccgcttggtctccagtgtctttgagctgcagcagctggttgaggggcaccaagaatcctac

SEQ ID NO: 362368 - DNA, 120 bp, Artificial Sequence
  ENSG00000140688_9 (sequence is synthesized)
ctcctctgctgggaccagtcacaaaaccaggtacaggtagttctgaaccagaaggcaggccccaagaccatcctaagggccgccacacatgggctgatgcttggggccctgcagggagat

SEQ ID NO: 362369 - DNA, 120 bp, Artificial Sequence
  ENSG00000140688_10 (sequence is synthesized)
ggaccccttccagcagagctggaggagctgaggaaccgggtgcgggcaggtcctaagaaagagagctgggtcgtcgtcaaggagacacacgaagtgttggacatgctgttcccaaagttc

SEQ ID NO: 362370 - DNA, 120 bp, Artificial Sequence
  ENSG00000140688_11 (sequence is synthesized)
ggaagaccgagaagcaccagctagaggtggatgagtggagggccacatggcttctgtctcccgaaaagaaggtcttgtgagcagcccagacggaggcccaagcccagggcaggaacctgg

SEQ ID NO: 362371 - DNA, 120 bp, Artificial Sequence
  ENSG00000140688_12 (sequence is synthesized)
agcaaggacactttggccacagcaggacaggggaaaggcagctttatttttccttagggcaactgcagcgggtgggccaggccctcatgggaagtgactgccaatcagatgcagtgggcc

SEQ ID NO: 362372 - DNA, 120 bp, Artificial Sequence
  ENSG00000140688_13 (sequence is synthesized)
ccaggcagaggaaggccgggagaaggggagccaggaccttctcaccccactgccccttccccttttctggggagcaccgcaggctcctcacccccacttcctgtgaggctgtggcttatg

SEQ ID NO: 362373 - DNA, 120 bp, Artificial Sequence
  ENSG00000140688_14 (sequence is synthesized)
gtgtccaacgcagttggtcttaggcatagaagccccagaggaacacggccactgccatcatgagcagggcattgaggttgaccacacgggcccagctcgggtcctcgctgatgtcctcca

SEQ ID NO: 362374 - DNA, 120 bp, Artificial Sequence
  ENSG00000140688_15 (sequence is synthesized)
gccgcctggctgctgccgctgcctcctcctgggtaaggggcggaggactgcccaccccacctctgctcattccacaaaaccagagcaggcactggcggaagaggcttggtgccggggcct

SEQ ID NO: 362375 - DNA, 120 bp, Artificial Sequence
  ENSG00000140688_16 (sequence is synthesized)
ggggctctgagggaaattgaggccctgcagttagtttgcgggaactcagctcctccagccccacctcccagcatggtgccctaccattcatctccatggcactctctgggcacccattct

SEQ ID NO: 362376 - DNA, 120 bp, Artificial Sequence
  ENSG00000140688_17 (sequence is synthesized)
gtacagggagtgaggagccttgctgctcatcagcatccaggtcctcccgttcctccttgctatgccggagactgaagaccaggcggtggagctggggagggtgggagcacgaacgaggtg

SEQ ID NO: 362377 - DNA, 120 bp, Artificial Sequence
  ENSG00000140688_18 (sequence is synthesized)
ggagttctgtccccccatgcctggccctaaagtctcttgcacaccagctcgtcactgcctgccctacccacctctgtccagtctacacacccagcccaggcttaactcatgccaactcca

SEQ ID NO: 362378 - DNA, 120 bp, Artificial Sequence
  ENSG00000140688_19 (sequence is synthesized)
ccctacatggctgccctgtgccctcgggataaaccccaagcccctgagcttgtgtttaaagccgttggccttgctcccccagctttgtcagctcaggtctgtctacacccagatggtagc

SEQ ID NO: 362379 - DNA, 120 bp, Artificial Sequence
  ENSG00000140688_20 (sequence is synthesized)
gcttgtgacactggcctggcagtcctgctcacagtgttctgtgcctgtgtgctcccaccctttcctcctgctgctgcagaaacccggccatccttccacacccagatctcttgtcctgtc

SEQ ID NO: 362380 - DNA, 120 bp, Artificial Sequence
  ENSG00000140688_21 (sequence is synthesized)
ctcaccccaccctgccaccatcagccctgcctggagccacctgccctttggcaacaaaaccaaacctttttgtgggcgttcaagatggtattgtgcccaccagtcagatcctgtgttttg

SEQ ID NO: 362381 - DNA, 120 bp, Artificial Sequence
  ENSG00000140688_22 (sequence is synthesized)
agtcccaaaggccatgccaaggattggctttgggaggctttaatcaccaacccatcaacatcaagcctcccccaggccggttcaaataaatgtatttaaataaaaattcttgctcggcaa

SEQ ID NO: 362382 - DNA, 120 bp, Artificial Sequence
  ENSG00000140688_23 (sequence is synthesized)
tgcctaggcatcctgaccccagcttcccacaggtttctggccagctccgtctctatccctgggggtccccttacaccgcttggtctccaggtgagtggcctagcgtctcccgctcgtcac

SEQ ID NO: 362383 - DNA, 120 bp, Artificial Sequence
  ENSG00000140688_24 (sequence is synthesized)
caccgccacccacactcccctcactccgattacacactggcctccctggcaaggccccacctctctgtcctgggttcttcattgctgctgaacagacatggggttggtgtgggtgtgtga

SEQ ID NO: 362384 - DNA, 120 bp, Artificial Sequence
  ENSG00000140688_25 (sequence is synthesized)
ggaaggaaagggtgtataacatgaagcagatgtaagagatgtgcttgatgggtgaaggaaggatgggtagatggggaagttggatgactggatacaggaagaaaggatggatttggtgtg

SEQ ID NO: 362385 - DNA, 120 bp, Artificial Sequence
  ENSG00000140688_26 (sequence is synthesized)
ttcagttcactgggtggctgttcagtggctggttgggcatgcctgcctttgctgtcctccacccccactgcactgtcctctcccccacagtgtctttgagctgcagcagctggttgaggg

SEQ ID NO: 362386 - DNA, 120 bp, Artificial Sequence
  ENSG00000140688_27 (sequence is synthesized)
aaaagctcggcatggctgacgacgcgggtttggagaccccgctgtgttccgagcagttcggctccggggaggcacggggctgccgcgccgccgcggacgggagcctgcagtgggagggct

SEQ ID NO: 362387 - DNA, 120 bp, Artificial Sequence
  ENSG00000140688_28 (sequence is synthesized)
gaagtttcaaataaggagttgtcggttgggatcaaactgtggggatccaagaatgccaggctaagaaaccaggatattttattttctgataaaaagaggatgcttttttggcaaatttct

SEQ ID NO: 362388 - DNA, 120 bp, Artificial Sequence
  ENSG00000140691_0 (sequence is synthesized)
gctgcgagtgaagaactccccgtttcctagatgccagctcctgagctcacgagcacgtccagagcggaggacactcgggacaccggggtccagctccggaaacggaaaattccacaagcc

SEQ ID NO: 362389 - DNA, 120 bp, Artificial Sequence
  ENSG00000140691_1 (sequence is synthesized)
cgtcactctaggaagcggcagcgaacgttctcggtaggtttaaccctcttcttcctctgaccgagcgagggctccccgtctgcggcgcggtcaggaccccgcactttcggcccggctcgg

SEQ ID NO: 362390 - DNA, 120 bp, Artificial Sequence
  ENSG00000140691_2 (sequence is synthesized)
ggttctcggagtccgtcccaaggccgggccgcaccaccgctggggggcagcgaagcgagcctagaggagaaaaggcggtccccgccgagtgcacgccgggggcggggcacggcacgaagg

SEQ ID NO: 362391 - DNA, 120 bp, Artificial Sequence
  ENSG00000140691_3 (sequence is synthesized)
ctccgtggtcggacttctgggctgttcggaggccctggcccacctggagggccctggaagagtttccagcgcttcccgaggtaggcgtgagaagctcgacgcggaccacatctccctcat

SEQ ID NO: 362392 - DNA, 120 bp, Artificial Sequence
  ENSG00000140691_4 (sequence is synthesized)
gcaccgcccgcacgtcccaggatgcgctgcgattaaggtactgccgcgcctcgtgtgcaaggacagacttccggggtcgagaactacaacttccgacttgcatcactgcggtggcgctaa

SEQ ID NO: 362393 - DNA, 120 bp, Artificial Sequence
  ENSG00000140691_5 (sequence is synthesized)
acagcgtcagcgaggcggtgcccgacgatttccctgtcttccagttccgctccctgggatcagcggcgagaagcggggcggagtctgaggcccgagccaagatggcggctgcgaagccaa

SEQ ID NO: 362394 - DNA, 120 bp, Artificial Sequence
  ENSG00000140691_6 (sequence is synthesized)
ccctcacggactcgctctcgttctgcctcgcgcagctcgcggcggcggccggggaggctctgggtggggaaaaggacccagcgaccaacgagacacccctgagccgcgcgctcctagccc

SEQ ID NO: 362395 - DNA, 120 bp, Artificial Sequence
  ENSG00000140691_7 (sequence is synthesized)
tccgcacgcgccacatcaaggcagcggggggaatcgagcgcttccgggcacgcggcgggctccgccccctactcgcgctgctacggcgagcggctgcagcgggttccgccccgtcccagg

SEQ ID NO: 362396 - DNA, 120 bp, Artificial Sequence
  ENSG00000140691_8 (sequence is synthesized)
caggccccggctccgccccctcgtcggccgcgtcgggagcttctagccccgcccccgcgtcgggccccgccccctccgctgtgtcgtcgtctagtcctacgccgccagtgcgcctgcgca

SEQ ID NO: 362397 - DNA, 120 bp, Artificial Sequence
  ENSG00000140691_9 (sequence is synthesized)
agacgctggacttggcgctcagcatcctagccgattgctgtacggaaggggcgtgccggaccgaagtgcgcagactcggaggcatactccctttggtgaccattcttcagtgcatgaaga

SEQ ID NO: 362398 - DNA, 120 bp, Artificial Sequence
  ENSG00000140691_10 (sequence is synthesized)
cagacagcatccagaaccgaacggcccgtgccctggggaacttagccatggaacctgagagctgtggggacatccactgtgctggtgctgttcccctgcttgtggagagcctgacagcct

SEQ ID NO: 362399 - DNA, 120 bp, Artificial Sequence
  ENSG00000140691_11 (sequence is synthesized)
gccaggactcgcagtgcctacagagcgtggtgcgtgccctccgtaacctggcagactcaccccagcaccgcctggccttggcacagcagggagcagtgcgtccgctggccgagctcctgg

SEQ ID NO: 362400 - DNA, 120 bp, Artificial Sequence
  ENSG00000140691_12 (sequence is synthesized)
ccactgccccagatgctgcactgaccttagccctcgtccgtgccctcctggaactcagccgaggctgctcccgggcctgtgctgagcagctaagtctgggtgggggattgggcccactcg

SEQ ID NO: 362401 - DNA, 120 bp, Artificial Sequence
  ENSG00000140691_13 (sequence is synthesized)
tcagcctggcttcccaccccaagcgggcagtacgcgagggaaccattctgatcctcgccaacctgtgtgcccagggcctgattcggcctgcactgggcaatgctggtggcgtggaggtgc

SEQ ID NO: 362402 - DNA, 120 bp, Artificial Sequence
  ENSG00000140691_14 (sequence is synthesized)
tggtagatgagctccggcagcgccgggatcctaatggagctagcccaacctcccagcagcccctggtgcgggctgtgtgcctcctatgtcgtgaggccatcaaccgggcccgactgcggg

SEQ ID NO: 362403 - DNA, 120 bp, Artificial Sequence
  ENSG00000140691_15 (sequence is synthesized)
atgctggtggcttggatctactgatgggcctgctgcgggaccctcgtgcaagcgcatggcaccctcgtattgtggctgcccttgtggggtttctgtatgacactggggccctgggccggc

SEQ ID NO: 362404 - DNA, 120 bp, Artificial Sequence
  ENSG00000140691_16 (sequence is synthesized)
tgcaggctctgggacttgtgcctctcctggctgggcagctgtgtggtgaggctggtgaggaggaagaagagggaagagaagctgcttcctgggactttcctgaggagaggacccctgagc

SEQ ID NO: 362405 - DNA, 120 bp, Artificial Sequence
  ENSG00000140691_17 (sequence is synthesized)
gggcacagggtggaagcttccggagcctcaggtcgtggctgatctccgagggctatgccacaggccctgatgacatctcccccgactggtctcctgagcagtgtccgccggagcccatgg

SEQ ID NO: 362406 - DNA, 120 bp, Artificial Sequence
  ENSG00000140691_18 (sequence is synthesized)
ccgccccgaccccgacctcgctgcgggcaccacgcacccaacgcactccgggccgcagccccgccgccgccatcgaggagccttggggacgcgaagggccagccctgctgctgctgtcgc

SEQ ID NO: 362407 - DNA, 120 bp, Artificial Sequence
  ENSG00000140691_19 (sequence is synthesized)
tgctgctgtcgcgcttttcccaggcccctgacccaagtggggcacttgtgaccggcccggcgctgtacggcctgctgacctatgtgaccggcgcaccgggcccgcccagcccacgtgcac

SEQ ID NO: 362408 - DNA, 120 bp, Artificial Sequence
  ENSG00000140691_20 (sequence is synthesized)
gccttcgtgcgcagctatggcgcggcgctgctgcgggcctggctggtgctgggggtggcgcctgacgattggccggcaccacgtgcccggcccactctccacagccggcaccgagagctg

SEQ ID NO: 362409 - DNA, 120 bp, Artificial Sequence
  ENSG00000140691_21 (sequence is synthesized)
ggtgagttcccatacccacccgtctccttgcccccatgtgagtccccatcctcccccatggcttccatgggcccagaacctcaccttcccactcacctgtcctccccagcccgtcctcca

SEQ ID NO: 362410 - DNA, 120 bp, Artificial Sequence
  ENSG00000140691_22 (sequence is synthesized)
gacaacctgtcaccagagtggggtggggagcagggcgttccagtccctccatgggcccacaggcagagttctgctgtgtcctctgccctagccctgggacccagataccctaactctaga

SEQ ID NO: 362411 - DNA, 120 bp, Artificial Sequence
  ENSG00000140691_23 (sequence is synthesized)
tgcagccccgcgcccaggatctgggctggtctgtgcttctttcctggctctgccattggttcagcactgtcctgactgctccccaccagcacgctgacctgtgaaccccagcctcaccat

SEQ ID NO: 362412 - DNA, 120 bp, Artificial Sequence
  ENSG00000140691_24 (sequence is synthesized)
cacccccagcactgccagggactgccctgtctgctgtgccctgaccacaggctgcttcatggcgttactgctagaccaaggagcccttctgctggccctgtccgggcataacagaaggct

SEQ ID NO: 362413 - DNA, 80 bp, Artificial Sequence
  ENSG00000140691_25 (sequence is synthesized)
tattatactggaacagctcgtgtcctccgtctcttgcctcggcgcctgggtggcttgccgcccacacttcaggggcccag

SEQ ID NO: 362414 - DNA, 120 bp, Artificial Sequence
  ENSG00000140691_26 (sequence is synthesized)
ggcgcctgggtggcttgccgcccacacttcaggggcccagacttacaccctgactgtcccaccttctgtccttgtcctggacctcaggttcccagcgtcccgagcccagcactgtctctt

SEQ ID NO: 362415 - DNA, 120 bp, Artificial Sequence
  ENSG00000140691_27 (sequence is synthesized)
cagtgccctgatttctcacccagaggtttcaccctccttcatctcacgggcccagagccctgtctcactcaccccacctgtcttagaccccagttcccagcctgacaagctttccactca

SEQ ID NO: 362416 - DNA, 120 bp, Artificial Sequence
  ENSG00000140691_28 (sequence is synthesized)
caggggagaggctactgcagaacctgacggttcaggctgagtcgccctttggggttggggccctgacgcacctgctgctctctgggagccctgaggaccgagtggcctgcgcgctgaccc

SEQ ID NO: 362417 - DNA, 120 bp, Artificial Sequence
  ENSG00000140691_29 (sequence is synthesized)
tgcccttcatctgccggtgagtgggaagtgggtgccttgcggggttgggggaggagtgctgtgtttcccaggcccgttgcccaccttttgaaaggccctctcttccctgtaggaagccct

SEQ ID NO: 362418 - DNA, 120 bp, Artificial Sequence
  ENSG00000140691_30 (sequence is synthesized)
ctctgtggcgccggctgcttctggagcagggtggtctccggctcctccttgcggcgctgacccggccggccccacacccgctcttcctcttctttgccgcggactccctttcctgcctcc

SEQ ID NO: 362419 - DNA, 120 bp, Artificial Sequence
  ENSG00000140691_31 (sequence is synthesized)
aagacctggtgtctcccactgtgagcccagctgtcccacaggcagtccccatggacctagactcaccttccccttgcctctatgaacctctgctgggcccagcccctgtcccagctcccg

SEQ ID NO: 362420 - DNA, 120 bp, Artificial Sequence
  ENSG00000140691_32 (sequence is synthesized)
acctgcacttcctgctggactcaggcctccagctccctgcccagcgagcggcctcagccaccgcctcccctttcttccgggccctgctgtcaggcagctttgcagaagcccagatggacc

SEQ ID NO: 362421 - DNA, 120 bp, Artificial Sequence
  ENSG00000140691_33 (sequence is synthesized)
tggtgcccctgcgaggtctgtcgcctggtgcagcctggcctgtcctgcatcatttgcatggttgtcgggggtgtggggctgccctggggcccgtgcccccaccaggccagcccctgctgg

SEQ ID NO: 362422 - DNA, 120 bp, Artificial Sequence
  ENSG00000140691_34 (sequence is synthesized)
gttcagaggccgaggaggcactggaggctgctggccgtttcctactgcctgggctggaggaggagctggaagaggccgtgggccgcatccacctgggaccccagggtggcccggagtcag

SEQ ID NO: 362423 - DNA, 120 bp, Artificial Sequence
  ENSG00000140691_35 (sequence is synthesized)
tgggtgaggtgttccgcctgggccggccccggctggctgcccactgtgcccgctggacactggggtcagagcagtgcccgaggaagcggggtctggccctggtggggcttgtggaggcag

SEQ ID NO: 362424 - DNA, 120 bp, Artificial Sequence
  ENSG00000140691_36 (sequence is synthesized)
caggtgaagaggcagggcccctgacggaggctttgctggctgtggtgatggggattgagttgggggcaagggtccctgcctagactgttgacgtcccctgggaaggggacccaaggatga

SEQ ID NO: 362425 - DNA, 120 bp, Artificial Sequence
  ENSG00000140691_37 (sequence is synthesized)
attggctgtgaaggatcctccctgagactggcaagggaggaggctgagcagaaggagtcatcatggaggagcggtgagaacatggaaccggactccaagatgacgatctaaagacccggg

SEQ ID NO: 362426 - DNA, 120 bp, Artificial Sequence
  ENSG00000140691_38 (sequence is synthesized)
agcgagaagccaaggccaggttctgggtgtagggcccagagaagcagaacagcccagagccccaggtgcctggcctggcctagacctctggaattgagattaaacaatttggagttggat

SEQ ID NO: 362427 - DNA, 120 bp, Artificial Sequence
  ENSG00000140691_39 (sequence is synthesized)
ggatgggcaggtgggagctgtggccgaaggtctggccacactcaccaccaagcatcaggtttccggactttgtgactgtgctggtgccgcagcagattccaactgtgcacaaaactctta

SEQ ID NO: 362428 - DNA, 120 bp, Artificial Sequence
  ENSG00000140691_40 (sequence is synthesized)
ctacaaacaaggcacttagaggccttctcacccatgtggagcgcaggtgctgcaacagggtggagccaaggctgagactcttgccgcagtcccctcagcggtaaggcttttagcggtgtg

SEQ ID NO: 362429 - DNA, 120 bp, Artificial Sequence
  ENSG00000140691_41 (sequence is synthesized)
agcgcgctggtgctggatcaggttggagctgacgctgaaagtcttaccacactaggcacaggcatagggccgaagcgatggtcacactcggggcaggagtacggcttttcaccggtgtgt

SEQ ID NO: 362430 - DNA, 120 bp, Artificial Sequence
  ENSG00000140691_42 (sequence is synthesized)
ctttgggtaagtgctccgcccccgtttcctagaaagattaggtttgcaactcccttgctctctagacccgggcagtctggagttctttgtgtcctatcccggaataacgtgctttgtgat

SEQ ID NO: 362431 - DNA, 120 bp, Artificial Sequence
  ENSG00000140691_43 (sequence is synthesized)
ggcgcatcgctcctgtttctcaatctgttgtgccccgtgacgtcactgcactctctatagatgagagagagccctcccagaccagataattgtagccattatctaggaattggttgttga

SEQ ID NO: 362432 - DNA, 120 bp, Artificial Sequence
  ENSG00000140694_0 (sequence is synthesized)
gtttccggaagtcgcggccggcgtcaccgctgcggctgcctcagctactgccgcagtcgccgcggaattcggcgagtagaaccgctgaggcgggcgcgggcccgggtggggccaaggttc

SEQ ID NO: 362433 - DNA, 120 bp, Artificial Sequence
  ENSG00000140694_1 (sequence is synthesized)
cggccactctgcagaatggagataatcaggagcaattttaagagtaatcttcacaaagtgtaccaggccatagaggaggccgacttcttcgccatcgatggggagttttcaggaatcagt

SEQ ID NO: 362434 - DNA, 120 bp, Artificial Sequence
  ENSG00000140694_2 (sequence is synthesized)
gatggaccttcagtctctgcattaacaaatggttttgacactccagaagagaggtatcagaagcttaaaaagcattccatggactttttgctatttcagtttggcctttgcacttttaag

SEQ ID NO: 362435 - DNA, 120 bp, Artificial Sequence
  ENSG00000140694_3 (sequence is synthesized)
tatgactacacagattcaaagtatataacgaagtcatttaacttctatgttttcccgaaacccttcaatagatcctcaccagatgtcaaatttgtttgtcagagctccagcattgacttt

SEQ ID NO: 362436 - DNA, 120 bp, Artificial Sequence
  ENSG00000140694_4 (sequence is synthesized)
ctagcaagccagggatttgattttaataaagtttttcgaaatggaattccatatttaaatcaggaagaagaaagacagttaagagagcagtatgatgaaaaacgttcacaggcgaatggt

SEQ ID NO: 362437 - DNA, 120 bp, Artificial Sequence
  ENSG00000140694_5 (sequence is synthesized)
gcaggagctctgtcctatgtatctcctaacacttcaaaatgtcctgtcacgattcctgaggatcaaaagaagtttattgaccaagtggtagagaaaatagaggatttattacaaagtgaa

SEQ ID NO: 362438 - DNA, 120 bp, Artificial Sequence
  ENSG00000140694_6 (sequence is synthesized)
gaaaacaagaacttggatttagagccatgtaccgggttccaaagaaaactaatttatcagactttgagctggaagtatccgaaaggcattcatgttgagactttagaaactgaaaagaag

SEQ ID NO: 362439 - DNA, 120 bp, Artificial Sequence
  ENSG00000140694_7 (sequence is synthesized)
gagcgatatatagttatcagcaaagtagatgaagaagaacgcaaaagaagagagcagcagaaacatgccaaagaacaggaggagctgaatgatgctgtgggattttctagagtcattcac

SEQ ID NO: 362440 - DNA, 120 bp, Artificial Sequence
  ENSG00000140694_8 (sequence is synthesized)
gccattgctaattcgggaaaacttgttattggacacaatatgctcttggacgtcatgcacacagttcatcagttctactgccctctgcctgcggacttaagtgagtttaaagagatgaca

SEQ ID NO: 362441 - DNA, 120 bp, Artificial Sequence
  ENSG00000140694_9 (sequence is synthesized)
acatgtgttttccccagactcttggatactaaattgatggccagcacacaaccttttaaggatatcattaacaacacatcccttgcggaattggaaaagcggttaaaagagacacctttc

SEQ ID NO: 362442 - DNA, 120 bp, Artificial Sequence
  ENSG00000140694_10 (sequence is synthesized)
aaccctcctaaagttgaaagtgccgaaggttttccaagttatgacacagcctctgaacaactccacgaggcaggctacgatgcctacatcacagggctgtgcttcatctccatggccaat

SEQ ID NO: 362443 - DNA, 120 bp, Artificial Sequence
  ENSG00000140694_11 (sequence is synthesized)
tacctaggttcttttctcagccctccaaaaattcatgtgtctgccagatcaaaactcattgaacctttttttaacaagttatttcttatgagggtcatggatatcccctatctaaacttg

SEQ ID NO: 362444 - DNA, 120 bp, Artificial Sequence
  ENSG00000140694_12 (sequence is synthesized)
cgacctttaccagcttttcagtgcctttggtaacattcagatatcctggattgatgacacatcagcatttgtttcccttagccagcccgagcaagtaaagattgctgtcaataccagcaa

SEQ ID NO: 362445 - DNA, 120 bp, Artificial Sequence
  ENSG00000140694_13 (sequence is synthesized)
atatgcagaaagctatcggatccaaacctatgctgaatatatggggagaaaacaggaagagaagcagatcaaaagaaagtggactgaagatagctggaaggaggctgacagcaaacggtt

SEQ ID NO: 362446 - DNA, 120 bp, Artificial Sequence
  ENSG00000140694_14 (sequence is synthesized)
aaacccccagtgcataccctacaccctgcagaatcactattaccgcaacaatagttttacagctcccagcacagtaggaaagagaaatttgagtcctagtcaagaggaagctggcctgga

SEQ ID NO: 362447 - DNA, 120 bp, Artificial Sequence
  ENSG00000140694_15 (sequence is synthesized)
ggacggagtgtcaggggagatttccgacactgagcttgagcagaccgattcctgtgcagagcccctctcagagggaaggaaaaaggccaagaaattaaaaagaatgaagaaggagctttc

SEQ ID NO: 362448 - DNA, 120 bp, Artificial Sequence
  ENSG00000140694_16 (sequence is synthesized)
tccagcaggaagcatctcgaagaacagccctgccacactctttgaagttcctgacacatggtaaccaagacctgagggcagcaaaccgctggtgctgtcgctgtgagcaagagccggctg

SEQ ID NO: 362449 - DNA, 120 bp, Artificial Sequence
  ENSG00000140694_17 (sequence is synthesized)
gcacatttggaagccgcactgtatttaacttaatcaaatgtggtatgggaggggttggaaaccaagttgtctcctgggggggagaaaacaggttttatttttgtggctgtggttttttcc

SEQ ID NO: 362450 - DNA, 120 bp, Artificial Sequence
  ENSG00000140694_18 (sequence is synthesized)
cctttttaatctaactgcctgttgacattgacactcatcacggttgtaggctgtcatgaatgtgtacgtgcttaaccagtgaattccgtgttgctcttgtgaggcctttcctgtcatgac

SEQ ID NO: 362451 - DNA, 120 bp, Artificial Sequence
  ENSG00000140694_19 (sequence is synthesized)
ccagtgtgcttaagaacctgcctgatggggagtgtcggctgtgaaatctgcaaaaagagctgacattccagctgctgtgatcatgaatttgggggtgtactgtcctgcctgtgcatcttc

SEQ ID NO: 362452 - DNA, 120 bp, Artificial Sequence
  ENSG00000140694_20 (sequence is synthesized)
tcgcactgagattttgaggcagttgcagccctcggttagtctcccagtggaaaaatcggttgtgcctccctgcttcccaccatagctgcctgaaaacatgacgctctcaagcttgtcctt

SEQ ID NO: 362453 - DNA, 120 bp, Artificial Sequence
  ENSG00000140694_21 (sequence is synthesized)
ccttcaggaagatgtccactcatgcccacccatgagagggcttgccgtatgccctggcctttgggcatatttatgtagagttcctttctcctaagacgtgagtttctcatgggggatgta

SEQ ID NO: 362454 - DNA, 120 bp, Artificial Sequence
  ENSG00000140694_22 (sequence is synthesized)
cgagtaaaaaggttaacttctgttcttatgcgtggcgctgtgttcactttccagagtctctgttcgtttgtttggatggcggtctcggggtacggcagcgtgtgtgcgtacgtgtctgtg

SEQ ID NO: 362455 - DNA, 120 bp, Artificial Sequence
  ENSG00000140694_23 (sequence is synthesized)
tgtgtgtgtgtgtgtgtgtgtgtgaaatcgtgcaaatctacaacatgtcccagcccattctccgttgaaacagatcacagcaacgacaaacgctcatggcgctgctttgctccacccgct

SEQ ID NO: 362456 - DNA, 120 bp, Artificial Sequence
  ENSG00000140694_24 (sequence is synthesized)
gctgctttgctccacccgcttcagatagatcattgttagatatttcacatttttgtatggtggaaataaaaatgaaaaatgtatttccaaaagatgaaaattaaaaacattttcatagga

SEQ ID NO: 362457 - DNA, 120 bp, Artificial Sequence
  ENSG00000140694_25 (sequence is synthesized)
caaatggttttgacactccagaagagaggtatcagaagcttaaaaagagatcggtctcactttgttgaccaggctggtctcgaacttctggcgtcaaatgatcctcctgctttagcctcc

SEQ ID NO: 362458 - DNA, 120 bp, Artificial Sequence
  ENSG00000140694_26 (sequence is synthesized)
aagtgacctgttggtctgtgtttaatattagcaggattctttttatctgaaaaaatattattatgatgcttttaactgaactgtcctctacttgggtgccatttccttgtatgcagcatg

SEQ ID NO: 362459 - DNA, 120 bp, Artificial Sequence
  ENSG00000140694_27 (sequence is synthesized)
ttcccagagagaatcttatgcactcagttgcacatttttttttccttgagatgtattctcactctgttgcccaggagtgcagtggtgcaatcttggcttgctgcagcctccacctcttgg

SEQ ID NO: 362460 - DNA, 120 bp, Artificial Sequence
  ENSG00000140694_28 (sequence is synthesized)
ctcctgacctcgtgatccgcctgccttagcctcccatagtgctgggattacaggcctgagctaccacgcctggccacaaacttttttattaagggatcttcagtcactgccattgccaga

SEQ ID NO: 362461 - DNA, 120 bp, Artificial Sequence
  ENSG00000140694_29 (sequence is synthesized)
ttgccagaggaagattaaacatttgtttcattgtcttaatgccagtggtttgctcatttagtgctgggcagggattcccaggccacaggtgtgggctgctagtttggtcctgctacaatt

SEQ ID NO: 362462 - DNA, 120 bp, Artificial Sequence
  ENSG00000140694_30 (sequence is synthesized)
agacatagcagggccattgaaggtaagtggtggcagctgaagtgggtccagtcctacagaattcttgatcgcccttgctaggctgcttcccttagattctctgctgacctcagtagtgca

SEQ ID NO: 362463 - DNA, 120 bp, Artificial Sequence
  ENSG00000140694_31 (sequence is synthesized)
tttttcagtccttgagccaagttgccttggttgaccaaagcacaagctgctttggttcctctactggctctccctcttctgctccatacggtttgcgtggcctcacgttacttgtccctc

SEQ ID NO: 362464 - DNA, 120 bp, Artificial Sequence
  ENSG00000140694_32 (sequence is synthesized)
gccactctgcgctccactcttttatttcctcttcatcttttttgtcttttagtgatctcactcactttacagcttcagctgtagacaccaacatctttatccccagctgtggtctctgtt

SEQ ID NO: 362465 - DNA, 120 bp, Artificial Sequence
  ENSG00000140694_33 (sequence is synthesized)
cagatccaggtatacatttcatgctggactccagacatccctacctggatagcccccagactaagtgttgttttgaattgacgtggctcaaatgagatatttaacttgtacttcttttct

SEQ ID NO: 362466 - DNA, 120 bp, Artificial Sequence
  ENSG00000140694_34 (sequence is synthesized)
ttcttactgtctccaaaccacttctttctcctcatcccattactataagtgattcccagttaccaaccctgtttttagcatcagttttgactcttgctctgtctccagatctggtcattt

SEQ ID NO: 362467 - DNA, 120 bp, Artificial Sequence
  ENSG00000140694_35 (sequence is synthesized)
tgggctcaagtgatcctccaacctcaacctgagtagctggcactacagtgataaacccaggcaacattcttttcaaatggataatcaaaagagagaattgatcaaccaagatgaaagtgt

SEQ ID NO: 362468 - DNA, 120 bp, Artificial Sequence
  ENSG00000140694_36 (sequence is synthesized)
ataatcaaaagagagaattgatcaaccaagatgaaagtgtcataaggaaccaataagtgataatgttggaagtgaaattcaaatcaaaacaagtagaattataaagaagaattagctgac

SEQ ID NO: 362469 - DNA, 120 bp, Artificial Sequence
  ENSG00000140694_37 (sequence is synthesized)
cacgggaatgttgacactgctgccatttgagttactgtaaatctgcagccagaggaacttaacgaaggcaacttatcagcataaatgaggaaagtggttgtgacaaaaaggatgaagatg

SEQ ID NO: 362470 - DNA, 120 bp, Artificial Sequence
  ENSG00000140694_38 (sequence is synthesized)
tcccagaagaagtaacgccagcacaaactttcacattaaaggagctctcagagatatttcactacattgaaagcgcaaaggataacccactggaagctgattcacacttacaaaggagta

SEQ ID NO: 362471 - DNA, 120 bp, Artificial Sequence
  ENSG00000140694_39 (sequence is synthesized)
caacagttcacccaggcatagaagaaacactcactgcatatcataagttacatggcaagaagaaggcacacactgtttaaactaccctgaataagtttttttgtttttaacaaaagctca

SEQ ID NO: 362472 - DNA, 120 bp, Artificial Sequence
  ENSG00000140694_40 (sequence is synthesized)
tactttattcacatttcctcggtttttacctaatgtcctttttctgtttcagtttcaggatctcatctaggataccatattatatttggccatcatatctccataggcttctttagacca

SEQ ID NO: 362473 - DNA, 120 bp, Artificial Sequence
  ENSG00000140694_41 (sequence is synthesized)
cgatggtttctctgactctccttgtttttgattaccttgacagtttcaggatgaaattggccagctaatctatggaatgtcctccaacttgagtttgtctgatatttttctagtggttag

SEQ ID NO: 362474 - DNA, 120 bp, Artificial Sequence
  ENSG00000140694_42 (sequence is synthesized)
actaaggttatgggttttggatggaagacccgtgatgaagtgccatcctcatcacttcatatcaagggaacatgctgtcaatgtgatttctcacttgggatgttaaccttcatcacctgg

SEQ ID NO: 362475 - DNA, 120 bp, Artificial Sequence
  ENSG00000140694_43 (sequence is synthesized)
gttgaggtggtgtttgccagatctctccacatgaagttactgttctctctctttccacactctgctgtttgaaaggaagtcactgtacacagcccaagtctaagtggtggggagttatgt

SEQ ID NO: 362476 - DNA, 120 bp, Artificial Sequence
  ENSG00000140694_44 (sequence is synthesized)
tccacctccttgggggaggagtgtctgtaattattctgaacaagagatttgtctcttatttgttatttagtcattgatctatatcattatatagacataagttttatacaaagaaataaa

SEQ ID NO: 362477 - DNA, 120 bp, Artificial Sequence
  ENSG00000140694_45 (sequence is synthesized)
atcagcatttgtttcccttagccagcccgagcaagtaaagattgacggagtcttgtcctgtggcccgggctggagtgcagtggcgcgttcacagctcactgcagcctctacctcctgggc

SEQ ID NO: 362478 - DNA, 120 bp, Artificial Sequence
  ENSG00000140694_46 (sequence is synthesized)
ctacagatgtacaccaccatgcccagctaattttttatttcatttagagataaggatttgccatgttgcccaggctggtcttcaattcctgggctcaagccacctgcctgcctcagcctc

SEQ ID NO: 362479 - DNA, 120 bp, Artificial Sequence
  ENSG00000140694_47 (sequence is synthesized)
cagcaatctgcctgcctcagcctcctaaaatcttggtattacagctgtgagccaccgtgcctggctggcacctattttgtgatccagaccttccttccatatcacataccatgcttaaac

SEQ ID NO: 362480 - DNA, 120 bp, Artificial Sequence
  ENSG00000140694_48 (sequence is synthesized)
tactttaataacattttcagaaaatctaatgtaaatgcatcaaaaagcatgcctttaactgattaaaagtgactcaagttcatttcctttcagatatatatatgtattatatctgaaata

SEQ ID NO: 362481 - DNA, 120 bp, Artificial Sequence
  ENSG00000140694_49 (sequence is synthesized)
caatatattgatatatatttgatacgctgtccagacatagtagtgtctttgcttctacctttggtgccttttgtagttggccagtgtgttactgtttatttattcttgtcacagaggaaa

SEQ ID NO: 362482 - DNA, 120 bp, Artificial Sequence
  ENSG00000140694_50 (sequence is synthesized)
taaatataatctcttagttctcatttcctttttgaaattctgcggttctcagtgatttgactacatgaagttccccctactttcttaagttgaatactcacttaattttcttttgttatt

SEQ ID NO: 362483 - DNA, 120 bp, Artificial Sequence
  ENSG00000140694_51 (sequence is synthesized)
aattcatgtgtctgccagatcaaaactcattgaacctttttttaacaaagtctcgctctgttgccaggctggagtccaatggcgcaatctcgactcactgcaacttctgcctcctgggtt

SEQ ID NO: 362484 - DNA, 120 bp, Artificial Sequence
  ENSG00000140694_52 (sequence is synthesized)
actgctctgccctgaaggaaataccaagaccgtttgcaagtacagtagagctgctggtcggttatttcttatgagggtcatggatatcccctatctaaacttggaaggaccagacttgca

SEQ ID NO: 362485 - DNA, 120 bp, Artificial Sequence
  ENSG00000140694_53 (sequence is synthesized)
agtcacagcccaaggggtgacgggtgtgtgtcagtttccgctcctcctgggcggctgttcttgtatccggaggatacaagctttgcctagaaattaaaatattacaaggccgcaccgtac

SEQ ID NO: 362486 - DNA, 120 bp, Artificial Sequence
  ENSG00000140694_54 (sequence is synthesized)
tctctacagttattttttgccttcacattttatgtagaaaatcacaggactatacgttcaatttacggtgttaagaatcggaattaaatgacttttatttctattaaaatattttttttt

SEQ ID NO: 362487 - DNA, 120 bp, Artificial Sequence
  ENSG00000140694_55 (sequence is synthesized)
ctttgagctggaaaaggagcgatatatagttatcagcaaagtagatgaagaagaacgcaaaagaagagagcagcagaaacatgccaaagaacaggaggagctgaatgatgctgtgggatt

SEQ ID NO: 362488 - DNA, 120 bp, Artificial Sequence
  ENSG00000140694_56 (sequence is synthesized)
tgggtgccttatttaaccttgatgaacttctgcttatctctgtaaactgcgcataatagtatggactttagtgttattgtaaggattccatgagattaagtaaatgaaccttggcatggc

SEQ ID NO: 362489 - DNA, 120 bp, Artificial Sequence
  ENSG00000140694_57 (sequence is synthesized)
caaatggttttgacactccagaagagaggtatcagaagcttaaaaaggcaagtggatgtgctaggaaatctttttctttctcatgttagtcttccttatgttaaatgataaatattgtta

SEQ ID NO: 362490 - DNA, 120 bp, Artificial Sequence
  ENSG00000140694_58 (sequence is synthesized)
ctaaacttgtgcattaaggttttgtaagtgcagtattttctcctcaaacctagccatgaagtgatttttttttttgttttgtcttgttttagagacaaggtctcgctctgtcacccaggc

SEQ ID NO: 362491 - DNA, 88 bp, Artificial Sequence
  ENSG00000140694_59 (sequence is synthesized)
acccaggctggggtgcagtggcgtgatcactgctctgtggagccttgaactcctggctcaactgattctcctgccaagccactgtgcc

SEQ ID NO: 362492 - DNA, 120 bp, Artificial Sequence
  ENSG00000140694_60 (sequence is synthesized)
tattattattttttttaatttttacatattcttttgtagagatcggtctcactttgttgaccaggctggtctcgaacttctggcgtcaaatgatcctcctgctttagcctcccaaagtgc

SEQ ID NO: 362493 - DNA, 120 bp, Artificial Sequence
  ENSG00000140694_61 (sequence is synthesized)
caggtgtgagccaccacacctggccttaaagtgttattttaatgatatttaaaacagcaaaaataattgtttgctggaaaatattttggggaaagtttagcattttcagtgttaatttga

SEQ ID NO: 362494 - DNA, 120 bp, Artificial Sequence
  ENSG00000140694_62 (sequence is synthesized)
taatttgattcataggaaatatgaggcagttattttaatcatttggaaatagacctaatatgattctttggatgatggataaataggtccttaaatgggaaaagtattatgaaatgtata

SEQ ID NO: 362495 - DNA, 120 bp, Artificial Sequence
  ENSG00000140694_63 (sequence is synthesized)
ttgagtaattcagaaagcccacctgtttgagaatgctatgctcacatggaatatgcagcacttttgtgacagatgttttatttcccttttccagcattccatggactttttgctatttca

SEQ ID NO: 362496 - DNA, 120 bp, Artificial Sequence
  ENSG00000140694_64 (sequence is synthesized)
gtttggcctttgcacttttaagtatgactacacagattcaaagtaggttgtgttaacaaacgttgggaattccgtttttgtggcacaatgtcacctcctaagtctccttttatcttatcc

SEQ ID NO: 362497 - DNA, 120 bp, Artificial Sequence
  ENSG00000140694_65 (sequence is synthesized)
gcagcaggcgcgcgctgtttccggaagtcgcggccggcgtcaccgctgcggctgcctcagctactgccgcagtcgccgcggaattcgattttaagagtaatcttcacaaagtgtaccagg

SEQ ID NO: 362498 - DNA, 120 bp, Artificial Sequence
  ENSG00000140694_66 (sequence is synthesized)
gcccaggaactctcaccatgatggctttaataacatggtggcacattgcctggtaacctgagggttggtggggtttgtttctacctactttaccgaaaagccctctatcagctgttggcc

SEQ ID NO: 362499 - DNA, 120 bp, Artificial Sequence
  ENSG00000140694_67 (sequence is synthesized)
tgagaatgagaagtacctgtaataaattaatacttacattgacctgttcatctctgtactttccccccatttgttgatacatatttgagatttattcactccattaaacttgtatcaaat

SEQ ID NO: 362500 - DNA, 64 bp, Artificial Sequence
  ENSG00000140694_68 (sequence is synthesized)
ttaagtgagtttaaagagatgacaacatgtgttttccccagactcttggatactaaattgatgg

SEQ ID NO: 362501 - DNA, 120 bp, Artificial Sequence
  ENSG00000140694_69 (sequence is synthesized)
agttctactgccctctgcctgcgctttcccttaactttccgcggtgcagcttttgccttctccatgaagtttttattgcctgctaccttgcccaagaggacttaagtgagtttaaagaga

SEQ ID NO: 362502 - DNA, 120 bp, Artificial Sequence
  ENSG00000140694_70 (sequence is synthesized)
attgatgacacatcagcatttgtttcccttagccagcccgagcaagtaaagattgatggggtttcactctgttggacaggctgttctcaaactccaagtgatctgcctgcttcagcctcc

SEQ ID NO: 362503 - DNA, 120 bp, Artificial Sequence
  ENSG00000140694_71 (sequence is synthesized)
gccagatcaaaactcattgaacctttttttaacaaggttccgctggaaatctaggccttcctggaatgacactgctttatggtctttctgagctaccgatgagacaaggaatgatatgct

SEQ ID NO: 362504 - DNA, 120 bp, Artificial Sequence
  ENSG00000140694_72 (sequence is synthesized)
cttggacaaatgttttctcctctgtaaaatggggataaaatgattcaccttctgtattggtccattttcatgctgctaataaagacacaactaagacagggcaatttacaaaataaagag

SEQ ID NO: 362505 - DNA, 120 bp, Artificial Sequence
  ENSG00000140694_73 (sequence is synthesized)
cagaatcactattaccgcaacaatagatttctatagtttttttaaatttgtaattatttcattaaagtttaggagattttagcaatgacttagctttctttaaatttgaaaacatagaaa

SEQ ID NO: 362506 - DNA, 120 bp, Artificial Sequence
  ENSG00000140694_74 (sequence is synthesized)
ggtttctcagtgtctccaataaaattcagtatttccatttaaaggctcctgtatgcagaaatttggaactcagcactgaaagcctgctttcacctcacacattaaagcactgtgtcatct

SEQ ID NO: 362507 - DNA, 120 bp, Artificial Sequence
  ENSG00000140694_75 (sequence is synthesized)
caggattttattttaaataacatgaagctaagtttaacatcaccttatacttatatgacctttgttgtgttagaacgctttcatgtttcataatagcagtaatatttgaaaattgttttc

SEQ ID NO: 362508 - DNA, 120 bp, Artificial Sequence
  ENSG00000140718_0 (sequence is synthesized)
gcggtggcgaaggcggctttagtggcagcatgaagcgcaccccgactgccgaggaacgagagcgcgaagctaagaaactgaggcttcttgaagagcttgaagacacttggctcccttatc

SEQ ID NO: 362509 - DNA, 120 bp, Artificial Sequence
  ENSG00000140718_1 (sequence is synthesized)
tgacccccaaagatgatgaattctatcagcagtggcagctgaaatatcctaaactaattctccgagaagccagcagtgtatctgaggagctccataaagaggttcaagaagcctttctca

SEQ ID NO: 362510 - DNA, 120 bp, Artificial Sequence
  ENSG00000140718_2 (sequence is synthesized)
cactgcacaagcatggctgcttatttcgggacctggttaggatccaaggcaaagatctgctcactccggtatctcgcatcctcattggtaatccaggctgcacctacaagtacctgaaca

SEQ ID NO: 362511 - DNA, 120 bp, Artificial Sequence
  ENSG00000140718_3 (sequence is synthesized)
ccaggctctttacggtcccctggccagtgaaagggtctaatataaaacacaccgaggctgaaatagccgctgcttgtgagaccttcctcaagctcaatgactacctgcagatagaaacca

SEQ ID NO: 362512 - DNA, 120 bp, Artificial Sequence
  ENSG00000140718_4 (sequence is synthesized)
tccaggctttggaagaacttgctgccaaagagaaggctaatgaggatgctgtgccattgtgtatgtctgcagatttccccagggttgggatgggttcatcctacaacggacaagatgaag

SEQ ID NO: 362513 - DNA, 120 bp, Artificial Sequence
  ENSG00000140718_5 (sequence is synthesized)
tggacattaagagcagagcagcatacaacgtaactttgctgaatttcatggatcctcagaaaatgccatacctgaaagaggaaccttattttggcatggggaaaatggcagtgagctggc

SEQ ID NO: 362514 - DNA, 120 bp, Artificial Sequence
  ENSG00000140718_6 (sequence is synthesized)
atcatgatgaaaatctggtggacaggtcagcggtggcagtgtacagttatagctgtgaaggccctgaagaggaaagtgaggatgactctcatctcgaaggcagggatcctgatatttggc

SEQ ID NO: 362515 - DNA, 120 bp, Artificial Sequence
  ENSG00000140718_7 (sequence is synthesized)
atgttggttttaagatctcatgggacatagagacacctggtttggcgataccccttcaccaaggagactgctatttcatgcttgatgatctcaatgccacccaccaacactgtgttttgg

SEQ ID NO: 362516 - DNA, 120 bp, Artificial Sequence
  ENSG00000140718_8 (sequence is synthesized)
ccggttcacaacctcggtttagttccacccaccgagtggcagagtgctcaacaggaaccttggattatattttacaacgctgtcagttggctctgcagaatgtctgtgacgatgtggaca

SEQ ID NO: 362517 - DNA, 120 bp, Artificial Sequence
  ENSG00000140718_9 (sequence is synthesized)
atgatgatgtctctttgaaatcctttgagcctgcagttttgaaacaaggagaagaaattcataatgaggtcgagtttgagtggctgaggcagttttggtttcaaggcaatcgatacagaa

SEQ ID NO: 362518 - DNA, 120 bp, Artificial Sequence
  ENSG00000140718_10 (sequence is synthesized)
agtgcactgactggtggtgtcaacccatggctcaactggaagcactgtggaagaagatggagggtgtgacaaatgctgtgcttcatgaagttaaaagagaggggctccccgtggaacaaa

SEQ ID NO: 362519 - DNA, 120 bp, Artificial Sequence
  ENSG00000140718_11 (sequence is synthesized)
ggaatgaaatcttgactgccatccttgcctcgctcactgcacgccagaacctgaggagagaatggcatgccaggtgccagtcacgaattgcccgaacattacctgctgatcagaagccag

SEQ ID NO: 362520 - DNA, 120 bp, Artificial Sequence
  ENSG00000140718_12 (sequence is synthesized)
aatgtcggccatactgggaaaaggatgatgcttcgatgcctctgccgtttgacctcacagacatcgtttcagaactcagaggtcagcttctggaagcaaaaccctagaaggagcacaagt

SEQ ID NO: 362521 - DNA, 120 bp, Artificial Sequence
  ENSG00000140718_13 (sequence is synthesized)
ctcaggcggaggagaaaaagagatcggcttttctcctccaacgttgtcatgggcttaagcaagagcagtggagacttctcttggcccctagattgtagcacccgggtcccaatccaaaac

SEQ ID NO: 362522 - DNA, 120 bp, Artificial Sequence
  ENSG00000140718_14 (sequence is synthesized)
agctaggaaatggtgcccatgaagttttaaatgttttaaaatgaccctgtgttatagtctgatttggtgttaaacaggaccttcttcccccaaaattgttcagattataaaatgtgagcc

SEQ ID NO: 362523 - DNA, 120 bp, Artificial Sequence
  ENSG00000140718_15 (sequence is synthesized)
attcagcccccaaggtccagggcaggcgacaggaacgagcccagcgtgtgacaaagcctaacctactttcctctttcccaagctttttcagagactctggagtggacccagccctctggg

SEQ ID NO: 362524 - DNA, 120 bp, Artificial Sequence
  ENSG00000140718_16 (sequence is synthesized)
gaaagacagaacttagagacatcccagttactcaccacacccatagtgctgtccaatatggtagccactagctagctgtggctacttcaatttaaattcagttttaattttaattaaaaa

SEQ ID NO: 362525 - DNA, 120 bp, Artificial Sequence
  ENSG00000140718_17 (sequence is synthesized)
tgcagctcttcagtcgccctggccacatttcaagtgcttaacagcctcatgtggctagtgactgctgtattggacggtacagatatggaacattttcatcatcgaagaaagtcctattgg

SEQ ID NO: 362526 - DNA, 120 bp, Artificial Sequence
  ENSG00000140718_18 (sequence is synthesized)
acaacacttctataaaaagtttgagagcaggaattctcatttccattcgtctgtagcttctatccccaaaggcaaagaaactaaaagagaaatgactcattgaagattggcctctttcct

SEQ ID NO: 362527 - DNA, 120 bp, Artificial Sequence
  ENSG00000140718_19 (sequence is synthesized)
ttctctaagacaaacctaagtaaaagcctgagctttgagtcctatgctcagcacacgggaaggagatgttaataattaaaataaagttgatatcctgtctttagggagttcccttgatct

SEQ ID NO: 362528 - DNA, 120 bp, Artificial Sequence
  ENSG00000140718_20 (sequence is synthesized)
cttgaaagagacacagccccatttacattatttcgtggatttcaccagcatagtatagtttttttctgtaagtccctcattcttatgtaataacaggtggaactgaggtttgaagaacct

SEQ ID NO: 362529 - DNA, 120 bp, Artificial Sequence
  ENSG00000140718_21 (sequence is synthesized)
cagtggcccatcctgatgacattggagactcaaagagacaagagagagtagggtttaaaacctgagctttaagactcccactagcttcgtgtcctttggcatgttaacgtgcctcagttt

SEQ ID NO: 362530 - DNA, 120 bp, Artificial Sequence
  ENSG00000140718_22 (sequence is synthesized)
cctcatctgtataatggggatatatgaaaggcaccagtcctaaggtgaacattaagtgagatgattctagttacagacttagaacaatttccagcacatagttaaatatccaggaaattc

SEQ ID NO: 362531 - DNA, 120 bp, Artificial Sequence
  ENSG00000140718_23 (sequence is synthesized)
tggtactgttatgtgtgggtgagctgacctggatgtagatgttttcctctctcttgctgacccctccgccagttttgtcttgtgatgccattaacacatctctccctttctgacctggct

SEQ ID NO: 362532 - DNA, 120 bp, Artificial Sequence
  ENSG00000140718_24 (sequence is synthesized)
cctgcccattggtgtcccaagaaatcgtgagaatagttagccccccgtctccccagcctgttgctttctcgtgtagttgttcacagtagttgagaagttgaagagcttttgcctattgaa

SEQ ID NO: 362533 - DNA, 120 bp, Artificial Sequence
  ENSG00000140718_25 (sequence is synthesized)
ggtgcactgagaataaactctttcctgccaccagaattgcagtggttcacggcctgcactcattcccatgaatgcagttaatagccacagaaatgtcacattaagcaaagcagccagggt

SEQ ID NO: 362534 - DNA, 120 bp, Artificial Sequence
  ENSG00000140718_26 (sequence is synthesized)
ctcatcgtgttgagactcgagtctctcagaccttggattcattccctggtgtctttgagcctcagtttcctcattggtaaaagagaagtgaagcagtgtctcacagggtcattacagaga

SEQ ID NO: 362535 - DNA, 120 bp, Artificial Sequence
  ENSG00000140718_27 (sequence is synthesized)
ttaaatgaaataaatgaaataacatagaccaggagggcgtggtgtttaaaagtcacagatggggcaccctcgggccatccagcccagtgttttctttagcccctatgatgttcatttttt

SEQ ID NO: 362536 - DNA, 120 bp, Artificial Sequence
  ENSG00000140718_28 (sequence is synthesized)
tctttagcccctatgatgttcattttttgttatatcccattaggtgcccatatttaaaaattgggagatttcacataaaattaaaaggtctgcattttcttttttcttttcttttttttt

SEQ ID NO: 362537 - DNA, 120 bp, Artificial Sequence
  ENSG00000140718_29 (sequence is synthesized)
ccaccgcgccaagccaaggtctgcatttttctttagaactcagaacacccaatagtcctaggcccccatcctcgcatggcagcaagctaaataagcatcttcccactgcgagttggggca

SEQ ID NO: 362538 - DNA, 120 bp, Artificial Sequence
  ENSG00000140718_30 (sequence is synthesized)
tgacccagcctatggtttgccatactccctctttttctccgttttttcattaattgtgaacctgacctgcatcaccctttcatgtcagtgctctccaaacctgcttgcttgcacccctct

SEQ ID NO: 362539 - DNA, 120 bp, Artificial Sequence
  ENSG00000140718_31 (sequence is synthesized)
agtcgaaatattttgtgcttaccccaatatatgtgtgtgactattgaactctattcgtagactgcttgtactaatgtcatttgcatcataaaatattcatatccaataaacatattaaaa

SEQ ID NO: 362540 - DNA, 120 bp, Artificial Sequence
  ENSG00000140718_32 (sequence is synthesized)
ggatgagataagaaaccgagagattttgctgtttttttccttttgcatggatgagccagcttcactgtcctgggtggggcccaggtggaattagttctcaaagtcctccaggtggagtca

SEQ ID NO: 362541 - DNA, 120 bp, Artificial Sequence
  ENSG00000140718_33 (sequence is synthesized)
caggtggagtcagggaatgtgcaacagggttggagaaatcactactttaagtgaatccgaaaggtgagatcacatttgctctaaagaaatggtgatcccagcactttgggaggctgaggc

SEQ ID NO: 362542 - DNA, 83 bp, Artificial Sequence
  ENSG00000140718_34 (sequence is synthesized)
ggagcgagagaagaaagaaatggtgactttcattgatcatgtgtttgaggatttcatgtgctctccagggaggtttcaggtgg

SEQ ID NO: 362543 - DNA, 120 bp, Artificial Sequence
  ENSG00000140718_35 (sequence is synthesized)
tttgaggatttcatgtgctctccagggaggtttcaggtgggtagaaggaggtgggcaagacccaataaaaaagcagctggtgcgggcaatgacaatgaactcgtatcctgcagggtcaaa

SEQ ID NO: 362544 - DNA, 120 bp, Artificial Sequence
  ENSG00000140718_36 (sequence is synthesized)
ggaaggcttgcttctgctgtgaattggagaaggactttcctggaagcacaggcccagaaatcgcacccttctccccatgtgtgcggataagggaccacttccatcagcagcagccccctc

SEQ ID NO: 362545 - DNA, 120 bp, Artificial Sequence
  ENSG00000140718_37 (sequence is synthesized)
ctgctttcctgccagtcctccctgtggtcccaggtctcttgagaaaagtgatctaagagatccctttgcaatgaggtgctactgactgccctacctccctcccttcctcccatgaatgtt

SEQ ID NO: 362546 - DNA, 120 bp, Artificial Sequence
  ENSG00000140718_38 (sequence is synthesized)
tcttggtgctgaccacagcctcagcaatgaggcaagcctggggacccaagacagatctctgcctcccaggctagtggatgccctgggatatgtagtcaccaaaataggaacttaccccat

SEQ ID NO: 362547 - DNA, 120 bp, Artificial Sequence
  ENSG00000140718_39 (sequence is synthesized)
agtggggaaatagacagtaagcagcaaatcaataacaagagtgttccagatggttgtaagtgccaggaagggaaccaactgggagagggacaagaggagatggtgactgaccaaggggac

SEQ ID NO: 362548 - DNA, 120 bp, Artificial Sequence
  ENSG00000140718_40 (sequence is synthesized)
cttgatcaggctgtggggaagggaggtggttgggaagagcttcccaggaaaggggacggcgggcccaggcaggagagccttgggagggggtgcccaaggaaggaaaagggccctgagcct

SEQ ID NO: 362549 - DNA, 120 bp, Artificial Sequence
  ENSG00000140718_41 (sequence is synthesized)
gaagccgagaagaccaggaggggagaaggggagatgtagggcagagcagacgggagccgctcgggttttattccacacaccccaggaagcatgagagggtttcaagcagcaagggcatgg

SEQ ID NO: 362550 - DNA, 120 bp, Artificial Sequence
  ENSG00000140718_42 (sequence is synthesized)
aagtaacttggtgagatatttttatgcattagatcatcgctctatctggattccagagggtctctgagagagcaaacagcttaatccaaaggagcggctttccaactgggaatgtccccc

SEQ ID NO: 362551 - DNA, 120 bp, Artificial Sequence
  ENSG00000140718_43 (sequence is synthesized)
tggctgggtgagatctcaagatggcctgcggcccctctagattgcctgcctacagagttcactctaaacagcccctcccctccacaccccagcagatccattcctgacgccctcactggc

SEQ ID NO: 362552 - DNA, 120 bp, Artificial Sequence
  ENSG00000140718_44 (sequence is synthesized)
aggctccagccccacagagctttctagacataaaagagcagggtcatggcatcattggtgacacaattttagtaataagcttcaaaacccatcactccactgaatccagggatgccagaa

SEQ ID NO: 362553 - DNA, 120 bp, Artificial Sequence
  ENSG00000140718_45 (sequence is synthesized)
tgtatgcttcgagggaaggaaggtattttcaaatgcaacttcttttttttttttcttgctctagttagggctgattttaccactgggcaaattgcatacatttggatccatgccacgcta

SEQ ID NO: 362554 - DNA, 120 bp, Artificial Sequence
  ENSG00000140718_46 (sequence is synthesized)
aaaactgtttattttggagatctgtcagaggcaagcacatggaagacaaggggattctggtttgaaaaggcaattctcatccagacagattcagatggagaggagcggtgtggattaaaa

SEQ ID NO: 362555 - DNA, 120 bp, Artificial Sequence
  ENSG00000140718_47 (sequence is synthesized)
tgcgccgaagtggtaatgccgtttatcccgtttgcctttgttactctgtgattaaatggtatttttaattaagtttcattgggagccataggtatcgcggtggtgaaatcaatttgacaa

SEQ ID NO: 362556 - DNA, 120 bp, Artificial Sequence
  ENSG00000140718_48 (sequence is synthesized)
ccataaaggggagagacggcacaggcgtgttgtgatgattgcggctgtagggaaagccgggcagcttgcagaggatgggtgggaggaggggaagccggctaagaatgacttcctgcaaga

SEQ ID NO: 362557 - DNA, 120 bp, Artificial Sequence
  ENSG00000140718_49 (sequence is synthesized)
cagcaagggcacccctgggccactgctgtgtttgggaggcaggttttgggggttgtcagaaggcattcacctggttctctcgctcacctgagacacccgatagattcctggaaactccag

SEQ ID NO: 362558 - DNA, 120 bp, Artificial Sequence
  ENSG00000140718_50 (sequence is synthesized)
gaaagtatctgaagatctggttctccattctctcttattaacaaggagaaccacaagtgccccccagatcccggctagaaggaccagacagctttccaccccggttcccaggcagccctg

SEQ ID NO: 362559 - DNA, 120 bp, Artificial Sequence
  ENSG00000140718_51 (sequence is synthesized)
ctcccatagtcctgtgtcccatcggccccatgctcccaggacagtcctaattcccacctctcagaaccttgtcagccaagttcttcctgctctctggcccaaatcctcctcctacattgg

SEQ ID NO: 362560 - DNA, 120 bp, Artificial Sequence
  ENSG00000140718_52 (sequence is synthesized)
aaactgagcctctctgcatcctctgctctttctatcccgctgtcattcatcagattttccaaatctttggattcctgagtggcagaagaggttttctgagtttaagttctgattctgtgt

SEQ ID NO: 362561 - DNA, 120 bp, Artificial Sequence
  ENSG00000140718_53 (sequence is synthesized)
gtgattctcactctaccacctcttcaaacctttgttgtcttatctacaaaatagaatagtagtaatccatcacctaaggttgttgtgaaggttcaataagttaatgcgtatttaaaatgc

SEQ ID NO: 362562 - DNA, 120 bp, Artificial Sequence
  ENSG00000140718_54 (sequence is synthesized)
ctcccacagtacctgacatatactgggcttcagtgaggtactagctattattattaaccaagtttcctgtggtaacagttgtagctttgtgactgggccaaatcacttaacccctctgcg

SEQ ID NO: 362563 - DNA, 120 bp, Artificial Sequence
  ENSG00000140718_55 (sequence is synthesized)
ctccagtctttgtttctataatggggatgatgataatgcctagctcattggattgttctgtcccctacgatcagccatgttaagtgattcatatcatgtctggtacttaaaaatcacgcc

SEQ ID NO: 362564 - DNA, 120 bp, Artificial Sequence
  ENSG00000140718_56 (sequence is synthesized)
acgcatgtacattattatgatgaaaaatatgatccgtgatatcctgaccaaaatattaaagggactaaagatagctgtggcttgttcaagaagaatattgtgtcactatcccatatatta

SEQ ID NO: 362565 - DNA, 120 bp, Artificial Sequence
  ENSG00000140718_57 (sequence is synthesized)
tcccatttgctcttcacagcttccatttttcgctaggcggatggcatggaactttttataaatgagatattatgaaaaatgatgttttaggactctcatttctacagtgggagtaggtca

SEQ ID NO: 362566 - DNA, 120 bp, Artificial Sequence
  ENSG00000140718_58 (sequence is synthesized)
cccattgcaattttggatttgcttaaaaaaattcttgccatcaccttctaatggatgatctgtgtacaacaattgtttattgactctgaatgtctaagtaccagggtcagtctatttcaa

SEQ ID NO: 362567 - DNA, 120 bp, Artificial Sequence
  ENSG00000140718_59 (sequence is synthesized)
ggggagggaagcattaattaacctccagcattagattcagtgattcttttccaatgatgcagttcatgactttgctcgcatttacttttcatcaatcctgaaagaattgaggtaaaatag

SEQ ID NO: 362568 - DNA, 120 bp, Artificial Sequence
  ENSG00000140718_60 (sequence is synthesized)
ttcctctgcacatgtgtgtcaagctaaatggataacagcagatacagatctgtttgcctgtctgcacttgcctttagacaaaattcatcaattttacaaaagccactgactaaacatggc

SEQ ID NO: 362569 - DNA, 120 bp, Artificial Sequence
  ENSG00000140718_61 (sequence is synthesized)
accaatacaaatgaagcacttctagcaggcggagattccctttgtttctgatctggtaaatgcggtagtttcctgctgagagatgggaagtgctggcctaggacagcaaggtgccctaca

SEQ ID NO: 362570 - DNA, 120 bp, Artificial Sequence
  ENSG00000140718_62 (sequence is synthesized)
ggtggggccaaaagggtcaagaccgttctacaggaagtttaggagaagttcaatggttccagatcctgtgtgcttcgggtaattctgaccctcttcattagtgataatggcatgaagctc

SEQ ID NO: 362571 - DNA, 120 bp, Artificial Sequence
  ENSG00000140718_63 (sequence is synthesized)
tttcacacagtcttttttttttttctttttttttttcagacagggtctcaccctgtcacgtaggctggagtgcagtggtgagatcacggctcactgcagcctcgacttcatgggctcaag

SEQ ID NO: 362572 - DNA, 120 bp, Artificial Sequence
  ENSG00000140718_64 (sequence is synthesized)
cgattctcctgcctcagcctcctaagtagtcgggatcataggcacttgccaccacatccggctaatttttttgtagagacaggatttcaccacattacacaggctggtttcaaactccga

SEQ ID NO: 362573 - DNA, 120 bp, Artificial Sequence
  ENSG00000140718_65 (sequence is synthesized)
ggctcaagtgatctgcctgcatcggcctcccaaagcgctgagattacaagcgtgagccactacgccttgccctccacacagccttgcttggtgttaaagattaaacaaagaccacaggtg

SEQ ID NO: 362574 - DNA, 120 bp, Artificial Sequence
  ENSG00000140718_66 (sequence is synthesized)
atcactgtcttcgtggtgccagtttcaagggcacccttcttcccttcccagcctccgagagaaggagagagggtccacaagccagatccatccccatccacacaggtaaaaccacgactg

SEQ ID NO: 362575 - DNA, 120 bp, Artificial Sequence
  ENSG00000140718_67 (sequence is synthesized)
tgcagctagcaggtggagataacatttggaaaaaggctttgtaaatgctaaagtcctactcaagtccaagggagagaaattattattattcgttttgtgaaaccaatttagtttggctgg

SEQ ID NO: 362576 - DNA, 120 bp, Artificial Sequence
  ENSG00000140718_68 (sequence is synthesized)
gtaatggaagaatttctacatacattcattacttctgatcaggcaagaccagtctgacacaggaacagtctatggctcactcttaaagccacagcaggctgccagggcttggagaaatag

SEQ ID NO: 362577 - DNA, 120 bp, Artificial Sequence
  ENSG00000140718_69 (sequence is synthesized)
aaacctctcttgcacaagaatagtctcaatgaatcatgttaaggcctctttaggtttttcagactccatgcaccctgtggaaactgcctttcttgagtagaggtacgttcagcacttcat

SEQ ID NO: 362578 - DNA, 120 bp, Artificial Sequence
  ENSG00000140718_70 (sequence is synthesized)
aaaataatcttggagcctccagacacacggatggaggagcatgatttcatttgtttctttgcaaaactgctgtccccaactgaaaaacctgattatcctttcaaatagggaattcggctt

SEQ ID NO: 362579 - DNA, 120 bp, Artificial Sequence
  ENSG00000140718_71 (sequence is synthesized)
tccacgttggaaccagaacagttaaccttcaaacccccaaggcttgcaagagatgaatcagtttctcagacagccaaagccgtggcttataactcatccaacccagaaaactggaccgct

SEQ ID NO: 362580 - DNA, 120 bp, Artificial Sequence
  ENSG00000140718_72 (sequence is synthesized)
ggtcaccttccttccccctgcccccaactctgcagacagaggtttcccgttgattatgccttgattagagtcaggagagaagcaaaccaggtatataggattccattatccttccctcct

SEQ ID NO: 362581 - DNA, 120 bp, Artificial Sequence
  ENSG00000140718_73 (sequence is synthesized)
ctgctcccaaccagggtcacgctgagagggatctcggtgaacatgtgaacaatcaagccatgtttaccatggacgtttagttttcttttctcaaaatcaaaacagagtttagtaggcagc

SEQ ID NO: 362582 - DNA, 120 bp, Artificial Sequence
  ENSG00000140718_74 (sequence is synthesized)
gtatttcatacatgccccttgatcaatggaatgatctgtcagaagccattaaagcccccattagcttgaatgcattcaaagctaaactattggatcatttaagggctgcagtgattgttt

SEQ ID NO: 362583 - DNA, 120 bp, Artificial Sequence
  ENSG00000140718_75 (sequence is synthesized)
ttaatataccgtacattgatttctccctgtgagcagcaacataagtttgaaactaactgtgtatgactaaggctccatttgctgtctccaaccctctgtgagaagcatggtttcacttcg

SEQ ID NO: 362584 - DNA, 120 bp, Artificial Sequence
  ENSG00000140718_76 (sequence is synthesized)
accagaaatgtctgtgtatagttttcaaagagatgcagaccctgttcgatttcccaagatttagactgggtcgggttgttatttcttttttccctgagctttctcccatttctttgtgcc

SEQ ID NO: 362585 - DNA, 120 bp, Artificial Sequence
  ENSG00000140718_77 (sequence is synthesized)
cattaagtgagctgtgcgtgcagaatgggagaggcatccctgccaaggacttcaagtgaaaggcggtgggagaaattgttctgaaagcatgaagcccagctgaggccaaaatcaaagtga

SEQ ID NO: 362586 - DNA, 120 bp, Artificial Sequence
  ENSG00000140718_78 (sequence is synthesized)
atttgacagccttgggccagcaaaactctgtacccagcagaaaacaatagatgtgtggctgtgtcaggggcatcctcactgggacatagcttggggagctgaaggtaccttggaagggcc

SEQ ID NO: 362587 - DNA, 120 bp, Artificial Sequence
  ENSG00000140718_79 (sequence is synthesized)
agatgaggaagctagccaaggccacaggccttcctttgactgccatattgccagctcttcatagtattgactcttcagtcttagccaacacacacttgttgattccttccggaatgtcag

SEQ ID NO: 362588 - DNA, 120 bp, Artificial Sequence
  ENSG00000140718_80 (sequence is synthesized)
actctgctagcaacacaaggtccctgtcctcaaaatcctattcttaatcagcatttctaatttctgccctttgctcattttaatacagagcctgaggataggagagcagcgtggtgaaag

SEQ ID NO: 362589 - DNA, 120 bp, Artificial Sequence
  ENSG00000140718_81 (sequence is synthesized)
aagcaatagttaccacatttgcaaaggcacataccccaaagagaagtttttaatatgtcacacccatattttatagatggggcaatggaagtccagatgggagaagttatttcaggtgaa

SEQ ID NO: 362590 - DNA, 120 bp, Artificial Sequence
  ENSG00000140718_82 (sequence is synthesized)
ttatagaaactggatttcaagtttctgataagtattgaatttgggaaggctgtgaacattcttgagcccccctcccaagttcaccttcaacatcctaaagcaggttgaagaggaagatgg

SEQ ID NO: 362591 - DNA, 120 bp, Artificial Sequence
  ENSG00000140718_83 (sequence is synthesized)
ttccaggtcacttacaagaacaggaacagcccctccctccaaatttgagcccagaaaggagaacctttgttactctagaaaacagtgtgtgtgctattgttttctccataggtcacaaac

SEQ ID NO: 362592 - DNA, 120 bp, Artificial Sequence
  ENSG00000140718_84 (sequence is synthesized)
atccacaagatattggtgattttacatattattagagccactgaaatttatgatgcaggatattaacgtcaaagaggccaagatgcatcattcagaacactggcaggtcaagcagaaacc

SEQ ID NO: 362593 - DNA, 120 bp, Artificial Sequence
  ENSG00000140718_85 (sequence is synthesized)
accgtagtaaaattgaaagctggagtcagcaaagtatagcccacagccaaatctggcccatcccctgttcttataaagttttattggaacgcagccatgctcatcggtttatgtattatc

SEQ ID NO: 362594 - DNA, 120 bp, Artificial Sequence
  ENSG00000140718_86 (sequence is synthesized)
tatggctgtttccaactacagtggcagagctgaatagttgcaaaggaccatagggctatcaaagccccaaatagtcattgtctgacccttcatagaaaaattttgctgaactgtagtcta

SEQ ID NO: 362595 - DNA, 120 bp, Artificial Sequence
  ENSG00000140718_87 (sequence is synthesized)
gctccaaggattgttgtatcacctgtgatcgtgcctattaagcaattaacgtcatgtctagtacttagtaatgactcagcatgtatcaattacgatgataaatattatcatggcatccaa

SEQ ID NO: 362596 - DNA, 120 bp, Artificial Sequence
  ENSG00000140718_88 (sequence is synthesized)
accaaaatactcatgccaacatctctctgtacagaaacatggaaaaagagcgatgctattaaggaggaaaatggagccaggagcaaaacctaaggctatttctgaactaaagaggcctga

SEQ ID NO: 362597 - DNA, 120 bp, Artificial Sequence
  ENSG00000140718_89 (sequence is synthesized)
ataaggtagtgaaaggaccagggaaagccttcccacggggatggagagccacctcctccccggctttctggttcagatgtcttgtctcaacagacggcagattcgcagggaagcaggccg

SEQ ID NO: 362598 - DNA, 120 bp, Artificial Sequence
  ENSG00000140718_90 (sequence is synthesized)
agcctgatcttttctccgctagaactgctcaacaggtgaagaatctttttccagcactcctgagcccttcgggtcgcggaacagtgcgaagattattccaatgcctcattcggagaggtg

SEQ ID NO: 362599 - DNA, 120 bp, Artificial Sequence
  ENSG00000140718_91 (sequence is synthesized)
ataatctggtctgtggtttctttttcggtggggcatggggtgggggtgagtgtcatgctttctaaggcacagggctgactaaagggtgtcctatttataagtcagtaaaacacagcggct

SEQ ID NO: 362600 - DNA, 120 bp, Artificial Sequence
  ENSG00000140718_92 (sequence is synthesized)
tcatactctgtgcttattacccagaagccccggctcttagagtttctattaagatgtacctcataaatatatacgcctcctatgtacccacaaaaattaaaaataaaaaaattgaaatca

SEQ ID NO: 362601 - DNA, 120 bp, Artificial Sequence
  ENSG00000140718_93 (sequence is synthesized)
gcggtggcgaaggcggctttagtggcagcatgaagcgcaccccgactgccgaggaacgagagcgcgaagctaagctaaaccaaaaaggctttatctaggaggtgagacttgtagaaactc

SEQ ID NO: 362602 - DNA, 120 bp, Artificial Sequence
  ENSG00000140718_94 (sequence is synthesized)
ttgattgatggaaggaatgagtcagtgaactagaagaagggtattcgaggcctgtggataaccatgtgagaagaaactgaggcttcttgaagagcttgaagacacttggctcccttatct

SEQ ID NO: 362603 - DNA, 120 bp, Artificial Sequence
  ENSG00000140718_95 (sequence is synthesized)
gctctccacttccaactgcctacggagtggctctacctgaaagtcttccagctacatctaactcaacatgattcatattcattaagttacttactccattaaacaaatggatttcactcc

SEQ ID NO: 362604 - DNA, 120 bp, Artificial Sequence
  ENSG00000140718_96 (sequence is synthesized)
ccgactctgtgccagtggcagctgaaatatcctaaactaattctccgagaagccagcagtgtatctgaggagctccataaagaggttcaagaagcctttctcacactgcacaagcatggc

SEQ ID NO: 362605 - DNA, 120 bp, Artificial Sequence
  ENSG00000140718_97 (sequence is synthesized)
ggagtcagataagcctgggtttgattattggttctttctcttgccagctatgactttgagcaggttacttaactttctctatgccttggttttttcatctggaaagtggatttttgacaa

SEQ ID NO: 362606 - DNA, 120 bp, Artificial Sequence
  ENSG00000140718_98 (sequence is synthesized)
cccatctcatttaacaggttatctcattaaatgagatagtgtatagtaagctcttaacctagtgcctggcatctagtaagcaatcaatacgtgttaattatcattactggcatcgggcat

SEQ ID NO: 362607 - DNA, 120 bp, Artificial Sequence
  ENSG00000140718_99 (sequence is synthesized)
ctgtagagcaatttcctcttcaaactagactcataatgagaattagcctaaacacagtctgcagaatggtcatttttttctccttaagcacaaatgagactcagttgagatctgccccag

SEQ ID NO: 362608 - DNA, 120 bp, Artificial Sequence
  ENSG00000140718_100 (sequence is synthesized)
ccagtgtctaatacatataagattttctaggacatcctgattttatatagcattctttgattaaaggcaattcattttaaaatgtatatctaaatggaaattttttgaagattttaaaat

SEQ ID NO: 362609 - DNA, 120 bp, Artificial Sequence
  ENSG00000140718_101 (sequence is synthesized)
aaatatatgtatgtatcaggagaaaaccttagaggtctttattcacgattctgaacatatgatcaccatactgatagctctttgacatagaaggtgctcctccccacaccttctatccaa

SEQ ID NO: 362610 - DNA, 120 bp, Artificial Sequence
  ENSG00000140718_102 (sequence is synthesized)
agcaagtattattccagaaaaatactggaaacctatcaggaatctttagaatatcgtccatttttttagagtcagttttgctattctcatgcgtttcttacttatagggtcaaaaacact

SEQ ID NO: 362611 - DNA, 120 bp, Artificial Sequence
  ENSG00000140718_103 (sequence is synthesized)
ttctaataccacggatggcatggaattcttccctgcaggcagccatcttcaagactgaaagcagaatttaaaaagcagctaaattagagactttacacagttgctggatcctgcttaatg

SEQ ID NO: 362612 - DNA, 120 bp, Artificial Sequence
  ENSG00000140718_104 (sequence is synthesized)
agagacagcgaacattttgcaggctactgaacttctgaaatgtgacaatccaagcaaatgaaatcatggtacctttcattgtagtttaattggactcaaactcggcaagaggggctgctg

SEQ ID NO: 362613 - DNA, 120 bp, Artificial Sequence
  ENSG00000140718_105 (sequence is synthesized)
aaagctgtattcaaagagacagacaggaattgtacaacaactaattcagcccacacaacacatcttacaactgtccaagctccacacttgctctcaagactgactcttttggtcaagaga

SEQ ID NO: 362614 - DNA, 120 bp, Artificial Sequence
  ENSG00000140718_106 (sequence is synthesized)
gagatagacctgcagtgaacaaaagcacagattgtaaggcaggccaaatactggcattgggaatggcatagctgtcaccccaagttatgcatttgaaatagctcagtctcatggcagcca

SEQ ID NO: 362615 - DNA, 120 bp, Artificial Sequence
  ENSG00000140718_107 (sequence is synthesized)
gtacaggccaatttattttaaagaggaaaagagaagtgaaacaaacttaggccctctcttctgcctgttagggtgtcaagatatcagtgtcaaggagtccagttaacagaagggtgagga

SEQ ID NO: 362616 - DNA, 120 bp, Artificial Sequence
  ENSG00000140718_108 (sequence is synthesized)
tgagttgagcataaacactaacaagagaagaacttagcacaggcctcctgttgagtggagctaaatggcagtcccagttgagtaacccaaaaagcagagaattaccgtagctgtcaggag

SEQ ID NO: 362617 - DNA, 120 bp, Artificial Sequence
  ENSG00000140718_109 (sequence is synthesized)
tgggaccaaaatcctgtcaggcagcggtaaaggggatgggaacggtttgagggaaaggcgagttttgtgggggagtgaggtcaagaagtagactgttttagggcatgcatgtctgaactt

SEQ ID NO: 362618 - DNA, 120 bp, Artificial Sequence
  ENSG00000140718_110 (sequence is synthesized)
aggaggcccttggactgtttaggagggtgtcttggcttccttgttttgttcttgtatcatttgagctctgtggcctgaaactgattatatcatctcagccccttctggtgtaaccatccc

SEQ ID NO: 362619 - DNA, 120 bp, Artificial Sequence
  ENSG00000140718_111 (sequence is synthesized)
gcctgaccacttgagtccacgtttactgttattatggctgtaggtttagccagtaaggctaaaagagtggacaaattgggtgcctgcatgtaacaggccatcctggacattgatttttga

SEQ ID NO: 362620 - DNA, 120 bp, Artificial Sequence
  ENSG00000140718_112 (sequence is synthesized)
aggttcattagataaatgctgacatcacagattgatgtctctttaaaccagtacctagtgcaggaccgtctggggaatcaaaaatattgatgtaaacatgtttgagtagaaggcccactg

SEQ ID NO: 362621 - DNA, 120 bp, Artificial Sequence
  ENSG00000140718_113 (sequence is synthesized)
gagaattccactgcctaaatgggatccatcaatttaggctttctttaattattctaattctatgcatcacatcaataggggagtttgtctgcagaaccggtttttatagggggtgccgcc

SEQ ID NO: 362622 - DNA, 120 bp, Artificial Sequence
  ENSG00000140718_114 (sequence is synthesized)
cctacgttaggggcaaaggaaggccggacaaggtatccacatctatttttcattgttgttttgagttgctgtttagtaattaaaatttttgatcatagactaattttcccataccatgtg

SEQ ID NO: 362623 - DNA, 120 bp, Artificial Sequence
  ENSG00000140718_115 (sequence is synthesized)
gccgtgcgattgacaagggactgattaatgggctgaccccagggccaggaggctgctgggctcttctcttgtggaaggcatgccggcaaaataaagttgatggttttgtttgtgtttaac

SEQ ID NO: 362624 - DNA, 120 bp, Artificial Sequence
  ENSG00000140718_116 (sequence is synthesized)
ccttcaccttggcactatcaatagattgaagacatcatttgtatctgcaagtgtttctttaattaagacctcctaaaaatctttcctattgattcattccattatcctattgattaactg

SEQ ID NO: 362625 - DNA, 120 bp, Artificial Sequence
  ENSG00000140718_117 (sequence is synthesized)
cagtggatcatgtacttggtcttcagtggaaggcaacagcctcagccgtctgtcatgactacagatgcagaccacaggcagccagcagccagcgcccagggctggcaggagtgtctcgcg

SEQ ID NO: 362626 - DNA, 120 bp, Artificial Sequence
  ENSG00000140718_118 (sequence is synthesized)
ttctaatgaggcatcagcggtggctcactgaacaccacagagaaagccagttgtctcctgctgaaggggtggccaagcataaagcattccttccagttatttatactgcagccacttagc

SEQ ID NO: 362627 - DNA, 120 bp, Artificial Sequence
  ENSG00000140718_119 (sequence is synthesized)
cctgaggagagaatggcatgccagagtggatatagaggggtggaagaaggaggccaagatactttgctttctgcaagaagctatagagatcaagaaggaaacatagggatggagactact

SEQ ID NO: 362628 - DNA, 120 bp, Artificial Sequence
  ENSG00000140718_120 (sequence is synthesized)
actaagcatcttcgactatgctaagtcctgagcagacagtgaagaactagaaagacatggccccgccctcatgaagattacaagttaggcctattctccacacttgttctaactcaatct

SEQ ID NO: 362629 - DNA, 120 bp, Artificial Sequence
  ENSG00000140718_121 (sequence is synthesized)
aaggtttatcctgattgtaatccctccagaggttttgatcatttctctaatcacttattaggcctcttgcttcctgtaggaatttgttctctatattagattgaaatctgcctgttctaa

SEQ ID NO: 362630 - DNA, 120 bp, Artificial Sequence
  ENSG00000140718_122 (sequence is synthesized)
tttcaacttcctttcttctggccctggctagtcctcagtgtacagaattgccattggtacctgctggtcaaggccaagtgttgtgagccaaggtttctaaccttggctgcagttacactt

SEQ ID NO: 362631 - DNA, 120 bp, Artificial Sequence
  ENSG00000140718_123 (sequence is synthesized)
aactgctcctctccgaagctggatttagcagagatttgatggaagccctgcaaacctcgattcaaatcaaagttcaaacctagtgactggttgagtgaactgctttaataataacagtgc

SEQ ID NO: 362632 - DNA, 120 bp, Artificial Sequence
  ENSG00000140718_124 (sequence is synthesized)
aaaaattgaatttaaaataatccttttagggatgcaagatgcagtggtttagccttttattaatattcttttctttccactaataaagattttaagtcaacatctccttaaatttgatta

SEQ ID NO: 362633 - DNA, 120 bp, Artificial Sequence
  ENSG00000140718_125 (sequence is synthesized)
attccattaggatcactccaaaaaaaggtttatcagtggctttgaaatccaaatgggatgaagaaaaaatcatttatatggcaaaatctcagttacactaactagattaaagaccttctg

SEQ ID NO: 362634 - DNA, 120 bp, Artificial Sequence
  ENSG00000140718_126 (sequence is synthesized)
ctgaattaaagaaaaaatcaacacacagattatttgaaacaaatgtaaatatgcaacttttaagcacatagagaaatctaccctaaagttgatgttttttcaagttctcttggagcttac

SEQ ID NO: 362635 - DNA, 120 bp, Artificial Sequence
  ENSG00000140718_127 (sequence is synthesized)
attccagtgggagaaacccgtgttaaacaaatacatagaagacaatttcagattgtgagctaggaaatcagggtagaggaatgggtaatattagagagatcagggaggcttctctgagag

SEQ ID NO: 362636 - DNA, 120 bp, Artificial Sequence
  ENSG00000140718_128 (sequence is synthesized)
gtgacatttgagctgagatctgaaagaccaagccacagtcacatgaagacatggagttagcgttacatgcaaagcaaacggttaagtgcaaagtccctgaggctggaatgggcttaatgt

SEQ ID NO: 362637 - DNA, 120 bp, Artificial Sequence
  ENSG00000140718_129 (sequence is synthesized)
aaaccaatctattaggctgcttggaaaacagagggagaaagaagaacaatgattttgtaaactccataaaggccaaaaaaaggctttcaacaaatgctgtgcttcatgaagttaaaagag

SEQ ID NO: 362638 - DNA, 120 bp, Artificial Sequence
  ENSG00000140718_130 (sequence is synthesized)
ctcttggtgaagatactgtgaacaatgttggaataataacaaaggatgttgaatcttacataaaccgagttgatgaagcagtagcaaggtttgagaggattgactccaattttgcaagaa

SEQ ID NO: 362639 - DNA, 120 bp, Artificial Sequence
  ENSG00000140718_131 (sequence is synthesized)
gtaaaattgtgccagtcacgaattgcccgaacattacctgctgatcagaagccagaatgtcggccatactgggaaaaggatgatgcttcgatgcctctgccgtttgacctcacagacatc

SEQ ID NO: 362640 - DNA, 120 bp, Artificial Sequence
  ENSG00000140718_132 (sequence is synthesized)
gtattcttggaggctagcatagagcgtggtgcattctgagagcaggcattcattaaatagttgttgagtgagtgaatggagtccatggggtttcagggtctgtgaacccagagatggttt

SEQ ID NO: 362641 - DNA, 120 bp, Artificial Sequence
  ENSG00000140718_133 (sequence is synthesized)
accaaattttataaggaacctgattaagtgtcgagtagtgtactcagcaccagggtaaagatggcagacacagtcccatggaactggctggctgtccatggaagaaactgaggcttcttg

SEQ ID NO: 362642 - DNA, 120 bp, Artificial Sequence
  ENSG00000140718_134 (sequence is synthesized)
tttatacttccaaaggatcttcaatggaactctacttctgtgagctaaaccagtgtcatactgcaatgaaaactgcaggtgataaacattgtctaaataaaatttccaaaaagtatttga

SEQ ID NO: 362643 - DNA, 120 bp, Artificial Sequence
  ENSG00000140718_135 (sequence is synthesized)
gtttcaagagtaaaggagaacaaagtagggtgacctagtctgaaggacaggcgcagaacagtcagtggaacagccagagatagcagcgagagaggtgagaagaggaccaggagtaggtgg

SEQ ID NO: 362644 - DNA, 120 bp, Artificial Sequence
  ENSG00000140718_136 (sequence is synthesized)
tagaatggagtggaggaaagtcagcgaatgtaatagtgtcgaaccctgcagggaagttaagaagtggccataccgttgcattcatcatgggaagaatttcagtagaatgacaaatgctgt

SEQ ID NO: 362645 - DNA, 120 bp, Artificial Sequence
  ENSG00000140718_137 (sequence is synthesized)
tggaaaaagaatgagttttggagtcaaaacccctgttatcttggaaaagccatttaacttccttgaccttcagtttcatcttgtgtaaaatcagaataataatgccaaccttatagagta

SEQ ID NO: 362646 - DNA, 120 bp, Artificial Sequence
  ENSG00000140718_138 (sequence is synthesized)
ggcagagcaaagccttccgactcaacttcatccccggccccacctggtgccagtcacgaattgcccgaacattacctgctgatcagaagccagaatgtcggccatactgggaaaaggatg

SEQ ID NO: 362647 - DNA, 75 bp, Artificial Sequence
  ENSG00000140718_139 (sequence is synthesized)
ctacaatcaatacagtgttgcctggaggcatctcttgcttcaaatttgcttcacaaatctgctgcagggtgaact

SEQ ID NO: 362648 - DNA, 66 bp, Artificial Sequence
  ENSG00000140718_140 (sequence is synthesized)
gcctcccaaagcactgggattacaggtatgagctaatgcctcagttctgagatcagctttggtggt

SEQ ID NO: 362649 - DNA, 120 bp, Artificial Sequence
  ENSG00000140718_141 (sequence is synthesized)
tttcttgacttacaaaaagacctatccctgagagataaaaagctcacaatgataagaattcaaaacactggaagatatatgttgtaggaacacaaaaacccactttcctccaagccacct

SEQ ID NO: 362650 - DNA, 120 bp, Artificial Sequence
  ENSG00000140718_142 (sequence is synthesized)
gtcctgacaaggctactccaatcttttcactgaatccttcagaaggccggaagatgagtgccggggagagacagttgtgctgacattactgcccgcattctctccagatgagctgagaca

SEQ ID NO: 362651 - DNA, 120 bp, Artificial Sequence
  ENSG00000140718_143 (sequence is synthesized)
cgtgcagcccagggcgggtcgtctggctggttttggttattcatcgcaggctgaagagtggccttggaatttcagagcagagactaatggcttttctcctgagaacatgcaatgatgtga

SEQ ID NO: 362652 - DNA, 120 bp, Artificial Sequence
  ENSG00000140718_144 (sequence is synthesized)
cattttagagagaagtcaaaacaccacaaaccatggggactatcagtgtttccaccactcgtaagtggcagatgaaaatcatggctaatcccgttacttctttttctgtccaaagtggct

SEQ ID NO: 362653 - DNA, 120 bp, Artificial Sequence
  ENSG00000140718_145 (sequence is synthesized)
tcgtaggtagagaaaggtgatccgagggaggtgatgtttgtgggctttgcgcatacaaataaaataggaaatgcatctctgagatagcagggatgacgggcacgtctcttaaacatgatt

SEQ ID NO: 362654 - DNA, 120 bp, Artificial Sequence
  ENSG00000140718_146 (sequence is synthesized)
cacgcatccttggccctcttgttgaggtttaacgatgtcttcgtggatccacttctccacttagcagcattccaaacacagtgaggggcataaaaaccacctgaagacacaccccctttg

SEQ ID NO: 362655 - DNA, 120 bp, Artificial Sequence
  ENSG00000140718_147 (sequence is synthesized)
ttagcaaaaagcttagcatctagcctgggaggatgttagggactgaactgtgtcccctcccacattcctatatggaagccctaacctccagcacctccgaatgactccaaatgagactgc

SEQ ID NO: 362656 - DNA, 120 bp, Artificial Sequence
  ENSG00000140718_148 (sequence is synthesized)
ctttggaaataaggtctttaaagaggtgatcaagttaaaatgagctctttagggtgggtgctgatccggtcacactggagtctttatgagaagaggaaagttagatgccaggcgtgtgca

SEQ ID NO: 362657 - DNA, 120 bp, Artificial Sequence
  ENSG00000140718_149 (sequence is synthesized)
tgcactaagattaaaaaaaatagccacacaaaaacacattgggaaggtggccgcctgcaagccaggagagaggcctcaaaagaaaccagccccgtggacaccttgatcttggatttctgg

SEQ ID NO: 362658 - DNA, 120 bp, Artificial Sequence
  ENSG00000140718_150 (sequence is synthesized)
aagctgtggtggctccacgtttctttagcgggcagtgttttatatatataggttaagattatcaccagctcctcctggcccatgggtcgagtttgagtggctgaggcagttttggtttca

SEQ ID NO: 362659 - DNA, 120 bp, Artificial Sequence
  ENSG00000140718_151 (sequence is synthesized)
agccatttggacagaagccctaaatggcccagaggcacagccatttagaactcttttcttttttttttttttttcagtagaatattttgacccccagaggtatgcgtagctatatcgggg

SEQ ID NO: 362660 - DNA, 120 bp, Artificial Sequence
  ENSG00000140718_152 (sequence is synthesized)
atccaaaggtttcacacaggatgagtcctgtgtctacatgcagcgtagcaggagctgggaatggaagcaaaccaatattccagcatctgcttctagaacagtgatcaggatcgctatcgt

SEQ ID NO: 362661 - DNA, 88 bp, Artificial Sequence
  ENSG00000140718_153 (sequence is synthesized)
ccagaaaaaaatgtttataaaaatagacacaggatcttgtcatgttgcccaggctggtcttaaactccttgcctcaagcgatcctctt

SEQ ID NO: 362662 - DNA, 120 bp, Artificial Sequence
  ENSG00000140718_154 (sequence is synthesized)
gacggtttcaactaaagtaatgactaaatgatttccaatttacctttcaataattaattttaaaattttctctgtattataagttaagcatgtatattcattaaagtatacatagtaagg

SEQ ID NO: 362663 - DNA, 120 bp, Artificial Sequence
  ENSG00000140718_155 (sequence is synthesized)
gaacaaaggaatgaaatcttgactgccatccttgcctcgctcactgcacgccagaacctgaggagagaatggcatgccagggcagagaggagtgttggtgccagtcacgaattgcccgaa

SEQ ID NO: 362664 - DNA, 120 bp, Artificial Sequence
  ENSG00000140718_156 (sequence is synthesized)
ccaatttacagattcatcaagagagaatgcctctcccatctcaagtttggcagcatggaatattacagtttgaaaacatcttttccaattttatggactaaaagtaacagaatttcttta

SEQ ID NO: 362665 - DNA, 120 bp, Artificial Sequence
  ENSG00000140718_157 (sequence is synthesized)
ctacgctcttccagctgtcggacctgggaaattctcctgtgctaaatcccgtggcgctcgcgggtgtcgccgcggtgcatcctgggagttgtagttttttctactcagagggagaatagc

SEQ ID NO: 362666 - DNA, 120 bp, Artificial Sequence
  ENSG00000140718_158 (sequence is synthesized)
gcagggtaagtgttaacagaagtgggacagaatttctgaagattcgcctttgtttatccagtcccctctgcctgatggacagcttgttatagcttttaaagaactgggcgagccctctga

SEQ ID NO: 362667 - DNA, 120 bp, Artificial Sequence
  ENSG00000140718_159 (sequence is synthesized)
tctgaccccttcttgacctgcgtagcccaaaggtcagtctgcagctaataaactctgaggttcttagggtctactgtaggaaaaggcagaaaaagagcagctgcaaggaccgggtgtccc

SEQ ID NO: 362668 - DNA, 120 bp, Artificial Sequence
  ENSG00000140718_160 (sequence is synthesized)
aggataggctactttagggtcactctctgataatgaaaatgattaccaaattatatggaagtttaactgcaatcgtgagtgagaggagggtggggcccggcgtattaggtttgataaatg

SEQ ID NO: 362669 - DNA, 120 bp, Artificial Sequence
  ENSG00000140718_161 (sequence is synthesized)
aactgtgaagaggcccatctggctctcaacatcttttctccccctctttccctaccaaggggaaacattttaaaataacagcagtacatatagactcaatgacccatgcaaggagctgga

SEQ ID NO: 362670 - DNA, 120 bp, Artificial Sequence
  ENSG00000140718_162 (sequence is synthesized)
atggattaagatttaatggtgacagtggaagaaattatcatttgaaaagtgctccaaagaaaaggtacagttcaatgtccacacccgagttgtctttctaaataaaatataataaaaatc

SEQ ID NO: 362671 - DNA, 120 bp, Artificial Sequence
  ENSG00000140740_0 (sequence is synthesized)
ctccgccaccatcttgctttcctttaatccggcagtgaccgtgtgtcagaacaatcttgaatcatgaagctactaaccagagccggctctttctcgagattttattccctcaaagttgcc

SEQ ID NO: 362672 - DNA, 120 bp, Artificial Sequence
  ENSG00000140740_1 (sequence is synthesized)
cccaaagttaaagccacagctgcgcctgcaggagcaccgccacaacctcaggaccttgagtttaccaagttaccaaatggcttggtgattgcttctttggaaaactattctcctgtatca

SEQ ID NO: 362673 - DNA, 120 bp, Artificial Sequence
  ENSG00000140740_2 (sequence is synthesized)
agaattggtttgttcattaaagcaggcagtagatatgaggacttcagcaatttaggaaccacccatttgctgcgtcttacatccagtctgacgacaaaaggagcttcatctttcaagata

SEQ ID NO: 362674 - DNA, 120 bp, Artificial Sequence
  ENSG00000140740_3 (sequence is synthesized)
acccgtggaattgaagcagttggtggcaaattaagtgtgaccgcaacaagggaaaacatggcttatactgtggaatgcctgcggggtgatgttgatattctaatggagttcctgctcaat

SEQ ID NO: 362675 - DNA, 120 bp, Artificial Sequence
  ENSG00000140740_4 (sequence is synthesized)
gtcaccacagcaccagaatttcgtcgttgggaagtagctgaccttcagcctcagctaaagattgacaaagctgtggcctttcagaatccgcagactcatgtcattgaaaatttgcatgca

SEQ ID NO: 362676 - DNA, 120 bp, Artificial Sequence
  ENSG00000140740_5 (sequence is synthesized)
gcagcttaccggaatgccttggctaatcccttgtattgtcctgactataggattggaaaagtgacatcagaggagttacattacttcgttcagaaccatttcacaagtgcaagaatggct

SEQ ID NO: 362677 - DNA, 120 bp, Artificial Sequence
  ENSG00000140740_6 (sequence is synthesized)
ttgattggacttggtgtgagtcatcctgttctaaagcaagttgctgaacagtttctcaacatgaggggtgggcttggtttatctggtgcaaaggccaactaccgtggaggtgaaatccga

SEQ ID NO: 362678 - DNA, 120 bp, Artificial Sequence
  ENSG00000140740_7 (sequence is synthesized)
catgtcaagaggggcagcaacaccaccagccatctgcaccaggctgttgccaaggcaactcagcagccatttgatgtttctgcatttaatgccagttactcagattctggactctttggg

SEQ ID NO: 362679 - DNA, 120 bp, Artificial Sequence
  ENSG00000140740_8 (sequence is synthesized)
atttatactatctcccaggccacagctgctggagatgttatcaaggctgcctataatcaagtaaaaacaatagctcaaggaaacctttccaacacagatgtccaagctgccaagaacaag

SEQ ID NO: 362680 - DNA, 120 bp, Artificial Sequence
  ENSG00000140740_9 (sequence is synthesized)
ctgaaagctggatacctaatgtcagtggagtcttctgagtgtttcctggaagaagtcgggtcccaggctctagttgctggttcttacatgccaccatccacagtccttcagcagattgat

SEQ ID NO: 362681 - DNA, 120 bp, Artificial Sequence
  ENSG00000140740_10 (sequence is synthesized)
tcagtggctaatgctgatatcataaatgcggcaaagaagtttgtttctggccagaagtcaatggcagcaagtggaaatttgggacatacaccttttgttgatgagttgtaatactgatgc

SEQ ID NO: 362682 - DNA, 120 bp, Artificial Sequence
  ENSG00000140740_11 (sequence is synthesized)
acacattacaggagagagctgaacgttctctcagcccagagcagcaaacacatgaaagtcagaagtctctaatatatcatttgtcttttttccagtgaggtaaaataaggcataaatgca

SEQ ID NO: 362683 - DNA, 120 bp, Artificial Sequence
  ENSG00000140740_12 (sequence is synthesized)
ggtaattattcccagctgacctaaagtcaataaaacattctgtttaagtgtttttcttacgtttttctcaatgagttaatcaacaagtatttattatgtgctgatatctttgttttagat

SEQ ID NO: 362684 - DNA, 120 bp, Artificial Sequence
  ENSG00000140740_13 (sequence is synthesized)
gctttaaaggagacaggaatataattattgagtatagaagcatcagaaactattaaaattaaggctaagtggctatcggggtaaatagtgccagattactattggtggcgtttaagatga

SEQ ID NO: 362685 - DNA, 120 bp, Artificial Sequence
  ENSG00000140740_14 (sequence is synthesized)
aagcaagttcaaaatttgtcattttgggtgtcaacagctaaatggtctggtttttacccctgttttgccttttttgcaataaaattatttccaaaaaacatacatttcctatcaatcata

SEQ ID NO: 362686 - DNA, 120 bp, Artificial Sequence
  ENSG00000140740_15 (sequence is synthesized)
tgaagcagttggtggcaaattaagtgttcacagcatcttcaaccaggagcagattctatctcaagaaaccactttgtttgctcatccataagaagcatctcctcatctgttcaagcttta

SEQ ID NO: 362687 - DNA, 120 bp, Artificial Sequence
  ENSG00000140740_16 (sequence is synthesized)
gagtcatccataagggttggaattggcttcttccaaactcacgttaatgttgatactttgacatcctcccatgagtcacaaatgttcttaatggtgtctagaatggtgaattctttccag

SEQ ID NO: 362688 - DNA, 120 bp, Artificial Sequence
  ENSG00000140740_17 (sequence is synthesized)
ttcttaatggtgtctagaatggtgaattctttccagaaagttttttaatttactttgcccagatccatcagcgtcttcactatctgtggtagctgtagccttacaaaatgtatttcttaa

SEQ ID NO: 362689 - DNA, 120 bp, Artificial Sequence
  ENSG00000140740_18 (sequence is synthesized)
atccggcagtgaccgtgtgtcagaacaatcttgaatcatgaagctactaaccagagccggctctttctcgtttaccaagttaccaaatggcttggtgattgcttctttggaaaactattc

SEQ ID NO: 362690 - DNA, 120 bp, Artificial Sequence
  ENSG00000140740_19 (sequence is synthesized)
tatgacagagtcatgatgagaccactatacagccattacggaatgaactagatccatacgtcaacatagcacaactgaagggcaaaatagagtgtgaacaagcaagtttcaagatttctt

SEQ ID NO: 362691 - DNA, 120 bp, Artificial Sequence
  ENSG00000140740_20 (sequence is synthesized)
gcttattatccttagcataatgtcctcagggttcatctgtgttgtaacatgtgaccagatttcactccttttaaggttgaattatttgctggtttttaaaaaaattttgaattttagttg

SEQ ID NO: 362692 - DNA, 120 bp, Artificial Sequence
  ENSG00000140740_21 (sequence is synthesized)
gttaatatgtggagttttgttatattattgttcgcaccttttatacttcagaaattttctttccaaaggaattggttgatagaagattataagggaaagcttactatcctgattcagatg

SEQ ID NO: 362693 - DNA, 120 bp, Artificial Sequence
  ENSG00000140740_22 (sequence is synthesized)
atttactctagtttattttccgattcagtgtgaccgcaacaagggaaaacatggcttatactgtggaatgcctgcggggtgatgtgtaagtacctgtgtgtgtttaggacttctgctttg

SEQ ID NO: 362694 - DNA, 120 bp, Artificial Sequence
  ENSG00000140740_23 (sequence is synthesized)
aaagaaatactaagctgctcacttctggtctttgtaatgcgtcattatgacctctgacttccattttggattattgttcataaactgctcaaaaacactgcttaccacaagacctaaagt

SEQ ID NO: 362695 - DNA, 120 bp, Artificial Sequence
  ENSG00000140740_24 (sequence is synthesized)
tgagaagtacagaaaagcgtaaaaagggaaacatacccatatcctaccacctaaagatataattgttaacattttggccaggcacagtggctcactaatcccagcactttgggaggccaa

SEQ ID NO: 362696 - DNA, 120 bp, Artificial Sequence
  ENSG00000140740_25 (sequence is synthesized)
gaccagcttgggcaacatagcaagacctcgtctccaccaaaattagagaataattgttaacatttttcttagtttattgatcatgcatttttaaacataattgttaatattgtatatata

SEQ ID NO: 362697 - DNA, 120 bp, Artificial Sequence
  ENSG00000140740_26 (sequence is synthesized)
ataattgttaatattgtatatatagatgctgcttgacttacactggggttacgtcctgagaaatgcgcatatcgaaaatgcatttaataccctaataacccagtcatccagccaaacaaa

SEQ ID NO: 362698 - DNA, 120 bp, Artificial Sequence
  ENSG00000140740_27 (sequence is synthesized)
cataagtcaaaccatcataagttaagttagggaccatctgtatacttttttatcttatttaaatagcatccttattatagaagtttgaaaattacaaataaaagacaaaaatgatctctg

SEQ ID NO: 362699 - DNA, 120 bp, Artificial Sequence
  ENSG00000140740_28 (sequence is synthesized)
atttccctagcaatgattctgtttccattgattcaaattactaaaaatttaaacaatattcattggtgtgtcaaaatacacttgtgcattttctgcagttataaagatatctttgggctt

SEQ ID NO: 362700 - DNA, 120 bp, Artificial Sequence
  ENSG00000140740_29 (sequence is synthesized)
ataataaaatcccagggtaattcacctcagttagtaccttgtagttcattacagcaacttataaggccttataagtatttattttcttccaaactgtacttttatgtttttacagctttt

SEQ ID NO: 362701 - DNA, 120 bp, Artificial Sequence
  ENSG00000140740_30 (sequence is synthesized)
tcactcaaatctgtagcagcatatggacccacaaatggaggccaaagtgggccctcaattggacactttggcaaccctgaagagacttcttcccttcagacttactgttttagtatgttc

SEQ ID NO: 362702 - DNA, 120 bp, Artificial Sequence
  ENSG00000140740_31 (sequence is synthesized)
cagagaagggagtggcattcttcttggggaattcaggaagagggagacacgctgttactctatccattaaataaagctttgatgttcacagccccccgccaccactcagaaaaaaaaaat

SEQ ID NO: 362703 - DNA, 120 bp, Artificial Sequence
  ENSG00000140743_0 (sequence is synthesized)
ctgccaaagtgccacgttgggcccggcggcggcgtgaagactggcggctgcgtgagactccggctccaggcgttcgcaccgtaatgcccggccgttggggccgtcggtaggcgcgaggcg

SEQ ID NO: 362704 - DNA, 80 bp, Artificial Sequence
  ENSG00000140743_1 (sequence is synthesized)
gaacggggctgaggcggcgcagcggagtctgggcggcggcgcgtcccgcccgagggcggctctggctgagggcggagggg

SEQ ID NO: 362705 - DNA, 120 bp, Artificial Sequence
  ENSG00000140743_2 (sequence is synthesized)
ggaagagcccggggcagcggctgaggcgggacggcggcgggggccgctgcccctagaagacccagccgagatgctggcggaaaacctggtagaggagtttgagatgaaggaggacgagcc

SEQ ID NO: 362706 - DNA, 120 bp, Artificial Sequence
  ENSG00000140743_3 (sequence is synthesized)
gtggtacgaccaccaggacctccagcaagatcttcaacttgctgctgagcttgggaagacattactggatcggaacacagagttggaggactctgttcagcagatgtatacaaccaatca

SEQ ID NO: 362707 - DNA, 120 bp, Artificial Sequence
  ENSG00000140743_4 (sequence is synthesized)
ggagcagttacaggaaattgagtatctgacgaagcaagtggaacttctacggcagatgaacgaacaacatgcaaaggtttatgaacaattagacgtcacagcaagggaactggaagaaac

SEQ ID NO: 362708 - DNA, 120 bp, Artificial Sequence
  ENSG00000140743_5 (sequence is synthesized)
aaatcaaaagctagttgctgacagcaaggcctcacagcaaaagattctgagcctgactgaaacgattgaatgcctgcaaaccaacattgatcacctccagagccaagtggaggagctgaa

SEQ ID NO: 362709 - DNA, 120 bp, Artificial Sequence
  ENSG00000140743_6 (sequence is synthesized)
gtcatctggccaagggagaaggagcccgggaaagtgtgaccaggagaaaccggcacccagctttgcatgtctgaaggagctgtatgacctccgccaacacttcgtgtatgatcatgtgtt

SEQ ID NO: 362710 - DNA, 120 bp, Artificial Sequence
  ENSG00000140743_7 (sequence is synthesized)
cgctgagaagatcacttccttgcaaggtcagccaagccctgatgaagaggaaaatgagcacttgaaaaaaacagtgacaatgttgcaggcccagctgagcctggagcggcagaagcgggt

SEQ ID NO: 362711 - DNA, 120 bp, Artificial Sequence
  ENSG00000140743_8 (sequence is synthesized)
gactatggaggaggaatatgggctcgtgttaaaggagaacagtgaactggagcagcagctgggggccacaggtgcctaccgagcacgggcgctggaactagaggccgaggtggcagagat

SEQ ID NO: 362712 - DNA, 120 bp, Artificial Sequence
  ENSG00000140743_9 (sequence is synthesized)
gcgacagatgttgcagtcagagcatccatttgtgaatggagttgagaagctggtgccagactctctgtatgttcctttcaaagagcccagccagagcctgctggaagagatgttcctgac

SEQ ID NO: 362713 - DNA, 120 bp, Artificial Sequence
  ENSG00000140743_10 (sequence is synthesized)
tgtgccggaatcacatagaaagcctctcaagcgcagcagcagtgagacgatcctcagcagcttggcagggagtgacatcgtgaagggccacgaggagacctgcatcaggagggccaaggc

SEQ ID NO: 362714 - DNA, 120 bp, Artificial Sequence
  ENSG00000140743_11 (sequence is synthesized)
aagtatgaagagttgctgaagaagtgccaagaggaacaggactccctgtcacacaaggctgtgcagacctccagggctgcagccaaggacctgactggagtgaacgcccagtctgagcct

SEQ ID NO: 362715 - DNA, 120 bp, Artificial Sequence
  ENSG00000140743_12 (sequence is synthesized)
gttgccagcggctgggaactggcctctgtcaacccagagcccgtgagttcccctacaacacctccagaatacaaagcgttgtttaaggagatctttagttgcatcaagaaaactaagcag

SEQ ID NO: 362716 - DNA, 120 bp, Artificial Sequence
  ENSG00000140743_13 (sequence is synthesized)
gaaatagatgaacagagaacaaaataccgatcactctcctctcattcttaattgaacctctagctctactactaatttgcctattgcctatcgcctctctctcccattcagacaagtgtt

SEQ ID NO: 362717 - DNA, 120 bp, Artificial Sequence
  ENSG00000140743_14 (sequence is synthesized)
tgtagactctgaagcctaatgttactcatgacgtttgcctcattgctttgcttatttagcaaatgcatacaacgaggaaaggaggtggctagtggtatcagttctctgatccacttccat

SEQ ID NO: 362718 - DNA, 120 bp, Artificial Sequence
  ENSG00000140743_15 (sequence is synthesized)
ttaagctccccaggaaatcccatgacaaactggcctctggctggcgcgctgattagacttcagttcctgaaaaggaccagtggagggaagagctatacttctggagaagtaggcctggag

SEQ ID NO: 362719 - DNA, 120 bp, Artificial Sequence
  ENSG00000140743_16 (sequence is synthesized)
ttactacagtatgggggaaaagggtcgagttagaacaaagctaaggcaattcctattgcttccttgcgcaacttctcaaaacgatgaaagtcagaaggctgtcaaactcaaatatctttg

SEQ ID NO: 362720 - DNA, 120 bp, Artificial Sequence
  ENSG00000140743_17 (sequence is synthesized)
caaacagtttgaatactgtgaattcattacgaagaatgttcgagagaaagcaggggtctaatccaaaagaaatgtcattaaccaatactccaagtccttgagttttgttatatctgaact

SEQ ID NO: 362721 - DNA, 120 bp, Artificial Sequence
  ENSG00000140743_18 (sequence is synthesized)
agttgaactgtgactgacaggtaatcctaatatatccaaatccaactgaataccaaattgagatggcaaatttttgtttgatataagttagcttgttagcatatgccctagagggcctcc

SEQ ID NO: 362722 - DNA, 120 bp, Artificial Sequence
  ENSG00000140743_19 (sequence is synthesized)
atccctgtattctaatgtttttactcaaagctctagcctttaggataggtgaatatgtaaatcttttatcactttctcaaattcaaactaaaggggaaagatcaaaccccttcccttcct

SEQ ID NO: 362723 - DNA, 120 bp, Artificial Sequence
  ENSG00000140743_20 (sequence is synthesized)
acctgttttctgagctggctgacttgccagccacaagctgctcttgcagagttcttaccattcctgtaaatgttttgacttgttgcagaaattcctatctactttattaagcagtattga

SEQ ID NO: 362724 - DNA, 120 bp, Artificial Sequence
  ENSG00000140743_21 (sequence is synthesized)
tctgactgtggaaacatcctctcacttgcattcttttaacttaaaactatttaagaactgatgttccgattattgtatatatttttctaaaaaccaaataaagctacctatgaaaatgaa

SEQ ID NO: 362725 - DNA, 120 bp, Artificial Sequence
  ENSG00000140743_22 (sequence is synthesized)
agagcctgcctttctgtggagttacagcagggactgtctcatgtcattggcacattctgatttccagtagattgaaagtaccattttaagaaaagtcacttagctattaagctaccattg

SEQ ID NO: 362726 - DNA, 120 bp, Artificial Sequence
  ENSG00000140743_23 (sequence is synthesized)
agcacgttggttaagatggtgagcagctcaaagagtgaggatggatgaagcaaagcagaggccgctgcccctgtaagtaccagctcgtcttctgctacaccatcatcgagaggaacaatc

SEQ ID NO: 362727 - DNA, 120 bp, Artificial Sequence
  ENSG00000140743_24 (sequence is synthesized)
gccagatgctgccagtcattaggagtaccactggaggagactcagtgcagacctgcacaaacccactggacaccttcgtcccctttgatccctgtgtgctgaagagacctgcctttcgcc

SEQ ID NO: 362728 - DNA, 120 bp, Artificial Sequence
  ENSG00000140743_25 (sequence is synthesized)
ggggaggcgacgtctcttccagggccgtgcgcggcccacgtcgccggggccgcggaggacgaggacgacgaggagcaggcggtggcggcagctcctcacgctcacaaggccactgctaac

SEQ ID NO: 362729 - DNA, 120 bp, Artificial Sequence
  ENSG00000140743_26 (sequence is synthesized)
ccgcctcccggctccgctggccgcgccgccgctatcgcacgggattcgcagaggcatttttggaacatctttggaaaaaattgcaggatccaagtaatcctgccatcatcaggcaggctg

SEQ ID NO: 362730 - DNA, 120 bp, Artificial Sequence
  ENSG00000140743_27 (sequence is synthesized)
ctggaaattatattggaagctttttggcaagagctaaatttattcctcttattactgtaaaaccatgcctagatcttttggttaactggctgcacatataccttaataaccaggattcgg

SEQ ID NO: 362731 - DNA, 120 bp, Artificial Sequence
  ENSG00000140743_28 (sequence is synthesized)
cctgaaagaaggtttgcagtatcttcagagtctgaattttgagcggatagtgatgagccagctaaatcccctgaagatttgcctgccctcagtggttaacttttttgctgcaatcacaaa

SEQ ID NO: 362732 - DNA, 120 bp, Artificial Sequence
  ENSG00000140743_29 (sequence is synthesized)
agagtcaagatgcgagaaggggtggccgggcggcggacctcaggcttccggcacccttgcgcttcccgccggcacgaaggactcccctggacaaccgcccgcctctcagaggccggagtc

SEQ ID NO: 362733 - DNA, 120 bp, Artificial Sequence
  ENSG00000140749_0 (sequence is synthesized)
atacacagaaatggggactgcgagcagaagcaacatcgctcgccatctgcaaaccaatctcattctattttgtgtcggtgctgtgggcgcctgtactctctctgtcacacaaccgtggta

SEQ ID NO: 362734 - DNA, 120 bp, Artificial Sequence
  ENSG00000140749_1 (sequence is synthesized)
cctagaagtggactacactcatgaggccgtcaccataaagtgtaccttctccgcaaccggatgcccttctgagcaaccaacatgcctgtggtttcgctacggtgctcaccagcctgagaa

SEQ ID NO: 362735 - DNA, 120 bp, Artificial Sequence
  ENSG00000140749_2 (sequence is synthesized)
cctgtgcttggacgggtgcaaaagtgaggcagacaagttcacagtgagggaggccctcaaagaaaaccaagtttccctcactgtaaacagagtgacttcaaatgacagtgcaatttacat

SEQ ID NO: 362736 - DNA, 120 bp, Artificial Sequence
  ENSG00000140749_3 (sequence is synthesized)
ctgtggaatagcattccccagtgtgccggaagcgagagctaaacagacaggaggagggaccacactggtggtaagagaaattaagctgctcagcaaggaactgcggagcttcctgacagc

SEQ ID NO: 362737 - DNA, 120 bp, Artificial Sequence
  ENSG00000140749_4 (sequence is synthesized)
tcttgtatcactgctctctgtctatgtgaccggtgtgtgcgtggccttcatactcctctccaaatcaaaatccaaccctctaagaaacaaagaaataaaagaagactcacaaaagaagaa

SEQ ID NO: 362738 - DNA, 120 bp, Artificial Sequence
  ENSG00000140749_5 (sequence is synthesized)
gagtgctcggcgtatttttcaggaaattgctcaagaactataccataagagacatgtggaaacaaatcagcaatctgagaaagataacaacacttatgaaaacagaagagtactttccaa

SEQ ID NO: 362739 - DNA, 120 bp, Artificial Sequence
  ENSG00000140749_6 (sequence is synthesized)
ctatgaaaggccatagaaacgttttaattttcaatgaagtcactgaaaatccaactccaggagctatggcagtgttaatgaacatatatcatcaggtcttaaaaaaaaataaaggtaaac

SEQ ID NO: 362740 - DNA, 120 bp, Artificial Sequence
  ENSG00000140749_7 (sequence is synthesized)
tgaaaagacaactggctacaaagaaggatgtcagaatgtaaggaaactataactaatagtcattaccaaaatactaaaacccaacaaaatgcaactgaaaaataccttccaaatttgcca

SEQ ID NO: 362741 - DNA, 120 bp, Artificial Sequence
  ENSG00000140749_8 (sequence is synthesized)
agaaaaaaaattctattttaaacttgtatcctgagtctgtttcattcaacatgagatgtgtgatgactgccatcctgaagatctgaagccaaaccatgtgcctcagtcttgagtggaaga

SEQ ID NO: 362742 - DNA, 120 bp, Artificial Sequence
  ENSG00000140749_9 (sequence is synthesized)
atcacctttatggtttgtggaaatcatggcacaattaaaataagttgggagggacaacgtgacaaaatttgagttagagacattcattttgaaaagcaccttagtaaagttatttcctct

SEQ ID NO: 362743 - DNA, 120 bp, Artificial Sequence
  ENSG00000140749_10 (sequence is synthesized)
gatgttgtaatggggcagtggggtaacgcacatttgcctgccagggtatgcaaagtaacttacatcatgctatcagcaaaatgagaataatatagtggctagagtaagaccataaaagcc

SEQ ID NO: 362744 - DNA, 120 bp, Artificial Sequence
  ENSG00000140749_11 (sequence is synthesized)
gccacaacggactctagatgtcagtgttgtgccaaataacagcaccagggaagatgtgggcaacacatctactttacaagcacgtttgtaatactgattttttttcttttcttttttttt

SEQ ID NO: 362745 - DNA, 120 bp, Artificial Sequence
  ENSG00000140749_12 (sequence is synthesized)
attacaggcgtgagccaccgcgcacagtctataatactgatttttaaccaatttaggagggaaatgtcagataggaggcatggtacaaggatatttatggaattcattaccacttcacta

SEQ ID NO: 362746 - DNA, 120 bp, Artificial Sequence
  ENSG00000140749_13 (sequence is synthesized)
accacttcactaagaaaacatgatataaattgtcctttgaaagctactttggtataaaaaaatctaaagtgcccataagtatgcattcattattagacacaaattacaaccttacaacct

SEQ ID NO: 362747 - DNA, 70 bp, Artificial Sequence
  ENSG00000140749_14 (sequence is synthesized)
atgcattcattattagacacaaattacaaccttacaacctactatgtttatttcattaaagtgtctcttt

SEQ ID NO: 362748 - DNA, 120 bp, Artificial Sequence
  ENSG00000140749_15 (sequence is synthesized)
aaactggtattgcctaaggtgtattctttataaaacttagaattgttaaatattttaagattcctttgaaagtgtttttgcattgatggtttaaatcagtgatatcaaactttcctgatc

SEQ ID NO: 362749 - DNA, 120 bp, Artificial Sequence
  ENSG00000140749_16 (sequence is synthesized)
ctatgtgcccagaaaaatgggcaggggaaaggaggcagcatggaacctcatttttttgtgtgtatctgtgtgtacacgtgagtgcacatgtgtatatgtgtggggccacatgtgttttgt

SEQ ID NO: 362750 - DNA, 120 bp, Artificial Sequence
  ENSG00000140749_17 (sequence is synthesized)
atacggtatatgcatgaaaatgtacctttgtaccttatacacaaaaacaaattaaacaatggcataagcagcaatataaataaaaaatgctaatactttcctgccatattccaaaataaa

SEQ ID NO: 362751 - DNA, 120 bp, Artificial Sequence
  ENSG00000140749_18 (sequence is synthesized)
gacgggtgcaaaaaaattaagctgctcagcaaggaactgcggagcttcctgacagctcttgtatcactgctctctgtctatgtgaccggtgtgtgcgtggccttcatactcctctccaaa

SEQ ID NO: 362752 - DNA, 72 bp, Artificial Sequence
  ENSG00000140749_19 (sequence is synthesized)
taccctagccagtgatgggtgtgatctgaacacaagtcaccatgaggtttggactaaagaactactccctga

SEQ ID NO: 362753 - DNA, 120 bp, Artificial Sequence
  ENSG00000140749_20 (sequence is synthesized)
gaggcgaaggttgcagtgaaccgagatcgcactactgcactccagtctgggcaacaaagcaagactccatctcagaaaaacaaaagaactactccaatccatctcgaacatccactaaca

SEQ ID NO: 362754 - DNA, 120 bp, Artificial Sequence
  ENSG00000140749_21 (sequence is synthesized)
caaagtcagtgatttgctgggtgctctattctccctacatggtgatgtttaaccaaccatgttcacctcttttgtatattacagtgatttagtgtaaagtaccatgtccaaagggaacct

SEQ ID NO: 362755 - DNA, 120 bp, Artificial Sequence
  ENSG00000140749_22 (sequence is synthesized)
tgtggtgagtaactatcagctttctcaggaactagtctggtaatgcaccacctagaacaaagcactagagaagtgtaaaagatcaataaattggacccacagaaactatgcaacatggag

SEQ ID NO: 362756 - DNA, 120 bp, Artificial Sequence
  ENSG00000140750_0 (sequence is synthesized)
caccgccgcgccgccgtttgggccgggaagcgatgtagtagctgccaggctgtcccccgccctgcccggcccgagccccgcgggccgccgccgccaccgccgccatgaagaagcagttca

SEQ ID NO: 362757 - DNA, 120 bp, Artificial Sequence
  ENSG00000140750_1 (sequence is synthesized)
ttcaaccgcatgaagcagctggctaaccagaccgtgggcagagctgagaaaacagaagtccttagtgaagatctattacagattgagagacgcctggacacggtgcggtcaatatgccac

SEQ ID NO: 362758 - DNA, 120 bp, Artificial Sequence
  ENSG00000140750_2 (sequence is synthesized)
cattcccataagcgcttggtggcatgtttccagggccagcatggcaccgatgccgagaggagacacaaaaaactgcctctgacagctcttgctcaaaatatgcaagaagcatcgactcag

SEQ ID NO: 362759 - DNA, 120 bp, Artificial Sequence
  ENSG00000140750_3 (sequence is synthesized)
ctggaagactctctcctggggaagatgctggagacgtgtggagatgctgagaatcagctggctctcgagctctcccagcacgaagtctttgttgagaaggagatcgtggaccctctgtac

SEQ ID NO: 362760 - DNA, 120 bp, Artificial Sequence
  ENSG00000140750_4 (sequence is synthesized)
ggcatagctgaggtggagattcccaacatccagaagcagaggaagcagcttgcaagattggtgttagactgggattcagtcagagccaggtggaaccaagctcacaaatcctcaggaacc

SEQ ID NO: 362761 - DNA, 120 bp, Artificial Sequence
  ENSG00000140750_5 (sequence is synthesized)
aactttcaggggcttccatcaaaaatagatactctaaaggaagagatggatgaagctggaaataaagtagaacagtgcaaggatcaacttgcagcagacatgtacaactttatggccaaa

SEQ ID NO: 362762 - DNA, 120 bp, Artificial Sequence
  ENSG00000140750_6 (sequence is synthesized)
gaaggggagtatggcaaattctttgttacgttattagaagcccaagcagattaccatagaaaagcattagcagtcttagaaaagaccctccccgaaatgcgagcccatcaagataagtgg

SEQ ID NO: 362763 - DNA, 120 bp, Artificial Sequence
  ENSG00000140750_7 (sequence is synthesized)
gcggaaaaaccagcctttgggactcccctagaagaacacctgaagaggagcgggcgcgagattgcgctgcccattgaagcctgtgtcatgctgcttctggagacaggcatgaaggaggag

SEQ ID NO: 362764 - DNA, 120 bp, Artificial Sequence
  ENSG00000140750_8 (sequence is synthesized)
ggccttttccgaattggggctggggcctccaagttaaagaagctgaaagctgctttggactgttctacttctcacctggatgagttctattcagacccccatgctgtagcaggtgcttta

SEQ ID NO: 362765 - DNA, 120 bp, Artificial Sequence
  ENSG00000140750_9 (sequence is synthesized)
aaatcctatttacgggaattgcctgaacctttgatgacttttaatctgtatgaagaatggacacaagttgcaagtgtgcaggatcaagacaaaaaacttcaagacttgtggagaacatgt

SEQ ID NO: 362766 - DNA, 120 bp, Artificial Sequence
  ENSG00000140750_10 (sequence is synthesized)
cagaagttgccaccacaaaattttgttaactttagatatttgatcaagttccttgcaaagcttgctcagaccagcgatgtgaataaaatgactcccagcaacattgcgattgtgttaggc

SEQ ID NO: 362767 - DNA, 120 bp, Artificial Sequence
  ENSG00000140750_11 (sequence is synthesized)
cctaacttgttatgggccagaaatgaaggaacacttgctgaaatggcagcagccacatccgtccatgtggttgcagtgattgaacccatcattcagcatgccgactggttcttccctgaa

SEQ ID NO: 362768 - DNA, 120 bp, Artificial Sequence
  ENSG00000140750_12 (sequence is synthesized)
gaggtggaatttaatgtatcagaagcatttgtacctctcaccaccccgagttctaatcactcattccacactggaaacgactctgactcggggaccctggagaggaagcggcctgctagc

SEQ ID NO: 362769 - DNA, 120 bp, Artificial Sequence
  ENSG00000140750_13 (sequence is synthesized)
atggcggtgatggaaggagacttggtgaagaaggaaagctttggtgtgaagcttatggacttccaggcccaccggcggggtggcactctaaatagaaagcacatatcccccgctttccag

SEQ ID NO: 362770 - DNA, 120 bp, Artificial Sequence
  ENSG00000140750_14 (sequence is synthesized)
acagatggcagcaccgtggtgcccgctggcccagagccccctccccagagctctagggctgaaagcagctctgggggtgggactgtcccctcttccgcgggcatactggagcaggggccg

SEQ ID NO: 362771 - DNA, 120 bp, Artificial Sequence
  ENSG00000140750_15 (sequence is synthesized)
agcccaggcgacggcagtcctcccaaaccgaaggaccctgtatctgcagctgtgccagcaccagggagaaacaacagtcagatagcatctggccaaaatcagccccaggcagctgctggc

SEQ ID NO: 362772 - DNA, 120 bp, Artificial Sequence
  ENSG00000140750_16 (sequence is synthesized)
tcccaccagctctccatgggccaacctcacaatgctgcagggcccagcccgcatacactgcgccgagctgttaaaaaacccgctccagcacccccgaaaccgggcaacccacctcctggc

SEQ ID NO: 362773 - DNA, 120 bp, Artificial Sequence
  ENSG00000140750_17 (sequence is synthesized)
caccccgggggccagagttcttcaggaacatctcagcatccacccagtctgtcaccaaagccacccacccgaagcccctctcctcccacccagcacacgggccagcctccaggccagccc

SEQ ID NO: 362774 - DNA, 120 bp, Artificial Sequence
  ENSG00000140750_18 (sequence is synthesized)
tccgccccctcccagctctcagcaccccggaggtactccagcagcttgtctccaatccaagctcccaatcacccaccgccgcagccccctacgcaggccacgccactgatgcacaccaaa

SEQ ID NO: 362775 - DNA, 120 bp, Artificial Sequence
  ENSG00000140750_19 (sequence is synthesized)
cccaatagccagggccctcccaaccccatggcattgcccagtgagcatggacttgagcagccatctcacacccctccccagactccaacgccccccagtactccgcccctaggaaaacag

SEQ ID NO: 362776 - DNA, 120 bp, Artificial Sequence
  ENSG00000140750_20 (sequence is synthesized)
aaccccagtctgccagctcctcagaccctggcagggggtaaccctgaaactgcacagccacatgctggaaccttaccgagaccgagaccagtaccaaagccaaggaaccggcccagcgtg

SEQ ID NO: 362777 - DNA, 120 bp, Artificial Sequence
  ENSG00000140750_21 (sequence is synthesized)
cccccacccccccaacctcctggtgtccactcagctggggacagcagcctcaccaacacagcaccaacagcttccaagatagtaacagactccaattccagggtttcagaaccgcatcgc

SEQ ID NO: 362778 - DNA, 120 bp, Artificial Sequence
  ENSG00000140750_22 (sequence is synthesized)
agcatctttcctgaaatgcactcagactcagccagcaaagacgtgcctggccgcatcctgctggatatagacaatgataccgagagcactgccctgtgaagaaagccctttcccagccct

SEQ ID NO: 362779 - DNA, 120 bp, Artificial Sequence
  ENSG00000140750_23 (sequence is synthesized)
ccaccacttccaccctggcgagtggagcaggggcaggcgaacctctttctttgcagaccgaacagtgaaaagctttcagtggaggacaaaggagggcctcactgtgcgggacctggcctt

SEQ ID NO: 362780 - DNA, 120 bp, Artificial Sequence
  ENSG00000140750_24 (sequence is synthesized)
ctgcacggcccaaggagaacctggaggccaccactaaagctgaatgacctgtgtcttgaagaagttggctttctttacatgggaaggaaatcatgccaaaaaaatccaaaacaaagaagt

SEQ ID NO: 362781 - DNA, 120 bp, Artificial Sequence
  ENSG00000140750_25 (sequence is synthesized)
acctggagtggagagagtattcctgctgaaacgcgcataggaagcttttgtccctgctgttaatgcgggcagcacctacagcaacttggaatgagtaagaagcagtgcgttaactatcta

SEQ ID NO: 362782 - DNA, 120 bp, Artificial Sequence
  ENSG00000140750_26 (sequence is synthesized)
tttaataaaatgcgctcattatgcaagtcgcctactctctgctacctggacgttcattcttatgtattaggagggaggctgcgctccttcagacttgctgcagaatcattttgtatcatg

SEQ ID NO: 362783 - DNA, 120 bp, Artificial Sequence
  ENSG00000140750_27 (sequence is synthesized)
tatggtctgtgtctccccagtcccctcagaaccatgcccatggatggtgactgctggctctgtcacctcatcaaactggatgtgacccatgccgcctcgttggattgtcggaatgtagac

SEQ ID NO: 362784 - DNA, 120 bp, Artificial Sequence
  ENSG00000140750_28 (sequence is synthesized)
agaaatgtactgttcttttttttttttttaaacaatgtaattgctacttgataaggaccgaacattattctagtttcatgtttaatttgaattaaatatattctgtggtttatatgaaaa

SEQ ID NO: 362785 - DNA, 120 bp, Artificial Sequence
  ENSG00000140750_29 (sequence is synthesized)
gataagtttaatgcccagcagagaagtcatttaattcaggcatacttggcacattaaaaaacaacaacaacaacaaaaaaaaccacatcactttggagagtaacttggggctactgggaa

SEQ ID NO: 362786 - DNA, 120 bp, Artificial Sequence
  ENSG00000140750_30 (sequence is synthesized)
tgggatttcatgtatattatgatgaatttgaagcatcagtatcatgcctgacattaatacgtaagttggcttatcattttcccactacagctattagcaataaatttcttgtgaaaagtt

SEQ ID NO: 362787 - DNA, 120 bp, Artificial Sequence
  ENSG00000140750_31 (sequence is synthesized)
aggaatttcagccaacataataagacatgaaaatggcattcgaggtgtattagacagacaaggggatgttagtgtttgcaggagacttggtctgcctcagtgatgtcagtcagcagtgat

SEQ ID NO: 362788 - DNA, 120 bp, Artificial Sequence
  ENSG00000140750_32 (sequence is synthesized)
tgtgattccccaggggacactcggcagcatctggagacattttagtttaaacttccccagtgatctgtgatgtacaggagacactttcggttgtcacactgggggaggaggctgcatgtc

SEQ ID NO: 362789 - DNA, 120 bp, Artificial Sequence
  ENSG00000140750_33 (sequence is synthesized)
actggcatctgttgggtgacacctacaatgcacaggacaaccacaacaaataattcaggcccaaatgttgctggtgctgagggtgaggtcctagtgttagtaacaggaggaaaacccagc

SEQ ID NO: 362790 - DNA, 120 bp, Artificial Sequence
  ENSG00000140750_34 (sequence is synthesized)
agtctggaggagagacctcttcccagggcagcccaggggccatcaggagggttcatctcatgcattagaggtcttgggaagaatgaggcttcctttcctccatcaaagcaagcaaatcct

SEQ ID NO: 362791 - DNA, 120 bp, Artificial Sequence
  ENSG00000140750_35 (sequence is synthesized)
ttaaaagctgcatctccaagggctgctccgggctcatagcaagcaacgtcggagcccagaggcaaggctgtgctactcagctgccctctggggtcacaaaggcttcacttggcttctaag

SEQ ID NO: 362792 - DNA, 120 bp, Artificial Sequence
  ENSG00000140750_36 (sequence is synthesized)
agctgatgaggcctctcgcaagggaccctgtgtgcatgggctgaccctgaaacttcccagcctctcttcttctcagagcaccctcaggtggcctctcgggggttacccctcattgatacc

SEQ ID NO: 362793 - DNA, 120 bp, Artificial Sequence
  ENSG00000140750_37 (sequence is synthesized)
cgtggtatctggtatcgctcagtggacttgggatttgagagtggtcgccatccacccatgactgatggtgtccagatagtttctggaattctgctgtaggtcattccaagcactaatctc

SEQ ID NO: 362794 - DNA, 120 bp, Artificial Sequence
  ENSG00000140750_38 (sequence is synthesized)
accataaagtcagtgtgtagcttctcagttaacgtttcttccacgtgtattccagcttaacttggtggtgtgcttggtaagccctgcagtggaacggcatcatacacatgttaaaagtga

SEQ ID NO: 362795 - DNA, 120 bp, Artificial Sequence
  ENSG00000140750_39 (sequence is synthesized)
aagtgctgagattacaacgttgaaccactgcgccctgctagaaacagcttttcatacgttgaaataaacgagagggtgaccgggcagcgttggggtcggggaggccaggcggaggaggcc

SEQ ID NO: 362796 - DNA, 120 bp, Artificial Sequence
  ENSG00000140750_40 (sequence is synthesized)
tccaaatcatccagtatgttaaaaggcaaaattaatcaataattgtacattctgtaatgtcttttatatatgctacttaatttaaagtataaatcatcttactaaataaaatttcaaaga

SEQ ID NO: 362797 - DNA, 120 bp, Artificial Sequence
  ENSG00000140750_41 (sequence is synthesized)
attgtaaggactctgcattgctccatttctttttaaaaatttttcttcaagaaggattatatattgctcatttctgtctccaccccagaagtcagccttttctgaggtccagtccttgca

SEQ ID NO: 362798 - DNA, 120 bp, Artificial Sequence
  ENSG00000140750_42 (sequence is synthesized)
cctctgttctctcccaccctcacttcctcgcccccttttccctagaaatccccttacttggacagctttgcctcttacctgcattttaatccttgcagcctcctaagcatcggttccctt

SEQ ID NO: 362799 - DNA, 120 bp, Artificial Sequence
  ENSG00000140750_43 (sequence is synthesized)
tgatgaacagcactcaccttaaactcaaaaagcaaaccagtcctcttcccactccaactgtcccttttctcccttcttgtctcccttatatcacctttctccaagtgattcaggtcttaa

SEQ ID NO: 362800 - DNA, 120 bp, Artificial Sequence
  ENSG00000140750_44 (sequence is synthesized)
ccttggaacccttttctccttcctctcttccatccagtgcctgggttctgtccatttcgccctaggctctgtcatcctctcttcccctggcccactctgctccatgctctcacggccttg

SEQ ID NO: 362801 - DNA, 120 bp, Artificial Sequence
  ENSG00000140750_45 (sequence is synthesized)
gcgtgaacttgggataagatgtaaattcccagactcacaattcctgatcttttctcagctgattgcccctcacaaagatgtgtttgtccgtttttcagcctgtttaatctctgtccgtct

SEQ ID NO: 362802 - DNA, 120 bp, Artificial Sequence
  ENSG00000140750_46 (sequence is synthesized)
catgagaccccctccaacctcatttcctttgagaagccttctccgacagctgaagccaatggcaaacactttgcctcttgaattgtgccagcatttatggtctacaccagaagtcgcaaa

SEQ ID NO: 362803 - DNA, 120 bp, Artificial Sequence
  ENSG00000140750_47 (sequence is synthesized)
cagccatatctcattaaaaattgttaaaagttggttgtcatcatgtgaaaaccagatggtttgatgtaacaattctgatttctggcttctcctgaaagttgagaacatctggcaacactg

SEQ ID NO: 362804 - DNA, 120 bp, Artificial Sequence
  ENSG00000140750_48 (sequence is synthesized)
gctttgctttcccacgtggcagtgttggtttggtgcagaggagtggttatcgcctgtcggcagatcgtgcactcccagcaggatttgtgcccctgtgctacctatccgactcctctggac

SEQ ID NO: 362805 - DNA, 120 bp, Artificial Sequence
  ENSG00000140750_49 (sequence is synthesized)
aattgcatttgcaacccttgtctataccatcgatctgccatgacttagcaaatatgtcttgtcttgttattgactgttctgtgtttacatgtgtgtcttatattcccttcacaattcaat

SEQ ID NO: 362806 - DNA, 120 bp, Artificial Sequence
  ENSG00000140750_50 (sequence is synthesized)
tgccctcttcctgagggtagggagtctctgttaactttacatgcctcctgcagtacctgacacatagtaggtctgttgtttgagaggccagtgcctgaggtggaatttgccttatgactt

SEQ ID NO: 362807 - DNA, 120 bp, Artificial Sequence
  ENSG00000140750_51 (sequence is synthesized)
gcttctaggtcagtggttctcacttgcaccctctgtcaacattataccaggcttgggggtggggtacactctgtccagtgtttactagaaagttccagcagaggtttgaagcatgcccgc

SEQ ID NO: 362808 - DNA, 120 bp, Artificial Sequence
  ENSG00000140750_52 (sequence is synthesized)
cccttagcattacagggttgggcttgtggtgaaggcaatggcgggtgtcatttgcagaacccccctgggtgattccagggcatcccctagtggaaggctcacgtggccattttcagcctg

SEQ ID NO: 362809 - DNA, 120 bp, Artificial Sequence
  ENSG00000140750_53 (sequence is synthesized)
tgttgtaacttattgctttagataaaagggacaaagtatttcaggtaagatttgacctctgggaaggtccagacccccagatgcgttttctattggaaattccccagctggggccgggcc

SEQ ID NO: 362810 - DNA, 120 bp, Artificial Sequence
  ENSG00000140750_54 (sequence is synthesized)
agagacgaggagggctccccacaattctgagagtggctggtggcctgcacctcatttttgtcccccaccttcctttccctcacccctttcttcagtctttacctcttgctctttccatcc

SEQ ID NO: 362811 - DNA, 120 bp, Artificial Sequence
  ENSG00000140750_55 (sequence is synthesized)
atttttacctttccacaagctctcggttctatggatttgtgggattttatttttcttccttccccatgtgcaaatctacccctgctgtgacatgggagagagtgtaagaggacacaccag

SEQ ID NO: 362812 - DNA, 120 bp, Artificial Sequence
  ENSG00000140750_56 (sequence is synthesized)
agtacatactgccttcttccaacccagctttctaacagcagagctgctaagggaccaatggccagtaaaggtgcagagaaggacatgaacccttcctgttgttggaaagatttaagtgtt

SEQ ID NO: 362813 - DNA, 120 bp, Artificial Sequence
  ENSG00000140750_57 (sequence is synthesized)
tctccctggagcagttttcacaactggtttgccctcctttgcttctgcgagctgctcagatagcactagatctctgcagcttgcacaggcaggccaaattcaaccagatacttcttattc

SEQ ID NO: 362814 - DNA, 120 bp, Artificial Sequence
  ENSG00000140750_58 (sequence is synthesized)
taattcatatgtccgttctctaaattcttctttctattttactgcttcattgtatttgtgctaagctgcctcataacctgaagataatctaaaatatggctttcctgccatcagcatagc

SEQ ID NO: 362815 - DNA, 120 bp, Artificial Sequence
  ENSG00000140750_59 (sequence is synthesized)
cttcagctgctttagggctgcagatgctgcatttctttccactcagaatttttcggagctgtttggggatgcggtgttctgaagcactgcatgccgcggagatgtcgcatctgatggaga

SEQ ID NO: 362816 - DNA, 120 bp, Artificial Sequence
  ENSG00000140750_60 (sequence is synthesized)
gtaactgcaacgtggagagttcacgttggccatctccagtcttgtatgacagatacttaacttgtgtttgaaattttcagagatcatttccatttttgcatagcaaagaatctatttctt

SEQ ID NO: 362817 - DNA, 120 bp, Artificial Sequence
  ENSG00000140750_61 (sequence is synthesized)
aacgaaacggtatgctctggcaaatcttccttttggttcaaggcagcccactaaacccgctggcgtgtgttgatgaagtgtggtgcaggtgcagcgtgccactgcagcttctgggcagcc

SEQ ID NO: 362818 - DNA, 120 bp, Artificial Sequence
  ENSG00000140750_62 (sequence is synthesized)
tgagttggtgccatctaggtacgctcaggcttctgttccacaagtaaccgccccagcctggtccatagtttgctgctccagtagatggcaaataacaaaagcaaatagaacagatgtatc

SEQ ID NO: 362819 - DNA, 120 bp, Artificial Sequence
  ENSG00000140750_63 (sequence is synthesized)
ccctcttgcacagcctcacctaccagtcggctagaaaagcccattgggtagttggggagaaaatagcttggtaatgccgtgagtttgttgggtgtctaactgaacaatttgctgctctag

SEQ ID NO: 362820 - DNA, 120 bp, Artificial Sequence
  ENSG00000140750_64 (sequence is synthesized)
actcagtgtgatagcaaggtgtagccaagatcatcccttttccctgcatgtagattcagccatgcttttcctaccagcatgcagacaccacaaaagaaagaggatgaatttgttctcttt

SEQ ID NO: 362821 - DNA, 120 bp, Artificial Sequence
  ENSG00000140750_65 (sequence is synthesized)
attttcatttccttgtgacattccatttgtttaatcaaggctaaatgtattatttaagacaataattagtcttaatgcagaaggacaaatggaatgtcagttactttgcttttttttttt

SEQ ID NO: 362822 - DNA, 71 bp, Artificial Sequence
  ENSG00000140750_66 (sequence is synthesized)
aaggacaaatggaatgtcagttactttgctttttttttttttgagacagcaggcaacctccacctcctggg

SEQ ID NO: 362823 - DNA, 120 bp, Artificial Sequence
  ENSG00000140750_67 (sequence is synthesized)
tcccaaagtgctggcgttacaggcgtgagtcactgtgcctggcctgctgtttgttttttatactgtattctgtaggtatttttatgtacattacactaatgttattcactctttggtgac

SEQ ID NO: 362824 - DNA, 120 bp, Artificial Sequence
  ENSG00000140750_68 (sequence is synthesized)
cttgacaaaatggagctacagagtttggtataaaaagttctgggccaggaaacaggaagcctgaattctgatctctatcctgctgctaccaactctggacttcgagtagtcatttagcct

SEQ ID NO: 362825 - DNA, 120 bp, Artificial Sequence
  ENSG00000140750_69 (sequence is synthesized)
ctgagttctccttcttcagtccaagttattgataataatcaagccctttatcatttagggtcttattttgccatggcttttgcttagttttgtacagtgtatatgtcaacatgtaaaagc

SEQ ID NO: 362826 - DNA, 120 bp, Artificial Sequence
  ENSG00000140750_70 (sequence is synthesized)
catttcatggtattaagtactgcccaatttaagtccaaacgcagtagaactgaaaactccgcattggttgctttgaaatggtctctctgatgatactggagtggcagagtcgttggagtc

SEQ ID NO: 362827 - DNA, 120 bp, Artificial Sequence
  ENSG00000140750_71 (sequence is synthesized)
cagtctgatgcaacgaatctcataaaataaatagtcctatagtcccggctactcagggtgctgaggcaggagaggattgcttgagtccagaaatttgagaccaacctgggcaacatagca

SEQ ID NO: 362828 - DNA, 120 bp, Artificial Sequence
  ENSG00000140750_72 (sequence is synthesized)
agacctcatctcttaaaaaaaaaatggcaccaagtaaacattagctctttatatggcaccaagtaaacattagctttataagcccagtgtgagctagttagaatttcagatccttttcct

SEQ ID NO: 362829 - DNA, 120 bp, Artificial Sequence
  ENSG00000140750_73 (sequence is synthesized)
gcctgccgaagtgaaaactctgcttggaatcttatgttttatgtgcagtatgttcagattttctagctgggattgtctgacgtctaacttgacttttactcctcttagtcctcccaaacc

SEQ ID NO: 362830 - DNA, 120 bp, Artificial Sequence
  ENSG00000140750_74 (sequence is synthesized)
agaccgtgggcaggaaaattaaagaaataatgctgagaggaaggtagacgtgtggtaatggcggctgatgtttcaaggaacagtttacaagcacatgataatttcttagctgagaaaaca

SEQ ID NO: 362831 - DNA, 120 bp, Artificial Sequence
  ENSG00000140750_75 (sequence is synthesized)
ggggaaaaaaacagcagaggaagtatggggataaacacactaacatgatgtcattcaagatgaggcctgcctatttgcttttagctgctcacacccaaattgatcaaagacattgaacag

SEQ ID NO: 362832 - DNA, 120 bp, Artificial Sequence
  ENSG00000140750_76 (sequence is synthesized)
taccaggttcattggctttgctcaggcttgaagccgagtggagttgctcaggggtggccattagtctggtccttgccgcttcactgcatgccgggcagcttgggtggctatccccatgtg

SEQ ID NO: 362833 - DNA, 120 bp, Artificial Sequence
  ENSG00000140795_0 (sequence is synthesized)
acacagcccaggccatcgtggaggttggtgctgccaggagtctgtcagctacggaggacaatgaccttgcagacaccaccgcctgagtgagaaccaggggtctgtgcctctcctcattcc

SEQ ID NO: 362834 - DNA, 120 bp, Artificial Sequence
  ENSG00000140795_1 (sequence is synthesized)
ccgctcttgcccttgtcaagcctgcaccagcatgtcaggaacctccaaggagagtctggggcatggggggctgccagggttgggcaagacctgcttaacaaccatggacacaaagctgaa

SEQ ID NO: 362835 - DNA, 120 bp, Artificial Sequence
  ENSG00000140795_2 (sequence is synthesized)
catgctgaacgagaaggtggaccagctcctgcacttccaagaagatgtcacagagaagttgcagagcatgtgccgagacatgggccacctggagcggggcctgcacaggctggaggcctc

SEQ ID NO: 362836 - DNA, 120 bp, Artificial Sequence
  ENSG00000140795_3 (sequence is synthesized)
ccgggcaccgggcccgggcggggctgatggggttccccacattgacacccaggctgggtggcccgaggtcctggagctggtgagggccatgcagcaggatgcggcccagcacggtgccag

SEQ ID NO: 362837 - DNA, 120 bp, Artificial Sequence
  ENSG00000140795_4 (sequence is synthesized)
gctggaggccctcttcaggatggtggctgcggtggacagggccatcgctttggtgggggccacgttccagaaatcaaaggtggcggatttcctcatgcaggggcgtgtgccctggaggag

SEQ ID NO: 362838 - DNA, 120 bp, Artificial Sequence
  ENSG00000140795_5 (sequence is synthesized)
aggcagcccaggtgacagccctgaggagaataaagagcgagtggaagaagagggaggaaaaccaaagcatgtgctgagcaccagtggggtgcagtctgatgccagggagcctggggaaga

SEQ ID NO: 362839 - DNA, 120 bp, Artificial Sequence
  ENSG00000140795_6 (sequence is synthesized)
gagccagaaggcggacgtgctggaggggacagcggagaggctgccccccatcagagcgtcagggctgggagctgaccccgcccaggcagtggtctcaccgggccagggagatggtgttcc

SEQ ID NO: 362840 - DNA, 120 bp, Artificial Sequence
  ENSG00000140795_7 (sequence is synthesized)
tggcccagcccaggcattccctggccacctgcccctgcccacaaaggtggaagccaaggctcctgagacacccagcgagaacctcaggactggcctggaattggctccagcacccggcag

SEQ ID NO: 362841 - DNA, 120 bp, Artificial Sequence
  ENSG00000140795_8 (sequence is synthesized)
ggtcaatgtggtctccccgagcctggaggttgcaccaggtgcaggacaaggagcatcgtccagcaggcctgaccctgagcccttagaggaaggcacgaggctgactccagggcctggccc

SEQ ID NO: 362842 - DNA, 120 bp, Artificial Sequence
  ENSG00000140795_9 (sequence is synthesized)
tcagtgcccagggcctccagggctgccagcccaggccagggcaacccacagtggtggagaaacacctccaaggatctccatccacatacaagagatggatactcctggggagatgctgat

SEQ ID NO: 362843 - DNA, 120 bp, Artificial Sequence
  ENSG00000140795_10 (sequence is synthesized)
gacaggcaggggcagccttggacccaccctcaccacagaggctccagcagctgcccagccaggcaagcagggcccacctgggaccgggcgctgcctccaagcccctgggactgagcccgg

SEQ ID NO: 362844 - DNA, 120 bp, Artificial Sequence
  ENSG00000140795_11 (sequence is synthesized)
agaacagacccctgaaggagccagagagctctccccgctgcaggagagcagcagccccgggggagtgaaggcagaggaggagcaaagggctggggccgagcctggcacgagaccaagctt

SEQ ID NO: 362845 - DNA, 120 bp, Artificial Sequence
  ENSG00000140795_12 (sequence is synthesized)
ggccaggagtgacgacaatgaccacgaggttggggccctgggcctgcagcagggcaaaagcccaggggcgggaaaccctgagcctgagcaggactgtgcagccagggctccggtgagagc

SEQ ID NO: 362846 - DNA, 120 bp, Artificial Sequence
  ENSG00000140795_13 (sequence is synthesized)
tgaagcagtaaggaggatgcccccaggcgccgaggctggcagcgtggttctggatgacagtccggccccaccagctccttttgaacaccgggtagtgagcgtcaaggagacctccatctc

SEQ ID NO: 362847 - DNA, 120 bp, Artificial Sequence
  ENSG00000140795_14 (sequence is synthesized)
tgcgggttacgaggtgtgccagcacgaagtcttgggagggggtcggtttggccaggtccacaggtgcacagagaagtccacaggcctcccactggctgccaagatcatcaaagtgaagag

SEQ ID NO: 362848 - DNA, 120 bp, Artificial Sequence
  ENSG00000140795_15 (sequence is synthesized)
cgccaaggaccgggaggacgtgaagaacgagatcaacatcatgaaccagctcagccacgtgaacctgatccagctctatgacgccttcgagagcaagcacagctgcacccttgtcatgga

SEQ ID NO: 362849 - DNA, 120 bp, Artificial Sequence
  ENSG00000140795_16 (sequence is synthesized)
gtacgtggacgggggtgagctcttcgaccggatcacagatgagaagtaccacctgactgagctggatgtggtcctgttcaccaggcagatctgtgagggtgtgcattacctgcaccagca

SEQ ID NO: 362850 - DNA, 120 bp, Artificial Sequence
  ENSG00000140795_17 (sequence is synthesized)
ctacatcctgcacctggacctcaagccggagaacatattgtgcgtcaatcagacaggacatcaaattaagatcattgactttgggctggccagaaggtacaagcctcgagagaagctgaa

SEQ ID NO: 362851 - DNA, 120 bp, Artificial Sequence
  ENSG00000140795_18 (sequence is synthesized)
ggtgaacttcggcactcctgagttcctggccccagaagtcgtcaattatgagtttgtctcattccccacagacatgtggagtgtgggagtcatcacctacatgctactcagtggcttgtc

SEQ ID NO: 362852 - DNA, 120 bp, Artificial Sequence
  ENSG00000140795_19 (sequence is synthesized)
cccatttctaggggaaacagatgcagagaccatgaatttcattgtaaactgtagctgggattttgatgctgacacctttgaagggctctcggaggaggccaaggactttgtttcccggtt

SEQ ID NO: 362853 - DNA, 120 bp, Artificial Sequence
  ENSG00000140795_20 (sequence is synthesized)
gctggtcaaagagaagagctgcagaatgagtgccacacagtgcctgaaacacgagtggctgaataatttgcctgccaaagcttcaagatccaaaactcgtctcaaatcccaactactgct

SEQ ID NO: 362854 - DNA, 120 bp, Artificial Sequence
  ENSG00000140795_21 (sequence is synthesized)
gcagaaatacatagctcaaagaaaatggaagaaacatttctatgtggtgactgctgccaacaggttaaggaaatttccaacttctccctaatcttcaactctgctgctccaatgggtcca

SEQ ID NO: 362855 - DNA, 120 bp, Artificial Sequence
  ENSG00000140795_22 (sequence is synthesized)
gaaattactgaggccagtggtgaagtgaagagatgactcaaacatttaaataatttggctttttggtattattgattccacttattttgtaaaaatggttatggctgctgccttccttgt

SEQ ID NO: 362856 - DNA, 120 bp, Artificial Sequence
  ENSG00000140795_23 (sequence is synthesized)
ggatgaaaagtggctgtaaagaagcttcctaagaacgtttttttctgccttgtaagatcactacgtgtgaaatgctctgagtacctttcaaatatacctacttttggtggtaagtgtagg

SEQ ID NO: 362857 - DNA, 120 bp, Artificial Sequence
  ENSG00000140795_24 (sequence is synthesized)
gatgctttaggtaggtactttgcatctgtcgaatttaaattctaaactcacactgattaaggaactcagtagactactttgcaggggccatgttattcagtgttatctcctccagtacaa

SEQ ID NO: 362858 - DNA, 120 bp, Artificial Sequence
  ENSG00000140795_25 (sequence is synthesized)
agaattcctagaattttgatttgctcaggtgtgagctgacattttattgtactaccccattcttgtgttaagccatgtggatttaggacagtgatcttcaaacttgctttaacttatgct

SEQ ID NO: 362859 - DNA, 120 bp, Artificial Sequence
  ENSG00000140795_26 (sequence is synthesized)
cccttttgagaatcagcatcacttgaaatgtcaaaatatgtcaactctcatagccaaatcaaagaagtgatcattttgactgtgctttttaaatctccacacacctccacctctctccta

SEQ ID NO: 362860 - DNA, 120 bp, Artificial Sequence
  ENSG00000140795_27 (sequence is synthesized)
attctgcctgtcttaacccctctgtcttagttataaatttctggtcttgtaagtctggaagctgataggcaatttatgaaagagataagaatgtaatgaggttccgctttctgagaaaca

SEQ ID NO: 362861 - DNA, 120 bp, Artificial Sequence
  ENSG00000140795_28 (sequence is synthesized)
cagaaatgatacatcctgagacataaaggaaagctgctcttctgctgcctcaggctgtagcactctcaatgttgtcactctacacatacactttctatatacatgtacagttgacccttg

SEQ ID NO: 362862 - DNA, 120 bp, Artificial Sequence
  ENSG00000140795_29 (sequence is synthesized)
aacagggtttgaattgcagtcaacttaaatgtggattttctttcacctttgtcacccctgagacagcaacaccatgctctcctcttcatcccactctgcagcctactcaacaggaagatg

SEQ ID NO: 362863 - DNA, 88 bp, Artificial Sequence
  ENSG00000140795_30 (sequence is synthesized)
aacaggaagatgatgaagatgaactagtaaacatatgttttcctccttatgattttagtaacttttctctagcttactttattgtaag

SEQ ID NO: 362864 - DNA, 120 bp, Artificial Sequence
  ENSG00000140795_31 (sequence is synthesized)
catatgtgtgtatgggtattaactgactgtttatattattgatagggcttccagtcaacattaggctattagtagttaagtttttggggagacaaaagttatactcagattttctactgc

SEQ ID NO: 362865 - DNA, 120 bp, Artificial Sequence
  ENSG00000140795_32 (sequence is synthesized)
aagggggtaggcactcctaaccctcacattgttcaagggtccactgtacatttaaacacttttctatatgcattagagtagccctgtcatcccttcactgaaatcatactgttctcaaca

SEQ ID NO: 362866 - DNA, 63 bp, Artificial Sequence
  ENSG00000140795_33 (sequence is synthesized)
ccgcctcctgggctcaggcgatcatgagtacctgggaccataggtgcccgctactacacccag

SEQ ID NO: 362867 - DNA, 76 bp, Artificial Sequence
  ENSG00000140795_34 (sequence is synthesized)
ttggctcactgtagcctccgcctcctgggctcaggcgatcatgagtacctgggaccataggtgcccgcttgccatg

SEQ ID NO: 362868 - DNA, 120 bp, Artificial Sequence
  ENSG00000140795_35 (sequence is synthesized)
attataggtgtgagccaccacacccagcttcaactaacacatttacgaacttgtatacatgtatatttagatactttaccaacttgtaaaatggttaaaggagtactttattatgaaaaa

SEQ ID NO: 362869 - DNA, 120 bp, Artificial Sequence
  ENSG00000140795_36 (sequence is synthesized)
gagtactttattatgaaaaaatatacaatctttaaaatttccttacttctacatgatttttgtgctattcccatttttttcctcaggtgagcagctttagttttttattttttttgagag

SEQ ID NO: 362870 - DNA, 120 bp, Artificial Sequence
  ENSG00000140795_37 (sequence is synthesized)
ctgggaatataggcatgagccactgtgcttggcctcaggtgagcagctttagtcaatgttgtgaattttagattttaattagacatgcaacagtttcactacctttcaggatttttgtcc

SEQ ID NO: 362871 - DNA, 120 bp, Artificial Sequence
  ENSG00000140795_38 (sequence is synthesized)
tgtaacagaggctcttgctttttgacagagaggtaggcaggtggagaggttatcctgctgctgcagttctcaagttgttaagtttcctctggaaggctaacccttgttgggaactaacag

SEQ ID NO: 362872 - DNA, 120 bp, Artificial Sequence
  ENSG00000140795_39 (sequence is synthesized)
tttcaataccagcaagtctaggcctgctccaagttggtcagctgaagaatgaacatcagaagacacagctgctgaaagttgtcctttgatgagacagtgatagtgatttggtaaaatgtc

SEQ ID NO: 362873 - DNA, 120 bp, Artificial Sequence
  ENSG00000140795_40 (sequence is synthesized)
ttattttttaaatgtcagttatctttctttaaaaggttttttgagggcagcctccagaaggagctagagagtatattttatagttctattgtggttcataccctgttttcgacttaagat

SEQ ID NO: 362874 - DNA, 120 bp, Artificial Sequence
  ENSG00000140795_41 (sequence is synthesized)
tctggagaatgctatgaaacatctccccagaaaaagacagttaattaccatatctagagcagcactgcccaacaaaaatatagtacaggctatacacataattaaaacatttctagtagc

SEQ ID NO: 362875 - DNA, 120 bp, Artificial Sequence
  ENSG00000140795_42 (sequence is synthesized)
ttctctaacaaaacccattgaaagccaattttaataatttatataacttagtgtatcaaaaatatttcaatatgtaatcaacataaaattgagatactttaccagctactagggaggctg

SEQ ID NO: 362876 - DNA, 66 bp, Artificial Sequence
  ENSG00000140795_43 (sequence is synthesized)
tgcagtgagccaagatcacagatattttatattctttttctcatactaagtctcaaaaatctggta

SEQ ID NO: 362877 - DNA, 120 bp, Artificial Sequence
  ENSG00000140795_44 (sequence is synthesized)
ccgtctcaaaaaaaaagagatattttatattctttttctcatactaagtctcaaaaatctggtatattttacacttaaaaacacatgtcaaggctaggcatggtggctcacatctgtaat

SEQ ID NO: 362878 - DNA, 87 bp, Artificial Sequence
  ENSG00000140795_45 (sequence is synthesized)
tgcactccagcctgggtggcagagcaaaactttgtccccacccctgaccctgtcaattcagatgctaggttttcatcagacgtactt

SEQ ID NO: 362879 - DNA, 120 bp, Artificial Sequence
  ENSG00000140795_46 (sequence is synthesized)
gtcaattcagatgctaggttttcatcagacgtacttaatctgtatttagatttcttaaaacttactgtggaaaatgtatttacatactcaagttgtttgaaacataactcactgttttcc

SEQ ID NO: 362880 - DNA, 120 bp, Artificial Sequence
  ENSG00000140795_47 (sequence is synthesized)
aataactgaagtatccacttttacatgtattaaaattaaataaaattagaaattcagttctgcagttgcactagccacattttaagtgtttaatagccacacgtggttagtggcatctat

SEQ ID NO: 362881 - DNA, 120 bp, Artificial Sequence
  ENSG00000140795_48 (sequence is synthesized)
attggacagggcagatctagagagaatcctgtatctaacaattttaatttttttccctttatgctgttattccttacctagagaaacaatttccctccaaagttcctttgaggggtctgt

SEQ ID NO: 362882 - DNA, 120 bp, Artificial Sequence
  ENSG00000140795_49 (sequence is synthesized)
ttaggccaggccaacacaagtgacctatgtggattttagcatcctttttttgaaatttgaggttttatgaagcttgagtttttctggatatttttagtaatttgctggtgtgtacttagc

SEQ ID NO: 362883 - DNA, 120 bp, Artificial Sequence
  ENSG00000140795_50 (sequence is synthesized)
tcaaatacttgattgcaactgtgttgggtcaactatttctaatgggacttttccatttgcatgtacagtcactggaaactgctgggcagagaaactctaaaaggtagttggggcacactt

SEQ ID NO: 362884 - DNA, 120 bp, Artificial Sequence
  ENSG00000140795_51 (sequence is synthesized)
tttccacctgtcagattggtgaagaattggtgaggctgtggggaaaatggcattctcccacttttgatggatatgtatccaaataaaagtcattcccatgctttctttcatccagaaatt

SEQ ID NO: 362885 - DNA, 120 bp, Artificial Sequence
  ENSG00000140795_52 (sequence is synthesized)
ttatttctagaaatttatccctccgtacttgaacaattgtatagagatttattcaaaatgatgtttactatagcactgttgctaatggcccagtaaaaacaaccaacacatgcctattag

SEQ ID NO: 362886 - DNA, 120 bp, Artificial Sequence
  ENSG00000140795_53 (sequence is synthesized)
tttggttttagttaaatgaattttgccacatccatgtagtggaatacctcacagctgttatagatagatctagatatactgaaagccattttttcttaaattatagaatgtatatatggt

SEQ ID NO: 362887 - DNA, 120 bp, Artificial Sequence
  ENSG00000140795_54 (sequence is synthesized)
atcatcccatttgtgaagagacatatgcttatatgtgcattaaaaaaccgtaggatatgcaagaaacttaacagtggagtgtgaaaagtgggtgattgggagagggggaattccactttt

SEQ ID NO: 362888 - DNA, 120 bp, Artificial Sequence
  ENSG00000140795_55 (sequence is synthesized)
ccacttttcatttatctttctgaaccttttgaatcttttttttttttttttttacaatgagcatgtattcctttttttttttttctttccaagatggagtctcactctgttgccaggctg

SEQ ID NO: 362889 - DNA, 120 bp, Artificial Sequence
  ENSG00000140795_56 (sequence is synthesized)
cccgcatgtattacatttataattaaaaattcacaactcaatgtcaagtgtgaaccttgtgttgaccctgatttgagcaagcaataaaaagatatttttgagacatttagattatgaatt

SEQ ID NO: 362890 - DNA, 120 bp, Artificial Sequence
  ENSG00000140795_57 (sequence is synthesized)
tcacatttgatgatagttactattaattttgtgaggtgtgatattggcaatgtggttagatgacttcagagaaaaaggaaggtatagttaagcaagtatggcaacatctaataacttggg

SEQ ID NO: 362891 - DNA, 120 bp, Artificial Sequence
  ENSG00000140795_58 (sequence is synthesized)
tctaggtgatgtgtatgggtttcattatactgtcctctttactgttgtatgtatttgaaaacattcatgacaaaaaaactttttaatcagttaaataaaccatgaagaacggttaaagaa

SEQ ID NO: 362892 - DNA, 120 bp, Artificial Sequence
  ENSG00000140795_59 (sequence is synthesized)
agagggccgaccagcagaggaagggagaccagagggcagcttgcacagatcttgtcttgggttataactgttgacaagccacttaactgcctccaggtttaagtttgtctgtgtataaga

SEQ ID NO: 362893 - DNA, 120 bp, Artificial Sequence
  ENSG00000140795_60 (sequence is synthesized)
tggaggtaacaatatttatacatctcactggagacttatgaaaacaagattttggacagatcccttgggacccatggatggaaagtgaataaagagcgagtggaagaagagggaggaaaa

SEQ ID NO: 362894 - DNA, 120 bp, Artificial Sequence
  ENSG00000140795_61 (sequence is synthesized)
aaattttaaatccttccgcttcctccctttaatgaacacactggactccatcctgtggagaagtagtggaggtgcttttattttgaaccctcttggttctggctaggtccacttgaactc

SEQ ID NO: 362895 - DNA, 120 bp, Artificial Sequence
  ENSG00000140795_62 (sequence is synthesized)
ggatggcctcagtggtgagggatgaggggatgttccctgggatgtggaatggcctgggtggtgtggggtgaagagttgctttgcaggtttcgggatagccagcagggttttggggtgatg

SEQ ID NO: 362896 - DNA, 120 bp, Artificial Sequence
  ENSG00000140795_63 (sequence is synthesized)
acaggctgcactctgggatgtaggatggtccacatggcctgtgtgtggatgagttggacccagaagtccagggatgggtgtgggatgagcctctgggctctcagcctgccgtgtggctat

SEQ ID NO: 362897 - DNA, 120 bp, Artificial Sequence
  ENSG00000140795_64 (sequence is synthesized)
attccttgtggactaatggagatggggtggaattgatttcctgatacttctgggtgggtaaagcaagcttcagctggagagaaagccctccagcaaagacatgcaggtgctttggtacaa

SEQ ID NO: 362898 - DNA, 120 bp, Artificial Sequence
  ENSG00000140795_65 (sequence is synthesized)
gcggtaggggcccctggtgtcctagctcctggcgtgctctcaccattgagagctctatccacagacagtcccagcttccattcctggctctctgtcattttgtagttctggagtctggga

SEQ ID NO: 362899 - DNA, 120 bp, Artificial Sequence
  ENSG00000140795_66 (sequence is synthesized)
caggccactcttgctgcctcttggggctgtagttcttccatctggataatggtacctctttaagtattatttgaagattaagtgaaacaatgagcttttcttctttaaaaatatctttaa

SEQ ID NO: 362900 - DNA, 120 bp, Artificial Sequence
  ENSG00000140795_67 (sequence is synthesized)
gattactttttttaaaagttcaaaagggaacataggcttttggtaacaactatagacaacagagtagtgtgtaaaatacacagtgaaagttcctcccgccagccctccgtgcggaaggga

SEQ ID NO: 362901 - DNA, 120 bp, Artificial Sequence
  ENSG00000140795_68 (sequence is synthesized)
cttctctgtgagcaagctggcatgactcacagacacacaaaaggagatcctacgatgcattcttccctccctccctccccctctctctctttcttttctttctttctctctctctttctt

SEQ ID NO: 362902 - DNA, 79 bp, Artificial Sequence
  ENSG00000140795_69 (sequence is synthesized)
ctttctttctttctctcactttctttttctttctctttctcttttctctctctctctctcttctctcctctctcctctc

SEQ ID NO: 362903 - DNA, 120 bp, Artificial Sequence
  ENSG00000140795_70 (sequence is synthesized)
tctttctctcactttctttttctttctctttctcttttctctctctctctctcttctctcctctctcctctctttcttttttggagacagggcctctctctgttgcccaggctggagtgc

SEQ ID NO: 362904 - DNA, 66 bp, Artificial Sequence
  ENSG00000140795_71 (sequence is synthesized)
tggagtgcagtggtgccatcatatctcactgcagcctggacctcccaggcttaagtgatcctcagt

SEQ ID NO: 362905 - DNA, 120 bp, Artificial Sequence
  ENSG00000140795_72 (sequence is synthesized)
tggctgagtagtatatggtactggcataataataggcgctgagtggtatatggtactggcataaaaataggcacatagaccaatggaacataatcgagaacccagaaataaaccctaata

SEQ ID NO: 362906 - DNA, 86 bp, Artificial Sequence
  ENSG00000140795_73 (sequence is synthesized)
caatggaacataatcgagaacccagaaataaaccctaatacttacagccaactgactgacaaagcaaacaaaaacaagtgaagaaa

SEQ ID NO: 362907 - DNA, 78 bp, Artificial Sequence
  ENSG00000140795_74 (sequence is synthesized)
caagatggatcaaggacttaaatctaaggcctgaaactaaaaattgtagaagataacattggacaagaacccaaaagc

SEQ ID NO: 362908 - DNA, 90 bp, Artificial Sequence
  ENSG00000140795_75 (sequence is synthesized)
tttcatgagcaaatgtttgaagaagaattaacacctttacaaattcttccaaaaatagaagaggagagaacacttgcttctcattttatg

SEQ ID NO: 362909 - DNA, 120 bp, Artificial Sequence
  ENSG00000140795_76 (sequence is synthesized)
gtgctgggaactgggagccccagcttcatgctcttttcttagtgcctcatttttctcgttcttccccgccggcccaggggctactccgagctgcttggggatccccgccgcccccactgt

SEQ ID NO: 362910 - DNA, 120 bp, Artificial Sequence
  ENSG00000140795_77 (sequence is synthesized)
gcagcctggctggcgccgactcctctggccaacgtggcggtggcgccgagcagcccgtgagccacgtctgcatcctcagctgccacgctgtgcaccagccacgaatccacttggctgcgg

SEQ ID NO: 362911 - DNA, 120 bp, Artificial Sequence
  ENSG00000140798_0 (sequence is synthesized)
gccttggtcattggaccggctcccaaccaaaaccacaccatagggttttctgctcttggccaacccaacatgagaaaagaggaattaaatggtcctactaataagaaagcctcagcgtag

SEQ ID NO: 362912 - DNA, 120 bp, Artificial Sequence
  ENSG00000140798_1 (sequence is synthesized)
cattaagggacgtagcaggtcttctggccacactcccctacaaatgtggaaagctcattggtgaaaacagttctcaggggtcaaagcaaaggaactgatctgggtaaagtagaggctgcc

SEQ ID NO: 362913 - DNA, 120 bp, Artificial Sequence
  ENSG00000140798_2 (sequence is synthesized)
tgatcccaatcagacatcctcacctctcaataacctttgccatttctctgccatagagtgaaagtgtccccaggccaaaagcccagggctccaggctgccatcaggatggtgggtgaagg

SEQ ID NO: 362914 - DNA, 120 bp, Artificial Sequence
  ENSG00000140798_3 (sequence is synthesized)
accctaccttatctcagatctggaccagcgaggccggcggagatcctttgcagaaagatatgaccccagcctgaagaccatgatcccagtgcgaccctgtgcaaggttagcacccaaccc

SEQ ID NO: 362915 - DNA, 120 bp, Artificial Sequence
  ENSG00000140798_4 (sequence is synthesized)
ggtggatgatgccgggctactctccttcgccacattttcctggctcacgccggtgatggtgaaaggctaccggcaaaggctgaccgtagacaccctgcccccattgtcgacatatgactc

SEQ ID NO: 362916 - DNA, 120 bp, Artificial Sequence
  ENSG00000140798_5 (sequence is synthesized)
atctgacaccaatgccaaaagatttcgagtcctttgggatgaagaggtagcaagggtgggtcctgagaaggcctctctgagccacgtggtgtggaaattccagaggacacgcgtgttgat

SEQ ID NO: 362917 - DNA, 120 bp, Artificial Sequence
  ENSG00000140798_6 (sequence is synthesized)
ggacatcgtggccaacatcctgtgcatcatcatggcagccatagggccggtgattctcattcaccaaatcctccagcagactgagaggacctctgggaaagtctgggttggcattggact

SEQ ID NO: 362918 - DNA, 120 bp, Artificial Sequence
  ENSG00000140798_7 (sequence is synthesized)
gtgcatagccctttttgccaccgagtttaccaaagtcttcttttgggcccttgcctgggccatcaactaccgcacggccatccggttgaaggtggcgctctccaccttggtttttgaaaa

SEQ ID NO: 362919 - DNA, 120 bp, Artificial Sequence
  ENSG00000140798_8 (sequence is synthesized)
cctagtgtccttcaagacattgacccacatctctgttggcgaggtgctcaatatactgtcaagtgatagctattctttgtttgaagctgccttgttttgtcctttgccagccaccatccc

SEQ ID NO: 362920 - DNA, 120 bp, Artificial Sequence
  ENSG00000140798_9 (sequence is synthesized)
gatcctaatggtcttttgtgcggcgtacgcctttttcattctggggcccacagctctcatcgggatatcagtgtatgtcatattcatacccgtccagatgtttatggccaagctcaattc

SEQ ID NO: 362921 - DNA, 120 bp, Artificial Sequence
  ENSG00000140798_10 (sequence is synthesized)
agctttccgaaggtcagcaattttggtgacagacaagcgagttcagacaatgaatgagtttctgacctgcatcaggctgatcaaaatgtatgcctgggagaaatcttttaccaacactat

SEQ ID NO: 362922 - DNA, 120 bp, Artificial Sequence
  ENSG00000140798_11 (sequence is synthesized)
ccaagatataagaaggagggaaagaaaattactggaaaaagctggatttgtccaaagtggaaactctgccctggcccccatcgtgtccaccatagccatcgtgctgacattatcctgcca

SEQ ID NO: 362923 - DNA, 120 bp, Artificial Sequence
  ENSG00000140798_12 (sequence is synthesized)
catcctcctgagacgcaaactcaccgcacccgtggcatttagtgtgattgccatgtttaatgtaatgaagttttccattgcaatcttgcccttctccatcaaagcaatggctgaagcgaa

SEQ ID NO: 362924 - DNA, 120 bp, Artificial Sequence
  ENSG00000140798_13 (sequence is synthesized)
tgtctctctaaggagaatgaagaaaattctcatagataaaagccccccatcttacatcacccaaccagaagacccagatactgtcttgcttttagcaaatgccaccttgacatgggagca

SEQ ID NO: 362925 - DNA, 120 bp, Artificial Sequence
  ENSG00000140798_14 (sequence is synthesized)
tgaagccagcaggaaaagtaccccaaagaaattgcagaaccagaaaaggcatttatgcaagaaacagaggtcagaggcatacagtgagaggagtccaccagccaagggagccactggccc

SEQ ID NO: 362926 - DNA, 120 bp, Artificial Sequence
  ENSG00000140798_15 (sequence is synthesized)
agaggagcaaagtgacagcctcaaatcggttctgcacagcataagctttgtggtgagaaaggggaagatcttgggaatatgtgggaatgtgggaagtggaaagagctccctccttgcagc

SEQ ID NO: 362927 - DNA, 120 bp, Artificial Sequence
  ENSG00000140798_16 (sequence is synthesized)
tctcctaggacagatgcagctgcagaaaggggtggtggcagtcaatggaactttggcctacgtttcacagcaggcatggatctttcatggaaatgtgagagaaaacatactctttggaga

SEQ ID NO: 362928 - DNA, 120 bp, Artificial Sequence
  ENSG00000140798_17 (sequence is synthesized)
aaagtatgatcaccaaaggtatcagcacacagtccgcgtctgtggcctccagaaggacctgagcaacctcccctatggagacctgactgagattggggagcggggcctcaacctctctgg

SEQ ID NO: 362929 - DNA, 120 bp, Artificial Sequence
  ENSG00000140798_18 (sequence is synthesized)
ggggcagaggcagaggattagcctggcccgcgctgtctactccgaccgtcagctctacctgctggacgaccccctgtcggccgtggacgcccacgtggggaagcacgtctttgaggagtg

SEQ ID NO: 362930 - DNA, 120 bp, Artificial Sequence
  ENSG00000140798_19 (sequence is synthesized)
cattaagaagacgctcaggggaaagacagtcgtcctggtgacccaccagctacagttcttagagtcttgtgatgaagttattttattagaagatggagagatttgtgaaaagggaaccca

SEQ ID NO: 362931 - DNA, 120 bp, Artificial Sequence
  ENSG00000140798_20 (sequence is synthesized)
caaggagttaatggaggagagagggcgctatgcaaaactgattcacaacctgcgaggattgcagttcaaggatcctgaacacctttacaatgcagcaatggtggaagccttcaaggagag

SEQ ID NO: 362932 - DNA, 120 bp, Artificial Sequence
  ENSG00000140798_21 (sequence is synthesized)
agagagaggaagatgctggtataatcgttttggctccaggaaatgagaaagatgaaggaaaagaatctgaaacaggctcagaatttgtagacacaaaagttcctgagcaccagctcatcc

SEQ ID NO: 362933 - DNA, 120 bp, Artificial Sequence
  ENSG00000140798_22 (sequence is synthesized)
agactgaatccccccaggaaggaaccgtgacctggaaaacatatcacacgtacattaaggcttctggagggtacctcctttctctcttcactgtgttcctcttcctcctgatgattggca

SEQ ID NO: 362934 - DNA, 120 bp, Artificial Sequence
  ENSG00000140798_23 (sequence is synthesized)
gcgctgccttcagcaactggtggctgggtctctggttggacaagggctcacggatgacctgtgggccccagggcaacaggaccatgtgtgaggtcggcgcggtgctggcagacatcggtc

SEQ ID NO: 362935 - DNA, 120 bp, Artificial Sequence
  ENSG00000140798_24 (sequence is synthesized)
agcatgtgtaccagtgggtgtacactgcaagcatggtgttcatgctggtgtttggcgtcaccaaaggcttcgtcttcaccaagaccacactgatggcatcctcctctctgcatgacacgg

SEQ ID NO: 362936 - DNA, 120 bp, Artificial Sequence
  ENSG00000140798_25 (sequence is synthesized)
tgtttgataagatcttaaagagcccaatgagtttctttgacacgactcccactggcaggctaatgaaccgtttttccaaggatatggacgagctggatgtgaggctgccgtttcacgcag

SEQ ID NO: 362937 - DNA, 120 bp, Artificial Sequence
  ENSG00000140798_26 (sequence is synthesized)
agaactttctgcagcagttttttatggtggtgtttattctcgtgatcttggctgctgtgtttcctgctgtccttttagtcgtggccagccttgctgtaggcttcttcattctgttacgca

SEQ ID NO: 362938 - DNA, 120 bp, Artificial Sequence
  ENSG00000140798_27 (sequence is synthesized)
ttttccacagaggagtccaggagctcaagaaggtggagaatgtcagccggtcaccctggttcacccacatcacctcctccatgcagggcctgggcatcattcacgcctatggcaagaagg

SEQ ID NO: 362939 - DNA, 120 bp, Artificial Sequence
  ENSG00000140798_28 (sequence is synthesized)
agagctgcatcacctatcacctcctctactttaactgtgctctcaggtggtttgcgctgagaatggatgtcctcatgaacatccttaccttcactgtggccttgttggtgaccctgagtt

SEQ ID NO: 362940 - DNA, 120 bp, Artificial Sequence
  ENSG00000140798_29 (sequence is synthesized)
tctcctccatcagtacttcatccaaaggcctgtcattgtcatacatcatccagctgagcggactgctccaagtgtgtgtgcgaacgggaacagagacgcaagccaaattcacctccgtgg

SEQ ID NO: 362941 - DNA, 120 bp, Artificial Sequence
  ENSG00000140798_30 (sequence is synthesized)
agctgctcagggaatacatttcgacctgtgttcctgaatgcactcatcccctcaaagtggggacctgtcccaaggactggcccagccgtggggagatcaccttcagagactatcagatga

SEQ ID NO: 362942 - DNA, 120 bp, Artificial Sequence
  ENSG00000140798_31 (sequence is synthesized)
gatacagagacaacaccccccttgttctcgacagcctgaacttgaacatacaaagtgggcagacagtcgggattgttggaagaacaggttccggaaagtcatcgttaggaatggctttgt

SEQ ID NO: 362943 - DNA, 120 bp, Artificial Sequence
  ENSG00000140798_32 (sequence is synthesized)
ttcgtctggtggagccagccagtggcacaatctttattgatgaggtggatatctgcattctcagcttggaagacctcagaaccaagctgactgtgatcccacaggatcctgtcctgtttg

SEQ ID NO: 362944 - DNA, 120 bp, Artificial Sequence
  ENSG00000140798_33 (sequence is synthesized)
taggtacagtaaggtacaacttggatccctttgagagtcacaccgatgagatgctctggcaggttctggagagaacattcatgagagacacaataatgaaactcccagaaaaattacagg

SEQ ID NO: 362945 - DNA, 120 bp, Artificial Sequence
  ENSG00000140798_34 (sequence is synthesized)
cagaagtcacagaaaatggagaaaacttctcagtaggggaacgtcagctgctttgtgtggcccgagctcttctccgtaattcaaagatcattctccttgatgaagccaccgcctctatgg

SEQ ID NO: 362946 - DNA, 120 bp, Artificial Sequence
  ENSG00000140798_35 (sequence is synthesized)
actccaagactgacaccctggttcagaacaccatcaaagatgccttcaagggctgcactgtgctgaccatcgcccaccgcctcaacacagttctcaactgcgatcacgtcctggttatgg

SEQ ID NO: 362947 - DNA, 120 bp, Artificial Sequence
  ENSG00000140798_36 (sequence is synthesized)
aaaatgggaaggtgattgagtttgacaagcctgaagtccttgcagagaagccagattctgcatttgcgatgttactagcagcagaagtcagattgtagaggtcctggcggctgattctag

SEQ ID NO: 362948 - DNA, 120 bp, Artificial Sequence
  ENSG00000140798_37 (sequence is synthesized)
aggaggaagaggctctgtgagatgaataggaggagtcttcaggaggaggggctgtcctctccgcaggcagccctggtcttcagcccctcccatccacggagtgagctggggctgaagttg

SEQ ID NO: 362949 - DNA, 120 bp, Artificial Sequence
  ENSG00000140798_38 (sequence is synthesized)
tccccactgccatactcagtccatgtcaccccacttggtgggcttggggttggttctgggtggtgaaccggggcagacccagctaatggattaaaaaactgcccttcacctcccaaatcc

SEQ ID NO: 362950 - DNA, 120 bp, Artificial Sequence
  ENSG00000140798_39 (sequence is synthesized)
ccaagggttcctcatgtgttttcaccaaaaccaccccagtgcctgagattgaaaatattgtaactttcagttagaaatcagccacaataaacaacatgggaaaatgccttaggatggagt

SEQ ID NO: 362951 - DNA, 120 bp, Artificial Sequence
  ENSG00000140798_40 (sequence is synthesized)
ttgcaaggtttccttgcccattatcagaaggaaaaagagcagaattttcttctcgtttaaccccactcacttccatcttgactgggtgacaagtggtaatgacacagatttgtagcgtga

SEQ ID NO: 362952 - DNA, 120 bp, Artificial Sequence
  ENSG00000140798_41 (sequence is synthesized)
aagactgaatacagtgtttggccaaaaatttttttaaaaatcatattatatgtttcaattgatctgttagaataaccaagaaaacaaaatgctggagtttctctataaatgacactttta

SEQ ID NO: 362953 - DNA, 120 bp, Artificial Sequence
  ENSG00000140798_42 (sequence is synthesized)
tatcttctttattcgtcgttaaaacgcggtaggaaattaccctgaaatgtcgccttgcaattatttcactgaagatattccaatttccatactatttcctccaatagacccttgttgcct

SEQ ID NO: 362954 - DNA, 120 bp, Artificial Sequence
  ENSG00000140798_43 (sequence is synthesized)
agccaggtttatttgtagacaccacgtaagtcagtagaacataatccttagttattctttcctattaaaagcaacaatagggctctacaatgatccagtcaagagcactacatgtatcat

SEQ ID NO: 362955 - DNA, 120 bp, Artificial Sequence
  ENSG00000140798_44 (sequence is synthesized)
ctcacttggtccttactacaatgctctgaggttggtactcttacccctaattttagagatgaagaaattaaagctcagggaagtaacatgcccaggctagtgagtagcaggatggagact

SEQ ID NO: 362956 - DNA, 120 bp, Artificial Sequence
  ENSG00000140798_45 (sequence is synthesized)
tgtggaatgttctgggaatggcaagtatggctggttggagaggaccgaaccatctgtgagagggaaccctgtcctataagagctacagccccagctggggtcagcagataatgaaactcc

SEQ ID NO: 362957 - DNA, 120 bp, Artificial Sequence
  ENSG00000140798_46 (sequence is synthesized)
agttggagaggaggacttcaggcgggtgggacaagagaaactgaatctgaggtccttggggagaagcaggccctggagtcctgggcagcagatgccaggctctgagccccatgactgctg

SEQ ID NO: 362958 - DNA, 120 bp, Artificial Sequence
  ENSG00000140798_47 (sequence is synthesized)
catccctgttattgtccttggcttgaatggacacagatctctctttatttctcaccctagttttggctccaggaaatgagaaagatgaaggaaaagaatctgaaacaggctcagaatttg

SEQ ID NO: 362959 - DNA, 120 bp, Artificial Sequence
  ENSG00000140798_48 (sequence is synthesized)
aaaacttcacatgccctggggagcactcaaggaaattaccttctagcaccaatttcctatgcgcgctgattactcaaacctggccagggaggcctggcctccagtgtttggcatctggga

SEQ ID NO: 362960 - DNA, 120 bp, Artificial Sequence
  ENSG00000140798_49 (sequence is synthesized)
ctcaggagcccttaagacaagctgatgacatcttgctgccagggtcccttaccattagaaaagggaaccaaaaaatagaagttatagagtgaaagtgtccccaggccaaaagcccagggc

SEQ ID NO: 362961 - DNA, 120 bp, Artificial Sequence
  ENSG00000140798_50 (sequence is synthesized)
gaaatcagactgaccaagaactttgtgatgtccccagggcatggctggcctggagctgttctgtctgagggaagcagtatcccaggggggctcacaagcactgctggtccctgtttctgc

SEQ ID NO: 362962 - DNA, 120 bp, Artificial Sequence
  ENSG00000140798_51 (sequence is synthesized)
atccagccttgggaggagccagggcccggggtctgagcattacttgtgttttataaacacattattaatgagcaagatgcttctgtattcattcatacactgagcagatattccagtggc

SEQ ID NO: 362963 - DNA, 120 bp, Artificial Sequence
  ENSG00000140798_52 (sequence is synthesized)
tctggacagccctagtttatgcctgtgtcccagtatcccatcaggtttaacaatggccactctgaaaagtgtcccagtttgcacaataaaataaatagttaccccgtgtatacagctatc

SEQ ID NO: 362964 - DNA, 120 bp, Artificial Sequence
  ENSG00000140798_53 (sequence is synthesized)
cattgcaaagtgcattcatttatttccacacctaagtgaacagaagctatttcaagcacaagaacagtagggctgcagcttctgtggggctccagatctgatatcaaggcacaaggggaa

SEQ ID NO: 362965 - DNA, 120 bp, Artificial Sequence
  ENSG00000140798_54 (sequence is synthesized)
aggcagtttctcagttagctctctctgtgatgagaggaacatttctcccatacagcaccagatgaagtagggtaactgtatttactgtatttagagttcattgtttgaaaaatgcattct

SEQ ID NO: 362966 - DNA, 120 bp, Artificial Sequence
  ENSG00000140798_55 (sequence is synthesized)
gcctcttgaaacagtagatttacattctgcgtctgagctgctcagcaccctgtgaggccctaggagctgccgatacatggagtggcagatttgggttgctcactctccctctttctctgc

SEQ ID NO: 362967 - DNA, 120 bp, Artificial Sequence
  ENSG00000140798_56 (sequence is synthesized)
caagaatttttatcagttcaaacccactctgctactcggggctgctgagaggcccaggtgtgtctttctgagcaccttgctcagagctgcctctcggcagggttccacctgtcattgcct

SEQ ID NO: 362968 - DNA, 120 bp, Artificial Sequence
  ENSG00000140798_57 (sequence is synthesized)
gcctcagtggtctctgctccattgcagagttgtgggcccttggtctcgtggcctgaggtccatattttgtggaccactgtcctgtactgagcactattcttggagcacgaggtcatcaca

SEQ ID NO: 362969 - DNA, 120 bp, Artificial Sequence
  ENSG00000140798_58 (sequence is synthesized)
atgaatgacagcatctaatgaactcgctgaaacacagctgtggagcctggcggacacccctcccagatgcattgagagatgaatcacctcctatgactccttttctgcccacactcgctt

SEQ ID NO: 362970 - DNA, 120 bp, Artificial Sequence
  ENSG00000140798_59 (sequence is synthesized)
tggtttactctggcagaagaagaacaccgacattgatcctgatgtctactgagaccttgcagtgtgccaggactgtgacaagcattttttccatgaattatttcactgaatcctcatctc

SEQ ID NO: 362971 - DNA, 120 bp, Artificial Sequence
  ENSG00000140798_60 (sequence is synthesized)
accccatgagatgggatttgaggctcactgaggttagtaacttatctacagatgcccaggaaggaagggacagagatagggcttgaaccctaaccagtctggctccacaggccctgctcc

SEQ ID NO: 362972 - DNA, 120 bp, Artificial Sequence
  ENSG00000140798_61 (sequence is synthesized)
caaccccttcacaacaaagcccctccagtcctttccccttggcctgttgcaaggacagtgatggtcatcagtatcatccctgggggagagtgacttctgagggtttggctgtttgcatgt

SEQ ID NO: 362973 - DNA, 120 bp, Artificial Sequence
  ENSG00000140798_62 (sequence is synthesized)
ataagacacgaaaccatcttagcaaacccctctcccaccccaaccccttgctatcactgccatgtcagccaaggggagactatgtagaataatagtagccatttagccaaattcctcaaa

SEQ ID NO: 362974 - DNA, 120 bp, Artificial Sequence
  ENSG00000140798_63 (sequence is synthesized)
gcacaggcttaggttattaaatcctgaacatatccctgtggggtaggtgtctgctatgatctgaacattgtgttcccccaaaatcctcctgttgaaacataatcctcagtgtgacagtat

SEQ ID NO: 362975 - DNA, 120 bp, Artificial Sequence
  ENSG00000140798_64 (sequence is synthesized)
agaggtagggcctttaggaggtgattaattaggtcatgagggtggagacctcatgaataggattggctctcttataaaagagacttggggaagcttgttcaccccttcctccatgtgagg

SEQ ID NO: 362976 - DNA, 120 bp, Artificial Sequence
  ENSG00000140798_65 (sequence is synthesized)
aaaggtaatattaacttttaaagcaggaggcacatttgtgtttggtacacactctcctacagatgctgatgctgttggtaatgactgctaagtgggttctgagtttaatgaattctgatt

SEQ ID NO: 362977 - DNA, 120 bp, Artificial Sequence
  ENSG00000140798_66 (sequence is synthesized)
aaacattcatcagatccacacagacactggttttcctcttcctgagccaagcgttcaggagaggcgacttctgcagacctgcgactgcacactgggaagaggatagaatcggcacttcat

SEQ ID NO: 362978 - DNA, 120 bp, Artificial Sequence
  ENSG00000140798_67 (sequence is synthesized)
tcccagggcagaggagcatatgttccgaggttctctgcaacagggcatatgtggtctgactagagaaaagtgaatccagcaattttgctttaggctgagtacccaaaactgctcagaatc

SEQ ID NO: 362979 - DNA, 120 bp, Artificial Sequence
  ENSG00000140798_68 (sequence is synthesized)
atgagcaagtatgtaatgaatcagccctgacattattaattgacatcagagctatcaggatatattatcactgttagtgtcctcagaatggtctaactaaataaaaacaaagctcaactt

SEQ ID NO: 362980 - DNA, 80 bp, Artificial Sequence
  ENSG00000140807_0 (sequence is synthesized)
ccgcctcgggctccgctcggctcgggggctgcttcgggaggaggagagccaagggaggcgccaggcccgcgggccgggcg

SEQ ID NO: 362981 - DNA, 120 bp, Artificial Sequence
  ENSG00000140807_1 (sequence is synthesized)
catggcttagggacgctcccggccgccgcagccccagcatggggaaacttcactccaagccggccgccgtgtgcaagcgcagggagagcccggaaggtgacagcttcgccgtgagcgctg

SEQ ID NO: 362982 - DNA, 120 bp, Artificial Sequence
  ENSG00000140807_2 (sequence is synthesized)
cctgggctcggaagggcatcgaggagtggatcgggagacagcgctgcccgggcggtgtctcgggaccccgacagctgcggttggcgggcaccataggccgaagcacccgggagctcgtgg

SEQ ID NO: 362983 - DNA, 120 bp, Artificial Sequence
  ENSG00000140807_3 (sequence is synthesized)
gcgacgtgttgagagacacgctcagcgaggaagaggaggacgactttcggctggaagtggccctgcctcctgagaagactgacgggctgggcagcggagatgagaagaagatggagagag

SEQ ID NO: 362984 - DNA, 120 bp, Artificial Sequence
  ENSG00000140807_4 (sequence is synthesized)
tgagcgaaccctgcccaggctccaagaagcagctgaagtttgaagagctccagtgcgacgtgtccatggaggaggacagccggcaggagtggaccttcaccctgtatgactttgacaaca

SEQ ID NO: 362985 - DNA, 120 bp, Artificial Sequence
  ENSG00000140807_5 (sequence is synthesized)
acggcaaggtcacccgagaggacatcaccagcttgctgcacaccatctatgaggtggtggactcctctgtcaaccactccccaacatccagcaagatgctgcgggtaaagctcaccgtgg

SEQ ID NO: 362986 - DNA, 120 bp, Artificial Sequence
  ENSG00000140807_6 (sequence is synthesized)
cccccgatggcagccagagcaagaggagcgtccttgtcaatcaggctgacctgcagagcgcaaggccccgagcagagaccaagcccactgaggacctgcggagctgggagaagaagcagc

SEQ ID NO: 362987 - DNA, 120 bp, Artificial Sequence
  ENSG00000140807_7 (sequence is synthesized)
gagccccgctcaggttccagggtgacagccgcctggagcagtctggctgctaccaccattgcgtagatgagaacatcgagaggagaaaccactacttagatctcgccgggatagaaaact

SEQ ID NO: 362988 - DNA, 120 bp, Artificial Sequence
  ENSG00000140807_8 (sequence is synthesized)
acacgtcccaatttgggcctggctccccttccgtggcccagaagtcagaactgcccccccgcacctccaatcccactcgatctcgctcccatgagccggaagccatccacatcccacacc

SEQ ID NO: 362989 - DNA, 120 bp, Artificial Sequence
  ENSG00000140807_9 (sequence is synthesized)
gaaagccccaaggcgtggacccggcctccttccacttccttgacaccccaatcgccaaggtctcagagctccagcaacggctccggggcacccaggacgggagcaagcactttgtgaggt

SEQ ID NO: 362990 - DNA, 120 bp, Artificial Sequence
  ENSG00000140807_10 (sequence is synthesized)
cccccaaggcccagggcaagagtgtgggtgtgggccacgtggccagaggggcaagaaacaagccccctctgggacccgccatccctgcggtgtccccctccgcccacctggctgccagcc

SEQ ID NO: 362991 - DNA, 120 bp, Artificial Sequence
  ENSG00000140807_11 (sequence is synthesized)
cggccctcctcccctccctagcccccctcgggcacaagaagcacaagcaccgagccaaggagagccagcagggctgccggggcctgcaggcaccactggcctcaggtggccctgtcctgg

SEQ ID NO: 362992 - DNA, 120 bp, Artificial Sequence
  ENSG00000140807_12 (sequence is synthesized)
ggcgggagcacctgcgggagctgcccgccttggtggtgtatgagagccaggccgggcagccggtccagagacatgagcaccaccaccaccatgaacatcaccaccattaccaccacttct

SEQ ID NO: 362993 - DNA, 120 bp, Artificial Sequence
  ENSG00000140807_13 (sequence is synthesized)
accagacatagagcccctccccagggccccaccctgccatatgaaggaccccacccccgacaccacaaggcattattattctattaattattgttattatgatgattattgttattaata

SEQ ID NO: 362994 - DNA, 120 bp, Artificial Sequence
  ENSG00000140807_14 (sequence is synthesized)
attattgttactccactaatatttagctagcctacatgtagaagatctatggaaacacagaactaaacttttatttatatgttgtggggactgcataactagcccaggaaatgactctgg

SEQ ID NO: 362995 - DNA, 120 bp, Artificial Sequence
  ENSG00000140807_15 (sequence is synthesized)
ttttgagtggcctgtaatgggcagaggctccctcggggctcgggatctgcagcatctatgtggatcagcccacacccttcccagagccagggagcccttagcctcaactctgccccaccc

SEQ ID NO: 362996 - DNA, 120 bp, Artificial Sequence
  ENSG00000140807_16 (sequence is synthesized)
cagcctcttccaggagagcacccttacttggcccggcttccagagaccctcgaaatctccgagaagataaacagctgctacctcttagtattattctgattttattttgcccttaactga

SEQ ID NO: 362997 - DNA, 120 bp, Artificial Sequence
  ENSG00000140807_17 (sequence is synthesized)
ttgttatatgctacaagggatttcagtggactgcagagtgcgaacgtcttgctgttgtgtttttatgtcccaacctagaaaccttagctgtcttttctggagttgtctttcatgcttttc

SEQ ID NO: 362998 - DNA, 120 bp, Artificial Sequence
  ENSG00000140807_18 (sequence is synthesized)
cagtgggatcaagcccttttccccaagagtcccatctcttctgccatgcacgacatgaaaatccacttctcttccttctccttcttctctctctactttacagtgatacacacacgtatt

SEQ ID NO: 362999 - DNA, 120 bp, Artificial Sequence
  ENSG00000140807_19 (sequence is synthesized)
taaggactatccctgagaccatccttctcattttggaaactgctagggagggaaccaaccacttaaacaagcgtggttttccaagatccaggcaattgtgtgctgttggttgtggtggag

SEQ ID NO: 363000 - DNA, 120 bp, Artificial Sequence
  ENSG00000140807_20 (sequence is synthesized)
gatgtggcacatatatacgtacctacacggttctctaacagagctttctgtatctatagatagatgccatctgtccatttctatgtatctttctataaatatacactctcaggtatcttt

SEQ ID NO: 363001 - DNA, 120 bp, Artificial Sequence
  ENSG00000140807_21 (sequence is synthesized)
tctggtgtgtataaatcagtggtttgcttccctggatgcttctggaacccagatgtgaccctgcttgtctccttttggggctggacggctctcagatgctttcatcagaggtccattctc

SEQ ID NO: 363002 - DNA, 120 bp, Artificial Sequence
  ENSG00000140807_22 (sequence is synthesized)
gggttttggggtctgatggattttggagagaactgctggggtacagaaacttggtgggaaaaggggactgtggccagagttgggaccctggagcagcatcctctgcagagaaggattttg

SEQ ID NO: 363003 - DNA, 120 bp, Artificial Sequence
  ENSG00000140807_23 (sequence is synthesized)
tctggccagagcctggagaaacctgaaaaagaaccagtcagctagccagggtctcagagaaaagcagattacacactcaaattgggtaatttgagcagagcttaataaaggcagtattta

SEQ ID NO: 363004 - DNA, 120 bp, Artificial Sequence
  ENSG00000140807_24 (sequence is synthesized)
caaagtgtgggctaagcctcccatgagagtgcagaaccctggggctagcagtgtggggcgctattcccacccctgggcctgagtggggaaggagttatctttagcagacagaggattgct

SEQ ID NO: 363005 - DNA, 120 bp, Artificial Sequence
  ENSG00000140807_25 (sequence is synthesized)
ggaggagtgagaggggcacctgaaggagctgtgacctttgcttaaaggatgcagccagtcatggggaccctccagggaaattaatatcctgacctgctttcctgccccccagccccctca

SEQ ID NO: 363006 - DNA, 120 bp, Artificial Sequence
  ENSG00000140807_26 (sequence is synthesized)
atccattggctgaggccgctggaagccaccgggccaagggagcttgttgatgtgggtcacacgggcatgttcccaggtcagagaggagagtggagagtgaatctagggagactcaagagg

SEQ ID NO: 363007 - DNA, 120 bp, Artificial Sequence
  ENSG00000140807_27 (sequence is synthesized)
gagaagtgactccagctaccttcctttctgccgttttgtctcccagctggcattctcttttccagagcctcgagtttgggtttaatgtagttagtaaggagttacttccaaaggtagtgg

SEQ ID NO: 363008 - DNA, 120 bp, Artificial Sequence
  ENSG00000140807_28 (sequence is synthesized)
gcttagttgtcaccgtattcttaattttattaatgactgatgtgcctgggattggattaatacattaatccttaggacagccccatgaggcagcttggtggcagctcaggaagcatgtct

SEQ ID NO: 363009 - DNA, 120 bp, Artificial Sequence
  ENSG00000140807_29 (sequence is synthesized)
aaggctcagaagttcataactcccttgaggccgcacagagggcggagctggaattctggtctcccactcgatcccttcgccactggtgcagagcttaatcacggccatgggctgcccttg

SEQ ID NO: 363010 - DNA, 120 bp, Artificial Sequence
  ENSG00000140807_30 (sequence is synthesized)
ttttgggttgtgggtttctgttcagtgagaacgcaactcaatccaaagtgaatgaaaccaagttggaaggcagggagggaactggctttgagatgacagggtccaggatgtgaatgcagc

SEQ ID NO: 363011 - DNA, 120 bp, Artificial Sequence
  ENSG00000140807_31 (sequence is synthesized)
tgagactggttcttgtccctccctcttgtccctcggattgataacttgtactcaactacatgcttttgtcagggaaccctggctgctggccttctgggtcccctaaccataagaaaaagg

SEQ ID NO: 363012 - DNA, 120 bp, Artificial Sequence
  ENSG00000140807_32 (sequence is synthesized)
accttccgttagtgtaaagcccaaggcaggattctgcttggctgggcttcgatctggtacccatagctggaccaatcatgacatcccagatggggtcacgtggccaacctgccgcaaggg

SEQ ID NO: 363013 - DNA, 120 bp, Artificial Sequence
  ENSG00000140807_33 (sequence is synthesized)
ggtggggtctgtaccggaagacaggaggggaggggtgcagatcggacaggaagtaatggcatcccaggccccgaattgctgcaaccctggaggccagcccggagttgagactactggttt

SEQ ID NO: 363014 - DNA, 120 bp, Artificial Sequence
  ENSG00000140807_34 (sequence is synthesized)
tagagcagttcctctgcctccctaagctccacacctgtcaggattctgttacttcttggtaactgggacttgcccaactttaaaaacattatttaaaaaaatagtaatgtgcacatgtaa

SEQ ID NO: 363015 - DNA, 120 bp, Artificial Sequence
  ENSG00000140807_35 (sequence is synthesized)
aagattcaaatagtatatatacaaggtgtacagtaaaaagtaaacttccctccatcccaggcctgccagcatccctgatgccgactttctgggtgtggcctagggcccctcagtgtaatg

SEQ ID NO: 363016 - DNA, 120 bp, Artificial Sequence
  ENSG00000140807_36 (sequence is synthesized)
taggggttgtgagcacagactttggtgccagtttgctaggttcgaatcctgactccctctttgtagctctgtgcttcaattgaaatactgtgcctcagtttctcctttataaaggcaggg

SEQ ID NO: 363017 - DNA, 120 bp, Artificial Sequence
  ENSG00000140807_37 (sequence is synthesized)
atcatgagagtgcctgtcccttgtgagcactatgaaagtgttagctgttctttaccagaataaatgcatttctatatcttcccatatgcattttgttaatttttaaagtatttcaaacac

SEQ ID NO: 363018 - DNA, 120 bp, Artificial Sequence
  ENSG00000140807_38 (sequence is synthesized)
aaagtttgaaacagaaaattgtgtaacattaactatgaacttaccacccagaatttacaaatgctgacattttgcaatatttatttcggatctatttttaagggggggaaccctgcagtt

SEQ ID NO: 363019 - DNA, 120 bp, Artificial Sequence
  ENSG00000140807_39 (sequence is synthesized)
actgcttaatcctcttcccaccccacccttttatttttacacaaggagcatagtgttcatacttatgctatttttttcagtaactgaatatatttggagatctccctccctaggtcatag

SEQ ID NO: 363020 - DNA, 120 bp, Artificial Sequence
  ENSG00000140807_40 (sequence is synthesized)
agctctgcccccttctctctaacagctgctcagccttctgtgactagaggtgctgtcaccagcttgccccatcccctcctggtggtcataagggtcatctctcatcccaggctctggcga

SEQ ID NO: 363021 - DNA, 120 bp, Artificial Sequence
  ENSG00000140807_41 (sequence is synthesized)
acactgtgctgagagtccttgcatacagctctcccggtgcccacaggcaggaacacaggcgacagaaagtttccacgtggaactgcagagttcaagagcaagtgtgatttcaattttgat

SEQ ID NO: 363022 - DNA, 72 bp, Artificial Sequence
  ENSG00000140807_42 (sequence is synthesized)
aactgcagagttcaagagcaagtgtgatttcaattttgatgagattgtacatgacctctaaaagaggttata

SEQ ID NO: 363023 - DNA, 72 bp, Artificial Sequence
  ENSG00000140807_43 (sequence is synthesized)
gaggttatactgaataatgaggaatcaaaggaagaagaagaaagagagaggaaggaaggttggaaggaagga

SEQ ID NO: 363024 - DNA, 120 bp, Artificial Sequence
  ENSG00000140807_44 (sequence is synthesized)
agaagaagaaagagagaggaaggaaggttggaaggaaggaaggagggaaaattagaaggggaaaccatgattgctggtgaggttttgagcacattttcctgcaggctggtatgggtgaga

SEQ ID NO: 363025 - DNA, 120 bp, Artificial Sequence
  ENSG00000140807_45 (sequence is synthesized)
ggtttggtcttgtttgcaaatcttctgaaggccattccagaggagcagttgccactgccccatcccctgagctctgagcgtgggggttcccctggggagactcctggtgagaggatgccg

SEQ ID NO: 363026 - DNA, 120 bp, Artificial Sequence
  ENSG00000140807_46 (sequence is synthesized)
atttctgctgatctgtcactgggtaccgaggactgggtgtgtttaaggcagacagccaggtgaggatcccagctactggggcctgctgtcatctcctgggagtacccgggggtcaggagc

SEQ ID NO: 363027 - DNA, 120 bp, Artificial Sequence
  ENSG00000140807_47 (sequence is synthesized)
ctaggggactcttgcacttcacatccagccatgctaattacactttttggcaaaggaaacagctaggagcagtttctttcactcctacagccccgttttctcagtgtttagacctcgaat

SEQ ID NO: 363028 - DNA, 120 bp, Artificial Sequence
  ENSG00000140807_48 (sequence is synthesized)
tattactgggctagagggaaggcagcctctgaagtgtggcaggaggaggggaagtctgcctgcatcttggtgtgtctgtcagatgccagcactaataacctggcttctgtgaggcctgtc

SEQ ID NO: 363029 - DNA, 120 bp, Artificial Sequence
  ENSG00000140807_49 (sequence is synthesized)
agtgctctcaggaatgaaaggggacccctgagaggtgctcagtaccagcaggctgtgaatgctctctacccaccaccctcacctcctcgttaaagatggtgctacctgccacacagcaga

SEQ ID NO: 363030 - DNA, 120 bp, Artificial Sequence
  ENSG00000140807_50 (sequence is synthesized)
catctggtcgctgcacacccgaaagaccccaaggcagtctgccccttgtccagccacacgccagcacccaccctcctggcccctgcctcggcctccccagaccagctgcacccagccccc

SEQ ID NO: 363031 - DNA, 120 bp, Artificial Sequence
  ENSG00000140807_51 (sequence is synthesized)
aacacgcaccccttctccagatgtgtgcagggcctcattttgcagagcaaagacagatgtttcagccacacgctttattaacttctaaaacctgtgctcaggacactcttcaacagtcat

SEQ ID NO: 363032 - DNA, 120 bp, Artificial Sequence
  ENSG00000140807_52 (sequence is synthesized)
gaaaagtttgatcacttgccacagtcaggacctttgtgtggggctctgatctgatgttcggtctcatcatctcccaaaccagcagtcgtttgtaccccaaccctctgctcaggggctcat

SEQ ID NO: 363033 - DNA, 120 bp, Artificial Sequence
  ENSG00000140807_53 (sequence is synthesized)
acccccaaatgattttcctgatttatgtatttccctacaaagggctttctatacctagcatctgcctccagcatgagaagggggaataggtgagacccatttgccagtagcagacgggga

SEQ ID NO: 363034 - DNA, 120 bp, Artificial Sequence
  ENSG00000140807_54 (sequence is synthesized)
ccctggggagaaaatggcagagcctgttggagactccctgtctccagctgaccagccaatgggattcctcttccctccactgtctcccacaaagtagaagaatcctggtacatttagccc

SEQ ID NO: 363035 - DNA, 120 bp, Artificial Sequence
  ENSG00000140807_55 (sequence is synthesized)
atgagcctggcacagatccctatctagacatgaggccctttagacatgactttggcattgaccagcctgttggcaatgggtcggggaggcagaggggatgctcacaccagtaattctcat

SEQ ID NO: 363036 - DNA, 120 bp, Artificial Sequence
  ENSG00000140807_56 (sequence is synthesized)
cccctgaatgcttgggatcacctggggagagttcacaaaatactggtgcaggggtcccacctctgatgatgctgagtggtgggtctggggtgtggcccaggcatcatgatgtttcaggcc

SEQ ID NO: 363037 - DNA, 120 bp, Artificial Sequence
  ENSG00000140807_57 (sequence is synthesized)
cccaggtgacttcttaggcagcccagctaagcccctagagccttgcaatttcccccaaatgacctcagagggcccgatttgagggaaatgcctaacttcaggggccgtaagaatccccca

SEQ ID NO: 363038 - DNA, 120 bp, Artificial Sequence
  ENSG00000140807_58 (sequence is synthesized)
gggagcatgtgaaatgcagataccaggcccacccccagagatgagctgaggtgggtcaggggtgaagtgcagggatcagtgtttttcacaagctccatacctccaggaaatggtgttgtg

SEQ ID NO: 363039 - DNA, 120 bp, Artificial Sequence
  ENSG00000140807_59 (sequence is synthesized)
gttgggcccgtagaaaacattctgagagtcctgttgcctgtgccttggtgcacgtggggtggaatcccagtggccctgccttgaggaggatgtgcattaacgtggtaggggagacagaga

SEQ ID NO: 363040 - DNA, 120 bp, Artificial Sequence
  ENSG00000140807_60 (sequence is synthesized)
cagctccacctgccccctgccccaccggggacctccaaaaacttcatggatgttagagcaagcagccatgctgcagcagaggatgaggctggcggatttagtaagagccctctgtgtttg

SEQ ID NO: 363041 - DNA, 120 bp, Artificial Sequence
  ENSG00000140807_61 (sequence is synthesized)
ggctgagttctttctctagttgccctgtcatctggcctctggataacccacctctcctccctcatcctaaaattacagatggcgaaagatggccacatttagtgagacccctaaggtcct

SEQ ID NO: 363042 - DNA, 120 bp, Artificial Sequence
  ENSG00000140807_62 (sequence is synthesized)
ccaactagggtgggtccacagtggcccctggtgcatggaccacacactctcttccctcctctggctcaggactacggtctgaaattagggagatatgaatgtctttcttgaaaacttctc

SEQ ID NO: 363043 - DNA, 120 bp, Artificial Sequence
  ENSG00000140807_63 (sequence is synthesized)
ttcccagtcttcccactttgcttgggggtccttggtcaaggccagctttggggactagggcttgttgcgactaccagctgtctcattttgctgtactgcaaactcaggcttggttccaag

SEQ ID NO: 363044 - DNA, 120 bp, Artificial Sequence
  ENSG00000140807_64 (sequence is synthesized)
cttatgggggccctgtccttcccctagtagggtttgttttggggtcacatctggtcatacccttcagagagctcttccccagcctctacatcagggagagaggtaggtagggaggagcat

SEQ ID NO: 363045 - DNA, 120 bp, Artificial Sequence
  ENSG00000140807_65 (sequence is synthesized)
tcaaggattagaagaaggactaaagtacaacagccttggaggaactgccaggaactaagggcgagcactggagaaggcaacctgggaccccctgcgcttctgagcaggaagaccaagacc

SEQ ID NO: 363046 - DNA, 120 bp, Artificial Sequence
  ENSG00000140807_66 (sequence is synthesized)
ttcaggggccctaagcactgaaaacatcattcctcatccccaagccctggcatccccctgttcttctaaaataattcttttctaggtatttctgattgcaaaattctggatgggttcatc

SEQ ID NO: 363047 - DNA, 120 bp, Artificial Sequence
  ENSG00000140807_67 (sequence is synthesized)
caagctgacctttgctgttttttcccttcccaacaaggcctcactttttggagccaccttagctggtgcctaggcagaggggcagtcagcagtggttatcaggatcctggctctatgggt

SEQ ID NO: 363048 - DNA, 120 bp, Artificial Sequence
  ENSG00000140807_68 (sequence is synthesized)
tgccttcctcctggtctgtaaagcccctgcaggcagggacttcttagatagctgcttccttagggcatggcatgtagtgggtggttaatgaatggaagagagggaatgagtgatcaaggg

SEQ ID NO: 363049 - DNA, 120 bp, Artificial Sequence
  ENSG00000140807_69 (sequence is synthesized)
gggaaagcaacacatcatcgccaacttttaattttgctaaataaggatattagaaaaagaatagaaaattgcagtcccttactgtttaaagaaaaaccaaaagaagttaaaaagaaaaaa

SEQ ID NO: 363050 - DNA, 120 bp, Artificial Sequence
  ENSG00000140807_70 (sequence is synthesized)
aaaacaacctcattatgttgtctttgtttttgttttgttttctttccttggaaatcagtgaaagtttggtcagccacacattgtagtagggctagaatttttcttcccattttagagacg

SEQ ID NO: 363051 - DNA, 120 bp, Artificial Sequence
  ENSG00000140807_71 (sequence is synthesized)
ggagacctgagactccaggtgggggtgtggagtccaaatggacagttcttcccaaagctgagcgcagaccggcttgcaggtcctttttccagtcatggcctcagctgtctgcaaaggact

SEQ ID NO: 363052 - DNA, 120 bp, Artificial Sequence
  ENSG00000140807_72 (sequence is synthesized)
tgggggaggctgacagctctgatgtctggagagggggcttctgcaacctccaacactggtcagtaactccacagaggccattggcgggggtggtctgcttgtatcagcaggcctgtcatg

SEQ ID NO: 363053 - DNA, 120 bp, Artificial Sequence
  ENSG00000140807_73 (sequence is synthesized)
gccagttcaatggtcggggctgaactatgtctcttggtgcctggtagaggggttggagtgggcctgaggccaacttgctcagagccacactccccaggaagctgtggagtctggaactct

SEQ ID NO: 363054 - DNA, 120 bp, Artificial Sequence
  ENSG00000140807_74 (sequence is synthesized)
gccctgccttcctgtcccctgcccactctaagcctccagaagtcaatcctctgctcaccgggaccgtacctagcctggcccatcgatgtgtcatgtttgacccatcaagggtttcaaaaa

SEQ ID NO: 363055 - DNA, 120 bp, Artificial Sequence
  ENSG00000140807_75 (sequence is synthesized)
tttttaattaatttccaaaatctgagggtttcacctaaaaacctggatgtttggcttttctcataaaaatcagaaagtgggtttaccccaggctcctgttcccacatggctgcaatccgc

SEQ ID NO: 363056 - DNA, 120 bp, Artificial Sequence
  ENSG00000140807_76 (sequence is synthesized)
ccgcctcttccaatggtgcacatgccttttttcctgcgcccggagcccctctcagcctgattttgaggcctggctttgatgcgattcagctcatgacccctgcgcagcctcaagcaccta

SEQ ID NO: 363057 - DNA, 120 bp, Artificial Sequence
  ENSG00000140807_77 (sequence is synthesized)
agttttggaggtcagtgatgccacttaaaaacctgttcagggcagagcgttagacaggaggatggctaagggagcagcttcaggcatgggaggactttcatggggaagtctttggggcag

SEQ ID NO: 363058 - DNA, 120 bp, Artificial Sequence
  ENSG00000140807_78 (sequence is synthesized)
tcctggagaccctcacaatgtggccccactcctcctttagatggggcaaggtgggctggaacccccagcaaagggtcccaggctgtgtgagaccccgcccagcactccttaaacagccaa

SEQ ID NO: 363059 - DNA, 120 bp, Artificial Sequence
  ENSG00000140807_79 (sequence is synthesized)
gacaggtggaaagccccaactcaaaagactggctggattgtacccggctcagtgacttcccctctttgagactcagtttgcttttctgtaaagtggacctaatgaggcccgcttggcttc

SEQ ID NO: 363060 - DNA, 120 bp, Artificial Sequence
  ENSG00000140807_80 (sequence is synthesized)
agctccagggactttggagatttaagcaaagcaagaaatgggaaaggagtttgttacatatcaggcttcctggaggaatgccccccagctctcttggagggggaagcaaaaagactgctg

SEQ ID NO: 363061 - DNA, 120 bp, Artificial Sequence
  ENSG00000140807_81 (sequence is synthesized)
atcaggcaggggacgggaactccccgagtggccacatgggcagtctcagtaggagtctcaggccaggctctgtctgtggattcccacttctctgggctgcatctcactgttcaggctaga

SEQ ID NO: 363062 - DNA, 120 bp, Artificial Sequence
  ENSG00000140807_82 (sequence is synthesized)
gtctggtccttgcccatctgcaggtccaggaagatgtggccccaaattctctggacctgatgtcctagatcctgtgcacttggcttcatggatagagtctgagaaggttgcaggatccag

SEQ ID NO: 363063 - DNA, 120 bp, Artificial Sequence
  ENSG00000140807_83 (sequence is synthesized)
tagctggaccacagaatgcagcctgggggtttggctaagatgagcagactggcccatggttgagactttggacctgagctgagtcctggttctactacttcctagatgtgtgacctggga

SEQ ID NO: 363064 - DNA, 120 bp, Artificial Sequence
  ENSG00000140807_84 (sequence is synthesized)
caagtgactcacctctgtgccttggtgtttttctctaacatggggctaattggggtaactaccttactgagctgttatgagtaaatgatccagtgggcgtgaagcgttcagcgcagagcc

SEQ ID NO: 363065 - DNA, 120 bp, Artificial Sequence
  ENSG00000140807_85 (sequence is synthesized)
tggcacgtaataggccctcgataagtaaaacagcaacagtagctgcagttaggagaatgtgaccccagaaggctcatgggaaaggaggtgcagtcctgatggatgaagggtacctgtcct

SEQ ID NO: 363066 - DNA, 120 bp, Artificial Sequence
  ENSG00000140807_86 (sequence is synthesized)
ccaccccggctgcagagcccccagtgagacagctgctgtggcatgctgcctctgctacacactcaaaaaacacttgaggacatgacttttccctctcaagtttgatgggatcactctgtt

SEQ ID NO: 363067 - DNA, 120 bp, Artificial Sequence
  ENSG00000140807_87 (sequence is synthesized)
ccttccagacccgacttgtggtgtgaacttggacaagcccctgctgtctctggccttcagtaccatatttgtattatgaaactgcccttggcttgaagctagactatgggggtggcagct

SEQ ID NO: 363068 - DNA, 120 bp, Artificial Sequence
  ENSG00000140807_88 (sequence is synthesized)
ctaagtcctacaaacagtaggggtagtggtggggatgggcagcctgaaagccatgccagcagtgccttccttggggaaagaggtggcctctggagcaatgcttcgctaccctacatctgg

SEQ ID NO: 363069 - DNA, 120 bp, Artificial Sequence
  ENSG00000140807_89 (sequence is synthesized)
gtctgtccttgcccaactcctaagctgcaggatcgctgaggagtccacattgccatatctgccacttacagagtgcctactgtgcacccagcccacattcactagtgtcctcaaaacagc

SEQ ID NO: 363070 - DNA, 120 bp, Artificial Sequence
  ENSG00000140807_90 (sequence is synthesized)
cttgagaggaaaccaacgaggaaacagagttacagttcagttaagcaacttacctaacttgtggctaatgcatggtaggattaaacataagcctgacatatgctagccacatgaccctcc

SEQ ID NO: 363071 - DNA, 120 bp, Artificial Sequence
  ENSG00000140807_91 (sequence is synthesized)
ctttccaggagcctgctggcattgatacaggttgacaaagaccagtcctactccgttgtctgccattactccagccaagtccagggacacgtgaggcaaggggagctggggctgctggtg

SEQ ID NO: 363072 - DNA, 120 bp, Artificial Sequence
  ENSG00000140807_92 (sequence is synthesized)
tggccgagacctcagcctcagcaagatggtgccccaagctctcagggtgccctgtggtccccttcattcataacattgatcatgtttgtaactgtagttgattctcactcatcgcagtag

SEQ ID NO: 363073 - DNA, 120 bp, Artificial Sequence
  ENSG00000140807_93 (sequence is synthesized)
ttacatcttataaagtcacctctgacactgagttagcgcatactgaactactgatcctaggggaaatacagggttaggttcctgccagcttctggtcacaacattttcattaccaatcag

SEQ ID NO: 363074 - DNA, 120 bp, Artificial Sequence
  ENSG00000140807_94 (sequence is synthesized)
tgcataaccttgttttatgtgtgcttctgtttaaagatgcctaatttactatatattcttgattcgttaacattgaactcagccaacagctctataactcatgactgaatgaagcttatc

SEQ ID NO: 363075 - DNA, 120 bp, Artificial Sequence
  ENSG00000140807_95 (sequence is synthesized)
tagcacacatattttctctgcaaggcatatcagagccttctgtgcttaagagcacaagatggcacttcagcgtcatgcctggggagcattttaagcagccaaatcaccaacacaaagcac

SEQ ID NO: 363076 - DNA, 120 bp, Artificial Sequence
  ENSG00000140807_96 (sequence is synthesized)
aaacatgcacaaagcatgatgctaaacagactgtgagaaggatgtttgtgtataggatgagaactgaaccacgaaagcagagcatcatcttgttcgacctcagttgagaacatgttgtcg

SEQ ID NO: 363077 - DNA, 120 bp, Artificial Sequence
  ENSG00000140807_97 (sequence is synthesized)
ggccactcagacttttcactgctctgcgcatatcacgaatgaagtgaatgcaccatgagtattgattttgggtgatagacaaattttagtgaataggcaatttcgtaaatacagaatcca

SEQ ID NO: 363078 - DNA, 120 bp, Artificial Sequence
  ENSG00000140807_98 (sequence is synthesized)
cggagggtgaggatccaccgtatgtacttatctatgcctctaattatttggtttccaccaaagcacttgttcaccagattatcttataatcccaaaggcccagcaaagacaggtgcttgt

SEQ ID NO: 363079 - DNA, 120 bp, Artificial Sequence
  ENSG00000140807_99 (sequence is synthesized)
tcaatgtctgttgagcgactgaaggacaacacattcctggcctccccacccgcccccagcgggacctagcacatggcctgctgttgacactccatgtgtctttgttgatagaattcataa

SEQ ID NO: 363080 - DNA, 120 bp, Artificial Sequence
  ENSG00000140807_100 (sequence is synthesized)
agacagatgggaaaaggggcacccctcttgcgggttcctgatgctgagagttgttggaatgttgatgctgcccccagagaagggtgacagcatgcagacagactggaaacccagaacctc

SEQ ID NO: 363081 - DNA, 120 bp, Artificial Sequence
  ENSG00000140807_101 (sequence is synthesized)
ctggggatattcagatggtgtcactgggctcggcctgtgggctctcagcacatctaggtactggggcccagggtgactctgagtggctcaagtcccctggccagatcctctccagatggg

SEQ ID NO: 363082 - DNA, 120 bp, Artificial Sequence
  ENSG00000140807_102 (sequence is synthesized)
cccctggccatcttagccaacatcacctgattctgtttcctctgactctgtcctcaaaaggcagcatctgattgtgatttggtccagaaattcctggccagaatatttccagtgtggtgc

SEQ ID NO: 363083 - DNA, 120 bp, Artificial Sequence
  ENSG00000140807_103 (sequence is synthesized)
atgtgaacttcccgccttcccttccttccctcctccctcctttcttcactggggagaaagaatttggcattcgagtatctcaccccgtcttgctaagcagtttagttagactgcaggcca

SEQ ID NO: 363084 - DNA, 120 bp, Artificial Sequence
  ENSG00000140807_104 (sequence is synthesized)
gtctctgtggtgtgaccaccccccagtggcaaggagctgccaaaactgagcttctgggcaagacgtgggcagagcaaagagagacccacacttggcacttcctgcccagaaaggacctgc

SEQ ID NO: 363085 - DNA, 120 bp, Artificial Sequence
  ENSG00000140807_105 (sequence is synthesized)
tcaggcctggctggcctttaccaccgtcatctccaggctttctgttcatccgtactttcaaagatttagtgatcaagtactatgtgtcaggaaccatgctcagcactcgataaaacagac

SEQ ID NO: 363086 - DNA, 120 bp, Artificial Sequence
  ENSG00000140807_106 (sequence is synthesized)
atcatctctacctacctttgtggagctttaatctagtgtgggggacggggggactgcttccacccagaaacgacatttttatccactgcgataacttctggggagacatgggagggaata

SEQ ID NO: 363087 - DNA, 120 bp, Artificial Sequence
  ENSG00000140807_107 (sequence is synthesized)
acagaggggacatgatggagatgggggactgcagagggactctccaggaagccacatttagggggtgacctcaagggtgaggaagaattagccaggtggaaagttagagggagcagctgg

SEQ ID NO: 363088 - DNA, 120 bp, Artificial Sequence
  ENSG00000140807_108 (sequence is synthesized)
tacaagggcctcaagggtggatggagggtgaacgcttgatgaactggtgcaggcctgtatggccgggtacagctggcaacgaggaggcccggtatgggcagaatctgggggcctgaatgg

SEQ ID NO: 363089 - DNA, 120 bp, Artificial Sequence
  ENSG00000140807_109 (sequence is synthesized)
tggagagtctgcttgtcaccccaagagacacatcaggaagctaggtggtcagtcgggagagagaggatgtgacactctagccaccaccacgcagagaagggattggaaacagtagcccgg

SEQ ID NO: 363090 - DNA, 120 bp, Artificial Sequence
  ENSG00000140807_110 (sequence is synthesized)
agaggaggctctcttggtaggatcccacggcaaccgaatggatgcacgttgtttatgacgttcttacccatgaaagcgctcaaggatccgcttgcttgcttacatgtgggatcagcacta

SEQ ID NO: 363091 - DNA, 120 bp, Artificial Sequence
  ENSG00000140807_111 (sequence is synthesized)
ccttccgtgctgccgaacatcttcttaagcgagggaaagaacaaaaagaaaagttggcaagaaagaaagggcaaagacagagagactgggagagaaagaggccccaatttcctctctctg

SEQ ID NO: 363092 - DNA, 120 bp, Artificial Sequence
  ENSG00000140807_112 (sequence is synthesized)
gtagttgctgaattggctctcgtgaaggcagaaagggaagggctgacttatgtccctctgccaggagaggggaaaggagggaggcatgatattgacttaaacgtgggggatttaaaaggc

SEQ ID NO: 363093 - DNA, 120 bp, Artificial Sequence
  ENSG00000140807_113 (sequence is synthesized)
ccctatgttcccactttgtgctttgcttctaacagacagcctgggacctttgaagtcggtctggcccagtggggagcgggcttctgtggagacaagatgctaacgggggcgggggaaggg

SEQ ID NO: 363094 - DNA, 120 bp, Artificial Sequence
  ENSG00000140807_114 (sequence is synthesized)
ggccagggggcggccgaaactctattaggcatgctctagcaaaaagaaaggcaaatccaatgataatgtacatctgtttcagggaatttataagctttgaacattttttatgggcagata

SEQ ID NO: 363095 - DNA, 120 bp, Artificial Sequence
  ENSG00000140807_115 (sequence is synthesized)
agtgggtccttttcttaccataacttagaacttcaaagctgagtgtgtggataatgcaaattgctgaaatatgagattttccctacaaagaggtttccaaaaaagacgaggaagaaaaag

SEQ ID NO: 363096 - DNA, 120 bp, Artificial Sequence
  ENSG00000140807_116 (sequence is synthesized)
aggggggggggagagagaacgaaggctaactgatgccacagtcttttatgtacatggcaaaaacgggacagaaattgatttttatgaaagaagaaattgatgggagacatggcgtgggga

SEQ ID NO: 363097 - DNA, 120 bp, Artificial Sequence
  ENSG00000140807_117 (sequence is synthesized)
ggaggcggccttgtggcaggtgctgggaggcagggactggggccgggcgggtccacccaggctgtgggtcagccctgcagggttgagctgcctggctgtggctcaggccctggggacaca

SEQ ID NO: 363098 - DNA, 120 bp, Artificial Sequence
  ENSG00000140807_118 (sequence is synthesized)
gtgccctccctctaggagccttaatggggaaaacaagaacactgtcactcgtaatgggcatgaaaggacacttcagagccagccaaggcagtgtcagcccagaacaacaccctggaacac

SEQ ID NO: 363099 - DNA, 120 bp, Artificial Sequence
  ENSG00000140807_119 (sequence is synthesized)
ccaagggggctccaaggcaggatgggaccccctggtttgggaaaatcagaaaaggcctcctggaggagaggggctctagggggcaggtatgatcctgaagggaagacagtggggtgggac

SEQ ID NO: 363100 - DNA, 120 bp, Artificial Sequence
  ENSG00000140807_120 (sequence is synthesized)
atttcagatggcaaaacagctgggtcaggatatccccagggtcatgcctctgccacccagaccccaccacattcagccctctgtgcttttcttgtctcccacatccccagccccagtaac

SEQ ID NO: 363101 - DNA, 120 bp, Artificial Sequence
  ENSG00000140807_121 (sequence is synthesized)
tagcagggacacagtcaacattcaatatgtgcatgttgaatgaatgaatgaatgaatgtgagatcgtgagaacacacagctggttggcaagcagcatcaaccagctctttcttttcacta

SEQ ID NO: 363102 - DNA, 120 bp, Artificial Sequence
  ENSG00000140807_122 (sequence is synthesized)
tattacatatctacagtggtagagtcatactagaagacatgatgggatggtggtgtggtctctgtagttgaccccatcatcctttctgtccataggtgattcgtctaagccagacatggc

SEQ ID NO: 363103 - DNA, 120 bp, Artificial Sequence
  ENSG00000140807_123 (sequence is synthesized)
aaagtcctcacctttgccagtgactgattcaggaaagatcatgtgtgaccttattctgggcaatgagatctgaagggaagtctgttgaggaacttgtaacatgtcatggtagtggccatc

SEQ ID NO: 363104 - DNA, 120 bp, Artificial Sequence
  ENSG00000140807_124 (sequence is synthesized)
ttgctacagcctgaggaccacagagcacacacagagagtgctgggtccttgggaatgatgttgagcaagcacttatacatgacctggcagccacccagcatctgtactttagttatttgg

SEQ ID NO: 363105 - DNA, 120 bp, Artificial Sequence
  ENSG00000140807_125 (sequence is synthesized)
tttttctcaggaggagatcctgagatgaagactcaggagcaggttgttgattttgaggtggtcctgggaaagacagggaggagagtggggaagtgaggcagaaaaggaagggaagttcca

SEQ ID NO: 363106 - DNA, 120 bp, Artificial Sequence
  ENSG00000140807_126 (sequence is synthesized)
ctccaggagcccacgtggaacatacctcagagttatcccacctgcacagggagggagctgaggtatttacccacccatccttgtcagtcattggtcaagggctatttctgtgcataggca

SEQ ID NO: 363107 - DNA, 120 bp, Artificial Sequence
  ENSG00000140807_127 (sequence is synthesized)
taggcttcagcagaattgcaggtactggcagtcggaaattggaccagcaaacagaaatgattcctacaggggatacaagccaggcacaggcagtgtctgttacttggggttcctgttgct

SEQ ID NO: 363108 - DNA, 120 bp, Artificial Sequence
  ENSG00000140807_128 (sequence is synthesized)
tagagttgaaagcatcataacccatcccaggtgatcatagaaggacctcaaaggaaaaggtgaggggtttggacatttcctgagaatccatgggggaaccattcagggtttggggcaggt

SEQ ID NO: 363109 - DNA, 120 bp, Artificial Sequence
  ENSG00000140807_129 (sequence is synthesized)
gtcaaccacaagaacattaaacaggctcttttggcagcaaagttgggagtggtgttgaagtaactgggaaaactccacagaggctcagcgtccacctctacctgacaccctgccagcaac

SEQ ID NO: 363110 - DNA, 120 bp, Artificial Sequence
  ENSG00000140807_130 (sequence is synthesized)
ctgggtgatttccgcaggtgtctgaaccccgatctctcagtgttatggcccccaccaccaggaaggcctccttttctctcttctatagccactcactcctgggccccactgtgaacccag

SEQ ID NO: 363111 - DNA, 120 bp, Artificial Sequence
  ENSG00000140807_131 (sequence is synthesized)
aaatgccacaccatggaagccacacactctgctgtctccttctgtcctcattcctgtccttctcacagtcagtccctcttggctcttcctagagtccctttcattccctcatttccactt

SEQ ID NO: 363112 - DNA, 120 bp, Artificial Sequence
  ENSG00000140807_132 (sequence is synthesized)
cctgccgctgtactgtcacctgtggcctggatttgcactcttggtccaacaccctcaactccaacacctctgtctttctgccccatccactagacaaaagctgactctggaaaacattag

SEQ ID NO: 363113 - DNA, 120 bp, Artificial Sequence
  ENSG00000140807_133 (sequence is synthesized)
gcactcagaatcaagggttctggggtcagatggataattgccatcatcctcaccaagttgccactggactttcttgcccctaaatccactgggcatttcattgctacctttcttgacttc

SEQ ID NO: 363114 - DNA, 120 bp, Artificial Sequence
  ENSG00000140807_134 (sequence is synthesized)
ttgattgtttttgtgatactgacacatcccccctttcagaacaccctctgcccttggattctgtgcacaggaagctagttgctcccctgaatacactctttcttccttgtaatacagcct

SEQ ID NO: 363115 - DNA, 120 bp, Artificial Sequence
  ENSG00000140807_135 (sequence is synthesized)
ctgattttgagcccaagaataaagactacagttctcagactccttcgcaaataaattttgtgactaaactctagtcaacagtaagtgtcatgtagcagctcctgggaatctcctttaaaa

SEQ ID NO: 363116 - DNA, 120 bp, Artificial Sequence
  ENSG00000140807_136 (sequence is synthesized)
agagagcttgtttatacctattgtcatctctgttcttctgtgccccttcttccattttgctgcctggaaagcagatgtgatggctggaattccagtcaccattttggaccatgaggacaa

SEQ ID NO: 363117 - DNA, 120 bp, Artificial Sequence
  ENSG00000140807_137 (sequence is synthesized)
caccctagagatgtggagtggctaaaagaagcctgtgttcctgagaacttagaggaccaggacctctattccaggcttggacacctacatttagactattatatgaggaagcaatcaact

SEQ ID NO: 363118 - DNA, 120 bp, Artificial Sequence
  ENSG00000140807_138 (sequence is synthesized)
tctcacttgtttcaaccactttcacttgcagtcaaacctgaattgtaagtgaaattgctttcctgatagcaaacctgttggattttctccagaatccctgggccacttttagcagtcaga

SEQ ID NO: 363119 - DNA, 120 bp, Artificial Sequence
  ENSG00000140807_139 (sequence is synthesized)
ttcgtctaatcctcctttaaagatggtggcagtgaaactggtacatgggacctgactgggctttgtttgcaactttctgataatttataattatttcaaaataaaaaaattttaaaaata

SEQ ID NO: 363120 - DNA, 120 bp, Artificial Sequence
  ENSG00000140807_140 (sequence is synthesized)
ttcctttgtctttgaagacccacagaccaccaggcacccctgcaggcatccctccccaggccaaacctcccctgcccgggctctggctgccctcctgggccagttctgtcttggccaaag

SEQ ID NO: 363121 - DNA, 120 bp, Artificial Sequence
  ENSG00000140807_141 (sequence is synthesized)
tgctccctgtccactcaaggtctggggagggcagaggacaggtggccgccccttggcctggcctctaggcccaggcttccactacccagtcagtgttgccacagataggggaccagcccc

SEQ ID NO: 363122 - DNA, 120 bp, Artificial Sequence
  ENSG00000140829_0 (sequence is synthesized)
acttggatccaggaatcgggcgtgttccaggctgctctctatggtagctttgggcggatagagggggcgcgcaaagtattaagggacaataatggccgctttcaaggtgtggattttggc

SEQ ID NO: 363123 - DNA, 120 bp, Artificial Sequence
  ENSG00000140829_1 (sequence is synthesized)
tccttgagcctgtctgagcgaggggtggcagcgccggcgccccagaatccgggacagaagggtcccaagagtcgcgcttggtgagagaaatcccagatcctgtgatgggggacaccagtg

SEQ ID NO: 363124 - DNA, 120 bp, Artificial Sequence
  ENSG00000140829_2 (sequence is synthesized)
aggatgcctcgatccatcgattggaaggcactgatctggactgtcaggttggtggtcttatttgcaagtccaaaagtgcggccagcgagcagcatgtcttcaaggctcctgctccccgcc

SEQ ID NO: 363125 - DNA, 120 bp, Artificial Sequence
  ENSG00000140829_3 (sequence is synthesized)
cttcattactcggactggacttgctggcttccctgaaacggagagagcgagaggagaaggacgatggggaggacaagaagaagtccaaagtctcctcctacaaggactgggaagagagca

SEQ ID NO: 363126 - DNA, 120 bp, Artificial Sequence
  ENSG00000140829_4 (sequence is synthesized)
aggatgaccagaaggatgctgaggaagagggcggtgaccaggctggccaaaatatccggaaagacagacattatcggtctgctcgggtagagactccatcccatccgggtggtgtgagcg

SEQ ID NO: 363127 - DNA, 120 bp, Artificial Sequence
  ENSG00000140829_5 (sequence is synthesized)
aagagttttgggaacgcagtcggcagagagagcgggagcggcgggaacatggtgtctatgcctcgtccaaagaagaaaaggattggaagaaggagaaatcgcgggatcgagactatgacc

SEQ ID NO: 363128 - DNA, 120 bp, Artificial Sequence
  ENSG00000140829_6 (sequence is synthesized)
gcaagagggacagagatgagcgggatagaagtaggcacagcagcagatcagagcgagatggagggtcagagcgtagcagcagaagaaatgaacccgagagcccacgacatcgacctaaag

SEQ ID NO: 363129 - DNA, 120 bp, Artificial Sequence
  ENSG00000140829_7 (sequence is synthesized)
atgcagccaccccttcaaggtctacctgggaggaagaggacagtggctatggctcctcaaggcgctcacagtgggaatcgccctccccgacgccttcctatcgggattctgagcggagcc

SEQ ID NO: 363130 - DNA, 120 bp, Artificial Sequence
  ENSG00000140829_8 (sequence is synthesized)
atcggctgtccactcgagatcgagacaggtctgtgaggggcaagtactcggatgacacgcctctgccaactccctcctacaaatataacgagtgggccgatgacagaagacacttggggt

SEQ ID NO: 363131 - DNA, 120 bp, Artificial Sequence
  ENSG00000140829_9 (sequence is synthesized)
ccaccccgcgtctgtccaggggccgaggaagacgtgaggagggcgaagaaggaatttcatttgacacggaggaggagcggcagcagtgggaagatgaccagaggcaagccgatcgggatt

SEQ ID NO: 363132 - DNA, 120 bp, Artificial Sequence
  ENSG00000140829_10 (sequence is synthesized)
ggtacatgatggacgagggctatgacgagttccacaacccgctggcctactcctccgaggactacgtgaggaggcgggagcagcacctgcataaacagaagcagaagcgcatttcagctc

SEQ ID NO: 363133 - DNA, 120 bp, Artificial Sequence
  ENSG00000140829_11 (sequence is synthesized)
agcggagacagatcaatgaggataacgagcgctgggagacaaaccgcatgctcaccagtggggtggtccatcggctggaggtggatgaggactttgaagaggacaacgcggccaaggtgc

SEQ ID NO: 363134 - DNA, 120 bp, Artificial Sequence
  ENSG00000140829_12 (sequence is synthesized)
atctgatggtgcacaatctggtgcctccctttctggatgggcgcattgtcttcaccaagcagccggagccggtgattccagtgaaggatgctacttctgacctggccatcattgctcgga

SEQ ID NO: 363135 - DNA, 120 bp, Artificial Sequence
  ENSG00000140829_13 (sequence is synthesized)
aaggcagccagacagtgcggaagcacagggagcagaaggagcgcaagaaggctcagcacaaacactgggaactggcggggaccaaactgggagatataatgggcgtcaagaaggaggaag

SEQ ID NO: 363136 - DNA, 120 bp, Artificial Sequence
  ENSG00000140829_14 (sequence is synthesized)
agccagataaagctgtgacggaggatgggaaggtggactacaggacagagcagaagtttgcagatcacatgaagagaaagagcgaagccagcagtgaatttgcaaagaagaagtccatcc

SEQ ID NO: 363137 - DNA, 120 bp, Artificial Sequence
  ENSG00000140829_15 (sequence is synthesized)
tggagcagaggcagtacctgcccatctttgcagtgcagcaggagctgctcactattatcagagacaacagcatcgtgatcgtggttggggagacggggagtggtaagaccactcagctga

SEQ ID NO: 363138 - DNA, 120 bp, Artificial Sequence
  ENSG00000140829_16 (sequence is synthesized)
cgcagtacctgcatgaagatggttacacggactatgggatgattgggtgtacccagccccggcgtgtagctgccatgtcagtggccaagagagtcagtgaagagatggggggaaaccttg

SEQ ID NO: 363139 - DNA, 120 bp, Artificial Sequence
  ENSG00000140829_17 (sequence is synthesized)
gcgaggaggtgggctatgccatccgctttgaagactgcacttcagagaacaccttgatcaaatacatgactgacgggatcctgctccgagagtccctccgggaagccgacctggatcact

SEQ ID NO: 363140 - DNA, 120 bp, Artificial Sequence
  ENSG00000140829_18 (sequence is synthesized)
gtgccatcatcatggacgaggcccacgagcgctccctcaacactgacgtgctctttgggctgctccgggaggtagtggctcggcgctcagacctgaagctcatcgtcacatcagccacga

SEQ ID NO: 363141 - DNA, 120 bp, Artificial Sequence
  ENSG00000140829_19 (sequence is synthesized)
tggatgcggagaagtttgctgccttttttgggaatgtccccatcttccacatccctggccgtaccttccctgttgacatcctcttcagcaagaccccacaggaggattacgtggaggctg

SEQ ID NO: 363142 - DNA, 120 bp, Artificial Sequence
  ENSG00000140829_20 (sequence is synthesized)
cagtgaagcagtccttgcaggtgcacctgtcgggggcccctggagacatccttatcttcatgcctggccaagaggacattgaggtgacctcagaccagattgtggagcatctggaggaac

SEQ ID NO: 363143 - DNA, 120 bp, Artificial Sequence
  ENSG00000140829_21 (sequence is synthesized)
tggagaacgcgcctgccctggctgtgctgcccatctactctcagctgccttctgacctccaggccaaaatcttccagaaggctccagatggcgttcggaagtgcatcgttgccaccaata

SEQ ID NO: 363144 - DNA, 120 bp, Artificial Sequence
  ENSG00000140829_22 (sequence is synthesized)
ttgccgagacgtctctcactgttgacggcatcatgtttgttatcgattctggttattgcaaattaaaggtcttcaaccccaggattggcatggatgctctgcagatctatcccattagcc

SEQ ID NO: 363145 - DNA, 120 bp, Artificial Sequence
  ENSG00000140829_23 (sequence is synthesized)
aggccaatgccaaccagcggtcagggcgagccggcaggacgggcccaggtcagtgtttcaggctctacacccagagcgcctacaagaatgagctcctgaccaccacagtgcccgagatcc

SEQ ID NO: 363146 - DNA, 120 bp, Artificial Sequence
  ENSG00000140829_24 (sequence is synthesized)
agaggactaacctggccaacgtggtgctgctgctcaagtccctcggggtgcaggacctgctgcagttccacttcatggacccgcccccggaggacaacatgctcaactctatgtatcagc

SEQ ID NO: 363147 - DNA, 120 bp, Artificial Sequence
  ENSG00000140829_25 (sequence is synthesized)
tctggatcctcggggccctggacaacacaggtggtctgacctctaccgggcggctgatggtggagttcccgctggaccctgccctgtccaagatgctcatcgtgtcctgtgacatgggct

SEQ ID NO: 363148 - DNA, 120 bp, Artificial Sequence
  ENSG00000140829_26 (sequence is synthesized)
gcagctccgagatcctgctcatcgtttccatgctctcggtcccagccatcttctacaggcccaagggtcgagaggaggagagtgatcaaatccgggagaagttcgctgttcctgagagcg

SEQ ID NO: 363149 - DNA, 120 bp, Artificial Sequence
  ENSG00000140829_27 (sequence is synthesized)
atcatttgacctacctgaatgtttacctgcagtggaagaacaataattactccaccatctggtgtaacgatcatttcatccatgctaaggccatgcggaaggtccgggaggtgcgagctc

SEQ ID NO: 363150 - DNA, 120 bp, Artificial Sequence
  ENSG00000140829_28 (sequence is synthesized)
aactcaaggacatcatggtgcagcagcggatgagcctggcctcgtgtggcactgactgggacatcgtcaggaagtgcatctgtgctgcctatttccaccaagcagccaagctcaagggaa

SEQ ID NO: 363151 - DNA, 120 bp, Artificial Sequence
  ENSG00000140829_29 (sequence is synthesized)
tcggggagtacgtgaacatccgcacagggatgccctgccacttgcaccccaccagctccctttttggaatgggctacaccccagattacatagtgtatcacgagttggtcatgaccacca

SEQ ID NO: 363152 - DNA, 120 bp, Artificial Sequence
  ENSG00000140829_30 (sequence is synthesized)
aggagtatatgcagtgtgtgaccgctgtggacggggagtggctggcggagctgggccccatgttctatagcgtgaaacaggcgggcaagtcacggcaggagaaccgtcgtcgggccaaag

SEQ ID NO: 363153 - DNA, 120 bp, Artificial Sequence
  ENSG00000140829_31 (sequence is synthesized)
aggaagcctctgccatggaggaggagatggcgctggccgaggagcagctgcgagcccggcggcaggagcaggagaagcgcagccccctgggcagtgtcaggtctacgaagatctacactc

SEQ ID NO: 363154 - DNA, 120 bp, Artificial Sequence
  ENSG00000140829_32 (sequence is synthesized)
caggccggaaagagcaaggggagcccatgacccctcgccgcacgccagcccgctttggtctgtgagctgaggctgtccccagagaggatggcagcaggtattgggtcctcagccttctgg

SEQ ID NO: 363155 - DNA, 120 bp, Artificial Sequence
  ENSG00000140829_33 (sequence is synthesized)
cgggagccctgaggctgcggacaaagccctttcatctgaggactttcatctgtgcatatcacggccccccagggcagttcctgctggaccagactctctggcagaggaggtggagttctt

SEQ ID NO: 363156 - DNA, 120 bp, Artificial Sequence
  ENSG00000140829_34 (sequence is synthesized)
ccatgcaggagcacggcatggcgggagcggggctgcagagtatccgaggtgctgccggggcagcgggaggtggctggacccatcgcatctaaaactggcccaggacacttggtgtatgcg

SEQ ID NO: 363157 - DNA, 120 bp, Artificial Sequence
  ENSG00000140829_35 (sequence is synthesized)
tgacttggctgtggctgtcttttttaatccttgtgtaaagcagcaaaaaagacctaaagggaattgtaatttggttataattcaggatttggaaataaatttattatttgtaaaacatga

SEQ ID NO: 363158 - DNA, 120 bp, Artificial Sequence
  ENSG00000140829_36 (sequence is synthesized)
cccctcccagcctgatacctgtataagggcaaagttcttcctttgtcctggtgtggttctgcagatctgggcttccgccaaaggctgtgtcaagagtgttaagggatggggtcgctgccc

SEQ ID NO: 363159 - DNA, 120 bp, Artificial Sequence
  ENSG00000140829_37 (sequence is synthesized)
attctgtgctcttcgcaggggtgctgtttgcctgtggggtcggtgttccctccgcttggtattgaagacttgcggtcatccaacccacttacttctctctgcaaacataaaggctgtgat

SEQ ID NO: 363160 - DNA, 120 bp, Artificial Sequence
  ENSG00000140829_38 (sequence is synthesized)
ccagcaggctgggtctgtctgattccccaccacccactccagttgtttggtaggctgagcctttaaaaacaaaaccaaaaaactcattattgaaaagtccaaatattcatgaaagtggga

SEQ ID NO: 363161 - DNA, 120 bp, Artificial Sequence
  ENSG00000140829_39 (sequence is synthesized)
ggggctgagccatgtagttattccctagtagcttccacccatttttgctaaagggtgtgatctgctaagactcggaccccagtacggggtgtgctggtggtgagccggtggccagggcat

SEQ ID NO: 363162 - DNA, 120 bp, Artificial Sequence
  ENSG00000140829_40 (sequence is synthesized)
atttcatccatgctaaggccatgcggaaggtagagtggtggatgagcaggatgttgggatgaggggagggtcgagaggaaaggagggctccctcctggtgcctccgtctcctgccctagg

SEQ ID NO: 363163 - DNA, 120 bp, Artificial Sequence
  ENSG00000140829_41 (sequence is synthesized)
aataaacggaagagcttctagtcaccgcccaccttgctcggctctgaccggaagctaggcgtcacctccgcccgtattaaagatggtcgacctttttcccctccttttcctgcccccaga

SEQ ID NO: 363164 - DNA, 120 bp, Artificial Sequence
  ENSG00000140829_42 (sequence is synthesized)
ctagaggcgggatgtagtctcttaggctaagagtgattggtcacaaggagactcggaagtgtctgatcagagccccagaggaggccttgagagcctgttggcgtaccgttccacacttgg

SEQ ID NO: 363165 - DNA, 120 bp, Artificial Sequence
  ENSG00000140829_43 (sequence is synthesized)
agtgggttgctccaggtgggctgagggggtctctggtaggccagaggttcctgaggcctctggttgcagttcagactcgggttgtagttcatgctgttcttgctctgctgagggtggctt

SEQ ID NO: 363166 - DNA, 120 bp, Artificial Sequence
  ENSG00000140829_44 (sequence is synthesized)
ggggttttctgggcagtggctccattgcttcagtcttcatgattggtaagaattgaataggcccatttgtcagctttggcttgtgtttcctcgggggtggtgctgatgggactgggggac

SEQ ID NO: 363167 - DNA, 120 bp, Artificial Sequence
  ENSG00000140829_45 (sequence is synthesized)
aggagccaagggtccccaccatgggggcctccgagccgcctcttctctcaggtagtggctcggcgctcagacctgaagctcatcgtcacatcagccacgatggatgcggagaagtttgct

SEQ ID NO: 363168 - DNA, 120 bp, Artificial Sequence
  ENSG00000140829_46 (sequence is synthesized)
gggaatactagtttaagaaaagagctgttgcctgtaacatagctgctctccttgagtgtgtggtcttcgttttattatgaaaattgatgataaaggagataatgggtaaatatgtataag

SEQ ID NO: 363169 - DNA, 120 bp, Artificial Sequence
  ENSG00000140829_47 (sequence is synthesized)
agaccagcatttctaatagtattggtgatagagaaaggacagtgctatggaacaaagctagacaaaaaaatccaatgctgtccttgctcagtattaagttttatagctgatagaattgta

SEQ ID NO: 363170 - DNA, 120 bp, Artificial Sequence
  ENSG00000140829_48 (sequence is synthesized)
actattaaaaaaaatgattcactgtaaactcgcactagtattttttgaattcttgctggaaaataactgttactgtgggtttgaaattttctaggcagtaactatttttcccccttggga

SEQ ID NO: 363171 - DNA, 120 bp, Artificial Sequence
  ENSG00000140829_49 (sequence is synthesized)
gaatggggataggtgagtttcaggagtccacggatcacattcgagcagtgcaggttgcacctgtgagtgagtgggcagcctgtcctttctctagggtgaagatgtgtataccttaggatg

SEQ ID NO: 363172 - DNA, 120 bp, Artificial Sequence
  ENSG00000140830_0 (sequence is synthesized)
cgtttattgggctgttgagcgggggccgaccgacggccaggagtttcttttctgcgcttgtgcgttttctgttcggtttccttcccgctagcggggccacgagggttgctaggcaacagc

SEQ ID NO: 363173 - DNA, 120 bp, Artificial Sequence
  ENSG00000140830_1 (sequence is synthesized)
ccctgggtgacttggtcttagggtcctgtccggcttggggctgatgaaaggagctgtccgcgcccgggctcttccgagaagtggttgctgacagccacaaagtgaaagggagtgaggcgg

SEQ ID NO: 363174 - DNA, 120 bp, Artificial Sequence
  ENSG00000140830_2 (sequence is synthesized)
cgtggacgagtaaggagtgacagtgaggattcacatttgggttatttcaagatgagcttcctactgcccaagctgactagcaaaaaggaagtagaccaggcgataaaaagtactgctgag

SEQ ID NO: 363175 - DNA, 120 bp, Artificial Sequence
  ENSG00000140830_3 (sequence is synthesized)
aaggtgttggttctcaggtttgggagagatgaagatcctgtctgtctgcagctagatgatattctttctaagacctcttctgacttaagtaaaatggctgctatatacctggtagatgtg

SEQ ID NO: 363176 - DNA, 120 bp, Artificial Sequence
  ENSG00000140830_4 (sequence is synthesized)
gaccaaactgcagtttatacacagtattttgacatcagttatattccatctactgtctttttcttcaatgggcagcatatgaaagtggattatggatctccagatcacactaagtttgtg

SEQ ID NO: 363177 - DNA, 120 bp, Artificial Sequence
  ENSG00000140830_5 (sequence is synthesized)
ggaagcttcaaaaccaaacaagacttcatagatttgattgaagtaatctatcgaggagcaatgagggggaagcttattgtccaaagtcctattgatcccaagaatattcccaaatatgac

SEQ ID NO: 363178 - DNA, 120 bp, Artificial Sequence
  ENSG00000140830_6 (sequence is synthesized)
cttctctatcaagacatttagtacattaattgctgtcaaagatgaagaagaaggcacatcttgacacagtacctgaatccagctgtgctgtgtttctggagtcctttggaaacatgtgtc

SEQ ID NO: 363179 - DNA, 120 bp, Artificial Sequence
  ENSG00000140830_7 (sequence is synthesized)
ccagaggagaagaggtttgacttgcgtgtagaaaacccggcccctgaggaaaagaccccactggttctctgatgacctgggatgcctaactgtctactccctgcaagcctcagagcagcc

SEQ ID NO: 363180 - DNA, 120 bp, Artificial Sequence
  ENSG00000140830_8 (sequence is synthesized)
aagtcattggtgttcattttccccacagtgatttttgtaacttctctttctaatgtttttctttatccctttaatacagaaccctcccaaacattggctagtacaacttgatttcatcat

SEQ ID NO: 363181 - DNA, 120 bp, Artificial Sequence
  ENSG00000140830_9 (sequence is synthesized)
gttcatttgatacacaagtgaactggaaagtcacttcccatagaagcaaaagtacttattttctaccctagctgggtgcatgtgtgtgcacacacacacacacacacacccccacacccc

SEQ ID NO: 363182 - DNA, 120 bp, Artificial Sequence
  ENSG00000140830_10 (sequence is synthesized)
ttgccggttcctcgactcatacatccctcgtgctttcccatctccagtctgtattactgtaggttctcttcaaataattaattgagcagacaagtttgttttattttggagcctttttgg

SEQ ID NO: 363183 - DNA, 120 bp, Artificial Sequence
  ENSG00000140830_11 (sequence is synthesized)
agtttgttttattttggagcctttttggctctggcttttaaacattgtcctggttggctcatttaatttttttttttttttttgagaccgagtcactcttgtcacccaggctggagtgca

SEQ ID NO: 363184 - DNA, 89 bp, Artificial Sequence
  ENSG00000140830_12 (sequence is synthesized)
ctcctcagcctcccaggcaccccatttaattattttttatgttataaaatttaatatggaaagtgagaatttgaaccttcaccatccac

SEQ ID NO: 363185 - DNA, 120 bp, Artificial Sequence
  ENSG00000140830_13 (sequence is synthesized)
tttaatatggaaagtgagaatttgaaccttcaccatccaccactctattcaggtaaaacaatgaatgagccaccttagcaggagcagatttttcccagaagctgctgcctcttcctgagg

SEQ ID NO: 363186 - DNA, 120 bp, Artificial Sequence
  ENSG00000140830_14 (sequence is synthesized)
cagaaaattggattactaaggctcaaaactaaaagagatgtcagcattgttggatagaaatgtcacctatatgggatttgcctgttttaataactttgtaaggaattcttgctcttctag

SEQ ID NO: 363187 - DNA, 120 bp, Artificial Sequence
  ENSG00000140830_15 (sequence is synthesized)
gggtgcctggcgcaaccgtgggcaagttactgctcctctttaaacctcgtggtggttattgaaacagatttattagaaggagagggtaggtgcagagctggagagccatgggtgaggcag

SEQ ID NO: 363188 - DNA, 120 bp, Artificial Sequence
  ENSG00000140830_16 (sequence is synthesized)
cttgtgacctgcctagcagccgctgaccacctctccaacagaagcctagtcctgttcagagcagcactgtcactgcaagtccagccccctttgccaggggctccattccacccctttcct

SEQ ID NO: 363189 - DNA, 120 bp, Artificial Sequence
  ENSG00000140830_17 (sequence is synthesized)
gcagggaggggtgccatgagtcttgcttttggctcatacaggagagagggaaggctgccaggcactgcttgtatccctgctgataagaggagggagtcactccaggaataagacaaaagg

SEQ ID NO: 363190 - DNA, 120 bp, Artificial Sequence
  ENSG00000140830_18 (sequence is synthesized)
agaggaggaggccatcacctctggcctcttccatcgtacacttcctgtctctggtttaatcatgatgcatggagctacaacagccatcttaggtccccgaggtgcccagcatcacgtaaa

SEQ ID NO: 363191 - DNA, 120 bp, Artificial Sequence
  ENSG00000140830_19 (sequence is synthesized)
acatcgatatgctaagaagaacaaaaagagcccaatctctgatgttattgagctcctgcatgaactctggacctgcctgcctcagacttctgtgaaagaataaaatttctttttgcctaa

SEQ ID NO: 363192 - DNA, 120 bp, Artificial Sequence
  ENSG00000140830_20 (sequence is synthesized)
acgcccgattcctggatccaagtgtggaacggtacgccaacaggctctcaaggcctcctctggggctctgatcagacacttccgagtctccttgtgaccaatcactcttagcctaagaga

SEQ ID NO: 363193 - DNA, 120 bp, Artificial Sequence
  ENSG00000140830_21 (sequence is synthesized)
gagatcgcccaccagattgcctggtataaatgacactgtgagagagcagaggaagacacaaggagtcctactcgggctcggtgacagtctggggtgggttaaagcggaggcctgggagag

SEQ ID NO: 363194 - DNA, 120 bp, Artificial Sequence
  ENSG00000140830_22 (sequence is synthesized)
ggaccaaggccactccaggcagcatccctggatctcagcgaggccgctccaggcagcaggatttgaccagagcaaggaggaaggccaaggcggccaggacggatgcagcatccctgagga

SEQ ID NO: 363195 - DNA, 120 bp, Artificial Sequence
  ENSG00000140830_23 (sequence is synthesized)
agatcctgtctgtctgcagctagatgatatttgtgctgcctccagtatgtgcctgatgcagagagagacctaacccagaactaagacctcttaccgccatttctactgctaccatcccgt

SEQ ID NO: 363196 - DNA, 120 bp, Artificial Sequence
  ENSG00000140832_0 (sequence is synthesized)
tgttgccctcaggtcgctcccgggcggggacacggaacccggccatggaagatccgtcgggggctcgcgagccccgggcccggccgagagagcgggacccgggacggcgcccccacccag

SEQ ID NO: 363197 - DNA, 120 bp, Artificial Sequence
  ENSG00000140832_1 (sequence is synthesized)
accaaggccgcacccacgatcgaccgcgggaccgacccggggacccgcgcaggaagcgaagcagcgacgggaaccggcgaagggacggggaccgggacccggagagagaccaggagaggg

SEQ ID NO: 363198 - DNA, 120 bp, Artificial Sequence
  ENSG00000140832_2 (sequence is synthesized)
acgggaaccgcgaccggaaccgggaccgggagagggagagagagagggaaagagacccggaccgaggcccccgccgggacacacacagggacgcgggccctcgcgcaggtgaacacggag

SEQ ID NO: 363199 - DNA, 120 bp, Artificial Sequence
  ENSG00000140832_3 (sequence is synthesized)
tttgggaaaaaccgcgccaaagccggacgcgggacggagcccggggactgacctgggacgcagccgcgcctcctgggcccgcgccctgggaagccccggagccgccgcagccgcagagga

SEQ ID NO: 363200 - DNA, 120 bp, Artificial Sequence
  ENSG00000140832_4 (sequence is synthesized)
agggagaccccgggcgccgcagacccgaaagtgaacccccttcggagagatatctgccctcgacccccaggcctggacgagaggaggtggaatattaccagtcagaggcggaaggactcc

SEQ ID NO: 363201 - DNA, 120 bp, Artificial Sequence
  ENSG00000140832_5 (sequence is synthesized)
tggaatgccacaaatgcaaatacttgtgcactgggagagcctgctgccaaatgctggaggttctcctgaacttgctgatcctggcctgcagctctgtgtcttacagttccacagggggct

SEQ ID NO: 363202 - DNA, 120 bp, Artificial Sequence
  ENSG00000140832_6 (sequence is synthesized)
acacgggcatcaccagcttggggggcatttactactatcagttcggaggggcttacagtggctttgatggtgctgacggggagaaggcccagcaactggatgtccagttctaccagctaa

SEQ ID NO: 363203 - DNA, 120 bp, Artificial Sequence
  ENSG00000140832_7 (sequence is synthesized)
agctgcccatggtcactgtggcaatggcctgtagtggagccctcacagccctctgctgcctcttcgttgccatgggtgtcctgcgggtcccgtggcattgtccactgttgctggtgaccg

SEQ ID NO: 363204 - DNA, 120 bp, Artificial Sequence
  ENSG00000140832_8 (sequence is synthesized)
aaggcttgttggacatgctcatcgcgggggggtacatcccggccttgtacttctacttccactacctctctgctgcctatggctctcctgtgtgtaaagagaggcaggcgctgtaccaaa

SEQ ID NO: 363205 - DNA, 120 bp, Artificial Sequence
  ENSG00000140832_9 (sequence is synthesized)
gcaaaggctacagcggtttcggctgcagtttccacggagcagatataggagctggaatctttgctgccctgggcattgtggtctttgccctgggggctgtcctggccataaagggctacc

SEQ ID NO: 363206 - DNA, 120 bp, Artificial Sequence
  ENSG00000140832_10 (sequence is synthesized)
gaaaagttaggaagctaaaagagaagccagcagaaatgtttgaattttaagggtttctaaaacgctctgacagatgcaagtggtggtggaaggtagtctgagccactgcctttcccaaga

SEQ ID NO: 363207 - DNA, 120 bp, Artificial Sequence
  ENSG00000140832_11 (sequence is synthesized)
atcccttgttgtggaagtttccagtgctggaaaagcagcgagccagcgttggtgtggtgggcggagctcccagtcgcatggagcggtgttcatggatgcaacagaccctggcttctggag

SEQ ID NO: 363208 - DNA, 72 bp, Artificial Sequence
  ENSG00000140832_12 (sequence is synthesized)
ttctggagtcctctgtgagtgagggaccaatcaaaattatttttcaaaaagcaaaaaaatggccggcctcgg

SEQ ID NO: 363209 - DNA, 81 bp, Artificial Sequence
  ENSG00000140832_13 (sequence is synthesized)
aaaaaaactggaccccaagagccacaaggaaaaagcatgtactacaacagagtgcacctcttcattcagtaaagggaggtc

SEQ ID NO: 363210 - DNA, 120 bp, Artificial Sequence
  ENSG00000140832_14 (sequence is synthesized)
aaggaaaaagcatgtactacaacagagtgcacctcttcattcagtaaagggaggtcaccaagagaatttgatgaaccttaccttcaaagttcctgggcacagtggctcacacctgtaatc

SEQ ID NO: 363211 - DNA, 120 bp, Artificial Sequence
  ENSG00000140832_15 (sequence is synthesized)
ggaggattgcttgaacccaggagttcaagtttgcagtgcgctatgattgtcccactacactctagcctgagcaacagaccaagaccgtattgccaaaataccaaaaaaaaaaaaagttca

SEQ ID NO: 363212 - DNA, 120 bp, Artificial Sequence
  ENSG00000140832_16 (sequence is synthesized)
aaagttcatggagagccacatagacatgagaccacacttcagcctgaatttttctaaaacacagttgtctcaagcagattactccacacgtttttccacactgaactctccagtccttcc

SEQ ID NO: 363213 - DNA, 120 bp, Artificial Sequence
  ENSG00000140832_17 (sequence is synthesized)
acttccttaattctgcaaatggagggggtggggactcttgggaaactactcctgtaaaattgaagttggaggtaggcgtgggctgaggaaagaggaatcagattaattctctgggttgca

SEQ ID NO: 363214 - DNA, 120 bp, Artificial Sequence
  ENSG00000140832_18 (sequence is synthesized)
aagaggctattctgcaagccccttacagtggccctgaaagctcaataagtgttttgtacctcttgtaaatgtgccattgtgtgaagcattaaacccaacatctagaattcaggattcatc

SEQ ID NO: 363215 - DNA, 120 bp, Artificial Sequence
  ENSG00000140832_19 (sequence is synthesized)
cagaataaaaggatgtaaaatctttcccaacagaagagtgttacttttggtcagacaacttcatgggttcttactgcacattaaattatgacttatggaacattgcaatatattctcggt

SEQ ID NO: 363216 - DNA, 120 bp, Artificial Sequence
  ENSG00000140832_20 (sequence is synthesized)
ccttaagttatgacttatggaacattacaatatattctcggtccaagtgagtaagttctttgctttatgtgaatccaataaaaaatccaaagaattttaatttggagttgatgtcctctt

SEQ ID NO: 363217 - DNA, 120 bp, Artificial Sequence
  ENSG00000140832_21 (sequence is synthesized)
tacaatacatttataatattctcttaaatacagacaatttttcacatttaaaaggtgagttccatttgagtttagaaaaggaaatatatatatacatgcttgtatatgattggaaaattt

SEQ ID NO: 363218 - DNA, 120 bp, Artificial Sequence
  ENSG00000140832_22 (sequence is synthesized)
cttgaagaataacatcagaaagtattaagttttgcttttgaagagaaggggacttttcatttatacatggcttgactgcacatgtattaattttagaaaaataaaaagtaaaaaagttga

SEQ ID NO: 363219 - DNA, 120 bp, Artificial Sequence
  ENSG00000140832_23 (sequence is synthesized)
ggaatgccacaaatgcaaatacttgtgcactgggagaggtgtggtgcagatagtggaggtggtcttgaatgggatggttctcatatgcatcgtggcctcctactttgtccttgccggatt

SEQ ID NO: 363220 - DNA, 120 bp, Artificial Sequence
  ENSG00000140832_24 (sequence is synthesized)
cagtgccagcttttccagcggcggtggctttgggaacaactactactcaccgttcgagggcactgagctagagcaggttcggcagctggaccagcagtacacgatcctccgctcgcccct

SEQ ID NO: 363221 - DNA, 120 bp, Artificial Sequence
  ENSG00000140832_25 (sequence is synthesized)
gatatacggtggcgtggctgtttctctgggtctgggggtcctcaccatgggtgttttactccaaggagccaagagtcgaacaatgttgtcagggaagtggctcctcacggaggccgcctt

SEQ ID NO: 363222 - DNA, 120 bp, Artificial Sequence
  ENSG00000140832_26 (sequence is synthesized)
cagcctcctagcggcagtgggctactgcacaggcattggtgtttacctccacgtggctctgcagatcaatagcaccgacacttgcaaaacaagagagaggctctatgcccgcaagggtct

SEQ ID NO: 363223 - DNA, 120 bp, Artificial Sequence
  ENSG00000140832_27 (sequence is synthesized)
ttgtcttctcgtgatcatgtacggcgccagcgtggtgctggccctgcgtagctaccgagaacagaagcgctacaaaggcagccgagaacagcccggaagttacagtgatgcaccggaata

SEQ ID NO: 363224 - DNA, 120 bp, Artificial Sequence
  ENSG00000140832_28 (sequence is synthesized)
tctgtggtctggaactctttgagatcttccggaacctaaatgtgaacgcacattgtttctctcaaaaagacaggtcttttaaaactccgcattagacaactatggttttcacacacttga

SEQ ID NO: 363225 - DNA, 84 bp, Artificial Sequence
  ENSG00000140832_29 (sequence is synthesized)
aaaactccgcattagacaactatggttttcacacacttgactttataaatgctctctttggactgaggcaaagttaaagaattg

SEQ ID NO: 363226 - DNA, 68 bp, Artificial Sequence
  ENSG00000140832_30 (sequence is synthesized)
tgcagtgagccaatacaaaaaatcatctgggcttggtggtgaacgcctgtaatcccagttactcagga

SEQ ID NO: 363227 - DNA, 87 bp, Artificial Sequence
  ENSG00000140832_31 (sequence is synthesized)
agagcgagactccgtctcaaaaaaatacaaaaaatcatctgggcttggtggtgaacgcctgtaatcccagttactcaggaggctaaa

SEQ ID NO: 363228 - DNA, 120 bp, Artificial Sequence
  ENSG00000140832_32 (sequence is synthesized)
cctgggtaacagagcgaggctctgtctcaaaaacaacaactacaacaaaaaagataggacagtagattttattagaccctgaagcatactggaggctttttcatttctgcattccctgac

SEQ ID NO: 363229 - DNA, 120 bp, Artificial Sequence
  ENSG00000140832_33 (sequence is synthesized)
agtgctccatagagtaggtcttcaaaggtagatagtaatctcattaccctggactgttctcataatgtaacagatcactaacactgaatcttaaaaataaagttcttttagtaattttaa

SEQ ID NO: 363230 - DNA, 120 bp, Artificial Sequence
  ENSG00000140832_34 (sequence is synthesized)
aacttgcactcacaggaaggcagctcgcagctacctggtgagacagctcccaggggcagacaaaccatcagcggtaccaatcacagcatctgtcacgtgtgaacccccttcggagagata

SEQ ID NO: 363231 - DNA, 120 bp, Artificial Sequence
  ENSG00000140832_35 (sequence is synthesized)
ctggtgaagcaaaaatttaagcagattcccttgtgggttcctagcattttcatttctgtacttgtgaggttcttgttttcttaaaaaaaaaaaaaaaaaaaaaggaggaacgtctcaaaa

SEQ ID NO: 363232 - DNA, 120 bp, Artificial Sequence
  ENSG00000140832_36 (sequence is synthesized)
tccatttgtacattattttatttttagagtattttcacatacttgcttttttgttgttgttgttaacttcccacagtatcacacggttgctttcatttgagcctccccacatccctgtgg

SEQ ID NO: 363233 - DNA, 120 bp, Artificial Sequence
  ENSG00000140832_37 (sequence is synthesized)
gtgaagattggcagacttagcttcatttgtcatattgtctgaggcttagaaggactgaatggcttggccaagatgacaaggcagtaaaaagcggggacttgaacctggtggtcctgctct

SEQ ID NO: 363234 - DNA, 120 bp, Artificial Sequence
  ENSG00000140832_38 (sequence is synthesized)
cggttcatttgtatttctcttcatgctcatccctgaacaccacgggaatggcaggagaccctctcccagaaggacacctaagaaggatttggggcctctgtcagtaacaaataaaagctg

SEQ ID NO: 363235 - DNA, 120 bp, Artificial Sequence
  ENSG00000140832_39 (sequence is synthesized)
acctcggacaagaagatcttcagtctgttggcctgttggcttcctctgcctcgtgccatttgtgggttcctttcagtccaaatatctatcagtaaggtcctggttgaatagacaaatcca

SEQ ID NO: 363236 - DNA, 120 bp, Artificial Sequence
  ENSG00000140832_40 (sequence is synthesized)
tccatacaatgaagtcgaaggccacttaacaaaatgtggctcctcttgtaggaactgatctgaaaacatctggaagatacagtaaatgaaaaaatcaagatgcagaacagtgtacatggt

SEQ ID NO: 363237 - DNA, 120 bp, Artificial Sequence
  ENSG00000140832_41 (sequence is synthesized)
acacttacttttgtggaaaaatgcagggaagggaatgaaatgcagatttaaatgtgctttttatttgcataaaggaacactggacaattatattgaaaccaatgaaagcggttggcaaca

SEQ ID NO: 363238 - DNA, 120 bp, Artificial Sequence
  ENSG00000140832_42 (sequence is synthesized)
ttgaagagacggtatgagtgaaatttctcagtttatatcttatgtcatttcaattttttagaaacttttcgttttgaaatatagatttgcaagaagtcacaaaaacagtgcagagtactc

SEQ ID NO: 363239 - DNA, 120 bp, Artificial Sequence
  ENSG00000140832_43 (sequence is synthesized)
ctgtgtatccttaacccagttttctccaatgataatatactgcataactagtacaatatcaagaccaggaaagtcacaatctacagagctcatttaggtttcccccttttacctgcacac

SEQ ID NO: 363240 - DNA, 120 bp, Artificial Sequence
  ENSG00000140832_44 (sequence is synthesized)
atatgtatgtgtttgtagttctaagccgttttatctcatgtgtagatttgtgtgagcagcaccatgatgcaatccagaactgttccctcaccctggacatccctgtgctaagtcttcata

SEQ ID NO: 363241 - DNA, 73 bp, Artificial Sequence
  ENSG00000140832_45 (sequence is synthesized)
agaatacaatggcgcaatctcggctcattgcaacctctgccttccgggttcaagtaattctcatgcctcagcc

SEQ ID NO: 363242 - DNA, 120 bp, Artificial Sequence
  ENSG00000140832_46 (sequence is synthesized)
ccaggctagaatacaatggcgcaatctcggctcattgcaacctctgccttccgggttcaagtaattctcatgcctcagccttccaagtgggtgggattacaggcgcctgccaccacacct

SEQ ID NO: 363243 - DNA, 77 bp, Artificial Sequence
  ENSG00000140832_47 (sequence is synthesized)
tgaggtgggcggatcgcttgaggtcagcagattgagtccagcctggctcacatagcgaaaccctgtctctactaaaa

SEQ ID NO: 363244 - DNA, 120 bp, Artificial Sequence
  ENSG00000140832_48 (sequence is synthesized)
tttacagcttgccccaaatatattagttcaaatcagatgcaactagaaatatacattctcgttatggtctttttgctaattgtcctcttgctttttagtagtgaattcttatggaacctg

SEQ ID NO: 363245 - DNA, 120 bp, Artificial Sequence
  ENSG00000140835_0 (sequence is synthesized)
acaattgaaatcaagtcaaggcaagcaccacaggttcttgtcatttgtgcttagcggacttagctgatggaaatcggcaaagatcatcccaaagctcacacaactccctgcctgctctct

SEQ ID NO: 363246 - DNA, 120 bp, Artificial Sequence
  ENSG00000140835_1 (sequence is synthesized)
ctctcttccaagggagttgaccttcacagttgcctttcagtagtcaacatgccaggatgcctccagtctgggggaaaatgcttcctcatttgcttctcccagcccacctcaagcagtctc

SEQ ID NO: 363247 - DNA, 120 bp, Artificial Sequence
  ENSG00000140835_2 (sequence is synthesized)
cccaccccttgagtctcagcagtgttaaagctgttactttcacagcttcctgggagcgagtgctttctcaagcccgtcttgcaaggtcttccacttcagcacaatgctactgcctaaaaa

SEQ ID NO: 363248 - DNA, 120 bp, Artificial Sequence
  ENSG00000140835_3 (sequence is synthesized)
aatgaagctcctgctgtttctggtttcccagatggccatcttggctctattcttccacatgtacagccacaacatcagctccctgtctatgaaggcacagcccgagcgcatgcacgtgct

SEQ ID NO: 363249 - DNA, 120 bp, Artificial Sequence
  ENSG00000140835_4 (sequence is synthesized)
ggttctgtcttcctggcgctctggctcttcttttgtggggcagctttttgggcagcacccagatgttttctacctgatggagcccgcctggcacgtgtggatgaccttcaagcagagcac

SEQ ID NO: 363250 - DNA, 120 bp, Artificial Sequence
  ENSG00000140835_5 (sequence is synthesized)
cgcctggatgctgcacatggctgtgcgggatctgatacgggccgtcttcttgtgcgacatgagcgtctttgatgcctacatggaacctggtccccggagacagtccagcctctttcagtg

SEQ ID NO: 363251 - DNA, 120 bp, Artificial Sequence
  ENSG00000140835_6 (sequence is synthesized)
ggagaacagccgggccctgtgttctgcacctgcctgtgacatcatcccacaagatgaaatcatcccccgggctcactgcaggctcctgtgcagtcaacagccctttgaggtggtggagaa

SEQ ID NO: 363252 - DNA, 120 bp, Artificial Sequence
  ENSG00000140835_7 (sequence is synthesized)
ggcctgccgctcctacagccacgtggtgctcaaggaggtgcgcttcttcaacctgcagtccctctacccgctgctgaaagacccctccctcaacctgcatatcgtgcacctggtccggga

SEQ ID NO: 363253 - DNA, 120 bp, Artificial Sequence
  ENSG00000140835_8 (sequence is synthesized)
cccccgggccgtgttccgttcccgagaacgcacaaagggagatctcatgattgacagtcgcattgtgatggggcagcatgagcaaaaactcaagaaggaggaccaaccctactatgtgat

SEQ ID NO: 363254 - DNA, 120 bp, Artificial Sequence
  ENSG00000140835_9 (sequence is synthesized)
gcaggtcatctgccaaagccagctggagatctacaagaccatccagtccttgcccaaggccctgcaggaacgctacctgcttgtgcgctatgaggacctggctcgagcccctgtggccca

SEQ ID NO: 363255 - DNA, 120 bp, Artificial Sequence
  ENSG00000140835_10 (sequence is synthesized)
gtatgaattcgtgggattggaattcttgccccatcttcagacctgggtgcataacatcacccgaggcaagggcatgggtgaccacgctttccacacaaatgccagggatgcccttaatgt

SEQ ID NO: 363256 - DNA, 120 bp, Artificial Sequence
  ENSG00000140835_11 (sequence is synthesized)
ctcccaggcttggcgctggtctttgccctatgaaaaggtttctcgacttcagaaagcctgtggcgatgccatgaatttgctgggctaccgccacgtcagatctgaacaagaacagagaaa

SEQ ID NO: 363257 - DNA, 120 bp, Artificial Sequence
  ENSG00000140835_12 (sequence is synthesized)
aacaagaacagagaaacctgttgctggatcttctgtctacctggactgtccctgagcaaatccactaagagggttgagaaggctttgctgccacctggtgtcagcctcagtcactttctc

SEQ ID NO: 363258 - DNA, 120 bp, Artificial Sequence
  ENSG00000140835_13 (sequence is synthesized)
ttgcctacatctctgagccttaactacatgtctgtgggtatcacactgagtgtgagttgtgtccacacgtgctcaagcagaaggacttttgtgtccatgcttgtgtctagaaaacagact

SEQ ID NO: 363259 - DNA, 120 bp, Artificial Sequence
  ENSG00000140835_14 (sequence is synthesized)
ggggaaccttatgtgagcagcacatcccaccagtgaaacagggtattgctcttcttcttttcttgatcttcctgtctgggcagacttcagagactttgtggcctggaggcctattaagca

SEQ ID NO: 363260 - DNA, 120 bp, Artificial Sequence
  ENSG00000140835_15 (sequence is synthesized)
cgacacagtatcagtggaattgatccataaacctccctgtccacatcttgcccaatggggaatggatctttcaccaaagagctcaccagcattttccacagagatgcaaattctgagccc

SEQ ID NO: 363261 - DNA, 120 bp, Artificial Sequence
  ENSG00000140835_16 (sequence is synthesized)
ttggagttcccagtggattcaaggaaggaagtgggaacaaggttggatgcctacttatgagcttgaccatcacagctatcggtaatcagaaatatgaaacaaaatctctgcacaaaagag

SEQ ID NO: 363262 - DNA, 120 bp, Artificial Sequence
  ENSG00000140835_17 (sequence is synthesized)
caagctcttaagttcacagggtgcctgggctgcatttgaatatcacttcccctctgcattttcccatcacatagaagactttgacctgtgaagctgccatctgttaatactaaaattccc

SEQ ID NO: 363263 - DNA, 120 bp, Artificial Sequence
  ENSG00000140835_18 (sequence is synthesized)
aaataaggttctgtttagaatgtccctttttatgcttcttaattattagcagtaaatgttcatttttatgggatcctaagctaagaatagatgtaatcatctttattggttttttaaaac

SEQ ID NO: 363264 - DNA, 120 bp, Artificial Sequence
  ENSG00000140835_19 (sequence is synthesized)
acctttgctattatctatcacccatttatacagaaaattgctaagataatatttggtttcagatgatgaactaagtctataccctcttaagaattggtggaaaatagacaattagcagct

SEQ ID NO: 363265 - DNA, 120 bp, Artificial Sequence
  ENSG00000140835_20 (sequence is synthesized)
gttaaagctgttactttcacagcttcctgggagcgagtgctttctcaagcccgtcttgcaaggtgggtccttttttgtttttggcagaagggagggacagtgaaatgtgctctgagtagg

SEQ ID NO: 363266 - DNA, 120 bp, Artificial Sequence
  ENSG00000140835_21 (sequence is synthesized)
gacggttatgcaaaagcaagtaggaggaggaagccaagaggggagttggtgagtcagaggagaaaagcgcatggcccggctagcagtgagcctctcaaaagcagcagggaagcccaagcc

SEQ ID NO: 363267 - DNA, 80 bp, Artificial Sequence
  ENSG00000140836_0 (sequence is synthesized)
atttacataaagcgattccgggcgggcggcggcagaggaggaggcggcggcggcgggcaggccggggacccggacgccag

SEQ ID NO: 363268 - DNA, 120 bp, Artificial Sequence
  ENSG00000140836_1 (sequence is synthesized)
cctccctccggggacgggccgaccgccagccctgccgccaccatgagctcccctcccctgtctccgggccccctgctcctgaccagagccacctccgagtcctggggccagcgggaggtg

SEQ ID NO: 363269 - DNA, 120 bp, Artificial Sequence
  ENSG00000140836_2 (sequence is synthesized)
gggagcatgccgcctggggtgggtgagctcggggctcgggtgccactggaatttcccgttgttgcgcatggcggcgcggcccccggacctgcaagtgccgcctccctccggaggtgcgcg

SEQ ID NO: 363270 - DNA, 120 bp, Artificial Sequence
  ENSG00000140836_3 (sequence is synthesized)
gaggcttggtgtgccaggtccgagcctccgtactgggtgcaatgaaagctccacgcaggccttaccatggaaggctgtgactcgcccgtcgtctcggggaaggacaatgggtgcggtatc

SEQ ID NO: 363271 - DNA, 120 bp, Artificial Sequence
  ENSG00000140836_4 (sequence is synthesized)
cctcagcaccagcaatggactgaactcaacagcacccacctccctgacaaacccagtagcatggagcagtccacaggcgagagccacgggcccttggacagcctgagggcccccttcaat

SEQ ID NO: 363272 - DNA, 120 bp, Artificial Sequence
  ENSG00000140836_5 (sequence is synthesized)
gagcgcctcgcggagagcaccgcgtcggccgggcccccctccgagcccgccagcaaggaggtcacctgcaacgaatgttcggcctcctttgccagcctccagacctacatggagcaccac

SEQ ID NO: 363273 - DNA, 120 bp, Artificial Sequence
  ENSG00000140836_6 (sequence is synthesized)
tgccccagcgcgcgccccccgccacccctgagagaggagagcgccagcgacaccggtgaggagggggacgaggagagtgacgtggagaacctggccggggagatcgtctaccagccggac

SEQ ID NO: 363274 - DNA, 120 bp, Artificial Sequence
  ENSG00000140836_7 (sequence is synthesized)
ggctccgcgtacattgtggagagcctgagccagctgacccagggcgggggcgcctgtgggagtggcagtggcagtgggcctctcccctcgcttttcctgaactctctccctggcgcgggg

SEQ ID NO: 363275 - DNA, 120 bp, Artificial Sequence
  ENSG00000140836_8 (sequence is synthesized)
ggcaagcaaggggacccttcgtgtgctgcacccgtgtacccgcagatcatcaacactttccacatagcctcatccttcgggaaatggtttgagggcccagaccaggctttcccgaatacc

SEQ ID NO: 363276 - DNA, 120 bp, Artificial Sequence
  ENSG00000140836_9 (sequence is synthesized)
tcagccctggcggggctcagccccgtcctgcacagcttccgcgtgtttgacgtgcgacacaaaagcaacaaggattacctgaacagcgacggttctgccaaaagctcctgcgtatccaaa

SEQ ID NO: 363277 - DNA, 120 bp, Artificial Sequence
  ENSG00000140836_10 (sequence is synthesized)
gatgttcccaacaatgtggacctgtccaaattcgatggctttgtgctctatggcaagaggaagcccatcctgatgtgtttcttgtgcaaactctcctttgggtacgtccgttcgtttgtg

SEQ ID NO: 363278 - DNA, 120 bp, Artificial Sequence
  ENSG00000140836_11 (sequence is synthesized)
acccacgcggtgcatgaccatcgaatgaccctgagcgaagacgagcggaaaattcttagcaataagaacatctccgctatcatccaagggatcggcaaagacaaggaaccccttgtaagt

SEQ ID NO: 363279 - DNA, 120 bp, Artificial Sequence
  ENSG00000140836_12 (sequence is synthesized)
tttctggaaccaaaaaacaaaaactttcaacaccctttagtttccacagctaacctcataggccccggacacagtttttatggtaaatttagtggcattcgaatggaaggggaggaagct

SEQ ID NO: 363280 - DNA, 120 bp, Artificial Sequence
  ENSG00000140836_13 (sequence is synthesized)
ctcccagcgggctccgccgctggccccgagcagccccaggctggtctcttgacccccagcaccctgttgaaccttggcgggctcaccagctcggtactgaagacccccattacctcagtc

SEQ ID NO: 363281 - DNA, 120 bp, Artificial Sequence
  ENSG00000140836_14 (sequence is synthesized)
cccctggggcctctggcttccagtcctaccaaatcctcagagggcaaggactctggggcggcagaaggagagaagcaggaagtgggcgacggggattgcttctctgagaaggtagagcca

SEQ ID NO: 363282 - DNA, 120 bp, Artificial Sequence
  ENSG00000140836_15 (sequence is synthesized)
gccgaagaggaggcggaggaggaagaggaggaggaagaggcggaggaggaggaggaagaagaggaggaggaagaagaggaggaggaagacgagggttgcaaaggactctttccaagcgag

SEQ ID NO: 363283 - DNA, 120 bp, Artificial Sequence
  ENSG00000140836_16 (sequence is synthesized)
ttggatgaggaactggaggacaggccccatgaggagcctggggccgcagcaggtagtagcagcaaaaaggaccttgctctctcaaaccaaagcatttctaactcccccttaatgcctaac

SEQ ID NO: 363284 - DNA, 120 bp, Artificial Sequence
  ENSG00000140836_17 (sequence is synthesized)
gtgctccagaccctgtcgaggggcacagcttctactagttctaattctgcttcttcctttgttgtctttgatggtgcgaacaggaggaatcgtttaagctttaacagtgagggcgtcagg

SEQ ID NO: 363285 - DNA, 120 bp, Artificial Sequence
  ENSG00000140836_18 (sequence is synthesized)
gccaatgtggcagagggcggcaggaggctggacttcgctgacgaaagtgccaataaagacaatgccacagcaccagaaccaaatgaaagcacagagggtgacgatgggggcttcgttccc

SEQ ID NO: 363286 - DNA, 120 bp, Artificial Sequence
  ENSG00000140836_19 (sequence is synthesized)
catcaccagcacgctggctccctctgcgagcttggggttggggagtgcccctcggggagtggcgtggagtgccccaaatgcgacacggtcctgggctcctcccgctcgctgggcggccac

SEQ ID NO: 363287 - DNA, 120 bp, Artificial Sequence
  ENSG00000140836_20 (sequence is synthesized)
atgaccatgatgcattctcgtaactcgtgtaagacactcaagtgccccaagtgcaactggcactataagtaccagcagaccctggaggcacacatgaaggagaagcacccggagccgggg

SEQ ID NO: 363288 - DNA, 120 bp, Artificial Sequence
  ENSG00000140836_21 (sequence is synthesized)
ggctcctgtgtctactgcaaaagcgggcagccccacccccggctggcacgaggcgagagctacacgtgtggttacaagcctttccgctgcgaggtgtgtaactactccacaactaccaaa

SEQ ID NO: 363289 - DNA, 120 bp, Artificial Sequence
  ENSG00000140836_22 (sequence is synthesized)
ggcaacctcagtattcatatgcagtctgacaagcatctcaacaacatgcagaacctgcagaatggagggggggagcaggtcttcagccacactgccggggcggcggcggcggcggtggct

SEQ ID NO: 363290 - DNA, 120 bp, Artificial Sequence
  ENSG00000140836_23 (sequence is synthesized)
gcggcggcggcggcagccaatatcagtagctcctgcggggccccctcgccgaccaaaccaaaaaccaaacccacctggcggtgcgaggtgtgtgattatgagaccaacgtggccaggaac

SEQ ID NO: 363291 - DNA, 120 bp, Artificial Sequence
  ENSG00000140836_24 (sequence is synthesized)
ctccgcattcacatgaccagtgagaagcacatgcataacatgatgttactgcaacagaacatgacccagatccaacacaaccgccacctgggcctcggcagcctgccctcacccgccgag

SEQ ID NO: 363292 - DNA, 120 bp, Artificial Sequence
  ENSG00000140836_25 (sequence is synthesized)
gccgagctctaccaatactacctggcccagaacatgaacctgcccaacctgaagatggacagtgctgcctcggacgcccagttcatgatgagcggattccagctggatcccgccgggccc

SEQ ID NO: 363293 - DNA, 120 bp, Artificial Sequence
  ENSG00000140836_26 (sequence is synthesized)
atggccgccatgacgcctgctctagtgggcggtgagatccccctagacatgcggctcgggggcgggcagctggtgtcagaggagctgatgaacctgggcgagagcttcatccagaccaac

SEQ ID NO: 363294 - DNA, 120 bp, Artificial Sequence
  ENSG00000140836_27 (sequence is synthesized)
gacccgtcgctgaagctcttccagtgcgccgtctgcaacaagttcacgacggacaacctggacatgctgggcctgcacatgaacgtggagcgcagcctgtcggaggacgagtggaaggcg

SEQ ID NO: 363295 - DNA, 120 bp, Artificial Sequence
  ENSG00000140836_28 (sequence is synthesized)
gtgatgggggactcataccagtgcaagctctgccgctacaacacccagctcaaggccaacttccagctgcactgcaagacagacaagcacgtgcagaagtaccagctggtggcccacatc

SEQ ID NO: 363296 - DNA, 120 bp, Artificial Sequence
  ENSG00000140836_29 (sequence is synthesized)
aaggagggcggcaaggccaacgagtggaggctcaagtgtgtggccatcggcaaccccgtgcacctcaagtgcaacgcctgtgactactacaccaacagcctggagaagctgcggctgcac

SEQ ID NO: 363297 - DNA, 120 bp, Artificial Sequence
  ENSG00000140836_30 (sequence is synthesized)
acggtcaactccaggcacgaggccagcctgaagttgtacaagcacctgcagcagcatgagagtggtgtagaaggtgagagctgctactaccactgcgttctgtgcaactactccaccaag

SEQ ID NO: 363298 - DNA, 120 bp, Artificial Sequence
  ENSG00000140836_31 (sequence is synthesized)
gccaagctcaacctcatccagcatgtgcgctccatgaagcaccagcgaagcgagagcctgcgaaagctgcagcggctgcagaagggccttccagaggaggacgaggacctggggcagatc

SEQ ID NO: 363299 - DNA, 120 bp, Artificial Sequence
  ENSG00000140836_32 (sequence is synthesized)
ttcaccatccgcaggtgcccctccacggacccagaagaagccattgaagatgttgaaggacccagtgaaacagctgctgatccagaggagcttgctaaggaccaagagggcggagcatcg

SEQ ID NO: 363300 - DNA, 120 bp, Artificial Sequence
  ENSG00000140836_33 (sequence is synthesized)
tccagccaagcagagaaggagctgacagattctcctgcaacctccaaacgcatctccttcccaggtagctcagagtctcccctctcttcgaagcgaccaaaaacagctgaggagatcaaa

SEQ ID NO: 363301 - DNA, 120 bp, Artificial Sequence
  ENSG00000140836_34 (sequence is synthesized)
ccggagcagatgtaccagtgtccctactgcaagtacagtaatgccgatgtcaaccggctccgggtgcatgccatgacgcagcactcggtgcaacccatgcttcgctgccccctgtgccag

SEQ ID NO: 363302 - DNA, 120 bp, Artificial Sequence
  ENSG00000140836_35 (sequence is synthesized)
gacatgctcaacaacaagatccacctccagctgcacctcacccacctccacagcgtggcacctgactgcgtggagaagctcattatgacggtgaccacccctgagatggtgatgccaagc

SEQ ID NO: 363303 - DNA, 120 bp, Artificial Sequence
  ENSG00000140836_36 (sequence is synthesized)
agcatgttcctcccagcagctgttccagatcgagatgggaattccaatttggaagaggcaggaaagcagcctgaaacctcagaggatctgggaaagaacatcttgccatccgcaagcaca

SEQ ID NO: 363304 - DNA, 120 bp, Artificial Sequence
  ENSG00000140836_37 (sequence is synthesized)
gagcaaagcggagatttgaaaccatcccctgctgacccaggctctgtgagagaagactcaggcttcatctgctggaagaaggggtgcaaccaggttttcaaaacttctgctgcccttcag

SEQ ID NO: 363305 - DNA, 120 bp, Artificial Sequence
  ENSG00000140836_38 (sequence is synthesized)
acgcattttaatgaagtgcatgccaagaggcctcagctgccggtgtcagatcgccatgtgtacaagtaccgctgtaatcagtgtagcctggccttcaagaccattgaaaagttgcagctc

SEQ ID NO: 363306 - DNA, 120 bp, Artificial Sequence
  ENSG00000140836_39 (sequence is synthesized)
cattctcagtaccatgtgatcagagctgccaccatgtgctgtctttgtcagcgcagtttccgaactttccaggctctgaagaagcaccttgagacaagccacctggagctgagtgaggct

SEQ ID NO: 363307 - DNA, 120 bp, Artificial Sequence
  ENSG00000140836_40 (sequence is synthesized)
gacatccaacagctttatggtggcctgctggccaatggggacctcctggcaatgggagaccccactctggcagaggaccataccataattgttgaggaagacaaggaggaagagagtgac

SEQ ID NO: 363308 - DNA, 120 bp, Artificial Sequence
  ENSG00000140836_41 (sequence is synthesized)
ttggaagataaacagagcccaacgggcagtgactctgggtcagtacaagaagactcgggctcagagccaaagagagctctgcctttcagaaaaggtcccaattttactatggaaaagttc

SEQ ID NO: 363309 - DNA, 120 bp, Artificial Sequence
  ENSG00000140836_42 (sequence is synthesized)
ctagacccttctcgcccttacaagtgtaccgtctgcaaggaatctttcactcaaaagaatatcctgctagtacactacaattctgtctcccacctgcataagttaaagagagcccttcaa

SEQ ID NO: 363310 - DNA, 120 bp, Artificial Sequence
  ENSG00000140836_43 (sequence is synthesized)
gaatcagcaaccggtcagccagaacccaccagcagcccagacaacaaaccttttaagtgtaacacttgtaatgtggcctacagccagagttccactctggagatccatatgaggtctgtg

SEQ ID NO: 363311 - DNA, 120 bp, Artificial Sequence
  ENSG00000140836_44 (sequence is synthesized)
ttacatcaaaccaaggcccgggcagccaagctggaggctgcaagtggcagcagcaatgggactgggaacagcagcagtatttccttgagctcctccacgccaagtcctgtgagcaccagt

SEQ ID NO: 363312 - DNA, 120 bp, Artificial Sequence
  ENSG00000140836_45 (sequence is synthesized)
ggcagtaacacctttaccacctccaatccaagcagtgctggcattgctccaagctctaacttactaagccaagtgcccactgagagtgtagggatgccacccctggggaatcctattggt

SEQ ID NO: 363313 - DNA, 120 bp, Artificial Sequence
  ENSG00000140836_46 (sequence is synthesized)
gccaacattgcttccccttcagagcccaaagaggccaatcggaagaaactggcagatatgattgcatccaggcagcagcaacaacagcagcagcaacagcaacaacaacaacaacaacaa

SEQ ID NO: 363314 - DNA, 120 bp, Artificial Sequence
  ENSG00000140836_47 (sequence is synthesized)
caacaacaagcacaaacgctggcccaggcccaggctcaagttcaagctcacctgcagcaggagctgcagcaacaggctgccctgatccagtctcagctgtttaaccccaccctccttcct

SEQ ID NO: 363315 - DNA, 120 bp, Artificial Sequence
  ENSG00000140836_48 (sequence is synthesized)
cacttccccatgacaactgagaccctgctgcaactacagcagcagcagcacctcctcttccctttctacatccccagtgctgagttccagcttaaccccgaggtgagcttgccagtgacc

SEQ ID NO: 363316 - DNA, 120 bp, Artificial Sequence
  ENSG00000140836_49 (sequence is synthesized)
agtggggcactgacactgactgggacaggcccaggcctgctggaagatctgaaggctcaggttcaggtcccacagcagagccatcagcagatcttgccgcagcagcagcagaaccaactc

SEQ ID NO: 363317 - DNA, 120 bp, Artificial Sequence
  ENSG00000140836_50 (sequence is synthesized)
tctatagcccagagtcactctgccctccttcagccaagccagcaccccgaaaagaagaacaaattggtcatcaaagaaaaggaaaaagaaagccagagagagagggacagcgccgagggg

SEQ ID NO: 363318 - DNA, 120 bp, Artificial Sequence
  ENSG00000140836_51 (sequence is synthesized)
ggagagggcaacaccggtccgaaggaaacactgccagatgccttgaaggccaaagagaagaaagagttggcaccagggggtggttctgagccttccatgctccctccacgcattgcttca

SEQ ID NO: 363319 - DNA, 120 bp, Artificial Sequence
  ENSG00000140836_52 (sequence is synthesized)
gatgccagagggaacgccaccaaggccctgctggagaactttggctttgagttggtcatccagtataatgagaacaagcagaaggtgcagaaaaagaatgggaagactgaccagggagag

SEQ ID NO: 363320 - DNA, 120 bp, Artificial Sequence
  ENSG00000140836_53 (sequence is synthesized)
aacctggaaaagctcgagtgtgactcctgcggcaagttgttttccaacatcttgattttaaagagtcatcaagagcacgttcatcagaattactttcctttcaaacagctcgagaggttt

SEQ ID NO: 363321 - DNA, 120 bp, Artificial Sequence
  ENSG00000140836_54 (sequence is synthesized)
gccaaacagtacagagaccactacgataaactgtacccactgaggccccagaccccagagccaccaccacctccccctccaccccctccacccccacttccggcagcgccgcctcagccg

SEQ ID NO: 363322 - DNA, 120 bp, Artificial Sequence
  ENSG00000140836_55 (sequence is synthesized)
gcgtccacaccagccatccccgcatcagccccacccatcacctcacctacaattgcaccggcccagccatcagtgccgctcacccagctctccatgccgatggagctgcccatcttctcg

SEQ ID NO: 363323 - DNA, 120 bp, Artificial Sequence
  ENSG00000140836_56 (sequence is synthesized)
ccgctgatgatgcagacgatgccgctgcagaccttgccggctcagctacccccgcagctgggacctgtggagcctctgcctgcggacctggcccaactctaccagcatcagctcaatcca

SEQ ID NO: 363324 - DNA, 120 bp, Artificial Sequence
  ENSG00000140836_57 (sequence is synthesized)
accctgctccagcagcagaacaagaggcctcgcaccaggatcacagatgatcagctccgagtcttgcggcaatattttgacattaacaactcccccagtgaagagcaaataaaagagatg

SEQ ID NO: 363325 - DNA, 120 bp, Artificial Sequence
  ENSG00000140836_58 (sequence is synthesized)
gcagacaagtccgggttgccccagaaagtgatcaagcactggttcaggaacactctcttcaaagagaggcagcgtaacaaggactccccttacaacttcagtaatcctcctatcaccagc

SEQ ID NO: 363326 - DNA, 120 bp, Artificial Sequence
  ENSG00000140836_59 (sequence is synthesized)
ctggaggagctcaagattgactcccggcccccttcgccggaacctccaaagcaggagtactggggaagcaagaggtcttcaagaacaaggtttacggactaccagctgagggtcttacag

SEQ ID NO: 363327 - DNA, 120 bp, Artificial Sequence
  ENSG00000140836_60 (sequence is synthesized)
gacttcttcgatgccaatgcttacccaaaggatgatgaatttgagcaactctctaatttactgaaccttccaacccgagtgatagtggtgtggtttcagaatgcccgacagaaggccagg

SEQ ID NO: 363328 - DNA, 120 bp, Artificial Sequence
  ENSG00000140836_61 (sequence is synthesized)
aagaattatgagaatcagggagagggcaaagatggagagcggcgtgagcttacaaatgatagatacattcgaacaagcaacttgaactaccagtgcaaaaaatgtagcctggtgtttcag

SEQ ID NO: 363329 - DNA, 120 bp, Artificial Sequence
  ENSG00000140836_62 (sequence is synthesized)
cgcatctttgatctcatcaagcaccagaagaagctgtgttacaaggatgaggatgaggaggggcaggacgacagccaaaatgaggattccatggatgccatggaaatcctgacgcctacc

SEQ ID NO: 363330 - DNA, 120 bp, Artificial Sequence
  ENSG00000140836_63 (sequence is synthesized)
agctcatcctgcagtaccccgatgccctcacaggcttacagcgccccagcaccatcagccaataatacagcttcctccgctttcttgcagcttacagcggaggctgaggaactggccacc

SEQ ID NO: 363331 - DNA, 120 bp, Artificial Sequence
  ENSG00000140836_64 (sequence is synthesized)
ttcaattcaaaaacagaggcaggcgatgagaaaccaaagctggcggaagctcccagtgcacagccaaaccaaacccaagaaaagcaaggacaaccaaagccagagctgcagcagcaagag

SEQ ID NO: 363332 - DNA, 120 bp, Artificial Sequence
  ENSG00000140836_65 (sequence is synthesized)
agtgccccttaccccagtcgagccccagtccttcccagctctcccacctgcccctcaagcccctccacacatcaactcctcaacagctcgcaaacctacctcctcagctaatcccctacc

SEQ ID NO: 363333 - DNA, 120 bp, Artificial Sequence
  ENSG00000140836_66 (sequence is synthesized)
agtgtgaccagtgtaagttggcatttccgtcatttgagcactggcaggagcatcagcagctccacttcctgagcgcgcagaaccagttcatccacccccagtttttggacaggtccctgg

SEQ ID NO: 363334 - DNA, 120 bp, Artificial Sequence
  ENSG00000140836_67 (sequence is synthesized)
atatgcctttcatgctctttgatcccagtaacccactcctggccagccagctgctctctggggccatacctcagattccagcaagctcagccacttctccttcaactccaacctccacaa

SEQ ID NO: 363335 - DNA, 120 bp, Artificial Sequence
  ENSG00000140836_68 (sequence is synthesized)
tgaacactctcaagaggaagctggaggaaaaggccagtgcaagccctggcgaaaacgacagtgggacaggaggagaagagcctcagagagacaagcgtttgagaacaaccatcacaccgg

SEQ ID NO: 363336 - DNA, 120 bp, Artificial Sequence
  ENSG00000140836_69 (sequence is synthesized)
aacaactagaaattctctaccagaagtatctactggattccaatccgactcgaaagatgttggatcacattgcacacgaggtgggcttgaagaaacgtgtggtacaagtctggtttcaga

SEQ ID NO: 363337 - DNA, 120 bp, Artificial Sequence
  ENSG00000140836_70 (sequence is synthesized)
acacccgagctcgggaaaggaaaggacagttccgggctgtaggcccagcgcaggcccacaggagatgccctttttgcagagcgctcttcaaagccaagactgctcttgaggctcatatcc

SEQ ID NO: 363338 - DNA, 120 bp, Artificial Sequence
  ENSG00000140836_71 (sequence is synthesized)
ggtcccgtcactggcatgaagccaagagagctggctacaacctaactctgtctgcgatgctcttagactgtgatgggggactccagatgaaaggagatatttttgacggaactagctttt

SEQ ID NO: 363339 - DNA, 120 bp, Artificial Sequence
  ENSG00000140836_72 (sequence is synthesized)
cccacctacccccaagcagtagtgatggtcagggtgtccccctctcacctgtgagtaaaaccatggaattgtcacccagaactcttctaagcccttcctccattaaggtggaagggattg

SEQ ID NO: 363340 - DNA, 120 bp, Artificial Sequence
  ENSG00000140836_73 (sequence is synthesized)
aagactttgaaagcccctccatgtcctcagttaatctaaactttgaccaaactaagctggacaacgatgactgttcctctgtcaacacagcaatcacagataccacaactggagacgagg

SEQ ID NO: 363341 - DNA, 120 bp, Artificial Sequence
  ENSG00000140836_74 (sequence is synthesized)
gcaacgcagataacgacagtgcaacgggaatagcaactgaaaccaaatcctcttctgcacccaacgaagggttgaccaaagcggccatgatggcaatgtctgagtatgaagatcggttgt

SEQ ID NO: 363342 - DNA, 120 bp, Artificial Sequence
  ENSG00000140836_75 (sequence is synthesized)
catctggtctggtcagcccggccccgagcttttatagcaaggaatatgacaatgaaggtacagtggactacagtgaaacctcaagccttgcagatccctgctccccgagtcctggtgcga

SEQ ID NO: 363343 - DNA, 120 bp, Artificial Sequence
  ENSG00000140836_76 (sequence is synthesized)
gtggatctgcaggcaaatctggtgacagcggagatcggcctgggcagaaacgttttcgcactcaaatgaccaatctgcagctgaaggtcctcaagtcatgctttaatgactacaggacac

SEQ ID NO: 363344 - DNA, 120 bp, Artificial Sequence
  ENSG00000140836_77 (sequence is synthesized)
ccactatgctagaatgtgaggtcctgggcaatgacattggactgccaaagagagtcgttcaggtctggttccagaatgcccgggcaaaagaaaagaagtccaagttaagcatggccaagc

SEQ ID NO: 363345 - DNA, 120 bp, Artificial Sequence
  ENSG00000140836_78 (sequence is synthesized)
attttggtataaaccaaacgagttatgagggacccaaaacagagtgcactttgtgtggcatcaagtacagcgctcggctgtctgtacgtgaccatatcttttcccaacagcatatctcca

SEQ ID NO: 363346 - DNA, 120 bp, Artificial Sequence
  ENSG00000140836_79 (sequence is synthesized)
aagttaaagacaccattggaagccagctggacaaggagaaagaatactttgacccagccaccgtacgtcagttgatggctcaacaagagttggaccggattaaaaaggccaacgaggtcc

SEQ ID NO: 363347 - DNA, 120 bp, Artificial Sequence
  ENSG00000140836_80 (sequence is synthesized)
ttggactggcagctcagcagcaagggatgtttgacaacacccctcttcaggcccttaaccttcctacagcatatccagcgctccagggcattcctcctgtgttgctcccgggcctcaaca

SEQ ID NO: 363348 - DNA, 120 bp, Artificial Sequence
  ENSG00000140836_81 (sequence is synthesized)
gcccctccttgccaggctttactccatccaacacagctttaacgtctcctaagccgaacttgatgggtctgcccagcacaactgttccttcccctggcctccccacttctggattaccaa

SEQ ID NO: 363349 - DNA, 120 bp, Artificial Sequence
  ENSG00000140836_82 (sequence is synthesized)
ataaaccgtcctcagcgtcgctgagctccccaaccccagcacaagccacgatggcgatgggccctcagcaacccccccagcagcagcagcagcagcagcaaccacaggtgcagcagcctc

SEQ ID NO: 363350 - DNA, 120 bp, Artificial Sequence
  ENSG00000140836_83 (sequence is synthesized)
ccccgccgccagcagcccagccgccacccacaccacagctcccactgcaacagcagcagcaacgcaaggacaaagacagtgagaaagtaaaggagaaggaaaaggcacacaaagggaaag

SEQ ID NO: 363351 - DNA, 120 bp, Artificial Sequence
  ENSG00000140836_84 (sequence is synthesized)
gggaacccctgcctgtccccaagaaggagaaaggagaggcccccacggcaactgcagccacgatctcagccccgctgcccaccatggagtatgcggtagaccctgcacagctgcaggccc

SEQ ID NO: 363352 - DNA, 120 bp, Artificial Sequence
  ENSG00000140836_85 (sequence is synthesized)
tgcaggccgcgttgacttcggaccccacagcattgctcacaagccagttccttccttactttgtaccaggcttttctccttattatgctccccagatccctggcgccctgcagagcgggt

SEQ ID NO: 363353 - DNA, 120 bp, Artificial Sequence
  ENSG00000140836_86 (sequence is synthesized)
acctgcagcctatgtatggcatggaaggcctgttcccctacagccctgcactgtcgcaggccctgatggggctgtccccaggctccctactgcagcagtaccagcaataccagcagagtc

SEQ ID NO: 363354 - DNA, 120 bp, Artificial Sequence
  ENSG00000140836_87 (sequence is synthesized)
tgcaggaggcaattcagcagcagcagcagcggcaactacagcagcagcagcagcaaaaagtgcagcagcagcagcccaaagcaagccaaaccccagtcccccccggggctccttccccag

SEQ ID NO: 363355 - DNA, 120 bp, Artificial Sequence
  ENSG00000140836_88 (sequence is synthesized)
acaaagaccctgccaaagaatcccccaaaccagaagaacagaaaaacaccccccgtgaggtgtcccccctcctgccgaaactccctgaagagccagaagcagaaagcaaaagtgcggact

SEQ ID NO: 363356 - DNA, 120 bp, Artificial Sequence
  ENSG00000140836_89 (sequence is synthesized)
ccctctacgaccccttcattgttccaaaggtgcagtacaagttggtctgccgcaagtgccaggcgggcttcagcgacgaggaggcagcgaggagccacctgaagtccctctgcttcttcg

SEQ ID NO: 363357 - DNA, 120 bp, Artificial Sequence
  ENSG00000140836_90 (sequence is synthesized)
gccagtctgtggtgaacctgcaagagatggtgcttcacgtccccaccggcggcggcggcggtggcagtggcggcggcggcggcggtggcggcggcggcggcggcggcggctcgtaccact

SEQ ID NO: 363358 - DNA, 120 bp, Artificial Sequence
  ENSG00000140836_91 (sequence is synthesized)
gcctggcgtgcgagagcgcgctctgtggggaggaagctctgagtcaacatctcgagtcggccttgcacaaacacagaacaatcacgagagcagcaagaaacgccaaagagcaccctagtt

SEQ ID NO: 363359 - DNA, 120 bp, Artificial Sequence
  ENSG00000140836_92 (sequence is synthesized)
tattacctcactctgcctgcttccccgatcctagcaccgcatctacctcgcagtctgccgctcactcaaacgacagcccccctcccccgtcggccgccgccccctcctccgcttcccccc

SEQ ID NO: 363360 - DNA, 120 bp, Artificial Sequence
  ENSG00000140836_93 (sequence is synthesized)
acgcctccaggaagtcttggccgcaagtggtctcccgggcttcggcagcgaagcccccttcttttcctcctctctcctcatcttcaacggttacctcaagttcatgcagcacctcagggg

SEQ ID NO: 363361 - DNA, 120 bp, Artificial Sequence
  ENSG00000140836_94 (sequence is synthesized)
ttcagccctcgatgccaacagacgactattcggaggagtctgacacggatctcagccaaaagtccgacggaccggcgagcccggtggagggtcccaaagaccccagctgccccaaggaca

SEQ ID NO: 363362 - DNA, 120 bp, Artificial Sequence
  ENSG00000140836_95 (sequence is synthesized)
gtggtctgaccagtgtaggaacggacaccttcagattgtaagctttgaagatgaacaatacaaacaaatgaatttaaatacaaaaattaataacaaaccaatttcaaaaatagactaact

SEQ ID NO: 363363 - DNA, 120 bp, Artificial Sequence
  ENSG00000140836_96 (sequence is synthesized)
aaaaaaaaagaaaaaaaagaaaaagcgtgggttgttttcccatatacctatctatgccggtgattttacattcttgtctttttcttttcttttaatattaaaaaaaaaaaaaaagcccta

SEQ ID NO: 363364 - DNA, 120 bp, Artificial Sequence
  ENSG00000140836_97 (sequence is synthesized)
ttttcttttaatattaaaaaaaaaaaaaaagccctaaccctgttacattgtgtccttttgaaggtactattggtctgggaaacagaagtccgcagggcctccctaatgtctttggagctt

SEQ ID NO: 363365 - DNA, 120 bp, Artificial Sequence
  ENSG00000140836_98 (sequence is synthesized)
aaaccccttgtatatttgccccttttcaataaacgccccacgctgatagcacagaggagcccggcatgcactgtatgggaaagcagtccaccttgttacagttttaaatttcttgctatc

SEQ ID NO: 363366 - DNA, 120 bp, Artificial Sequence
  ENSG00000140836_99 (sequence is synthesized)
ttagcattcagataccaatggcttgctaaaagaaaaaaagaaatgtaatgtctttttattctcaggtcaatcgctcacactttgttttcagaatcattgttttatatattattgtttttt

SEQ ID NO: 363367 - DNA, 120 bp, Artificial Sequence
  ENSG00000140836_100 (sequence is synthesized)
cagtttttttttttttttttgttccagaaaagattttttgttttgttaacttaaaaatgggcagaaagtattcaagaaaaacaatgtgaactgctttagctttctggggatttttaagga

SEQ ID NO: 363368 - DNA, 120 bp, Artificial Sequence
  ENSG00000140836_101 (sequence is synthesized)
tagcttttctgctgaagccaatttcaaggggaaaagttaagcactcccactttcaaaaaaaaaaaaaaataataacccacacacacaaagagtgttgaggacttgtagcttaaaaaaaat

SEQ ID NO: 363369 - DNA, 120 bp, Artificial Sequence
  ENSG00000140836_102 (sequence is synthesized)
aagttttaaaaactgactttctgtatttatgatagatatgaccatttttggtgttgagtagattgttgcattggaaatgaactgaagcagtatggtagatttaaaaggaaaaaaaaaaaa

SEQ ID NO: 363370 - DNA, 120 bp, Artificial Sequence
  ENSG00000140836_103 (sequence is synthesized)
aaaccttttgtgtacatttagctttttgtatggtccagctgacagctcctcatttgatgttgtcttgttcattcctagcagatgatagattgcaatccgttgattcgcctaagcttttct

SEQ ID NO: 363371 - DNA, 120 bp, Artificial Sequence
  ENSG00000140836_104 (sequence is synthesized)
ccccttgtcccttaattccactttctctttcttgtcccttaattccactttctctttccttctcccacctcccgtcctataatctcccacttaaggtagctgccttcatttcttagaggg

SEQ ID NO: 363372 - DNA, 120 bp, Artificial Sequence
  ENSG00000140836_105 (sequence is synthesized)
agctgcagaattattttataaaactaaagaaagaatttcaagggattctaggggtcattaggatcctcacagattatttttggttggggagttgaaactttttaaaggcatataattcta

SEQ ID NO: 363373 - DNA, 120 bp, Artificial Sequence
  ENSG00000140836_106 (sequence is synthesized)
gttacctgtgtctgttagctttgtgcatttattttttatttatccttcttttggcttttttttctttgtaccccttcttttcctccttgtttggtaggagcttcaaatattctttttttt

SEQ ID NO: 363374 - DNA, 120 bp, Artificial Sequence
  ENSG00000140836_107 (sequence is synthesized)
tctatactaaaggatttgtttccatttgtgtaattggctgtgtacttttcttttctaaaaaaagtttttggttagggatttggtttttggttttgtgtttgttttttctttcctctctca

SEQ ID NO: 363375 - DNA, 120 bp, Artificial Sequence
  ENSG00000140836_108 (sequence is synthesized)
gaaaaaaaaatttcatgctttaaataaaatccaaagacacaccctttcactgctgatgcagaaaaaagggaaagggttcttgttacttgagaatttgtttctgatttaaacaaacaagac

SEQ ID NO: 363376 - DNA, 120 bp, Artificial Sequence
  ENSG00000140836_109 (sequence is synthesized)
ttagtttaataaaagaaagagaaaaacaaaagattcccaggttgttatgtgcttcttctgcaagcagagaggcaaatgttaatgacaattccatataccaaaagacacattttttacttc

SEQ ID NO: 363377 - DNA, 120 bp, Artificial Sequence
  ENSG00000140836_110 (sequence is synthesized)
aaagttttgtccttgtgttaggcagtctgagcagcgagtgatccagagcgcagccaacaaagcagcagatagcagtgtacagaaagcaaaaaaggaactgtatgtgaggcacttgtttct

SEQ ID NO: 363378 - DNA, 120 bp, Artificial Sequence
  ENSG00000140836_111 (sequence is synthesized)
gttaatatccatattcctgttaacacacaccctttctcatgtaaaaagaaaaataaataaatggtctgaactttgaaaactttgtgctgctaaaacatagattttggagacaaataaata

SEQ ID NO: 363379 - DNA, 120 bp, Artificial Sequence
  ENSG00000140836_112 (sequence is synthesized)
gatgctttgctgtttcactttcatagctaaacatcaacagaaaccatctccccttgcccccaaagtgtgaaatccttcttcccttcgttttcttccttatgtttcaaaagggaactttga

SEQ ID NO: 363380 - DNA, 120 bp, Artificial Sequence
  ENSG00000140836_113 (sequence is synthesized)
agactgtgaatacaggttccattggtcacctttcgggcttctttccccagtgctgaagccactcatcgactttgcaaaagactggagcattccaagatctgaaaatggattttttttctt

SEQ ID NO: 363381 - DNA, 120 bp, Artificial Sequence
  ENSG00000140836_114 (sequence is synthesized)
tttttcttttttagccgggactattttatttttatgaatttgtttttagtttaatgaaatagtagatcctgaaatgttgtacatatttctaactaggctgatgcacagtgcaaattcctt

SEQ ID NO: 363382 - DNA, 120 bp, Artificial Sequence
  ENSG00000140836_115 (sequence is synthesized)
ttttaattgttttttttaagtagaaatactaaagaaagaataccatctaactattcataccagtatccagttgtagcataaggtgtcaaaagcaagtacgcaaaacatttactgttttaa

SEQ ID NO: 363383 - DNA, 120 bp, Artificial Sequence
  ENSG00000140836_116 (sequence is synthesized)
caagctatttccttttaacaagaaatcttgtatttcttcctgtgtttgagatgaacatttttaaattttaaagttgtacagttttttgttttccattattttatcttgtttgtaactcta

SEQ ID NO: 363384 - DNA, 120 bp, Artificial Sequence
  ENSG00000140836_117 (sequence is synthesized)
tgaaatatatatatatatattttttgccatttaactgttgtatgttactctgtgtctgtaccatatagaaaaaaaattgtttttgtttttggttctctatgtgatatcagttaacaatgt

SEQ ID NO: 363385 - DNA, 120 bp, Artificial Sequence
  ENSG00000140836_118 (sequence is synthesized)
aacactagctttacctgtcaaattctgctaggtcttctctgaaaacgttgtttttaaaaatgatattgcttggtaatagtgcaatttctatccttttccctcccccctcaacttttaagt

SEQ ID NO: 363386 - DNA, 86 bp, Artificial Sequence
  ENSG00000140836_119 (sequence is synthesized)
gggagctactatgccatcctccctctgtgaggcagagtgactgtcagtgttttgttatgccatgccttgagctgtgggtgtttggc

SEQ ID NO: 363387 - DNA, 120 bp, Artificial Sequence
  ENSG00000140836_120 (sequence is synthesized)
gtgttttgttatgccatgccttgagctgtgggtgtttggcgacaataaggtggttgaatagattggctgagcacacttccacccacctagtgttctcagaggggttatgtgattgtttca

SEQ ID NO: 363388 - DNA, 120 bp, Artificial Sequence
  ENSG00000140836_121 (sequence is synthesized)
acctggagtgggttgcacccttaatgctttcctctgcaactaaaccgcccacatatatgttcattgaaaaaagtaagaataattctcagcactaacccagaagtagcaaagcagtcagtg

SEQ ID NO: 363389 - DNA, 120 bp, Artificial Sequence
  ENSG00000140836_122 (sequence is synthesized)
atggtgaacattagaggtcaaacatgagttagatgtttgtgggctgacagccatcgtggctatgaccagtactatttacaaagcatgaattcactacaatgctcaactgtttgtttagct

SEQ ID NO: 363390 - DNA, 120 bp, Artificial Sequence
  ENSG00000140836_123 (sequence is synthesized)
ttatctcacttggggaatttattcctgtctgctgcattgtaggtagctgggtaggatatatttccacttgctttttaaattagttcttcacctccattgacactcgttttttggttttct

SEQ ID NO: 363391 - DNA, 120 bp, Artificial Sequence
  ENSG00000140836_124 (sequence is synthesized)
ccctatagtgtgggttggtgctagacaccagtctgacccacagaatgggagttatttcatccatctttcctccatccttccaaaaaccacatatctacacaaggaaaaatttaatacatc

SEQ ID NO: 363392 - DNA, 120 bp, Artificial Sequence
  ENSG00000140836_125 (sequence is synthesized)
taggaattttttttttaattacaagctatttaaagagatgaatgtggccaaagttttacacaattgaaaataaagtaaaacagacggcatgtgtttaaacctgagtttatcaggcatggc

SEQ ID NO: 363393 - DNA, 120 bp, Artificial Sequence
  ENSG00000140836_126 (sequence is synthesized)
aggaagttgcaggagagagaggcagtgacccaagccagtgcacttgatgttcatggacatatattttttttaaataataaattaaaacattttaaatagaagcataaattgagttgtttg

SEQ ID NO: 363394 - DNA, 120 bp, Artificial Sequence
  ENSG00000140836_127 (sequence is synthesized)
ttggcgctgagatactgcccactgtgaaacaaagctttgactagttttttgtttgtttactttcttcaggggggaggggggcaagtttgggtaggaaagaaagcataaatgaacgtgacc

SEQ ID NO: 363395 - DNA, 83 bp, Artificial Sequence
  ENSG00000140836_128 (sequence is synthesized)
gcaagtgaaaccaaaaatgatgttcttggtgtttttctataatgtagtcttgttagcttttttgttactgtaacaatgctgat

SEQ ID NO: 363396 - DNA, 120 bp, Artificial Sequence
  ENSG00000140836_129 (sequence is synthesized)
gtagtcttgttagcttttttgttactgtaacaatgctgatctcgaactgtaccaaaatacatggagactaacaaacagaaccacatggaactttcaaactgaaaaaaaaatttgtcacaa

SEQ ID NO: 363397 - DNA, 120 bp, Artificial Sequence
  ENSG00000140836_130 (sequence is synthesized)
aaactttgttgtcatagttaagttgattgtagatggtaattgaatatactcctttgaaaatatttcatcaagtatgtttcctgctcattgtgatacattaaaaaaaaaatatgagcaaaa

SEQ ID NO: 363398 - DNA, 120 bp, Artificial Sequence
  ENSG00000140836_131 (sequence is synthesized)
ggacttcatgatgcttccttgactgctagcttaacatggagttgtcttttttattttttttataaacccagtcacaacacagaaagaggaggaggaagagagagagagagagagagagag

SEQ ID NO: 363399 - DNA, 120 bp, Artificial Sequence
  ENSG00000140836_132 (sequence is synthesized)
agagagagagagaactaaaaaccctgaaggatggttctcaaaaattctaaaggaaccacagggaattccttttaagagcaacagaaagcaagctagctgaggcttctggactttttgaat

SEQ ID NO: 363400 - DNA, 120 bp, Artificial Sequence
  ENSG00000140836_133 (sequence is synthesized)
tctgaaaccaaaagaagaataagtcgaagaaattttactttgggacttggagaacaaggaacaagtataaaatatccctgtctcacgaccctgtcaagttctcagggagatgaacatatg

SEQ ID NO: 363401 - DNA, 120 bp, Artificial Sequence
  ENSG00000140836_134 (sequence is synthesized)
agagattgcgggacatccttgcaagaggagaaaggctcctgactcctgaggaggactctgctgcccgctggccccgttagacggacggctcccctggcatcctattcttgtttggacatt

SEQ ID NO: 363402 - DNA, 120 bp, Artificial Sequence
  ENSG00000140836_135 (sequence is synthesized)
tttaaagaccacatatggtctccaggactggaggagtctgaatcacagttcttcccaggtggccctggatgtgtgtgggaagaggtcgggccgagaatggctggaagaaaattgacccca

SEQ ID NO: 363403 - DNA, 120 bp, Artificial Sequence
  ENSG00000140836_136 (sequence is synthesized)
tggttccagctttttccaggagcccatttcagcagactctgatttggggaacccagacgttgtgcttgttaacaggacaactttgagtccttgctatcttcatcttcaccctcgatttgg

SEQ ID NO: 363404 - DNA, 120 bp, Artificial Sequence
  ENSG00000140836_137 (sequence is synthesized)
agaagctcggaagatataagttacaacccccagaagtctagcctagcgctattggatggtgtccagctttgccggaattagagagatagagaagctgagacacaaagaagttaacaagag

SEQ ID NO: 363405 - DNA, 120 bp, Artificial Sequence
  ENSG00000140836_138 (sequence is synthesized)
ccagcaagggacaggacctggattggagcccagggggtctaactccagaaccagcgccaccagctcaggcacaaagcggcagttgcatagaggagacgaccggttagcccaagatgaaga

SEQ ID NO: 363406 - DNA, 120 bp, Artificial Sequence
  ENSG00000140836_139 (sequence is synthesized)
caaggccgagaaatggctgggctccaggcttgtgtgacagcccgagagtggacagggcgcagctatgactccatctcttcttacaggacctggaagctctgagagccctggaacccccaa

SEQ ID NO: 363407 - DNA, 120 bp, Artificial Sequence
  ENSG00000140836_140 (sequence is synthesized)
aagagctgagcgaaaggggccctcaaacggaccaaagtgatcagctgtggttctgcatctgccagactttttcagggtcgtcccctgtggctttcagacgtctgttggcctgggcacact

SEQ ID NO: 363408 - DNA, 120 bp, Artificial Sequence
  ENSG00000140836_141 (sequence is synthesized)
tctggctttcaatatgcatctttcccctttgcaacccaaacacgatgtgcaaagggtggcacgtggcctttgagtgaacctggaagtcaacgccagctcccacttccagcgcgtcccctc

SEQ ID NO: 363409 - DNA, 120 bp, Artificial Sequence
  ENSG00000140836_142 (sequence is synthesized)
cgaccgctgcagccgccaccgccgccgcctcctcctcctcctcctcccggccgcagccgccgccgccgcctgctttgcatcccaattacagcctagagccgctgccgccgccgccgccgc

SEQ ID NO: 363410 - DNA, 120 bp, Artificial Sequence
  ENSG00000140836_143 (sequence is synthesized)
ctagagccgctgccgccgccgccgccgcttctcttccgtggcccctgcccgctccgggggctgtaaactccccgccaaccatgctgctcggcggcagcggcggcggcggctccggctccc

SEQ ID NO: 363411 - DNA, 120 bp, Artificial Sequence
  ENSG00000140836_144 (sequence is synthesized)
cgccgccgccgccgccagcagcgcgtcctccgccgccgccgacccccgccagccgccgctgctgccttgatgggctccgcggcccgagcgcctcttttcgggattaaaagcgccgccagc

SEQ ID NO: 363412 - DNA, 120 bp, Artificial Sequence
  ENSG00000140836_145 (sequence is synthesized)
gtgtgtgtggctgtccttgagccttctcatctttccttccctggaagaatggagctaacaagtcagggagcggatacatccttagtctgcccagaaaaaggatgagtgggagggagattt

SEQ ID NO: 363413 - DNA, 120 bp, Artificial Sequence
  ENSG00000140836_146 (sequence is synthesized)
cgtttgcttctttgagcagtcacctttattcttctttattatactacattatactgtagtttttaatggttaagctttttaagtggcaccaaagccagcttgcttattgagtatccaggt

SEQ ID NO: 363414 - DNA, 120 bp, Artificial Sequence
  ENSG00000140836_147 (sequence is synthesized)
aatttaaagtggtctctattcgaagtctctgctctttcacttaaacctttactctaagctgtccccctccactaatgcccccattctttggagatgctcttttcctagttaatttaaaca

SEQ ID NO: 363415 - DNA, 120 bp, Artificial Sequence
  ENSG00000140836_148 (sequence is synthesized)
gagagagagagagagagagagaaaggggaaaataataagaaagaaaagagaagggggggaagaagaaaggaaaaaaaaaatcttaaaaagattcttagccaggttcctattgttgctcct

SEQ ID NO: 363416 - DNA, 88 bp, Artificial Sequence
  ENSG00000140836_149 (sequence is synthesized)
agaagggggggaagaagaaaggaaaaaaaaaatcttaaaaagattcttagccaggttcctattgttgctcctatgcattccacttctc

SEQ ID NO: 363417 - DNA, 120 bp, Artificial Sequence
  ENSG00000140836_150 (sequence is synthesized)
gtgtgtttttaatacatgcataaacttttggagcctctctccctcttctaggctcttctcccatcctctcttcctgctctccttgccctgctcatcactttcccctgttttttttttttt

SEQ ID NO: 363418 - DNA, 120 bp, Artificial Sequence
  ENSG00000140836_151 (sequence is synthesized)
ttcctcccttcctcccctctgcctccctccacctcccccttttcttttttgctgaatcttattgatccagaaggtggctaattagcccttcccgtcgtgcctgggtaatgaagcacatgc

SEQ ID NO: 363419 - DNA, 120 bp, Artificial Sequence
  ENSG00000140836_152 (sequence is synthesized)
ctgaaaccaaaagaagaataagtcgaagaaattttactttggtatgtagaagcgttccaatttgtttggtctaaaagttatccatggacttttcttcagagtgctctgtttcattcgatg

SEQ ID NO: 363420 - DNA, 120 bp, Artificial Sequence
  ENSG00000140836_153 (sequence is synthesized)
tagttaaaggttgatttcaggtaatttctgagatgtgatgatttggaaaatgtagcacataaaaatgaggaacttacgcgttaatggctttactttcaaaatgcctatgtatctttctgg

SEQ ID NO: 363421 - DNA, 120 bp, Artificial Sequence
  ENSG00000140836_154 (sequence is synthesized)
gggtagtccacagcagaacgattgctacgggaggtgctggctgtgtaagtcatgagctttgataatttcagtgcttaatgtacagctgctggtcttggtaaagtaccacatgatggctca

SEQ ID NO: 363422 - DNA, 120 bp, Artificial Sequence
  ENSG00000140836_155 (sequence is synthesized)
tagttgcattcctagttgaaactcagcacaactctggattctgattgttctacaaatgaatgagatacaatagtaaggaaatccacagaatagtaaaatagaatgttgtttgttggaatt

SEQ ID NO: 363423 - DNA, 120 bp, Artificial Sequence
  ENSG00000140836_156 (sequence is synthesized)
catttctgtggctgtaggtagaagacgatatggcaaattcactcaccagaaaattgtactatgagttttttgtttttgtttttgttttacataagagaaaagaaggtaaaaaaaagagaa

SEQ ID NO: 363424 - DNA, 120 bp, Artificial Sequence
  ENSG00000140836_157 (sequence is synthesized)
ccagatgtccctgtccagccatgtcacatcctaccgacacactttgtgccatcacaagaggtctcattagcaaattggcatctaccagtggaacagggaaatagagaatacaaagaagag

SEQ ID NO: 363425 - DNA, 81 bp, Artificial Sequence
  ENSG00000140836_158 (sequence is synthesized)
tctaccagtggaacagggaaatagagaatacaaagaagagctgggctttagtgaggcatttgataatatggttaaagacaa

SEQ ID NO: 363426 - DNA, 120 bp, Artificial Sequence
  ENSG00000140836_159 (sequence is synthesized)
ggatttgtaaagatattgattccagataatgtttgcctttctaactctctcttccttagacttgatggataggttcagggctacatctcggcagccaactcaccgcagctacccagggaa

SEQ ID NO: 363427 - DNA, 120 bp, Artificial Sequence
  ENSG00000140836_160 (sequence is synthesized)
ggctgtcctcaagtgccccagtcagctcggctgagcccaaagcctcccatctctgcattcaggggctctcttcttcccccatccatcaccagggaccagtgatcttgcctgtcgatgccc

SEQ ID NO: 363428 - DNA, 120 bp, Artificial Sequence
  ENSG00000140836_161 (sequence is synthesized)
ggctctcgcttgatgtctcagttccggaacagagatgctccagctactacctgggaaggctctggccccaaaaatatttagttagcagccattcagttaagtggaattgactttttatcg

SEQ ID NO: 363429 - DNA, 120 bp, Artificial Sequence
  ENSG00000140836_162 (sequence is synthesized)
ctaaccgctgtgtaacagctcacgcacgactgctctggtttgcatcgatcagacccttcttccaacaggtagtcagctatttgaggcaatgacttgagataaacacctacttttacttca

SEQ ID NO: 363430 - DNA, 120 bp, Artificial Sequence
  ENSG00000140836_163 (sequence is synthesized)
ggctaattcatttcaggtggatttcaaggaggccctgcaccccgtctcttagacaagctgaaattggagagtcaagatccacgcactgcatgcttgagatcctaggagacctttcttcct

SEQ ID NO: 363431 - DNA, 120 bp, Artificial Sequence
  ENSG00000140836_164 (sequence is synthesized)
ctcccgttttctttttctttcccttgtattttgtaagtgccacttataaacaagataccaggactcaggacgttgaaaatgccacttcagaaaatgtgtcggccatccatccctctgtcc

SEQ ID NO: 363432 - DNA, 120 bp, Artificial Sequence
  ENSG00000140836_165 (sequence is synthesized)
ttttaatgagatgcatccgggactgcaggaaaccaagactgctgcggaggcaggattgtcgctgggcaaccaagcatccttccagctgccccagaaagaatctcacaatgtcctgcaatc

SEQ ID NO: 363433 - DNA, 120 bp, Artificial Sequence
  ENSG00000140836_166 (sequence is synthesized)
cctggtcttctcaccacctcagggggcggtccttgaatccacccccatccttgttccaggctcacaagtgaaatttaccaggagctgatattgcaaaatagattgctatttcgcaactga

SEQ ID NO: 363434 - DNA, 120 bp, Artificial Sequence
  ENSG00000140836_167 (sequence is synthesized)
acacagaatcagtaacagccaggagccatattgcctgactgtccccaccacccacccacacacacacctggtctaaatatgtatttacaaaatataaatacatgtttacacatttcagat

SEQ ID NO: 363435 - DNA, 120 bp, Artificial Sequence
  ENSG00000140836_168 (sequence is synthesized)
tgaccaattggagtaacaactctggaattttcacagcttaggcaatttgagaatagcgtctcttctttctatgccatgtgctagaatgaaattaggattcaacttgattgggtgtgaatt

SEQ ID NO: 363436 - DNA, 120 bp, Artificial Sequence
  ENSG00000140836_169 (sequence is synthesized)
tttggaggtagctgttcttatctggcatgtctactgagttttcttaaatgaatatacatatgccttcaaccaattacccctccctctttcccttccttccttcttccctccctccctcct

SEQ ID NO: 363437 - DNA, 120 bp, Artificial Sequence
  ENSG00000140836_170 (sequence is synthesized)
ttccttccttccatccatccatcaagttacctatgattttcctgctaagtcgtcccccagtggctgagggtaaaatccacagtctgaatcctttttaaattttaatttaaaagtaaaaat

SEQ ID NO: 363438 - DNA, 120 bp, Artificial Sequence
  ENSG00000140836_171 (sequence is synthesized)
caaagcattctaaaggaaaactcctttctattgttgacaaccctttcaatttctagtccgctcttcttaggggcagtagtgaagggctttaaattgatccctttatttttttgaaatgga

SEQ ID NO: 363439 - DNA, 120 bp, Artificial Sequence
  ENSG00000140836_172 (sequence is synthesized)
agaagtgtcaaatattcgaatttgtcttgatcatttattttccacgagcagggagcaaacactgtgtgagtgatacgtgcacattctgtaggtggttatgatgaataaattggttgtacg

SEQ ID NO: 363440 - DNA, 120 bp, Artificial Sequence
  ENSG00000140836_173 (sequence is synthesized)
atgcagaaatcaaatgatggagcgatgatgatgatgagcaaatcaaatgtatttgcatcgccttctcacttctgaaatggcgttaagtcagggattttactagagtgaatccacacgtct

SEQ ID NO: 363441 - DNA, 120 bp, Artificial Sequence
  ENSG00000140836_174 (sequence is synthesized)
gcatttctaccagaatgaaagctgcagcttgtgcatatagagactgggaaaagcagagggtttcctgccaatttagaggaggaaaacatcagattgttacaaagtttatgagtaatttaa

SEQ ID NO: 363442 - DNA, 120 bp, Artificial Sequence
  ENSG00000140836_175 (sequence is synthesized)
agtcagtcactactgctgcaacgtgtagagtctgagcacccacaaatagtgaggagaaaatagacggaagatagaacctaaagactaaaaaagagtaattagaaatgctaataactcagt

SEQ ID NO: 363443 - DNA, 120 bp, Artificial Sequence
  ENSG00000140836_176 (sequence is synthesized)
ggtatgtatgttcattgggcaattttcatggccaaactctctattttgttcgttttaaaggttgttgtttttttaaaaatacctttgaatacttattaaatctggatctggatgctatta

SEQ ID NO: 363444 - DNA, 120 bp, Artificial Sequence
  ENSG00000140836_177 (sequence is synthesized)
agcaagagctctgcttatggaccaaggctgacaaacatacagtatccttttgaagatacagcctgaatctattggcgggtaattgccatggatttagtcattagttaatatcgcatcaca

SEQ ID NO: 363445 - DNA, 120 bp, Artificial Sequence
  ENSG00000140836_178 (sequence is synthesized)
ttttttcctcccttcctcccctctgcctccctccacctcccccttttcttttttgctgaatcttattgatccagaaggtggctaattagcccttcccgtcgtgcctggctcccacttcca

SEQ ID NO: 363446 - DNA, 120 bp, Artificial Sequence
  ENSG00000140839_0 (sequence is synthesized)
ctcttttgtccaccagcccagcctgactcctggagattgtgaatagctccatccagcctgagaaacaagccgggtggctgagccaggctgtgcacggagcgcctgacgggcccaacagac

SEQ ID NO: 363447 - DNA, 120 bp, Artificial Sequence
  ENSG00000140839_1 (sequence is synthesized)
ccatgctgcatccagagacctcccctggccgggggcatctcctggctgtgctcctggccctccttggcaccacctgggcagaggtgtggccaccccagctgcaggagcaggctccgatgg

SEQ ID NO: 363448 - DNA, 120 bp, Artificial Sequence
  ENSG00000140839_2 (sequence is synthesized)
ccggagccctgaacaggaaggagagtttcttgctcctctccctgcacaaccgcctgcgcagctgggtccagccccctgcggctgacatgcggaggctggactggagtgacagcctggccc

SEQ ID NO: 363449 - DNA, 120 bp, Artificial Sequence
  ENSG00000140839_3 (sequence is synthesized)
aactggctcaagccagggcagccctctgtggaatcccaaccccgagcctggcgtccggcctgtggcgcaccctgcaagtgggctggaacatgcagctgctgcccgcgggcttggcgtcct

SEQ ID NO: 363450 - DNA, 120 bp, Artificial Sequence
  ENSG00000140839_4 (sequence is synthesized)
ttgttgaagtggtcagcctgtggtttgcagaggggcagcggtacagccacgcggcaggagagtgtgctcgcaacgccacctgcacccactacacgcagctcgtgtgggccacctcaagcc

SEQ ID NO: 363451 - DNA, 120 bp, Artificial Sequence
  ENSG00000140839_5 (sequence is synthesized)
agctgggctgtgggcggcacctgtgctctgcaggccagacagcgatagaagcctttgtctgtgcctactcccccggaggcaactgggaggtcaacgggaagacaatcatcccctataaga

SEQ ID NO: 363452 - DNA, 120 bp, Artificial Sequence
  ENSG00000140839_6 (sequence is synthesized)
agggtgcctggtgttcgctctgcacagccagtgtctcaggctgcttcaaagcctgggaccatgcaggggggctctgtgaggtccccaggaatccttgtcgcatgagctgccagaaccatg

SEQ ID NO: 363453 - DNA, 120 bp, Artificial Sequence
  ENSG00000140839_7 (sequence is synthesized)
gtgaggtgcagcctgcagtgtgtgcacggccggttccgggaggaggagtgctcgtgcgtctgtgacatcggctacgggggagcccagtgtgccaccaaggtgcattttcccttccacacc

SEQ ID NO: 363454 - DNA, 120 bp, Artificial Sequence
  ENSG00000140839_8 (sequence is synthesized)
tgtgacctgaggatcgacggagactgcttcatggtgtcttcagaggcagacacctattacagagccaggatgaaatgtcagaggaaaggcggggtgctggcccagatcaagagccagaaa

SEQ ID NO: 363455 - DNA, 120 bp, Artificial Sequence
  ENSG00000140839_9 (sequence is synthesized)
gtgcaggacatcctcgccttctatctgggccgcctggagaccaccaacgaggtgattgacagtgacttcgagaccaggaacttctggatcgggctcacctacaagaccgccaaggactcc

SEQ ID NO: 363456 - DNA, 120 bp, Artificial Sequence
  ENSG00000140839_10 (sequence is synthesized)
ttccgctgggccacaggggagcaccaggccttcaccagttttgcctttgggcagcctgacaaccacgggctggtgtggctgagtgctgccatggggtttggcaactgcgtggagctgcag

SEQ ID NO: 363457 - DNA, 120 bp, Artificial Sequence
  ENSG00000140839_11 (sequence is synthesized)
gcttcagctgccttcaactggaacgaccagcgctgcaaaacccgaaaccgttacatctgccagtttgcccaggagcacatctcccggtggggcccagggtcctgaggcctgaccacatgg

SEQ ID NO: 363458 - DNA, 120 bp, Artificial Sequence
  ENSG00000140839_12 (sequence is synthesized)
ctccctcgcctgccctgggagcaccggctctgcttacctgtctgcccacctgtctggaacaagggccaggttaagaccacatgcctcatgtccaaagaggtctcagaccttgcacaatgc

SEQ ID NO: 363459 - DNA, 120 bp, Artificial Sequence
  ENSG00000140839_13 (sequence is synthesized)
cagaagttgggcagagagaggcagggaggccagtgagggccagggagtgagtgttagaagaagctggggcccttcgcctgcttttgattgggaagatgggcttcaattagatggcgaagg

SEQ ID NO: 363460 - DNA, 120 bp, Artificial Sequence
  ENSG00000140839_14 (sequence is synthesized)
agaggacaccgccagtggtccaaaaaggctgctctcttccacctggcccagaccctgtggggcagcggagcttccctgtggcatgaaccccacggggtattaaattatgaatcagctgaa

SEQ ID NO: 363461 - DNA, 120 bp, Artificial Sequence
  ENSG00000140839_15 (sequence is synthesized)
atagccgaggtcctcctcccagggcccggggctggggagcggaagccatcagtgggctcggaggacactgtcccagccaggacacggccatcggtcactaatctgcagcaccggaatgtc

SEQ ID NO: 363462 - DNA, 120 bp, Artificial Sequence
  ENSG00000140839_16 (sequence is synthesized)
ctgtgcatgctcatttcaaagggaaattcagatgatccaggatgaccctggagagaccagagggggcctgaggcttcactgcagcggcctccacccacctattccctttcctggtcacct

SEQ ID NO: 363463 - DNA, 120 bp, Artificial Sequence
  ENSG00000140839_17 (sequence is synthesized)
tcatggtccaggacactctctggaagttctgggtctccccaagaagaggaagaccagactctgcctcagtgaggggcagttctcatggctggggcccaggcaggcagggtattaatagaa

SEQ ID NO: 363464 - DNA, 120 bp, Artificial Sequence
  ENSG00000140839_18 (sequence is synthesized)
gttgctctgaatgtctgggagacgacgcgtgtgtgttgcccccaccggcggagtgtcatcgcaccagggccaatggtagtcagagcctgtgcagtcccgctccctcacccagctcctcag

SEQ ID NO: 363465 - DNA, 120 bp, Artificial Sequence
  ENSG00000140839_19 (sequence is synthesized)
gaggtggttccttcaacgtctctgacctcaccctattcatcagcataaagcaggggtcgtggactccaaggctcatagaagccaggaggtcacttattgacctgaggggccaaggtcaag

SEQ ID NO: 363466 - DNA, 120 bp, Artificial Sequence
  ENSG00000140839_20 (sequence is synthesized)
accaacctccatctaagggagttccagccactggttgccttgcaggaatgcaaggtcagggtggccagagctcggggttgttcaagaaaaccagcaacccagacttccactggcaactct

SEQ ID NO: 363467 - DNA, 120 bp, Artificial Sequence
  ENSG00000140839_21 (sequence is synthesized)
actgtccccctggctacacgggcagatactgccaaggtcacctcccaaactccaatatgcctcactctgcaatggggaccaaaccaaagacaccaggcgtgccagcaatcggaagccttg

SEQ ID NO: 363468 - DNA, 120 bp, Artificial Sequence
  ENSG00000140839_22 (sequence is synthesized)
tgaggtgcagcctgcagtgtgtgcacggccggttccgggaggaggagtgctcgtgcgtctgtgacatcggctacgggggagcccagtgtgccagtgagtcctgccccagggcccccaaag

SEQ ID NO: 363469 - DNA, 120 bp, Artificial Sequence
  ENSG00000140839_23 (sequence is synthesized)
agccagctcctctcaagaccccccttcaatggggcatcagctcccaggagcccgctgtgtgcctctctttccaactcattcagtgacaacacgttgagatcttgaaactggccacagcat

SEQ ID NO: 363470 - DNA, 120 bp, Artificial Sequence
  ENSG00000140839_24 (sequence is synthesized)
ggatatttacaccaaagaaattggcaaatgctataaaccatggattttttttttcttttgagagagagcaagctcaatattccaactgaccagctcactcctgaccctcaccacccactc

SEQ ID NO: 363471 - DNA, 80 bp, Artificial Sequence
  ENSG00000140848_0 (sequence is synthesized)
cgggaggaggaccggaccccgagcggctgggagcgcacgcgagcgggccgtggccgcgcgggcagcgccctgagcctgtc

SEQ ID NO: 363472 - DNA, 120 bp, Artificial Sequence
  ENSG00000140848_1 (sequence is synthesized)
gatgcccgggcggctcggagcgcgggcagcggcagccgtgcggtgagggcggtggcgcccgcgggacctgcgactgccaggaactcctgccaccgccaccggctcccatggcccacatac

SEQ ID NO: 363473 - DNA, 120 bp, Artificial Sequence
  ENSG00000140848_2 (sequence is synthesized)
cccatggcccacatacccagtgggggtgccccagcagcgggggcagcccccatgggcccccagtattgcgtgtgcaaggtggagctgtcagtgagtggccagaacctactggaccgggat

SEQ ID NO: 363474 - DNA, 120 bp, Artificial Sequence
  ENSG00000140848_3 (sequence is synthesized)
gttacctccaagtccgaccccttctgtgtcctctttacagagaacaatggcagatggatcgagtacgacaggacagaaaccgcgatcaacaacctcaaccccgccttctccaagaagttc

SEQ ID NO: 363475 - DNA, 120 bp, Artificial Sequence
  ENSG00000140848_4 (sequence is synthesized)
gtgcttgactaccacttcgaggaggtacagaagctcaagttcgcgctctttgaccaggacaagtccagtatgcggctggacgagcatgacttcctgggccagttctcctgcagcctgggc

SEQ ID NO: 363476 - DNA, 120 bp, Artificial Sequence
  ENSG00000140848_5 (sequence is synthesized)
acgatcgtctccagcaagaagatcactaggcctctgctgctgctgaatgacaagcctgcggggaagggcttgattacgatcgctgcccaggagctgtccgacaaccgcgtcatcacacta

SEQ ID NO: 363477 - DNA, 120 bp, Artificial Sequence
  ENSG00000140848_6 (sequence is synthesized)
agcctggcgggcaggaggctggacaagaaggacctctttgggaagtcagacccctttctggagttttataagccaggagacgatggcaagtggatgctggtccacaggactgaggtgatc

SEQ ID NO: 363478 - DNA, 120 bp, Artificial Sequence
  ENSG00000140848_7 (sequence is synthesized)
aagtacacactggaccctgtgtggaagccattcacagtgcccttggtgtccctgtgtgatggggacatggagaagcccatccaggtcatgtgctacgactatgacaatgacgggggccat

SEQ ID NO: 363479 - DNA, 120 bp, Artificial Sequence
  ENSG00000140848_8 (sequence is synthesized)
gacttcatcggcgagttccagacctcagtgtcacagatgtgtgaggctcgagacagcgtcccgctggagttcgagtgcatcaaccccaagaagcagaggaagaagaagaactataaaaac

SEQ ID NO: 363480 - DNA, 120 bp, Artificial Sequence
  ENSG00000140848_9 (sequence is synthesized)
tcgggcatcatcatcctgcgatcctgcaagataaaccgagactactccttccttgactacatcctgggaggctgccagctcatgttcaccgttggaatagactttacagcctccaacggg

SEQ ID NO: 363481 - DNA, 120 bp, Artificial Sequence
  ENSG00000140848_10 (sequence is synthesized)
cagatcattcaggactacgacagtgataagatgtttccagctctgggattcggggcccagttacccccagactggaaggtctcccatgagtttgccatcaacttcaaccccaccaacccc

SEQ ID NO: 363482 - DNA, 120 bp, Artificial Sequence
  ENSG00000140848_11 (sequence is synthesized)
ttctgctcaggtgtggatggtattgcccaggcgtactcagcttgcctgccccacatccgcttctacggtcctaccaatttctcccccatcgtcaaccacgtggcccggtttgcggcccag

SEQ ID NO: 363483 - DNA, 120 bp, Artificial Sequence
  ENSG00000140848_12 (sequence is synthesized)
gccacacaacagcggacggccacgcagtacttcatcctcctcatcatcacggacggggtcatcagtgacatggaggagacacggcatgccgtggtgcaggcttccaagctgcccatgtcc

SEQ ID NO: 363484 - DNA, 120 bp, Artificial Sequence
  ENSG00000140848_13 (sequence is synthesized)
atcatcatcgtgggcgtgggcaatgcggacttcgctgccatggagttcctggatggggacagccgcatgctgcgctcccacacgggggaggaggcagcccgcgatattgtgcagttcgtt

SEQ ID NO: 363485 - DNA, 120 bp, Artificial Sequence
  ENSG00000140848_14 (sequence is synthesized)
ccctttcgagagttccgcaacgcagcaaaagagaccttggccaaagctgtgctggcggagctgccccaacaagttgtgcagtatttcaagcataaaaacctgccccccaccaactcggag

SEQ ID NO: 363486 - DNA, 120 bp, Artificial Sequence
  ENSG00000140848_15 (sequence is synthesized)
cccgcctgagctccagtgcccagcagcagcatgtcagctgagcctcctgccctcccccaggaacatgcacgctcactctgcttccttgtgggtggcctttttttaccgatcccctttttt

SEQ ID NO: 363487 - DNA, 120 bp, Artificial Sequence
  ENSG00000140848_16 (sequence is synthesized)
attttttacaaccggacctccacccccaacttcctccagcccagctgggcttcctttgttggagtcaactgttgatgcttccaggccaaactggcttcctctcctcctctccccaccttt

SEQ ID NO: 363488 - DNA, 120 bp, Artificial Sequence
  ENSG00000140848_17 (sequence is synthesized)
gccattcttaagtattgaatgtactttgtataattttagtggaattgttattgagaataaaatttttacaatcataactggctttttccaagtaactagctgcagactctgatgaaagaa

SEQ ID NO: 363489 - DNA, 120 bp, Artificial Sequence
  ENSG00000140848_18 (sequence is synthesized)
acatgtccttggtgcatacgtgtcgtagcctgcacctaattaattcctgctgtttttttaatactgtgactgtgttctatttgttatatgctcagggtaacaaatgagtttcagacgtcc

SEQ ID NO: 363490 - DNA, 120 bp, Artificial Sequence
  ENSG00000140848_19 (sequence is synthesized)
ctgcgtcagctccttcctcagcagggacctgacgggctcactgatctaagaaaggaaatggaaaatgaaaatccaccccacaagtctaataagttggtgtagtcacttctgcatggggac

SEQ ID NO: 363491 - DNA, 120 bp, Artificial Sequence
  ENSG00000140848_20 (sequence is synthesized)
atgcattccagatgataacctgttaaatcactgccagttaacagtgataacctgttaaactggcacagaacctggcacattgtacaaactcaataaatattcatggatgaatagaatgaa

SEQ ID NO: 363492 - DNA, 120 bp, Artificial Sequence
  ENSG00000140848_21 (sequence is synthesized)
tttcttcaaacctttgcctatgttatttgacaacccgcctcaatttgccttccatctctccactcacctcttaaaggccaggtggtaatgcctccctatggtggggcagcatagcaggtg

SEQ ID NO: 363493 - DNA, 120 bp, Artificial Sequence
  ENSG00000140848_22 (sequence is synthesized)
ttttgacctccttgtccctactgaggttgcaggacatagagcaacaactcccccatggggagtgtgaccaagtcaaggggacccactgactcatccgctttcttccagataaaccgagac

SEQ ID NO: 363494 - DNA, 120 bp, Artificial Sequence
  ENSG00000140848_23 (sequence is synthesized)
tactccttccttgactacatcctgggaggctgccagctcatgttcaccgtaaggctctccccgctggctccctctgcacccccatcccagtgagggtcctccctgaagacttgggccact

SEQ ID NO: 363495 - DNA, 120 bp, Artificial Sequence
  ENSG00000140848_24 (sequence is synthesized)
agtgcagccagagggacttagggtagacttcaggaaggacttccctggggcaaagagtgtgtgcggcctagtgaggagggcataagtgggctgtctggtcctgctgggtgtgcctgagtt

SEQ ID NO: 363496 - DNA, 120 bp, Artificial Sequence
  ENSG00000140848_25 (sequence is synthesized)
ggggcttaactacaggtcagagcacagctgcacagctttcagtctggtggctacactccttctgcgggtggaggaaaacaaattcctcctcactggccacaaggccttcagcgatccctg

SEQ ID NO: 363497 - DNA, 120 bp, Artificial Sequence
  ENSG00000140848_26 (sequence is synthesized)
cctccttcatctgcagcctccttcctccttgctcactgggctctaaccacactcttcctctgtttgcccaacatgccaagctttgcttcatgttagaactttgcatttgctgttccttct

SEQ ID NO: 363498 - DNA, 120 bp, Artificial Sequence
  ENSG00000140848_27 (sequence is synthesized)
gcatttgttgttccctctgcctgaaacacttccccagaacctttgcatggctgcctacctgccatttttcaggcctgaggaggtaacggaggtcaccttccagggagccctccctccctc

SEQ ID NO: 363499 - DNA, 79 bp, Artificial Sequence
  ENSG00000140848_28 (sequence is synthesized)
cgtctcattctgtcacgtggtctagagtgcagtggcacgatctcagatcactgcagcctccaccttcagctctcagttg

SEQ ID NO: 363500 - DNA, 78 bp, Artificial Sequence
  ENSG00000140848_29 (sequence is synthesized)
gcgtctcattctgtcacgtggtctagagtgcagtggcacgatctcagatcactgcagcctccaccttcagctctcagt

SEQ ID NO: 363501 - DNA, 120 bp, Artificial Sequence
  ENSG00000140848_30 (sequence is synthesized)
ctattttcctattttctgggcacttgccgccccgagattcatatgcatttgtcgcttctccctgatcgtcgcacccactggaatgtgagtgcttttaagtgtgggcactttgtttatttt

SEQ ID NO: 363502 - DNA, 120 bp, Artificial Sequence
  ENSG00000140848_31 (sequence is synthesized)
gcttccactccaaccccagcatatcacacagtaactggcacatagcaggtgctccatcatttctcgttggaagaatgaactgccaccttgcctgtggcctggagtctttgccccacagac

SEQ ID NO: 363503 - DNA, 120 bp, Artificial Sequence
  ENSG00000140848_32 (sequence is synthesized)
tctgtgccactcatcctggctttgcttcctcaccccaagggagcctcaggcccagaagggaggaagctgctggggtgccacgctctgcccacctccccatgttgtctcaccgttccccat

SEQ ID NO: 363504 - DNA, 120 bp, Artificial Sequence
  ENSG00000140848_33 (sequence is synthesized)
caccacccctagatcctaatgggaaatggagggcatcacaggatgccatggagtcagaggattggccttgctgacttctgaccctgctgcccaccactgccccctcccctgcacagaggc

SEQ ID NO: 363505 - DNA, 120 bp, Artificial Sequence
  ENSG00000140848_34 (sequence is synthesized)
caggccctcctgttcctcctgcacgagtttgttcattcagcgaactcacactgactgcctcctttgtgccgggctctaggctgtgtccctgcagcggtccctcaaggactaagacatgct

SEQ ID NO: 363506 - DNA, 120 bp, Artificial Sequence
  ENSG00000140848_35 (sequence is synthesized)
ccatgtagccaaatcttccccggggtcctacttctaaccctcccctgctgggcaggggttgttcttgcctacccctctgtgccctttctccagggattgggctgggattctctggggctg

SEQ ID NO: 363507 - DNA, 120 bp, Artificial Sequence
  ENSG00000140848_36 (sequence is synthesized)
agagagcaggtagagccctagtccctgcctgcccatcagccccgagtccctgttaataagcacctgccttgtctgctgttcccagccctgggccaggcttctccagagtacgtgctgcgg

SEQ ID NO: 363508 - DNA, 120 bp, Artificial Sequence
  ENSG00000140848_37 (sequence is synthesized)
tgagctcccagctgatcggggagacgggcactgctctaccaggcaaccccaggtcccaggccccttggtggtctgagggataatggggagatggcttgggttgggggtgaggttatctgg

SEQ ID NO: 363509 - DNA, 120 bp, Artificial Sequence
  ENSG00000140848_38 (sequence is synthesized)
gaaggttgcagtggagcagtggcatctgagttgggcctggaagatggagcaaagttagacgggaagaaacgatagcctggctctgcatgcagagcgaagcttatgaataaatgcctgcat

SEQ ID NO: 363510 - DNA, 120 bp, Artificial Sequence
  ENSG00000140848_39 (sequence is synthesized)
atgggaacagatgaatgtgtggatagggatagtaaggagaaaaaggaatctgggactgtacgttagtctcttatgtcatcacatctaggcagtggactttatgcttgggcaatagagagc

SEQ ID NO: 363511 - DNA, 120 bp, Artificial Sequence
  ENSG00000140848_40 (sequence is synthesized)
cacagatggcattagagcagaggagtgatacaatcagagcatttctaggtttcagaccatcttattgtggggagggctgggagatgagtgggcttcccatgtcccatctacctctcctat

SEQ ID NO: 363512 - DNA, 120 bp, Artificial Sequence
  ENSG00000140848_41 (sequence is synthesized)
tccctgggagtgggatagggtgctggggtctctggccccactgggtggcctttttctccactctgcaggttggaatagactttacagcctccaacgggaatcccctcgacccttcctctt

SEQ ID NO: 363513 - DNA, 120 bp, Artificial Sequence
  ENSG00000140848_42 (sequence is synthesized)
tgggcctgtcgggaatgcagctgactgggccactgccacgtcaggcacattatctgcaacaactcccactttgcagatgaagaaactgaggcactacgagtcaagtcagttgcctagagt

SEQ ID NO: 363514 - DNA, 120 bp, Artificial Sequence
  ENSG00000140848_43 (sequence is synthesized)
cccacagtatagcaactggcaaggccaggcccagagtccagggctctcagaggccccaagggggagtctaagataacacacagggcaggaggggagagcagtttgtacttcctgctgtga

SEQ ID NO: 363515 - DNA, 120 bp, Artificial Sequence
  ENSG00000140848_44 (sequence is synthesized)
ccaggtcagagtttagagcatgagaggcctgcaggggtggggtgctgagagcaggacgcatagtgagttgtctgggacttggctgcagctgggtaagatgcactgccttcctccaggact

SEQ ID NO: 363516 - DNA, 120 bp, Artificial Sequence
  ENSG00000140848_45 (sequence is synthesized)
tttgaaaaagggttttcccaaaataaaaagtgaaaaccgcaagtagtcaaatcctttccctttacagaggtggaaacggaggcccagatggggaaagggccttgtcctccatctcttacc

SEQ ID NO: 363517 - DNA, 120 bp, Artificial Sequence
  ENSG00000140848_46 (sequence is synthesized)
caggcaggggcagggcctgagctcttaccctggcacctgggtagggagccagggccaaagaattaagagtgtgggtagcagagtcagacctcggtttcaaatctcggccctgctccacaa

SEQ ID NO: 363518 - DNA, 120 bp, Artificial Sequence
  ENSG00000140848_47 (sequence is synthesized)
gctgtccagccctggggaagtcacttaacctctctgtgcttcagtgtccttgtctgtgagctggggatagtgagtcactgacgatgaccacaagagcctggcacagagtaggcattgtac

SEQ ID NO: 363519 - DNA, 120 bp, Artificial Sequence
  ENSG00000140848_48 (sequence is synthesized)
agtcttggggttgtctggcccaatcctagacttctccactccattgactatgctcttctgagggcctgccatgtgccaggcgccgtgccaggccttgccccggtggtggccattgtgata

SEQ ID NO: 363520 - DNA, 120 bp, Artificial Sequence
  ENSG00000140848_49 (sequence is synthesized)
gtgtgagcacttgcttccacaaactgatggaacatggagccgtgggcatctagcctgaggctctggggcagggcttcctggaggacctgccctctagtggggtctgatgagaggctgggg

SEQ ID NO: 363521 - DNA, 120 bp, Artificial Sequence
  ENSG00000140848_50 (sequence is synthesized)
ctatccatgtggtgtaaagtgcaggaggagagaggggttttcctgatcatcacgccccagcaagccccctcattttgtagacggaaaacaaggcctcccagtcatcttaggttgacctcc

SEQ ID NO: 363522 - DNA, 120 bp, Artificial Sequence
  ENSG00000140848_51 (sequence is synthesized)
ccctctgcctgggagaatggtgtccccagccttgttcctggaagtggctctggctttatttgcaggtgatcccagatctgcccacaaggaggccggggttggcctcctgatcactgccct

SEQ ID NO: 363523 - DNA, 120 bp, Artificial Sequence
  ENSG00000140848_52 (sequence is synthesized)
agcagcagggtccatgaggagtcccataggggagcagtctctccactgtaccgctgtactgtaatgccacccccatactgctggctgggggcttaacccagcctcagcaagaactgccca

SEQ ID NO: 363524 - DNA, 120 bp, Artificial Sequence
  ENSG00000140848_53 (sequence is synthesized)
tgctggtttgcacccagtggccctcacctctcttcccagcatcctctggggttgcctgcgatggttctactccttcctctggagcattcgcttcctaaggacaaaccctgggcatcggtc

SEQ ID NO: 363525 - DNA, 120 bp, Artificial Sequence
  ENSG00000140848_54 (sequence is synthesized)
accccttcatgcacaggtcggtgaccgagtacctccatgtgcctggcctgtggctggctgttcactagtgaaccatactgtcaggcccatttattcccgccaagaaggtgctcaggagat

SEQ ID NO: 363526 - DNA, 120 bp, Artificial Sequence
  ENSG00000140848_55 (sequence is synthesized)
gtttgccggacacataggtgcttcccgcagacggagtcatcctaacccgttactcccaagcatctcaagtgctccaggtaacacttacacctaacctaaaggaaggcactgcgatcaggg

SEQ ID NO: 363527 - DNA, 120 bp, Artificial Sequence
  ENSG00000140848_56 (sequence is synthesized)
ggaatttcaggcctggcctgggctgagatgagggatgccacttgcagacagccctggcccgcagccctaattttgtcctcaatggacacctgctgtagcagccctctgggcatagtgccg

SEQ ID NO: 363528 - DNA, 120 bp, Artificial Sequence
  ENSG00000140848_57 (sequence is synthesized)
tagcagagtgactagaggtggcagtggggcagggggagccttcagggcagagaacagactgtgcgaagcctgcaggacgagctggaggaactggcagaggtctcccatgagtttgccatc

SEQ ID NO: 363529 - DNA, 120 bp, Artificial Sequence
  ENSG00000140848_58 (sequence is synthesized)
cagggtccagtacgcctggctgctgctgggctggcgcagagggacccactcttccccccgcctgccccaactccagacatcatgtgctccccgtttcggggatccagaagcttccagcca

SEQ ID NO: 363530 - DNA, 120 bp, Artificial Sequence
  ENSG00000140853_0 (sequence is synthesized)
gcagcagccgccagttccatgcactggcggagcagctctaggcggcggcttctactttcagtttcgtgcagagcgcggaggagccgcgagcgctgagggagtctgcactatggaaacaac

SEQ ID NO: 363531 - DNA, 120 bp, Artificial Sequence
  ENSG00000140853_1 (sequence is synthesized)
ctgtcaatccagctcaaggcacacatagcccagacacccatgagaccctctccgtggggaccctagagcacctatcatgaacgaggagaccaaggctggctcctcatggaccccgttggc

SEQ ID NO: 363532 - DNA, 120 bp, Artificial Sequence
  ENSG00000140853_2 (sequence is synthesized)
ctccagctcggcaacaagaacctgtggagctgtcttgtgaggctgctcaccaaagacccagaatggctgaacgccaagatgaagttcttcctccccaacacggacctggattccaggaac

SEQ ID NO: 363533 - DNA, 120 bp, Artificial Sequence
  ENSG00000140853_3 (sequence is synthesized)
gagaccttggaccctgaacagagagtcatcctgcaactcaacaagctgcatgtccagggttcggacacctggcagtctttcattcattgtgtgtgcatgcagctggaggtgcctctggac

SEQ ID NO: 363534 - DNA, 120 bp, Artificial Sequence
  ENSG00000140853_4 (sequence is synthesized)
ctggaggtgctgctgctgagtacttttggctatgatgatgggttcaccagccagctgggagctgaggggaaaagccaacctgaatctcagctccaccatggcctgaagcgcccacatcag

SEQ ID NO: 363535 - DNA, 120 bp, Artificial Sequence
  ENSG00000140853_5 (sequence is synthesized)
agctgtgggtcctcaccccgccggaagcagtgcaagaagcagcagctagagttggccaagaagtacctgcagctcctgcggacctctgcccagcagcgctacaggagccaaatccctggg

SEQ ID NO: 363536 - DNA, 120 bp, Artificial Sequence
  ENSG00000140853_6 (sequence is synthesized)
tcagggcagccccacgccttccaccaggtctatgtccctccaatcctgcgccgggccacagcatccttagacactccggagggggccattatgggggacgtcaaggtggaagatggtgct

SEQ ID NO: 363537 - DNA, 120 bp, Artificial Sequence
  ENSG00000140853_7 (sequence is synthesized)
gacgtgagcatctcggacctcttcaacaccagggttaacaagggcccgagggtgaccgtgcttttggggaaggctggcatgggcaagaccacgctggcccaccggctctgccagaagtgg

SEQ ID NO: 363538 - DNA, 120 bp, Artificial Sequence
  ENSG00000140853_8 (sequence is synthesized)
gcagagggccatctgaactgtttccaggccctgttcctttttgaattccgccagctcaacttgatcacgaggttcctgacaccgtccgagctcctttttgatctgtacctgagccctgaa

SEQ ID NO: 363539 - DNA, 120 bp, Artificial Sequence
  ENSG00000140853_9 (sequence is synthesized)
tcggaccacgacactgtcttccagtacctggagaagaacgctgaccaagtcctgctgatctttgatgggctagatgaggccctccagcctatgggtcctgatggcccaggcccagtcctc

SEQ ID NO: 363540 - DNA, 120 bp, Artificial Sequence
  ENSG00000140853_10 (sequence is synthesized)
acccttttctcccatctctgcaatgggaccctcctgcctggctgccgggtgatggctacctcccgtccagggaagctgcctgcctgcctgcctgcagaggcagccatggtccacatgttg

SEQ ID NO: 363541 - DNA, 120 bp, Artificial Sequence
  ENSG00000140853_11 (sequence is synthesized)
ggctttgatgggccacgggtggaagaatatgtgaatcacttcttcagcgcccagccatcgcgggagggggccctggtggagttacagacaaatggacgtctccgaagcctgtgtgcggtg

SEQ ID NO: 363542 - DNA, 120 bp, Artificial Sequence
  ENSG00000140853_12 (sequence is synthesized)
cccgcactgtgccaagtcgcctgtctctgcctccaccatctgcttcctgaccacgccccaggccagtctgtggccctcctgcccaacatgactcagctctatatgcagatggtgctcgcc

SEQ ID NO: 363543 - DNA, 120 bp, Artificial Sequence
  ENSG00000140853_13 (sequence is synthesized)
ctcagcccccctgggcacttgcccacctcgtccctactggacctgggggaggtggccctgaggggcctggagacagggaaggttatcttctatgcaaaagatattgctccacccttgata

SEQ ID NO: 363544 - DNA, 120 bp, Artificial Sequence
  ENSG00000140853_14 (sequence is synthesized)
gcttttggggccactcacagcctgctgacttccttctgcgtctgcacaggccctgggcaccagcagacaggctatgctttcacccacctcagcctgcaggagtttcttgctgccctgcac

SEQ ID NO: 363545 - DNA, 120 bp, Artificial Sequence
  ENSG00000140853_15 (sequence is synthesized)
ctgatggccagccccaaggtgaacaaagacacacttacccagtatgttaccctccattcccgctgggtacagcggaccaaagctagactgggcctctcagaccacctccccaccttcctg

SEQ ID NO: 363546 - DNA, 120 bp, Artificial Sequence
  ENSG00000140853_16 (sequence is synthesized)
gcgggcctggcatcctgcacctgccgccccttccttagccacctggcgcagggcaatgaggactgtgtgggtgccaagcaggctgctgtagtgcaggtgttgaagaagttggccacccgc

SEQ ID NO: 363547 - DNA, 120 bp, Artificial Sequence
  ENSG00000140853_17 (sequence is synthesized)
aagctcacagggccaaaggttgtagagctgtgtcactgtgtggatgagacacaggagcctgagctggccagtctcaccgcacaaagcctcccctatcaactgcccttccacaatttccca

SEQ ID NO: 363548 - DNA, 120 bp, Artificial Sequence
  ENSG00000140853_18 (sequence is synthesized)
ctgacctgcaccgacctggccaccctgaccaacatcctagagcacagggaggcccccatccacctggattttgatggctgtcccctggagccccactgccctgaggctctggtaggctgt

SEQ ID NO: 363549 - DNA, 120 bp, Artificial Sequence
  ENSG00000140853_19 (sequence is synthesized)
gggcagatagagaatctcagctttaagagcaggaagtgtggggatgcctttgcagaagccctctccaggagcttgccgacaatggggaggctgcagatgctggggttagcaggaagtaaa

SEQ ID NO: 363550 - DNA, 120 bp, Artificial Sequence
  ENSG00000140853_20 (sequence is synthesized)
atcactgcccgaggcatcagccacctggtgaaagctttgcctctctgtccacagctgaaagaagtcagttttcgggacaaccagctcagtgaccaggtggtgctgaacattgtggaggtt

SEQ ID NO: 363551 - DNA, 120 bp, Artificial Sequence
  ENSG00000140853_21 (sequence is synthesized)
ctccctcacctaccacggctccggaagcttgacctgagcagcaacagcatctgcgtgtcaaccctactctgcttggcaagggtggcagtcacgtgtcctaccgtcaggatgcttcaggcc

SEQ ID NO: 363552 - DNA, 120 bp, Artificial Sequence
  ENSG00000140853_22 (sequence is synthesized)
agggaggcggacctcatcttccttctttccccgcccacagagacaactgcagagctacaaagagctccagacctgcaggaaagtgacggccagaggaaaggggctcagagcagaagcttg

SEQ ID NO: 363553 - DNA, 120 bp, Artificial Sequence
  ENSG00000140853_23 (sequence is synthesized)
acgctcaggctgcagaagtgtcagctccaggtccacgatgcggaggccctcatagccctgctccaggaaggccctcacctggaggaagtggacctctcagggaaccagctggaagatgaa

SEQ ID NO: 363554 - DNA, 120 bp, Artificial Sequence
  ENSG00000140853_24 (sequence is synthesized)
ggctgtcggctgatggcagaggctgcatcccagctgcacatcgccaggaagctggacctcagtaacaacgggctttctgtggccggggtgcattgtgtgctgagggccgtgagtgcgtgc

SEQ ID NO: 363555 - DNA, 120 bp, Artificial Sequence
  ENSG00000140853_25 (sequence is synthesized)
tggaccctggcagagctgcacatcagcctgcagcacaaaactgtgatcttcatgtttgcccaggagccagaggagcagaaggggccccaggagagggctgcatttcttgacagcctcatg

SEQ ID NO: 363556 - DNA, 120 bp, Artificial Sequence
  ENSG00000140853_26 (sequence is synthesized)
ctccagatgccctctgagctgcctctgagctcccgaaggatgaggctgacacattgtggcctccaagaaaagcacctagagcagctctgcaaggctctgggaggaagctgccacctcggt

SEQ ID NO: 363557 - DNA, 120 bp, Artificial Sequence
  ENSG00000140853_27 (sequence is synthesized)
cacctccacctcgacttctcaggcaatgctctgggggatgaaggtgcagcccggctggctcagctgctcccagggctgggagctctgcagtccttgaacctcagtgagaacggtttgtcc

SEQ ID NO: 363558 - DNA, 120 bp, Artificial Sequence
  ENSG00000140853_28 (sequence is synthesized)
aagacaagcagggatatgtgggccactggatctttgccagacttcccagctgcagccaagttcttagggttccgtcagcgctgcatccccaggagcctctgcctcagtgagtgtcctctg

SEQ ID NO: 363559 - DNA, 120 bp, Artificial Sequence
  ENSG00000140853_29 (sequence is synthesized)
gagcccccaagcctcacccgcctctgtgccactctgaaggactgcccgggacccctggaactgcaattgtcctgtgagttcctgagtgaccagagcctggagactctactggactgctta

SEQ ID NO: 363560 - DNA, 120 bp, Artificial Sequence
  ENSG00000140853_30 (sequence is synthesized)
cctcaactccctcagctgagcctgctgcagctgagccagacgggactgtccccgaaaagccccttcctgctggccaacaccttaagcctgtgtccacgggttaaaaaggtggatctcagg

SEQ ID NO: 363561 - DNA, 120 bp, Artificial Sequence
  ENSG00000140853_31 (sequence is synthesized)
tccctgcaccatgcaactttgcacttcagatccaacgaggaggaggaaggcgtgtgctgtggcaggttcacaggctgcagcctcagccaggagcacgtagagtcactctgctggttgctg

SEQ ID NO: 363562 - DNA, 120 bp, Artificial Sequence
  ENSG00000140853_32 (sequence is synthesized)
agcaagtgtaaagacctcagccaggtggatctctcagcaaacctgctgggcgacagcggactcagatgccttctggaatgtctgccgcaggtgcccatctccggtttgcttgatctgagt

SEQ ID NO: 363563 - DNA, 120 bp, Artificial Sequence
  ENSG00000140853_33 (sequence is synthesized)
cacaacagcatttctcaggaaagtgccctgtacctgctggagacactgccctcctgcccacgtgtccgggaggcctcagtgaacctgggctctgagcagagcttccggattcacttctcc

SEQ ID NO: 363564 - DNA, 120 bp, Artificial Sequence
  ENSG00000140853_34 (sequence is synthesized)
agagaggaccaggctgggaagacactcaggctaagtgagtgcagcttccggccagagcacgtgtccaggctggccaccggcttgagcaagtccctgcagctgacggagctcacgctgacc

SEQ ID NO: 363565 - DNA, 120 bp, Artificial Sequence
  ENSG00000140853_35 (sequence is synthesized)
cagtgctgcctgggccagaagcagctggccatcctcctgagcttggtggggcgacccgcagggctgttcagcctcagggtgcaggagccgtgggcggacagagccagggttctctccctg

SEQ ID NO: 363566 - DNA, 120 bp, Artificial Sequence
  ENSG00000140853_36 (sequence is synthesized)
ttagaagtctgcgcccaggcctcaggcagtgtcactgaaatcagcatctccgagacccagcagcagctctgtgtccagctggaatttcctcgccaggaagagaatccagaagctgtggca

SEQ ID NO: 363567 - DNA, 120 bp, Artificial Sequence
  ENSG00000140853_37 (sequence is synthesized)
ctcaggttggctcactgtgaccttggagcccaccacagccttcttgtcgggcagctgatggagacatgtgccaggctgcagcagctcagcttgtctcaggttaacctctgtgaggacgat

SEQ ID NO: 363568 - DNA, 120 bp, Artificial Sequence
  ENSG00000140853_38 (sequence is synthesized)
gatgccagttccctgctgctgcagagcctcctgctgtccctctctgagctgaagacatttcggctgacctccagctgtgtgagcaccgagggcctcgcccacctggcatctggtctgggc

SEQ ID NO: 363569 - DNA, 120 bp, Artificial Sequence
  ENSG00000140853_39 (sequence is synthesized)
cactgccaccacttggaggagctggacttgtctaacaatcaatttgatgaggagggcaccaaggcgctgatgagggcccttgaggggaaatggatgctaaagaggctggacctcagtcac

SEQ ID NO: 363570 - DNA, 120 bp, Artificial Sequence
  ENSG00000140853_40 (sequence is synthesized)
cttctgctgaacagctccaccttggccttgcttactcacagactaagccagatgacctgcctgcagagcctcagactgaacaggaacagtatcggtgatgtcggttgctgccacctttct

SEQ ID NO: 363571 - DNA, 120 bp, Artificial Sequence
  ENSG00000140853_41 (sequence is synthesized)
gaggctctcagggctgccaccagcctagaggagctggacttgagccacaaccagattggagacgctggtgtccagcacttagctaccatcctgcctgggctgccagagctcaggaagata

SEQ ID NO: 363572 - DNA, 120 bp, Artificial Sequence
  ENSG00000140853_42 (sequence is synthesized)
gacctctcagggaatagcatcagctcagccgggggagtgcagttggcagagtctctcgttctttgcaggcgcctggaggagttgatgcttggctgcaatgccctgggggatcccacagcc

SEQ ID NO: 363573 - DNA, 120 bp, Artificial Sequence
  ENSG00000140853_43 (sequence is synthesized)
ctggggctggctcaggagctgccccagcacctgagggtcctacacctaccattcagccatctgggcccaggtggggccctgagcctggcccaggccctggatggatccccccatttggaa

SEQ ID NO: 363574 - DNA, 120 bp, Artificial Sequence
  ENSG00000140853_44 (sequence is synthesized)
gagatcagcttggcggaaaacaacctggctggaggggtcctgcgtttctgtatggagctcccgctgctcagacagatagacctggtttcctgtaagattgacaaccagactgccaagctc

SEQ ID NO: 363575 - DNA, 120 bp, Artificial Sequence
  ENSG00000140853_45 (sequence is synthesized)
ctcacctccagcttcacgagctgccctgccctggaagtaatcttgctgtcctggaatctcctcggggatgaggcagctgccgagctggcccaggtgctgccgcagatgggccggctgaag

SEQ ID NO: 363576 - DNA, 120 bp, Artificial Sequence
  ENSG00000140853_46 (sequence is synthesized)
agagtggacctggagaagaatcagatcacagctttgggggcctggctcctggctgaaggactggcccaggggtctagcatccaagtcatccgcctctggaataaccccattccctgcgac

SEQ ID NO: 363577 - DNA, 120 bp, Artificial Sequence
  ENSG00000140853_47 (sequence is synthesized)
atggcccagcacctgaagagccaggagcccaggctggactttgccttctttgacaaccagccccaggccccttggggtacttgatggccccctcaagacctttggaatccagccaagtga

SEQ ID NO: 363578 - DNA, 120 bp, Artificial Sequence
  ENSG00000140853_48 (sequence is synthesized)
tgcacccaaatgatccacctttcgcccactgggataattgactcaggaaagaagagcctcggcagggcgctctgcactccacccaggaggaaggatacgtgtgtcctgctgcagtcctca

SEQ ID NO: 363579 - DNA, 120 bp, Artificial Sequence
  ENSG00000140853_49 (sequence is synthesized)
gggagaacttttttgggaaccaggagctgggtctggacaaaggagtaccctgcattacgtgggatatgtgtgatcaattggggacatgcgacacacaatgagggtgtcatgacaatgcat

SEQ ID NO: 363580 - DNA, 120 bp, Artificial Sequence
  ENSG00000140853_50 (sequence is synthesized)
gacacgtacggttatatgtggcagtgtgaccccttgacatgtggcgttacatgaaagtcagtgtggcacgtgttctgtggcatgggtgctggcatcccaagtagcaggatacatgattgt

SEQ ID NO: 363581 - DNA, 120 bp, Artificial Sequence
  ENSG00000140853_51 (sequence is synthesized)
tggtctatatatgacacatgacaaatgtccatgtcacaggactcatggctggccagatgacctcaggctggcccaagatctaatttattaatttttaaagcaaatacatatttatagatt

SEQ ID NO: 363582 - DNA, 120 bp, Artificial Sequence
  ENSG00000140853_52 (sequence is synthesized)
gtgtgtatggagcagctaagtcaggaaaagtcttccgcccgagctgggaggggagagtgtccatgcactgaccagtccaggggctcaagggccagggctctggaacaagccagggactca

SEQ ID NO: 363583 - DNA, 120 bp, Artificial Sequence
  ENSG00000140853_53 (sequence is synthesized)
gccattaagtcccctcctgcctcaatcctcagcctacccatctataaacttgatgactcctcccttacttacatactagcttccaaggacaggtggaggtagggccagcctggcgggagt

SEQ ID NO: 363584 - DNA, 120 bp, Artificial Sequence
  ENSG00000140853_54 (sequence is synthesized)
ggagaagcccagtctgtcctatgtaagggacaaagccaggtctaatggtactgggtagggggcactgccaagacaataagctaggctactgggtccagctactactttggtgggattcag

SEQ ID NO: 363585 - DNA, 120 bp, Artificial Sequence
  ENSG00000140853_55 (sequence is synthesized)
gtgagtctccatgcacttcacatgttacccagtgttcttgttacttccaaggagaaccaagaatggctctgtcacactcgaagccaggcttgatcaataaacacaatggtattccacgtc

SEQ ID NO: 363586 - DNA, 120 bp, Artificial Sequence
  ENSG00000140853_56 (sequence is synthesized)
acgtgatttctcggcagcagccgccagttccatgcactggcggagcagctctaggcggcggcttctactttcagtttcgtgcagagcgcggaggagccgcgagcgctgagggtgagtgcc

SEQ ID NO: 363587 - DNA, 120 bp, Artificial Sequence
  ENSG00000140853_57 (sequence is synthesized)
acacaggtaggaagagtctaggctagggttcaagcccagacagtctggctcgcagcctcatcctcataaccactgctacctctcttgctgagatctgccaagtagaaaccccaccacacc

SEQ ID NO: 363588 - DNA, 120 bp, Artificial Sequence
  ENSG00000140853_58 (sequence is synthesized)
tgggtctgccttccaaaccacagtccctcagggctccccccacccccttcatccttctcccagagtagagtgggataaccttctcttttcgggatggagaaattcccatggcgtccagcc

SEQ ID NO: 363589 - DNA, 120 bp, Artificial Sequence
  ENSG00000140853_59 (sequence is synthesized)
cctggctgaagccaataagagtagtgcttggggatggacggaggctctgtcacgaccctaggaggggcgcccctccaggaaacctccaagtgaacatgaaggcagatgatggaacgccag

SEQ ID NO: 363590 - DNA, 120 bp, Artificial Sequence
  ENSG00000140853_60 (sequence is synthesized)
agagtcccctggcctttggtagaaacttggctgtctctcggcagcccccagccttaggcagcgcatgtctcccactgggagatgctgtgctggactggggaagccttcacctgcaccatc

SEQ ID NO: 363591 - DNA, 120 bp, Artificial Sequence
  ENSG00000140853_61 (sequence is synthesized)
cactcaactcagggcacctgggagccctgtccacctccaaccccacccctggagcctcaccagggcacccacttgaacctgcctgcatggctggagcgtagcacttctgaaagcccttcc

SEQ ID NO: 363592 - DNA, 120 bp, Artificial Sequence
  ENSG00000140853_62 (sequence is synthesized)
tcaaggcacccccactctccttggggttaccacctcactcgccccagaacatctgggtctgtaaccagagactggacctggaatcaggactcttggctcaaaagggatttaactccccgg

SEQ ID NO: 363593 - DNA, 120 bp, Artificial Sequence
  ENSG00000140853_63 (sequence is synthesized)
gcctcagcttcttcatctgcacagtggatggtcagcctttccttttattgtcattgtggtgattctattatagtaattaccttaaaataaagaaatccaagacaaaacctgcctcaccta

SEQ ID NO: 363594 - DNA, 120 bp, Artificial Sequence
  ENSG00000140853_64 (sequence is synthesized)
aacaacctcttctctcatcaaatccatgttgtcatgtgtccacaggactgtctactccttgcctatttgcatattcagtttctacctgtttgcagtcataaactagtttcatgcactgtg

SEQ ID NO: 363595 - DNA, 120 bp, Artificial Sequence
  ENSG00000140853_65 (sequence is synthesized)
tgtgttggtccctctttgtccgtctgtctaggtgccagatacatcccagtccctcctctcctgcaagcctcattctctgcctctgtgtctggggggtgggaaagcggctccttcccgcct

SEQ ID NO: 363596 - DNA, 120 bp, Artificial Sequence
  ENSG00000140853_66 (sequence is synthesized)
cacatctggtctgcatttgcacgggatggcgatggtcttctgactcttctaacctgcggcatcactgcccccatcccctcaccacagctttctgtttcatgtcagtgtctgttgacaaaa

SEQ ID NO: 363597 - DNA, 120 bp, Artificial Sequence
  ENSG00000140853_67 (sequence is synthesized)
tcagcaactgtgtgtactgcagactgtcctgctcctgactctggtggctttctcatgatgtcatggcacgtgttcctctaaccccgactttcctggaaactggacgttagatcaaaaggc

SEQ ID NO: 363598 - DNA, 120 bp, Artificial Sequence
  ENSG00000140853_68 (sequence is synthesized)
tccatgacattcagtttcatgtttgtgcccaaaaaacttacgtcaccgacagagctgtgcacttctcattgcagcctgtgacaaggcacctaagaactgactgttccccaaaataacctg

SEQ ID NO: 363599 - DNA, 120 bp, Artificial Sequence
  ENSG00000140853_69 (sequence is synthesized)
gtgtgactttatcctggaggcagtgggatgctgatagcaagttcagacaggcatgaggccagaccagagctgagttttcaagataactccagccagaggagtctgcactatggaaacaac

SEQ ID NO: 363600 - DNA, 120 bp, Artificial Sequence
  ENSG00000140853_70 (sequence is synthesized)
gtgcagagcgcggaggagccgcgagcgctgaggggctgttgcagatataactggtgaagatgaggtcatactggagtaggatgggccttgaatccaataggaccggtgtccttataagag

SEQ ID NO: 363601 - DNA, 120 bp, Artificial Sequence
  ENSG00000140853_71 (sequence is synthesized)
aggagatggacacatgaagacagagacatacggggatcagacaatcatggacggaggaggaagagagtgcggcgatgcatctaggagccacaggacacctagaatggccagcagccggtg

SEQ ID NO: 363602 - DNA, 120 bp, Artificial Sequence
  ENSG00000140853_72 (sequence is synthesized)
gacctccagaactgcgagagaagaaatctcagttgttttaatgtacgcagcttgtggcactttgtgacagcagatacagcagtactgtgacaacactaggaaacgaatacaccatcccag

SEQ ID NO: 363603 - DNA, 120 bp, Artificial Sequence
  ENSG00000140853_73 (sequence is synthesized)
catctctgctctgttttccatacagaattgaactaaggaccaggcaagctaatgcaagtccaaacactgtaaaaactttggaggcaatctaaggatgtgagccagatttgtttgccagat

SEQ ID NO: 363604 - DNA, 120 bp, Artificial Sequence
  ENSG00000140853_74 (sequence is synthesized)
acagatgaggacgctgaggtacgaagaggctgcgtaacctaccagggtcacacagctttggtgtggagtagggactcaaatccagggccctggtacggaggcatttgccctcaccaagat

SEQ ID NO: 363605 - DNA, 120 bp, Artificial Sequence
  ENSG00000140853_75 (sequence is synthesized)
tcaggcactgagagaagctgacgggcctagagaatggcaagacttgagatagcagaaggaaggagagagggtgagaaatggatccccgtgctgaggtctggtctggaaggagaagtctgc

SEQ ID NO: 363606 - DNA, 120 bp, Artificial Sequence
  ENSG00000140853_76 (sequence is synthesized)
ctccactctgcagtggctcttccgcttggacatcaggtgagcgtgcctctccgcccccagccctgcccctgtcccccatcccacaggtcatctgctcccacgtgggccccttgtccacca

SEQ ID NO: 363607 - DNA, 120 bp, Artificial Sequence
  ENSG00000140853_77 (sequence is synthesized)
gtttcatgccaacctgtcatcctcagcaccttgggcagtaccagatctgcagagcatgtgatgggcgtccactgaatgaatgaatgatcaaatgaatgaataagtatggcctcacggatg

SEQ ID NO: 363608 - DNA, 88 bp, Artificial Sequence
  ENSG00000140853_78 (sequence is synthesized)
gcgattctggactgaacaggaacagtatcggtgatgtcggttgctgccacctttctgaggctctcagggctgccaccagcctagagga

SEQ ID NO: 363609 - DNA, 120 bp, Artificial Sequence
  ENSG00000140853_79 (sequence is synthesized)
atgatgcatcttaaatacaggaggtacatgtatgtggcaaaaatggcaacatcttgtgaacaacgtcatgattcaaacttgacggggaggggagcagggaggaaggtaacctgcaccctg

SEQ ID NO: 363610 - DNA, 120 bp, Artificial Sequence
  ENSG00000140853_80 (sequence is synthesized)
acgtcttcaggggaggacacacaagcaccctatcaggtggcctctcttgaaaacccttgcccccacgactggcaccctgctttccccattcactgccttgtctccacccctcgacctcct

SEQ ID NO: 363611 - DNA, 120 bp, Artificial Sequence
  ENSG00000140853_81 (sequence is synthesized)
ggagtatgaggggccgggggaggaatgggacgggctaaagggggacctacatcccgggaacaccaagaggccactgggtcagtcccctgcctcccagaaagcccttccttgagttgcaca

SEQ ID NO: 363612 - DNA, 120 bp, Artificial Sequence
  ENSG00000140853_82 (sequence is synthesized)
ctctggcctgttccaagcccctgccaggcttagttccccctgggttctagccttcagccttcctgctgcacctgccaccagtcccctgttgtcttttgggttccctgagaaggtagtgtg

SEQ ID NO: 363613 - DNA, 120 bp, Artificial Sequence
  ENSG00000140853_83 (sequence is synthesized)
actgtccttccccacactggaggcctgtgctttgggatttaagaaaaaaagaaagaaagaaagaaagaaggtttcagaggatactgaactgaggacaaaaataaactgaaacgaagttct

SEQ ID NO: 363614 - DNA, 120 bp, Artificial Sequence
  ENSG00000140853_84 (sequence is synthesized)
ctgcccacgtgtccgggaggcctcagtgaagtgcctaggaagctggcatgtctgggcaccgtgcttccccaggcccttctctctgcagcctgggctctgagcagagcttccggattcact

SEQ ID NO: 363615 - DNA, 120 bp, Artificial Sequence
  ENSG00000140853_85 (sequence is synthesized)
ctctgcctttctctgaatctcagggtttcctgggcatgggatcataatttctatcccctgatgcccgggtgccatggggaccatggaggccatggggtgggaaggccaggtattgccatg

SEQ ID NO: 363616 - DNA, 120 bp, Artificial Sequence
  ENSG00000140853_86 (sequence is synthesized)
ctcacagaatgagtttgggggtctcctctggttctgaggcctccatcctcccttgtccttgtgggtgcagccccgcttccctctctgtgccctgtgggtgccctaggtgcctaggaagct

SEQ ID NO: 363617 - DNA, 120 bp, Artificial Sequence
  ENSG00000140853_87 (sequence is synthesized)
gcagctggccatcctcctgagcttggtggggcgacccgcagggctgttcagcctcaggtacctcctcccccgctgcctccgggaggggccatggcatgaatgggagcaggggtgggcact

SEQ ID NO: 363618 - DNA, 120 bp, Artificial Sequence
  ENSG00000140853_88 (sequence is synthesized)
ttggctatgatgatggtaagggcaggtgtgagagacgcaaagcagccgggccagtacctgcgtcatggggagccgggaggagcccagggacccacctaagtcagagagagggtgtagccc

SEQ ID NO: 363619 - DNA, 120 bp, Artificial Sequence
  ENSG00000140853_89 (sequence is synthesized)
gtttttggttctgttcctgaagcagccactttgtgtatgaccttaagcaagttctctaactctctgaaccttggtgttcctcacctgtaaaatggggacgataataaacccacctttcca

SEQ ID NO: 363620 - DNA, 120 bp, Artificial Sequence
  ENSG00000140853_90 (sequence is synthesized)
gatggccccaagccctgagtttggcccacattttatgatcaatgtgtgaccgccattattacggatcattagtcttggtccatgtggttcagaacatagaactgctgcctgcctgacctc

SEQ ID NO: 363621 - DNA, 120 bp, Artificial Sequence
  ENSG00000140853_91 (sequence is synthesized)
tgtgtggatataagtggctgtcttggaggtccctaggcttgctaagcacagaggcctcagacccccagactggacagtgccccacccccagatgtcaagttcacctggcctcctcttctc

SEQ ID NO: 363622 - DNA, 120 bp, Artificial Sequence
  ENSG00000140853_92 (sequence is synthesized)
cagcctcagtcaccttctgctgaacagctccaccttggccttgcttactcacagactaagccagatgacctgcctgcagagcctcagactgaacaggaacagtatcggtgatgtcggttg

SEQ ID NO: 363623 - DNA, 120 bp, Artificial Sequence
  ENSG00000140853_93 (sequence is synthesized)
gggtgagtgccgggagctctgagggttgaagtttctgcagacctaaaaagcagtttgaaaactggcagttcccagcctctaaaacccgggggtagcaggaggcagagagtaccccggggc

SEQ ID NO: 363624 - DNA, 120 bp, Artificial Sequence
  ENSG00000140853_94 (sequence is synthesized)
cagatcctggagcctcattgtcccttcaaatcaccttccgtttctctaagggagaaataaaccttgaaaagccatgggcttttcagatgtatctagatgtatctgatgcttttcaggtgt

SEQ ID NO: 363625 - DNA, 120 bp, Artificial Sequence
  ENSG00000140853_95 (sequence is synthesized)
agcccagaatggccatccatgatgcccacccgccttgtctcctgaagcacattgccaggtggacctgcacatggtgtggacggcagacagactggggctctcaacaactggtatttgctg

SEQ ID NO: 363626 - DNA, 120 bp, Artificial Sequence
  ENSG00000140853_96 (sequence is synthesized)
gatgaccatgaactaaccattcaatttctcgaaactttggtttctcgtctgtaaaatgaacatatgcaaatctatcctacaaagtgtgttttgtggattgaatgagatgatacacgccca

SEQ ID NO: 363627 - DNA, 120 bp, Artificial Sequence
  ENSG00000140853_97 (sequence is synthesized)
ctgctgtccctctctgagctgaagacatttcgcattcagagctcccaagacccagggcggctcctgcctgacctgttgccctttgacccccaccaggctgacctccagctgtgtgagcac

SEQ ID NO: 363628 - DNA, 120 bp, Artificial Sequence
  ENSG00000140853_98 (sequence is synthesized)
atacatgtaattgttgcttaatctattccttgtttgctaagaaagcaggccaccccaggccctccttgccctgaccagtctgggttcttgccactgccagggaagttggtctttgaccat

SEQ ID NO: 363629 - DNA, 120 bp, Artificial Sequence
  ENSG00000140854_0 (sequence is synthesized)
aagcagcggccaatcaaggcaggggatggaggcaagtgggggtcgcgcctggagcggagcctcggcctccggagccgcagctgcagccctgtattgagctgagatggctcgagcctaaca

SEQ ID NO: 363630 - DNA, 120 bp, Artificial Sequence
  ENSG00000140854_1 (sequence is synthesized)
ttccatgatccaggatcgtgacagatgtgcacaggctgctgctgttgctgctgtgggtaatttggaaccacgaggcaccccagggccagaagacgaggcattctgtctgcctggatgtgt

SEQ ID NO: 363631 - DNA, 120 bp, Artificial Sequence
  ENSG00000140854_2 (sequence is synthesized)
gggaactctctgccaacttgattggtggatctggggggggatccacccccaccccacgaggaaagcacagtttattttgtgggtggggcttcaggtgccagccagctgaaggatggccac

SEQ ID NO: 363632 - DNA, 120 bp, Artificial Sequence
  ENSG00000140854_3 (sequence is synthesized)
ccctgtggtcaccaagacagcctggaagttgcaagagatcgtcgcgcatgccagcaacgtgtcctcactggtgctgggcaaagcctccgggcggctgctggctacaggcggggatgactg

SEQ ID NO: 363633 - DNA, 120 bp, Artificial Sequence
  ENSG00000140854_4 (sequence is synthesized)
ccgcgtcaacctgtggtccatcaacaagcccaactgcatcatgagcctgacgggccacacatccccagtggagagcgtccgcctcaacacccccgaggagctcatcgtggccggctctca

SEQ ID NO: 363634 - DNA, 120 bp, Artificial Sequence
  ENSG00000140854_5 (sequence is synthesized)
gtcgggctccatccgtgtctgggacctggaagctgccaaaattcttcgcacactcatgggacacaaagccaacatctgcagcctggatttccacccgtacggcgagtttgtagcctctgg

SEQ ID NO: 363635 - DNA, 120 bp, Artificial Sequence
  ENSG00000140854_6 (sequence is synthesized)
ttcccaggacacaaacatcaagctctgggacatcaggaggaaaggctgtgtcttccgatacagggggcacagccaggccgtgcggtgtctccggttcagccccgatgggaagtggttggc

SEQ ID NO: 363636 - DNA, 120 bp, Artificial Sequence
  ENSG00000140854_7 (sequence is synthesized)
gtcggccgcagatgaccacaccgtgaagctctgggatctcactgccggcaagatgatgtctgagttccctggtcacacggggcctgtcaacgtggtcgagtttcaccccaacgagtacct

SEQ ID NO: 363637 - DNA, 120 bp, Artificial Sequence
  ENSG00000140854_8 (sequence is synthesized)
cctggcctccggcagctctgacaggacaatccgcttctgggacctggagaagttccaggtggtgagctgcatcgaaggggagcctgggcccgtcaggagcgtcctcttcaacccagacgg

SEQ ID NO: 363638 - DNA, 120 bp, Artificial Sequence
  ENSG00000140854_9 (sequence is synthesized)
ctgctgcctgtacagcggctgccaggactcactgcgtgtctacggctgggaacctgagcggtgctttgatgtggtcctcgtcaactggggcaaggtggccgacctggccatctgcaatga

SEQ ID NO: 363639 - DNA, 120 bp, Artificial Sequence
  ENSG00000140854_10 (sequence is synthesized)
tgcaggaccaccggcccctggcacagccactgcccaaccccagcgcccccctccggcgcatctatgagcggcccagcacaacctgcagcaagcctcagagggtgaagcagaactcagaga

SEQ ID NO: 363640 - DNA, 120 bp, Artificial Sequence
  ENSG00000140854_11 (sequence is synthesized)
gcgagcgccgcagccccagcagcgaggatgaccgggacgagcgcgagtcccgcgcggagatccagaacgccgaggactacaacgagatcttccagcccaagaacagcatcagtcggacgc

SEQ ID NO: 363641 - DNA, 120 bp, Artificial Sequence
  ENSG00000140854_12 (sequence is synthesized)
caccccggagaagtgagcccttccctgcacccccagaggacgacgcagccacagcaaaggaggcagcaaagcccagccctgccatggatgtgcagttcccggtgccaaatctggaggtcc

SEQ ID NO: 363642 - DNA, 120 bp, Artificial Sequence
  ENSG00000140854_13 (sequence is synthesized)
tgccccggcccccagtggttgcttccacacctgcacccaaggctgagcctgccatcatccctgccacccggaacgagcccatcgggctgaaggcctccgacttcctgcccgccgtgaaga

SEQ ID NO: 363643 - DNA, 120 bp, Artificial Sequence
  ENSG00000140854_14 (sequence is synthesized)
tcccccagcaggccgagctggtggacgaggatgccatgtcacagatccgcaaaggccacgacaccatgtgtgtggtgctcaccagccgccacaagaacctggacactgtgcgggctgtgt

SEQ ID NO: 363644 - DNA, 120 bp, Artificial Sequence
  ENSG00000140854_15 (sequence is synthesized)
ggaccatgggcgacatcaagacgtcggtggactccgctgtggccatcaacgacctgtcggtggtggtggacctcctgaacatcgtcaaccagaaagcctccctgtggaagctggacctgt

SEQ ID NO: 363645 - DNA, 120 bp, Artificial Sequence
  ENSG00000140854_16 (sequence is synthesized)
gcaccaccgtcctgccacagattgagaagcttctgcagagcaagtatgagagctacgtccagacgggctgcacctccctgaagctgatcctgcagcggtttctgcccctcatcacagaca

SEQ ID NO: 363646 - DNA, 120 bp, Artificial Sequence
  ENSG00000140854_17 (sequence is synthesized)
tgctggcggccccaccctctgtgggtgtggatatcagcagggaggagaggctgcataagtgccggctctgctacaagcagcttaagagcatcagcggcctggtcaagagcaagtcaggcc

SEQ ID NO: 363647 - DNA, 120 bp, Artificial Sequence
  ENSG00000140854_18 (sequence is synthesized)
tgagcggccgccatggcagtaccttccgcgagctgcacctgctcatggccagtctggactgaggaaagcagtgggcaggggcgctcggcagcccacagggcctggcctcagcccccactc

SEQ ID NO: 363648 - DNA, 120 bp, Artificial Sequence
  ENSG00000140854_19 (sequence is synthesized)
ctgttccttgtgcacccactggcccatgagcctctgcctggcccctgctgctgtcctgtggccgtcctggaggaggtgatgctggtccctggccacctctacagccctgaactcttgaga

SEQ ID NO: 363649 - DNA, 120 bp, Artificial Sequence
  ENSG00000140854_20 (sequence is synthesized)
caactctctccagcaatagctgcccagctttgcccaactgttgcttcttggggcagcgaactgagccctggggctgctgctgtaatttataaggcaaattttattaaatttgtaactatt

SEQ ID NO: 363650 - DNA, 120 bp, Artificial Sequence
  ENSG00000140854_21 (sequence is synthesized)
ctggcctctgggaggagtttctttttccttacgttccaaatcaccctacctgaggtgccccctctgcagattcccaaacctaatttgcagtgcagcttctgactctggtggctttgccct

SEQ ID NO: 363651 - DNA, 120 bp, Artificial Sequence
  ENSG00000140854_22 (sequence is synthesized)
ggcaaggggacgaggtggcgaggggacggtgggccctgggctgggccgagccaggcggggctggctgggcttgcgggcagagagctctgagcgtggggaggctagagcccgtactccgca

SEQ ID NO: 363652 - DNA, 120 bp, Artificial Sequence
  ENSG00000140854_23 (sequence is synthesized)
agcagagggttgggaggatcagccgtggccgagggacctgcccccgcccccggacgagaggggtcggggtggaggccggagggggcaaaaccagggaggccggaagcagagctgggggtc

SEQ ID NO: 363653 - DNA, 120 bp, Artificial Sequence
  ENSG00000140854_24 (sequence is synthesized)
ccttgtcctctgtgcgtgtctctactgccggtctgtcgctgtctggggtgtcatacgtctgatgatcctgtgtggactgaattggatttcagccgagccaggactggaccctggtccatc

SEQ ID NO: 363654 - DNA, 120 bp, Artificial Sequence
  ENSG00000140854_25 (sequence is synthesized)
tcccctggctctggttccctggccccagtgtcccaggtctgtggcttcatgggcaggttgggacccaaggcatctagtgggaccccatagggcagggaggctcgtggctgttggggccaa

SEQ ID NO: 363655 - DNA, 120 bp, Artificial Sequence
  ENSG00000140854_26 (sequence is synthesized)
ccctggggccagggccatcgggccgagcctcccccttgcaaagtcagggccagctctgccccagatgttgctcctggtggccctgccctgggggagaggtttctagagaaaagctggctt

SEQ ID NO: 363656 - DNA, 120 bp, Artificial Sequence
  ENSG00000140854_27 (sequence is synthesized)
cccagggacatgtggaggccaggatgagggataggcttcgcagcacagcttggctgcctttgcaggacaatccgcttctgggacctggagaagttccaggtggtgagctgcatcgaaggg

SEQ ID NO: 363657 - DNA, 120 bp, Artificial Sequence
  ENSG00000140854_28 (sequence is synthesized)
gagcctgggcccgtcaggtacgcaggctgtggggtgggcggcccagcgctcctcccggcagtggggcgtggctgtgggtgggcctttcccatctccgctgctgcgccctccctgccctgg

SEQ ID NO: 363658 - DNA, 120 bp, Artificial Sequence
  ENSG00000140854_29 (sequence is synthesized)
actcccacagggccacccgcctccctccagcccaggcccctcctcctacccccacactggggctgggattttgccccctcggcttgcagtcccagccccacctctccgctttctgcagat

SEQ ID NO: 363659 - DNA, 120 bp, Artificial Sequence
  ENSG00000140854_30 (sequence is synthesized)
tctgcagagcaagtatgagaggtgcgtgtggggaagccatgcctgcctgaagcagggggaggggagaggtaagaagcctcctccagaaccatgggaaggacccccaagagcctgggtgtt

SEQ ID NO: 363660 - DNA, 120 bp, Artificial Sequence
  ENSG00000140854_31 (sequence is synthesized)
cctgtgagctggctgtgaagcattgctgcccctcaacagtccggaggtgggagtggaaacaggcgtgtgtgggtgtatgtgtgggtgtgtctgtgtctgtttctgcccctctcctccttt

SEQ ID NO: 363661 - DNA, 120 bp, Artificial Sequence
  ENSG00000140854_32 (sequence is synthesized)
aaggcctggaggcctgggcccctcttactgacagtcctgctgggacagagtacagaggaggcgttggtctggggccatggctcagggtgtgggtgggcttagccagagctgggttcctcc

SEQ ID NO: 363662 - DNA, 120 bp, Artificial Sequence
  ENSG00000140854_33 (sequence is synthesized)
atggcctggctgtgcccacaatccctggcagggcctgggtggttcccctctgggcctccgccttcccttgggaggaagggctggagcagttaggacagcaaaggccctggggttgggtgt

SEQ ID NO: 363663 - DNA, 120 bp, Artificial Sequence
  ENSG00000140854_34 (sequence is synthesized)
gggtggtggtggtgccagctagcccctcaggcactgccctctctacaggctgcataagtgccggctctgctacaagcagcttaagagcatcagcggcctggtcaagagcaagtcaggcct

SEQ ID NO: 363664 - DNA, 120 bp, Artificial Sequence
  ENSG00000140859_0 (sequence is synthesized)
gcgggcgcgcgccgccgccccccgccggggtcggagccggttgccatgggaacgcgccgcggcccgagttaatcatttcctgtggaaagtgtgcgggaggggcgcgagcgggctggccga

SEQ ID NO: 363665 - DNA, 80 bp, Artificial Sequence
  ENSG00000140859_1 (sequence is synthesized)
ccgggccgagccccgggcgctgcggcgacgcctggatcctgcctccgccaggccggctgcctggtgccccgaggaggctg

SEQ ID NO: 363666 - DNA, 120 bp, Artificial Sequence
  ENSG00000140859_2 (sequence is synthesized)
gctgctgagccccaggccatggtcccctctcgcaggacgtggaacctgggagccacgccctcgctgcggggcctgtggagagtgggccgggccccggagcccgagccggggatggctcgc

SEQ ID NO: 363667 - DNA, 120 bp, Artificial Sequence
  ENSG00000140859_3 (sequence is synthesized)
cccgccccagccccagccagcccggccgcccgccctttcccacacaccggcccggggaggttgagaactgggcgtggaaaagataccccagtctgcggtgacgaggactccagtgcccga

SEQ ID NO: 363668 - DNA, 120 bp, Artificial Sequence
  ENSG00000140859_4 (sequence is synthesized)
agtgcagctcgcccagccctagctcagtgccgagcccttagcgtggactgggctggccccggaagcccccacgggctctacctgaccctgcaggtagaacacctgaaggagaagctcatt

SEQ ID NO: 363669 - DNA, 120 bp, Artificial Sequence
  ENSG00000140859_5 (sequence is synthesized)
agccaggcccaggaagtgagccgactgcgatctgagctggggggcaccgacttggagaagcaccgggacctgctgatggtggagaatgagcgactgaggcaggagatgcggcgctgtgag

SEQ ID NO: 363670 - DNA, 120 bp, Artificial Sequence
  ENSG00000140859_6 (sequence is synthesized)
gccgagctgcaagagctgcgcacaaagccagcaggtccctgcccaggttgtgagcacagccaggagagcgcccagctccgtgacaagctgtcccagctgcagctggagatggcggaaagc

SEQ ID NO: 363671 - DNA, 120 bp, Artificial Sequence
  ENSG00000140859_7 (sequence is synthesized)
aaaggcatgctgtcagagctgaacctagaggtgcagcagaagaccgaccggctggctgaggtggagctgcgactcaaggactgcctggctgagaaggcacaggaggaggagcggcttagt

SEQ ID NO: 363672 - DNA, 120 bp, Artificial Sequence
  ENSG00000140859_8 (sequence is synthesized)
cggcgcctgcgtgacagccacgagaccattgccagcctgcgggcccagtccccacctgtcaagtatgtcatcaagacagtggaggtggagtcgtccaagaccaagcaggccctcagcgag

SEQ ID NO: 363673 - DNA, 120 bp, Artificial Sequence
  ENSG00000140859_9 (sequence is synthesized)
tcccaggcccggaaccagcacctgcaggagcaggtggctatgcagaggcaggtgctgaaggagatggaacagcagctgcagagctcacaccagctgaccgcgcggctccgggcgcagatt

SEQ ID NO: 363674 - DNA, 120 bp, Artificial Sequence
  ENSG00000140859_10 (sequence is synthesized)
gccatgtacgagtcagagctggagcgggcccatgggcagatgctggaggagatgcagtccctggaagaggacaagaaccgggccattgaggaggcctttgccagagcccaggtggagatg

SEQ ID NO: 363675 - DNA, 120 bp, Artificial Sequence
  ENSG00000140859_11 (sequence is synthesized)
aaggctgtgcacgagaatctagcaggcgtccggaccaacttgctgaccttgcagccggcactgcggaccctcaccaacgactacaatgggctcaagcggcaggtgcgcggcttcccactg

SEQ ID NO: 363676 - DNA, 120 bp, Artificial Sequence
  ENSG00000140859_12 (sequence is synthesized)
ctgctgcaggaggccctcaggagtgtcaaggccgagataggccaggccatcgaggaggtcaacagcaacaaccaggagctgctgcgcaagtaccgccgcgagctgcagctgcgtaagaag

SEQ ID NO: 363677 - DNA, 120 bp, Artificial Sequence
  ENSG00000140859_13 (sequence is synthesized)
tgccacaatgagctcgtgcggctgaaagggaacatccgagtgattgctcgtgtccggccagtcaccaaagaggatggggaaggacctgaggccaccaatgctgtgactttcgatgccgac

SEQ ID NO: 363678 - DNA, 120 bp, Artificial Sequence
  ENSG00000140859_14 (sequence is synthesized)
ccccacaggcctcgcagcaggacgtgttccaggaggtgcaggccctggtcacctcttgcattgatggcttcaatgtctgcatctttgcgtacggccagacgggcgccggcaagacgtaca

SEQ ID NO: 363679 - DNA, 120 bp, Artificial Sequence
  ENSG00000140859_15 (sequence is synthesized)
cgatggaggggaccgctgagaacccaggtatcaaccagcgggccctgcagctgctcttctccgaggtgcaggagaaggcgtctgactgggagtacaccatcaccgtcagcgctgcggaga

SEQ ID NO: 363680 - DNA, 120 bp, Artificial Sequence
  ENSG00000140859_16 (sequence is synthesized)
tctacaatgaggtcctcagggacctgctagggaaagagcctcaggaaaaactggagatccggctgtgcccagacggcagtgggcagctgtatgtaccagggctgactgagttccaagtgc

SEQ ID NO: 363681 - DNA, 120 bp, Artificial Sequence
  ENSG00000140859_17 (sequence is synthesized)
agagcgtggacgacatcaacaaggtgtttgagtttggccacactaatcgcacgaccgagttcaccaacctgaacgagcacagctcccgctcgcacgcgctgctcatcgtgacggtgcgag

SEQ ID NO: 363682 - DNA, 120 bp, Artificial Sequence
  ENSG00000140859_18 (sequence is synthesized)
gcgtggactgcagcacaggcctccgcaccacggggaagctgaacctggtggacttggctggctcggagcgcgtgggcaagtcgggggccgagggcagccgcctgcgggaggcgcagcaca

SEQ ID NO: 363683 - DNA, 120 bp, Artificial Sequence
  ENSG00000140859_19 (sequence is synthesized)
tcaacaagtcgctgtcggctctgggggacgtcattgctgccctgcgctcccgccagggccacgtgcccttccgcaactccaagctcacctacctgctgcaggattcgcttagtggtgaca

SEQ ID NO: 363684 - DNA, 120 bp, Artificial Sequence
  ENSG00000140859_20 (sequence is synthesized)
gcaagaccctcatggtggtacaggtgtcccccgtggagaagaacactagcgagacgctctattccctcaagtttgctgagagggtgcgctctgtggagctggggcctgggctacgcaggg

SEQ ID NO: 363685 - DNA, 120 bp, Artificial Sequence
  ENSG00000140859_21 (sequence is synthesized)
cagagcttgggtcctggtcaagccaggagcatctagagtgggagccggcttgtcagacgccacagccctcggcacgggcccactcagcccccagctctgggaccagtagccgccctggat

SEQ ID NO: 363686 - DNA, 120 bp, Artificial Sequence
  ENSG00000140859_22 (sequence is synthesized)
ccatccggaggaagctgcagccctcggggaagtcgcggccactgcctgtgtgacggatgtgaccccgctgggcctgaagctgggccctcactggcctgtccctgctgcagcgccaggacc

SEQ ID NO: 363687 - DNA, 120 bp, Artificial Sequence
  ENSG00000140859_23 (sequence is synthesized)
cccggaggtagaggcgagagtggaggctcttcttctgccccgtctcccctcaaagatgagaaacatgttcagaaggaaacggtgtctctcggctgtggctctgagtgcaaattgcatggg

SEQ ID NO: 363688 - DNA, 120 bp, Artificial Sequence
  ENSG00000140859_24 (sequence is synthesized)
cggaaaggcgggggtggctgctcttcctggcaggcctgggccatcagcgaactgggccccgtgaggagggcgggagtgtggaggagggtgggcctctcacccaggctttctcggcccctc

SEQ ID NO: 363689 - DNA, 120 bp, Artificial Sequence
  ENSG00000140859_25 (sequence is synthesized)
tcctcagcttgcagagctggccagccccctccttagggggtgggcgaggagcctctgggcagacccaagaaccatggggactggggtgggttggtggcaccaatggcagccctccccgcc

SEQ ID NO: 363690 - DNA, 120 bp, Artificial Sequence
  ENSG00000140859_26 (sequence is synthesized)
cctctccttcaaggagggttcccgcagctggggggtgtgcggaggcgcatggcctcccgccacggggccgtgctgtgtttatggctggcagaggcagccagcgggtgggggattctgctg

SEQ ID NO: 363691 - DNA, 120 bp, Artificial Sequence
  ENSG00000140859_27 (sequence is synthesized)
ctcgctcacctgcctggctcgctggtctctcgaattttcttccctctgaaatcctatttaagaacttttggaagcttagccatttttacttattaaaataaaagaagcctttttacacaa

SEQ ID NO: 363692 - DNA, 120 bp, Artificial Sequence
  ENSG00000140859_28 (sequence is synthesized)
agagatgagactgaggtttctcaccggttcctaagcccagtcagagctgtcaggtaattacagggtaaccgacagcccagagccaggcgggcgtggagccggagcgtcagtctcgccggg

SEQ ID NO: 363693 - DNA, 120 bp, Artificial Sequence
  ENSG00000140859_29 (sequence is synthesized)
cgctccttccctgcgcccctgtctggaaaagaggagacctggaagccgggttaaactttaacacgggtcgggcacagagcagggggaatcagctgcattccctctggccaagctggtcag

SEQ ID NO: 363694 - DNA, 120 bp, Artificial Sequence
  ENSG00000140859_30 (sequence is synthesized)
agctctgcgggctgccgtccttggccaagagcgtgtgggctagctccggtctctgcccaggctggtaaacaagggcgtggaaaagataccccagtctgcggtgacgaggactccagtgcc

SEQ ID NO: 363695 - DNA, 120 bp, Artificial Sequence
  ENSG00000140859_31 (sequence is synthesized)
aggggacgaaagaagagaagctttggaagagacaggcgccggcccccaggcgggcccgggaggcccgggaagctggtggcaccatgaatgtagagaatacaggtagaacacctgaaggag

SEQ ID NO: 363696 - DNA, 120 bp, Artificial Sequence
  ENSG00000140859_32 (sequence is synthesized)
aaggacagaacagaaccctgggccgcaggcaggtggctggtgggtatcccgcctcccacccccagcaaacactggcaaaccccactctccctgcatcagggtctgagtgcctggcagggg

SEQ ID NO: 363697 - DNA, 120 bp, Artificial Sequence
  ENSG00000140859_33 (sequence is synthesized)
agctgggcagctgtaggaagtcacttcctctctgagccttcacttcccagtctctaaactggggctcacaaatgtcgcattgcagtttgggggtggatctgttgtaagaatggacagaaa

SEQ ID NO: 363698 - DNA, 120 bp, Artificial Sequence
  ENSG00000140859_34 (sequence is synthesized)
aaagatggtcaactgtaatgtgtggtgcatcgtgagctgtcactcccgtgtgccctggtctcctgctggcctcactgtggtttgactcagacttggactttcctggaattctgaactttg

SEQ ID NO: 363699 - DNA, 120 bp, Artificial Sequence
  ENSG00000140859_35 (sequence is synthesized)
cctctctaagcaaagcccgccagggggtacactctgccttgttttccatggtgccgtgtttccagccctatccaccactggcttctgatcggctgctttctcacactgctgttcctgcaa

SEQ ID NO: 363700 - DNA, 120 bp, Artificial Sequence
  ENSG00000140859_36 (sequence is synthesized)
ggctgtgtggccccatggttaagggtgagggttctgcaagggtcagccagatgcgagttccggtcctaggtccaccacttactggtcaggtgacctcaagtagaacacctgaaggagaag

SEQ ID NO: 363701 - DNA, 120 bp, Artificial Sequence
  ENSG00000140859_37 (sequence is synthesized)
tgaggcctccccagccatgtggaactaactcttttcatcttctgctactgaaatttgggcctcattaaagagtaactcctcattcgccatctgtctccgtgggtttgactgctcatgtac

SEQ ID NO: 363702 - DNA, 120 bp, Artificial Sequence
  ENSG00000140859_38 (sequence is synthesized)
cattcgccatctgtctccgtgggtttgactgctcatgtacttactgaacacctactgtgtaccaggcactgttccaggcactgggagtacagtgctgaacacaacagacaaaaatccctg

SEQ ID NO: 363703 - DNA, 120 bp, Artificial Sequence
  ENSG00000140859_39 (sequence is synthesized)
ccttcgcatatatcatctcgtttaatcctcgagacagcttccatgaggtagcctcattatacaaataaggaaactaagagacatagagaacttaagagacttgtccaaggttacccagca

SEQ ID NO: 363704 - DNA, 120 bp, Artificial Sequence
  ENSG00000140859_40 (sequence is synthesized)
atgtcccagctccaggacgagaagacccagctacaggaggagctggtggtcctacaggagaggctggccctccgcgacagtgaccagcaggccacgtccacccagctgcagaaccaggta

SEQ ID NO: 363705 - DNA, 90 bp, Artificial Sequence
  ENSG00000140859_41 (sequence is synthesized)
gtggactgggctggccccggaagcccccacgggctctacctgaccctgcagagacagggtttcaccatgctggccatgctgctctcgaag

SEQ ID NO: 363706 - DNA, 120 bp, Artificial Sequence
  ENSG00000140859_42 (sequence is synthesized)
ccagcaggaatattcctaaatataagaggtagaacacctgaaggagaagctcattagccaggcccaggaagtgagccgactgcgatctgagctggggggcaccgacttggagaagcaccg

SEQ ID NO: 363707 - DNA, 120 bp, Artificial Sequence
  ENSG00000140859_43 (sequence is synthesized)
agctgtctctcccggctggcaggcccctggcctcccccaggcctcttctgaggctctaggtgccccagtagcagggccttctgcagcaaggccgggaactgctgcaccattggctgcctg

SEQ ID NO: 363708 - DNA, 120 bp, Artificial Sequence
  ENSG00000140859_44 (sequence is synthesized)
gtatcccgcctcccacccccagcaaacactggcaaaccccactctccctgcatcagggtctgagtgcctggcaggggcggcagtggagatgatcaaggacgaaagcagaaaggctgcctc

SEQ ID NO: 363709 - DNA, 120 bp, Artificial Sequence
  ENSG00000140859_45 (sequence is synthesized)
atgcaaactgtccctactcccacccaggggccaaaggacttgagccgtcctctcatcaggcactgagcgggcagagaagtggcacaagctctgcctccctgcctggcccgtggcccagcg

SEQ ID NO: 363710 - DNA, 120 bp, Artificial Sequence
  ENSG00000140859_46 (sequence is synthesized)
gtcccccaggaggcctggctgggcccccagcctttcacctgggtcttgcatcttggaatccccctgccccaccaagagcaggcagtgccagctccctggccttttcctcagaggtggggg

SEQ ID NO: 363711 - DNA, 120 bp, Artificial Sequence
  ENSG00000140859_47 (sequence is synthesized)
tggatcccttggtccacttcctccctgaccactcagagctggcctagctgctgtgagtcagccgttctctcccaccctgggagacagggacctccgaggccgaacactaccttgtttgat

SEQ ID NO: 363712 - DNA, 120 bp, Artificial Sequence
  ENSG00000140859_48 (sequence is synthesized)
ctgttcaagaagaaatgtactaagtgaattcatactatagtgtgaatgacggataacagctttgtgggcccccttcccctagggggctgtgcttaaaagtcaggggactcctaggtcaac

SEQ ID NO: 363713 - DNA, 120 bp, Artificial Sequence
  ENSG00000140859_49 (sequence is synthesized)
attgtgagctgagtgactgcagtaacacgtgatgtggtgttgctgaaggacagcatggttggggaggtggctggacttgtagctggtggtcccagcggccctggaagcccccccaccagc

SEQ ID NO: 363714 - DNA, 120 bp, Artificial Sequence
  ENSG00000140859_50 (sequence is synthesized)
caggtatttctttatagcagtgtgaaaactgactaatacaccatccatctccagaactcttttcatcttctgctactgaaatttgggcctcattaaagagtaactcctcattcgccatct

SEQ ID NO: 363715 - DNA, 120 bp, Artificial Sequence
  ENSG00000140859_51 (sequence is synthesized)
ggatgggaagacacgtactggtatgagagcccgcgtgagaagtataccagagatgagactgaggtttctcaccggttcctaagcccagtcagagctgtcagggcgtggaaaagatacccc

SEQ ID NO: 363716 - DNA, 120 bp, Artificial Sequence
  ENSG00000140859_52 (sequence is synthesized)
agagtgacttgctttctcctcttccgcacccgggggtgtggagagtgagggagaatattgctgctggctctggaataaaatgctgcctctgtttgggagacaaagaacagagtggctcct

SEQ ID NO: 363717 - DNA, 120 bp, Artificial Sequence
  ENSG00000140859_53 (sequence is synthesized)
cagcgccttccaggcatctccgcccaggtggctgggtttcccagcagaacatcgcattccagtgtctgccgcaagccctcttctgttaggtcaccctccaccatccgccttcttcagcca

SEQ ID NO: 363718 - DNA, 120 bp, Artificial Sequence
  ENSG00000140859_54 (sequence is synthesized)
ttgtaaatggaattattttcttaatttcctttttggattgtttattgttagttgtagaaatgtaaccgatttttgtgtgttcattttgtatccttcaactttgctgaatttattagttct

SEQ ID NO: 363719 - DNA, 120 bp, Artificial Sequence
  ENSG00000140859_55 (sequence is synthesized)
aattgccctgcttttaaaatcaaattaattccaacattcaaatcttaattaaattcacataaaactctagacttcctttttgtcataaaatattggaagatgtggcacctctgagctgac

SEQ ID NO: 363720 - DNA, 120 bp, Artificial Sequence
  ENSG00000140859_56 (sequence is synthesized)
attcccacatggcacccaccgcttgaggtctagtggcagctcctgcctttggtggaggtgaccatcctttagcacgctccagccccaccaccctttctgtctctgcttaccaacctcatc

SEQ ID NO: 363721 - DNA, 120 bp, Artificial Sequence
  ENSG00000140859_57 (sequence is synthesized)
ttggcaacagaggcagggtggcgtggacaggggacagataggcctggccggtggtcatacagccaggatcaggccttctgtgggctccacagggtgtgctcccagggccgccccgctggc

SEQ ID NO: 363722 - DNA, 120 bp, Artificial Sequence
  ENSG00000140859_58 (sequence is synthesized)
ctctgggctgagtttccttgaggttgtctggatcccagaccctctggccttcccagctcagcagcttcagcctgggagagcccgcttttcctcagcagacagctgatgatcgttgactgg

SEQ ID NO: 363723 - DNA, 120 bp, Artificial Sequence
  ENSG00000140859_59 (sequence is synthesized)
gcttggtgggaggtaaggaggtaaccagcaggttttctttctgtgatggtaagaggccgccttggaagcagacagctgagaaaacacaaagacctgggctggctggccccacccttggtc

SEQ ID NO: 363724 - DNA, 120 bp, Artificial Sequence
  ENSG00000140859_60 (sequence is synthesized)
ttcagttgctctggctgatgaggagcctgggcccgggaggagtgtcgcacagccccagcctggtccgtcctcagccctggattgacgtccatgctgtcctgggaccgtttcagccgccta

SEQ ID NO: 363725 - DNA, 120 bp, Artificial Sequence
  ENSG00000140859_61 (sequence is synthesized)
gtggggagtctgctttctcctccgtcctgtgtcttgggctcaggcatgtgcctgctgcccctttgtggccacaagtatgtatcgggcccagggtggcactcgggaccctcccctgttggg

SEQ ID NO: 363726 - DNA, 120 bp, Artificial Sequence
  ENSG00000140859_62 (sequence is synthesized)
cttagagacatggacggcccttgctggctggaagctgcggtgagtgtgtgaagggccctcagtcttccctgaggaaggccctgcctgctcttggctctcactgctcccaggccatcttcc

SEQ ID NO: 363727 - DNA, 120 bp, Artificial Sequence
  ENSG00000140859_63 (sequence is synthesized)
atccgctttccccaggtgcctccgtttctctctgacttcttgcctgttttccctaactctgagagattgcctgccttcaagtgcaggagaaagcagacatcttccctacaagcccgagac

SEQ ID NO: 363728 - DNA, 120 bp, Artificial Sequence
  ENSG00000140859_64 (sequence is synthesized)
ctagcccccagtagagctggccaaccacctgccacggagcaggccactggtgccttggccagagtgctcgtggtgccagtctgctgcgtctcagtcacattccccctgctttgctgccct

SEQ ID NO: 363729 - DNA, 120 bp, Artificial Sequence
  ENSG00000140859_65 (sequence is synthesized)
caagaagccagagatgacctagtgtctgacacctctgaacaaaggggcctttagagccccttcctcaactccctcaccatcccccatgctccccagcctgccctggttgcggttgcggcc

SEQ ID NO: 363730 - DNA, 120 bp, Artificial Sequence
  ENSG00000140859_66 (sequence is synthesized)
agcctttctggggagggagggggcgtggaaggagacttcaaccttttgaagaggaagtcagttcacttatgtcagggtagggagagtaggaattacgtattctttgagactgaaaaatta

SEQ ID NO: 363731 - DNA, 82 bp, Artificial Sequence
  ENSG00000140859_67 (sequence is synthesized)
ggagagtaggaattacgtattctttgagactgaaaaattactggccgggcgcaggggctcacaactgcttgaggccaggaat

SEQ ID NO: 363732 - DNA, 120 bp, Artificial Sequence
  ENSG00000140859_68 (sequence is synthesized)
tggtgccactcctcatgggtgcttggggccagggcagccgtggcccccgcccatccgcccttccctgctcacagtgggagccggcttgtcagacgccacagccctcggcacgggcccact

SEQ ID NO: 363733 - DNA, 120 bp, Artificial Sequence
  ENSG00000140859_69 (sequence is synthesized)
accaggctgcccttacctggatgggctttctcttttctttcctttttaaaaagttcttacaccttctccagaacctgttttacaacctcccctgcccccaggcagtagtcagggcagaca

SEQ ID NO: 363734 - DNA, 120 bp, Artificial Sequence
  ENSG00000140859_70 (sequence is synthesized)
gtgctgtgtccgttctgcaggtgggaaatggaaggtctgtgggaagggggcagtgtaaggagaccccagcctctcagccgggggtgctgactctaccctgggaccctgctctctgagcat

SEQ ID NO: 363735 - DNA, 120 bp, Artificial Sequence
  ENSG00000140859_71 (sequence is synthesized)
agtccaggcagacagcatcatgggtgaaggcttggagagctggtgaggcttggtggagacagcagctgattgtggctgatgaccaaagggcagggtcaaaggggcaggtggtaatctggg

SEQ ID NO: 363736 - DNA, 120 bp, Artificial Sequence
  ENSG00000140859_72 (sequence is synthesized)
aaggaggggacggacttcatccgaggtgtcatgttcaggaatttgtactttatcctgaaggctacaggacaacccagtaaaacgtattgctcggaaaatggcacagatggagtttctttt

SEQ ID NO: 363737 - DNA, 120 bp, Artificial Sequence
  ENSG00000140873_0 (sequence is synthesized)
agacgctcacaccgacacagacagacgcacagacgggcgggcagacaccgacagtctcccaaccgtttgcgctccagtcccggcccagggagccccccgtaccctctggggtgccgcaaa

SEQ ID NO: 363738 - DNA, 120 bp, Artificial Sequence
  ENSG00000140873_1 (sequence is synthesized)
caaactgcagctcggcaggcccgcgccgggagaagggagggcgcgcaggcggccggaggaggggaggtcccagcgcgcccccgctgcgatgtgaacggcggcggctctcacctggagccg

SEQ ID NO: 363739 - DNA, 120 bp, Artificial Sequence
  ENSG00000140873_2 (sequence is synthesized)
cgagctccggggccgcggaaagaatgcgcgccgcccgtgcgctccgcctgccgcgtctggccacccgcagccgccgcgtccgcacctgaccatggagtgcgccctcctgctcgcgtgtgc

SEQ ID NO: 363740 - DNA, 120 bp, Artificial Sequence
  ENSG00000140873_3 (sequence is synthesized)
gcgtgtgccttcccggctgcgggttcgggcccgccgaggggcctggcgggactggggcgcgtggccaaggcgctccagctgtgctgcctctgctgtgcgtcggtcgccgcggccttagcc

SEQ ID NO: 363741 - DNA, 120 bp, Artificial Sequence
  ENSG00000140873_4 (sequence is synthesized)
agtgacagcagcagcggcgccagcggattaaatgatgattacgtctttgtcacgccagtagaagtagactcagccgggtcatatatttcacacgacattttgcacaacggcaggaaaaag

SEQ ID NO: 363742 - DNA, 120 bp, Artificial Sequence
  ENSG00000140873_5 (sequence is synthesized)
cgatcggcgcagaatgccagaagctccctgcactaccgattttcagcatttggacaggaactgcacttagaacttaagccctcggcgattttgagcagtcactttattgtccaggtactt

SEQ ID NO: 363743 - DNA, 120 bp, Artificial Sequence
  ENSG00000140873_6 (sequence is synthesized)
ggaaaagatggtgcttcagagactcagaaacccgaggtgcagcaatgcttctatcagggatttatcagaaatgacagctcctcctctgtcgctgtgtctacgtgtgctggcttgtcaggt

SEQ ID NO: 363744 - DNA, 120 bp, Artificial Sequence
  ENSG00000140873_7 (sequence is synthesized)
ttaataaggacacgaaaaaatgaattcctcatctcgccattacctcagcttctggcccaggaacacaactacagctcccctgcgggtcaccatcctcacgtactgtacaaaaggacagca

SEQ ID NO: 363745 - DNA, 120 bp, Artificial Sequence
  ENSG00000140873_8 (sequence is synthesized)
gaggagaagatccagcggtaccgtggctaccccggctctggccggaattatcctggttactccccaagtcacattccccatgcatctcagagtcgagagacagagtatcaccatcgaagg

SEQ ID NO: 363746 - DNA, 120 bp, Artificial Sequence
  ENSG00000140873_9 (sequence is synthesized)
ttgcaaaagcagcatttttgtggacgacgcaagaaatatgctcccaagcctcccacagaggacacctatctaaggtttgatgaatatgggagctctgggcgacccagaagatcagctgga

SEQ ID NO: 363747 - DNA, 120 bp, Artificial Sequence
  ENSG00000140873_10 (sequence is synthesized)
aaatcacaaaagggcctcaatgtggaaaccctcgtggtggcagacaagaaaatggtggaaaagcatggcaagggaaatgtcaccacatacattctcacagtaatgaacatggtttctggc

SEQ ID NO: 363748 - DNA, 120 bp, Artificial Sequence
  ENSG00000140873_11 (sequence is synthesized)
ctatttaaagatgggactattggaagtgacataaacgtggttgtggtgagcctaattcttctggaacaagaacctggaggattattgatcaaccatcatgcagaccagtctctgaatagt

SEQ ID NO: 363749 - DNA, 120 bp, Artificial Sequence
  ENSG00000140873_12 (sequence is synthesized)
ttttgtcaatggcagtctgccctcattggaaagaatggcaagagacatgatcatgccatcttactaacaggatttgatatttgttcttggaagaatgaaccatgtgacactctagggttt

SEQ ID NO: 363750 - DNA, 120 bp, Artificial Sequence
  ENSG00000140873_13 (sequence is synthesized)
gcccccatcagtggaatgtgctctaagtaccgaagttgtaccatcaatgaggacacaggacttggccttgccttcaccatcgctcatgagtcagggcacaactttggtatgattcacgat

SEQ ID NO: 363751 - DNA, 120 bp, Artificial Sequence
  ENSG00000140873_14 (sequence is synthesized)
ggagaagggaatccctgcagaaaggctgaaggcaatatcatgtctcccacactgaccggaaacaatggagtgttttcatggtcttcctgcagccgccagtatctcaagaaattcctcagc

SEQ ID NO: 363752 - DNA, 120 bp, Artificial Sequence
  ENSG00000140873_15 (sequence is synthesized)
acacctcaggcggggtgtctagtggatgagcccaagcaagcaggacagtataaatatccggacaaactaccaggacagatttatgatgctgacacacagtgtaaatggcaatttggagca

SEQ ID NO: 363753 - DNA, 120 bp, Artificial Sequence
  ENSG00000140873_16 (sequence is synthesized)
aaagccaagttatgcagccttggttttgtgaaggatatttgcaaatcactttggtgccaccgagtaggccacaggtgtgagaccaagtttatgcccgcagcagaagggaccgtttgtggc

SEQ ID NO: 363754 - DNA, 120 bp, Artificial Sequence
  ENSG00000140873_17 (sequence is synthesized)
ttgagtatgtggtgtcggcaaggccagtgcgtaaagtttggggagctcgggccccggcccatccacggccagtggtccgcctggtcgaagtggtcagaatgttcccggacatgtggtgga

SEQ ID NO: 363755 - DNA, 120 bp, Artificial Sequence
  ENSG00000140873_18 (sequence is synthesized)
ggagtcaagttccaggagagacactgcaataaccccaagcctcagtatggtggcttattctgtccaggttctagccgtatttatcagctgtgcaatattaacccttgcaatgaaaatagc

SEQ ID NO: 363756 - DNA, 120 bp, Artificial Sequence
  ENSG00000140873_19 (sequence is synthesized)
ttggattttcgggctcaacagtgtgcagaatataacagcaaacctttccgtggatggttctaccagtggaaaccctatacaaaagtggaagaggaagatcgatgcaaactgtactgcaag

SEQ ID NO: 363757 - DNA, 120 bp, Artificial Sequence
  ENSG00000140873_20 (sequence is synthesized)
gctgagaactttgaatttttttttgcaatgtccggcaaagtgaaagatggaactccctgctccccaaacaaaaatgatgtttgtattgacggggtttgtgaactagtgggatgtgatcat

SEQ ID NO: 363758 - DNA, 120 bp, Artificial Sequence
  ENSG00000140873_21 (sequence is synthesized)
gaactaggctctaaagcagtttcagatgcttgtggcgtttgcaaaggtgataattcaacttgcaagttttataaaggcctgtacctcaaccagcataaagcaaatgaatattatccggtg

SEQ ID NO: 363759 - DNA, 120 bp, Artificial Sequence
  ENSG00000140873_22 (sequence is synthesized)
gtcctcattccagctggcgcccgaagcatcgaaatccaggagctgcaggtttcctccagttacctcgcagttcgaagcctcagtcaaaagtattacctcaccgggggctggagcatcgac

SEQ ID NO: 363760 - DNA, 120 bp, Artificial Sequence
  ENSG00000140873_23 (sequence is synthesized)
tggcctggggagttccccttcgctgggaccacgtttgaataccagcgctctttcaaccgcccggaacgtctgtacgcgccagggcccacaaatgagacgctggtctttgaaattctgatg

SEQ ID NO: 363761 - DNA, 120 bp, Artificial Sequence
  ENSG00000140873_24 (sequence is synthesized)
aaagacctgcctatacctggagtatcgtgcagtcagagtgctccgtctcctgtggtggaggttacataaatgtaaaggccatttgcttgcgagatcaaaatactcaagtcaattcctcat

SEQ ID NO: 363762 - DNA, 120 bp, Artificial Sequence
  ENSG00000140873_25 (sequence is synthesized)
tctgcagtgcaaaaaccaagccagtaactgagcccaaaatctgcaacgctttctcctgcccggcttactggatgccaggtgaatggagtacatgcagcaaggcctgtgctggaggccagc

SEQ ID NO: 363763 - DNA, 120 bp, Artificial Sequence
  ENSG00000140873_26 (sequence is synthesized)
agagccgaaagatccagtgtgtgcaaaagaagcccttccaaaaggaggaagcagtgttgcattctctctgtccagtgagcacacccactcaggtccaagcctgcaacagccatgcctgcc

SEQ ID NO: 363764 - DNA, 120 bp, Artificial Sequence
  ENSG00000140873_27 (sequence is synthesized)
ctccacaatggagccttggaccctggtctcagtgttccaagacctgtggacgaggggtgaggaagcgtgaactcctctgcaagggctctgccgcagaaaccctccccgagagccagtgta

SEQ ID NO: 363765 - DNA, 120 bp, Artificial Sequence
  ENSG00000140873_28 (sequence is synthesized)
ccagtctccccagacctgagctgcaggagggctgtgtgcttggacgatgccccaagaacagccggctacagtgggtcgcttcttcgtggagcgagtgttctgcaacctgtggtttgggtg

SEQ ID NO: 363766 - DNA, 120 bp, Artificial Sequence
  ENSG00000140873_29 (sequence is synthesized)
tgaggaagagggagatgaagtgcagcgagaagggcttccagggaaagctgataactttcccagagcgaagatgccgtaatattaagaaaccaaatctggacttggaagagacctgcaacc

SEQ ID NO: 363767 - DNA, 120 bp, Artificial Sequence
  ENSG00000140873_30 (sequence is synthesized)
gacgggcttgcccagcccatccagtgtacaacatggtagctggatggtattcattgccgtggcagcagtgcacagtcacctgtgggggaggggtccagacccggtcagtccactgtgttc

SEQ ID NO: 363768 - DNA, 120 bp, Artificial Sequence
  ENSG00000140873_31 (sequence is synthesized)
agcaaggccggccttcctcaagttgtctgctccatcagaaacctccggtgctacgagcctgtaatacaaacttctgtccagctcctgaaaagagagaggatccatcctgcgtagatttct

SEQ ID NO: 363769 - DNA, 120 bp, Artificial Sequence
  ENSG00000140873_32 (sequence is synthesized)
tcaactggtgtcacctagttcctcagcatggtgtctgcaaccacaagttttacggaaaacaatgctgcaagtcatgcacaaggaagatctgatcttggtgtcctccccagcaccttaggg

SEQ ID NO: 363770 - DNA, 120 bp, Artificial Sequence
  ENSG00000140873_33 (sequence is synthesized)
ccaggggcttacctttcaacctctagagagaccagctgcctttgagaccaggagctgagcaccgagaaccatctgtgagctgccgctgtgatgaaggagcctgctctgaggaacagacag

SEQ ID NO: 363771 - DNA, 120 bp, Artificial Sequence
  ENSG00000140873_34 (sequence is synthesized)
gttgccagtaggcttctagctcaattccctgaagcacgtggtactctgaagcacttgaaaatgggaagcgatgacaaatctgactttaaaaaaaatctttgatttgcactgttatatgca

SEQ ID NO: 363772 - DNA, 120 bp, Artificial Sequence
  ENSG00000140873_35 (sequence is synthesized)
agaagtggtgaatcacactgagatacgtcgatttggggagagacccccttttgaacttcaaagggttcaagggcaaagacatctgttttaaaaaggtcctttatgacttcaggtcaaaga

SEQ ID NO: 363773 - DNA, 120 bp, Artificial Sequence
  ENSG00000140873_36 (sequence is synthesized)
ctgagactcagaactttcaaatctggatggaataccttgcctaactgttgcgtggagttcacagttcgactaaccctgtgaacacccaagccaggagttctatgagaagccaaatggtgc

SEQ ID NO: 363774 - DNA, 120 bp, Artificial Sequence
  ENSG00000140873_37 (sequence is synthesized)
tcgcaattgtgcttgctgctggactggcaagcttcatgttatgtttatttggtgtgcgtgtgtctttattattttgtgtaaactatattctgcttatagagagtctctgagactaaaatt

SEQ ID NO: 363775 - DNA, 120 bp, Artificial Sequence
  ENSG00000140873_38 (sequence is synthesized)
gacaacttgaaaagtattccaaggaatattatgaaaatagggcaacatggactgtttaagatctccatgtaattgaaattcatgcaaggaaacaactcatagaaaagataaatatggatg

SEQ ID NO: 363776 - DNA, 120 bp, Artificial Sequence
  ENSG00000140873_39 (sequence is synthesized)
cccttcacatgttatcaacctcgtaacttttggtgcttgctgaatcagtccatgaaaagctacagcccgctctttgggaatgctacatacccatttctggtatttaaaaaatatctagga

SEQ ID NO: 363777 - DNA, 120 bp, Artificial Sequence
  ENSG00000140873_40 (sequence is synthesized)
ggagctaaatgacaaaacacagcagtgttttgagggagaaaggaccatcatttataatgctctgtacatactaccagagctgcttggaaaattaaaggccacttgtggctttttcctacc

SEQ ID NO: 363778 - DNA, 86 bp, Artificial Sequence
  ENSG00000140873_41 (sequence is synthesized)
gagtaaacagtggtaataaaaaaatccatctgtcttcttgctatgttaatattaataaatcataatatgacaagaccctcactgaa

SEQ ID NO: 363779 - DNA, 120 bp, Artificial Sequence
  ENSG00000140873_42 (sequence is synthesized)
taatattaataaatcataatatgacaagaccctcactgaataagagtattttcagtcatcagaagccagctgttggtaggcattaatgagtttaaaattgttctcaattgaaaaaacatc

SEQ ID NO: 363780 - DNA, 120 bp, Artificial Sequence
  ENSG00000140873_43 (sequence is synthesized)
acactattttgccaaaaccaaagtaattataatactgtgtcctcctgtaattttttgagaagtggttataaagggcatatttacataaattctactttattcctcaacttctttgatgaa

SEQ ID NO: 363781 - DNA, 120 bp, Artificial Sequence
  ENSG00000140873_44 (sequence is synthesized)
tgtaacccaattttacttctttaaaaagtctcaattcaagctggattagccagctcagcataatcaactagacagtggtttgttaaatttagcagcatacttcgttcccattctaattaa

SEQ ID NO: 363782 - DNA, 120 bp, Artificial Sequence
  ENSG00000140873_45 (sequence is synthesized)
agtcatgagttcttgaatcccagagaaataatgcttaggaacttctctcaatctgcttggcttggcctagagaagtggccattttatcaacaggaaaaaaaaaaattttctctactacaa

SEQ ID NO: 363783 - DNA, 120 bp, Artificial Sequence
  ENSG00000140873_46 (sequence is synthesized)
ccccgttgccttctgaaaaacagcaagttatttctttatataattatcattttattattttatggaaaattaatttattaattaatagcctattatgtgttctcacttgcttctctaagt

SEQ ID NO: 363784 - DNA, 120 bp, Artificial Sequence
  ENSG00000140873_47 (sequence is synthesized)
atagcctattatgtgttctcacttgcttctctaagtaatattttgagataaaatgttgaataaaaccatggattatagagaaaagtcaaaatatatgtgtaatatttaattattttataa

SEQ ID NO: 363785 - DNA, 120 bp, Artificial Sequence
  ENSG00000140873_48 (sequence is synthesized)
atatttgatctaggtgcaaggcaataggaacaaagatatctttgagctttgtgttgctctttgccagcttgctggaaagagaccatttggaattgtgggctctgggtgctgacagctgaa

SEQ ID NO: 363786 - DNA, 120 bp, Artificial Sequence
  ENSG00000140873_49 (sequence is synthesized)
gaaggggaaagtttaataaggacacgaaaaaatgaattcctcatctcgccattacctcagcttctggcccaggaacacaactacagctcccctgcgggtcaccatcctcacgtactgtac

SEQ ID NO: 363787 - DNA, 120 bp, Artificial Sequence
  ENSG00000140873_50 (sequence is synthesized)
agcaaggccggccttcctcaagttgtctgctccatcagaaacctccggtgctacgagcctgtaatacaaacttctgtccagctcctgaaaagagagattctgcaggaagccagttaccat

SEQ ID NO: 363788 - DNA, 120 bp, Artificial Sequence
  ENSG00000140873_51 (sequence is synthesized)
tcagataactacagccccacctccaatctttcttgcagcctgatgagagacctcaagccagaaccacacagctaaccatttctgaatttccatgcaataaatgcataatgttataagcca

SEQ ID NO: 363789 - DNA, 120 bp, Artificial Sequence
  ENSG00000140873_52 (sequence is synthesized)
gtctcctgtggtggaggtagatgattttctcattctgtctccaaagtctgtctctcttaaaacaggttctttcactccaggcgtctttaacataatatggtttaaataagccacccaaga

SEQ ID NO: 363790 - DNA, 120 bp, Artificial Sequence
  ENSG00000140873_53 (sequence is synthesized)
actgtcttttatgagaaccatcaccataaaagcaaatattatggcattagttaagggttttcctatgtggtaaggaatcaactctcacaaagctcaaatcaaccacaaccaaggctcaaa

SEQ ID NO: 363791 - DNA, 120 bp, Artificial Sequence
  ENSG00000140876_0 (sequence is synthesized)
gctctgcgcaagcgcgaccgaccgagcagctccgaggagtccgcccggaaacaaacattccccagggcaatgtcacgacttggtcttcccgaggagccagtcagaaacagtttgctagat

SEQ ID NO: 363792 - DNA, 120 bp, Artificial Sequence
  ENSG00000140876_1 (sequence is synthesized)
gatgctaaggcccgcttaagaaagtatgatattggaggcaaatattctcacttgccatataacaaatactccgtccttttgccattggtggctaaagaaggaaaactccatttgttgttc

SEQ ID NO: 363793 - DNA, 120 bp, Artificial Sequence
  ENSG00000140876_2 (sequence is synthesized)
accgtccggtcagagaagctaagaagggcccctggagaagtttgcttccctggaggtaagcgtgaccctacagacatggatgatgcagccacagctctccgggaagcccaggaggaagtg

SEQ ID NO: 363794 - DNA, 120 bp, Artificial Sequence
  ENSG00000140876_3 (sequence is synthesized)
ggtctccgtcctcaccaagtggaagttgtctgctgcctggtgccatgtcttattgatacagatacattgataactccatttgtgggtttaatagaccacaacttccaggcccagccgaat

SEQ ID NO: 363795 - DNA, 120 bp, Artificial Sequence
  ENSG00000140876_4 (sequence is synthesized)
atgtattcctggtgcctctggcctatttcctgcatccacaggtccatgaccagcattacgtcacacgtcttggtcaccgttttattaatcatatctttgagtacacaaaccctgaagacg

SEQ ID NO: 363796 - DNA, 120 bp, Artificial Sequence
  ENSG00000140876_5 (sequence is synthesized)
gtgtcacttaccagatcaagggaatgacggcaaaccttgcagtgttggtggcctttatcattttggaaaaaaaacccacctttgaggttcaatttaatcttaatgatgtattagcatcct

SEQ ID NO: 363797 - DNA, 120 bp, Artificial Sequence
  ENSG00000140876_6 (sequence is synthesized)
ctgaagagttattcctgaaggttcataaaaaagctacaagcaggttatgatttactagagcaagagacaaagaactattcacgaggattctgtgtgtgcttattcgtagaacaacaacaa

SEQ ID NO: 363798 - DNA, 120 bp, Artificial Sequence
  ENSG00000140876_7 (sequence is synthesized)
tgccagctgttggaatttgacaggtgtgaatattttttctgcagtatgtagttagaatccttgcctcttttccagttgccttctattgtctgaaaaagtaaaagccattcaaaaatgaaa

SEQ ID NO: 363799 - DNA, 120 bp, Artificial Sequence
  ENSG00000140876_8 (sequence is synthesized)
actatgttcatagtgttgcatattttcacccacaatatgttaataatatttttcttacacatataataaagaatatctggcacatactaggcccttaataaagattttttgaatatataa

SEQ ID NO: 363800 - DNA, 65 bp, Artificial Sequence
  ENSG00000140876_9 (sequence is synthesized)
gatacattgataactccatttgtgggtttaatagaccacaacttccaggcccagccgaatcctgc

SEQ ID NO: 363801 - DNA, 120 bp, Artificial Sequence
  ENSG00000140876_10 (sequence is synthesized)
tgagcaccgtccccacccccaggtggatctactgttctcaggattccacattttccaaacataaccccaaagagtactgtacataaagtcaagagaacaggttctcctacagacattgcc

SEQ ID NO: 363802 - DNA, 120 bp, Artificial Sequence
  ENSG00000140876_11 (sequence is synthesized)
cctcatgagtcaagtggctatgggcaaccccttttgcctctccggacccctctttccccatccagaaataaaagggttgaactcccatcagtggatttcaaactggatgccatagaaccc

SEQ ID NO: 363803 - DNA, 120 bp, Artificial Sequence
  ENSG00000140876_12 (sequence is synthesized)
ccgaggagtccgcccggaaacaaacattccccagggcaatgtcacgacttggtcttcccgaggagccagtcagacagatacattgataactccatttgtgggtttaatagaccacaactt

SEQ ID NO: 363804 - DNA, 80 bp, Artificial Sequence
  ENSG00000140905_0 (sequence is synthesized)
cccagtcaggctctgtcccgcccccgcggcaccgcctccgcgcctccatccagccggctccctccggccgcgaactgccc

SEQ ID NO: 363805 - DNA, 120 bp, Artificial Sequence
  ENSG00000140905_1 (sequence is synthesized)
ggtggccgaggcgtagcgctgcgacccccgcacccctgcgaacatggcgctgcgagtggtgcggagcgtgcgggccctgctctgcaccctgcgcgcggtcccgtcacccgccgcgccctg

SEQ ID NO: 363806 - DNA, 120 bp, Artificial Sequence
  ENSG00000140905_2 (sequence is synthesized)
cagctgggggtgggcgccgtccgtacgctgcgcactggacccgctctgctctcggtgcgtaaattcacagagaaacacgaatgggtaacaacagaaaatggcattggaacagtgggaatc

SEQ ID NO: 363807 - DNA, 120 bp, Artificial Sequence
  ENSG00000140905_3 (sequence is synthesized)
agcaattttgcacaggaagcgttgggagatgttgtttattgtagtctccctgaagttgggacaaaattgaacaaacaagatgagtttggtgctttggaaagtgtgaaagctgctagtgaa

SEQ ID NO: 363808 - DNA, 120 bp, Artificial Sequence
  ENSG00000140905_4 (sequence is synthesized)
ctctattctcctttatcaggagaagtaactgaaattaatgaagctcttgcagaaaatccaggacttgtaaacaaatcttgttatgaagatggttggctgatcaagatgacactgagtaac

SEQ ID NO: 363809 - DNA, 120 bp, Artificial Sequence
  ENSG00000140905_5 (sequence is synthesized)
ccttcagaactagatgaacttatgagtgaagaagcatatgagaaatacataaaatctattgaggagtgaaaatggaactcctaaataaactagtatgaaataacgcaagccagcagagtt

SEQ ID NO: 363810 - DNA, 120 bp, Artificial Sequence
  ENSG00000140905_6 (sequence is synthesized)
aacttttagtattaccgatggggaaaaaaaaactactgttaacactgctaatgaaagaaaatgccctttaactttctaatgattatagataaatataatatgcgtctttttcacaatatc

SEQ ID NO: 363811 - DNA, 120 bp, Artificial Sequence
  ENSG00000140905_7 (sequence is synthesized)
ctatgatttttagactaggctctagtgttcagaattcatgaaattatccatggtaaaaactagttataaaaattacataattcaaagataacattgttattcttaagccttatataatat

SEQ ID NO: 363812 - DNA, 120 bp, Artificial Sequence
  ENSG00000140905_8 (sequence is synthesized)
tgtaacttgcatgtatccatacctggatttgggatgaaatacttaatgatctttccattggaaataactggaagtgaagaggttttgttgcttgtacagtgtcagatgaggaacaccact

SEQ ID NO: 363813 - DNA, 120 bp, Artificial Sequence
  ENSG00000140905_9 (sequence is synthesized)
atcttaattttgcgatacactgcatttgctggtgctatttttatacagtgaagcaacagctttgcagcaaaataataaaatacttcttcgttaatcatgtttgttttgatgttaatattt

SEQ ID NO: 363814 - DNA, 120 bp, Artificial Sequence
  ENSG00000140905_10 (sequence is synthesized)
catttagtaactctgctagtatttgtgaaagtgctaactttaacttacggaaagttactttttaaaaggaaatttaagccagaacaatgcaaagctccaagaaaatgttttctttagtca

SEQ ID NO: 363815 - DNA, 120 bp, Artificial Sequence
  ENSG00000140905_11 (sequence is synthesized)
caaatctggtttttcttaagccaagatctgtcacctttaacataataaaaaataaatcaccaactttgattttctatcatgcgaggtctgaagaaagaagaggaaagacagaggaaggtg

SEQ ID NO: 363816 - DNA, 120 bp, Artificial Sequence
  ENSG00000140905_12 (sequence is synthesized)
gaagttttgatcagtatagcacatggtgtttttaagttgttaaaccacgttcaggtttccacttaagtcatgggaataaaagtggacaaggactgaagctttatgagctcagataatgga

SEQ ID NO: 363817 - DNA, 120 bp, Artificial Sequence
  ENSG00000140905_13 (sequence is synthesized)
aaacaaatcttgttatgaagatggtaagctgttgctagaaatttctcaaggaattactactacagtaaatattttatctagaatttaaagcaagtttagctgattgtgacttcatctttt

SEQ ID NO: 363818 - DNA, 120 bp, Artificial Sequence
  ENSG00000140905_14 (sequence is synthesized)
tctacttcttggtactaaatagagatgttctgctttaaaagaaaaacagaggttagttgaatacttaaagttatgtttaagatttctggctaggcgcagtggctcgcgcctgtgatccca

SEQ ID NO: 363819 - DNA, 84 bp, Artificial Sequence
  ENSG00000140905_15 (sequence is synthesized)
tagaaatacaaaaattagctggctgtggtggaatgtgcctgtagtctcagttactagggaggctgaggtgggagaattgcttga

SEQ ID NO: 363820 - DNA, 120 bp, Artificial Sequence
  ENSG00000140905_16 (sequence is synthesized)
tgggagaattgcttgaacctgggaggtcaaggctgcagtctatagtgagccaagatcgcaccactccactccagcctgagtgacagagcgagaccttctcaaaaaaagaaaaaaaaatct

SEQ ID NO: 363821 - DNA, 120 bp, Artificial Sequence
  ENSG00000140905_17 (sequence is synthesized)
aaaaaaaaatctctgatgataaaagcattaccttattttgcagtttcttgatatcagttgtagattctttggttttggtgtaaacatctgcaaagtatttactttttcagacataaagca

SEQ ID NO: 363822 - DNA, 120 bp, Artificial Sequence
  ENSG00000140905_18 (sequence is synthesized)
gccactcatattgtgtgacatgggaggtaaaaaaatatatattttgcattaatttttggttttctcacattttcacccttataatctaatcaggtaagctaacagcaattttctctattt

SEQ ID NO: 363823 - DNA, 120 bp, Artificial Sequence
  ENSG00000140905_19 (sequence is synthesized)
tccaaaggatttatctgtcagggtctcatggctgataaatggcaaagctaggattaggttgtagttctcttttgtctgtcacctagcccttctaattactactgctttctaatcccgtta

SEQ ID NO: 363824 - DNA, 120 bp, Artificial Sequence
  ENSG00000140905_20 (sequence is synthesized)
ctaatcccgttaacctcagtagttagtgttccatttgttaaagacatacctggtcttgtgtatttggatcatatatttaaggacttatttttattatttttttgagacagagtctccctc

SEQ ID NO: 363825 - DNA, 120 bp, Artificial Sequence
  ENSG00000140905_21 (sequence is synthesized)
tggagtgcagtggcgtgatctcggtgcactgcaacctccccttctcgggttcaagcacttcttctgcctcagcttcccagtagctgggatcaagggcaactgccaccacgcccagctaat

SEQ ID NO: 363826 - DNA, 120 bp, Artificial Sequence
  ENSG00000140905_22 (sequence is synthesized)
cagctaatttttgtggttttggtagagatggggttccactatgttggccaggctggtctagagctcctagcctcaagtgatttgcttgccttcgcttcccaaagtactgggattacaggc

SEQ ID NO: 363827 - DNA, 120 bp, Artificial Sequence
  ENSG00000140905_23 (sequence is synthesized)
ccgtgcccggcccttaaagatttaaatgtcattttctgatgcttattacaacctaagagttcttaatttattatggtggaatctattctagccataattattttcatttgttatatacaa

SEQ ID NO: 363828 - DNA, 120 bp, Artificial Sequence
  ENSG00000140905_24 (sequence is synthesized)
gtattttaattcttaaggctaaaatttaaagttctatgaacaaataatgtatggtttttgtaaagaatacaagattgaggcgctcagaaatttattttacgttttggatgaatttgactt

SEQ ID NO: 363829 - DNA, 120 bp, Artificial Sequence
  ENSG00000140905_25 (sequence is synthesized)
tagaattttaagaacttagtcaaattatagttgttccaggaggtcagtttcattcctgtaaaattttactttgtaacccaagctgcactgaagctctcttaggtcaactctgcctaaaga

SEQ ID NO: 363830 - DNA, 120 bp, Artificial Sequence
  ENSG00000140905_26 (sequence is synthesized)
ggcacctgattattactgttatttttttttttaggttaaatcatttcttatatgagccatctttatgctgcctccctaaacctcatcaccccaaatttgtcttcagaggcacagattttt

SEQ ID NO: 363831 - DNA, 120 bp, Artificial Sequence
  ENSG00000140905_27 (sequence is synthesized)
ttttctgcaagacagaccagtaatagttaagtatacatttgaaatatgctccaaaattttcttttgtgatttaggctaagtaatgttaaagcagataatccaatctccaaaagatgcaca

SEQ ID NO: 363832 - DNA, 120 bp, Artificial Sequence
  ENSG00000140905_28 (sequence is synthesized)
aggtgttcagatgaagccatctttgcttaaatggtactgctgtttaaatgcgtcatctctatacatgatcttcattctttcctgagccatgcactatttaaaggtagtgtcaacaggtca

SEQ ID NO: 363833 - DNA, 120 bp, Artificial Sequence
  ENSG00000140931_0 (sequence is synthesized)
ggccggggacaggaggggtggccaagaaagtcgcaagaaaactccggcccccaagaaaaagagagggcatgggttgcggagccgacatcacggccggggtctttgctgtttagacgcctg

SEQ ID NO: 363834 - DNA, 120 bp, Artificial Sequence
  ENSG00000140931_1 (sequence is synthesized)
ggttcccggatcccagacacgcgcacgggcaggaagttagaccggagacagcgagtatagacagcccttctggataggggcagacgggtgggagctccgaaggggtgccggggcggtgat

SEQ ID NO: 363835 - DNA, 120 bp, Artificial Sequence
  ENSG00000140931_2 (sequence is synthesized)
cgggaggtctccagcggcccgaaccagggtgaagaagaagcccgggtttccgcttccctccgggcgcgagaagaggggagccaggccgagccccggccctaccgccgccgccgccatgtg

SEQ ID NO: 363836 - DNA, 120 bp, Artificial Sequence
  ENSG00000140931_3 (sequence is synthesized)
cccgagcctgccggcggctcccgtcccggccccgcggtccccgggctccgcgccctgctgccggcgcgggctttcctctgctctctcaaaggccgcctcctgctggccgagtcgggtctc

SEQ ID NO: 363837 - DNA, 120 bp, Artificial Sequence
  ENSG00000140931_4 (sequence is synthesized)
ccgcctcctgctggccgagtcgggtctctcattcatcacttttatctgctatgtggcgtcctcagcatctgccttcctcacagcgcctctgctggagttcctgctggccttgtacttcct

SEQ ID NO: 363838 - DNA, 120 bp, Artificial Sequence
  ENSG00000140931_5 (sequence is synthesized)
ctttgctgatgccatgcagctgaatgacaagtggcagggcttgtgctggcccatgatggacttcctgcgctgtgtcaccgcggccctcatctactttgctatctccatcacggccatcgc

SEQ ID NO: 363839 - DNA, 120 bp, Artificial Sequence
  ENSG00000140931_6 (sequence is synthesized)
caagtactcggatggggcttccaaagccgctggggtgtttggcttctttgctaccatcgtgtttgcaactgatttctacctgatctttaacgacgtggccaaattcctcaaacaagggga

SEQ ID NO: 363840 - DNA, 120 bp, Artificial Sequence
  ENSG00000140931_7 (sequence is synthesized)
ctctgcagatgagaccacagcccacaagacagaagaagagaattccgactcggactctgactgaaggcctggcgggtgccttggcaacctgagccacacaggcctccacccctgcgcctc

SEQ ID NO: 363841 - DNA, 120 bp, Artificial Sequence
  ENSG00000140931_8 (sequence is synthesized)
ctcagctcagcactgttgaccacgctgcgtatgagggcatcttgggtatcccactccttctccccatttctgtcccacaggccttcagccctttaacgtctctgccaaaaaccagcacaa

SEQ ID NO: 363842 - DNA, 120 bp, Artificial Sequence
  ENSG00000140931_9 (sequence is synthesized)
ggagacaaagcagagccttgtctgtatctgggcagcaggtgttccatgctgctaggtggcgggggtcgggggtcttctgtttcactaacaggaacaaagacagaaaccatgacagggctg

SEQ ID NO: 363843 - DNA, 120 bp, Artificial Sequence
  ENSG00000140931_10 (sequence is synthesized)
ccccgccaggccccggtgggtttgtctgcacttggtgctcctgcccacaccagccactttggtgacaatgacccttccaagaatctttggttcaaggagcaccagttccctcttcattct

SEQ ID NO: 363844 - DNA, 120 bp, Artificial Sequence
  ENSG00000140931_11 (sequence is synthesized)
tgaagcagggagaaattgacctttgccttgtcgcccaggaagtggggctcggcacccataactaacacctcccacccttggaaaccatgtcttctgggggtgagatgaccattctgggtc

SEQ ID NO: 363845 - DNA, 120 bp, Artificial Sequence
  ENSG00000140931_12 (sequence is synthesized)
taagactgtttcaaagaagagctcatagactgactggtccagaagacagagggtacaacagtggcatcacagtgacagtgtcatggggagctgggcgggcccagccaaaccctccttctt

SEQ ID NO: 363846 - DNA, 120 bp, Artificial Sequence
  ENSG00000140931_13 (sequence is synthesized)
cctagagcccagccagcaggcaggagttcctggaccctcaggacagtgaacttccagacctcagggcaggtctatgggccactgcaggagatgagaccagccttctgtgttcacctaacg

SEQ ID NO: 363847 - DNA, 120 bp, Artificial Sequence
  ENSG00000140931_14 (sequence is synthesized)
atttatactgtgtatctgtctttgatggaattttgtaactttttatatttttttatgcaaaagcagcttcttaacagatggcattttctgtgactctaggcctcacaaaagagccagagt

SEQ ID NO: 363848 - DNA, 120 bp, Artificial Sequence
  ENSG00000140931_15 (sequence is synthesized)
tctggacccatgtttggagcatttgtagccttattctcttgcgtgtgaatctcttaccctgaaaaaaagccataatgaattaagccagactgaccacttgcttggagtgtgtgcttgaaa

SEQ ID NO: 363849 - DNA, 120 bp, Artificial Sequence
  ENSG00000140931_16 (sequence is synthesized)
aaaccagagcaatactgttgggtattgtatcaggcttcagtacaaactggtaacaccaatgtggatcctgacagctttcagttttagcaaaaatacacgtgaaatctgactaccatttaa

SEQ ID NO: 363850 - DNA, 120 bp, Artificial Sequence
  ENSG00000140931_17 (sequence is synthesized)
gtgtgtgtgtgtgtgtgagagagagagatgtgttggggtggggggactgcaggtcaggaagtcctgcagatgtgcgtgcctgtgtgtgtttgcgcgcgcgcgcgcgtgtgtgtgtgtctg

SEQ ID NO: 363851 - DNA, 120 bp, Artificial Sequence
  ENSG00000140931_18 (sequence is synthesized)
tctgtgtgtgtgcctggagctgcgcttgcaggtctgagagtcctctgagaatgggttgggggaggcgggtgcaggaccgaggcctggaacagccaacaaagaggccctggaggagggtgg

SEQ ID NO: 363852 - DNA, 80 bp, Artificial Sequence
  ENSG00000140931_19 (sequence is synthesized)
cggggactcgggcaactcggacctccgggactcccgggccgcagcggggtccgctttcctgcgagcgggtagtgcgggcc

SEQ ID NO: 363853 - DNA, 120 bp, Artificial Sequence
  ENSG00000140931_20 (sequence is synthesized)
ctcgggctgtttgtccaagcagatctgaaatgggccgtgaggctggggcagcagcctcccggagcagggagtcagccctgtgatgcatcccatccaccctgtccacaggtgtttggcttc

SEQ ID NO: 363854 - DNA, 120 bp, Artificial Sequence
  ENSG00000140931_21 (sequence is synthesized)
gatgagaccacagcccacaagacagaagccaggtgctggggccatggggatttgtgaatcccagaaaccgtccttctgctgaaaatgaatgccactcatcccatcccgtcccttggcaaa

SEQ ID NO: 363855 - DNA, 120 bp, Artificial Sequence
  ENSG00000140931_22 (sequence is synthesized)
tattaggttagagctcccaggcggtttcctcaggctctgcaacctgctcccagttgcccgcagcaagtgatcccagacaaccagcccagggaccaattagtaaacgtcagtggaaacttg

SEQ ID NO: 363856 - DNA, 120 bp, Artificial Sequence
  ENSG00000140932_0 (sequence is synthesized)
attcggtggtcctggcagttagctgagcacgccctctgagccgctcggtggacaccaggcactctagtaggcctggcctacccagaaacagcaggagagagaagaaacaggccagctgtg

SEQ ID NO: 363857 - DNA, 120 bp, Artificial Sequence
  ENSG00000140932_1 (sequence is synthesized)
agaagccaaggacaccgagtcagtcatggcacctaaggcggcaaagggggccaagccagagccagcaccagctccacctccacccggggccaaacccgaggaagacaagaaggacggtaa

SEQ ID NO: 363858 - DNA, 120 bp, Artificial Sequence
  ENSG00000140932_2 (sequence is synthesized)
ggagccatcggacaaacctcaaaaggcggtgcaggaccataaggagccatcggacaaacctcaaaaggcggtgcagcccaagcacgaagtgggcacgaggagggggtgtcgccgctaccg

SEQ ID NO: 363859 - DNA, 120 bp, Artificial Sequence
  ENSG00000140932_3 (sequence is synthesized)
gtgggaattaaaagacagcaataaagagttctggctcttggggcacgctgagatcaagattcggagtttgggctgcctaatagctgcaatgatactgttgtcctcactcaccgtgcaccc

SEQ ID NO: 363860 - DNA, 120 bp, Artificial Sequence
  ENSG00000140932_4 (sequence is synthesized)
ttcatcctgtggcccatttctgacctcttcaacgacctgattgcttgtgcgttccttgtgggagccgtggtctttgctgtgagaagtcggcgatccatgaatctccactacttacttgct

SEQ ID NO: 363861 - DNA, 120 bp, Artificial Sequence
  ENSG00000140932_5 (sequence is synthesized)
gtgatccttattggtgcggctggagtttttgcttttatcgatgtgtgtcttcaaagaaaccacttcagaggcaagaaggccaaaaagcatatgctggttcctcctccaggaaaggaaaaa

SEQ ID NO: 363862 - DNA, 120 bp, Artificial Sequence
  ENSG00000140932_6 (sequence is synthesized)
ggaccccagcagggcaagggaccagaacccgccaagccaccagaacctggcaagccaccagggccagcaaagggaaagaaatgacttggaggaggctcctggtgtctgaaacggcagtgt

SEQ ID NO: 363863 - DNA, 120 bp, Artificial Sequence
  ENSG00000140932_7 (sequence is synthesized)
attttacagcaatatgtttccactctcttccttgtcttctttctggaatggttttcttttccattttcattaccacctttgcttggaaaagaatggattaatggattctaaaagcctaaa

SEQ ID NO: 363864 - DNA, 120 bp, Artificial Sequence
  ENSG00000140937_0 (sequence is synthesized)
attccgcggccgccgccagctgaggggagcgtcgcgggccgaggagcagatgccgcgggggccgctcgcagccgccgctgacttgtgaatgggaccgggactggggccgggactgacacc

SEQ ID NO: 363865 - DNA, 120 bp, Artificial Sequence
  ENSG00000140937_1 (sequence is synthesized)
gcagcgcttgccctgcgccagggactggcggctcggaggttgcgtccaccctcaagggccccagaaatcactgtgttttcagctcagcggccctgtgacattccttcgtgttgtcatttg

SEQ ID NO: 363866 - DNA, 120 bp, Artificial Sequence
  ENSG00000140937_2 (sequence is synthesized)
ttgagtgaccaatcagatgggtggagtgtgttacagaaattggcagcaagtatccaatgggtgaagaagaagctaactggggacgtgggcagccctgacgtgatgagctcaaccagcaga

SEQ ID NO: 363867 - DNA, 120 bp, Artificial Sequence
  ENSG00000140937_3 (sequence is synthesized)
gacattccatcccaagagaggtctgcgtgacgcgtccgggaggccaccctcagcaagaccaccgtacagttggtggaaggggtgacagctgcattctcctgtgcctaccacgtaaccaaa

SEQ ID NO: 363868 - DNA, 120 bp, Artificial Sequence
  ENSG00000140937_4 (sequence is synthesized)
aatgaaggagaactactgtttacaagccgccctggtgtgcctgggcatgctgtgccacagccatgcctttgccccagagcggcgggggcacctgcggccctccttccatgggcaccatga

SEQ ID NO: 363869 - DNA, 120 bp, Artificial Sequence
  ENSG00000140937_5 (sequence is synthesized)
gaagggcaaggaggggcaggtgctacagcgctccaagcgtggctgggtctggaaccagttcttcgtgatagaggagtacaccgggcctgaccccgtgcttgtgggcaggcttcattcaga

SEQ ID NO: 363870 - DNA, 120 bp, Artificial Sequence
  ENSG00000140937_6 (sequence is synthesized)
tattgactctggtgatgggaacattaaatacattctctcaggggaaggagctggaaccatttttgtgattgatgacaaatcagggaacattcatgccaccaagacgttggatcgagaaga

SEQ ID NO: 363871 - DNA, 120 bp, Artificial Sequence
  ENSG00000140937_7 (sequence is synthesized)
gagagcccagtacacgttgatggctcaggcggtggacagggacaccaatcggccactggagccaccgtcggaattcattgtcaaggtccaggacattaatgacaaccctccggagttcct

SEQ ID NO: 363872 - DNA, 120 bp, Artificial Sequence
  ENSG00000140937_8 (sequence is synthesized)
gcacgagacctatcatgccaacgtgcctgagaggtccaatgtgggaacgtcagtaatccaggtgacagcttcagatgcagatgaccccacttatggaaatagcgccaagttagtgtacag

SEQ ID NO: 363873 - DNA, 120 bp, Artificial Sequence
  ENSG00000140937_9 (sequence is synthesized)
tatcctcgaaggacaaccctatttttcggtggaagcacagacaggtatcatcagaacagccctacccaacatggacagggaggccaaggaggagtaccacgtggtgatccaggccaagga

SEQ ID NO: 363874 - DNA, 120 bp, Artificial Sequence
  ENSG00000140937_10 (sequence is synthesized)
catgggtggacatatgggcggactctcagggacaaccaaagtgacgatcacactgaccgatgtcaatgacaacccaccaaagtttccgcagagcgtataccagatgtctgtgtcagaagc

SEQ ID NO: 363875 - DNA, 120 bp, Artificial Sequence
  ENSG00000140937_11 (sequence is synthesized)
agccgtccctggggaggaagtaggaagagtgaaagctaaagatccagacattggagaaaatggcttagtcacatacaatattgttgatggagatggtatggaatcgtttgaaatcacaac

SEQ ID NO: 363876 - DNA, 120 bp, Artificial Sequence
  ENSG00000140937_12 (sequence is synthesized)
ggactatgaaacacaggagggggtgataaagctgaaaaagcctgtagattttgaaaccaaaagagcctatagcttgaaggtagaggcagccaacgtgcacatcgacccgaagtttatcag

SEQ ID NO: 363877 - DNA, 120 bp, Artificial Sequence
  ENSG00000140937_13 (sequence is synthesized)
caatggccctttcaaggacactgtgaccgtcaagatctcagtagaagatgctgatgagccccctatgttcttggccccaagttacatccacgaagtccaagaaaatgcagctgctggcac

SEQ ID NO: 363878 - DNA, 120 bp, Artificial Sequence
  ENSG00000140937_14 (sequence is synthesized)
cgtggttgggagagtgcatgccaaagaccctgatgctgccaacagcccgataaggtattccatcgatcgtcacactgacctcgacagatttttcactattaatccagaggatggttttat

SEQ ID NO: 363879 - DNA, 120 bp, Artificial Sequence
  ENSG00000140937_15 (sequence is synthesized)
taaaactacaaaacctctggatagagaggaaacagcctggctcaacatcactgtctttgcagcagaaatccacaatcggcatcaggaagccaaagtcccagtggccattagggtccttga

SEQ ID NO: 363880 - DNA, 120 bp, Artificial Sequence
  ENSG00000140937_16 (sequence is synthesized)
tgtcaacgataatgctcccaagtttgctgccccttatgaaggtttcatctgtgagagtgatcagaccaagccactttccaaccagccaattgttacaattagtgcagatgacaaggatga

SEQ ID NO: 363881 - DNA, 120 bp, Artificial Sequence
  ENSG00000140937_17 (sequence is synthesized)
cacggccaatggaccaagatttatcttcagcctaccccctgaaatcattcacaatccaaatttcacagtcagagacaaccgagataacacagcaggcgtgtacgcccggcgtggagggtt

SEQ ID NO: 363882 - DNA, 120 bp, Artificial Sequence
  ENSG00000140937_18 (sequence is synthesized)
cagtcggcagaagcaggacttgtaccttctgcccatagtgatcagcgatggcggcatcccgcccatgagtagcaccaacaccctcaccatcaaagtctgcgggtgcgacgtgaacggggc

SEQ ID NO: 363883 - DNA, 120 bp, Artificial Sequence
  ENSG00000140937_19 (sequence is synthesized)
actgctctcctgcaacgcagaggcctacattctgaacgccggcctgagcacaggcgccctgatcgccatcctcgcctgcatcgtcattctcctggtcattgtagtattgtttgtgaccct

SEQ ID NO: 363884 - DNA, 120 bp, Artificial Sequence
  ENSG00000140937_20 (sequence is synthesized)
gagaaggcaaaagaaagaaccactcattgtctttgaggaagaagatgtccgtgagaacatcattacttatgatgatgaagggggtggggaagaagacacagaagcctttgatattgccac

SEQ ID NO: 363885 - DNA, 120 bp, Artificial Sequence
  ENSG00000140937_21 (sequence is synthesized)
cctccagaatcctgatggtatcaatggatttatcccccgcaaagacatcaaacctgagtatcagtacatgcctagacctgggctccggccagcgcccaacagcgtggatgtcgatgactt

SEQ ID NO: 363886 - DNA, 120 bp, Artificial Sequence
  ENSG00000140937_22 (sequence is synthesized)
catcaacacgagaatacaggaggcagacaatgaccccacggctcctccttatgactccattcaaatctacggttatgaaggcaggggctcagtggccgggtccctgagctccctagagtc

SEQ ID NO: 363887 - DNA, 120 bp, Artificial Sequence
  ENSG00000140937_23 (sequence is synthesized)
ggccaccacagattcagacttggactatgattatctacagaactggggacctcgttttaagaaactagcagatttgtatggttccaaagacacttttgatgacgattcttaacaataacg

SEQ ID NO: 363888 - DNA, 120 bp, Artificial Sequence
  ENSG00000140937_24 (sequence is synthesized)
atacaaatttggccttaagaactgtgtctggcgttctcaagaatctagaagatgtgtaaacaggtatttttttaaatcaaggaaaggctcatttaaaacaggcaaagttttacagagagg

SEQ ID NO: 363889 - DNA, 120 bp, Artificial Sequence
  ENSG00000140937_25 (sequence is synthesized)
atacatttaataaaactgcgaggacatcaaagtggtaaatactgtgaaataccttttctcacaaaaaggcaaatattgaagttgtttatcaacttcgctagaaaaaaaaaacacttggca

SEQ ID NO: 363890 - DNA, 120 bp, Artificial Sequence
  ENSG00000140937_26 (sequence is synthesized)
tacaaaatatttaagtgaaggagaagtctaacgctgaactgacaatgaagggaaattgtttatgtgttatgaacatccaagtctttcttcttttttaagttgtcaaagaagcttccacaa

SEQ ID NO: 363891 - DNA, 120 bp, Artificial Sequence
  ENSG00000140937_27 (sequence is synthesized)
aattagaaaggacaacagttctgagctgtaatttcgccttaaactctggacactctatatgtagtgcatttttaaacttgaaatatataatattcagccagcttaaacccatacaatgta

SEQ ID NO: 363892 - DNA, 120 bp, Artificial Sequence
  ENSG00000140937_28 (sequence is synthesized)
tacaatacaatgtacaattatgtctcttgagcatcaatcttgttactgctgattcttgtaaatctttttgcttctactttcatcttaaactaatacgtgccagatataactgtcttgttt

SEQ ID NO: 363893 - DNA, 120 bp, Artificial Sequence
  ENSG00000140937_29 (sequence is synthesized)
cagtgagagacgccctatttctatgtcatttttaatgtatctatttgtacaattttaaagttcttattttagtatacgtataaatatcagtattctgacatgtaagaaaatgttacggca

SEQ ID NO: 363894 - DNA, 120 bp, Artificial Sequence
  ENSG00000140937_30 (sequence is synthesized)
tcacacttatattttatgaacattgtactgttgctttaatatgagcttcaatataagaagcaatctttgaaataaaaaaagatttttttttaattctgggtttgattcttaacattgaaa

SEQ ID NO: 363895 - DNA, 120 bp, Artificial Sequence
  ENSG00000140937_31 (sequence is synthesized)
caaacgttaagtatttctaatgatccatttatatttctaatttaattgtgatcttttaataaccctatttatgatctgttgttgtctgtctgctgcttttattgtttatttaaaatcaaa

SEQ ID NO: 363896 - DNA, 120 bp, Artificial Sequence
  ENSG00000140937_32 (sequence is synthesized)
tatgttttacaaatgttttttcagacaagattctgtaacatcatgtaaagcttttttgtacattcttggtgttaacctcctggcttctcttcacacacatcttctaaaaaagaaggatgt

SEQ ID NO: 363897 - DNA, 120 bp, Artificial Sequence
  ENSG00000140937_33 (sequence is synthesized)
gaaagaactaggtcagtctatgactttgcaatatgtgttatatagtatgcatttatcttgtatatcagtaatttgatggttatgagagatgaatccatgagggaatggagctatcagaac

SEQ ID NO: 363898 - DNA, 120 bp, Artificial Sequence
  ENSG00000140937_34 (sequence is synthesized)
tctaatgttccaggtatacattctatgccccacactgagcactggggaactgggggactagagtcaaaaatataaatttgcccagactctaatgttattctattttttcttctgttgaac

SEQ ID NO: 363899 - DNA, 120 bp, Artificial Sequence
  ENSG00000140937_35 (sequence is synthesized)
ttaccaggctattgtaagactcttgatagttgaaactgcttatttttcctcctgtaattttaactaattgtaaaatgatgtggcattttatgttttaatgagaatgggcgattcatttaa

SEQ ID NO: 363900 - DNA, 120 bp, Artificial Sequence
  ENSG00000140937_36 (sequence is synthesized)
aaaagctttgtttagaatatgcttggggccgtaagctcagaatgagggcagggaccattttggattctgagagtcgatgccatttggtccaggagtgtgtctacagtcccctgcattcca

SEQ ID NO: 363901 - DNA, 120 bp, Artificial Sequence
  ENSG00000140937_37 (sequence is synthesized)
gctagtttcttggggattgaaacttatgtgaagggcatttcacctgttcagttgggccaaaggtcaaaacgtagcaatacttggggaaagaccacataaagtcacactgcaagtgctttc

SEQ ID NO: 363902 - DNA, 120 bp, Artificial Sequence
  ENSG00000140937_38 (sequence is synthesized)
cctctttccccctacacacagggcacgtgctttttcttggattgcagacaatttttacagtttttttctgactttattgtgaaagtttgtttcaagcatttcttgatatcatgttatgta

SEQ ID NO: 363903 - DNA, 120 bp, Artificial Sequence
  ENSG00000140937_39 (sequence is synthesized)
ctatttttatgatttagtcaacatgcatacaaagaaatgttttttatgaagtgctcacttccattttactttgcattgaaatcaaattgggctgaacacttcaatggaatacattttgtg

SEQ ID NO: 363904 - DNA, 120 bp, Artificial Sequence
  ENSG00000140937_40 (sequence is synthesized)
gacaatgtcactttagaatctttcatctcagtgaaggattacacattctcaatacttccataattgcaggttgtgttcatttttttatatagtttttgtaatccaaagaatattttgcta

SEQ ID NO: 363905 - DNA, 120 bp, Artificial Sequence
  ENSG00000140937_41 (sequence is synthesized)
gatttgcacagatctccaattgaatttgcaatgaagaaataactcaaaaggaatatgaatagcatttaaataagtatacagctgtaagtaaccctgtcaccatggatgatccttttctct

SEQ ID NO: 363906 - DNA, 120 bp, Artificial Sequence
  ENSG00000140937_42 (sequence is synthesized)
aggaatgtatttggattagagatgacaactacattttcgcatttttatgttgaagtcttttttaaaaaggctgtttacttttcagtagttaagaatacttgtttttctttttcttttttt

SEQ ID NO: 363907 - DNA, 120 bp, Artificial Sequence
  ENSG00000140937_43 (sequence is synthesized)
tttttttttttaccttttattttttcgttaagcctctattgtttgtagaacactcttagaaacttggaaataaaatgtctttcccaactagtggagtcctttttcatttggagcacattg

SEQ ID NO: 363908 - DNA, 120 bp, Artificial Sequence
  ENSG00000140937_44 (sequence is synthesized)
ccttaaaagaagtcttaatttaaacggtccttccttattctaaagtaatcactgttttataccatctatgcagctaaaagaaggaacatgcttctgttcttttcctcaagtaatggttat

SEQ ID NO: 363909 - DNA, 120 bp, Artificial Sequence
  ENSG00000140937_45 (sequence is synthesized)
tgtttctagtcatcattcattcattgattcattcattaattcatcaaaatcttattttataaaccctgttccacttactggaggattcagaatgaatcttactaccttttctgacatctt

SEQ ID NO: 363910 - DNA, 120 bp, Artificial Sequence
  ENSG00000140937_46 (sequence is synthesized)
ttgataattcagccctgtaccaaagtatccaccttgttgtcttataatcacctatttacctatttgccctcctagaaaatgcaagaagatattttctctccttccaaattgaaggaagaa

SEQ ID NO: 363911 - DNA, 120 bp, Artificial Sequence
  ENSG00000140937_47 (sequence is synthesized)
cataaaagatataacaggaaggagatggtgagatatagagtgtgagcggaaattaggccagctgtggcaattctggacagatcttgggtttagctaagttatttcttttaggcctgggtt

SEQ ID NO: 363912 - DNA, 120 bp, Artificial Sequence
  ENSG00000140937_48 (sequence is synthesized)
tctgggggtgacagggaagataaaagagtagtttatttgcacctcttggagaattgcttaaaaatatagagatcatggctctgtatgtcaggtggaaccaggtcaggagtatttgaaact

SEQ ID NO: 363913 - DNA, 120 bp, Artificial Sequence
  ENSG00000140937_49 (sequence is synthesized)
gctcctgggtcattgtgacatatccttcacatctttttgagaaactttataagacaatgggggtgaatgggggctgggcagttggagtctctgagcagaagaggggcaaaatttatttgg

SEQ ID NO: 363914 - DNA, 120 bp, Artificial Sequence
  ENSG00000140937_50 (sequence is synthesized)
caggcagtgtggaggacagattaggagcatataaacccagaggtgtgccccaggagggcttttgcaaaggtcaatatgagatagaatgagggcctgaaataattcagtaatttggagatg

SEQ ID NO: 363915 - DNA, 120 bp, Artificial Sequence
  ENSG00000140937_51 (sequence is synthesized)
gagaagaggaaagacttctctgctcttgcactgccatcagcctggtctgggccatggtcatctctgacccggaagactgaccccacctcttggctcaccctctgcctcccaacctcctct

SEQ ID NO: 363916 - DNA, 120 bp, Artificial Sequence
  ENSG00000140937_52 (sequence is synthesized)
tcacaaagaagccagagggatacttttaacacacaacccagatcacatgacttcgtaacttaaacctcttcactggcttcccaaagacttaaaatgaattctgatgcctttattttattg

SEQ ID NO: 363917 - DNA, 120 bp, Artificial Sequence
  ENSG00000140937_53 (sequence is synthesized)
ctttacatgaacagggccctgcgaacctctccagtgtcattccactccatcctcctttcagtgcacgatgctccagccacactggccatctttcggttcctgatacaaaaaaaaacacgt

SEQ ID NO: 363918 - DNA, 120 bp, Artificial Sequence
  ENSG00000140937_54 (sequence is synthesized)
tccttttccatggaaagcaggtcacccttgttattttgtatcgatgacaactctttaaacttattttgctttttggctttatgtatgtgtgtgggtgggtgggactgactgccccactag

SEQ ID NO: 363919 - DNA, 120 bp, Artificial Sequence
  ENSG00000140937_55 (sequence is synthesized)
aatgtaagctccatgagggcagggaatcttgctttcttgtttaccattgtatactcagttctttacacagtgcctgaaacataacaggtacacaataaatatctattgaatgaaagcaaa

SEQ ID NO: 363920 - DNA, 120 bp, Artificial Sequence
  ENSG00000140937_56 (sequence is synthesized)
tagcaagggcctgttcctcatagatgatgccttctgagtgtcctcagttgacagaagagatggaaggggtgaaaacaggtgtatttcctcctttaagtcccttgataagggcattaatcc

SEQ ID NO: 363921 - DNA, 120 bp, Artificial Sequence
  ENSG00000140937_57 (sequence is synthesized)
tattcttttatagtcctctgtttgtagtcagtatcatcgtgtctccttctgggaggagatcatgaaaccatgttaaagaagcacagagaggggtacaaaggagaggctgagactaagaca

SEQ ID NO: 363922 - DNA, 120 bp, Artificial Sequence
  ENSG00000140937_58 (sequence is synthesized)
tcagatggctatggtatcccaagtaacttatttgttctcaattcgcatcttggagaaagcacctcatcaccctcttgggggcatctccatgttcaaggcatgggtacccttagagttcca

SEQ ID NO: 363923 - DNA, 90 bp, Artificial Sequence
  ENSG00000140937_59 (sequence is synthesized)
gtatagttgaaggcgaggaggagcaagtcatatcttacgtggatggcagcaggaaaagagagagagcttgtgcagggaaactccccttta

SEQ ID NO: 363924 - DNA, 120 bp, Artificial Sequence
  ENSG00000140937_60 (sequence is synthesized)
ctattcctgctttactgaggtatcaaaaagaaaatctagaaaactaagggcaattcatatcattcttacaaaaacaaaacacaaaaacaagacaacaacaacaacaacaatgtcggggag

SEQ ID NO: 363925 - DNA, 120 bp, Artificial Sequence
  ENSG00000140937_61 (sequence is synthesized)
tagaggtagtaggagaatgaaaagatgtaaaaagttctacaaccctggaaacaaaatatcgtttttgctaagtattttgcttggtagtagtgatgcaatctagtaattaattaacccttt

SEQ ID NO: 363926 - DNA, 120 bp, Artificial Sequence
  ENSG00000140937_62 (sequence is synthesized)
tctgcctcagtgtcctcatttctaacctggatataacagtccctgaatcagttatcaattactgtgtaacaaattgctggaaaacttagtggtttaaaacaataaaaataataacaataa

SEQ ID NO: 363927 - DNA, 120 bp, Artificial Sequence
  ENSG00000140937_63 (sequence is synthesized)
accatttaccaaaggatgcctctagagcaggaagctttgagaagacctggggagcctggaacttctaagtctaaacaaggaactgactcagcagggtctggctatcttcagagtctgagg

SEQ ID NO: 363928 - DNA, 120 bp, Artificial Sequence
  ENSG00000140937_64 (sequence is synthesized)
ctcatatctctctggattggaacccgcaggaagcagaaggggctgtttaatcctggctccagagcaaccgtgaaggctggcttcctcccttgaagaagaacaaggtgaaggaaagaaatc

SEQ ID NO: 363929 - DNA, 120 bp, Artificial Sequence
  ENSG00000140937_65 (sequence is synthesized)
ctcagcaggcagcaggaaaatagaacactggatgattcttcaacatttaagtccatcttgggctgttaatatcaggaatggtgctatttgggcagatgaagagcatgtctgcccaggttt

SEQ ID NO: 363930 - DNA, 120 bp, Artificial Sequence
  ENSG00000140937_66 (sequence is synthesized)
gctggcagtgccagggatcaggagccgcctctccgtctgtccagaacaaagctgggctgagccctctcacggtcctgtggcccttggtctccccacatgaggtgtcccgagattgaagag

SEQ ID NO: 363931 - DNA, 120 bp, Artificial Sequence
  ENSG00000140937_67 (sequence is synthesized)
agaaggtgcctcctggcattgccaaggctggaatctgcctgtcaaggaagtccctcggcggctagctgctgcaccatgaccttcgtgatggtggagtgagtaggcactggaatcaataag

SEQ ID NO: 363932 - DNA, 120 bp, Artificial Sequence
  ENSG00000140937_68 (sequence is synthesized)
aaaactcgagtacctctgagggaaagccggaccccttgtccatcctctcctgttggaggaatgaggagttcaaaggccacgtccacacagagggtgacagaggcatcctctccgcgcagg

SEQ ID NO: 363933 - DNA, 120 bp, Artificial Sequence
  ENSG00000140937_69 (sequence is synthesized)
acgcggactgggggcaggcacgcagcgccacccggatcctggagtcgtcaagaaaaacgcgggcgcgcaggccgaagaggaaatcactgtgttttcagctcagcggccctgtgacattcc

SEQ ID NO: 363934 - DNA, 120 bp, Artificial Sequence
  ENSG00000140937_70 (sequence is synthesized)
agactccatctgagccctgagggagtcggagcgccgcgccacggggcgggaggggcggccacgaatccagggaaatcactgtgttttcagctcagcggccctgtgacattccttcgtgtt

SEQ ID NO: 363935 - DNA, 120 bp, Artificial Sequence
  ENSG00000140937_71 (sequence is synthesized)
ctggaaccttgcctgtgaatgcctgtgacttatgaagtggtaacttatgaagttggtaaactttgatctcttatattcaaatctgttttcagaaccatctaaacaagatcttcaaatctg

SEQ ID NO: 363936 - DNA, 120 bp, Artificial Sequence
  ENSG00000140937_72 (sequence is synthesized)
attttagtcttccttcattctcaatacatgtatgtaggtagatgttggagaaacataacaatttcattggaatttactttcaatattgatgttttcactttgatgacaggcatacttact

SEQ ID NO: 363937 - DNA, 120 bp, Artificial Sequence
  ENSG00000140937_73 (sequence is synthesized)
tttatggtggcagcacaatgggcctttcagggctcagggaaagagctgtgagatcctgctccccggcttttcaaggcctctagtctttttatcaggcctggacaatgccggattcagcgg

SEQ ID NO: 363938 - DNA, 120 bp, Artificial Sequence
  ENSG00000140937_74 (sequence is synthesized)
caagaaacagggaggcgacggttaagaaatgagaatttgcgaaaccaggggctgacctgactttgtagttgagctctgagctctggaagatcacagaattgtattcctttctgttactgc

SEQ ID NO: 363939 - DNA, 120 bp, Artificial Sequence
  ENSG00000140937_75 (sequence is synthesized)
agagaagctgacaaaggggctggtgatacctgcctgagattgctagttagttcttaaatgttttccgatggagggaagcacagttctcccatggagggaaggacaatgagataaatctag

SEQ ID NO: 363940 - DNA, 120 bp, Artificial Sequence
  ENSG00000140937_76 (sequence is synthesized)
attttgaagaagcagccctgagcatgcatggaattccccccttagctctgccacactgaatctgttagataagctgttcagaactcttactgtttcaacattcaagattcactgcattgc

SEQ ID NO: 363941 - DNA, 120 bp, Artificial Sequence
  ENSG00000140937_77 (sequence is synthesized)
tggaccctctgtgaaactgaagccttctctacttgtttttatctcaagtgaacctggagaagcaacaataatggaccttctcccctagtcaaagagcctgtggacctcccctcatagtca

SEQ ID NO: 363942 - DNA, 120 bp, Artificial Sequence
  ENSG00000140937_78 (sequence is synthesized)
gtctccaaaaacatgtatctggaattaatttattacaaagagaagtttagtgtttcttcttttttacatgcgctcaatactgactactggccagacacagcaccatcctcttacaaacat

SEQ ID NO: 363943 - DNA, 120 bp, Artificial Sequence
  ENSG00000140937_79 (sequence is synthesized)
catttcatttacttttcacaaaaacaaacaaaagtatgaagtaggtagtgttatcccaatgggcaaagagacctcaacttaattttgaggagattggggctcagacagatgaaatcattt

SEQ ID NO: 363944 - DNA, 120 bp, Artificial Sequence
  ENSG00000140937_80 (sequence is synthesized)
gacccagtcactgtcatatagctcaggcatgccgacctggaattcacaccttagttattctagaacaacttccctctcaagacattttgaaaacagctggcctggaaagcgtttgtaaag

SEQ ID NO: 363945 - DNA, 120 bp, Artificial Sequence
  ENSG00000140937_81 (sequence is synthesized)
aagagccagataagattcacttccaagtgaagaaataattcccgtacattctaaaaaggtttccccccgtgatttaccacttgagaaatcaacacctctccatcatgaaagtgtatggag

SEQ ID NO: 363946 - DNA, 120 bp, Artificial Sequence
  ENSG00000140937_82 (sequence is synthesized)
cattaaatcggaattggaagatgggattaccttggttttaatcaagcgttcattttcaacttagttttatagcatgaatattaaactccttggtgcgatggaaaagactggactctaaca

SEQ ID NO: 363947 - DNA, 120 bp, Artificial Sequence
  ENSG00000140937_83 (sequence is synthesized)
ctgatagaaaattaatttgaagcatcaataaagaggccagtagctaaagaggagggaaggaccagtgggggaagacaggtcctgaaaggaatctttcaggtgggggagcaaggagtgacc

SEQ ID NO: 363948 - DNA, 120 bp, Artificial Sequence
  ENSG00000140937_84 (sequence is synthesized)
tgtgctaagaaactgacctttcacagacttttaaagtatgttggggttggggaaaatattatagagcacaaaacaaagaaaaggtagggggtgattgttataaaaaaagaaagaaaatga

SEQ ID NO: 363949 - DNA, 120 bp, Artificial Sequence
  ENSG00000140937_85 (sequence is synthesized)
aggatatggaaattggggtgaaatttggatacttggaaaagtctacattaatggatgaatggtaggaccgaggaagcctaattatcaaccacagggagctagggcagtcactaattctgg

SEQ ID NO: 363950 - DNA, 120 bp, Artificial Sequence
  ENSG00000140937_86 (sequence is synthesized)
tttctcctctggaaaagtagctgtgtgaattgtgtgttgcctagagctgtcaacttacttcgttaattaatattactatctcttctgcttgacactgacatatgaacattgacatcagca

SEQ ID NO: 363951 - DNA, 120 bp, Artificial Sequence
  ENSG00000140937_87 (sequence is synthesized)
agttggttatgctaaggttgtcacctgtttttagtgtattcagggcataaacacacactgtatctctgaaatcctgaaacatttaaatcacccccatggaactcacacgtcgcaaatgag

SEQ ID NO: 363952 - DNA, 120 bp, Artificial Sequence
  ENSG00000140937_88 (sequence is synthesized)
ctctctgcatatgattaatttgcacatttgcctccaattcagtgtgtttattctaggcaaaggaataatcttctataaagcactgatgcttaggttttaaatagtgtaagatgttattgc

SEQ ID NO: 363953 - DNA, 120 bp, Artificial Sequence
  ENSG00000140937_89 (sequence is synthesized)
atttgtaaaagaacatttgctcaaacttctagcacaaagttccaaatgtccaccgggggaaaaaaaagaaaaattatagatgaatttaacagagtaaaaatatgactccttgtgaaagtc

SEQ ID NO: 363954 - DNA, 120 bp, Artificial Sequence
  ENSG00000140937_90 (sequence is synthesized)
attccatgcaatttaatactgtaaaagtctatagagacattatggcaatatttctgcattttaaagtattttttaacttagtgtttttatttatttcctaatttattcacccatttttcc

SEQ ID NO: 363955 - DNA, 120 bp, Artificial Sequence
  ENSG00000140937_91 (sequence is synthesized)
accaagagttattgagttcttactatttgtcaggcaggccctttgccagaggctggaaatctaaagttgaagaggcagagtcttgaccacagggagttcacaatttaacaggacagtgaa

SEQ ID NO: 363956 - DNA, 120 bp, Artificial Sequence
  ENSG00000140937_92 (sequence is synthesized)
gtgatacaataattaaaaccgagagggttttctcagccttagcagtgttgatgtctagggctggataattctttgttgtaggaggctgttctgcgcattgtaggatatttggtagtatct

SEQ ID NO: 363957 - DNA, 120 bp, Artificial Sequence
  ENSG00000140937_93 (sequence is synthesized)
agtatcccaggcttcccctcactaaaggtcattaagcacgtgctctaccccacccaacagtcctgataataataataaaaataattactctagacattgcctaatagccctggagtaact

SEQ ID NO: 363958 - DNA, 120 bp, Artificial Sequence
  ENSG00000140937_94 (sequence is synthesized)
gggagcaaaatcactccccagttgaaaattgactgcaatagtgtgataaggcctatgcacatgggacatgaatgacttcttgtgggggcagttctcaagctgagtcttgatagatgagga

SEQ ID NO: 363959 - DNA, 120 bp, Artificial Sequence
  ENSG00000140937_95 (sequence is synthesized)
gaaatttgctggatagttaaggacagaaaaggcagaaaaaataactcatgatgggctagtatcaatggaaacaggacacatttaagaaactgcaataccttcaatcttgagaatcttaag

SEQ ID NO: 363960 - DNA, 120 bp, Artificial Sequence
  ENSG00000140937_96 (sequence is synthesized)
atatatacggtaaaaccaacaaacaaacttgttaaaattcaagggagatgttacaaagaattgaagaaggtagaagaggtagtgagatagtagtgaaggagaagaattcaagaaataatt

SEQ ID NO: 363961 - DNA, 120 bp, Artificial Sequence
  ENSG00000140937_97 (sequence is synthesized)
actagatagaatcattcatttattgaatattttagaaaacaataaatacctcttgagttctgactgtgtcttagtttaatagtgcacaggaaagagagaaactacccttggggtatttgg

SEQ ID NO: 363962 - DNA, 120 bp, Artificial Sequence
  ENSG00000140937_98 (sequence is synthesized)
acaatctctgtgtggttagctgaggaagaaccagggtcaaataaagatgaggttttaggtggcttcgtggacttagaggggaaaatccaatctgttcacgcagcacctttgactaaatgg

SEQ ID NO: 363963 - DNA, 120 bp, Artificial Sequence
  ENSG00000140937_99 (sequence is synthesized)
gaatcccatctatctcagagaaatcaccgcacagtgtctgagctatttattttcaaccagataaactccttgaaaagcagtgtcagagcagaattataaggcatttttaatattccctgt

SEQ ID NO: 363964 - DNA, 120 bp, Artificial Sequence
  ENSG00000140937_100 (sequence is synthesized)
tttaataaaactctttttatgtttgatttttctttatattctttgtccgcacgtatatagatgtggatacataacatttaacacggttgcaatcagagggtgatctgatttgttaactta

SEQ ID NO: 363965 - DNA, 120 bp, Artificial Sequence
  ENSG00000140937_101 (sequence is synthesized)
atgtcacatcataaacattttacatgctgttatataatgtacataatcatttttaatgactacataacatcccatcctattgacgaatcattatgtccttaataaaatctcacagttgga

SEQ ID NO: 363966 - DNA, 120 bp, Artificial Sequence
  ENSG00000140937_102 (sequence is synthesized)
ttatctgggcttccagctgatgctattttcctatgttaaagtaaacagaagattttgtcttctgggggtctttataaaacttcctttcctctatgtggtggctacagagagtccaaccac

SEQ ID NO: 363967 - DNA, 120 bp, Artificial Sequence
  ENSG00000140937_103 (sequence is synthesized)
ctattaccatcaccatgcctcattagagtggggactttcggcggtggcttgggaagtacccaaagttttaggggttacagcagaggccaaaaaggcagacagaggaagcagggtagagct

SEQ ID NO: 363968 - DNA, 120 bp, Artificial Sequence
  ENSG00000140937_104 (sequence is synthesized)
ctgaaaaggttcagggccagggacccacagggggaggcaggagtggcaggcaccacgatctgctctctggcgctctacaggaaagcaccgggagtcaatgtcctcgcgcgtcccttgcgc

SEQ ID NO: 363969 - DNA, 120 bp, Artificial Sequence
  ENSG00000140939_0 (sequence is synthesized)
gccgcagctgctgcacccacccccaccctgcccggccctttctgcaccgtcatctcctgccccgccgaggcttgacccccccgacaatgggcaacgcgcaggagcggccgtcagagacta

SEQ ID NO: 363970 - DNA, 120 bp, Artificial Sequence
  ENSG00000140939_1 (sequence is synthesized)
tcgaccgcgagcggaaacgcctggtcgagacgctgcaggcggactcgggactgctgttggacgcgctgctggcgcggggcgtgctcaccgggccagagtacgaggcattggatgcactgc

SEQ ID NO: 363971 - DNA, 120 bp, Artificial Sequence
  ENSG00000140939_2 (sequence is synthesized)
ctgatgccgagcgcagggtgcgccgcctactgctgctggtgcagggcaagggcgaggccgcctgccaggagctgctacgctgtgcccagcgtaccgcgggcgcgccggaccccgcttggg

SEQ ID NO: 363972 - DNA, 120 bp, Artificial Sequence
  ENSG00000140939_3 (sequence is synthesized)
actggcagcacgtgggtccgggctaccgggaccgcagctatgaccctccatgcccaggccactggacgccggaggcacccggctcggggaccacatgccccgggttgcccagagcttcag

SEQ ID NO: 363973 - DNA, 120 bp, Artificial Sequence
  ENSG00000140939_4 (sequence is synthesized)
accctgacgaggccgggggccctgagggctccgaggcggtgcaatccgggaccccggaggagccagagccagagctggaagctgaggcctctaaagaggctgaaccggagccggagccag

SEQ ID NO: 363974 - DNA, 120 bp, Artificial Sequence
  ENSG00000140939_5 (sequence is synthesized)
cccgacttcgaggaaagggacgagtccgaagattcctgaaggccagagctctgacaggcggtgccccgcccatgctggataggacctgggatgctgctggagctgaatcggatgccacca

SEQ ID NO: 363975 - DNA, 120 bp, Artificial Sequence
  ENSG00000140939_6 (sequence is synthesized)
aggctcggtccagcccagtaccgctggaagtgaataaactccggagggtcggacgggacctgggctctctccacgattctggctgtttgcccaggaacttagggtgggtacctctgagtc

SEQ ID NO: 363976 - DNA, 120 bp, Artificial Sequence
  ENSG00000140939_7 (sequence is synthesized)
ccagggacctgggcaggcccaagcccaccacgagcatcatccagtcctcagccctaatctgcccttaggagtccaggctgcaccctggagatcccaaacctagccccctagtgggacaag

SEQ ID NO: 363977 - DNA, 120 bp, Artificial Sequence
  ENSG00000140939_8 (sequence is synthesized)
gacctgaccctcctgcccgcatacacaacccatttcccctggtgagccacttggcagcatatgtaggtaccagctcaaccccacgcaagttcctgagctgaacatggagcaaggggaggg

SEQ ID NO: 363978 - DNA, 120 bp, Artificial Sequence
  ENSG00000140939_9 (sequence is synthesized)
tgacttctctccacatagggagggcttagagctcacagccttgggaagtgagactagaagaggggagcagaaagggaccttgagtagacaaaggccacacacatcattgtcattactgtt

SEQ ID NO: 363979 - DNA, 120 bp, Artificial Sequence
  ENSG00000140939_10 (sequence is synthesized)
ttaattgtctggcttctctctggactgggagctcagtgaggattctgaccagtgacttacacaaaaggcgctctatacatattataatatattcgcttactaaatgaataaggactttcc

SEQ ID NO: 363980 - DNA, 120 bp, Artificial Sequence
  ENSG00000140939_11 (sequence is synthesized)
gcaccgtcatctcctgccccgccgaggcttgacccgtgctgtccccctctcccttcctttgcccaccgattggagggacactctggaaaactcagttgaagaaagcggagagtctgcgtg

SEQ ID NO: 363981 - DNA, 120 bp, Artificial Sequence
  ENSG00000140939_12 (sequence is synthesized)
tacacagtgcaatgatgtcagttaatgcactagtgagggcatgtgttgttcacggtacacagaagaaggaaccaccagcccttgggacacttaggcattggtgtagacaagggaacattt

SEQ ID NO: 363982 - DNA, 120 bp, Artificial Sequence
  ENSG00000140939_13 (sequence is synthesized)
gagtcctggacgatggataggtccacggagcggagggaggagaaaaggattccagtcttagcgatcagcatcagcaaaggctccgaggtgccagaggcataagagtagatgccagtcctg

SEQ ID NO: 363983 - DNA, 120 bp, Artificial Sequence
  ENSG00000140939_14 (sequence is synthesized)
ggaaaggcaggggaggagaggagagccacggctgacgcttggggacagaaggaggagcctgaggaggagacaggacagagcgtctggagaggcaggaggacaccgagttccccgtgttgg

SEQ ID NO: 363984 - DNA, 120 bp, Artificial Sequence
  ENSG00000140939_15 (sequence is synthesized)
agagctggaacccgaggctgaagcagaaccagagccggaactggagccagaaccggacccagagcccgagcccgacttcgaggaaagggacgagtccgaaggtattcctgaaggccagag

SEQ ID NO: 363985 - DNA, 120 bp, Artificial Sequence
  ENSG00000140939_16 (sequence is synthesized)
atagttcagttcctcatagttcaggctggagcaagtaagattccagttttaccactgaatctctgagcctgtctcctcatctgtaaaatgggaacagcaatcctagcccagagggttgtc

SEQ ID NO: 363986 - DNA, 120 bp, Artificial Sequence
  ENSG00000140939_17 (sequence is synthesized)
aaagtcactgtgctatcgggcctggcagaatgggagtgagaggggctcagagggactgttacaggacatgaggtgacgatggtggggtggcaaggcaggagctgatggagactcactgag

SEQ ID NO: 363987 - DNA, 120 bp, Artificial Sequence
  ENSG00000140939_18 (sequence is synthesized)
agattcatcacatacgggacataaagggagatggaggggcagggggtagtcctggtctcggcctggtggggaagggcttcaatgggaggaagccagggtgtgaagtgacgggggaggatt

SEQ ID NO: 363988 - DNA, 87 bp, Artificial Sequence
  ENSG00000140939_19 (sequence is synthesized)
aatgggaggaagccagggtgtgaagtgacgggggaggattgcttgaggccagcagttcgagaccagcctgatcaatatagcaagacc

SEQ ID NO: 363989 - DNA, 70 bp, Artificial Sequence
  ENSG00000140939_20 (sequence is synthesized)
taaataaatacaaaaaatatatatagcaagaccccacctctaaaaaaaaaaaaaaaaaaaaaggctgggc

SEQ ID NO: 363990 - DNA, 120 bp, Artificial Sequence
  ENSG00000140939_21 (sequence is synthesized)
agccagaccagatattttgggttgtctctgatgggcagtggggtgtgggggggaggtagataggtatttaggatggaattctgctagacaggaaaatatagttcagttcctcatagttca

SEQ ID NO: 363991 - DNA, 120 bp, Artificial Sequence
  ENSG00000140939_22 (sequence is synthesized)
cggatttgccgggggtggagctcaggacgtcctggttggggagggcattcagagagtagatgccagtcctgggaaaggcaggggaggagaggagagccacggctgacgcttggggacaga

SEQ ID NO: 363992 - DNA, 120 bp, Artificial Sequence
  ENSG00000140941_0 (sequence is synthesized)
agagtcggattcgccgccgcagcagccgccgcccccgggagccgccgggaccctcgcgtcgtcgccgccgccgccgcccagatccctgcaccatgccgtcggagaagaccttcaagcagc

SEQ ID NO: 363993 - DNA, 120 bp, Artificial Sequence
  ENSG00000140941_1 (sequence is synthesized)
gccgcaccttcgaacaaagagtagaagatgtccgacttattcgagagcagcatccaaccaaaatcccggtgataatagaacgatacaagggtgagaagcagcttcctgttctggataaaa

SEQ ID NO: 363994 - DNA, 120 bp, Artificial Sequence
  ENSG00000140941_2 (sequence is synthesized)
caaagttccttgtacctgaccatgtcaacatgagtgagctcatcaagataattagaaggcgcttacagctcaatgctaatcaggccttcttcctgttggtgaacggacacagcatggtca

SEQ ID NO: 363995 - DNA, 120 bp, Artificial Sequence
  ENSG00000140941_3 (sequence is synthesized)
gcgtctccacaccaatctcagaggtgtatgagagtgagaaagatgaagatggattcctgtacatggtctatgcctcccaggagacgttcgggatgaaattgtcagtgtaaaaccagaaaa

SEQ ID NO: 363996 - DNA, 120 bp, Artificial Sequence
  ENSG00000140941_4 (sequence is synthesized)
aatgcagctcttctagaattgtttaaacccttaccaaggaaaaaaaagggatgttaccaactgagatcgatcagttcatccaatcacagatcatgaaacagtagtgttcccacctaggag

SEQ ID NO: 363997 - DNA, 120 bp, Artificial Sequence
  ENSG00000140941_5 (sequence is synthesized)
tgttaggaagttgtgtttgtgtttcaagcagaaaaactgagctccaagtgagcacattcagctttggaaactatattatttaatgtaggctagcttgttttcaaattttaaaagtttaaa

SEQ ID NO: 363998 - DNA, 120 bp, Artificial Sequence
  ENSG00000140941_6 (sequence is synthesized)
aataaaatactttgcattctaagttgccaataaaatagaccttcaagttattttaatgctcttttctcactaataggaacttgtaattccagcagtaatttaaaggctttcagagagacc

SEQ ID NO: 363999 - DNA, 120 bp, Artificial Sequence
  ENSG00000140941_7 (sequence is synthesized)
ctgagtcttctcttcaggttcacaaaacccgccgcctttttgggtagaagttttctactcagctagagagatctccctaagaggatctttaggcctgagttgtgaagcgcaacccccgca

SEQ ID NO: 364000 - DNA, 120 bp, Artificial Sequence
  ENSG00000140941_8 (sequence is synthesized)
acccaaagtcctcactcttgcaggggtagacatttctggtttggtttgttctctagatagttacacacataaagacaccactcaaaaggaaacttgaataatttataattttgatcgagt

SEQ ID NO: 364001 - DNA, 120 bp, Artificial Sequence
  ENSG00000140941_9 (sequence is synthesized)
ttcttaaaagaccctggagaaagagtggcatttcttctgtttcaggttttgtctgagttcaaactagtgcctgtgttgttacggaaagcagcagtgtaccagtgtcactctggagtacag

SEQ ID NO: 364002 - DNA, 120 bp, Artificial Sequence
  ENSG00000140941_10 (sequence is synthesized)
cgggagaaacacaaaatagtataactgaaaacattaacattcagacacactcccttctgccttccggcttaaagctgtggatgatccacgtttttgtttttttaatgttaaatgtgtaac

SEQ ID NO: 364003 - DNA, 120 bp, Artificial Sequence
  ENSG00000140941_11 (sequence is synthesized)
tcagtattactgaaaaggtacccacattttgaatagtagttatcactcttaggtcagacagccatcagaattctcccacaccaagtgcatgtcagttgtggagaaaacatagcaaaaaga

SEQ ID NO: 364004 - DNA, 120 bp, Artificial Sequence
  ENSG00000140941_12 (sequence is synthesized)
gccgtacgctctttacagatactaatgtcaagagttaaacctcctcaggttcaacctgtgataaaagactagtgcttcccagtacttgcatggggttcactatttatagttttcttggga

SEQ ID NO: 364005 - DNA, 120 bp, Artificial Sequence
  ENSG00000140941_13 (sequence is synthesized)
gtatcacaggaaaatcacaattacaccactttagaccctatgtgtagcaggtcacaacttacccttgtgtgtttagatgtgtatgaaatacctgtatacgttagtgaaagctgtttactg

SEQ ID NO: 364006 - DNA, 120 bp, Artificial Sequence
  ENSG00000140941_14 (sequence is synthesized)
taacggggaaaaccagattctttgcatctgggccctctactgattgttaaaggagttcctgtcacctgctccccccacccccgcatgcgtctgtccacttggctaacttttaatatgtgt

SEQ ID NO: 364007 - DNA, 120 bp, Artificial Sequence
  ENSG00000140941_15 (sequence is synthesized)
atttttacattatgtatattcttaactggactgtctcgtttagactgtatacatcatatctgacattattgtaactaccgtgtgatcagtaagattcctgtaagaaatactgctttttaa

SEQ ID NO: 364008 - DNA, 120 bp, Artificial Sequence
  ENSG00000140941_16 (sequence is synthesized)
gaaaaaaaataacatgctgaggggtgacctatatcccatgtgagtggtcactttatttataggatctttaaaacatttttaatgaactaagttgaataaaggcacaattaaaaactgtca

SEQ ID NO: 364009 - DNA, 120 bp, Artificial Sequence
  ENSG00000140941_17 (sequence is synthesized)
agcgtgagggcgccgcccgtgacgggcatgagaaaagaaagtggtgatgccgagtgcaaaacgttagactgccccgtgtgaggctcgaactcacgaccttcagattatgagactgacgcg

SEQ ID NO: 364010 - DNA, 120 bp, Artificial Sequence
  ENSG00000140941_18 (sequence is synthesized)
ctgcctactgcgctaacgaggctgctcggcgaccacttcgcgccgcggcttttgtggagataggggtcgcccctcgcgcccgtgcgtcccgcttccggcgcccgaaactgtgccgcgccg

SEQ ID NO: 364011 - DNA, 120 bp, Artificial Sequence
  ENSG00000140941_19 (sequence is synthesized)
gccgccaccaggagagttccaggcgccgcggcagggggactgggagaggggactgcgcccagaatgaaggctcgggacaaaagcagttgcgcaaacgcgccaaggctgggcgtcgagtga

SEQ ID NO: 364012 - DNA, 120 bp, Artificial Sequence
  ENSG00000140941_20 (sequence is synthesized)
tcgagtgaccgcgggcggaggtcaccagcggccactccccggaagccacccacggaccacgcgcgcccctgcacgcagagggggccagggctccacgggcgagcggcgaccctgcctccc

SEQ ID NO: 364013 - DNA, 120 bp, Artificial Sequence
  ENSG00000140941_21 (sequence is synthesized)
cgcggcctgccctgcgcgcctcagccccgggtgccggcgtctcgggcagcaccaccaagtctctctggaggggaaaggatggtcggatttgccccatgtcccttcctctgacccctccct

SEQ ID NO: 364014 - DNA, 120 bp, Artificial Sequence
  ENSG00000140941_22 (sequence is synthesized)
ccctcaagagtgccccgggacaccccgcctgtggctcagcctcccccgccccgcgctgccatctcctcagggccgggcagcaggctcccgagcgcccacagacccggggtgcggcccagc

SEQ ID NO: 364015 - DNA, 120 bp, Artificial Sequence
  ENSG00000140941_23 (sequence is synthesized)
aaccgtcacctcaggggcctcaggcgcccagcggtgctgggcggggctggggcacgaccgggagcatgcgcagagcgcgcgtttcgcccatcgcgcacgcgcacacacctgctccgcccc

SEQ ID NO: 364016 - DNA, 120 bp, Artificial Sequence
  ENSG00000140941_24 (sequence is synthesized)
cacgctgcgtgccgctgctgggttccgccacgcccgtcatggcggcggccccggccggctctggccccgcccctcggtgacgcgtcgcgagtcacctgaccaggctgcgggctgaggaga

SEQ ID NO: 364017 - DNA, 120 bp, Artificial Sequence
  ENSG00000140941_25 (sequence is synthesized)
aagaccttcaagcagcgccgcaccttcggtgagtgtcgccgcgagggcggcgggtgcggcggggccggggtccgagctgtggagggcggcagggcctgggacgccgtgaggggtcggggc

SEQ ID NO: 364018 - DNA, 80 bp, Artificial Sequence
  ENSG00000140941_26 (sequence is synthesized)
cccgtgagggacccaggccgggaccgagccgggagggccaggggctggtctgggccggggcggcctgcggacctctcgga

SEQ ID NO: 364019 - DNA, 80 bp, Artificial Sequence
  ENSG00000140941_27 (sequence is synthesized)
ctctcggaggcctgggaggaggcagccggcggagggcgggcgggggccggtgcgctcggggccccgggcctgctgaatca

SEQ ID NO: 364020 - DNA, 120 bp, Artificial Sequence
  ENSG00000140941_28 (sequence is synthesized)
cgcaagcgcgctgcgggcgagggtcgcgcttctggggcccaacagcccccggggccgcgctgggccgttcggctctgaagcggggctgcgccgggacccagcgcgtcaccttcagggctg

SEQ ID NO: 364021 - DNA, 120 bp, Artificial Sequence
  ENSG00000140941_29 (sequence is synthesized)
cagggctggttttcccgtcgagggagcccgcccgggtgcgagtgcctcttacagacctcagtgcctcggtcgagaggaggggaatgtgctgggccccggcctcgccgcgcccgggacggc

SEQ ID NO: 364022 - DNA, 120 bp, Artificial Sequence
  ENSG00000140941_30 (sequence is synthesized)
ccacagcggtgttgccagttcctgtctgtagcccaggagctggggtgggagacttctcttgggtttgcgattacgttctcaccttggcaccaggaataccgaatacatcccttttctgcc

SEQ ID NO: 364023 - DNA, 120 bp, Artificial Sequence
  ENSG00000140941_31 (sequence is synthesized)
ggttcagactggaaacccagcttaggtgtgctggcatttggttaaacgtgcaggtgtcaccatcacaatatttactccacgcagatgatgcgaagtgattatttcccgcttgagcaagag

SEQ ID NO: 364024 - DNA, 120 bp, Artificial Sequence
  ENSG00000140941_32 (sequence is synthesized)
aacgccgcagatccagaacaaagagtagaagatgtccgacttattcgagagcagcatccaaccaaaatcccgggtggaagaattactgtatatagaaaagatgtccgcagcgttcagtaa

SEQ ID NO: 364025 - DNA, 120 bp, Artificial Sequence
  ENSG00000140941_33 (sequence is synthesized)
gcaccatgccgtcggagaagaccttcaagcagcgccgcaccttcgaacaaagagtagaagatgtccgacttattcgagagcagcatccaaccaaaatcccggtaggtagtctcaggcctc

SEQ ID NO: 364026 - DNA, 120 bp, Artificial Sequence
  ENSG00000140941_34 (sequence is synthesized)
ggtttcagtcatgaatgtacgcagaggagagcaccgcataagtgcatccacttgacgggtttttacaggaatcaccagacagccaaaccctgggtgtcagtttcacaacctagagagagg

SEQ ID NO: 364027 - DNA, 120 bp, Artificial Sequence
  ENSG00000140941_35 (sequence is synthesized)
cccaggctggagtgcagtggtgcgatcgtagctcagtgcagtctcagccaccttgtgctcaagcagtcctccctcctcagcctcctgagtagctctgactagaggcacacaccactacac

SEQ ID NO: 364028 - DNA, 90 bp, Artificial Sequence
  ENSG00000140941_36 (sequence is synthesized)
caagcagtcctccctcctcagcctcctgagtagctctgactagaggcacacaccactacacctggctaattttttaagtaacaacccagg

SEQ ID NO: 364029 - DNA, 120 bp, Artificial Sequence
  ENSG00000140941_37 (sequence is synthesized)
gttgggattataggcatgagccactggctggcctcaggtgccaagatttctgtactgcctctaatttctgctaccacttaaactcaggcaggtggagcctacacactgatatttccttgt

SEQ ID NO: 364030 - DNA, 120 bp, Artificial Sequence
  ENSG00000140941_38 (sequence is synthesized)
atatttccttgtggatatcacacttcagaacgtgtccgctagataaagctctcaaacttaccaaggaaagtgatgacagcttgactcggccttacacagaaccctatgtaggtctcacac

SEQ ID NO: 364031 - DNA, 120 bp, Artificial Sequence
  ENSG00000140941_39 (sequence is synthesized)
gtcaacatgagtgagctcatcaagataattaggtattcagtcacctttgtttcataatatatttcctttgagtaacttcttattctttatgaaacttacagttaaatctttagttctggt

SEQ ID NO: 364032 - DNA, 120 bp, Artificial Sequence
  ENSG00000140941_40 (sequence is synthesized)
taaaatctttaaaaaatatttttcagctgaattcagttctgattcagttatgattaaaacaatttcaacttaaactataaaatgtttctttttttgaggttttatattacttgctagact

SEQ ID NO: 364033 - DNA, 120 bp, Artificial Sequence
  ENSG00000140941_41 (sequence is synthesized)
gcagagcccgtttctttcatcataacatcgtttagatgtttcctgtttaaaatcagtgttacaagttattaaggtattgtacagcaaagctagttaaagagaatgtagactctgtgagtg

SEQ ID NO: 364034 - DNA, 120 bp, Artificial Sequence
  ENSG00000140943_0 (sequence is synthesized)
agagcgcgcacgcaagccccgggagcgcgggacagacagggcacgctgggtcggcggagctgaggctcccagctgtgggcctcgctggcccggtcgcccagtctcgcgagagttgggagt

SEQ ID NO: 364035 - DNA, 120 bp, Artificial Sequence
  ENSG00000140943_1 (sequence is synthesized)
aaacagccccgaatggagtgcccaggcgtgttcgccgcggaggcgccgttatcccgggcccgccggccctgagctcccggcggcgcagattggctcacagtggttgattgatcaacccca

SEQ ID NO: 364036 - DNA, 120 bp, Artificial Sequence
  ENSG00000140943_2 (sequence is synthesized)
ttggacgttggttctgtggtacaaatggagtacaggactcagtcgtcacggcctgagtgagagaagccttatttccaagatggagaagaagcggagaaagaaatgaaagcctctcttcag

SEQ ID NO: 364037 - DNA, 120 bp, Artificial Sequence
  ENSG00000140943_3 (sequence is synthesized)
gctgaaccacaaaaggccatgggatttaacttttatttatgttgggcaagactgtaagatggctgattagtaatgttgcagcttttagctgaaacaaaaattcacttttaatcaagaaga

SEQ ID NO: 364038 - DNA, 120 bp, Artificial Sequence
  ENSG00000140943_4 (sequence is synthesized)
aaaaagtgtgatttgaatatatgcaattttatgatcatattcgcttgtgaccatgaagcttgtcaacatctggctgcttctgctcgtggttttgctctgtgggaagaaacatctgggcga

SEQ ID NO: 364039 - DNA, 120 bp, Artificial Sequence
  ENSG00000140943_5 (sequence is synthesized)
cagactggaaaagaaatcttttgaaaaggccccatgccctggctgttcccacctgactttgaaggtggaattctcatcaacagttgtggaatatgaatatattgtggctttcaatggata

SEQ ID NO: 364040 - DNA, 120 bp, Artificial Sequence
  ENSG00000140943_6 (sequence is synthesized)
ctttacagccaaagctagaaattcatttatttcaagtgccctgaagagcagtgaagtagacaattggagaattatacctcgaaacaatccatccagtgactaccctagtgattttgaggt

SEQ ID NO: 364041 - DNA, 120 bp, Artificial Sequence
  ENSG00000140943_7 (sequence is synthesized)
gattcagataaaagaaaaacagaaagcggggctgctaacacttgaagatcatccaaacatcaaacgggtcacgccccaacgaaaagtctttcgttccctcaagtatgctgaatctgaccc

SEQ ID NO: 364042 - DNA, 120 bp, Artificial Sequence
  ENSG00000140943_8 (sequence is synthesized)
cacagtaccctgcaatgaaacccggtggagccagaagtggcaatcatcacgtcccctgcgaagagccagcctctccctgggctctggcttctggcatgctacgggaaggcattcgagcag

SEQ ID NO: 364043 - DNA, 120 bp, Artificial Sequence
  ENSG00000140943_9 (sequence is synthesized)
acggctgctgagagccatcccgcgccaggttgcccagacactgcaggcagatgtgctctggcagatgggatatacaggtgctaatgtaagagttgctgtttttgacactgggctgagcga

SEQ ID NO: 364044 - DNA, 120 bp, Artificial Sequence
  ENSG00000140943_10 (sequence is synthesized)
gaagcatccccacttcaaaaatgtgaaggagagaaccaactggaccaacgagcgaacgctggacgatgggttgggccatggcacattcgtggcaggtgtgatagccagcatgagggagtg

SEQ ID NO: 364045 - DNA, 120 bp, Artificial Sequence
  ENSG00000140943_11 (sequence is synthesized)
ccaaggatttgctccagatgcagaacttcacattttcagggtctttaccaataatcaggtatcttacacatcttggtttttggacgccttcaactatgccattttaaagaagatcgacgt

SEQ ID NO: 364046 - DNA, 120 bp, Artificial Sequence
  ENSG00000140943_12 (sequence is synthesized)
gttaaacctcagcatcggcggcccggacttcatggatcatccgtttgttgacaaggtgtgggaattaacagctaacaatgtaatcatggtttctgctattggcaatgacggacctcttta

SEQ ID NO: 364047 - DNA, 120 bp, Artificial Sequence
  ENSG00000140943_13 (sequence is synthesized)
tggcactctgaataaccctgctgatcaaatggatgtgattggagtaggcggcattgactttgaagataacatcgcccgcttttcttcaaggggaatgactacctgggagctaccaggagg

SEQ ID NO: 364048 - DNA, 120 bp, Artificial Sequence
  ENSG00000140943_14 (sequence is synthesized)
ctacggtcgcatgaaacctgacattgtcacctatggtgctggcgtgcggggttctggcgtgaaaggggggtgccgggccctctcagggaccagtgttgcttctccagtggttgcaggtgc

SEQ ID NO: 364049 - DNA, 120 bp, Artificial Sequence
  ENSG00000140943_15 (sequence is synthesized)
tgtcaccttgttagtgagcacagtccagaagcgtgagctggtgaatcccgccagtatgaagcaggccctgatcgcgtcagcccggaggctccccggggtcaacatgtttgagcaaggcca

SEQ ID NO: 364050 - DNA, 120 bp, Artificial Sequence
  ENSG00000140943_16 (sequence is synthesized)
cggcaagctcgatctgctcagagcctatcagatcctcaacagctacaagccacaggcaagtttgagccccagctacatagatctgactgagtgtccctacatgtggccctactgctccca

SEQ ID NO: 364051 - DNA, 120 bp, Artificial Sequence
  ENSG00000140943_17 (sequence is synthesized)
gcccatctactatggaggaatgccgacagttgttaatgtcaccatcctcaacggcatgggagtcacaggaagaattgtagataagcctgactggcagccctatttgccacagaacggaga

SEQ ID NO: 364052 - DNA, 120 bp, Artificial Sequence
  ENSG00000140943_18 (sequence is synthesized)
ggccatctccatttctgtgaccaagaaagcggcttcctgggaaggcattgctcagggccatgtcatgatcactgtggcttccccagcagagacagagtcaaaaaatggtgcagaacagac

SEQ ID NO: 364053 - DNA, 120 bp, Artificial Sequence
  ENSG00000140943_19 (sequence is synthesized)
ttcaacagtaaagctccccattaaggtgaagataattcctactcccccgcgaagcaagagagttctctgggatcagtaccacaacctccgctatccacctggctatttccccagggataa

SEQ ID NO: 364054 - DNA, 120 bp, Artificial Sequence
  ENSG00000140943_20 (sequence is synthesized)
tttaaggatgaagaatgaccctttagactggaatggtgatcacatccacaccaatttcagggatatgtaccagcatctgagaagcatgggctactttgtagaggtcctcggggccccctt

SEQ ID NO: 364055 - DNA, 120 bp, Artificial Sequence
  ENSG00000140943_21 (sequence is synthesized)
cacgtgttttgatgccagtcagtatggcactttgctgatggtggacagtgaggaggagtacttccctgaagagatcgccaagctccggagggacgtggacaacggcctctcgctcgtcat

SEQ ID NO: 364056 - DNA, 120 bp, Artificial Sequence
  ENSG00000140943_22 (sequence is synthesized)
cttcagtgactggtacaacacttctgttatgagaaaagtgaagttttatgatgaaaacacaaggcagtggtggatgccggataccggaggagctaacatcccagctctgaatgagctgct

SEQ ID NO: 364057 - DNA, 120 bp, Artificial Sequence
  ENSG00000140943_23 (sequence is synthesized)
gtctgtgtggaacatggggttcagcgatggcctgtatgaaggggagttcaccctggccaaccatgacatgtattatgcgtcagggtgcagcatcgcgaagtttccagaagatggcgtcgt

SEQ ID NO: 364058 - DNA, 120 bp, Artificial Sequence
  ENSG00000140943_24 (sequence is synthesized)
gataacacagactttcaaggaccaaggattggaggttttaaagcaggaaacagcagttgttgaaaacgtccccattttgggactttatcagattccagctgagggtggaggccggattgt

SEQ ID NO: 364059 - DNA, 120 bp, Artificial Sequence
  ENSG00000140943_25 (sequence is synthesized)
actgtatggggactccaattgcttggatgacagtcaccgacagaaggactgcttttggcttctggatgccctcctccagtacacatcgtatggggtgacaccgcctagcctcagtcactc

SEQ ID NO: 364060 - DNA, 120 bp, Artificial Sequence
  ENSG00000140943_26 (sequence is synthesized)
tgggaaccgccagcgccctcccagtggagcaggctcagtcactccagagaggatggaaggaaaccatcttcatcggtactccaaggttctggaggcccatttgggagacccaaaacctcg

SEQ ID NO: 364061 - DNA, 120 bp, Artificial Sequence
  ENSG00000140943_27 (sequence is synthesized)
gcctctaccagcctgtccacgcttgtcttgggccaagccacagcctttaaacgagacggcgcccagtaacctttggaaacatcagaagctactctccattgacctggacaaggtggtgtt

SEQ ID NO: 364062 - DNA, 120 bp, Artificial Sequence
  ENSG00000140943_28 (sequence is synthesized)
acccaactttcgatcgaatcgccctcaagtgaggcccttgtcccctggagagagcggcgcctgggacattcctggagggatcatgcctggccgctacaaccaggaggtgggccagaccat

SEQ ID NO: 364063 - DNA, 120 bp, Artificial Sequence
  ENSG00000140943_29 (sequence is synthesized)
tcctgtctttgccttcctgggagccatggtggtcctggccttctttgtggtacaaatcaacaaggccaagagcaggccgaagcggaggaagcccagggtgaagcgcccgcagctcatgca

SEQ ID NO: 364064 - DNA, 120 bp, Artificial Sequence
  ENSG00000140943_30 (sequence is synthesized)
gcaggttcacccgccaaagaccccttcggtgtgaccggcagcctggctgaccgtgagggccagagagagccttcacggacggcgctggtgggtgagccgagctgtggtggcggctggttt

SEQ ID NO: 364065 - DNA, 120 bp, Artificial Sequence
  ENSG00000140943_31 (sequence is synthesized)
aaaagggatccagtttccagctgcaggtttgttagagtctgttctacatgggcctgccctcctgtgatgggcagaggctcctggtacatcgagaagattcctgtggatcccgtcaggagg

SEQ ID NO: 364066 - DNA, 120 bp, Artificial Sequence
  ENSG00000140943_32 (sequence is synthesized)
gacttagtggctctgccgccagtgagacttcccgccggcagctgtgcgcaccaaagactcgggagaactggaaaggctgtctggggtcttctgactgcaggggaaggatgtactttccaa

SEQ ID NO: 364067 - DNA, 120 bp, Artificial Sequence
  ENSG00000140943_33 (sequence is synthesized)
acaaatgatacaaccctgaccaagctaaaagacgcttgttaaaggctattttctatatttattgttgggaaaagtcactttaaagacttgtgctatttggaagcaaagctattttttttg

SEQ ID NO: 364068 - DNA, 120 bp, Artificial Sequence
  ENSG00000140943_34 (sequence is synthesized)
tcagtggaatgcagtttttttactattccatcatgaggaacaacatagattccatgatctttttaatgacagtacagactgagatttgaaggaaacatgcacaaatctgtaaaacataga

SEQ ID NO: 364069 - DNA, 120 bp, Artificial Sequence
  ENSG00000140943_35 (sequence is synthesized)
ccttcgctttatttttgtaagtatcacctgccaccatgttttgtaatttgaggtcttgatttcaccattgtcggtgaagaaaattttcaataaatatgtattacccgtctgaagcttaaa

SEQ ID NO: 364070 - DNA, 120 bp, Artificial Sequence
  ENSG00000140943_36 (sequence is synthesized)
aggctggcatctcctgtaatgaggtgaagcagttgcgcagagccgcccgcccactgcacgtgggtgcagcttgagaagcaggatccacgtatgcctggtgctctcagggaggccatcgtg

SEQ ID NO: 364071 - DNA, 83 bp, Artificial Sequence
  ENSG00000140943_37 (sequence is synthesized)
aaacccatttctgcaaaaaataaaaaattagccgggcatgctgtcatgtgccttcagtctcagctacttgggaggctgaggca

SEQ ID NO: 364072 - DNA, 120 bp, Artificial Sequence
  ENSG00000140943_38 (sequence is synthesized)
aacccaacacaaactcagttcagataaggggaaaccatgaaaccaacataattgccagagcacttgtgtcagcacttctgacacaaattatgtcagggtccccagcacctctcccaggct

SEQ ID NO: 364073 - DNA, 120 bp, Artificial Sequence
  ENSG00000140943_39 (sequence is synthesized)
cggtgctttagggctcacgggactcagcctgtggtcatactcccagctaagattcattatagtggcacagcaaggatgcacagcggctctgtaagggaaaaagatgcctcacacggagaa

SEQ ID NO: 364074 - DNA, 120 bp, Artificial Sequence
  ENSG00000140943_40 (sequence is synthesized)
agcctggagaaatccaggcgcagcttcctaagctctcccctctctcctgccaggcagggtctcacagagctggcccctttcctagcagcaagctgcattgacatgtgtacgtgtttttgc

SEQ ID NO: 364075 - DNA, 120 bp, Artificial Sequence
  ENSG00000140943_41 (sequence is synthesized)
ccagggaagccctctagagactcaagtccaagtttccattagggctggtcacgtactcattctctgccagtgacaactcccaaagctccagacttgcaaaagcagaggtgtccctgcaca

SEQ ID NO: 364076 - DNA, 120 bp, Artificial Sequence
  ENSG00000140943_42 (sequence is synthesized)
tcacactgtctgtatagacagcaggctggcacagaggccttatctgtgcaggagcattccagagccaagttcccagatgccagcctagggcagcgctgtaagcaagcccttctgaagcta

SEQ ID NO: 364077 - DNA, 120 bp, Artificial Sequence
  ENSG00000140943_43 (sequence is synthesized)
ggtctgctttgttaactctgtcttgtacagttgtgttgcttcattgtagttttctcatatgatctactctaacactgtattctttatttcagtttgagccccagctacatagatctgact

SEQ ID NO: 364078 - DNA, 120 bp, Artificial Sequence
  ENSG00000140943_44 (sequence is synthesized)
tgacctaaactcgtgacttctgaactcccatttcccccacttttggggactaacttaaaaaaaattcctttagagatttcttcttaaaagctaaattccgggccacgtgtggtggctcac

SEQ ID NO: 364079 - DNA, 120 bp, Artificial Sequence
  ENSG00000140943_45 (sequence is synthesized)
gagagttgggagtaaacagccccgaatggagtgcccaggcgtgttcgccgcggaggcgccgttatcccgggcccgccggccctgagctcccggcggcgcaggggagattttaggaaagca

SEQ ID NO: 364080 - DNA, 120 bp, Artificial Sequence
  ENSG00000140943_46 (sequence is synthesized)
ggcgacctgcctctgaagagtgtggcctctggagccaggctgaccacctgagttctcagcccagctgttctacttgctggtgttgtggccccagattggctcacagtggttgattgatca

SEQ ID NO: 364081 - DNA, 120 bp, Artificial Sequence
  ENSG00000140943_47 (sequence is synthesized)
ttataaccttctattagcctagcattcaaaccagcatttatattccagccatggtcagcaattcatactcagtgaacagtgttagctgaatttccagaaacccaattattctccacagtg

SEQ ID NO: 364082 - DNA, 120 bp, Artificial Sequence
  ENSG00000140943_48 (sequence is synthesized)
ttgttcaggacttgaagcagataacaatatcctttctatccttggctatctacctgttcacatcaaataatccatcacatactgaaccggcccatccagcatgttgataatggacagctc

SEQ ID NO: 364083 - DNA, 120 bp, Artificial Sequence
  ENSG00000140943_49 (sequence is synthesized)
ctggaatttgattttcacaatcactcagtaattccttcttctcagtacgctgctgggttttacatttatcttgcttttcatatcttgttgaaaattattctcggtccccagagacctaga

SEQ ID NO: 364084 - DNA, 120 bp, Artificial Sequence
  ENSG00000140943_50 (sequence is synthesized)
tcgacgcatattctgagtctccaaaagagatttgagaccaggagacagctccagatgctgtcagcccagtgctgggggcaggcttccatctgtgaagtggagaggcgctttgggcttctt

SEQ ID NO: 364085 - DNA, 120 bp, Artificial Sequence
  ENSG00000140943_51 (sequence is synthesized)
cgttggcatcaggtgcccatacctagggcagctgtggaagtgtcagcgtcctccctgagaggaactcctgctccggtggctcctcagtccttccgtcagtatgctgtaaagcacccacat

SEQ ID NO: 364086 - DNA, 120 bp, Artificial Sequence
  ENSG00000140943_52 (sequence is synthesized)
ggtaatgggtgtggactgttaccatgactgctccactagaaagtgccatcaccaaagaatgagattctggaacaggatatcactgttagaatggaaatatagcccatagatattcagcta

SEQ ID NO: 364087 - DNA, 120 bp, Artificial Sequence
  ENSG00000140943_53 (sequence is synthesized)
caaagtcataaagcctaaatgtcattgattccgtaacttaacactgtcagtttaactttcagactgattaagcctgaagtgtaaaattaaatcctataaaatagggcgggttataatgag

SEQ ID NO: 364088 - DNA, 120 bp, Artificial Sequence
  ENSG00000140943_54 (sequence is synthesized)
tgctcattggcattcaggcagttgccgagctgggagtatcgagtgggagtctctctcttgcctgcctagggaacctctactcagaccagcccttgcccgccagcttggcgttgactttca

SEQ ID NO: 364089 - DNA, 120 bp, Artificial Sequence
  ENSG00000140943_55 (sequence is synthesized)
gcctaattgctgataggactggacgtctttgctttcacttgcccaaagtgaaagagacaggctgacagtttccaaatgaataaataacagaaaaatagagaaattttaatttgcaaactt

SEQ ID NO: 364090 - DNA, 120 bp, Artificial Sequence
  ENSG00000140943_56 (sequence is synthesized)
actgtattcttccccctcacttaagccagagtagtgtttttcccatcgcgctcttcgctctagctccggtgtcctcccaagctctgtgctgctgttgccagcgtatcaacctctctgtct

SEQ ID NO: 364091 - DNA, 120 bp, Artificial Sequence
  ENSG00000140943_57 (sequence is synthesized)
tcttcgggtctaagttgtattggcctgaacgagtttttcagatcccagagttaataatgatactgtgcaccacagagtgcaggaatcgcacacgttcatttgatcgtcccccgcctgcag

SEQ ID NO: 364092 - DNA, 120 bp, Artificial Sequence
  ENSG00000140943_58 (sequence is synthesized)
gcaaggcagatggggaccccacgttttgctgctcagactctctcccactgttggttccttgtatgtttcgtattctccctggagacagtggtttcttcagagacaaagatgctgtctggt

SEQ ID NO: 364093 - DNA, 120 bp, Artificial Sequence
  ENSG00000140943_59 (sequence is synthesized)
atcaccattgcctccgactgctccaggccttagggagaggacctcgatagccccaggctcaggtccactcagcaggcttcagctcctccccctgacaggctccttccagggcctcgcttg

SEQ ID NO: 364094 - DNA, 120 bp, Artificial Sequence
  ENSG00000140943_60 (sequence is synthesized)
gagtgtcctcccgaggcgcttggtcatgtttagctttatgcaaaaacaggctcctgctggtcatattgtaaactcagtagaatctcatgaacagggacttgattttgatctttctccctc

SEQ ID NO: 364095 - DNA, 120 bp, Artificial Sequence
  ENSG00000140943_61 (sequence is synthesized)
gggacgtggaaacggccaccatagttgctgtcagtggcatttaggtggccgtggacgcaaatggcatttcacatctccccgtagatcacttgctctgtcttgagtttcagttgaacttcc

SEQ ID NO: 364096 - DNA, 120 bp, Artificial Sequence
  ENSG00000140943_62 (sequence is synthesized)
gagagttgggagtaaacagccccgaatggagtgcccaggcgtgttcgccgcggaggcgccgttatcccgggcccgccggccctgagctcccggcggcgcagattcatacttcttggattg

SEQ ID NO: 364097 - DNA, 120 bp, Artificial Sequence
  ENSG00000140943_63 (sequence is synthesized)
caagccacaggcaaggtcagtgcaccgccctgccgatgggtctttctctccttcactgggctctgggcgaattttccctctgcacaaaatacaagcctcaaaacagaaaatgatgactaa

SEQ ID NO: 364098 - DNA, 120 bp, Artificial Sequence
  ENSG00000140943_64 (sequence is synthesized)
gcacagaattctcggggtgcttggagaggttttgctgctgcttctacagggtgctgctggcagaactggtagctgctttcgcttactgatgtgatctttaatataaatggttaaaagtaa

SEQ ID NO: 364099 - DNA, 120 bp, Artificial Sequence
  ENSG00000140943_65 (sequence is synthesized)
gtgttggagtagtgctccactgggcgggtcggccacatggcgtttctccgttcatctcttgctgggcatttggctattctaggtggtacatctttcagctttcagcttagatgggggtaa

SEQ ID NO: 364100 - DNA, 120 bp, Artificial Sequence
  ENSG00000140943_66 (sequence is synthesized)
aacgggcgccttgtgtaatgtgcacttcagttctttgtggggtgggtatctttggttgtgtttacgaattctgtttcctcttgtatgagttacacgttgatttcgttggcccatttttct

SEQ ID NO: 364101 - DNA, 120 bp, Artificial Sequence
  ENSG00000140943_67 (sequence is synthesized)
aagtgaacagatgctgcatgggtgttgagccttgcctccaccccctggggtgtcagtacagttccttctccccaggagagcctctgggatgcagcaggagccatggccctccgttctcct

SEQ ID NO: 364102 - DNA, 120 bp, Artificial Sequence
  ENSG00000140943_68 (sequence is synthesized)
ctccctgttgcccctgagaccccgctctcaggcccttcttttctcagtgggtgtcacatggtctcactgtctctgaatgagctccattctgcccccatccatgaggagctgagtgtggca

SEQ ID NO: 364103 - DNA, 120 bp, Artificial Sequence
  ENSG00000140943_69 (sequence is synthesized)
ctcaggcagttggtgcaacctggtggacagtggtgctgaccacctggaaccctggggcactgggagtggagccctggtcaggtcatggctgtgtgtgcttatctggctgggctgggccac

SEQ ID NO: 364104 - DNA, 120 bp, Artificial Sequence
  ENSG00000140943_70 (sequence is synthesized)
gggcaggatgccttggggagggaattggatccagctgaacatgatgctacttcagccagtggctgtgcctgccagcaagtggggccagtttgtgtgcgccgctgagtggttttcgtaatg

SEQ ID NO: 364105 - DNA, 120 bp, Artificial Sequence
  ENSG00000140943_71 (sequence is synthesized)
gctgcgggtagagcagcactcagcggctctaacctgccgagaggccatccttagtccccagagggccatgatcgaggacccagtgtgcagctgctttcccacgtgcaccccgaccctcac

SEQ ID NO: 364106 - DNA, 120 bp, Artificial Sequence
  ENSG00000140943_72 (sequence is synthesized)
gccactctgagtgtgtttaccgtcccgctctcacaggtgaggacagtggctcctacagatcttcaggaagaatcaccaacattctagagcacttgccaggtcccatgcagcaggctggga

SEQ ID NO: 364107 - DNA, 120 bp, Artificial Sequence
  ENSG00000140943_73 (sequence is synthesized)
tgctcccatggattacctcactgtcccctctcagtaatcctgtgaaaatagatgttattattcccagtttccagatgaggaaatgagagctgagagaaattagataactgcctgagatcg

SEQ ID NO: 364108 - DNA, 120 bp, Artificial Sequence
  ENSG00000140943_74 (sequence is synthesized)
cctgggcggtatgtggtggtggagcctcaacccgcctctggggcctgtgctggtgccgtggggccgccagctgcttggcacttagtggggtgggtatcagtgcgtctaagtccctggtgt

SEQ ID NO: 364109 - DNA, 120 bp, Artificial Sequence
  ENSG00000140943_75 (sequence is synthesized)
acacagatgaaactattttaataatatacttgagcccaagacatgaagaatattagaatttaaacacgtgataccttatttcacttgctcagtagctacgtgtggttggcacaatggtgc

SEQ ID NO: 364110 - DNA, 120 bp, Artificial Sequence
  ENSG00000140943_76 (sequence is synthesized)
agatctaagaaatagaaagaattttgaaaatgcagagtggttttttatttggccagagaattaaatattttagaagagaagtattttttccatgaaaccggtctgtagcttagatttcgc

SEQ ID NO: 364111 - DNA, 120 bp, Artificial Sequence
  ENSG00000140943_77 (sequence is synthesized)
aggtgtagccttgcgtgtgtcagtggtggtcagcaaagtttgaccagccagtgctgtgcacacatctgcccatcttcaagggaacggttctgattttctcacccaccttcagcaatggaa

SEQ ID NO: 364112 - DNA, 120 bp, Artificial Sequence
  ENSG00000140943_78 (sequence is synthesized)
acacacattgtccgggaggaaccaatcaggcgtggctcctgcggctcatggaggatagcttaatagagcacaggggctctgtgctgtgttgtgggaaagcagacagactcataataaggc

SEQ ID NO: 364113 - DNA, 120 bp, Artificial Sequence
  ENSG00000140943_79 (sequence is synthesized)
cctcctttttcctttgcattttagtaatagagatgattttcctttttgttgatgttgctgctaaccacaggaaaccatcttcatcggtactccaaggttctggaggcccatttgggagac

SEQ ID NO: 364114 - DNA, 120 bp, Artificial Sequence
  ENSG00000140943_80 (sequence is synthesized)
gcaagctcgatctgctcagagcctatcagatcctcaacagctacaagccacaggcaagcctgactggcagccctatttgccacagaacggagacaacattgaagttgccttctcctactc

SEQ ID NO: 364115 - DNA, 120 bp, Artificial Sequence
  ENSG00000140943_81 (sequence is synthesized)
gtgttcgccgcggaggcgccgttatcccgggcccgccggccctgagctcccggcggcgcagattggctcacagtggttgattgatcaaccccattggacgttgggttgggccatggcaca

SEQ ID NO: 364116 - DNA, 120 bp, Artificial Sequence
  ENSG00000140943_82 (sequence is synthesized)
ttgaattatcacaaaaatatgtgttactgatgcatttagcataagtgggtcccgtagaaggttgcggagtggtcagtcctggattgggtacagagatgagtgtgcactcattctctcatg

SEQ ID NO: 364117 - DNA, 120 bp, Artificial Sequence
  ENSG00000140943_83 (sequence is synthesized)
caggctgtgccagacaagcacctgttggatactaaacaagactgcaggcctcttgtgtgcacgtttgtaggttaggttttagtggtccaatttccattcttttactgagagaaaataggc

SEQ ID NO: 364118 - DNA, 120 bp, Artificial Sequence
  ENSG00000140945_0 (sequence is synthesized)
atctatttgggaagttggctggctggcgaggcagagcctctcctcaaagcctggctcccacggaaaatatgctcagtgcagccgcgtgcatgaatgaaaacgccgccgggcgcttctagt

SEQ ID NO: 364119 - DNA, 120 bp, Artificial Sequence
  ENSG00000140945_1 (sequence is synthesized)
cggacaaaatgcagccgagaactccgctcgttctgtgcgttctcctgtcccagggccaaacaacccacctgcactgcatggttcccccagcaagaacatcccagtgagaatggcccacag

SEQ ID NO: 364120 - DNA, 120 bp, Artificial Sequence
  ENSG00000140945_2 (sequence is synthesized)
atgcctgggcgtgacccacctgcagcttcaaccatgcaggtgctgctgctaacatctgcagaagatttggactgcactcctggatttcagcagaaagtgttccatatcaatcagccagct

SEQ ID NO: 364121 - DNA, 120 bp, Artificial Sequence
  ENSG00000140945_3 (sequence is synthesized)
gaattcattgaggaccagtcaattctaaacttgaccttcagtgactgtaagggaaacgacaagctacgctatgaggtctcgagcccatacttcaaggtgaacagcgatggcggcttagtt

SEQ ID NO: 364122 - DNA, 120 bp, Artificial Sequence
  ENSG00000140945_4 (sequence is synthesized)
gctctgagaaacataactgcagtgggcaaaactctgttcgtccatgcacggaccccccatgcggaagatatggcagaactcgtgattgtcggggggaaagacatccagggctccttgcag

SEQ ID NO: 364123 - DNA, 120 bp, Artificial Sequence
  ENSG00000140945_5 (sequence is synthesized)
gatatatttaaatttgcaagaacttctcctgtcccaagacaaaagaggtccattgtggtatctcccattttaattccagagaatcagagacagcctttcccaagagatgttggcaaggta

SEQ ID NO: 364124 - DNA, 120 bp, Artificial Sequence
  ENSG00000140945_6 (sequence is synthesized)
gtcgatagtgacaggccagaaaggtccaagttccggctcactggaaagggagtggatcaagagcctaaaggaattttcagaatcaatgagaacacagggagcgtctccgtgacacggacc

SEQ ID NO: 364125 - DNA, 120 bp, Artificial Sequence
  ENSG00000140945_7 (sequence is synthesized)
ttggacagagaagtaatcgctgtttatcaactatttgtggagaccactgatgtcaatggcaaaactctcgaggggccggtgcctctggaagtcattgtgattgatcagaatgacaaccga

SEQ ID NO: 364126 - DNA, 120 bp, Artificial Sequence
  ENSG00000140945_8 (sequence is synthesized)
ccgatctttcgggaaggcccctacatcggccacgtcatggaagggtcacccacaggcaccacagtgatgcggatgacagcctttgatgcagatgacccagccaccgataatgccctcctg

SEQ ID NO: 364127 - DNA, 120 bp, Artificial Sequence
  ENSG00000140945_9 (sequence is synthesized)
cggtataatatccgtcagcagacgcctgacaagccatctcccaacatgttctacatcgatcctgagaaaggagacattgtcactgttgtgtcacctgcgctgctggaccgagagactctg

SEQ ID NO: 364128 - DNA, 120 bp, Artificial Sequence
  ENSG00000140945_10 (sequence is synthesized)
gaaaatcccaagtatgaactgatcatcgaggctcaagatatggctggactggatgttggattaacaggcacggccacagccacgatcatgatcgatgacaaaaatgatcactcaccaaaa

SEQ ID NO: 364129 - DNA, 120 bp, Artificial Sequence
  ENSG00000140945_11 (sequence is synthesized)
accccaccacaggtgcatggagggctgcctacaccatcatcaacggaaaccccgggcagagctttgaaatccacaccaaccctcaaaccaacgaagggatgctttctgttgtcaaaccat

SEQ ID NO: 364130 - DNA, 120 bp, Artificial Sequence
  ENSG00000140945_12 (sequence is synthesized)
tggactatgaaatttctgccttccacaccctgctgatcaaagtggaaaatgaagacccactcgtacccgacgtctcctacggccccagctccacagccaccgtccacatcactgtcctgg

SEQ ID NO: 364131 - DNA, 120 bp, Artificial Sequence
  ENSG00000140945_13 (sequence is synthesized)
atgtcaacgagggcccagtcttctacccagaccccatgatggtgaccaggcaggaggacctctctgtgggcagcgtgctgctgacagtgaatgccacggaccccgactccctgcagcatc

SEQ ID NO: 364132 - DNA, 120 bp, Artificial Sequence
  ENSG00000140945_14 (sequence is synthesized)
aaaccatcaggtattctgtttacaaggacccagcaggttggctgaatattaaccccatcaatgggactgttgacaccacagctgtgctggaccgtgagtccccatttgtcgacaacagcg

SEQ ID NO: 364133 - DNA, 120 bp, Artificial Sequence
  ENSG00000140945_15 (sequence is synthesized)
tgtacactgctctcttcctggcaattgacagtggcaaccctcccgctacgggcactgggactttgctgataaccctggaggacgtgaatgacaatgccccgttcatttaccccacagtag

SEQ ID NO: 364134 - DNA, 120 bp, Artificial Sequence
  ENSG00000140945_16 (sequence is synthesized)
ctgaagtctgtgatgatgccaaaaacctcagtgtagtcattttgggagcatcagataaggatcttcacccgaatacagatcctttcaaatttgaaatccacaaacaagctgttcctgata

SEQ ID NO: 364135 - DNA, 120 bp, Artificial Sequence
  ENSG00000140945_17 (sequence is synthesized)
aagtctggaagatctccaagatcaacaatacacacgccctggtaagccttcttcaaaatctgaacaaagcaaactacaacctgcccatcatggtgacagattcagggaaaccacccatga

SEQ ID NO: 364136 - DNA, 120 bp, Artificial Sequence
  ENSG00000140945_18 (sequence is synthesized)
cgaatatcacagatctcagggtacaagtgtgctcctgcaggaattccaaagtggactgcaacgcggcaggggccctgcgcttcagcctgccctcagtcctgctcctcagcctcttcagct

SEQ ID NO: 364137 - DNA, 120 bp, Artificial Sequence
  ENSG00000140945_19 (sequence is synthesized)
tagcttgtctgtgagaactcctgacgtctgaagcttgactcccaagtttccatagcaacaggaaaaaaaaaaatctatccaaatctgaagattgcggtttacagctatcgaacttcacaa

SEQ ID NO: 364138 - DNA, 120 bp, Artificial Sequence
  ENSG00000140945_20 (sequence is synthesized)
ctaggcctcaattgttccggttttttattttctttacaatttcacttagtctgtacttcatcattttgacagcatcttcctccctcctttaattaatggaatcttctgaattttccctga

SEQ ID NO: 364139 - DNA, 120 bp, Artificial Sequence
  ENSG00000140945_21 (sequence is synthesized)
atgtttaaagatcatgacatatgacttgatcttctgggagcaggaacaatgactactttttctggtgtgttaacatgtcgctagccagtgctccaggcacccagctttgtctgtgggtta

SEQ ID NO: 364140 - DNA, 120 bp, Artificial Sequence
  ENSG00000140945_22 (sequence is synthesized)
gtatatatacacggtatttatagagagagactatcctggagaagcctcgttttgatgccattcttccttgcaaggttaagcaaggtgggtggaaactaagacacctgaaccctccagggc

SEQ ID NO: 364141 - DNA, 120 bp, Artificial Sequence
  ENSG00000140945_23 (sequence is synthesized)
ctcccgcatcaaggtcagcatgaggacagaccacagagctgtcacttttgctccgaagctacttctccactgtcccgttcagtctgaatgctgccacaaccagccaggcaggtccacaga

SEQ ID NO: 364142 - DNA, 120 bp, Artificial Sequence
  ENSG00000140945_24 (sequence is synthesized)
gagggagagcagagaaagaagtcctttctctttattgagttcgaggactacaaccaatttacactgccatctgatgccgtgatcctgagccaaggaggtgaggagcagagcaggcaattt

SEQ ID NO: 364143 - DNA, 120 bp, Artificial Sequence
  ENSG00000140945_25 (sequence is synthesized)
caccaccaaatgccaagaaaagggctgacattttctttcatgggcaccaacctgcatttgtatgtgtcccgaatccacagtcgtactgattctaatggggacacagatcatggtagagaa

SEQ ID NO: 364144 - DNA, 120 bp, Artificial Sequence
  ENSG00000140945_26 (sequence is synthesized)
tctctccctcctcagtaaatgtacaactgcacctgtcatcatggaggtcatacatgcatacaaagaggtgtacaggtaccatcttgtatacacatatatacccacatgtacagacataca

SEQ ID NO: 364145 - DNA, 120 bp, Artificial Sequence
  ENSG00000140945_27 (sequence is synthesized)
tttatgcacattcacgctgtttgtttcatatatacaggcataaaatagagtaaatacaggtagttttaaaagtacccttttgtgtgaattgactaccgttgtttgcaaacccgaaaataa

SEQ ID NO: 364146 - DNA, 120 bp, Artificial Sequence
  ENSG00000140945_28 (sequence is synthesized)
aagacgttcattatgtatgaaaagtaactgatttgtattctgtgagcatgtaaaagcggaaagttagtgcttgttctaagattaccttcttgttgataaaccataaatgaatcatcaaag

SEQ ID NO: 364147 - DNA, 120 bp, Artificial Sequence
  ENSG00000140945_29 (sequence is synthesized)
ctcacaccaaatttttctatcaaataaaactagtgacagcttgtggctttttattagagctcgccacgaactagggtaaggtgagtgtcttagcatattttaatgcagttgcttactaaa

SEQ ID NO: 364148 - DNA, 120 bp, Artificial Sequence
  ENSG00000140945_30 (sequence is synthesized)
ggttttaaccgcacatgcacacacacacgctttcttatgcaatctatgtttgcacttgtgctttcagttagccttctgtaggaagtagaagtcatatgttgtctttgttgtagtgaaatt

SEQ ID NO: 364149 - DNA, 120 bp, Artificial Sequence
  ENSG00000140945_31 (sequence is synthesized)
atacagatagagttccatatattgtatttgtttcaatggtaaatccttttggaacatatagaatgcagagatttttttttccattaaaataaatgggtattggtggttaaaactgctgga

SEQ ID NO: 364150 - DNA, 120 bp, Artificial Sequence
  ENSG00000140945_32 (sequence is synthesized)
tttgacagaccatttggggtccgtcgtacatctctggttggtgagtgagtctatgaagacagaagtaccagttctcagcatgggccatggactcatcttgtccacctcatgatatgatct

SEQ ID NO: 364151 - DNA, 120 bp, Artificial Sequence
  ENSG00000140945_33 (sequence is synthesized)
gagggtgtcataatcagctataaaggtaattgcatactcaaagatgagacggaccattctcagttgatgaccacattaagcatagtcatggccatctgtcaacagtcccaagacctgggg

SEQ ID NO: 364152 - DNA, 120 bp, Artificial Sequence
  ENSG00000140945_34 (sequence is synthesized)
atttttctctggaacaaatcctgttgctggatcaggagatgccacaccttgaacttgatagggtcattctccacgagcacatgcccccgactcagggacaggggaatctaagcctgtgca

SEQ ID NO: 364153 - DNA, 120 bp, Artificial Sequence
  ENSG00000140945_35 (sequence is synthesized)
ttcacactccacaagatttcctctactggctttacagggcactgtcacgcgtctcccgggcgcaccttgctcccctcttcctgcaaggcagggggagaacgttcatccttgaacaaacaa

SEQ ID NO: 364154 - DNA, 120 bp, Artificial Sequence
  ENSG00000140945_36 (sequence is synthesized)
agagcatcctcagccagtcaggcggctggtagccggacacatatgctaactggcaatcaggaagtcaccctccaatgtaaacttcagccacatgcagggagaaacacagcagctgagtgg

SEQ ID NO: 364155 - DNA, 120 bp, Artificial Sequence
  ENSG00000140945_37 (sequence is synthesized)
ccattcactcaaggaaacaaatacagcatgactccttttctctcaagctggtaggctctcctgcactttgtgaaccgaaccagaagattaacttcgctgaaaattcagaaaaataggagt

SEQ ID NO: 364156 - DNA, 120 bp, Artificial Sequence
  ENSG00000140945_38 (sequence is synthesized)
aaagtgcacacttcattaataaatagaatatgcctcaactttcccttatttaaacatattctctgtccccacagttctaatcaggacagagatacttctgtcatgttgttcctcctaata

SEQ ID NO: 364157 - DNA, 120 bp, Artificial Sequence
  ENSG00000140945_39 (sequence is synthesized)
gtttccagaaaaaaaggaaaataaaccaattcttataggccaaagtggtagcatttcctgaatcataagatgttttgttcatttgctggaatatattacattgtttactgaaaaccatag

SEQ ID NO: 364158 - DNA, 120 bp, Artificial Sequence
  ENSG00000140945_40 (sequence is synthesized)
tagaatcaaaatgttatttcattattacctatgcattttatctgagtccaacttattaaaaaacgaagtcaagtaaggaccagaaattgcttttcccaattactgagcacaggtctgagg
